United States Patent Application Publication US 2011/0183924 A1 - sequence listing, part 255

SEQ ID NO: 731058 - DNA, 657 bp, Homo sapiens
agatcccttagacctcagggcagcctcaccctttgaaagaaagtagctggtttccagtccaacaaaaagttaaaaggatgctcatctctttctcggcatcactgatggaaaacagactgtgtgatggcctaaaggatccaatcaatgtgaagaatgaggagttggatgccatgatgaaggaagccagcggtcccatcaacttcaccgtcttcctgaccatgttcggggagaagctcaagggtgagtggagtgtcctgggtccaaggccccggctgccttttcccagacccttcagggacccatcagcttcatgtgccctctgacccccacaggtgccgaccctgaggatgtgatcaccggagccttcaaggtcttggaccctgagggaaagggcaccatcaagaagaagttcctggaggagctgctgaccacgcagtgtgaccgcttctcccaggaggagatcaagaacatgtgggcggccttcccccccgacgtgggcggcaacgtcgactacaaaaacatctgctacgtcatcacgcacggcgacgccaaggaccaggagtaggggcacccgcgggcctccgctgcccgacgcttctgttcggcccgacctccaccccggctcccaataaaatttaactgatctttgtttcttaa

SEQ ID NO: 731059 - DNA, 364 bp, Homo sapiens
atcttcttggtcattcaggttctacttaaaacaggtacaactgatttgaataagaaaaaattgaaggtgtgggcatgtctaacatcctaattgcattttgctttttctatccctggtttgaattctttgttataatacatttttatgcattatctggggaaatgatagggaactagtgaaaaagaagactatggaaaatatagctatcaaaaacttggctgggactgcaggcgcccgccaccatgcccagctagtttttttgtatttttggtggagacggggtttcgccgtgttggccaggatcacttgaggccaggagttcaggaccagactgagcaacatagttgagacctcatctctattt

SEQ ID NO: 731060 - DNA, 483 bp, Homo sapiens; identical to SEQ ID NO: 102533

SEQ ID NO: 731061 - DNA, 455 bp, Homo sapiens
cgtctgaggcgggtgagaaatccggcctgcagagtcgcggctggccttcagatctgcgggctgcctgtgagatgccgtgttacctaaatccatttgggcactgagttcccaggagtgggggcaagaattccgatgacggggctttatccggtgccgcatccagctcagagtggttcctgagaccagccaccatgggcagcccaggatgtgctcatccttgaggctttccgaggcatcaaggagatggttggataaagaatttagcacagagcttgactgatggcaggcgcccacaacatgagacacattaataatgtgtgtggaggccaggtgtagtggttcatgcctgtcaccccagcactttgggaggcagaggtgggaagatttcttgaggccaggaattcaagaccagcctgggcaacacagcgagacctcatctctaccaaaaaaaaaaa

SEQ ID NO: 731062 - DNA, 516 bp, Homo sapiens; identical to SEQ ID NO: 728740

SEQ ID NO: 731063 - DNA, 1074 bp, Homo sapiens; identical to SEQ ID NO: 104970

SEQ ID NO: 731064 - DNA, 4904 bp, Homo sapiens
  misc_feature (278)..(278): n is a, c, g, or t
  misc_feature (280)..(280): n is a, c, g, or t
  misc_feature (285)..(286): n is a, c, g, or t
  misc_feature (289)..(289): n is a, c, g, or t
ggtcaaagaagagaaggtcctgaaaacagaggaaacaaaggaagcggaacagtgaaggcataatggctccctgcttggaatccagacaatcagagagggtaaacacaagagcacctcatctgggaattgctgacgaagaagagaaaatctggggcttgcttggtgttacctctaggacgtcaccaaccaggcatttctcaagggtttatgtcggtgtgagcctgacagtgacacacaaaagcatccctccaaaatttagcctggggaccttgaaaggnantaaanntcnggatgacaagatggagcaaacagtgcttgtaccaccaggacctgacagcttcaacttcttcaccagagaatctcttgcggctattgaaagacgcattgcagaagaaaaggcaaagaatcccaaaccagacaaaaaagatgacgacgaaaatggcccaaagccaaatagtgacttggaagctggaaagaaccttccatttatttatggagacattcctccagagatggtgtcagagcccctggaggacctggacccctactatatcaataagaaagtacgtcacagagtttgtggacctgggcaatgtctcggcattgagaacattcagagttctccgagcattgaagacgatttcagtcattccaggcctgaaaaccattgtgggagccctgatccagtctgtgaagaagctctcagatgtaatgatcctgactgtgttctgtctgagcgtatttgctctaattgggctgcagctgccaccttggaagaagcagaacagaaagaggccgaatttcagcagatgattgaacagcttaaaaagcaacaggaggcagctcagcaggcagcaacggcaactgcctcagaacattccagagagcccagtgcagcaggcaggctctcagacagctcatctgaagcctctaagttgagttccaagagtgctaaggaaagaagaaatcggaggaagaaaagaaaacagaaagagcagtctggtggggaagagaaagatgaggatgaattccaaaaatctgaatctgaggacagcatcaggaggaaaggttttcgcttctccattgaagggaaccgattgacatatgaaaagagctttagagggcgagcaaaggatgtgggatctgagaacgacttcgcagatgatgagcacagcacctttgaggataacgagagccgtagagattccttgtttgtgccccgacgacacggagagagacgcaacagcaacctgagtcagaccagtaggtcatcccggatgctggcagtgtttccagcgaatgggaagatgcacagcactgtggattgcaatggtgtggtttccttggttggtggaccttcagttcctacatcgcctgttggacagcttctgccagaggtgataatagataagccagctactgatgacaatgttttcactgggatctttacagcagaaatgtttctgaaaattattgccatggatccttactattatttccaagaaggctggaatatctttgacggttttattgtgacgcttagcctggtagaacttggactcgccaatgtggaaggattatctgttctccgttcatttcgattgctgcgagttttcaagttggcaaaatcttggccaacgttaaatatgctaataaagatcatcggcaattccgtgggggctctgggaaatttaaccctcgtcttggccatcatcgtcttcatttttgccgtggtcggcatgcagctctttggtaaaagctacaaagattgtgtctgcaagatcgccagtgattgtcaactcccacgctggcacatgaatgacttcttccactccttcctgattgtgttccgcgtgctgtgtggggagtggatagagaccatgtgggactgtatggaggttgctggtcaagccatgtgccttactgtcttcatgatggtcatggtgattggaaacctagtggtcctgaatctctttctggccttgcttctgagctcatttagtgcagacaaccttgcagccactgatgatgataatgaaatgaataatctccaaattgctgtggataggatgcacaaaggagtagcttatgtgaaaagaaaaatatatgaatttattcaacagtccttcattaggaaacaaaagattttagatgaaattaaaccacttgatgatctaaacaacaagaaagacagttgtatgtccaatcatacagcagaaattgggaaagatcttgactatcttaaagatgtaaatggaactacaagtggtataggaactggcagcagtgttgaaaaatacattattgatgaaagtgattacatgtcattcataaacaaccccagtcttactgtgactgtaccaattgctgtaggagaatctgactttgaaaatttaaacacggaagactttagtagtgaatcggatctggaagaaagcaaagagaaactgaatgaaagcagtagctcatcagaaggtagcactgtggacatcggcgcacctgtagaagaacagcccgtagtggaacctgaagaaactcttgaaccagaagcttgtttcactgaaggagcaattccatccatcatgaatgtgcttctggtttgtcttatattctggctaattttcagcatcatgggcgtaaatttgtttgctggcaaattctaccactgtattaacaccacaactggtgacaggtttgacatcgaagacgtgaataatcatactgattgcctaaaactaatagaaagaaatgagactgctcgatggaaaaatgtgaaagtaaactttgataatgtaggatttgggtatctctctttgcttcaagttgccacattcaaaggatggatggatataatgtatgcagcagttgattccagaaatctgatagaaaagtatttcgtgtcccctaccctgttccgagtgatccgtcttgctaggattggccgaatcctacgtctgatcaaaggagcaaaggggatccgcacgctgctctttgctttgatgatgtcccttcctgcgttgtttaacatcggcctcctactcttcctagtcatgttcatctacgccatctttgggatgtccaactttgcctatgttaagagggaagttgggatcgatgacatgttcaactttgagacctttggcaacagcatgatctgcctattccaaattacaacctctgctggctgggatggattgctagcacccattctcaacagtaagccacccgactgtgaccctaataaagttaaccctggaagctcagttaagggagactgtgggaacccatctgttggaattttcttttttgtcagttacatcatcatatccttcctggttgtggtgaacatgtacatcgcggtcatcctggagaacttcagtgttgctactgaagaaagtgcagagcctctgagtgaggatgactttgagatgttctatgaggtttgggagaagtttgatcccgatgcaactcagttcatggaatttgaaaaattatctcagtttgcagctgcgcttgaaccgcctctcaatctgccacaaccaaacaaactccagctcattgccatggatttgcccatggtgagtggtgaccggatccactgtcttgatatcttatttgcttttacaaagcgggttctaggagagagtggagagatggatgctctacgaatacagatggaagagcgattcatggcttccaatccttccaaggtctcctatcagccaatcactactactttaaaacgaaaacaagaggaagtatctgctgtcattattcagcgtgcttacagacgccaccttttaaagcgaactgtaaaacaagcttcctttacgtacaataaaaacaaaatcaaaggtggggctaatcttcttataaaagaagacatgataattgacagaataaatgaaaactctattacagaaaaaactgatctgaccatgtccactgcagcttgtccaccttcctatgaccgggtgacaaagccaattgtggaaaaacatgagcaagaaggcaaagatgaaaaagccaaagggaaataaatgaaaataaataaaaataattgggtgacaaattgtttacagcctgtgaaggtgatgtatttttatcaacaggactcctttaggaggtcaatgccaaactgactgtttttacacaaatctccttaaggtcagtgcctacaataagacagtgaccccttgtcagcaaactgtgactctgtgtaaaggggagatgaccttgacaggaggttactgttctcactaccagctgacactgctgaagataagatgcacaatggctagtcagactgtagggaccagtttcaaggggtgcaaacctgtgattttggggttgtttaacatgaaacactttagtgtagtaattgtatccactgtttgcatttcaactgccacatttgtcacatttttatggaatctgttagtggattcatctttttgttaatccatgtgtttattatatgtgactatttttgtaaacgaagtttctgttgagaaataggctaaggacctctataacaggtgcaaacttcattcaaatgtttggagtcataaatgttatgtttctttttgttgtattaaaaaaaaaacctgaatagtgaatattgcccctcaccctccaccgccagaagactgaattgaccaaaattactctttataaatttctgctttttcctgcactttgtttagccatcttcggctctcagcaaggttgacactgtatatgttaatgaaatgctatttattatgtaaatagtcattttaccctgtggtgcacgtttgagcaaacaaataatgacctaagcacagtatttattgcatcaaatatgtaccacaagaaatgtagagtgcaagctttacacagtcaggcccgtcttctacaggtct

SEQ ID NO: 731065 - DNA, 2258 bp, Homo sapiens
ctgatagaaaagtatttcgtgtcccctaccctgttccgagtgatccgtcttgctaggattggccgaatcctacgtctgatcaaaggagcaaaggggatccgcacgctgctctttgctttgatgatgtcccttcctgcgttgtttaacatcggcctcctactcttcctagtcatgttcatctacgccatctttgggatgtccaactttgcctatgttaagagggaagttgggatcgatgacatgttcaactttgagacctttggcaacagcatgatctgcctattccaaattacaacctctgctggctgggatggattgctagcacccattctcaacagtaagccacccgactgtgaccctaataaagttaaccctggaagctcagttaagggagactgtgggaacccatctgttggaattttcttttttgtcagttacatcatcatatccttcctggttgtggtgaacatgtacatcgcggtcatcctggagaacttcagtgttgctactgaagaaagtgcagagcctctgagtgaggatgactttgagatgttctatgaggtttgggagaagtttgatcccgatgcaactcagttcatggaatttgaaaaattatctcagtttgcagctgcgcttgaaccgcctctcaatctgccacaaccaaacaaactccagctcattgccatggatttgcccatggtgagtggtgaccggatccactgtcttgatatcttatttgcttttacaaagcgggttctaggagagagtggagagatggatgctctacgaatacagatggaagagcgattcatggcttccaatccttccaaggtctcctatcagccaatcactactactttaaaacgaaaacaagaggaagtatctgctgtcattattcagcgtgcttacagacgccaccttttaaagcgaactgtaaaacaagcttcctttacgtacaataaaaacaaaatcaaaggtggggctaatcttcttataaaagaagacatgataattgacagaataaatgaaaactctattacagaaaaaactgatctgaccatgtccactgcagcttgtccaccttcctatgaccgggtgacaaagccaattgtggaaaaacatgagcaagaaggcaaagatgaaaaagccaaagggaaataaatgaaaataaataaaaataattgggtgacaaattgtttacagcctgtgaaggtgatgtatttttatcaacaggactcctttaggaggtcaatgccaaactgactgtttttacacaaatctccttaaggtcagtgcctacaataagacagtgaccccttgtcagcaaactgtgactctgtgtaaaggggagatgaccttgacaggaggttactgttctcactaccagctgacactgctgaagataagatgcacaatggctagtcagactgtagggaccagtttcaaggggtgcaaacctgtgattttggggttgtttaacatgaaacactttagtgtagtaattgtatccactgtttgcatttcaactgccacatttgtcacatttttatggaatctgttagtggattcatctttttgttaatccatgtgtttattatatgtgactatttttgtaaacgaagtttctgttgagaaataggctaaggacctctataacaggtatgccacctggggggtatggcaaccacatggccctcccagctacacaaagtcgtggtttgcatgagggcatgctgcacttagagatcatgcatgagaaaaagtcacaagaaaaacaaattcttaaatttcaccatatttctgggaggggtaattggggtgataagtggaggtgctttgttgatcttgttttgcggaaatccagcccctaggaccaagtagattgtttgtggggtaggccagtaaatcttagcaggtgcaaacttcattcaaatgtttggagtcataaatgttatgtttctttttgttgtattaaaaaaaaaacctgaatagtgaatattgcccctcaccctccaccgccagaagactgaattgaccaaaattactctttataaatttctgctttttcctgcactttgtttagccatcttcggctctcagcaaggttgacactgtatatgttaatgaaatgctatttattatgtaaatagtcattttaccctgtggtgcacgtttgagcaaacaaataatgacctaagcacagtatttattgcatcaaatatgtaccacaagaaatgtagagtgcaagctttacacag

SEQ ID NO: 731066 - DNA, 1128 bp, Homo sapiens
cgtctccctcgcagtcccgcccgcccctcctgccgcccctgccgcgcgcgccgcagcagcgccgccttccctgcgcagtcggtgtctccgcgtcgctgggtgggacttggctcggcggccatgggcaagcagaacagcaagctgcggcccgagatgttgcaggacctgcgagagaacacagagttctcagagctggagctgcaggagtggtacaagggcttcctcaaggactgccccacaggaatcctcaatgtggatgagttcaagaagatctacgccaacttctttccctatggtgacgcctccaagtttgccgagcacgtcttccgcacctttgacaccaacagcgatggcaccatagactttcgggagttcatcattgcgctgagcgtgacctcgcgcggccgcctggagcagaagctcatgtgggccttcagcatgtatgacctggacggcaacggctacatcagccgggaggagatgctggagatcgtgcaggccatttacaagatggtttcgtccgtgatgaagatgccggaggacgagtcgaccccggaaaagaggactgagaaaatcttccgccaaatggacacaaacaacgacggcaagctgtccttggaggagttcatccgcggggccaaaagcgacccgtccatcgtgcgtctgctgcagtgcgaccccagcagcgcctcccagttctgagaggagccaggttccccttcctccctcccttcaccggccccctcccggctcttagcttccactcccttgtgtgtattctggctgggggccagattggggaagcccttctccccgggtctgccctgtggggggcttccggaaaagggaaccctgcggtacccccaggccaaagcaagtaagcggttagcaccccccaatcccagaggcaacaatagagacacaggctgggttggtctgcccctcagtcaggcccccttacccacccaccagccccaaggcccgacccctcccccaaaggggcagtccccttcttgcaggtctcagcttgcggggtggggggagtcatgccctgcatgcagccaaatggagcatctctgttctttttaataatttcagaataaagtctcatttcagtgcagtgggctg

SEQ ID NO: 731067 - DNA, 1494 bp, Homo sapiens
cgtctccctcgcagtcccgcccgcccctcctgccgcccctgccgcgcgcgccgcagcagcgccgccttccctgcgcagtcggtgtctccgcgtcgctgggtgggacttggctcggcggccatgggcaagcagaacagcaagctgcggcccgagatgttgcaggacctgcgagagaacacagagttctcagagctggagctgcaggagtggtacaagggcttcctcaaggactgccccacaggaatcctcaatgtggatgagttcaagaagatctacgccaacttctttccctatggtgacgcctccaagtttgccgagcacgtcttccgcacctttgacaccaacagcgatggcaccatagactttcgggagttcatcattgcgctgagcgtgacctcgcgcggccgcctggagcagaagctcatgtgggccttcagcatgtatgacctggacggcaacggctacatcagccgggaggagatgctggagatcgtgcaggccatttacaagatggtttcgtccgtgatgaagatgccggaggacgagtcgaccccggaaaagaggactgagaaaatcttccgccaaatggacacaaacaacgacggcaagctgtccttggaggagttcatccgcggggccaaaagcgacccgtccatcgtgcgtctgctgcagtgcgaccccagcagcgcctcccagttctgagaggagccaggttccccttcctccctcccttcaccggccccctcccggctcttagcttccactcccttgtgtgtattctggctgggggccagattggggaagcccttctccccgggtctgccctgtggggggcttccggaaaagggaaccctgcggtacccccaggccaaagcaagtaagcggttagcaccccccaatcccagaggcaacaatagagacacaggctgggttggtctgcccctcagtcaggcccccttacccacccaccagccccaaggcccgacccctcccccaaaggggcagtccccttcttgcaggtctcagcttgcggggtggggggagtcatgcccaggggaggagactttttatctggaggggagagaaggattctaggggtgtggagttggagaaagaggcttccttgagccacccttcccaccccagcccttgctggtccctaggccaagccaccaagtgaaaccttccaggatactagcccgccagctgtgggccccagaaagccagcctgccttttagcacttggatacacacagacccacggagctctctgtgtttggcctctcacacacacacaggcccatagacagatgggcagatgcacccagagccccatgcacagtgtcctgcgtgggaaagagacacggtccccctggctgagcccctgtcctcccctctgtccccccaaccgccccccctgcatgcagccaaatggagcatctctgttctttttaataatttcagaataaagtctcatttcagtgcagtgggctg

SEQ ID NO: 731068 - DNA, 945 bp, Homo sapiens
cgtctccctcgcagtcccgcccgcccctcctgccgcccctgccgcgcgcgccgcagcagcgccgccttccctgcgcagtcggtgtctccgcgtcgctgggtgggacttggctcggcggccatgggcaagcagaacagcaagctgcggcccgagatgttgcaggacctgcgagagaacacagagttctcagagctggagctgcaggagtggtacaagggcttcctcaaggactgccccacaggaatcctcaatgtggatgagttcaagaagatctacgccaacttctttccctatggtgacgcctccaagtttgccgagcacgtcttccgcacctttgacaccaacagcgatggcaccatagactttcgggagttcatcattgcgctgagcgtgacctcgcgcggccgcctggagcagaagctcatgtgggccttcagcatgtatgacctggacggcaacggctacatcagccgggaggagatgctggagatcgtgcaggccatttacaagatggtttcgtccgtgatgaagatgccggaggacgagtcgaccccggaaaagaggactgagaaaatcttccgccaaatggacacaaacaacgacggcaagctgtccttggaggagttcatccgcggggccaaaagcgacccgtccatcgtgcgtctgctgcagtgcgaccccagcagcgcctcccagttctgagaggagccaggttccccttcctccctcccttcaccggccccctcccggctcttagcttccactcccttgtgtgtattctggctgggggccagattggggaagcccttctccccgggtctgccctgtggggggcttccggaaaagggaaccctgcggtacccccaggccaaagcaagtaagcggttagcaccccccaatcccagaggcaacaatagagacacaggctgggttggtctgcccctc

SEQ ID NO: 731069 - DNA, 877 bp, Homo sapiens
cgtctccctcgcagtcccgcccgcccctcctgccgcccctgccgcgcgcgccgcagcagcgccgccttccctgcgcagtcggtgtctccgcgtcgctgggtgggacttggctcggcggccatgggcaagcagaacagcaagctgcggcccgagatgttgcaggacctgcgagagaacacagagttctcagagctggagctgcaggagtggtacaagggcttcctcaaggactgccccacaggaatcctcaatgtggatgagttcaagaagatctacgccaacttctttccctatggtgacgcctccaagtttgccgagcacgtcttccgcacctttgacaccaacagcgatggcaccatagactttcgggagttcatcattgcgctgagcgtgacctcgcgcggccgcctggagcagaagctcatgtgggccttcagcatgtatgacctggacggcaacggctacatcagccgggaggagatgctggagatcgtgcagagcacagtccagctatgtctagttgatcctcatttacaccagaggaaacggatgctcagagagataaaggcacttgcttgaggccacacagcctgtgtgagtgggccatctggcaccactgtctacattccatctggatacccagccatcttctaactaattgattgagggcccactatgagcctagcattgagtgaggtgctcatgagctcagtgcgtgcttacaacaaccccatgaggctcagagaggtgaggtgatgtgcccaaaatcacacagcacataagtggagaaaagctctggctggccactacttagagctgtctactgagagggctctggactcatagccaggaggtctggcttccagttctggaagtg

SEQ ID NO: 731070 - DNA, 263 bp, Homo sapiens
gcctgatcactcctctctgcccttgacccccttggggacccaggtgggacttggctcggcggccatgggcaagcagaacagcaagctgcggcccgagatgttgcaggacctgcgagagaacacagagttctcagagctggagctgcaggagtggtacaagggcttcctcaaggactgccccacaggaatcctcaatgtggatgagttcaagaagatctacgccaacttctttccctatggtgacgcctccaagtttgccgagc

SEQ ID NO: 731071 - DNA, 518 bp, Homo sapiens; identical to SEQ ID NO: 103989
  misc_feature (7)..(7): n is a, c, g, or t
  misc_feature (10)..(10): n is a, c, g, or t

SEQ ID NO: 731072 - DNA, 686 bp, Homo sapiens
cgaacttggggcagcccctggaagtcttgttctttgaccattacgtctgcggctgcatcaccagataatgagcttcaccacttgtctgcctcctgtgtccttccgcggggagtaaatgtcacttcagcttgccgcatctctaaataggcaaattttcagtgctcagaaaaggacctgatctttgacaaagtgctttgatggttgcctgcttgagtcactcccaatcccttcctgaagccctttctttataattcttctgttgaaatagccatcatattcacagtactaatcacagcatctcacatttactaaaaacttaccccataccaggaacccagagttgggggggctgtgtcagaattatgtaatttacgtgtcccaataatcctagatgcttcttgaccatctagttttgtcaaatgagaaaactgaggttccaaagaagtcaataaacttgtccaaagtctgaccgactctgcttgccatgtgacgagtctgtcttagaactgggtcattgccctgcttgcaatgctgtgccctctgcaagcccccccacccccctggtctcctgagctcggtaaggtgctccagctgcctctaccatagcacttcctacatggactgtaacatttctttactgctccaacttctcattaaattgggggctcctcaaagccagggttggt

SEQ ID NO: 731073 - DNA, 475 bp, Homo sapiens
  misc_feature (13)..(13): n is a, c, g, or t
  misc_feature (43)..(43): n is a, c, g, or t
  misc_feature (65)..(65): n is a, c, g, or t
  misc_feature (86)..(86): n is a, c, g, or t
aaagcaaccccanggcctaaccttaaaagtggaaattccaggnggttaaattccaccttaaatancccctagagaaatttccccangttgtataatactgttccttggcctcgggaagttccttattcatctcccacgtgtgataagactttggtgaataaatgcaccattttattccgtggatatttatttagttgtgtttcctaatttttgccaagaaatggaaacagcagcaatgaaattggtttttatttttttggatccttaagaaataggtgctttttgaagaatcaggggagaagtaacgcaagaccccagaagtatgccaacatataaaaccccaagtcaaaaggtcaaaccacgcatttgatccctcaagtcccctgcttgaccctcttccaagtgtactttccttcctttcattcctgctctaaagctttttaatactttcactcctgctcaaaagaaaaaaaaa

SEQ ID NO: 731074 - DNA, 1203 bp, Homo sapiens
cgcgccgatggtacgcgccggctcgcctggcccggctgcagtggatgttgctggaacccacgcggaggaaggaagagacgcaggcaggctgcggttacccaagcggccacccgggcctcagggaccccttccccgagagacggcaccatgacccagggaaagctctccgtggctaacaaggcccctgggaccgaggggcagcagcaggtgcatggcgagaagaaggaggctccagcagtgccctcagccccaccctcctatgaggaagccacctctggggaggggatgaaggcaggggccttccccccagcccccacagcggtgcctctccaccctagctgggcctatgtggaccccagcagcagctccagctatgacaacggtttccccaccggagaccatgagctcttcaccactttcagctgggatgaccagaaagttcgtcgagtctttgtcagaaaggtctacaccatcctgctgattcagctgctggtgaccttggctgtcgtggctctctttactttctgtgaccctgtcaaggactatgtccaggccaacccaggctggtactgggcatcctatgctgtgttctttgcaacctacctgaccctggcttgctgttctggacccaggaggcatttcccctggaacctgattctcctgaccgtctttaccctgtccatggcctacctcactgggatgctgtccagctactacaacaccacctccgtgctgctgtgcctgggcatcacggcccttgtctgcctctcagtcaccgtcttcagcttccagaccaagttcgacttcacctcctgccagggcgtgctcttcgtgcttctcatgactcttttcttcagcggactcatcctggccatcctcctacccttccaatatgtgccctggctccatgcagtttatgcagcactgggagcgggtgtatttacattgttcctggcacttgacacccagttgctgatgggtaaccgacgccactcgctgagccctgaggagtatatttttggagccctcaacatttacctagacatcatctatatcttcaccttcttcctgcagctttttggcactaaccgagaatgaggagccctccctgccccaccgtcctccagagaatgcgcccctcctggttccctgtccctcccctgcgctcctgcgagaccagatataaaactagctgccaaccca

SEQ ID NO: 731075 - DNA, 4706 bp, Homo sapiens
cgcgccgatggtacgcgccggctcgcctggcccggctgcagtggatgttgctggaacccacgcggaggaaggaagagacgcaggcaggctgcggttacccaagcggccacccgggcctcagggaccccttccccgagagacggcaccatgacccagggaaagctctccgtggctaacaaggcccctgggaccgaggggcagcagcaggtgcatggcgagaagaaggaggctccagcagtgccctcagccccaccctcctatgaggaagccacctctggggaggggatgaaggcaggggccttccccccagcccccacagcggtgcctctccaccctagctgggcctatgtggaccccagcagcagctccagctatgacaacggtttccccaccggagaccatgagctcttcaccactttcagctgggatgaccagaaagttcgtcgagtctttgtcagaaaggtctacaccatcctgctgattcagctgctggtgaccttggctgtcgtggctctctttactttctgtgaccctgtcaaggactatgtccaggccaacccaggctggtactgggcatcctatgctgtgttctttgcaacctacctgaccctggcttgctgttctggacccaggaggcatttcccctggaacctgattctcctgaccgtctttaccctgtccatggcctacctcactgggatgctgtccagctactacaacaccacctccgtgctgctgtgcctgggcatcacggcccttgtctgcctctcagtcaccgtcttcagcttccagaccaagttcgacttcacctcctgccagggcgtgctcttcgtgcttctcatgactcttttcttcagcggactcatcctggccatcctcctacccttccaatatgtgccctggctccatgcagtttatgcagcactgggagcgggtgtatttacattgttcctggcacttgacacccagttgctgatgggtaaccgacgccactcgctgagccctgaggagtatatttttggagccctcaacatttacctagacatcatctatatcttcaccttcttcctgcagctttttggcactaaccgagaatgaggagccctccctgccccaccgtcctccagagaatgcgcccctcctggttccctgtccctcccctgcgctcctgcgagaccagatataaaactagctgccaacccagcctgtggccaggtcactgtctaccccagcccagcccagccctctgccgcttgtacatacgccatggggaccctgaggaactgaggccacgtcaatccctgtgccgccccattcgcccgttacatcttccaaactgggacggtcaaggctgaaggctcctctgggtttgagggtccaagggacaaggaggagaagcctagcaggatttcagatgcaggagagagacccaggaagcccggcagagccctgagccccactgcaattcctcctagggctgcacaatcatgtggccttagggcacactgtcctgcatccagtctgtgtcctcctgtctttctcatccaggtcaggcattgacactttgtaagaaagggggtaggggacacagctgggcaggtggagtgggtgggcaggatggctgtcccagtctgcccatcttctcttggctctgggaccagcggcttgttctagggatttggacctggaggccaagggcaataggagagggtctgaagcctgtgctgtctgctgcttgctgtgaatggccctcccgggtcatgacagagctcttttggggcaggaggtgagggcagggggccccgctccttggtaagggcctgccctggggctcccagggaagtgggagctggggagccaatccacccagacccgcgtccacctgggaggcatttggggttgcaggaccgagacccacatcctctcactcacttctccacccgccaggcagctgccacaggcctaaggctgagtgaggtgtgattgggccctccggctggatgttctgggggaggaggcaatcgctgtagctgccaggccagccccatctggaaggagtccctgctctgcctcagccctaacccgaggctgtgtgggagtcccttctgcacctcttatttcctaaacccttcctgtcagctgctgtttgctggctcgtccccagccaggcctcctgaggtcttcatagttggcacagtccacatctcttctagcttcactggccactcactcagcccagagtccctaagtgctcccccacttatctctgcatctctccaatttggaagccatccagctgatgctaacagccagggccagtccctccagctggtcccatgtaatgaggccagggctccttatcagcttccaggcggctgggatctcaggcagggtgtgcgtcagccctccaacccccagaggggcgcctgtggggagggaaccaggaggccacactgggggagcgtgcagccagcatgtgcagtggccaactccaggccagtggaaagttactgtgtggatacaggaaggctctgagtggctagcaggaccctcccttggttcgccctcctcctcttctctctcccctgtgctgggagctccgtctgccttgggaagggagacgaggtgtgctgttccttcccagccccatccctccccacccttcctactcccagctttcaagaaacattgcagaagcatttgaagttttgttccatcttggatatttgaagagaaaaggagccaagaactggcgggtggtgtgtgtgcagcaaaggcattgggggcacgggtgagatgcccactgtgtgctggtctaaattaatccatcgcagtgatcctccagagacagcgctctgctcatgtccgtagcagagggaaaagccgaggtgctcagaaaggctcggtaatgagtcccaggtcatacggctagcgagtggcgggcctggggttcagacccacagctgcctcaagcaaacagggtatcacgcttgcccctgggcctgggtgggggccggaatgagaccacatgagagcgcagagaggtgggtggtcaggccctgatgtcctggggatttcttgtcctcagtgccacccggcctcccgtctttcctgaaacccctcgccagattttgcactctgaggtttctatcttccagacaagagctgggaggcaagatttctggtttctggttcctagcctcactgccagcgggctcctgctattaggtgagggtttcttgctgtctggaattcagtttttccatctgccacatggaagttcatagccaggatagggcgggagaggcaccagaacatttctctccactgactttctcacccggttcccaccctcctccacctcctctcctccgggcccctcagtttcctctcctcatctctggcctcagttccagagggttagccccagcaccccactctcctgccactgtcagatagccttggtcatgcttcctagaatctacttgtccaagttctcctctccctgggataagttactgcagaaactggggatttagaagcttattcagggctgagtgccaaaagcttgggggaggagggacaggtcctcggcaataaacagtgtcacacacgcatcacagccatttgagaaatggcttctttgcagagctggggaagccgggcagaagatgccgcagcctcctactctgggtcctgagggggggtggcaggtaccacagtgtaggcagcagggtcagggccaaagtctatgcgttccatctccaatccaggcagtgaggaatcctgaaacaccaggagaggcgtcagaagtaggaagggcaggggaacaggaatgcaagattaaggaaaccgcagctgagcaggtgtcacaagctgtaaaggaggaagggagtctgcaggcccttcacatttttggcctgggtggggctgggcccaggaaggggtgggctggattttgtaaagctggaggcagccaggaatctgactgtccggaatgtgagttgaggggtctcccactgaagtcctcttctggaagctgcagatgggggcccgggaggcacacacgagtctgggactcattcccgggcacacctatggctccttcggtatcacctggggaagccccggaatcttagttcttccattccctactcttccttccgagggagtcaggatgggacagacacccattttccaaaaggctccttgcctccttccctggcccacctgaagccaagtcccaggtgtcctggctgctctcctgggcggggtgggatttttgcataagcactttgctgccctccagtggctgcttgaggaaacgcagggcctggtttgggagagtcaccgagggcccatgtggctggaggttgggggcaggatctggcccgagctctcctcagacctccccagacctgtcttctcatcagccaccgctgttttcttttgccgaacgatggttgcatctctcggacacagtgtaccccctcccaagccctccctgagccgttctcctgagtccctgagggcagacacagctccagggacccaggccggctgccacacccccgacactcctgctgtccactggccttagctcctgcaagttccccagtgtccgcacctgttcccttccctgacctcaccttcctggggtctgtgactgactggagataaaaataaaagcaattgtgacacctgag

SEQ ID NO: 731076 - DNA, 4603 bp, Homo sapiens
cgcgccgatggtacgcgccggctcgcctggcccggctgcagtggatgttgctggaacccacgcggaggaaggaagagacgcaggcaggctgcggttacccaagcggccacccgggcctcagggaccccttccccgagagacggcaccatgacccagggaaagctctccgtggctaacaaggcccctgggaccgaggggcagcagcaggtgcatggcgagaagaaggaggctccagcagtgccctcagccccaccctcctatgaggaagccacctctggggaggggatgaaggcaggggccttccccccagcccccacagcggtgcctctccaccctagctgggcctatgtggaccccagcagcagctccagctatgacaacggtttccccaccggagaccatgagctcttcaccactttcagctgggatgaccagaaagttcgtcgagtctttgtcagaaaggtctacaccatcctgctgattcagctgctggtgaccttggctgtcgtggctctctttactttctgtgaccctgtcaaggactatgtccaggccaacccaggctggtactgggcatcctatgctgtgttctttgcaacctacctgaccctggcttgctgttctggacccaggaggcatttcccctggaacctgattctcctgaccgtctttaccctgtccatggcctacctcactgggatgctgtccagctactacaacaccacctccgtgctgctgtgcctgggcatcacggcccttgtctgcctctcagtcaccgtcttcagcttccagaccaagttcgacttcacctcctgccagggcgtgctcttcgtgcttctcatgactcttttcttcagcggactcatcctggccatcctcctacccttccaatatgtgccctggctccatgcagtttatgcagcactgggagcgggtgtatttacattgttcctggcacttgacacccagttgctgatgggtaaccgacgccactcgctgagccctgaggagtatatttttggagccctcaacatttacctagacatcatctatatcttcaccttcttcctgcagctttttggcactaaccgagaatgaggagccctccctgccccaccgtcctccagagaatgcgcccctcctggttccctgtccctcccctgcgctcctgcgagaccagatataaaactagctgccaacccagcctgtggccaggtcactgtctaccccagcccagcccagccctctgccgcttgtacatacgccatggggaccctgaggaactgaggccacgtcaatccctgtgccgccccattcgcccgttacatcttccaaactgggacggtcaaggctgaaggctcctctgggtttgagggtccaagggacaaggaggagaagcctagcaggatttcagatgcaggagagagacccaggaagcccggcagagccctgagccccactgcaattcctcctagggctgcacaatcatgtggccttagggcacactgtcctgcatccagtctgtgtcctcctgtctttctcatccaggtcaggcattgacactttgtaagaaagggggtaggggacacagctgggcaggtggagtgggtgggcaggatggctgtcccagtctgcccatcttctcttggctctgggaccagcggcttgttctagggatttggacctggaggccaagggcaataggagagggtctgaagcctgtgctgtctgctgcttgctgtgaatggccctcccgggtcatgacagagctcttttggggcaggaggtgagggcagggggccccgctccttggtaagggcctgccctggggctcccagggaagtgggagctggggagccaatccacccagacccgcgtccacctgggaggcatttggggttgcaggaccgagacccacatcctctcactcacttctccacccgccaggcagctgccacaggcctaaggctgagtgaggtgtgattgggccctccggctggatgttctgggggaggaggcaatcgctgtagctgccaggccagccccatctggaaggagtccctgctctgcctcagccctaacccgaggctgtgtgggagtcccttctgcacctcttatttcctaaacccttcctgtcagctgctgtttgctggctcgtccccagccaggcctcctgaggtcttcatagttggcacagtccacatctcttctagcttcactggccactcactcagcccagagtccctaagtgctcccccacttatctctgcatctctccaatttggaagccatccagctgatgctaacagccagggccagtccctccagctggtcccatgtaatgaggccagggctccttatcagcttccaggcggctgggatctcaggcagggtgtgcgtcagccctccaacccccagaggggcgcctgtggggagggaaccaggaggccacactgggggagcgtgcagccagcatgtgcagtggccaactccaggccagtggaaagttactgtgtggatacaggaaggctctgagtggctagcaggaccctcccttggttcgccctcctcctcttctctctcccctgtgctgggagctccgtctgccttgggaagggagacgaggtgtgctgttccttcccagccccatccctccccacccttcctactcccagctttcaagaaacattgcagaagcatttgaagttttgttccatcttggatatttgaagagaaaaggagccaagaactggcgggtggtgtgtgtgcagcaaaggcattgggggcacgggtgagatgcccactgtgtgctggtctaaattaatccatcgcagtgatcctccagagacagcgctctgctcatgtccgtagcagagggaaaagccgaggtgctcagaaaggctcggtaatgagtcccaggtcatacggctagcgagtggcgggcctggggttcagacccacagctgcctcaagcaaacagggtatcacgcttgcccctgggcctgggtgggggccggaatgagaccacatgagagcgcagagaggtgggtggtcaggccctgatgtcctggggatttcttgtcctcagtgccacccggcctcccgtctttcctgaaacccctcgccagattttgcactctgaggtttctatcttccagacaagagctgggaggcaagatttctggtttctggttcctagcctcactgccagcgggctcctgctattaggtgagggtttcttgctgtctggaattcagtttttccatctgccacatggaagttcatagccaggatagggcgggagaggcaccagaacatttctctccactgactttctcacccggttcccaccctcctccacctcctctcctccgggcccctcagtttcctctcctcatctctggcctcagttccagagggttagccccagcaccccactctcctgccactgtcagatagccttggtcatgcttcctagaatctacttgtccaaataaacagtgtcacacacgcatcacagccatttgagaaatggcttctttgcagagctggggaagccgggcagaagatgccgcagcctcctactctgggtcctgagggggggtggcaggtaccacagtgtaggcagcagggtcagggccaaagtctatgcgttccatctccaatccaggcagtgaggaatcctgaaacaccaggagaggcgtcagaagtaggaagggcaggggaacaggaatgcaagattaaggaaaccgcagctgagcaggtgtcacaagctgtaaaggaggaagggagtctgcaggcccttcacatttttggcctgggtggggctgggcccaggaaggggtgggctggattttgtaaagctggaggcagccaggaatctgactgtccggaatgtgagttgaggggtctcccactgaagtcctcttctggaagctgcagatgggggcccgggaggcacacacgagtctgggactcattcccgggcacacctatggctccttcggtatcacctggggaagccccggaatcttagttcttccattccctactcttccttccgagggagtcaggatgggacagacacccattttccaaaaggctccttgcctccttccctggcccacctgaagccaagtcccaggtgtcctggctgctctcctgggcggggtgggatttttgcataagcactttgctgccctccagtggctgcttgaggaaacgcagggcctggtttgggagagtcaccgagggcccatgtggctggaggttgggggcaggatctggcccgagctctcctcagacctccccagacctgtcttctcatcagccaccgctgttttcttttgccgaacgatggttgcatctctcggacacagtgtaccccctcccaagccctccctgagccgttctcctgagtccctgagggcagacacagctccagggacccaggccggctgccacacccccgacactcctgctgtccactggccttagctcctgcaagttccccagtgtccgcacctgttcccttccctgacctcaccttcctggggtctgtgactgactggagataaaaataaaagcaattgtgacacctgag

SEQ ID NO: 731077 - DNA, 430 bp, Homo sapiens
tgattagttggtgaaaaaaataaagtgtattataggtaataaaattctgtaaataccatttttaataatcactgcaaaatgaagtaaagtttatttagcataaaagcagtaggaaataaatgttatgtttaaggaatgagaagacactcaaagtaggtagccttttgaatgaaaatgaatgaataaactaattccttaataagggaaattataaatgttctttgatttgcaagtaacttctagaaaattgtccaaccctttgttcacagtataattaaaaataagaaattataaatattctttgatttgcaagtaacttctagaaaattgtccaaccctttgttcacagtataattaaaaataagaaagtattaggttctttttctgactttcctccaaactgaaagttaaatgtctctaaaaaatagaa

SEQ ID NO: 731078 - DNA, 2476 bp, Homo sapiens
ccgcagaggagcctcggccaggcttgccagggcgcccccagcccctccccaggccgcgagcgcccctgccgcggtgcctggcctcccctcccagactgcagggacagcacccggtaactgcgagtggagcggaggacccgagcggctgaggagagaggaggcggcggcttagctgctacggggtccggccggcgccctcccgaggggggctcaggaggaggaaggaggacccgtgcgagaatgcctctgccctggagccttgcgctcccgctgctgctctcctgggtggcaggtggtttcgggaacgcggccagtgcaaggcatcacgggttgttagcatcggcacgtcagcctggggtctgtcactatggaactaaactggcctgctgctacggctggagaagaaacagcaagggagtctgtgaagctacatgcgaacctggatgtaagtttggtgagtgcgtgggaccaaacaaatgcagatgctttccaggatacaccgggaaaacctgcagtcaagatgtgaatgagtgtggaatgaaaccccggccatgccaacacagatgtgtgaatacacacggaagctacaagtgcttttgcctcagtggccacatgctcatgccagatgctacgtgtgtgaactctaggacatgtgccatgataaactgtcagtacagctgtgaagacacagaagaagggccacagtgcctgtgtccatcctcaggactccgcctggccccaaatggaagagactgtctagatattgatgaatgtgcctctggtaaagtcatctgtccctacaatcgaagatgtgtgaacacatttggaagctactactgcaaatgtcacattggtttcgaactgcaatatatcagtggacgatatgactgtatagatataaatgaatgtactatggatagccatacgtgcagccaccatgccaattgcttcaatacccaagggtccttcaagtgtaaatgcaagcagggatataaaggcaatggacttcggtgttctgctatccctgaaaattctgtgaaggaagtcctcagagcacctggtaccatcaaagacagaatcaagaagttgcttgctcacaaaaacagcatgaaaaagaaggcaaaaattaaaaatgttaccccagaacccaccaggactcctacccctaaggtgaacttgcagcccttcaactatgaagagatagtttccagaggcgggaactctcatggaggtaaaaaagggaatgaagagaaaatgaaagaggggcttgaggatgagaaaagagaagagaaagccctgaagaatgacatagaggagcgaagcctgcgaggagatgtgtttttccctaaggtgaatgaagcaggtgaattcggcctgattctggtccaaaggaaagcgctaacttccaaactggaacataaagagatttaaatatctcggttgactgcagcttcaatcatgggatctgtgactggaaacaggatagagaagatgattttgactggaatcctgctgatcgagataatgctattggcttctatatggcagttccggccttggcaggtcacaagaaagacattggccgattgaaacttctcctacctgacctgcaaccccaaagcaacttctgtttgctctttgattaccggctggccggagacaaagtcgggaaacttcgagtgtttgtgaaaaacagtaacaatgccctggcatgggagaagaccacgagtgaggatgaaaagtggaagacagggaaaattcagttgtatcaaggaactgatgctaccaaaagcatcatttttgaagcagaacgtggcaagggcaaaaccggcgaaatcgcagtggatggcgtcttgcttgtttcaggcttatgtccagatagccttttatctgtggatgactgaatgttactatctttatatttgactttgtatgtcagttccctggtttttttgatattgcatcataggacctctggcattttagaattactagctgaaaaattgtaatgtaccaacagaaatattattgtaagatgcctttcttgtataagatatgccaatatttgctttaaatatcatatcactgtatcttctcagtcatttctgaatctttccacattatattataaaatatggaaatgtcagtttatctcccctcctcagtatatctgatttgtataagtaagttgatgagcttctctctacaacatttctagaaaatagaaaaaaaagcacagagaaatgtttaactgtttgactcttatgatacttcttggaaactatgacatcaaagatagacttttgcctaagtggcttagctgggtctttcatagccaaacttgtatatttaaattctttgtaataataatatccaaatcatcatcttgtgtcatggtttaatttttctaggtaagaaaatatgttcttgattctgtgtttacttatgtaaatgattatttgcttttctgaaaaat

SEQ ID NO: 731079 - DNA, 2679 bp, Homo sapiens
ccgcagaggagcctcggccaggcttgccagggcgcccccagcccctccccaggccgcgagcgcccctgccgcggtgcctggcctcccctcccagactgcagggacagcacccggtaactgcgagtggagcggaggacccgagcggctgaggagagaggaggcggcggcttagctgctacggggtccggccggcgccctcccgaggggggctcaggaggaggaaggaggacccgtgcgagaatgcctctgccctggagccttgcgctcccgctgctgctctcctgggtggcaggtggtttcgggaacgcggccagtgcaaggcatcacgggttgttagcatcggcacgtcagcctggggtctgtcactatggaactaaactggcctgctgctacggctggagaagaaacagcaagggagtctgtgaagctacatgcgaacctggatgtaagtttggtgagtgcgtgggaccaaacaaatgcagatgctttccaggatacaccgggaaaacctgcagtcaagatgtgaatgagtgtggaatgaaaccccggccatgccaacacagatgtgtgaatacacacggaagctacaagtgcttttgcctcagtggccacatgctcatgccagatgctacgtgtgtgaactctaggacatgtgccatgataaactgtcagtacagctgtgaagacacagaagaagggccacagtgcctgtgtccatcctcaggactccgcctggccccaaatggaagagactgtctagatattgatgaatgtgcctctggtaaagtcatctgtccctacaatcgaagatgtgtgaacacatttggaagctactactgcaaatgtcacattggtttcgaactgcaatatatcagtggacgatatgactgtatagatataaatgaatgtactatggatagccatacgtgcagccaccatgccaattgcttcaatacccaagggtccttcaagtgtaaatgcaagcagggatataaaggcaatggacttcggtgttctgctatccctgaaaattctgtgaaggaagtcctcagagcacctggtaccatcaaagacagaatcaagaagttgcttgctcacaaaaacagcatgaaaaagaaggcaaaaattaaaaatgttaccccagaacccaccaggactcctacccctaaggtgaacttgcagcccttcaactatgaagagatagtttccagaggcgggaactctcatggaggtaaaaaagggaatgaagagaaaatgaaagaggggcttgaggatgagaaaagagaagagaaagccctgaagaatgacatagaggagcgaagcctgcgaggagatgtgtttttccctaaggtgaatgaagcaggtgaattcggcctgattctggtccaaaggaaagcgctaacttccaaactggaacataaagagatttaaatatctcggttgactgcagcttcaatcatgggatctgtgactggaaacaggatagagaagatgattttgactggaatcctgctgatcgagataatgagctatatcatattgggagcccataggttattccaggacctccacagctgatataaggttatgttaagtcttaagttgagtcttctgtccaagggaagttccctatttacaaacactcaattcacaaataaccccagggttctcagcttctgcatcattcaaatcatacccctgctcctcctgcacctccattggatttctagctattggcttctatatggcagttccggccttggcaggtcacaagaaagacattggccgattgaaacttctcctacctgacctgcaaccccaaagcaacttctgtttgctctttgattaccggctggccggagacaaagtcgggaaacttcgagtgtttgtgaaaaacagtaacaatgccctggcatgggagaagaccacgagtgaggatgaaaagtggaagacagggaaaattcagttgtatcaaggaactgatgctaccaaaagcatcatttttgaagcagaacgtggcaagggcaaaaccggcgaaatcgcagtggatggcgtcttgcttgtttcaggcttatgtccagatagccttttatctgtggatgactgaatgttactatctttatatttgactttgtatgtcagttccctggtttttttgatattgcatcataggacctctggcattttagaattactagctgaaaaattgtaatgtaccaacagaaatattattgtaagatgcctttcttgtataagatatgccaatatttgctttaaatatcatatcactgtatcttctcagtcatttctgaatctttccacattatattataaaatatggaaatgtcagtttatctcccctcctcagtatatctgatttgtataagtaagttgatgagcttctctctacaacatttctagaaaatagaaaaaaaagcacagagaaatgtttaactgtttgactcttatgatacttcttggaaactatgacatcaaagatagacttttgcctaagtggcttagctgggtctttcatagccaaacttgtatatttaaattctttgtaataataatatccaaatcatcatcttgtgtcatggtttaatttttctaggtaagaaaatatgttcttgattctgtgtttacttatgtaaatgattatttgcttttctgaaaaat

SEQ ID NO: 731080 - DNA, 2612 bp, Homo sapiens
ccgcagaggagcctcggccaggcttgccagggcgcccccagcccctccccaggccgcgagcgcccctgccgcggtgcctggcctcccctcccagactgcagggacagcacccggtaactgcgagtggagcggaggacccgagcggctgaggagagaggaggcggcggcttagctgctacggggtccggccggcgccctcccgaggggggctcaggaggaggaaggaggacccgtgcgagaatgcctctgccctggagccttgcgctcccgctgctgctctcctgggtggcaggtggtttcgggaacgcggccagtgcaaggcatcacgggttgttagcatcggcacgtcagcctggggtctgtcactatggaactaaactggcctgctgctacggctggagaagaaacagcaagggagtctgtgaagctacatgcgaacctggatgtaagtttggtgagtgcgtgggaccaaacaaatgcagatgctttccaggatacaccgggaaaacctgcagtcaagatgtgaatgagtgtggaatgaaaccccggccatgccaacacagatgtgtgaatacacacggaagctacaagtgcttttgcctcagtggccacatgctcatgccagatgctacgtgtgtgaactctaggacatgtgccatgataaactgtcagtacagctgtgaagacacagaagaagggccacagtgcctgtgtccatcctcaggactccgcctggccccaaatggaagagactgtctagatattgatgaatgtgcctctggtaaagtcatctgtccctacaatcgaagatgtgtgaacacatttggaagctactactgcaaatgtcacattggtttcgaactgcaatatatcagtggacgatatgactgtatagatataaatgaatgtactatggatagccatacgtgcagccaccatgccaattgcttcaatacccaagggtccttcaagtgtaaatgcaagcagggatataaaggcaatggacttcggtgttctgctatccctgaaaattctgtgaaggaagtcctcagagcacctggtaccatcaaagacagaatcaagaagttgcttgctcacaaaaacagcatgaaaaagaaggcaaaaattaaaaatgttaccccagaacccaccaggactcctacccctaaggtgaacttgcagcccttcaactatgaagagatagtttccagaggcgggaactctcatggaggtaaaaaagggaatgaagagaaaatgaaagaggggcttgaggatgagaaaagagaagagaaagccctgaagaatgacatagaggagcgaagcctgcgaggagatgtgtttttccctaaggtgaatgaagcaggtgaattcggcctgattctggtccaaaggaaagcgctaacttccaaactggaacataaagagatttaaatatctcggttgactgcagcttcaatcatgggatctgtgactggaaacaggatagagaagatgattttgactggaatcctgctgatcgagataatgctattggcttctatatggcagttccggccttggcaggtcacaagaaagacattggccgattgaaacttctcctacctgacctgcaaccccaaagcaacttctgtttgctctttgattaccggctggccggagacaaagtcgggaaacttcgagtgtttgtgaaaaacagtaacaatgccctggcatgggagaagaccacgagtgaggatgaaaagtggaagacagggaaaattcagttgtatcaaggaactgatgctaccaaaagcacatgcccccaaagagcctggccagcaatcacactggaacacagcagtgctttcataagaggcattctcagacccaggcatctgttccttgaattcttcagttctaggggaaatcttgatggggggatattgaaggatcatttttgaagcagaacgtggcaagggcaaaaccggcgaaatcgcagtggatggcgtcttgcttgtttcaggcttatgtccagatagccttttatctgtggatgactgaatgttactatctttatatttgactttgtatgtcagttccctggtttttttgatattgcatcataggacctctggcattttagaattactagctgaaaaattgtaatgtaccaacagaaatattattgtaagatgcctttcttgtataagatatgccaatatttgctttaaatatcatatcactgtatcttctcagtcatttctgaatctttccacattatattataaaatatggaaatgtcagtttatctcccctcctcagtatatctgatttgtataagtaagttgatgagcttctctctacaacatttctagaaaatagaaaaaaaagcacagagaaatgtttaactgtttgactcttatgatacttcttggaaactatgacatcaaagatagacttttgcctaagtggcttagctgggtctttcatagccaaacttgtatatttaaattctttgtaataataatatccaaatcatcatcttgtgtcatggtttaatttttctaggtaagaaaatatgttcttgattctgtgtttacttatgtaaatgattatttgcttttctgaaaaat

SEQ ID NO: 731081 - DNA, 478 bp, Homo sapiens; identical to SEQ ID NO: 728745

SEQ ID NO: 731082 - DNA, 521 bp, Homo sapiens; identical to SEQ ID NO: 728746

SEQ ID NO: 731083 - DNA, 1861 bp, Homo sapiens
  misc_feature (757)..(757): n is a, c, g, or t
gggctggacgcgacccagagcctccgccacccgcttctgccactcaatggaggacggtctgctggagatcatgaccaaggacggcggcgacatgccggcgcccctggaggtgtccaccgtgccggcagtgggggacgtgatctccggggagtacaacggcggcatgaaggaactgatggagcacctgaaagcccagctgcaagccctgtttgaggacgtgagggccatgaggggggccctggacgagcaggcctcgcacatccaggtgctctcggacgacgtgtgcgccaaccagcgagccatcgtctccatgtgccagattatgaccactgcgccccgccaggcggctttgggcgtggtcggcggcaaggggagcttccagagcgacccccaagagccggagactccttcgcctgggatcggggacagcggcttgctgggtcgcgatcccgaggacgaggaggacgaggaagaagagaaggagatgcccagccccgccacaccctccagtcactgtgagcgccccgaaagcccctgtgctggtctccttgggggggacgggccacttgtggagcccctcgacatgcccgacattaccctgctgcaactggagggcgaggcctccctgtgaggggactccgtggggcactaccttcccgggctgtctttgggtttccgagtgcatgacgcgagggggactgaacggcgcggtgcggcatgcttcacttggacagctgctcttgtgggtcaggcaganagagactccctcgaggaaggatttgtagggtgaaggactttgggagcatcgagaattctttctgcccaactaagcgaattatagcgaactgcggaaaggtgaggctccgggagaggaagcgcccatctctggactcccatccatccctatcctgtcctttcccccttcccagacaacaggagaacccgtgaattgtgtaaataaaattctgctttttctattctgaaaaaggacttacctaggaccatggcaaataatctctaacaatttacctggaaattaaggaattgggggtattttgttctggcaacaggaaatttacccttctgctgaaatccaagatattcagtgctctgcagaagcctctccccctcacagatctctgcggctgctgattggtaaaggaagcttgaggagggaactgcagccctaggaatctgggtgaatggggttccaagggcccctgggctgggaggagctggctatgaatgtgcatgaagacataatagctcaacctctaggattttgcatgcagagcggatcctgccttgtcactgacttcatctgggattgcttttccactccctggggcttagagaacaaagagcccggttcacaggcagagactcgggggtgctcagcagcagcccagatttaggggacatttgagggactcttggggccgcagccaaaaactgtctctcctggctacacctgcttaacttcagttcctttttctgtcaatatgtccttgcccactgcctctcggtgttgccttcataatgtcttgtgtgtgttatgtgtgtctacttgtgtagtagtgtgtgagccctcaggggcagggcttgtggctctggtgttaggttcaggggcttcagacccttctacgagctccaagctatcaatggcgcttttctctccctcttcccccaaccagggcatggagcatgtggctgtcctgaggttcttttactgatgtgccgcccttccacctcctcaagtggtgactttgtgtgccctccccctcctttgtgtattccttctcaatgctttccttggtgttaaccttaataaaaaggcgtcatctccccttgaaaaaaaaaa

SEQ ID NO: 731084 - DNA, 709 bp, Homo sapiens
cggcacccgagccctgagggtcccagccccgcgctccgcgtccccgggacagcatggagcgcccggagcccgagctgatccggcagagctggcgggcagtgagccgcagcccgctggagcacggcaccgtcctgtttgccaggctgtttgccctggagcctgacctgctgcccctcttccagtacaactgccgccagttctccagcccagaggactgtctctcctcgcctgagttcctggaccacatcaggaaggtgatgctcgtgattgatgctgcagtgaccaatgtggaagacctgtcctcactggaggagtaccttgccagcctgggcaggaagcaccgggcagtgggtgtgaagctcagctccttctcgacagtgggtgagtctctgctctacatgctggagaagtgtctgggccctgccttcacaccagccacacgggctgcctggagccaactctacggggccgtagtgcaggccatgagtcgaggctgggatggcgagtaagaggcgaccccgcccggcagcccccatccatctgtgtctgtctgttggcctgtatctgttgtagcccaggctccccaagcttccctgcatcttggtccttgtccccttggccacactggagaggtgatggggcagggctgggtctcagtatcctagagtccagctgcagaaggagtggcttttcctccaggaaggggctt

SEQ ID NO: 731085 - DNA, 531 bp, Homo sapiens
aattattatataattccatttataaaagatagttagaatagccagttacatagagacagaaattagaatggtgggtgctaagggttcgagggagaaggagtgagagttactgtttattgggtacagaggtttaatatggtaagaggaaaaagttctggaaatggatagtgtgatggttacacaacactaaattgcacacttagaaatagctaatggtaagccttatattagatatatataaagtgtctggtagtcttaccctctctataattacacactttttggcactgcccttttcctgccatgcagagctccaggggtgaatctccctatttctctagctctgcatcagtcacagtcctccatgctgtgtcccacgtactgtgcccacagcttcatacaaccgctgacttcagagccaggaccaggctcaggagtctgccctgaggctccttctcttctcatttccctgcagcctggcccgggggaggcttggcttcaactggcagctccatttagcgaaattcagga

SEQ ID NO: 731086 - DNA, 967 bp, Homo sapiens; identical to SEQ ID NO: 373261

SEQ ID NO: 731087 - DNA, 537 bp, Homo sapiens
  misc_feature (50)..(50): n is a, c, g, or t
  misc_feature (54)..(54): n is a, c, g, or t
  misc_feature (273)..(273): n is a, c, g, or t
  misc_feature (293)..(293): n is a, c, g, or t
  misc_feature (295)..(295): n is a, c, g, or t
  misc_feature (299)..(299): n is a, c, g, or t
  misc_feature (315)..(315): n is a, c, g, or t
  misc_feature (323)..(323): n is a, c, g, or t
  misc_feature (353)..(353): n is a, c, g, or t
  misc_feature (451)..(451): n is a, c, g, or t
ccacacctactgcatccgctttgaccccactggatgagggcatgcctcanccantggaaggaaagctccaaatccatcacagtcaaagtctctgactggatattaccctgaattctactagttcctccaattccattttctcccatggaatcacgaagagcaagacccactctgttccagaagccctataagctggaggtggacaactcgatgtaaatttcatgggaaaacccttgtacctgacatgtgagccactcagaactcaccaaaatnttcgacaccataacaacagntnctcnaactgtaaaccagganaacaagtngatgacttcacactgtggacagtttttccnaagatgtcagaacagactccccattcatggattaagggctcccacccctcttaactgtccttggcttcatggcctggcctctttcacttgggcagggntaatggcagtcattaggattttcacatgtaggtaggttctgagggtaacacagggtgttcaggtttgtccttctcaacctcaaact

SEQ ID NO: 731088 - DNA, 1175 bp, Homo sapiens; identical to SEQ ID NO: 728748

SEQ ID NO: 731089 - DNA, 298 bp, Homo sapiens
ttgggccggtggagcccctggacggtccagcaggtgctgtcctggagtgcctggtgttgtctccggaatgctggtgccggaactcgctatccctgttgtctacctgctgggggcactgaccatgctgagtgaaacacgagcacaagctgctggcggaggcgctggagtcgcagaccctgttggggccgctcgagctggtgggcagcctcttggagcccagtagccatgtggccagtctaccatggggcccaggagttggggaaacacaataaaggtggcatacgaaggaaaaaaaaaa

SEQ ID NO: 731090 - DNA, 1680 bp, Homo sapiens; identical to SEQ ID NO: 728751

SEQ ID NO: 731091 - DNA, 483 bp, Homo sapiens; identical to SEQ ID NO: 129163

SEQ ID NO: 731092 - DNA, 873 bp, Homo sapiens
ggttctatctgaaggaacttgatccagcagagcactcctatgtcttgatcagaaaaatcgatcctgccctggtttggggcctgacaggcgaccagggcacaccaaagacccggctcctgatgattactctggactcgatcttcatgcaggccagctgtgtccccgaggaggtggtctgggaggtgttgagggtgttggaggcacatttcgtctaaaaagcatttcgtctttggggagtccatgaagctcatcaccaaagctagtgtgcagcaggagtatctggtgcacaaataggtgtcccacagcaatcccacgctctaggtattcttgtgggggctctcaaaggaaacaagacagatggaagtcccggagtttgtggccaaagtgaatgacacccaccccagttcctttccgtggcagtaaatgaggcattgagagaagaggaggagataccccgtgcccgagatggcagctgccgttggtgacgtgacaagtgccagtgttagtgccagttccagttccagggcctatgccatggctgaagcaagcatcagcaccagcaccaatgcaagtgccagttgccagtgccagggctagagccatggctggagcaagtatcagtacctgggacagtgccagtgtggttgcaatctcaggctagtgtcagggactcctcctgccagcagtgaaggctggggctgagtcttcactttgttttgctgtgggtagtcaaaagggccccacagcagtgggtgctggggtcctgacttttcaagagtcgaggggtagagtggggttagggagaacctgccgcccatggtatctgtgttccagttctatttgtctttctcagtgatttagctttcaatttgc

SEQ ID NO: 731093 - DNA, 711 bp, Homo sapiens
ggttctatctgaaggaacttgatccagcagagcactcctatgtcttgatcagaaaaatcgatcctgccctggtttggggcctgacaggcgaccagggcacaccaaagacccggctcctgatgattactctggactcgatcttcatgcaggccagctgtgtccccgaggaggtggtctgggaggtgttgagggtgttggaggcacatttcgtctaaaaagcatttcgtctttggggagtccatgaagctcatcaccaaagctagtgtgcagcaggagtatctggtgcacaaataggtgtcccacagcaatcccacgctctaggtattcttgtgggggctctcaaaggaaacaagacagatggaagtcccggagtttgtggccaaagtgaatgacacccaccccagttcctttccgtggcatcgataaacaccggtgtttatcgatgccactcccaaggtccggggagtggctatcggaggtagtatcaggctaggacgtgttcttcatagataagtggaggagaaatgctgtaagaattcacctgatgagtattcaaaaaacaaggtggcatcgtatagggagggacatgtggatgggtatggcaggttgttaccgtagaggtcgttctgtccattgatctagggatggtaagagtggtatggatggtgagtgtttagtaaggtaacgtcgtgactcatatagagagagatg

SEQ ID NO: 731094 - DNA, 419 bp, Homo sapiens
ggcaaaatacttcaaagggaaaaagatccatggagaaattgacattaaagtagaacaggccgaattctctgatctcaaccttgtggcccatgccaatggtggattctctgtggatatggaagttcttcggaatggggtgaaggtcgtgcggtctctgaagccggattttgtgctgatccgccagcacgccttcagcatggcacgcaacggagactaccgcagtttggtcattgggctgcagtatgctggaatccccagtgttaactccttgcattctgtctacaacttctgtgacaagccctgggtgtttgcccagatggttcgactgcataagaaactggggacagaagaattccctctaattgatcagaccttctaccccaatcacaaagaaatggtgagtttggggaaaatagagt

SEQ ID NO: 731095 - DNA, 211 bp, Homo sapiens
cccaaatctctccagcacacctatttcccatcataattttccaaatcctcaagaaacccctactgttgagccccttcccatggatcttccatccctctgaagatccacatcttcaaatgccacccaacacctagccccacaaggatttcccttcaccagctcccctcaacctcctgggttcaagcaattctcctgcctcagcctcccaagt

SEQ ID NO: 731096 - DNA, 3259 bp, Homo sapiens
  misc_feature (1450)..(1450): n is a, c, g, or t
cacgggcgcgaccatctgcgctgcggcgccggcgactcagcgctgcctcagtctgcggtgggcagcggaggagtcgtgtcgtgcctgagagcgcagctgtgctcctgggcaccgcgcagtccgcccccgcggctcctggccagaccacccctaggaccccctgccccaagtcgcagccatgaactacctgcggcgccgcctgtcggacagcaactttatggccaatctgccaaatgggtacatgacagacctgcagcgtccgcagccgcccccaccgccgcccggtgcccacagccccggagccacgcccggtcccgggaccgccactgccgagaggtcctccggggtcgccccagcggcctctccggccgcccctagccccgggtcctcggggggcggtggcttcttctcgtcgctgtccaacgcggtcaagcagaccacggcggcggcagctgccaccttcagcgagcaggtgggcggcggctctgggggcgcaggccgcgggggagccgcctccagggtgctgctggtcatcgacgagccgcacaccgactgggcaaaatacttcaaagggaaaaagatccatggagaaattgacattaaagtagaacaggccgaattctctgatctcaaccttgtggcccatgccaatggtggattctctgtggatatggaagttcttcggaatggggtgaaggtcgtgcggtctctgaagccggattttgtgctgatccgccagcacgccttcagcatggcacgcaacggagactaccgcagtttggtcattgggctgcagtatgctggaatccccagtgttaactccttgcattctgtctacaacttctgtgacaagccctgggtgtttgcccagatggttcgactgcataagaaactggggacagaagaattccctctaattgatcagaccttctaccccaatcacaaagaaatgctcagcagtacaacgtaccccgtggttgtgaagatggggcacgcacactctgggatgggcaaggtcaaggttgacaaccagcatgacttccaggacatcgcaagtgtcgtcgcactgaccaagacgtatgccactgccgagcccttcatcgatgccaaatatgacgtgcgtgtccagaagattgggcagaactacaaggcctacatgaggacgtcagtgtcagggaactggaagaccaatactggctctgcgatcctggagcaaattgccatgtctgacagatacaagctgtgggtggacacgtgctcagagatttttgggggactggacatctgcgcagtggaagcgctacatggcaaggacggaagggatcacatcattgaggtggtgggttcctccatgccgctcattggtgaccaccaggatgaagacaaacagctcatcgtagagctcgtggtcaacaagatggctcaggccctgccccggcagcgacagcgngatgcctcccctggcaggggctcccatggccagactccgtccccaggggccctgcccttgggccgccagacctcccagcagcccgcagggcccccggctcagcagcgacccccaccacagggcggccctccacagccgggtccaggcccccagcgccagggacccccattgcagcagcgcccgcccccgcagggccagcagcacctttcaggccttggacccccagctggcagccccctgccccagcgccttccaagtcccacctcagcgccccagcagcccgcgtcccaggccgcgccgccgacccagggtcaaggccgccaatcccggccagtggcgggaggccccggggcgcctccagcagcccgcccgcccgcctctccgtctccccagcgccaggcgggccccccacaggctacccgtcagacatccgtctctggcccggctccgccaaaggcctctggggccccaccgggcgggcagcagcgccagggcccgccccagaaacccccaggcccagccggccccacacgccaggccagccaggcgggtcccgtgccccgcactgggccacccaccacgcagcagcctcggcccagcggcccgggccccgctggacgtcccaaaccacagctggcccagaaacccagccaggacgtgccgccacccgccaccgccgctgcagggggacctccgcacccccagctcaacaaatcccagtctctgaccaatgccttcaaccttccagagccagccccgcccaggcccagccttagccaggacgaggtgaaagctgagaccatccgcagcctgaggaagtctttcgccagcctcttctccgactgataccccactctgagaaccccaaaatccctgggcaacccttctctgggccctgaatccatttctcacttttggagtctccaaatcccttgagaacccatctcccggttctccaagattccacctctcattcctcaagatccccgagtaccttgagaaacctgactcctcctggccctaaatccggttctcacatgtggaatccccaagtccttttagaaccccactcgtggtcacttcaggatctacttctgttttagaacctccacattcctgaagacctccgcccctggtttccccagagggcgttttccttcctggaagtgcccaaataccaggcaacccattgcagaatcccttcctggagccctgaagttcctggaaaaccctatttttggtcccaaatctctccagcacacctatttcccatcataattttccaaatcctcaagaaacccctactgttgagccccttcccatggatcttccatccctctgaagatccacatcttcaaatgccacccaacacctagccccacaaggatttcccttcaccagctcccctcaacctcattcaataccttgggagcccctcccacttccaggacccctcggttcccccagggaccccctccccagtttcctgcctctgacagctgtctttaaatatgcaaactccacccatcttcccagaatcctttgcacacggaaggccagtggtctccgcttccccacctttgctgtggtgtctgtgtctgtgactgacgtggcctccttttgtgccgtgcttggcatatgtggtcctcgttcatcgtgccgcctgtggtgatgcgtgcagtgacgctgtttatgtggtccgcacctccccctgaccttcactccttgcctggactcaccccacccctcagcggctctgaaccccaagagaagagtcgggaaacaaaataaacaagcaaaggcccagca

SEQ ID NO: 731097 - DNA, 3182 bp, Homo sapiens
  misc_feature (1450)..(1450): n is a, c, g, or t
cacgggcgcgaccatctgcgctgcggcgccggcgactcagcgctgcctcagtctgcggtgggcagcggaggagtcgtgtcgtgcctgagagcgcagctgtgctcctgggcaccgcgcagtccgcccccgcggctcctggccagaccacccctaggaccccctgccccaagtcgcagccatgaactacctgcggcgccgcctgtcggacagcaactttatggccaatctgccaaatgggtacatgacagacctgcagcgtccgcagccgcccccaccgccgcccggtgcccacagccccggagccacgcccggtcccgggaccgccactgccgagaggtcctccggggtcgccccagcggcctctccggccgcccctagccccgggtcctcggggggcggtggcttcttctcgtcgctgtccaacgcggtcaagcagaccacggcggcggcagctgccaccttcagcgagcaggtgggcggcggctctgggggcgcaggccgcgggggagccgcctccagggtgctgctggtcatcgacgagccgcacaccgactgggcaaaatacttcaaagggaaaaagatccatggagaaattgacattaaagtagaacaggccgaattctctgatctcaaccttgtggcccatgccaatggtggattctctgtggatatggaagttcttcggaatggggtgaaggtcgtgcggtctctgaagccggattttgtgctgatccgccagcacgccttcagcatggcacgcaacggagactaccgcagtttggtcattgggctgcagtatgctggaatccccagtgttaactccttgcattctgtctacaacttctgtgacaagccctgggtgtttgcccagatggttcgactgcataagaaactggggacagaagaattccctctaattgatcagaccttctaccccaatcacaaagaaatgctcagcagtacaacgtaccccgtggttgtgaagatggggcacgcacactctgggatgggcaaggtcaaggttgacaaccagcatgacttccaggacatcgcaagtgtcgtcgcactgaccaagacgtatgccactgccgagcccttcatcgatgccaaatatgacgtgcgtgtccagaagattgggcagaactacaaggcctacatgaggacgtcagtgtcagggaactggaagaccaatactggctctgcgatcctggagcaaattgccatgtctgacagatacaagctgtgggtggacacgtgctcagagatttttgggggactggacatctgcgcagtggaagcgctacatggcaaggacggaagggatcacatcattgaggtggtgggttcctccatgccgctcattggtgaccaccaggatgaagacaaacagctcatcgtagagctcgtggtcaacaagatggctcaggccctgccccggcagcgacagcgngatgcctcccctggcaggggctcccatggccagactccgtccccaggggccctgcccttgggccgccagacctcccagcagcccgcagggcccccggctcagcagcgacccccaccacagggcggccctccacagccgggtccaggcccccagcgccagggacccccattgcagcagcgcccgcccccgcagggccagcagcacctttcaggccttggacccccagctggcagccccctgccccagcgccttccaagtcccacctcagcgccccagcagcccgcgtcccaggccgcgccgccgacccagggtcaaggccgccaatcccggccagtggcgggaggccccggggcgcctccagcagcccgcccgcccgcctctccgtctccccagcgccaggcgggccccccacaggctacccgtcagacatccgtctctggcccggctccgccaaaggcctctggggccccaccgggcgggcagcagcgccagggcccgccccagaaacccccaggcccagccggccccacacgccaggccagccaggcgggtcccgtgccccgcactgggccacccaccacgcagcagcctcggcccagcggcccgggccccgctggacgtcccaaaccacagctggcccagaaacccagccaggacgtgccgccacccgccaccgccgctgcagggggacctccgcacccccagctcaacaaatcccagtctctgaccaatgccttcaaccttccagagccagccccgcccaggcccagccttagccaggacgaggtgaaagctgagaccatccgcagcctgaggaagtctttcgccagcctcttctccgactgataccccactctgagaaccccaaaatccctgggcaacccttctctgggccctgaatccatttctcacttttggagtctccaaatcccttgagaacccatctcccggttctccaagattccacctctcattcctcaagatccccgagtaccttgagaaacctgactcctcctggccctaaatccggttctcacatgtggaatccccaagtccttttagaaccccactcgtggtcacttcaggatctacttctgttttagaacctccacattcctgaagacctccgcccctggtttccccagagggcgttttccttcctggaagtgcccaaataccaggcaacccattgcagaatcccttcctggagccctgaagttcctggaaaaccctatttttggtcccaaatctctccagcacacctatttcccatcataattttccaaatcctcaagaaacccctactgttgagccccttcccatggatcttccatccctctgaagatccacatcttcaaatgccacccaacacctagccccacaaggatttcccttcaccagctcccctcaacctcattcaataccttgggagcccctcccacttccaggacccctcggttcccccagggaccccctccccagtttcctgcctctgacagctgtctttaaatatgcaaactccacccatcttcccagaatccttttgtgccgtgcttggcatatgtggtcctcgttcatcgtgccgcctgtggtgatgcgtgcagtgacgctgtttatgtggtccgcacctccccctgaccttcactccttgcctggactcaccccacccctcagcggctctgaaccccaagagaagagtcgggaaacaaaataaacaagcaaaggcccagca

SEQ ID NO: 731098 - DNA, 3105 bp, Homo sapiens
  misc_feature (1450)..(1450): n is a, c, g, or t
cacgggcgcgaccatctgcgctgcggcgccggcgactcagcgctgcctcagtctgcggtgggcagcggaggagtcgtgtcgtgcctgagagcgcagctgtgctcctgggcaccgcgcagtccgcccccgcggctcctggccagaccacccctaggaccccctgccccaagtcgcagccatgaactacctgcggcgccgcctgtcggacagcaactttatggccaatctgccaaatgggtacatgacagacctgcagcgtccgcagccgcccccaccgccgcccggtgcccacagccccggagccacgcccggtcccgggaccgccactgccgagaggtcctccggggtcgccccagcggcctctccggccgcccctagccccgggtcctcggggggcggtggcttcttctcgtcgctgtccaacgcggtcaagcagaccacggcggcggcagctgccaccttcagcgagcaggtgggcggcggctctgggggcgcaggccgcgggggagccgcctccagggtgctgctggtcatcgacgagccgcacaccgactgggcaaaatacttcaaagggaaaaagatccatggagaaattgacattaaagtagaacaggccgaattctctgatctcaaccttgtggcccatgccaatggtggattctctgtggatatggaagttcttcggaatggggtgaaggtcgtgcggtctctgaagccggattttgtgctgatccgccagcacgccttcagcatggcacgcaacggagactaccgcagtttggtcattgggctgcagtatgctggaatccccagtgttaactccttgcattctgtctacaacttctgtgacaagccctgggtgtttgcccagatggttcgactgcataagaaactggggacagaagaattccctctaattgatcagaccttctaccccaatcacaaagaaatgctcagcagtacaacgtaccccgtggttgtgaagatggggcacgcacactctgggatgggcaaggtcaaggttgacaaccagcatgacttccaggacatcgcaagtgtcgtcgcactgaccaagacgtatgccactgccgagcccttcatcgatgccaaatatgacgtgcgtgtccagaagattgggcagaactacaaggcctacatgaggacgtcagtgtcagggaactggaagaccaatactggctctgcgatcctggagcaaattgccatgtctgacagatacaagctgtgggtggacacgtgctcagagatttttgggggactggacatctgcgcagtggaagcgctacatggcaaggacggaagggatcacatcattgaggtggtgggttcctccatgccgctcattggtgaccaccaggatgaagacaaacagctcatcgtagagctcgtggtcaacaagatggctcaggccctgccccggcagcgacagcgngatgcctcccctggcaggggctcccatggccagactccgtccccaggggccctgcccttgggccgccagacctcccagcagcccgcagggcccccggctcagcagcgacccccaccacagggcggccctccacagccgggtccaggcccccagcgccagggacccccattgcagcagcgcccgcccccgcagggccagcagcacctttcaggccttggacccccagctggcagccccctgccccagcgccttccaagtcccacctcagcgccccagcagcccgcgtcccaggccgcgccgccgacccagggtcaaggccgccaatcccggccagtggcgggaggccccggggcgcctccagcagcccgcccgcccgcctctccgtctccccagcgccaggcgggccccccacaggctacccgtcagacatccgtctctggcccggctccgccaaaggcctctggggccccaccgggcgggcagcagcgccagggcccgccccagaaacccccaggcccagccggccccacacgccaggccagccaggcgggtcccgtgccccgcactgggccacccaccacgcagcagcctcggcccagcggcccgggccccgctggacgtcccaaaccacagctggcccagaaacccagccaggacgtgccgccacccgccaccgccgctgcagggggacctccgcacccccagctcaacaaatcccagtctctgaccaatgccttcaaccttccagagccagccccgcccaggcccagccttagccaggacgaggtgaaagctgagaccatccgcagcctgaggaagtctttcgccagcctcttctccgactgataccccactctgagaaccccaaaatccctgggcaacccttctctgggccctgaatccatttctcacttttggagtctccaaatcccttgagaacccatctcccggttctccaagattccacctctcattcctcaagatccccgagtaccttgagaaacctgactcctcctggccctaaatccggttctcacatgtggaatccccaagtccttttagaaccccactcgtggtcacttcaggatctacttctgttttagaacctccacattcctgaagacctccgcccctggtttccccagagggcgttttccttcctggaagtgcccaaataccaggcaacccattgcagaatcccttcctggagccctgaagttcctggaaaaccctatttttggtcccaaatctctccagcacacctatttcccatcataattttccaaatcctcaagaaacccctactgttgagccccttcccatggatcttccatccctctgaagatccacatcttcaaatgccacttccaggacccctcggttcccccagggaccccctccccagtttcctgcctctgacagctgtctttaaatatgcaaactccacccatcttcccagaatccttttgtgccgtgcttggcatatgtggtcctcgttcatcgtgccgcctgtggtgatgcgtgcagtgacgctgtttatgtggtccgcacctccccctgaccttcactccttgcctggactcaccccacccctcagcggctctgaaccccaagagaagagtcgggaaacaaaataaacaagcaaaggcccagca

SEQ ID NO: 731099 - DNA, 3182 bp, Homo sapiens
  misc_feature (1450)..(1450): n is a, c, g, or t
cacgggcgcgaccatctgcgctgcggcgccggcgactcagcgctgcctcagtctgcggtgggcagcggaggagtcgtgtcgtgcctgagagcgcagctgtgctcctgggcaccgcgcagtccgcccccgcggctcctggccagaccacccctaggaccccctgccccaagtcgcagccatgaactacctgcggcgccgcctgtcggacagcaactttatggccaatctgccaaatgggtacatgacagacctgcagcgtccgcagccgcccccaccgccgcccggtgcccacagccccggagccacgcccggtcccgggaccgccactgccgagaggtcctccggggtcgccccagcggcctctccggccgcccctagccccgggtcctcggggggcggtggcttcttctcgtcgctgtccaacgcggtcaagcagaccacggcggcggcagctgccaccttcagcgagcaggtgggcggcggctctgggggcgcaggccgcgggggagccgcctccagggtgctgctggtcatcgacgagccgcacaccgactgggcaaaatacttcaaagggaaaaagatccatggagaaattgacattaaagtagaacaggccgaattctctgatctcaaccttgtggcccatgccaatggtggattctctgtggatatggaagttcttcggaatggggtgaaggtcgtgcggtctctgaagccggattttgtgctgatccgccagcacgccttcagcatggcacgcaacggagactaccgcagtttggtcattgggctgcagtatgctggaatccccagtgttaactccttgcattctgtctacaacttctgtgacaagccctgggtgtttgcccagatggttcgactgcataagaaactggggacagaagaattccctctaattgatcagaccttctaccccaatcacaaagaaatgctcagcagtacaacgtaccccgtggttgtgaagatggggcacgcacactctgggatgggcaaggtcaaggttgacaaccagcatgacttccaggacatcgcaagtgtcgtcgcactgaccaagacgtatgccactgccgagcccttcatcgatgccaaatatgacgtgcgtgtccagaagattgggcagaactacaaggcctacatgaggacgtcagtgtcagggaactggaagaccaatactggctctgcgatcctggagcaaattgccatgtctgacagatacaagctgtgggtggacacgtgctcagagatttttgggggactggacatctgcgcagtggaagcgctacatggcaaggacggaagggatcacatcattgaggtggtgggttcctccatgccgctcattggtgaccaccaggatgaagacaaacagctcatcgtagagctcgtggtcaacaagatggctcaggccctgccccggcagcgacagcgngatgcctcccctggcaggggctcccatggccagactccgtccccaggggccctgcccttgggccgccagacctcccagcagcccgcagggcccccggctcagcagcgacccccaccacagggcggccctccacagccgggtccaggcccccagcgccagggacccccattgcagcagcgcccgcccccgcagggccagcagcacctttcaggccttggacccccagctggcagccccctgccccagcgccttccaagtcccacctcagcgccccagcagcccgcgtcccaggccgcgccgccgacccagggtcaaggccgccaatcccggccagtggcgggaggccccggggcgcctccagcagcccgcccgcccgcctctccgtctccccagcgccaggcgggccccccacaggctacccgtcagacatccgtctctggcccggctccgccaaaggcctctggggccccaccgggcgggcagcagcgccagggcccgccccagaaacccccaggcccagccggccccacacgccaggccagccaggcgggtcccgtgccccgcactgggccacccaccacgcagcagcctcggcccagcggcccgggccccgctggacgtcccaaaccacagctggcccagaaacccagccaggacgtgccgccacccgccaccgccgctgcagggggacctccgcacccccagctcaacaaatcccagtctctgaccaatgccttcaaccttccagagccagccccgcccaggcccagccttagccaggacgaggtgaaagctgagaccatccgcagcctgaggaagtctttcgccagcctcttctccgactgataccccactctgagaaccccaaaatccctgggcaacccttctctgggccctgaatccatttctcacttttggagtctccaaatcccttgagaacccatctcccggttctccaagattccacctctcattcctcaagatccccgagtaccttgagaaacctgactcctcctggccctaaatccggttctcacatgtggaatccccaagtccttttagaaccccactcgtggtcacttcaggatctacttctgttttagaacctccacattcctgaagacctccgcccctggtttccccagagggcgttttccttcctggaagtgcccaaataccaggcaacccattgcagaatcccttcctggagccctgaagttcctggaaaaccctatttttggtcccaaatctctccagcacacctatttcccatcataattttccaaatcctcaagaaacccctactgttgagccccttcccatggatcttccatccctctgaagatccacatcttcaaatgccacttccaggacccctcggttcccccagggaccccctccccagtttcctgcctctgacagctgtctttaaatatgcaaactccacccatcttcccagaatcctttgcacacggaaggccagtggtctccgcttccccacctttgctgtggtgtctgtgtctgtgactgacgtggcctccttttgtgccgtgcttggcatatgtggtcctcgttcatcgtgccgcctgtggtgatgcgtgcagtgacgctgtttatgtggtccgcacctccccctgaccttcactccttgcctggactcaccccacccctcagcggctctgaaccccaagagaagagtcgggaaacaaaataaacaagcaaaggcccagca

SEQ ID NO: 731100 - DNA, 3221 bp, Homo sapiens
  misc_feature (1450)..(1450): n is a, c, g, or t
cacgggcgcgaccatctgcgctgcggcgccggcgactcagcgctgcctcagtctgcggtgggcagcggaggagtcgtgtcgtgcctgagagcgcagctgtgctcctgggcaccgcgcagtccgcccccgcggctcctggccagaccacccctaggaccccctgccccaagtcgcagccatgaactacctgcggcgccgcctgtcggacagcaactttatggccaatctgccaaatgggtacatgacagacctgcagcgtccgcagccgcccccaccgccgcccggtgcccacagccccggagccacgcccggtcccgggaccgccactgccgagaggtcctccggggtcgccccagcggcctctccggccgcccctagccccgggtcctcggggggcggtggcttcttctcgtcgctgtccaacgcggtcaagcagaccacggcggcggcagctgccaccttcagcgagcaggtgggcggcggctctgggggcgcaggccgcgggggagccgcctccagggtgctgctggtcatcgacgagccgcacaccgactgggcaaaatacttcaaagggaaaaagatccatggagaaattgacattaaagtagaacaggccgaattctctgatctcaaccttgtggcccatgccaatggtggattctctgtggatatggaagttcttcggaatggggtgaaggtcgtgcggtctctgaagccggattttgtgctgatccgccagcacgccttcagcatggcacgcaacggagactaccgcagtttggtcattgggctgcagtatgctggaatccccagtgttaactccttgcattctgtctacaacttctgtgacaagccctgggtgtttgcccagatggttcgactgcataagaaactggggacagaagaattccctctaattgatcagaccttctaccccaatcacaaagaaatgctcagcagtacaacgtaccccgtggttgtgaagatggggcacgcacactctgggatgggcaaggtcaaggttgacaaccagcatgacttccaggacatcgcaagtgtcgtcgcactgaccaagacgtatgccactgccgagcccttcatcgatgccaaatatgacgtgcgtgtccagaagattgggcagaactacaaggcctacatgaggacgtcagtgtcagggaactggaagaccaatactggctctgcgatcctggagcaaattgccatgtctgacagatacaagctgtgggtggacacgtgctcagagatttttgggggactggacatctgcgcagtggaagcgctacatggcaaggacggaagggatcacatcattgaggtggtgggttcctccatgccgctcattggtgaccaccaggatgaagacaaacagctcatcgtagagctcgtggtcaacaagatggctcaggccctgccccggcagcgacagcgngatgcctcccctggcaggggctcccatggccagactccgtccccaggggccctgcccttgggccgccagacctcccagcagcccgcagggcccccggctcagcagcgacccccaccacagggcggccctccacagccgggtccaggcccccagcgccagggacccccattgcagcagcgcccgcccccgcagggccagcagcacctttcaggccttggacccccagctggcagccccctgccccagcgccttccaagtcccacctcagcgccccagcagcccgcgtcccaggccgcgccgccgacccagggtcaaggccgccaatcccggccagtggcgggaggccccggggcgcctccagcagcccgcccgcccgcctctccgtctccccagcgccaggcgggccccccacaggctacccgtcagacatccgtctctggcccggctccgccaaaggcctctggggccccaccgggcgggcagcagcgccagggcccgccccagaaacccccaggcccagccggccccacacgccaggccagccaggcgggtcccgtgccccgcactgggccacccaccacgcagcagcctcggcccagcggcccgggccccgctggacgtcccaaaccacagctggcccagaaacccagccaggacgtgccgccacccgccaccgccgctgcagggggacctccgcacccccagctcaaagccagccccgcccaggcccagccttagccaggacgaggtgaaagctgagaccatccgcagcctgaggaagtctttcgccagcctcttctccgactgataccccactctgagaaccccaaaatccctgggcaacccttctctgggccctgaatccatttctcacttttggagtctccaaatcccttgagaacccatctcccggttctccaagattccacctctcattcctcaagatccccgagtaccttgagaaacctgactcctcctggccctaaatccggttctcacatgtggaatccccaagtccttttagaaccccactcgtggtcacttcaggatctacttctgttttagaacctccacattcctgaagacctccgcccctggtttccccagagggcgttttccttcctggaagtgcccaaataccaggcaacccattgcagaatcccttcctggagccctgaagttcctggaaaaccctatttttggtcccaaatctctccagcacacctatttcccatcataattttccaaatcctcaagaaacccctactgttgagccccttcccatggatcttccatccctctgaagatccacatcttcaaatgccacccaacacctagccccacaaggatttcccttcaccagctcccctcaacctcattcaataccttgggagcccctcccacttccaggacccctcggttcccccagggaccccctccccagtttcctgcctctgacagctgtctttaaatatgcaaactccacccatcttcccagaatcctttgcacacggaaggccagtggtctccgcttccccacctttgctgtggtgtctgtgtctgtgactgacgtggcctccttttgtgccgtgcttggcatatgtggtcctcgttcatcgtgccgcctgtggtgatgcgtgcagtgacgctgtttatgtggtccgcacctccccctgaccttcactccttgcctggactcaccccacccctcagcggctctgaaccccaagagaagagtcgggaaacaaaataaacaagcaaaggcccagca

SEQ ID NO: 731101 - DNA, 3144 bp, Homo sapiens
  misc_feature (1450)..(1450): n is a, c, g, or t
cacgggcgcgaccatctgcgctgcggcgccggcgactcagcgctgcctcagtctgcggtgggcagcggaggagtcgtgtcgtgcctgagagcgcagctgtgctcctgggcaccgcgcagtccgcccccgcggctcctggccagaccacccctaggaccccctgccccaagtcgcagccatgaactacctgcggcgccgcctgtcggacagcaactttatggccaatctgccaaatgggtacatgacagacctgcagcgtccgcagccgcccccaccgccgcccggtgcccacagccccggagccacgcccggtcccgggaccgccactgccgagaggtcctccggggtcgccccagcggcctctccggccgcccctagccccgggtcctcggggggcggtggcttcttctcgtcgctgtccaacgcggtcaagcagaccacggcggcggcagctgccaccttcagcgagcaggtgggcggcggctctgggggcgcaggccgcgggggagccgcctccagggtgctgctggtcatcgacgagccgcacaccgactgggcaaaatacttcaaagggaaaaagatccatggagaaattgacattaaagtagaacaggccgaattctctgatctcaaccttgtggcccatgccaatggtggattctctgtggatatggaagttcttcggaatggggtgaaggtcgtgcggtctctgaagccggattttgtgctgatccgccagcacgccttcagcatggcacgcaacggagactaccgcagtttggtcattgggctgcagtatgctggaatccccagtgttaactccttgcattctgtctacaacttctgtgacaagccctgggtgtttgcccagatggttcgactgcataagaaactggggacagaagaattccctctaattgatcagaccttctaccccaatcacaaagaaatgctcagcagtacaacgtaccccgtggttgtgaagatggggcacgcacactctgggatgggcaaggtcaaggttgacaaccagcatgacttccaggacatcgcaagtgtcgtcgcactgaccaagacgtatgccactgccgagcccttcatcgatgccaaatatgacgtgcgtgtccagaagattgggcagaactacaaggcctacatgaggacgtcagtgtcagggaactggaagaccaatactggctctgcgatcctggagcaaattgccatgtctgacagatacaagctgtgggtggacacgtgctcagagatttttgggggactggacatctgcgcagtggaagcgctacatggcaaggacggaagggatcacatcattgaggtggtgggttcctccatgccgctcattggtgaccaccaggatgaagacaaacagctcatcgtagagctcgtggtcaacaagatggctcaggccctgccccggcagcgacagcgngatgcctcccctggcaggggctcccatggccagactccgtccccaggggccctgcccttgggccgccagacctcccagcagcccgcagggcccccggctcagcagcgacccccaccacagggcggccctccacagccgggtccaggcccccagcgccagggacccccattgcagcagcgcccgcccccgcagggccagcagcacctttcaggccttggacccccagctggcagccccctgccccagcgccttccaagtcccacctcagcgccccagcagcccgcgtcccaggccgcgccgccgacccagggtcaaggccgccaatcccggccagtggcgggaggccccggggcgcctccagcagcccgcccgcccgcctctccgtctccccagcgccaggcgggccccccacaggctacccgtcagacatccgtctctggcccggctccgccaaaggcctctggggccccaccgggcgggcagcagcgccagggcccgccccagaaacccccaggcccagccggccccacacgccaggccagccaggcgggtcccgtgccccgcactgggccacccaccacgcagcagcctcggcccagcggcccgggccccgctggacgtcccaaaccacagctggcccagaaacccagccaggacgtgccgccacccgccaccgccgctgcagggggacctccgcacccccagctcaaagccagccccgcccaggcccagccttagccaggacgaggtgaaagctgagaccatccgcagcctgaggaagtctttcgccagcctcttctccgactgataccccactctgagaaccccaaaatccctgggcaacccttctctgggccctgaatccatttctcacttttggagtctccaaatcccttgagaacccatctcccggttctccaagattccacctctcattcctcaagatccccgagtaccttgagaaacctgactcctcctggccctaaatccggttctcacatgtggaatccccaagtccttttagaaccccactcgtggtcacttcaggatctacttctgttttagaacctccacattcctgaagacctccgcccctggtttccccagagggcgttttccttcctggaagtgcccaaataccaggcaacccattgcagaatcccttcctggagccctgaagttcctggaaaaccctatttttggtcccaaatctctccagcacacctatttcccatcataattttccaaatcctcaagaaacccctactgttgagccccttcccatggatcttccatccctctgaagatccacatcttcaaatgccacccaacacctagccccacaaggatttcccttcaccagctcccctcaacctcattcaataccttgggagcccctcccacttccaggacccctcggttcccccagggaccccctccccagtttcctgcctctgacagctgtctttaaatatgcaaactccacccatcttcccagaatccttttgtgccgtgcttggcatatgtggtcctcgttcatcgtgccgcctgtggtgatgcgtgcagtgacgctgtttatgtggtccgcacctccccctgaccttcactccttgcctggactcaccccacccctcagcggctctgaaccccaagagaagagtcgggaaacaaaataaacaagcaaaggcccagca

SEQ ID NO: 731102 - DNA, 3067 bp, Homo sapiens
  misc_feature (1450)..(1450): n is a, c, g, or t
cacgggcgcgaccatctgcgctgcggcgccggcgactcagcgctgcctcagtctgcggtgggcagcggaggagtcgtgtcgtgcctgagagcgcagctgtgctcctgggcaccgcgcagtccgcccccgcggctcctggccagaccacccctaggaccccctgccccaagtcgcagccatgaactacctgcggcgccgcctgtcggacagcaactttatggccaatctgccaaatgggtacatgacagacctgcagcgtccgcagccgcccccaccgccgcccggtgcccacagccccggagccacgcccggtcccgggaccgccactgccgagaggtcctccggggtcgccccagcggcctctccggccgcccctagccccgggtcctcggggggcggtggcttcttctcgtcgctgtccaacgcggtcaagcagaccacggcggcggcagctgccaccttcagcgagcaggtgggcggcggctctgggggcgcaggccgcgggggagccgcctccagggtgctgctggtcatcgacgagccgcacaccgactgggcaaaatacttcaaagggaaaaagatccatggagaaattgacattaaagtagaacaggccgaattctctgatctcaaccttgtggcccatgccaatggtggattctctgtggatatggaagttcttcggaatggggtgaaggtcgtgcggtctctgaagccggattttgtgctgatccgccagcacgccttcagcatggcacgcaacggagactaccgcagtttggtcattgggctgcagtatgctggaatccccagtgttaactccttgcattctgtctacaacttctgtgacaagccctgggtgtttgcccagatggttcgactgcataagaaactggggacagaagaattccctctaattgatcagaccttctaccccaatcacaaagaaatgctcagcagtacaacgtaccccgtggttgtgaagatggggcacgcacactctgggatgggcaaggtcaaggttgacaaccagcatgacttccaggacatcgcaagtgtcgtcgcactgaccaagacgtatgccactgccgagcccttcatcgatgccaaatatgacgtgcgtgtccagaagattgggcagaactacaaggcctacatgaggacgtcagtgtcagggaactggaagaccaatactggctctgcgatcctggagcaaattgccatgtctgacagatacaagctgtgggtggacacgtgctcagagatttttgggggactggacatctgcgcagtggaagcgctacatggcaaggacggaagggatcacatcattgaggtggtgggttcctccatgccgctcattggtgaccaccaggatgaagacaaacagctcatcgtagagctcgtggtcaacaagatggctcaggccctgccccggcagcgacagcgngatgcctcccctggcaggggctcccatggccagactccgtccccaggggccctgcccttgggccgccagacctcccagcagcccgcagggcccccggctcagcagcgacccccaccacagggcggccctccacagccgggtccaggcccccagcgccagggacccccattgcagcagcgcccgcccccgcagggccagcagcacctttcaggccttggacccccagctggcagccccctgccccagcgccttccaagtcccacctcagcgccccagcagcccgcgtcccaggccgcgccgccgacccagggtcaaggccgccaatcccggccagtggcgggaggccccggggcgcctccagcagcccgcccgcccgcctctccgtctccccagcgccaggcgggccccccacaggctacccgtcagacatccgtctctggcccggctccgccaaaggcctctggggccccaccgggcgggcagcagcgccagggcccgccccagaaacccccaggcccagccggccccacacgccaggccagccaggcgggtcccgtgccccgcactgggccacccaccacgcagcagcctcggcccagcggcccgggccccgctggacgtcccaaaccacagctggcccagaaacccagccaggacgtgccgccacccgccaccgccgctgcagggggacctccgcacccccagctcaaagccagccccgcccaggcccagccttagccaggacgaggtgaaagctgagaccatccgcagcctgaggaagtctttcgccagcctcttctccgactgataccccactctgagaaccccaaaatccctgggcaacccttctctgggccctgaatccatttctcacttttggagtctccaaatcccttgagaacccatctcccggttctccaagattccacctctcattcctcaagatccccgagtaccttgagaaacctgactcctcctggccctaaatccggttctcacatgtggaatccccaagtccttttagaaccccactcgtggtcacttcaggatctacttctgttttagaacctccacattcctgaagacctccgcccctggtttccccagagggcgttttccttcctggaagtgcccaaataccaggcaacccattgcagaatcccttcctggagccctgaagttcctggaaaaccctatttttggtcccaaatctctccagcacacctatttcccatcataattttccaaatcctcaagaaacccctactgttgagccccttcccatggatcttccatccctctgaagatccacatcttcaaatgccacttccaggacccctcggttcccccagggaccccctccccagtttcctgcctctgacagctgtctttaaatatgcaaactccacccatcttcccagaatccttttgtgccgtgcttggcatatgtggtcctcgttcatcgtgccgcctgtggtgatgcgtgcagtgacgctgtttatgtggtccgcacctccccctgaccttcactccttgcctggactcaccccacccctcagcggctctgaaccccaagagaagagtcgggaaacaaaataaacaagcaaaggcccagca

SEQ ID NO: 731103 - DNA, 3144 bp, Homo sapiens
  misc_feature (1450)..(1450): n is a, c, g, or t
cacgggcgcgaccatctgcgctgcggcgccggcgactcagcgctgcctcagtctgcggtgggcagcggaggagtcgtgtcgtgcctgagagcgcagctgtgctcctgggcaccgcgcagtccgcccccgcggctcctggccagaccacccctaggaccccctgccccaagtcgcagccatgaactacctgcggcgccgcctgtcggacagcaactttatggccaatctgccaaatgggtacatgacagacctgcagcgtccgcagccgcccccaccgccgcccggtgcccacagccccggagccacgcccggtcccgggaccgccactgccgagaggtcctccggggtcgccccagcggcctctccggccgcccctagccccgggtcctcggggggcggtggcttcttctcgtcgctgtccaacgcggtcaagcagaccacggcggcggcagctgccaccttcagcgagcaggtgggcggcggctctgggggcgcaggccgcgggggagccgcctccagggtgctgctggtcatcgacgagccgcacaccgactgggcaaaatacttcaaagggaaaaagatccatggagaaattgacattaaagtagaacaggccgaattctctgatctcaaccttgtggcccatgccaatggtggattctctgtggatatggaagttcttcggaatggggtgaaggtcgtgcggtctctgaagccggattttgtgctgatccgccagcacgccttcagcatggcacgcaacggagactaccgcagtttggtcattgggctgcagtatgctggaatccccagtgttaactccttgcattctgtctacaacttctgtgacaagccctgggtgtttgcccagatggttcgactgcataagaaactggggacagaagaattccctctaattgatcagaccttctaccccaatcacaaagaaatgctcagcagtacaacgtaccccgtggttgtgaagatggggcacgcacactctgggatgggcaaggtcaaggttgacaaccagcatgacttccaggacatcgcaagtgtcgtcgcactgaccaagacgtatgccactgccgagcccttcatcgatgccaaatatgacgtgcgtgtccagaagattgggcagaactacaaggcctacatgaggacgtcagtgtcagggaactggaagaccaatactggctctgcgatcctggagcaaattgccatgtctgacagatacaagctgtgggtggacacgtgctcagagatttttgggggactggacatctgcgcagtggaagcgctacatggcaaggacggaagggatcacatcattgaggtggtgggttcctccatgccgctcattggtgaccaccaggatgaagacaaacagctcatcgtagagctcgtggtcaacaagatggctcaggccctgccccggcagcgacagcgngatgcctcccctggcaggggctcccatggccagactccgtccccaggggccctgcccttgggccgccagacctcccagcagcccgcagggcccccggctcagcagcgacccccaccacagggcggccctccacagccgggtccaggcccccagcgccagggacccccattgcagcagcgcccgcccccgcagggccagcagcacctttcaggccttggacccccagctggcagccccctgccccagcgccttccaagtcccacctcagcgccccagcagcccgcgtcccaggccgcgccgccgacccagggtcaaggccgccaatcccggccagtggcgggaggccccggggcgcctccagcagcccgcccgcccgcctctccgtctccccagcgccaggcgggccccccacaggctacccgtcagacatccgtctctggcccggctccgccaaaggcctctggggccccaccgggcgggcagcagcgccagggcccgccccagaaacccccaggcccagccggccccacacgccaggccagccaggcgggtcccgtgccccgcactgggccacccaccacgcagcagcctcggcccagcggcccgggccccgctggacgtcccaaaccacagctggcccagaaacccagccaggacgtgccgccacccgccaccgccgctgcagggggacctccgcacccccagctcaaagccagccccgcccaggcccagccttagccaggacgaggtgaaagctgagaccatccgcagcctgaggaagtctttcgccagcctcttctccgactgataccccactctgagaaccccaaaatccctgggcaacccttctctgggccctgaatccatttctcacttttggagtctccaaatcccttgagaacccatctcccggttctccaagattccacctctcattcctcaagatccccgagtaccttgagaaacctgactcctcctggccctaaatccggttctcacatgtggaatccccaagtccttttagaaccccactcgtggtcacttcaggatctacttctgttttagaacctccacattcctgaagacctccgcccctggtttccccagagggcgttttccttcctggaagtgcccaaataccaggcaacccattgcagaatcccttcctggagccctgaagttcctggaaaaccctatttttggtcccaaatctctccagcacacctatttcccatcataattttccaaatcctcaagaaacccctactgttgagccccttcccatggatcttccatccctctgaagatccacatcttcaaatgccacttccaggacccctcggttcccccagggaccccctccccagtttcctgcctctgacagctgtctttaaatatgcaaactccacccatcttcccagaatcctttgcacacggaaggccagtggtctccgcttccccacctttgctgtggtgtctgtgtctgtgactgacgtggcctccttttgtgccgtgcttggcatatgtggtcctcgttcatcgtgccgcctgtggtgatgcgtgcagtgacgctgtttatgtggtccgcacctccccctgaccttcactccttgcctggactcaccccacccctcagcggctctgaaccccaagagaagagtcgggaaacaaaataaacaagcaaaggcccagca

SEQ ID NO: 731104 - DNA, 2564 bp, Homo sapiens
  misc_feature (793)..(793): n is a, c, g, or t
cctgcgcctttcagaaccaatgagccggaacggggtgaaggtcgtgcggtctctgaagccggattttgtgctgatccgccagcacgccttcagcatggcacgcaacggagactaccgcagtttggtcattgggctgcagtatgctggaatccccagtgttaactccttgcattctgtctacaacttctgtgacaagccctgggtgtttgcccagatggttcgactgcataagaaactggggacagaagaattccctctaattgatcagaccttctaccccaatcacaaagaaatgctcagcagtacaacgtaccccgtggttgtgaagatggggcacgcacactctgggatgggcaaggtcaaggttgacaaccagcatgacttccaggacatcgcaagtgtcgtcgcactgaccaagacgtatgccactgccgagcccttcatcgatgccaaatatgacgtgcgtgtccagaagattgggcagaactacaaggcctacatgaggacgtcagtgtcagggaactggaagaccaatactggctctgcgatcctggagcaaattgccatgtctgacagatacaagctgtgggtggacacgtgctcagagatttttgggggactggacatctgcgcagtggaagcgctacatggcaaggacggaagggatcacatcattgaggtggtgggttcctccatgccgctcattggtgaccaccaggatgaagacaaacagctcatcgtagagctcgtggtcaacaagatggctcaggccctgccccggcagcgacagcgngatgcctcccctggcaggggctcccatggccagactccgtccccaggggccctgcccttgggccgccagacctcccagcagcccgcagggcccccggctcagcagcgacccccaccacagggcggccctccacagccgggtccaggcccccagcgccagggacccccattgcagcagcgcccgcccccgcagggccagcagcacctttcaggccttggacccccagctggcagccccctgccccagcgccttccaagtcccacctcagcgccccagcagcccgcgtcccaggccgcgccgccgacccagggtcaaggccgccaatcccggccagtggcgggaggccccggggcgcctccagcagcccgcccgcccgcctctccgtctccccagcgccaggcgggccccccacaggctacccgtcagacatccgtctctggcccggctccgccaaaggcctctggggccccaccgggcgggcagcagcgccagggcccgccccagaaacccccaggcccagccggccccacacgccaggccagccaggcgggtcccgtgccccgcactgggccacccaccacgcagcagcctcggcccagcggcccgggccccgctggacgtcccaaaccacagctggcccagaaacccagccaggacgtgccgccacccgccaccgccgctgcagggggacctccgcacccccagctcaaagccagccccgcccaggcccagccttagccaggacgaggtgaaagctgagaccatccgcagcctgaggaagtctttcgccagcctcttctccgactgataccccactctgagaaccccaaaatccctgggcaacccttctctgggccctgaatccatttctcacttttggagtctccaaatcccttgagaacccatctcccggttctccaagattccacctctcattcctcaagatccccgagtaccttgagaaacctgactcctcctggccctaaatccggttctcacatgtggaatccccaagtccttttagaaccccactcgtggtcacttcaggatctacttctgttttagaacctccacattcctgaagacctccgcccctggtttccccagagggcgttttccttcctggaagtgcccaaataccaggcaacccattgcagaatcccttcctggagccctgaagttcctggaaaaccctatttttggtcccaaatctctccagcacacctatttcccatcataattttccaaatcctcaagaaacccctactgttgagccccttcccatggatcttccatccctctgaagatccacatcttcaaatgccacccaacacctagccccacaaggatttcccttcaccagctcccctcaacctcattcaataccttgggagcccctcccacttccaggacccctcggttcccccagggaccccctccccagtttcctgcctctgacagctgtctttaaatatgcaaactccacccatcttcccagaatcctttgcacacggaaggccagtggtctccgcttccccacctttgctgtggtgtctgtgtctgtgactgacgtggcctccttttgtgccgtgcttggcatatgtggtcctcgttcatcgtgccgcctgtggtgatgcgtgcagtgacgctgtttatgtggtccgcacctccccctgaccttcactccttgcctggactcaccccacccctcagcggctctgaaccccaagagaagagtcgggaaacaaaataaacaagcaaaggcccagca

SEQ ID NO: 731105 - DNA, 2487 bp, Homo sapiens
  misc_feature (793)..(793): n is a, c, g, or t
cctgcgcctttcagaaccaatgagccggaacggggtgaaggtcgtgcggtctctgaagccggattttgtgctgatccgccagcacgccttcagcatggcacgcaacggagactaccgcagtttggtcattgggctgcagtatgctggaatccccagtgttaactccttgcattctgtctacaacttctgtgacaagccctgggtgtttgcccagatggttcgactgcataagaaactggggacagaagaattccctctaattgatcagaccttctaccccaatcacaaagaaatgctcagcagtacaacgtaccccgtggttgtgaagatggggcacgcacactctgggatgggcaaggtcaaggttgacaaccagcatgacttccaggacatcgcaagtgtcgtcgcactgaccaagacgtatgccactgccgagcccttcatcgatgccaaatatgacgtgcgtgtccagaagattgggcagaactacaaggcctacatgaggacgtcagtgtcagggaactggaagaccaatactggctctgcgatcctggagcaaattgccatgtctgacagatacaagctgtgggtggacacgtgctcagagatttttgggggactggacatctgcgcagtggaagcgctacatggcaaggacggaagggatcacatcattgaggtggtgggttcctccatgccgctcattggtgaccaccaggatgaagacaaacagctcatcgtagagctcgtggtcaacaagatggctcaggccctgccccggcagcgacagcgngatgcctcccctggcaggggctcccatggccagactccgtccccaggggccctgcccttgggccgccagacctcccagcagcccgcagggcccccggctcagcagcgacccccaccacagggcggccctccacagccgggtccaggcccccagcgccagggacccccattgcagcagcgcccgcccccgcagggccagcagcacctttcaggccttggacccccagctggcagccccctgccccagcgccttccaagtcccacctcagcgccccagcagcccgcgtcccaggccgcgccgccgacccagggtcaaggccgccaatcccggccagtggcgggaggccccggggcgcctccagcagcccgcccgcccgcctctccgtctccccagcgccaggcgggccccccacaggctacccgtcagacatccgtctctggcccggctccgccaaaggcctctggggccccaccgggcgggcagcagcgccagggcccgccccagaaacccccaggcccagccggccccacacgccaggccagccaggcgggtcccgtgccccgcactgggccacccaccacgcagcagcctcggcccagcggcccgggccccgctggacgtcccaaaccacagctggcccagaaacccagccaggacgtgccgccacccgccaccgccgctgcagggggacctccgcacccccagctcaaagccagccccgcccaggcccagccttagccaggacgaggtgaaagctgagaccatccgcagcctgaggaagtctttcgccagcctcttctccgactgataccccactctgagaaccccaaaatccctgggcaacccttctctgggccctgaatccatttctcacttttggagtctccaaatcccttgagaacccatctcccggttctccaagattccacctctcattcctcaagatccccgagtaccttgagaaacctgactcctcctggccctaaatccggttctcacatgtggaatccccaagtccttttagaaccccactcgtggtcacttcaggatctacttctgttttagaacctccacattcctgaagacctccgcccctggtttccccagagggcgttttccttcctggaagtgcccaaataccaggcaacccattgcagaatcccttcctggagccctgaagttcctggaaaaccctatttttggtcccaaatctctccagcacacctatttcccatcataattttccaaatcctcaagaaacccctactgttgagccccttcccatggatcttccatccctctgaagatccacatcttcaaatgccacccaacacctagccccacaaggatttcccttcaccagctcccctcaacctcattcaataccttgggagcccctcccacttccaggacccctcggttcccccagggaccccctccccagtttcctgcctctgacagctgtctttaaatatgcaaactccacccatcttcccagaatccttttgtgccgtgcttggcatatgtggtcctcgttcatcgtgccgcctgtggtgatgcgtgcagtgacgctgtttatgtggtccgcacctccccctgaccttcactccttgcctggactcaccccacccctcagcggctctgaaccccaagagaagagtcgggaaacaaaataaacaagcaaaggcccagca

SEQ ID NO: 731106 - DNA, 2410 bp, Homo sapiens
  misc_feature (793)..(793): n is a, c, g, or t
cctgcgcctttcagaaccaatgagccggaacggggtgaaggtcgtgcggtctctgaagccggattttgtgctgatccgccagcacgccttcagcatggcacgcaacggagactaccgcagtttggtcattgggctgcagtatgctggaatccccagtgttaactccttgcattctgtctacaacttctgtgacaagccctgggtgtttgcccagatggttcgactgcataagaaactggggacagaagaattccctctaattgatcagaccttctaccccaatcacaaagaaatgctcagcagtacaacgtaccccgtggttgtgaagatggggcacgcacactctgggatgggcaaggtcaaggttgacaaccagcatgacttccaggacatcgcaagtgtcgtcgcactgaccaagacgtatgccactgccgagcccttcatcgatgccaaatatgacgtgcgtgtccagaagattgggcagaactacaaggcctacatgaggacgtcagtgtcagggaactggaagaccaatactggctctgcgatcctggagcaaattgccatgtctgacagatacaagctgtgggtggacacgtgctcagagatttttgggggactggacatctgcgcagtggaagcgctacatggcaaggacggaagggatcacatcattgaggtggtgggttcctccatgccgctcattggtgaccaccaggatgaagacaaacagctcatcgtagagctcgtggtcaacaagatggctcaggccctgccccggcagcgacagcgngatgcctcccctggcaggggctcccatggccagactccgtccccaggggccctgcccttgggccgccagacctcccagcagcccgcagggcccccggctcagcagcgacccccaccacagggcggccctccacagccgggtccaggcccccagcgccagggacccccattgcagcagcgcccgcccccgcagggccagcagcacctttcaggccttggacccccagctggcagccccctgccccagcgccttccaagtcccacctcagcgccccagcagcccgcgtcccaggccgcgccgccgacccagggtcaaggccgccaatcccggccagtggcgggaggccccggggcgcctccagcagcccgcccgcccgcctctccgtctccccagcgccaggcgggccccccacaggctacccgtcagacatccgtctctggcccggctccgccaaaggcctctggggccccaccgggcgggcagcagcgccagggcccgccccagaaacccccaggcccagccggccccacacgccaggccagccaggcgggtcccgtgccccgcactgggccacccaccacgcagcagcctcggcccagcggcccgggccccgctggacgtcccaaaccacagctggcccagaaacccagccaggacgtgccgccacccgccaccgccgctgcagggggacctccgcacccccagctcaaagccagccccgcccaggcccagccttagccaggacgaggtgaaagctgagaccatccgcagcctgaggaagtctttcgccagcctcttctccgactgataccccactctgagaaccccaaaatccctgggcaacccttctctgggccctgaatccatttctcacttttggagtctccaaatcccttgagaacccatctcccggttctccaagattccacctctcattcctcaagatccccgagtaccttgagaaacctgactcctcctggccctaaatccggttctcacatgtggaatccccaagtccttttagaaccccactcgtggtcacttcaggatctacttctgttttagaacctccacattcctgaagacctccgcccctggtttccccagagggcgttttccttcctggaagtgcccaaataccaggcaacccattgcagaatcccttcctggagccctgaagttcctggaaaaccctatttttggtcccaaatctctccagcacacctatttcccatcataattttccaaatcctcaagaaacccctactgttgagccccttcccatggatcttccatccctctgaagatccacatcttcaaatgccacttccaggacccctcggttcccccagggaccccctccccagtttcctgcctctgacagctgtctttaaatatgcaaactccacccatcttcccagaatccttttgtgccgtgcttggcatatgtggtcctcgttcatcgtgccgcctgtggtgatgcgtgcagtgacgctgtttatgtggtccgcacctccccctgaccttcactccttgcctggactcaccccacccctcagcggctctgaaccccaagagaagagtcgggaaacaaaataaacaagcaaaggcccagca

SEQ ID NO: 731107 - DNA, 2487 bp, Homo sapiens
  misc_feature (793)..(793): n is a, c, g, or t
cctgcgcctttcagaaccaatgagccggaacggggtgaaggtcgtgcggtctctgaagccggattttgtgctgatccgccagcacgccttcagcatggcacgcaacggagactaccgcagtttggtcattgggctgcagtatgctggaatccccagtgttaactccttgcattctgtctacaacttctgtgacaagccctgggtgtttgcccagatggttcgactgcataagaaactggggacagaagaattccctctaattgatcagaccttctaccccaatcacaaagaaatgctcagcagtacaacgtaccccgtggttgtgaagatggggcacgcacactctgggatgggcaaggtcaaggttgacaaccagcatgacttccaggacatcgcaagtgtcgtcgcactgaccaagacgtatgccactgccgagcccttcatcgatgccaaatatgacgtgcgtgtccagaagattgggcagaactacaaggcctacatgaggacgtcagtgtcagggaactggaagaccaatactggctctgcgatcctggagcaaattgccatgtctgacagatacaagctgtgggtggacacgtgctcagagatttttgggggactggacatctgcgcagtggaagcgctacatggcaaggacggaagggatcacatcattgaggtggtgggttcctccatgccgctcattggtgaccaccaggatgaagacaaacagctcatcgtagagctcgtggtcaacaagatggctcaggccctgccccggcagcgacagcgngatgcctcccctggcaggggctcccatggccagactccgtccccaggggccctgcccttgggccgccagacctcccagcagcccgcagggcccccggctcagcagcgacccccaccacagggcggccctccacagccgggtccaggcccccagcgccagggacccccattgcagcagcgcccgcccccgcagggccagcagcacctttcaggccttggacccccagctggcagccccctgccccagcgccttccaagtcccacctcagcgccccagcagcccgcgtcccaggccgcgccgccgacccagggtcaaggccgccaatcccggccagtggcgggaggccccggggcgcctccagcagcccgcccgcccgcctctccgtctccccagcgccaggcgggccccccacaggctacccgtcagacatccgtctctggcccggctccgccaaaggcctctggggccccaccgggcgggcagcagcgccagggcccgccccagaaacccccaggcccagccggccccacacgccaggccagccaggcgggtcccgtgccccgcactgggccacccaccacgcagcagcctcggcccagcggcccgggccccgctggacgtcccaaaccacagctggcccagaaacccagccaggacgtgccgccacccgccaccgccgctgcagggggacctccgcacccccagctcaaagccagccccgcccaggcccagccttagccaggacgaggtgaaagctgagaccatccgcagcctgaggaagtctttcgccagcctcttctccgactgataccccactctgagaaccccaaaatccctgggcaacccttctctgggccctgaatccatttctcacttttggagtctccaaatcccttgagaacccatctcccggttctccaagattccacctctcattcctcaagatccccgagtaccttgagaaacctgactcctcctggccctaaatccggttctcacatgtggaatccccaagtccttttagaaccccactcgtggtcacttcaggatctacttctgttttagaacctccacattcctgaagacctccgcccctggtttccccagagggcgttttccttcctggaagtgcccaaataccaggcaacccattgcagaatcccttcctggagccctgaagttcctggaaaaccctatttttggtcccaaatctctccagcacacctatttcccatcataattttccaaatcctcaagaaacccctactgttgagccccttcccatggatcttccatccctctgaagatccacatcttcaaatgccacttccaggacccctcggttcccccagggaccccctccccagtttcctgcctctgacagctgtctttaaatatgcaaactccacccatcttcccagaatcctttgcacacggaaggccagtggtctccgcttccccacctttgctgtggtgtctgtgtctgtgactgacgtggcctccttttgtgccgtgcttggcatatgtggtcctcgttcatcgtgccgcctgtggtgatgcgtgcagtgacgctgtttatgtggtccgcacctccccctgaccttcactccttgcctggactcaccccacccctcagcggctctgaaccccaagagaagagtcgggaaacaaaataaacaagcaaaggcccagca

SEQ ID NO: 731108 - DNA, 732 bp, Homo sapiens
  misc_feature (475)..(475): n is a, c, g, or t
caacagttgcacgggcctcaagggtgtcacgcgacatgaaagacactcatctcaggccacacaggattccatctattgaacattcctgagacaacggaattctggcgatggagcacagcccagtaaaggcgccattccccattttacagctggggaaactgagttacagagcttgtctgcactgagtcatcaggagcaaatgctagatcagtagggtctctctctctgccacccaggccagagtgcagttgacgcagggcaggggagccccgaagtggagcatagtgtgtccggaactggtgggttcttggtctcactgacttcaagaaagaagccgcggaccctcgcgaaactcctgggagggcagagggcatgcctgccatcttcatcatggcattaccaccacccaacactatcaggggacctgccctgataatcaggtaggttcttttctattttcctaagcgtcgactgncttgagaaataaaaggacagagtacaaaagagagaaattttaaagttgggtatccgggggagacaatacacattggtaggatccgtgatgccccacaagccacaaaaaccagcaagttttcattagggagtttcaaaaggggagagagtgtatgaataggagtgggtgacagacatcaagtacttaacagggtaatagaatatcacaaggcatgttgggactgggtgagatcacagtaccacaggatggatgtgaat

SEQ ID NO: 731109 - DNA, 275 bp, Homo sapiens; identical to SEQ ID NO: 131643

SEQ ID NO: 731110 - DNA, 711 bp, Homo sapiens
  misc_feature (454)..(454): n is a, c, g, or t
cctaaccagggatgggtctgggtgattaaggaaggttggcttcagaactgggccaggggcactgctttgcttttgctgttttgatcagctctctgcctgaaggagacaagaaaaaccaacgggaacagctggggaaactgagttacagagcttgtctgcactgagtcatcaggagcaaatgctagatcagtagggtctctctctctgccacccaggccagagtgcagttgacgcagggcaggggagccccgaagtggagcatagtgtgtccggaactggtgggttcttggtctcactgacttcaagaaagaagccgcggaccctcgcgaaactcctgggagggcagagggcatgcctgccatcttcatcatggcattaccaccacccaacactatcaggggacctgccctgataatcaggtaggttcttttctattttcctaagcgtcgactgncttgagaaataaaaggacagagtacaaaagagagaaattttaaagttgggtatccgggggagacaatacacattggtaggatccgtgatgccccacaagccacaaaaaccagcaagttttcattagggagtttcaaaaggggagagagtgtatgaataggagtgggtgacagacatcaagtacttaacagggtaatagaatatcacaaggcatgttgggactgggtgagatcacagtaccacaggatggatgtgaat

SEQ ID NO: 731111 - DNA, 1358 bp, Homo sapiens
ttcttcgacatcagaggcttcatgctggagagtaaaatttggaatataatgagtatgggaagatttgtatggaagcaccttttttttctcctaaattcctaggaatgtaagactcaatctgtagctagtatgaatattttgtattttgaacaagaaatgttgtgtcctaatgtgtcctagtctggagtttgatgccttatctgctgctcagtgggtgtaaccttatcccttctgagcctcagtttccccattccccccaatagaaaaatggggatatttcctagggttgtcctgagaataaaatgagttctgtgtgacagttaactgccattaattaattagccgttctaaaagtttatttacaatatcaaaatctgacaagtaaatcagcattgttgtttggttctcataatgtattgtttcttaagaacattttgtaattgggctatgattttatgatctacagacgtctatttaaactataatgtcttggtttaaataggataatacaatctaagactggtttgtccttgagaaatttcagatttaatcagagaaaaatgtactgattgggatttgagtggacattgtggggtgtatttctggataccctcaagatcttcatttaaattttgatactttctattactagatctaatttgattttaagctctaagtttcacttttccattaaacggaaagcctccctgacattaactgaataaaacctcatgttgtgggacttctgtgtgtgtttagggttggcagcaggtgattaggagaaggcatatgacagtagagaggactggaatatagaggagaatataagcatgtagatgaggatgtggctgtatttgttttgagttctaggagcacagcaccaaatgtggtctcttaagggaagatgagggtagaagatgttaagatcccaggttccagcaactgatgccactgactaacaactagccacttgtcagaggaaggagagaacagtgtcttggggatgctgatgggttggagtgcctaatggctcattaaaagccatgaaaaagcaaagaaatcaaagaatacttttgatggagctttaggctatgctaagctctttaatgtaaacaagcacctctaacgctaaaagcacccttgcaagaaaggtaggagttactattcacatcctagagtcaaggaaaaagagaagatgtttgacttgctcaaagtcaagcaggtaatgtcagaattgaatctcaaatctatatctttatagatttgcagttctggtttatataataccaaagtcacatacaggtaatttcccaccattgaaccttcctgttggtgtgagatgccaaatctgtgaaaac

SEQ ID NO: 731112 - DNA, 1087 bp, Homo sapiens; identical to SEQ ID NO: 728756

SEQ ID NO: 731113 - DNA, 1135 bp, Homo sapiens
  misc_feature (7)..(7): n is a, c, g, or t
  misc_feature (16)..(16): n is a, c, g, or t
  misc_feature (35)..(36): n is a, c, g, or t
  misc_feature (40)..(40): n is a, c, g, or t
ggcgccnccccggccnccctagcaccccggcctcnncatnagaggcgggagacccggagcagcagcagaggcaggaggactaggaggaggaggaggagccgtcgcaggatgaaggatcggactcaagagctgcggagtgcgaaagacagtgatgatgaagaggaggtggtccacgtggatcgggaccacttcatggatgagttctttgaacaggtggaagagatccggggctgcattgagaaactgtcggaggatgtggagcaggtgaaaaaacagcatagcgccatcctggccgcacccaacccagatgagaagaccaaacaggagctggaggatcttcactgcagacatcaagaagacggccaacaaggttcggtccaaattgaaagcgattcgagcaaagcatttgaacaggaggaggggctgaaccgttcctccgcggacctgcgcatccgcaagacccagcactccacactgtcccggaagttcgtggaggtaatgaccgaatataacgcgacccagtccaagtaccgggaccgctgcaaggaccggatccagcggcaactggagatcactggaaggaccaccaccaacgaagaactggaagacatgctggagagcgggaagctggccatcttcacagatgacgtgagccgcgggtggggcgggctctgcttttggaaaatttttgcctcccctccctaagttcaggttgaactaaggtcctaagtccaccctggaaaaatgagcagcgggaagcctgagccgggaactggggaattccatgggagcggagcaggaaggcacccccatcagatgacggagtcgttcgtgtgccaggcactgttctaagcactttccatcttcacattcacccaccaactcatttaatactcacacatccccttcgaggaaaccccatttcacagatgaggaaaactggcccagagagatgaaatcacttggcaagatctcagagcgagggagagggccaggacttgaatcctgtctagtttcagagtcagaactctcgagccctaggatacacgacatactctgctactgaagcaagtcgtttcaccagagaactgatttgcctacattaaaagaaattttttttaattaaaaaaaactt

SEQ ID NO: 731114 - DNA, 956 bp, Homo sapiens
  misc_feature (7)..(7): n is a, c, g, or t
  misc_feature (16)..(16): n is a, c, g, or t
  misc_feature (35)..(36): n is a, c, g, or t
  misc_feature (40)..(40): n is a, c, g, or t
ggcgccnccccggccnccctagcaccccggcctcnncatnagaggcgggagacccggagcagcagcagaggcaggaggactaggaggaggaggaggagccgtcgcaggatgaaggatcggactcaagagctgcggagtgcgaaagacagtgatgatgaagaggaggtggtccacgtggatcgggaccacttcatggatgagttctttgaacaggtggaagagatccggggctgcattgagaaactgtcggaggatgtggagcaggtgaaaaaacagcatagcgccatcctggccgcacccaacccagatgagaagaccaaacaggagctggaggatcttcactgcagacatcaagaagacggccaacaaggttcggtccaaattgaaagcgattcgagcaaagcatttgaacaggaggaggggctgaaccgttcctccgcggacctgcgcatccgcaagacccagcactccacactgtcccggaagttcgtggaggtaatgaccgaatataacgcgacccagtccaagtaccgggaccgctgcaaggaccggatccagcggcaactggagatcactggaaggaccaccaccaacgaagaactggaagacatgctggagagcgggaagctggccatcttcacagatgacatcaaaatggactcacagatgacgaagcaggcgctgaatgagattgagacgaggcacaatgagatcatcaagctggagaccagcatccgcgagctgcacgatatgtttgtggacatggccatgctcgtagagagccagggagagatgattgaccgcatcgagtacaacgtggaacattctgtggactacgtggagcgagctgtgtctgacaccaagaaagcagtgaaatatcagagcaaggcccggaggaagaaaatcatgatcatcatttgctgtgtggtgctgggggtggtcttggcgtcatccat

SEQ ID NO: 731115 - DNA, 492 bp, Homo sapiens
attaccatatcatagaaatttacttttttaacacaaaaatggaatattgtgcactactcagtagcttgttttttttcgctcagtggtatctcatgaataaccttccatatttttttaatggctgcataatatttcaagtatgaatatagcataatttataggcagtctcctcttgaaaaaatgtataaatgggaaaatgctttcccaaataatgtggatgtgaaaattcttatacttctatacttggtatttctgttgagcaggttcctataatgggtatttctaggtcctagttcatgtgcattttaaattttgatcacttctgccaaactaccctcagaaaaggtttgaccaaagttgccatctcattaacaaattatgacctgtttctcttgtccgttgtcactggatagtgtcttttttttctccctgagacggggtcttgctttgttgcactccagcctgggcgacagaaaaaaaaccgtctcacaa

SEQ ID NO: 731116 - DNA, 600 bp, Homo sapiens
  misc_feature (592)..(592): n is a, c, g, or t
  misc_feature (596)..(599): n is a, c, g, or t
cgaggcagaaaaattctactttccatctgcttggctgcggaggaccttggggtgggctcagcgtgggggctgcaggcagaaatgggtccagaaggcaaggtcgaggttagagccaagcctgtgggcagggctacgggcagggggcggggaggaatgtgggtccaggcccagaggaaaaggttgaagttatagccaggcctgtgggcgaggccgcagcagggcggccataggggaaggagccaatgtgttatgcatgtagaaaatagatggcctggagcaactgaagaaccacaaaagaagtgaaacagccagttcctgccttaactgatgacgttccaccattgtgatttgttgctgccccaccccaactgatctcttgaccttgtgacattcttcttctggacgagtctcaggagttccccaccgagcaccttgtgacccccggccctgccagcaaaagataaccacctttaactttccactacctacccaaatcctataaaactgccccacccctatctccctttgctgacccctttctcgcactcagcccacttgcacccaagtgaataaacagccttgttgctaacanaaannnna

SEQ ID NO: 731117 - DNA, 962 bp, Homo sapiens; identical to SEQ ID NO: 293559

SEQ ID NO: 731118 - DNA, 1054 bp, Homo sapiens; identical to SEQ ID NO: 76789

SEQ ID NO: 731119 - DNA, 883 bp, Homo sapiens
ccagggatctgagcagctccttctagcatccttcatccttcaggtaccagccatccagacagtgcttgagctgcagaaactgagaccagacctctggcctggccctccccaggggcctcctttcctatagtcactgcttctgcatcagatactttcagctgcaactccctactgggtggggcacccatttcaggcagaaggttttggtaccctccactgaccctacacccagggctgctactgccgcttgtggcttcaggatgaaaggtgagaccccggtgaacagcactatgagtattgggcaagcacgcaagatggtggaacagcttaagattgaagccagcttgtgtcggataaaggtgtccaaggcagcagcagacctgatgacttactgtgatgcccacgcctgtgaggatcccctcatcacccctgtgcccacttcggagaaccccttccgggagaagaagttcttctgtgctctcctctgagctcccctgtcccttctcacaactcctcccttttccctctcctgggcccttccttaggtcagtaattgttgtgagccccttaggctccttgcatcccatccctaacccttgcctgaccatgtgaggttatctgaagcacaaggcccaccctcacctatctgtcgaccccatttcctaccacctttgtggccgaccccaagcaccccagagatatgaggcaccctttgctccacccacagcagggccccgtcagactctgccagcgcgtcctgcccgcttccctcggtgacctgctcagacaatggagagggatgggccaggttcttgctctcagtctcacctggagctactgggagggtaaagccatttgaagaataaagtcatccagagcctca

SEQ ID NO: 731120 - DNA, 1051 bp, Homo sapiens
  misc_feature (1051)..(1051): n is a, c, g, or t
ccagggatctgagcagctccttctagcatccttcatccttcaggtaccagccatccagacagtgcttgagctgcagaaactgagaccagacctctggcctggccctccccaggggcctcctttcctatagtcactgcttctgcatcagatactttcagctgcaactccctactgggtggggcacccatttcaggcagaaggttttggtaccctccactgaccctacacccagggctgctactgccgcttgtggcttcaggatgaaaggtgagaccccggtgaacagcactatgagtattgggcaagcacgcaagatggtggaacagcttaagattgaagccagcttgtgtcggataaaggtgtccaaggcagcagcagacctgatgacttactgtgatgcccacgcctgtgaggatcccctcatcacccctgtgcccacttcggagaaccccttccgggagaagaagttcttctgtgctctcctctgagctcccctgtcccttctcacaactcctcccttttccctctcctgggcccttccttaggtcagtaattgttgtgagccccttaggctccttgcatcccatccctaacccttgcctgaccatgtgaggttatctgaagcacaaggcccaccctcacctatctgtcgaccccatttcctaccacctttgtggccgaccccaagcaccccagagatatgaggcaccctttgctccacccacagcagggccccgtcagactctgccagcgcgtcctgcccgcttccctcggtgacctgctcagacaatggagagggatgggccaggttcttgctctcagtctcacctggagctactgggagggtaaagccatttgaagaataaagtcatccagagcctcaaaaaaaaaaaatcgaggcctctcggggcgcaaacgcaagaaggccggcacgctccgcccttcgacaagggacgcggccaagggctatcaagcggcatagcgcaccacccccaccgcacaccagcgccacaccaacacacacacacacacaaccacacgggaaagcggn

SEQ ID NO: 731121 - DNA, 560 bp, Homo sapiens; identical to SEQ ID NO: 728758

SEQ ID NO: 731122 - DNA, 492 bp, Homo sapiens
aaaaaaaatggaacatctttttcagtctttggacctcaaaatacataattcagttactaagtgcgtgcacttttgggcctcacatctggattaaaatcttgcctttgccacatactgaccatgagaacttgggcgagttactgaacctttctgggactcagtttcttcatctgttaaaatgaggttaagagtatgaaccttaccaacaggtaaaaatgtgtcatattaattttttcaacatcaacaaacacgtcaaaagatggagcactgaaagctgcattttaaacaaatgccccaggtccatactgactttatgagccgtaacacttacagcgaaggtctgcagcttcactcctgaagccagcgagaccacgaacccaccgggagaaacgaacaactccagacgcatcactttaagaactgtgacgctcaccgcgaaggtttgcaacttcactcctgagccaccgagaccacgaacccaccggaaggaag

SEQ ID NO: 731123 - DNA, 2767 bp, Homo sapiens; identical to SEQ ID NO: 322670

SEQ ID NO: 731124 - DNA, 539 bp, Homo sapiens
tataataaaatgatgggcatgtccaaatttgggtatctgcctttctcgtggttaggctgttttcatttcttcacatgtaccttgaaaggctttaaatcatagactttacctggcccttgattatgaaggtgatgttaaattgctacctctcttaatccttggagtgtttaaatgaatgttctgtaattgatggatcaaagtgtccgtgtcccatagctttgtactttccctttgctgccagttctcacattaggttagaagacatcattcagaatttttctgagtatataaatagtcctattgtgtaacctctattagtagcacatgcgcaaattagtgaagcaaaaaaagttgttgtgacagctttagttgaaagattgcatcgggctctgacctccttccttgcacatgtttacaagcatttgataaaatgattaaaccctaaggtggaattactactttctgctacagtacaatttgtgtgttaatggatattagtgttattgtaatgtggattaaaataaaattttttaaaaatt

SEQ ID NO: 731125 - DNA, 1341 bp, Homo sapiens; identical to SEQ ID NO: 386518

SEQ ID NO: 731126 - DNA, 579 bp, Homo sapiens
tgagcctttcttctttcccttttcccagaaaaggctcaacatcaactatatagccaacatgtccaaggtgtttaagaagaccagctccaatgggaaggtgagagaacctggcccagctgggcaaatgagagggcaaaagggatagctctccatctacctggggaaacgggacttcgtggaccatgtggacacggtggaacccattgacggtgttgtcctggttgatcctgagtacttaaaatgtcgaaagttgtttgtcatgttgacatgtgcctttcgctatggccgtgatgacttggaagtgattggtctgacgttccgaaaagatctgtatgtgcagaccctgcaagtggtcccagctgaatccagcagccctcaggggcccctcacagtcctacaggagcgactactgcacaagctaggggacaatgcctacccctttaccctgcagatggtgaccaacctgccctgttctgtgacactgcagccaggtcctgaagatgcaggaaagccctgtgggattgactttgaagtgaagagtttctgtgctgaaaacccagaggagacagtctccaagag

SEQ ID NO: 731127 - DNA, 1065 bp, Homo sapiens; identical to SEQ ID NO: 728763

SEQ ID NO: 731128 - DNA, 453 bp, Homo sapiens; identical to SEQ ID NO: 386476
  misc_feature (1)..(1): n is a, c, g, or t

SEQ ID NO: 731129 - DNA, 394 bp, Homo sapiens
  misc_feature (23)..(23): n is a, c, g, or t
  misc_feature (67)..(67): n is a, c, g, or t
  misc_feature (335)..(335): n is a, c, g, or t
  misc_feature (394)..(394): n is a, c, g, or t
tgtttatttattaagttatttancttatttattgaaaggtgaggagtgccacggctgccccgtttanacctttaacgtctggtcctcctgcgtgtcctcccctccactgcctgcatggggggcgcggggagtgacccaggcggggcctcaccgccccagggccgttgcctgctcagaccttgcaggctgtggagcaagaggccctgggtctctccaagcagctgcagaccccagctcgaattttgcacatggcggggtcccgggaagggtggggagcaggtgtccttcctgtcgtcgtctgccgtgtgccatctttcctggatcttgtagcgggngacacgcgtgcactgggaccacacagcaatacgagtccaacttaataaacacatttctn

SEQ ID NO: 731130 - DNA, 487 bp, Homo sapiens
tgcccctggccttgaaactgtggtttgtggactccaaagcccctatccttccacagtgctttctgtcttgttatcacatttccttggaggagagcccagccttggtggagagccctgctctggctttgtccctcggcatgagatggcaaaggatggtgctgctgggagaccctcacgtctgcacactgggggctgcttgccttctccattcctccttcaagtatctgagcagctcctgtgtgccagctgctggtctacaagatggatcggtccttggagatcatgctgtagcagaggaggcaggctgtagcccacacgccacaaccagccccctgcctgttcacacaaataaagttttattggaatacagccacacccatttcagtgcatattgtctgtggctgctttcctgctacaatagagagttgaatagttgggacagagacctatggcctgcaaagctgaactatttaccatctggctctca

SEQ ID NO: 731131 - DNA, 789 bp, Homo sapiens
gccggacgccgtcttacgtccccgcgctgtctcggcggcccaggaattcactgtctgtagcatctgctcctccacagagggaccctggaatggcgatggcactcccgatgcctggacctcaggctttcttgttgccaaaccagcactgatctccctattggagcaaggagaggagccgggggccttgattctgcaggtggctgaacagagcgtggccaaagccagcctgtgcacagaggaccctaatacactgcccagcagaagccaggaaggaagccctgccagctcagaaggtgggccaggagagaagggtgtggccggaaggttagccggtgggggtgctgcatcctcttggccccacggggagcaccctgtcacccctaacagatgaagagaagggtttctggtgtctccagatttttcaggcgcccaccatgttcctctcatccagacgtcggcacccaaggtggaagcaggtcatggcatgcccggcccagctgcagtccgagtgcagatcccatggcgagcgtgggatccagcccaaagcacaagccacgcacagcccgcccaggttgagtgggcaggtacctccaacagccagcccaggttgagtgggcaggtacctccaacagcctggagccgtgaggccttgcgcagggcgttgccggccgtggaggtctctggctggcaaagtggcaccgaaagagtcctgtgtcataaccagactcacttgtagcttctgttgctctccctagctatttgcaaagcatccaggataggttcatctaa

SEQ ID NO: 731132 - DNA, 665 bp, Homo sapiens
catataaactccatatccgattccccatatctaggttagaacgtctcttttctccctgtcaatcatgaggactaatgcagcacacaatgtatacagtactaataaaggctttggacttaccacttccttctttgaaatcccaactggtcgcatcttaggttggtttggggcagtcccttgtgggaactctcctgctattctgtctggttttgggccttactgcagttgtggttttgggtggttggaacaagcatatatttcaataaatacgttttttaaatgtccaaaaaacaacatgacacaactgcgggtcgagagccagttttagtttgtcccataagctttctgtctttgttcagtttagttacaatggagaaaacctctttaatgttgacaggatttctttagaaaaaaaccattgctatatctgaaagtccagtttcaactggcaaaattggacaaaagcagcaatttgaaaaaccaagctacttataacttgataaagtcctctataaactaagtcattatatttctccttttaaataaaccattgtaaatttaatgttcatatcagttgagtattagtttccagctggattcatgctgaataaagtccagaaactttctttgtgattcaaatagatgcacaggaagctgggaaggaa

SEQ ID NO: 731133 - DNA, 895 bp, Homo sapiens
acagaaattcttttgggaatgagttttagggccattaaaggacatgacctgaagtttcctctgaggccagtccccacaactcaatataaatgtgtttcctgcatatagtcaaagttgccacttctttttcttcatatcatcgatctctgctcttaaagataatcttggttttgcctcaaactgtttgtcactacaaactttccccatgttcctaagtaaaacaggtaactgcctctcaactatatcaagtagactaaaatattgtgtctctaatatcagaaattcagctttaatatattgggtttaactctttgaaatttagagtctccttgaaatacacatgggggtgatttcctaaactttatttcttgtaaggatttatctcaggggtaacacacaaaccagcatcctgaacctctaagtatgaggacagtaagccttaagaatataaaataaactgttcttctctctgccggtggaagtgtgcccctgtctattcctgaaattgcttgtttgagacgcatgagacgtgcagcacatgagacacgtgcagcagcctgtggaatattgtcagtgaagaatgtctttgcctgattagatataaagacaagttaaacacagcattagactatagatcaagcctgtgccagacacaaatgacctaatgcccagcacgggccacggaatctcctatcctcttgcttgaacagagcagcacacttctcccccaacactattagatgttctggcataattttgtagatatgtaggatttgacatggactattgttcaatgattcagaggaaatctcctttgttcagataagtacactgactactaaatggattaaaaaacacagtaataaaacccagttttccccttaaatccctagtt

SEQ ID NO: 731134 - DNA, 638 bp, Homo sapiens
gctcttgagaagaggagcttatcctgcattatccaggtaagccctaaatgcaatcatatgtatccttataagacaggggcagagggagatttgacatgaagggaaggcaatgtgaaggtgaaggcagagataggagtgatgtggccacaaatcgaagaatgccacggaatgccagtagccaccagatgattgagaagcaaggaacaaattctttcccagggcctccagagggagtatgtccctgctaatactttgatttcagacttctggcctccagactgataatgcatttctgtttaaagccccccagtttgtggttatttgttacagcagccgcaggaaactaatgtatcattctgaggtcccccaaatctcaacccattgcagttcaagatagagtccaaaatctcattagctgagaagtatggcgtaccagaaaagaagtgactactgtaataaaaggcatacatctaaagattagaagacatgatgaaaacatcttccatcagtgctatagtttgaatgtttgtcccctccaaaattcttgttgaaagataattcccagtgtaacagtattgagagatgggccctctaagaagtgattgagttatgaggactctgcccttatgaatggagta

SEQ ID NO: 731135 - DNA, 435 bp, Homo sapiens
cactaataagctcaataaatgtttggcctgtctagtataataaatatgtttttgtcagaatttgacccatttatgatgtaagcaaaaatgatatgtcttaatccatttgtctcacacactaattttataatttaaaagagcaatagtagtttcattcagaaagacaggtttaaggccaggtgcagtggctcacacccataatcccagcattttggatcacctgaggtcaggagttcaagaccagcctggccaaggtggtgaaaccccgtctctactaaaaatacaaacgtggcaggcgcgtgtaatcccatctacttgggaggctgagacaggagaatcgcttgaacccggggggcggaggttgcagtgaatcgagatcccaccactgcactccagcctgcgcgacagagtgagactccgtttcaaaaaaaaaaa

SEQ ID NO: 731136 - DNA, 602 bp, Homo sapiens
tctgttatatcaggaaactggtctgttttatattctactcatgtttctaaattgtttaaacttttatagttggaatacattccacttataatcagcaaaaataataaagatattaccaatttaaaaacatagtagtgattatctttaaattttttctatgagaagtattttccctacttcctttaaaagggcaagctaagttttttttttttttttttttgagatggagtctcactctgtcacccaggctggagtacagtggaacaatcttggctcactacaacctccacctcccaggttcaagcgactctcctgccccagcctcccaagtagctgggattacaggtgcacactgccatacccggctaatattttgtatttttagtagagacgaggtttcactgtgtaaaagggcaagctaagttttgtgttttaaaattggaggtgggatgaggggagcggtgggcttcctagggtagcatgcacaagatcagacaagttgttatgggttgaattgtgacccctaaaaagaaatattgaagtcttaacatccatatcttagaatacaccctcatttggaaataaagtacttgccaatataa

SEQ ID NO: 731137 - DNA, 667 bp, Homo sapiens
gtatttctcggcctgcgagaagtgtgtgctggcccaggtgtgcaaggcctggcggcgcgtgctgtaccagcccaagttctgggcaggcctcacgccggtgctgcatgccaaggagctctacaacgtgctgcctggtggcgagaaggagttcgtgaacctgcagggttttgccgccagaggcttcgagggcttctgcctggttggcgtctccgacctggacatctgtgagttcattgacaactatgcgctctccaagaagggtgtcaaagccatgagcctcaagcgctccaccatcacggacgcaggcctcgaggttatgcttgaacagatgcagggcgtggtgcgtctggagctgtcgggctgcaacgacttcaccgaggccgggctgtggtccagcctgagcgcgcgcatcacctcgctgagcgtgagtgactgcatcaacgtggccgacgacgccatcgcggccatctcgcagctgctgcccaacctggcggagctgagcctgcaggcctaccacgtgacggacacggcgctggcctacttcacggcgcgccagggccacagcacgcacacgctgcgcctgctctcctgctgggagatcaccaaccacggcgtggtcaacgtggtgcacagcctgcccaacctcaccgcgctcagcctctcgggc

SEQ ID NO: 731138 - DNA, 403 bp, Homo sapiens
gccgctggccacggacgagaagatcctcaatgggctcttctggtatttctcggcctgcgagaagtgtgtgctggcccaggtgtgcaaggcctggcggcgcgtgctgtaccagcccaagttctgggcaggcctcacgccggtgctgcatgccaaggagctctacaacgtgctgcctggtggcgagaaggagttcgtgaacctgcagggttttgccgccagaggcttcgagggcttctgcctggttggcgtctccgacctggacatctgtgagttcattgacaactatgcgctctccaagaagggtgtcaaagccatgagcctcaagcgctccaccatcacggacgcaggcctcgaggtgtgcaccaggctcgggggggacagggctggggggcaggggcgggca

SEQ ID NO: 731139 - DNA, 992 bp, Homo sapiens; identical to SEQ ID NO: 288005

SEQ ID NO: 731140 - DNA, 1014 bp, Homo sapiens
agcgtgggggtagaaggcctgttgtggagggaaaccacccatcctcctgcctcccaccaccaccatcatcctggctggacggagagggtgacgggggctgggaaggggcagctcatgttcaggtttccaggaggggctacctgttgactgtctttgcaggaagaagaaaacacctgagtgaccagatgtcccagctccaggtgccttgccagatggccagaaccacacctcttgaagagtgacagtgctgtggagcatggtttctgcacacctggaatgactggaaccccaaagactcaagaaggagctaaagatcttgaagtagacatgaataaaacagaagttactcccaggctgtggaccacctgtcgagatggagaagtccttctgaggctatccaaacacggaccaggccatgagaccccgatgaccatccctgaattttttcgagagtcagtcaaccgatttggaacttatccagccctcgcatccaagaatggcaaaaagtgggaaattctgaatttcaaccagtactatgaggcttgtcggaaggctgcaaaatccttgatcaagctgggtttggagcgtttccacggagttggtatcctggggtttaactctgcagagtggtttatcactgctgttggtgccatcctagccgggggtctttgtgttggtatttatgccaccaactctgccgaggcttgtcaatatgtcatcactcatgccaaagtgaacatcttgctggttgagaatgatcaacagttacagaaaatcctttcgattccacagagcagcctagagcccctaaaagcgatcatccagtacagactgccaatgaagaagaacaacaacttgtactcttgggatgatttcatggaacttggcagaagtatccctgacacccaactggagcaggtcatcgagagccagaaggcgaatcaatgcgcagtgctcatctacacttcagggaccacaggcatacccaagggagtgatgctcagtcatgacaac

SEQ ID NO: 731141 - DNA, 848 bp, Homo sapiens
agcgtgggggtagaaggcctgttgtggagggaaaccacccatcctcctgcctcccaccaccaccatcatcctggctggacggagagggtgacgggggctgggaaggggcagctcatgttcaggtttccaggaggggctacctgttgactgtctttgcaggaagaagaaaacacctgagtgaccagatgtcccagctccagtgctgtggagcatggtttctgcacacctggaatgactggaaccccaaagactcaagaaggagctaaagatcttgaagtagacatgaataaaacagaagttactcccaggctgtggaccacctgtcgagatggagaagtccttctgaggctatccaaacacggaccaggccatgagaccccgatgaccatccctgaattttttcgagagtcagtcaaccgatttggaacttatccagccctcgcatccaagaatggcaaaaagtgggaaattctgaatttcaaccagtactatgaggcttgtcggaaggctgcaaaatccttgatcaagctgggtttggagcgtttccacggagttggtatcctggggtttaactctgcagagtggtttatcactgctgttggtgccatcctagccggattccacagagcagcctagagcccctaaaagcgatcatccagtacagactgccaatgaagaagaacaacaacttgtactcttgggatgatttcatggaacttggcagaagtatccctgacacccaactggagcaggtcatcgagagccagaaggcgaatcaatgcgcagtgctcatctacacttcagggaccacaggcatacccaagggagtgatgctcagtcatgacaac

SEQ ID NO: 731142 - DNA, 2626 bp, Homo sapiens
  misc_feature (1940)..(1940): n is a, c, g, or t
agcgtgggggtagaaggcctgttgtggagggaaaccacccatcctcctgcctcccaccaccaccatcatcctggctggacggagagggtgacgggggctgggaaggggcagctcatgttcaggtttccaggaggggctacctgttgactgtctttgcaggaagaagaaaacacctgagtgaccagatgtcccagctccaggtgccttgccagatggccagaaccacacctcttgaagagtgacagtgctgtggagcatggtttctgcacacctggaatgactggaaccccaaagactcaagaaggagctaaagatcttgaagtagacatgaataaaacagaagttactcccaggctgtggaccacctgtcgagatggagaagtccttctgaggctatccaaacacggaccaggccatgagaccccgatgaccatccctgaattttttcgagagtcagtcaaccgatttggaacttatccagccctcgcatccaagaatggcaaaaagtgggaaattctgaatttcaaccagtactatgaggcttgtcggaaggctgcaaaatccttgatcaagctgggtttggagcgtttccacggagttggtatcctggggtttaactctgcagagtggtttatcactgctgttggtgccatcctagccggattccacagagcagcctagagcccctaaaagcgatcatccagtacagactgccaatgaagaagaacaacaacttgtactcttgggatgatttcatggaacttggcagaagtatccctgacacccaactggagcaggtcatcgagagccagaaggcgaatcaatgcgcagtgctcatctacacttcagggaccacaggcatacccaagggagtgatgctcagtcatgacaacatcacgtggattgcaggagcagtgacaaaggactttaaactgacagacaagcatgagacggtggttagctacctcccactcagccatattgcagcacagatgatggacatctgggtacccataaagattggggcgctcacatactttgctcaagcagatgctctcaagggcaccttggtaagtactctaaaggaggtaaaacctactgtcttcattggagtgcctcaaatttgggagaagatacatgagatggtgaagaaaaatagtgccaagtccatgggcttgaagaagaaggcattcgtgtgggcaagaaacattggcttcaaggtcaactcaaaaaagatgttggggaaatataatactcccgtgagctaccgcatggctaagactctcgtgttcagcaaagtcaagacatcccttggcttggatcactgtcactcttttatcagtgggactgcgcccctcaaccaagagactgccgagttctttctaagcttggacatacctataggcgagttgtatgggttgagtgagagctcgggaccccacacgatatccaaccagaataactacaggcttctaagctgtggcaagatcttgactgggtgtaagaatatgctgttccagcagaacaaggatggcattggggagatctgcctctggggtaggcacatcttcatgggctatctggaaagtgagactgaaactacagaggccatcgatgatgaaggctggctacactctggggatctgggccagctggacggtctgggtttcctctatgtcaccggccacatcaaagaaatccttatcactgctggtggtgaaaatgtgccccccattcctgttgagaccttggttaagaagaagatccccatcatcagtaacgccatgttagtaggagataaactgaagtttctgagcatgttgctgacgctgaagtgtgagatgaatcagatgagcggagaacctctggacaagctgaacttcgaggccatcaacttctgtcggggtctgggcagccaggcatccaccgtgactgagatngtgaagcagcaagaccccctggtctacaaggccatccagcaaggcatcaatgctgtgaaccaggaagccatgaacaatgcacagaggattgaaaagtgggtcatcttggagaaggacttttccatctatggtggagagctaggtccaatgatgaaacttaagagacattttgtagcccagaaatacaaaaaacaaattgatcacatgtaccactgactgctttgatggagctgctctcagctgttctgatgccttcagcaggaagacctcattgcaataagtgaaatgctgctctaggtagaagctctccctgctgtttttaagaagccacattcctcattggtcagtttcttgattgttcgtctgttggagaggtgctccctagaagaacctgccatacgtttcaaagcaataaaatcactgtatatctttctaaggaccttcaagtcatgactccagggaagcctattgggaagtctactaaaaactgcctgatttacaagaaagacctgaacttgtgggctcccatttgatttttttctcctcaggggactcagacattagaaagaaaaagcctcacagatttgaagaactggacccccaaatcaactcacctgcctggaagcaactgggaaacccttccaataagtcctgataataaagcacttcagggtcccatgtcttga

SEQ ID NO: 731143 - DNA, 2702 bp, Homo sapiens
  misc_feature (2016)..(2016): n is a, c, g, or t
agcgtgggggtagaaggcctgttgtggagggaaaccacccatcctcctgcctcccaccaccaccatcatcctggctggacggagagggtgacgggggctgggaaggggcagctcatgttcaggtttccaggaggggctacctgttgactgtctttgcaggaagaagaaaacacctgagtgaccagatgtcccagctccagtgctgtggagcatggtttctgcacacctggaatgactggaaccccaaagactcaagaaggagctaaagatcttgaagtagacatgaataaaacagaagttactcccaggctgtggaccacctgtcgagatggagaagtccttctgaggctatccaaacacggaccaggccatgagaccccgatgaccatccctgaattttttcgagagtcagtcaaccgatttggaacttatccagccctcgcatccaagaatggcaaaaagtgggaaattctgaatttcaaccagtactatgaggcttgtcggaaggctgcaaaatccttgatcaagctgggtttggagcgtttccacggagttggtatcctggggtttaactctgcagagtggtttatcactgctgttggtgccatcctagccgggggtctttgtgttggtatttatgccaccaactctgccgaggcttgtcaatatgtcatcactcatgccaaagtgaacatcttgctggttgagaatgatcaacagttacagaaaatcctttcgattccacagagcagcctagagcccctaaaagcgatcatccagtacagactgccaatgaagaagaacaacaacttgtactcttgggatgatttcatggaacttggcagaagtatccctgacacccaactggagcaggtcatcgagagccagaaggcgaatcaatgcgcagtgctcatctacacttcagggaccacaggcatacccaagggagtgatgctcagtcatgacaacatcacgtggattgcaggagcagtgacaaaggactttaaactgacagacaagcatgagacggtggttagctacctcccactcagccatattgcagcacagatgatggacatctgggtacccataaagattggggcgctcacatactttgctcaagcagatgctctcaagggcaccttggtaagtactctaaaggaggtaaaacctactgtcttcattggagtgcctcaaatttgggagaagatacatgagatggtgaagaaaaatagtgccaagtccatgggcttgaagaagaaggcattcgtgtgggcaagaaacattggcttcaaggtcaactcaaaaaagatgttggggaaatataatactcccgtgagctaccgcatggctaagactctcgtgttcagcaaagtcaagacatcccttggcttggatcactgtcactcttttatcagtgggactgcgcccctcaaccaagagactgccgagttctttctaagcttggacatacctataggcgagttgtatgggttgagtgagagctcgggaccccacacgatatccaaccagaataactacaggcttctaagctgtggcaagatcttgactgggtgtaagaatatgctgttccagcagaacaaggatggcattggggagatctgcctctggggtaggcacatcttcatgggctatctggaaagtgagactgaaactacagaggccatcgatgatgaaggctggctacactctggggatctgggccagctggacggtctgggtttcctctatgtcaccggccacatcaaagaaatccttatcactgctggtggtgaaaatgtgccccccattcctgttgagaccttggttaagaagaagatccccatcatcagtaacgccatgttagtaggagataaactgaagtttctgagcatgttgctgacgctgaagtgtgagatgaatcagatgagcggagaacctctggacaagctgaacttcgaggccatcaacttctgtcggggtctgggcagccaggcatccaccgtgactgagatngtgaagcagcaagaccccctggtctacaaggccatccagcaaggcatcaatgctgtgaaccaggaagccatgaacaatgcacagaggattgaaaagtgggtcatcttggagaaggacttttccatctatggtggagagctaggtccaatgatgaaacttaagagacattttgtagcccagaaatacaaaaaacaaattgatcacatgtaccactgactgctttgatggagctgctctcagctgttctgatgccttcagcaggaagacctcattgcaataagtgaaatgctgctctaggtagaagctctccctgctgtttttaagaagccacattcctcattggtcagtttcttgattgttcgtctgttggagaggtgctccctagaagaacctgccatacgtttcaaagcaataaaatcactgtatatctttctaaggaccttcaagtcatgactccagggaagcctattgggaagtctactaaaaactgcctgatttacaagaaagacctgaacttgtgggctcccatttgatttttttctcctcaggggactcagacattagaaagaaaaagcctcacagatttgaagaactggacccccaaatcaactcacctgcctggaagcaactgggaaacccttccaataagtcctgataataaagcacttcagggtcccatgtcttga

SEQ ID NO: 731144 - DNA, 724 bp, Homo sapiens
gtccaatgatgaaacttaagagacattttgtagcccagaaatacaaaaaacaaattgatcacatgtaccactgactgctttgatggagctgctctcagctgttctgatggtgagattcagttgcttggctttgctgggctatgcattcagagtccaagagagggctccactgtgtggcaggcagatctgtgactggaactgcagaaaacacacacatacacacatacatacacacacacacacacacacacacacacacacacacacactcttagttgcagtggattctgagtagcaggcttcaactcatgctgtctctactctaccagggtcatggtagggtgtgtaaactccttcagctggccaccaatgttgttagctgtgcttcctgccttttctatttgtttctagaaagtaggaggcaatgaatcccaaatgtctcattgggtcttatttggagaaggcctttgtcagaaactttagtggagaaagttctacttgccaggaactcaaggaatgaggtgtgttggcccattacacagataataagggatggaggcttgaacttccactatccaccgtttatcctctcttttccccaagacatgtgcagagggagcctccatgacaccatgaatcactgatagttattgaggtgttttttttttttttcttcactagatgcacagtgcaggcagaaagtagaatgcatcttcaattgtcc

SEQ ID NO: 731145 - DNA, 583 bp, Homo sapiens
gtggggagattttgggtgacagccaatttataaatggatcgattcactcgggaatattttcatcatatggtgactgtgggatcttggagactgaatgcacatattacgagaatccccatgtgataacttgtgtttctcctctttgcagccttcagcaggaagacctcattgcaataagtgaaatgctgctctaggtagaagctctccctgctgtttttaagaagccacattcctcattggtcagtttcttgattgttcgtctgttggagaggtgctccctagaagaacctgccatacgtttcaaagcaataaaatcactgtatatctttctaaggaccttcaagtcatgactccagggaagcctattgggaagtctactaaaaactgcctgatttacaagaaagacctgaacttgtgggctcccatttgatttttttctcctcaggggactcagacattagaaagaaaaagcctcacagatttgaagaactggacccccaaatcaactcacctgcctggaagcaactgggaaacccttccaataagtcctgataataaagcacttcagggtcccatgtcttga

SEQ ID NO: 731146 - DNA, 754 bp, Homo sapiens
ctccctcaggcatgtgacttttctatggcaggcccctttacagtcacattatgccccatccttcctataacatgggagagtctttctttttaggatttagtggctcaacaggtttggaaggacttgggaaggggaggcttccctgagttctgttgctgggagaagacaggcaattcagtaggtcaaatggcaaaggtaaaaccacagtggaaggcttctctgtggacagagactgaagggtgtggaggtatcgaagctgaacagcagcaggggtgcctgacagaatctcagctgccatcctcagggactcagaagcagccttttccgcttctgcagcaatcatctagaaaacatgtgacgaaagcaaagtgattgttcttcattccctgaaggcttcaccactatgcagtatgactcagcagacaagcactgagcatctactatgtggcaagcacgcctccacagccagtgagtgctgaagcccagctggcaacctcacatctttactgaaaaagaaagaatgcaggtcactgaatccaaggcaacctgtggaaagaagaattcagatgtcagtgggagcctccaggtgggaggagagcatgcctaaaccctggtggccattgttctgtactaaggaacaacattccctttgaaaggacattatttgcctgttgtatttaacttcacagtgccttgcaaagagttgtttaacttgcatggtgccacccaataaatatctgtgcaattgaaaaaa

SEQ ID NO: 731147 - DNA, 493 bp, Homo sapiens
ctccctcaggcatgtgacttttctatggcaggcccctttacagtcacattatgccccatccttcctataacatgggagagtctttctttttaggatttagtggctcaacaggtttggaaggacttgggaaggggaggcttccctgagttctgttgctgggagaagacaggcaattcagtaggtcaaatggcaaagcctccacagccagtgagtgctgaagcccagctggcaacctcacatctttactgaaaaagaaagaatgcaggtcactgaatccaaggcaacctgtggaaagaagaattcagatgtcagtgggagcctccaggtgggaggagagcatgcctaaaccctggtggccattgttctgtactaaggaacaacattccctttgaaaggacattatttgcctgttgtatttaacttcacagtgccttgcaaagagttgtttaacttgcatggtgccacccaataaatatctgtgcaattgaaaaaa

SEQ ID NO: 731148 - DNA, 344 bp, Homo sapiens
gcctggcctaaaatgggaaatttcatgtaaattttatctaaaacaatttttagattcatagagaaaaaaataatcagagtaatttgtccaaatgttatagtgattgtgttatggctgtcactgaatccaaggcaacctgtggaaagaagaattcagatgtcagtgggagcctccaggtgggaggagagcatgcctaaaccctggtggccattgttctgtactaaggaacaacattccctttgaaaggacattatttgcctgttgtatttaacttcacagtgccttgcaaagagttgtttaacttgcatggtgccacccaataaatatctgtgcaattgaaaaaa

SEQ ID NO: 731149 - DNA, 698 bp, Homo sapiens
ttactaagaagtgataaatatattcttaaatagcagcatgatttctactctgacattagcattcagagtcgctcctgggcccccagttctcagttaatcattgatgctgttgcttcccttatttctacccttcagacacattcatctaatctcactgcctttttagaaaatgagtttcgaaatcaaaaatactttttcaaccctttctattttgttgtgtcttctcttccatatcagggaggttgaaaatagagccagacaggcagaggagaagtttgaagatgcatatgagaaacttcatcatacccttataaaaaataaagatctagaggaattagtcatgacatcaagaaaggagtctaaagaagagaaagaaaatcaagatgaaagagaagtaaaagaagaagaagaacaacaagaagaagaagaagtcaggtcagcagaaaattcctcaaaatctccaaagaaaggtcactgaatccaaggcaacctgtggaaagaagaattcagatgtcagtgggagcctccaggtgggaggagagcatgcctaaaccctggtggccattgttctgtactaaggaacaacattccctttgaaaggacattatttgcctgttgtatttaacttcacagtgccttgcaaagagttgtttaacttgcatggtgccacccaataaatatctgtgcaattgaaaaaa

SEQ ID NO: 731150 - DNA, 433 bp, Homo sapiens
gttttgtattgatgagctgtgctcagtttttccgcttaggatataatctaagccccaactaataaatttgaacaatggcttgaagagccacactactgataataaagataaggggaattcatccaagtttataaaagagaagaattgattttgaaaagggtacaactgaccaaataagaacaacgcttaatgtattgcataaaaggtcactgaatccaaggcaacctgtggaaagaagaattcagatgtcagtgggagcctccaggtgggaggagagcatgcctaaaccctggtggccattgttctgtactaaggaacaacattccctttgaaaggacattatttgcctgttgtatttaacttcacagtgccttgcaaagagttgtttaacttgcatggtgccacccaataaatatctgtgcaattgaaaaaa

SEQ ID NO: 731151 - DNA, 657 bp, Homo sapiens
accaatactccagctatttgagcagttgttgcaaagggatggtaacagcaatggctctgagtaaatccactaactcacacaaaaatgctactgaagacctttatgaggtggataagttgaaggaggctgtaaaagaattcattgagcctgaaatagacgagtcttttaaagaagatgaagaagaaagtaaggaggataggaaacttcaggaggaaaataaagagagagcagaagaacaaccttcaacatctacagagaaggaaaaactcattcgattcattggagaagatgaaaatgttcattccaaacctctatttgaaacagatgtgttgtcttcctggagagagtcagctaagcaaggtacattggcccaaaaatatcttgaagcaatggctgtaattgaacatatgcaggagaagttactggaggttgaaaatagagccagacaggcagaggagaagtttgaagatgcatatgagaaacttcatcatacccttataaaaaataaagatctagaggaattagtcatgacatcaagaaaggagtctaaagaagagaaagaaaatcaagatgaaagagaagtaaaagaagaagaagaacaacaagaagaagaagaagtcaggtcagcagaaaattcctcaaaatctccaaagaaag

SEQ ID NO: 731152 - DNA, 891 bp, Homo sapiens
tgttactcacctttattttggtcgttcagtcagcaaagtggttttaggacgggtcaaatatttgattgtttgcaaactgtcgtaatggattgctgcagaaacatttggaaaaaaataagaaatttgaaaagcaagaaattgctgtaaatagggcacaagccctgtatatggattagatggtcgatatgccaaaaactacagatggtttctaagtagatttctcacctttccttggaggcatattgtagcttgctaaattgttaagcaaaaccacatgggccacaggaaggaattcctccaatcagctgtggggtttcgtgaagtgtgtgcatgaagcagaagttttcagagaaaatggtgaaacgtccttgaaagtgcctcagctgggagaggatcagaaaaaaatatctatcgggttttatcattttgaaagaagtacaaaatctctacgtatggaacctgcattaaataaatgagcatcaacatctccaggaggcaccccaggtgtagactccacctctcttacctcttccagatattcgaacaccattattgatagcattcttgttttgataaggtttctcctggcccacaatcattccagtgaatggtgcgtacacagtagatccagcagagcacaagacgtccacaccctggtgaggcctctgacttctaggatgtaaataagaacgaacagactgaggaactgccttaggggagctttactgcctgggaacatggtgttagcccactgtttgcagacgaggtaccaaagcttgaagctgccagaacatgttgggatgtcccaggatgcctcactctgtttagcccaattttaacctccctccccgcaggtgctaataaccatatcataaagatgaaagcatttaa

SEQ ID NO: 731153 - DNA, 1239 bp, Homo sapiens
ataatcatctaaaactggaaactgcccaaaagtccatctgaggaagaatagataaatagatgaaagtatacgcatataatggaatatcatgcatcagaaagaacgtggatacaaaaacataaactgcataatcacgatgtggaatgaaagaagacccaaagagtgcatgctgtttaattctatttataccatttttagaaacaggaagaactaatacatggtgttagaacttgagatagtgattatcttgctgggaataatgactaagtggtagcacaagggatctctgggatgtgggtgatgttctttttcttgatctgggtgctgattacacaggtgtgttcactttttgaaattcacggagctatacatggatgtgttgtgcacttttatgtgtgtatttataccttgatggagtaaccaaacaacaaaaccaatacctggagtaccaggagatctagctttacctaaaacttagaagctttcaaaaatatttcacattcaactcttgcagaagtgccagcatttatgatttgtgggatttgagtaaatgcaagtatctatccattatggttagcattgctgaaagtggctttgtttatagattgttaagcaaaaccacatgggccacaggaaggaattcctccaatcagctgtggggtttcgtgaagtgtgtgcatgaagcagaagttttcagagaaaatggtgaaacgtccttgaaagtgcctcagctgggagaggatcagaaaaaaatatctatcgggttttatcattttgaaagaagtacaaaatctctacgtatggaacctgcattaaataaatgagcatcaacatctccaggaggcaccccaggtgtagactccacctctcttacctcttccagatattcgaacaccattattgatagcattcttgttttgataaggtttctcctggcccacaatcattccagtgaatggtgcgtacacagtagatccagcagagcacaagacgtccacaccctggtgaggcctctgacttctaggatgtaaataagaacgaacagactgaggaactgccttaggggagctttactgcctgggaacatggtgttagcccactgtttgcagacgaggtaccaaagcttgaagctgccagaacatgttgggatgtcccaggatgcctcactctgtttagcccaattttaacctccctccccgcaggtgctaataaccatatcataaagatgaaagcatttaa

SEQ ID NO: 731154 - DNA, 1185 bp, Homo sapiens
ataatcatctaaaactggaaactgcccaaaagtccatctgaggaagaatagataaatagatgaaagtatacgcatataatggaatatcatgcatcagaaagaacgtggatacaaaaacataaactgcataatcacgatgtgtagaaacaggaagaactaatacatggtgttagaacttgagatagtgattatcttgctgggaataatgactaagtggtagcacaagggatctctgggatgtgggtgatgttctttttcttgatctgggtgctgattacacaggtgtgttcactttttgaaattcacggagctatacatggatgtgttgtgcacttttatgtgtgtatttataccttgatggagtaaccaaacaacaaaaccaatacctggagtaccaggagatctagctttacctaaaacttagaagctttcaaaaatatttcacattcaactcttgcagaagtgccagcatttatgatttgtgggatttgagtaaatgcaagtatctatccattatggttagcattgctgaaagtggctttgtttatagattgttaagcaaaaccacatgggccacaggaaggaattcctccaatcagctgtggggtttcgtgaagtgtgtgcatgaagcagaagttttcagagaaaatggtgaaacgtccttgaaagtgcctcagctgggagaggatcagaaaaaaatatctatcgggttttatcattttgaaagaagtacaaaatctctacgtatggaacctgcattaaataaatgagcatcaacatctccaggaggcaccccaggtgtagactccacctctcttacctcttccagatattcgaacaccattattgatagcattcttgttttgataaggtttctcctggcccacaatcattccagtgaatggtgcgtacacagtagatccagcagagcacaagacgtccacaccctggtgaggcctctgacttctaggatgtaaataagaacgaacagactgaggaactgccttaggggagctttactgcctgggaacatggtgttagcccactgtttgcagacgaggtaccaaagcttgaagctgccagaacatgttgggatgtcccaggatgcctcactctgtttagcccaattttaacctccctccccgcaggtgctaataaccatatcataaagatgaaagcatttaa

SEQ ID NO: 731155 - DNA, 1079 bp, Homo sapiens; identical to SEQ ID NO: 416865

SEQ ID NO: 731156 - DNA, 438 bp, Homo sapiens
gcaaatcaaatagctatccatggaatattagaacttgacttgctccatcctcttaaactttttgtgtctcacactaaagaaatgagagatgcagaattctaaggctaaatagctaggaagtattcattcaaacttgaatattcttcaaagagagtgtgggggcaactctaatcagaggaagaaactaaaggaagtcactggcagggccatgggctaatatatgtgctggcaagtcttccaatgagatccggacgtgtgaccgccatggctgtggacagtactctgctcaaagaagtcagaggcctcaccagggtgtggacgtcttgtgctctgctggatctactgtgtacgcaccattcactggaatgattgtgggccaggagaaaccttatcaaaacaagaatgctatcaataatggtgttcgaatatctggaagag

SEQ ID NO: 731157 - DNA, 488 bp, Homo sapiens
ataaggcccagccccgccttctgctgttgccgcagcaacccagaaagcgtcatggctgccgccggccaggaaaaagggtatttgacacagactgcggcagcctagacaagtcaccgtcactttcgccacagctagcagctcccatccgagggaggcctaagaagtgtctggtctatccgcatgcgccgaagagctcccgcttgtctcgttccgttctgcgttggcttcagggtctggatctcagcttcttccccaggaacatcaacagaaatattctgtatatattacccctgggaacttgaattatcatcctttgaaaacgggacctctttaaaagtcaagttggataactgggcacagttggagaagttcctggcaagaaaaaaatttaaattacctaaagaactaatccatggaacaattcattgtaaagctggagtgcctgaaatattgatagaagaggtttacactttattaacacatcgaga

SEQ ID NO: 731158 - DNA, 1085 bp, Homo sapiens; identical to SEQ ID NO: 464531

SEQ ID NO: 731159 - DNA, 1174 bp, Homo sapiens
ataaggcccagccccgccttctgctgttgccgcagcaacccagaaagcgtcatggctgccgccggccaggaaaaagggtatttgacacagactgcggcagcctagacaagtcaccgtcactttcgccacagctagcagctcccatccgagggaggcctaagaagtgtctggtctatccgcatgcgccgaagagctcccgcttgtctcgttccgttctgcgttggcttcagggtctggatctcagcttcttccccaggaacatcaacagagatttttcaaatggcttcctaattgcagaaatattctgtatatattacccctgggaacttgaattatcatcctttgaaaacgggacctctttaaaagtcaagttggataactgggcacagttggagaagttcctggcaagaaaaaaatttaaattacctaaagaactaatccatggaacaattcattgtaaagctggagtgcctgaaatattgatagaagaggtttacactttattaacacatcgagaaattaaaagtatccaggatgactttgtgaatttcacggactatagctaccagatgcgtttacccctggtttccaggtctacagtttcgaagtctattaaagataacattaggttatcagaattactaagcaatcccaacatgctgaccaatgaacttaaagcggagttcctcatccttttacatatgttgcaaagaaaattaggcagaaaattgaatccagaatggtttgatgtgaaaccaacagtgggagaagttactctcaatcaccttcctgcccaagcctctgggcgcagatataatttaaaagttaaaagaggaagagttgtccctgttttaccaaatataggtagtggtggcagttcacatagagaaatacatgtgaagcaagctggacaacattcttattactctgctatgaaacctatcagaaacatggacaagaaaccttgaaaagcacctgtcaaatggctttgaagaagtgatgccaccatctctagccataataaagaaacagaatcacctagtattggatgtatttcaataataaatagagtggtgtcttttccataattgtgttaaagaacatttcttttccattcaatttgtttattaaactcctatgccaggcattgttgaaaatacaaaattaaataaat

SEQ ID NO: 731160 - DNA, 632 bp, Homo sapiens
gcacactataaatgtctttccttatctgtgtgtactcttatctcactgttctattttttctcctcatttatattaactctttcttacctttttttctgaacttctaggccttctctttccagaactggtggaagacaaatgaaacggccaagatggtaagaaacaagccgcatttctccttggggagactgataatttaaaaggtttgttgtgtcagaaacattcccagcttcatcaccaaccctttccttccacctctgcccactggagaccacttatatcccgaagcggacgcggcagctgaagtcaggaaaccatgcatcacattagcaggagccaactgcagactttaaactccgttcaacatgtggatgcggcagagaaatgacctgtccagacaagccggggcagctcataaactggttcatctgctccctgtgcgtcccgcgggtgcgtaagctctggagcagccggcgtccaaggacccggagaaaaccttctgctgggcactgcgtgtgccatctacttgggcttcctggtgagccaggtggggagggcctctctccagcatggaagggcggctgagaaggggccacatcgcagccgcgacaccgccgagccatccttccctg

SEQ ID NO: 731161 - DNA, 1165 bp, Homo sapiens
gcacactataaatgtctttccttatctgtgtgtactcttatctcactgttctattttttctcctcatttatattaactctttcttacctttttttctgaacttctaggccttctctttccagaactggtggaagacaaatgaaacggccaagatggtaaggtgagtagttcctgggaacgcttgtgctctaaccccaagttatgtgggatggacactcgaggggtgatggcattcctcattttacaagttacttgcttggctgcggctgctccaccaagatagcaaacattctcgatcttttgaacttcatgagactgacatttctgagtctgtttgcgaacaggacactagagggctcccaggggttaaaaataagtggaaatttatttgaatgaaaactgattctctacggcatttcttttttccgaatttaaaattaaagtttattttgttaactattgtttttaaaagctttgtatctcttaaaaccatgcagcagtcagtttccaagttttgctttgcaatcagtagttttcaagggagcttttaaagctgaactgaaatgtttgaaatgtggaacactcttgaccatgaaatatgttctacttacatgcctcagcctttaaaagttctttgcattagagtcaaggattacattcttcctggagccaagcatggggccagctgtgtaaaaacaagccgcatttctccttggggagactgataatttaaaaggtttgttgtgtcagaaacattcccagcttcatcaccaaccctttccttccacctctgcccactggagaccacttatatcccgaagcggacgcggcagctgaagtcaggaaaccatgcatcacattagcaggagccaactgcagactttaaactccgttcaacatgtggatgcggcagagaaatgacctgtccagacaagccggggcagctcataaactggttcatctgctccctgtgcgtcccgcgggtgcgtaagctctggagcagccggcgtccaaggacccggagaaaaccttctgctgggcactgcgtgtgccatctacttgggcttcctggtgagccaggtggggagggcctctctccagcatggaagggcggctgagaaggggccacatcgcagccgcgacaccgccgagccatccttccctg

SEQ ID NO: 731162 - DNA, 1184 bp, Homo sapiens
  misc_feature (3)..(3): n is a, c, g, or t
  misc_feature (23)..(23): n is a, c, g, or t
agntccaaataggagtgaattangctggccacatagtgttacttccacagacttgtaagaaccagttctgaggagaacaggtgattttctcccaaaagcacttttcctttttttctgaacttctaggccttctctttccagaactggtggaagacaaatgaaacggccaagatggtaaggtgagtagttcctgggaacgcttgtgctctaaccccaagttatgtgggatggacactcgaggggtgatggcattcctcattttacaagttacttgcttggctgcggctgctccaccaagatagcaaacattctcgatcttttgaacttcatgagactgacatttctgagtctgtttgcgaacaggacactagagggctcccaggggttaaaaataagtggaaatttatttgaatgaaaactgattctctacggcatttcttttttccgaatttaaaattaaagtttattttgttaactattgtttttaaaagctttgtatctcttaaaaccatgcagcagtcagtttccaagttttgctttgcaatcagtagttttcaagggagcttttaaagctgaactgaaatgtttgaaatgtggaacactcttgaccatgaaatatgttctacttacatgcctcagcctttaaaagttctttgcattagagtcaaggattacattcttcctggagccaagcatggggccagctgtgtaaaaacaagccgcatttctccttggggagactgataatttaaaaggtttgttgtgtcagaaacattcccagcttcatcaccaaccctttccttccacctctgcccactggagaccacttatatcccgaagcggacgcggcagctgaagtcaggaaaccatgcatcacattagcaggagccaactgcagactttaaactccgttcaacatgtggatgcggcagagaaatgacctgtccagacaagccggggcagctcataaactggttcatctgctccctgtgcgtcccgcgggtgcgtaagctctggagcagccggcgtccaaggacccggagaaaaccttctgctgggcactgcgtgtgccatctacttgggcttcctggtgagccaggtggggagggcctctctccagcatggaagggcggctgagaaggggccacatcgcagccgcgacaccgccgagccatccttccctg

SEQ ID NO: 731163 - DNA, 541 bp, Homo sapiens
cccattttttttcttagaggaaatgtttgatagtttctcctaaaaaattaataattggcacaaaagactagttttgtgtcaaaagtagttttgagttttatctaaagactgacattggcttgaagttgggctttccagattcaaaaatctgccccagatgagatttagatgcagagggttagtgtccttttccccagggggatggccgtgatgatttgttcaagattgtgttatagtagctgccccttttaagccagctgtgtgtgtgtggtggggggtgggcagtgtgtattccacatcaacatcctagaaagaacgaataaacatttagtgatctcactgtttctacttacatttggtataatgtactgtttttattggtgctattacctatgttaatagggcactttacaaaattttcaagaacgtttttattaaaattatttcaaagacttctttcttaaaatatgattttaccatgtaaaaaattatactaaggtagaagaatattcgttctttctcattttctgaaaaaagaaaa

SEQ ID NO: 731164 - DNA, 656 bp, Homo sapiens
tcaacatggccctggagctctacatggacctgctgtcagcaccctgccgtgccgtctacatcttctcgaagaagcatgacatccagttcaactttcagtttgtggatctgctgaaaggtcaccaccacagcaaagaatacattgacatcaaccccctcaggaagctgcccagcctcaaagatgggaaatttatcttaagtgaaagttgctgatcccaaagataacaggggaggaagtttcagctgagaagatggagcatgcagtggaagaggtgaagaacagcctgcagctctttgaggagtattttctgcaggataagatgttcatcaccgggaaccaaatctcactggctgacctggtggccgtggtggagatgatgcagcccatggcagccaactataatgtcttcctcaacagctccaagctagctgagtggcgtatgcaggtggagctgaatattggctctggcctctttagggaggcccatgatcgactaatgcagttggccgactgggacttttcaacattggattcaatggtcaaggagaatatttctgagttgctgaagaagagcaggtgaccctaggcgcagcctgtcccgcagggcctggctggcttagcaatctgagccaccttccttaaaggaaatgttaaaa

SEQ ID NO: 731165 - DNA, 718 bp, Homo sapiens
ttgctgatcccaaagataacaggggaggaagtttcagctgagaagatggagcatgcagtggaagaggtgaagaacagcctgcagctctttgaggagtattttctgcaggataagatgttcatcaccgggaaccaaatctcactggctgacctggtggccgtggtggagatgatgcaggccagcagcacagcgatgcctttgcccaggtgaaccccctgaggaaggtgccgggccttgaaggatggggacttcaccttggctgagagatttagtctcttactggttatgtatgctgcacctgaggagtagcagcactgccaaggacactgagtgtcttgtctgtgcagagcttcacatgaagctggagagaagggactggggcaagagggaaagataaaaaggggcaaatggctctcctcacctggacccacaggggtataccaaaggtgccacggatgcagtcggcatgccagcccaggtactcatgaacacgggcacgagcctgcaggtcagatggataccagtggtccggcgtctggtacttacagctcagaaggcaagctaaggttcagagaggctgtgatcccttcaaggccactcagtccacagcattctctggtggcagacgctgcaggaggaggagtctcactctgtcgcccaggctggagtgcagtggcacaatcttggctcactgccaactccacctcctgggttcaag

SEQ ID NO: 731166 - DNA, 3114 bp, Homo sapiens
cacccggcaaacagcagcaggaggagccgctagagcagctgctcatgggcagagctgccctcgggcaactcctgccaccaccccctccccagggagcccaaggcaggggaggctcagcatggaatgaaacaggggagtgagggacacaaggaggtgggaagtgggagggtcccagccccaccaagtacgcagagaacccctcgttgtcctggacaccacaggggcacctgcaggctgggagaccaggtcctctgtgcatgggcccgggaggcagacctgccctaagggtgatgcacaggctacaggtgctgcacgctccagcgcccactctagacatcagcctccaggttgactaagggtcaggtcatgtttgaaaccatgcttggctggaccaggacccatggcaagagcacctgggcaccagtgtttagccctggtctgcaggaaggaggacagcagactttaggaccccacagcacggcagtgctgaccatttcacccacttggcctccttgagaaatatggatggggacccctctggggatgggcaaggccttccaggataggctcagttttggtcccctgctttttgaggttgggttaaaattccgaccatggcagaggaagcacagctcaggttcccacacctcacttttcacagcctctgagggcagcagtgcacgtggaggagacgtctcccatgaggccaaggcctccagtgctcaccgatgccctctgcgaagttggggtagaactcgtcagtgaagaggggctcgggcagctcacggaaatacagcttcagcgtgcctgcgatggcgttcacgtccatctcgctcatcatcaccgacacgtccttgttatctggaaagagcacggaaatgcagcggcctccttgaagatcctgataaatgaagaaaagacacagagaaggatgtgacatgcctgggccgtggagcactctgagatctcatcgcggacaccactgcccacacctccatcccgtcctgcgcaggccgacactcactgacgttgaaggctgccttcagtgcctggatgtctgcggccaccccagacatgcggtagatgcccacctcctccatgcctcggcgctcgatctcctccacgcactggcgcacgatgtagggcaccttggacctctctctcctgcgggaggagggaatgttctcagtgtcctaacagccctgcttgggccataacacaggagacctgctccctatgtgcacacccggaggtggggtgaggacggtgatgaaggtacccaggtctggggctgcacacagagccttctgcatgcctgtcctccctctgcaagctctgtcctcattgcatgtgctttctcaggaacctttcaagcggccagaacccctgcaaatcacacatgacctttgtgggaaggtcaggaggcctgtctaagtcaagtcagcacgggaagggcatctgacagattccaggcctggggtgagcagcctgtgcccccggctgggaggtcagacccggtgttggtcctgccacccacgtgctgtgtgagaggagaatccgtgacccctgccctgggccttaacacacatccgacgaatgaatgaagggttgcctcagcaccggtgctccaagtcctgcgatgctaagtgcttttctcctctgagtcttagcaatggacaattccaatacctccacacaggacactagagtaagaatccttcacagttagaacgcagtgctgtgcggaggccttaacttgagttctgttttgcacctggatttaccagcacatcaaagctgcttcgcaagccccctcatcagcagggctcatgtgggggagctgctgatggagtcctcgctgctcatgcccacagccctcccagagtgctatgcgagtggctgccgtgcagttgggggtggggcgtggtgtttagacacagataggagtccagggtatgactgatggaggccccggcccacgtgaccagcaaggtcagaggcccagccagattccatcctgaggaagcaagtgaattctcagaggaagtggtctgtgtctgcatgaactgctctcaaaccaacaaataggcttctcttggcaactgactcgtgacaaagggttcaagattgtttgaaaaaaaaaaaggggggggggggacagggaggcagtaggtcctggaaaagtaaattctttattttacaataagaaagtgattacatattttatttttttttacaatggtggaaaattagaagtgattgtgaaaatgatgtctacccgccttgctgatgagtaggatgtgatttggctctttaggaaactgaatttgcagaacttaagaatattgatttataaagggcatggccattgacccagtccatcttatgcaaatctggatgccataaataatatttaaaaatgaaagtattggggtggaggttgcagtgagcggagatcgccccactacactccagcctggtcaacagagtgagactctgtctcaaaacaaaaaaaaaaaaaaaaaaagaagaagtcattcccaacattgctcatcaaattatgaccataaatttccaggatcagactaacggctaaagagactgatgcatcaacaccaggcagagaataaagcagattttttttgttttgttttggagagcctctaggaacttgaaaaatacatatgccacactcttaagacccggtggttcttaatcagggatgttcattaaaatgctggaaaactctaaagatttccaggtcccatccaaggagattttgcttctgattgactggctagtggcctggccattggtattttgaaaaatccctccaagtgattcttttacatcccagctagaaaaccctaaattaaaggtgaaaaaccagacaccaagtggcatttaaataaatgtcaactttaactccacaaagcatctggttgcatgtggacagaaagagaaggaaagagggccctatatctggataacttggaaatgtgctccccctagcaagatatctaccaaaattaaaaccatatttgaggatgctggcactgtgagcaatatataaatgatgcatgtaacatcatttaatatgatcttatttttaaa

SEQ ID NO: 731167 - DNA, 2255 bp, Homo sapiens
tgtttgtacaactcttgttttctcttttttaaaaataataaaacagtaaatgaagaaaagacacagagaaggatgtgacatgcctgggccgtggagcactctgagatctcatcgcggacaccactgcccacacctccatcccgtcctgcgcaggccgacactcactgacgttgaaggctgccttcagtgcctggatgtctgcggccaccccagacatgcggtagatgcccacctcctccatgcctcggcgctcgatctcctccacgcactggcgcacgatgtagggcaccttggacctctctctcctgcgggaggagggaatgttctcagtgtcctaacagccctgcttgggccataacacaggagacctgctccctatgtgcacacccggaggtggggtgaggacggtgatgaaggtacccaggtctggggctgcacacagagccttctgcatgcctgtcctccctctgcaagctctgtcctcattgcatgtgctttctcaggaacctttcaagcggccagaacccctgcaaatcacacatgacctttgtgggaaggtcaggaggcctgtctaagtcaagtcagcacgggaagggcatctgacagattccaggcctggggtgagcagcctgtgcccccggctgggaggtcagacccggtgttggtcctgccacccacgtgctgtgtgagaggagaatccgtgacccctgccctgggccttaacacacatccgacgaatgaatgaagggttgcctcagcaccggtgctccaagtcctgcgatgctaagtgcttttctcctctgagtcttagcaatggacaattccaatacctccacacaggacactagagtaagaatccttcacagttagaacgcagtgctgtgcggaggccttaacttgagttctgttttgcacctggatttaccagcacatcaaagctgcttcgcaagccccctcatcagcagggctcatgtgggggagctgctgatggagtcctcgctgctcatgcccacagccctcccagagtgctatgcgagtggctgccgtgcagttgggggtggggcgtggtgtttagacacagataggagtccagggtatgactgatggaggccccggcccacgtgaccagcaaggtcagaggcccagccagattccatcctgaggaagcaagtgaattctcagaggaagtggtctgtgtctgcatgaactgctctcaaaccaacaaataggcttctcttggcaactgactcgtgacaaagggttcaagattgtttgaaaaaaaaaaaggggggggggggacagggaggcagtaggtcctggaaaagtaaattctttattttacaataagaaagtgattacatattttatttttttttacaatggtggaaaattagaagtgattgtgaaaatgatgtctacccgccttgctgatgagtaggatgtgatttggctctttaggaaactgaatttgcagaacttaagaatattgatttataaagggcatggccattgacccagtccatcttatgcaaatctggatgccataaataatatttaaaaatgaaagtattggggtggaggttgcagtgagcggagatcgccccactacactccagcctggtcaacagagtgagactctgtctcaaaacaaaaaaaaaaaaaaaaaaagaagaagtcattcccaacattgctcatcaaattatgaccataaatttccaggatcagactaacggctaaagagactgatgcatcaacaccaggcagagaataaagcagattttttttgttttgttttggagagcctctaggaacttgaaaaatacatatgccacactcttaagacccggtggttcttaatcagggatgttcattaaaatgctggaaaactctaaagatttccaggtcccatccaaggagattttgcttctgattgactggctagtggcctggccattggtattttgaaaaatccctccaagtgattcttttacatcccagctagaaaaccctaaattaaaggtgaaaaaccagacaccaagtggcatttaaataaatgtcaactttaactccacaaagcatctggttgcatgtggacagaaagagaaggaaagagggccctatatctggataacttggaaatgtgctccccctagcaagatatctaccaaaattaaaaccatatttgaggatgctggcactgtgagcaatatataaatgatgcatgtaacatcatttaatatgatcttatttttaaa

SEQ ID NO: 731168 - DNA, 2091 bp, Homo sapiens
acagcaggttgagcatgcagctcttctttgcaactgggtctgaaagagctgcaggaggcagtgggtcactcccctgggttacgacaagccggagacctctcccgaggtggtcacatggagcgccagggacacgagtccttgcgcagtttaggcttgtcatcatcgtcacacccacagcgctggccgccagtgaggaccctgtgaggggcacctgtgtgggaggaagcacagctcgggttcccacacctcacttttcacagcctctgagggcagcagtgcacgtggaggagacgtctcccatgaggccaaggcctccagtgctcaccgatgccctctgcgaagttggggtagaactcgtcagtgaagaggggctcgggcagctcacggaagtacagcttcagcatgcctgcgatggcgttcacgtccatctcgctcatcatcactgacacgtccttgttatctggaaagagcacggaaatgcagcggcctccttgaagatcctgataaatgaagaaaagacacagagaaggatgtgacatgcctgggccatggagcactctgagatctcatcgtggacaccactgcccacacctccatcccgtcctgcgcaggccgacactcactgacgttgaagcctgccttcagtgcctggatgtctgcggccaccccagacatgcggtagatgcccacctcctccatgcctcggcgctcgatctcctccacgcactgacgcacgatgtagggcaccttggacctctctctcctgcgggaggagggaatgttctcagtgtcctaacagccctgcttgggccataacacaggagacctgctccctatctgcgcacccggaggtggggtgaggacggtgacgaaggtacccaggtctggggctgcacacagagccttctgcatgcctgtcctccctctgcaagctctgtcctcattgcatgtactttctcaggaacctttcaagcggccagaacccctgcgaatcacacatgacctttgcgggaaggtcaggaggcctgtctaagtcaagtcagcacgggaagggcatctgacagattccaggcctggggttagcagcctgtgcccccggctgggaggtcagacccggtgttggtcctgccacccacgtgctgtgtgagaggagaatccctgacccctgccctgggccttaacacacatccgacgaatgaatgaagggttgcctcagcaccggtgctccaagtcctgcgatgctaagtgcttttctcctctgagtcttagcaatggacaattccaatacctccacacaggacactagagtaagaatccttcacagttagaacgcagtgctgtgcggaggccttaacttgagttctgttttgcacctggatttaccagcacatcaaagctgcttcgcaagccccctcatcagcagggcttatgtgggggagctgctgatggagtcctcgctgctcatgcccacagccctcccagagtgctatgcgagtggctgccgtgcagttgggggtggggcgtggtgtttagacacagataggagtccagggtatgactgatggaggccccggcccacgtgaccagcaaggtcagaggcccagccagattccatcctggggaagcaaatgaattctcagaggaagtggtctgtgtctgtatgaactgctctcaaaccaacaaataggcttctcttggcaactgactcgtgacaaagggttcaagattgtttgaaaaaaaaaaaaaagggggggaacagggaggcagtaggtcctggaaaagtaaattctttattttacaataagaaagtgattacatattttattttttttacaatggtggaaaattagaagtgattgtgaaaatgatgtctacccgccttgctgatgagtaggatgtgatttggctctttaggaaactgaatttgcagaacttaagaatattgatttataaagggcatggccattgacccagtccatcttatgcaaatctggatgccataaataatatttaaaaatgaaagtattggggtggaggttgcagtgagcggagatcgccccactacactccagcctggtcaacagagtgaga

SEQ ID NO: 731169 - DNA, 909 bp, Homo sapiens
  misc_feature (4)..(4): n is a, c, g, or t
  misc_feature (8)..(8): n is a, c, g, or t
  misc_feature (11)..(11): n is a, c, g, or t
  misc_feature (35)..(35): n is a, c, g, or t
ttantctnttntaggaccgccgccggttcggaatncccgggtgcgacccacgcgtccggctaagtgcttttctcctctgagtcttagcaatggacaattccaatacctccacacaggacactagagtaagaatccttcacagttagaacgcagtgctgtgcggaggccttaacttgagttctgttttgcacctggatttaccagcacatcaaagctgcttcgcaagccccctcatcagcagggcttatgtgggggagctgctgatggagtcctcgctgctcatgcccacagccctcccagagtgctatgcgagtggctgccgtgcagttgggggtggggcgtggtgtttagacacagataggagtccagggtatgactgatggaggccccggcccacgtgaccagcaaggtcagaggcccagccagattccatcctggggaagcaaatgaattctcagaggaagtggtctgtgtctgtatgaactgctctcaaaccaacaaataggcttctcttggcaactgactcgtgacaaagggttcaagattgtttgaaaaaaaaaaaaaagggggggaacagggaggcagtaggtcctggaaaagtaaattctttattttacaataagaaagtgattacatattttattttttttacaatggtggaaaattagaagtgattgtgaaaatgatgtctacccgccttgctgatgagtaggatgtgatttggctctttaggaaactgaatttgcagaacttaagaatattgatttataaagggcatggccattgacccagtccatcttatgcaaatctggatgccataaataatatttaaaaatgaaagtattggggtggaggttgcagtgagcggagatcgccccactacactccagcctggtcaacagagtgaga

SEQ ID NO: 731170 - DNA, 562 bp, Homo sapiens
cactcataggtgggaactgaacaatgagaacacttggacacaggaaggggaacatcacacaccagggcctgttgtggggtgggaagagtggggaagcaaatgaattctcagaggaagtggtctgtgtctgtatgaactgctctcaaaccaacaaataggcttctcttggcaactgactcgtgacaaagggttcaagattgtttgaaaaaaaaaaaaaagggggggaacagggaggcagtaggtcctggaaaagtaaattctttattttacaataagaaagtgattacatattttattttttttacaatggtggaaaattagaagtgattgtgaaaatgatgtctacccgccttgctgatgagtaggatgtgatttggctctttaggaaactgaatttgcagaacttaagaatattgatttataaagggcatggccattgacccagtccatcttatgcaaatctggatgccataaataatatttaaaaatgaaagtattggggtggaggttgcagtgagcggagatcgccccactacactccagcctggtcaacagagtgaga

SEQ ID NO: 731171 - DNA, 426 bp, Homo sapiens
ggttttcatacataaagatcttttgagacattgaggatgagttgactgattaaaattttaaaagatctaatgtttcaaaagaatttgggatcttattaaaaggatcttgaattctttcacattcaaacctagatcagtttgagagggggaaaaaacctggtaatctatgtagtcccctcatactaacttggagctgaataacacttatacttgctggtataaatgccttgtgatacagaaggtagataaagcaggaaataataactgttaaaatactatctaagacaggaagcatcatttgtatttcttgacagtttaaatgcttttttctctcatgaatctagtagctgagaaagtaatagaaattgcttggaaaaaaataatgttggccgccaggtgcagtggctcatgcctgtaatcccagca

SEQ ID NO: 731172 - DNA, 723 bp, Homo sapiens
agcggatcacctcctaggaaatatgcagtaagatggattgtgtgcctgaaggttaaactctttttccaacaggtattcaatggcattagaagtaactcaccccagctagagaaactgtgtagtagtgtgaatgtaagcaatgagattaaatcttcaggaaacacaatgaaagtcatttttttcacggatggatccaggccatatggcggcttcactgcttcctatacctccagtgaagatgcagtgtgtggtgggtctcttccaaatactcctgaaggaaactttacttctcctggctatgacggagtcaggaattactcaagaaacctgaactgcgaatggactctcagcaatccaaatcagggaaattcatccatttccattcactttgaagatttttacctagaaagtcaccaagactgtcaatttgatgtcctcgagtttcgagtgggtgatgctgatgggcccctgatgtggagactttgtggtccttcaaagcctacattgccattggttataccttattctcaggtatggattcactttgtcaccaacgaacgtgtagaacacattggattccatgcaaagtattcctttacagattgtggcggaatacagataggtgacagtggagtgatcacaagccccaactatccaaatgcttatgacagcctgacccactgctcttggctgttggaggccccacaagggcacaccatcact

SEQ ID NO: 731173 - DNA, 1184 bp, Homo sapiens
gcctcgaatggctacagagagaggaaatttggtgtttcttacggggtctgctcaaaacattgagtttagaaccggatccctgggaaaaattaaattaaatgatgaagatctcagtgagtgtttacatcagatccagaaaaacaaagaagatattatagagttaaaagggagcgcaattggtctgcctcaaaatatatctagtcaaatctatcagcttaattccaagctggtggatcttgagagaaaattccaaggcttgcagcagactgttgacaaaaaggtttgcagcagcaatccttgccagaatggtggaacctgcctcaatctgcatgattcctttttttgtatctgtcccccacagtggaagggtcctctctgctcagctgatgttaacgaatgtgagatttactcaggaacacccttgagctgccagaatggaggcacatgtgttaatacaatgggaagttacagaaatccttgctctaacatccccaaggaaccggaagaaggctcccgtgattggcacagagagtaagcatggcctggtgcaaaaggagctgaagacttaggaagagccggagcattgaaggggagccactgaatggccttaagtagaaaaggggacaccccaccacaccagtgtccccagctgtactctttccatgtattagcaagctcatagttttgggtaaagagagctttattcaatgctatgtcaaaatgtgaccataacgaggtcaaagattaaactgaggttcaatgaatgaagtaactctctctgaccacagtcatcattatcagtacagctctatcttctcttctgacttattctgtcaagtgacttgtccacagaattctcctgctcagctcaggcatcactttctgcaggaaactttcccttccctttttaagcagagtgaggcatctcagggcctctatgttcccatcatgctctagggatatccatcgtcaaagctttgctgatgacacacacattgtctttctaaaaacgaagtccaaaaaattaaggcagatcaatgccaaacttacttttgtacagttctttgaagtcaccttttaaactagacagtgtctttccttatagtttggctggtctcttttattttgtgatttttaaaagattaataaataaattctgctatagaatgaacaaatcctttcaa

SEQ ID NO: 731174 - DNA, 11915 bp, Homo sapiens
  misc_feature (11914)..(11915): n is a, c, g, or t
ctcttacctgccaacctgggaggttgatgatgaacatgtctttaccttttctttggagtttgcttaccttattaatatttgctgaagtaaatggcgaacgtggagaacttgagctgcagagacaaaaaagaagcatcaatctccaacagcctcgaatggctacagagagaggaaatttggtgtttcttacggggtctgctcaaaacattgagtttagaaccggatccctgggaaaaattaaattaaatgatgaagatctcagtgagtgtttacatcagatccagaaaaacaaagaagatattatagagttaaaagggagcgcaattggtctgcctcaaaatatatctagtcaaatctatcagcttaattccaagctggtggatcttgagagaaaattccaaggcttgcagcagactgttgacaaaaaggtttgcagcagcaatccttgccagaatggtggaacctgcctcaatctgcatgattcctttttttgtatctgtcccccacagtggaagggtcctctctgctcagctgatgttaacgaatgtgagatttactcaggaacacccttgagctgccagaatggaggcacatgtgttaatacaatgggaagttacagttgtcactgcccacctgagacgtacggaccccagtgtgcatccaaatatgacgactgtgaagggggttctgtggcacgctgtgtccatggcatctgtgaggatttaatgcgagagcaagctggagagcccaagtacagctgcgtctgtgatgctgggtggatgtcttcacccaacagccctgcctgcacgctggacagagacgagtgcagcttccagcccgggccttgctccacacttgtgcagtgtttcaacactcaaggctctttctactgtggggcctgtccaacaggctggcaaggcaatggatatatttgcgaagatatcaatgaatgtgagataaataatggcggctgttctgtggctccacccgttgagtgtgtgaatacacctgggtcttcccactgccaggcctgtccaccagggtaccagggtgacggaagagtgtgcacactcacagacatctgctcagtcagtaatggaggctgccacccagatgcctcatgctcctcaactctaggttccttacctctctgcacgtgtctcccgggttatactggaaatggttatgggccaaatggatgtgtgcagctcagtaatatttgcctaagtcacccctgtctaaatggacaatgcatcgacactgtctctggttatttttgtaagtgtgactcaggttggacaggtgtcaactgtacagaaaacatcaatgagtgtttgagcaacccctgtttgaatggaggaacttgtgttgatggcgttgattctttcagttgtgaatgcacacgtctctggactggagctctctgtcaggttcctcagcaagtttgtggagagtccctctcaggaataaatggaagcttcagctacaggagcccggatgttggttatgttcatgatgttaactgcttctgggttatcaaaactgaaatgggaaaggtcctgcgtatcactttcacttttttccggttagaatccatggacaactgtccacacgagtttcttcaggtttatgatggagattcctcttctgcttttcaacttggaagattttgtggctccagcctccctcatgaactcctcagcagtgacaatgctctctattttcatctctattctgaacatttaagaaatgggagaggctttacagtaagatgggaaacacagcaaccagagtgtggaggtatcctgactggtccttacggttctattaagtctccggggtatcctggaaactatcccccaggaagagattgtgtctggattgttgtaactagtcctgacctcctggtaacatttacttttgggaccttgagcctcgagcaccatgatgactgcaacaaagattaccttgagattcgagatggtcctttgtatcaggacccccttcttgggaagttctgcaccactttctctgtcccaccgctccagactactggcccctttgccagaattcacttccattcagactcccagattagtgaccaaggcttccatatcacctacttaacatcaccttcggatctgcgttgtggtgggaactacacggacccagagggtgaactcttcttgcctgagttgtctgggcctttcactcacaccaggcaatgcgtctatatgatgaagcagccccagggagaacaaatacaaatcaacttcacccacgtggagctgcaatgccagagtgacagttctcagaattacattgaggttcgagatggtgaaaccttacttggaaaagtctgtggcaacggaaccatctctcacattaaatccattactaatagtgtctggatcaggtttaaaatagatgcttctgttgaaaaagctagtttcagagctgtttatcaagtcgcttgcggggatgaattaactggagaaggggtcattcgctcgcctttttttcctaacgtgtatcctggagaaagaacctgtaggtggaccatccaccagccccaaagccaagtcattctcctcaacttcactgtctttgaaattggaagttctgcccactgtgaaacagattatgttgagattggtagcagttccattttgggttctcctgaaaataaaaagtattgcggtacagacataccttcatttataacatctgtgtacaattttctttatgtcacattcgtgaaaagttcttctactgaaaaccatggtttcatggctaagttcagtgctgaggatttggcatgtggagaaattcttacagaatcaacagggaccattcaaagtcctggccatccaaatgtctacccccacggtatcaactgtacttggcatatattagtccaacctaatcacctgattcatttaatgttcgaaacatttcatctggagtttcattacaattgcacaaacgactacttggaagtttatgacaccgactctgagacatcccttggaagatactgtggaaagtcgatcccgccatctctcacaagcagtggtaactcattgatgctggtgtttgtgactgactccgacctcgcttatgaaggcttcttaataaactatgaagcaatcagtgcagcaacagcatgtttgcaagactacacagatgatttggggacattcacttctccaaacttccccaataattatcccaacaactgggaatgcatttatcggatcacagtgagaactggccaactgattgcagtgcacttcacaaacttctccttggaggaagccattggaaactattatacagattttctggaaatcagagatggaggctatgaaaaatcaccattgctgggaatattctatggctcaaatctacccccaacaatcatctctcatagtaacaaactatggttaaaatttaagagtgaccaaatagacacaaggtctggattctcagcttactgggatgggtcatcaacaggttgcgggggtaatctcaccacttcaagcggtacgttcatatctcccaactacccgatgccctattaccacagctctgaatgctactggtggttgaaatctagccacggcagcgcatttgaactggaattcaaagactttcacttggagcatcatccaaactgcactttagattacctggctgtatatgatggcccaagtagcaactctcatctgctaactcagctttgtggggatgagaaaccccctcttattcgttctagtggagacagcatgtttataaaactgaggacagatgaaggtcagcaaggacgtggcttcaaggctgaataccggcagacatgtgagaatgtggtaatagtcaatcaaacctatggcatcttagagagtatagggtatccgaatccttattctgaaaatcagcattgcaactggaccatccgggcaacaacaggcaacactgtgaactacacatttttagcatttgacttggaacatcacataaactgctccacagattatttagagctctatgatggaccacggcagatgggacgctactgtggagtagacctgccccctccagggagtactacaagctccaagcttcaagtgctgctccttacagatggggttggccgccgtgagaaaggatttcagatgcagtggtttgtttacggttgtggtggagagctgtctggggccacaggctccttcagcagccccgggttccccaacaggtatccaccaaacaaggagtgtatctggtacattaggacggaccccgggagtagcattcagctcaccatccatgacttcgatgtggagtatcattcaaggtgcaactttgatgtcttggagatctatggaggccccgatttccactctcccagaatagcccaactgtgtacccagagatcacctgagaaccccatgcaggtctccagcactggaaatgagctagcaattcgattcaagaccgacttgtccataaatgggagaggcttcaatgcgtcatggcaagcagtcactggaggttgtggtgggattttccaggctcccagtggagagattcattctccaaattaccccagtccttataggagcaacacagactgttcttgggtcattcgggttgacagatatcatcgtgttctcttgaacttcactgactttgatcttgaaccacaagactcttgtattatggcatacgatggcttaagctccacaatgtcccgccttgccaggacgtgtggaagggagcagctggctaaccccatcgtctcctcaggaaacagcctcttcttgagatttcagtctggcccttccagacagaacagaggcttccgagctcaattcaggcaagcctgcggaggccacatcctcaccagctcatttgatactgtttcctctccacggttccctgccaattatccaaacaatcagaactgcagctggatcattcaagcgcaacctccattaaatcatatcaccctctcttttacccactttgaacttgaaagaagcacaacgtgtgcacgtgactttgtagaaattttggatggcggccacgaagacgcgcccctccgaggccgttactgtggcaccgacatgccccatcctatcacatccttcagcagcgccctgacgctgagattcgtctctgattctagcatcagtgctgggggtttccacaccacggtcaccgcatcagtgtcggcttgtggtggaacgttctacatggctgaaggcatcttcaacagccctggctacccagacatttatccccctaatgtggaatgtgtctggaacatcatcagttcccctggcaaccggctccagctgtcttttatatctttccagttggaagactctcaggactgcagcagagattttgtggagatccgtgaaggaaatgccacgggtcacttggtgggacgatactgtggaaactccttccctctcaattattcttccatcgttggacataccctgtgggtcagatttatctcagatggttctggcagcggcacgggcttccaggccacatttatgaagatatttggcaatgataatattgtgggaactcatgggaaagtcgcctctcctttctggcctgaaaactacccacataactccaattaccaatggacagtaaatgtgaatgcatctcacgttgtccatggtagaatcttggagatggacatagaagaaatacaaaactgctattatgacaaattaaggatctatgatgggcctagcattcacgcccgcctaattggagcttactgtggtacccagactgaatctttcagctccactggaaattctttgacatttcatttttactccgactcttcaatctcggggaagggattccttctggagtggtttgcagtggatgcacctgatggtgttttacctaccattgctccaggtgcttgtggtggcttcctgaggacgggagatgcacccgtgtttctcttctccccgggctggcctgacagttacagtaatagagtggactgtacgtggctcatccaggctcccgactctaccgtggaactcaacattctttccctggacattgaatctcaccgaacgtgtgcctatgatagccttgtgatacgagatggagataataacttggcccagcagctagcagttctctgtggcagagagatccctgggcccatccggtctactggagagtacatgttcatccgcttcacctcggactccagtgtaaccagggcaggcttcaatgcatcctttcacaagagctgcggtggatatttgcatgcagacagagggatcatcacgtcccccaagtatccagagacttacccatccaacctcaactgttcttggcacgtcctggtccaaagtggcctgaccattgctgtccattttgaacagcctttccagattccaaatggagattcttcttgcaaccagggggattacttggtgctaagaaatggtcctgatatctattctccacccttgggaccccctggaggaaatggtcatttttgtggcagtcatgcttcatcaactctgttcacctcggataatcaaatgtttgttcagtttatttctgatcacagtaatgaagggcaaggatttaaaatcaaatatgaggcaaagagtttagcctgtgggggcaacgtctacatccatgatgctgattctgctgggtatgtgacctcccccaaccaccctcataattatcccccgcacgctgattgcatttggatcttagcggctccaccggaaacacgcatacagctgcaatttgaagatcgattcgatattgaagtaacacccaactgtacttccaactaccttgagttgcgggatggagtggattcggatgcaccaatactttccaaattttgtgggacatctttgcccagcagtcagtggtcctcaggagaggttatgtatttgagatttcgatctgacaacagccccacacatgtgggattcaaggccaagtattctatagctcagtgtgggggaagagtaccagggcaaagtggtgttgttgaaagcattggacatccaacacttccatacagagacaacttattctgtgagtggcatctccaggggctctctggacactatctcaccatctcttttgaagactttaaccttcagaattcttctggctgtgaaaaagacttcgtggagatctgggacaatcatacctctggaaacatcttgggcagatactgtggaaacaccattcctgacagcatagacacttctagcaatactgctgtggtcaggtttgtcacagacggctctgtgactgcctcaggattcagactgcgatttgaatccagtatggaagagtgtggtggggatcttcagggctctattggaacatttacttctcccaactacccgaacccaaatcctcatggccggatctgcgagtggagaatcactgccccggagggaaggcggatcaccctaatgtttaacaacctgaggctggccacgcatccgtcctgcaacaatgagcatgtgatagtattcaatggcattagaagtaactcaccccagctagagaaactgtgtagtagtgtgaatgtaagcaatgagattaaatcttcaggaaacacaatgaaagtcatttttttcacggatggatccaggccatatggcggcttcactgcttcctatacctccagtgaagatgcagtgtgtggtgggtctcttccaaatactcctgaaggaaactttacttctcctggctatgacggagtcaggaattactcaagaaacctgaactgcgaatggactctcagcaatccaaatcagggaaattcatccatttccattcactttgaagatttttacctagaaagtcaccaagactgtcaatttgatgtcctcgagtttcgagtgggtgatgctgatgggcccctgatgtggagactttgtggtccttcaaagcctacattgccattggttataccttattctcaggtatggattcactttgtcaccaacgaacgtgtagaacacattggattccatgcaaagtattcctttacagattgtggcggaatacagataggtgacagtggagtgatcacaagccccaactatccaaatgcttatgacagcctgacccactgctcttggctgttggaggccccacaagggcacaccatcactctcacatttagtgactttgatattgaaccccatacaacttgtgcttgggactctgtcactgtcaggaatggtgggtcccctgaatcacccatcataggacaatactgtggaaattcaaaccccaggacaatacagtcaggttccaatcagctggtcgtgacttttaactcagaccattcattgcaaggtggtggattttatgctacgtggaacacacaaactttaggttgtggtggaatatttcattctgataatggtacaatcagatcccctcactggcctcagaattttcccgaaaacagcagatgttcctggacggccattactcacaaaagtaaacacttggagatcagctttgacaacaacttcctaatccccagcggtgatggacaatgtcagaatagcttcgtgaaggtgtgggcaggaactgaggaggtggacaaagccctgctagccactggctgtgggaacgtggctccgggtcccgttatcacaccaagtaacacattcactgccgtcttccagtctcaggaggcaccagctcagggcttctccgcgtcctttgttagccgatgtggaagtaatttcactggcccttcaggttacatcatttctccaaattacccaaaacaatatgacaacaacatgaattgcacctatgtcatagaggctaatcctctgtcagtggtcctcttgacttttgtgtccttccacttagaagctcgttccgctgtgacgggaagctgtgtcaacgatggcgtgcacattatcagaggttacagcgtcatgtccaccccatttgctactgtgtgtggggatgagatgccagctcccctcaccatcgctgggccggttctgcttaacttctactccaacgagcaaatcacagacttcggattcaagttttcctataggataatctcctgtggtggtgtgttcaatttctcttctggaatcatcacaagtcctgcctattcatacgcagactacccaaatgatatgcactgtctgtataccatcaccgttagtgacgacaaggtgatcgagctcaagttcagtgattttgatgtggttccctccacctcctgctcccatgactacctggcaatttacgatggtgccaataccagcgatccccttcttggcaaattctgcggttccaagcgcccaccaaatgtgaagagcagcaataatagtatgctcctggtgttcaagacagattcatttcagacagcaaaaggctggaagatgtctttccggcagacattggggcctcagcaaggatgtggtggttatctgacaggctcgaataatacctttgcctctcctgattctgattcgaatggaatgtatgacaagaatttaaactgtgtatggatcataattgcacctgtaaacaaagtaattcacctcaccttcaatacatttgctctggaggcagcaagtactaggcaaagatgcctttatgattatgtaaagttatatgatggggatagtgaaaatgcgaacttggctggaacgttttgtggttccacagtacctgctccttttatctcttctggtaacttccttacggttcaattcatcagtgacttaacattagagagggaaggatttaatgctacatacaccatcatggacatgccttgtggtggaacgtacaatgcaacttggaccccacaaaatatttcatcacccaattcatcagacccagatgtcccattttccatctgtacttgggtcattgattcccctccgcatcagcaggtcaagataactgtgtgggcattacagctgacctcgcaagactgcacgcagaattacttacagcttcaggactcaccgcagggtcacggaaattcaagatttcagttctgtggcagaaatgcttcggctgtgccagtgttttattcttctatgagtactgcaatggtcattttcaaatctggagttgtaaacagaaactctagaatgagtttcacctatcagattgcagattgcaacagagactatcacaaggcatttggcaacctgagaagccctggatggccagataactacgacaatgacaaggattgcaccgttactctcacagccccccagaaccacaccatttccctcttttttcattcacttggcatcgagaactcagttgaatgcagaaacgatttcttggaggtgagaaatggaagtaacagcaattcaccattactgggcaagtactgtggaactctgctgccaaaccctgtcttctctcaaaataatgaactatacctacgatttaagagtgatagtgtaacttctgatcgtggatatgaaatcatctggacttcatcaccctctggatgtggtggaactctttatggagacagaggctcattcaccagccccggctatccaggcacatacccaaacaacacgtactgcgagtgggtccttgttgctcctgctggaaggcttgtcaccatcaacttctacttcatcagcattgacgatccaggagactgtgtccagaactatctcacactctatgatgggcccaacgccagctctccatcctctggaccatactgcggaggcgacaccagcatagctcccttcgtggcttcctcaaatcaggtcttcataaaatttcatgctgattatgcacggcgtccatccgcattccgattaacttgggacagctaagtgggtaacaactcgtgttcactcagcactttccctctgcagcacgctggacagcactctgccatcctgatacatgacccctgctgatgccacagagaataagctgaacttgtatggtttttcaccaaaccatggatagaatcaatatttgtaggccaggcgtggtggctcacccccctgtattctcagcactttgggaggccgaggcaggttgatcacctgaggtcaggagtttgagactagcctggccagcatggtgaaacctcatccctctaacaatataataattagccaggcgtggtggtgggtgcctgtaattccagccactcgagaagctgaggcaggagaattgcttgaacccaggaggcagaggttgcagtgagctaagatcacaccactacactccagcctgggcgagacggcaagactccatctcaaaaaaaaaagaaacaaaaaaaaccagaatcaatatttgtacattttctcgaacatagaatatagcttctttagtcttgagtgtgcatttcattctaatattttgagctgaaatttaaaaaaactttgaaagagttggaaatgattatggcatatgtgacatacatttttaaaagttaataataatagccaggggcagtggctcatacccataatcccagcacgctgggaggccatgatgggaggattgcttgaacctaggagtttgagaccagcctgggcaacaaagtgagacctgatttttacaaaaaatcaaaaaattagccaggcatggtggcatgcacccgtggttccagctacacaggaggttgaagcaggaggatcacttgagcccagtaggttaaggctgcagtgaaaccctgtgaattaaccactgtactccagcctgggtgacagactgagaccctatctcaaaaatgacaacaagaacaacaaaagttaatgataatatagaagcataaatttcctgtgaatgttcaattacacataataaacattattgaattgtacacaaaaaaaann

SEQ ID NO: 731175 - DNA, 683 bp, Homo sapiens
atctatggaggccccgatttccactctcccagaatagcccaactgtgtacccagagatcacctgagaaccccatgcaggtctccagcactggaaatgagctagcaattcgattcaagaccgacttgtccataaatgggagaggcttcaatgcgtcatggcaagcagtcactggaggttgtggtgggattttccaggctcccagtggagagattcattctccaaattaccccagtccttataggagcaacacagactgttcttgggtcattcgggttgacagatatcatcgtgttctcttgaacttcactgactttgatcttgaaccacaagactcttgtattatggtttaatcatacttggtcggacgtcagacagatggggtttgtatattggctctgcactgctaagcgtgtgattgggcaagtcatgtatgttttcagagctcagttttccctgctgcaaagtggaactgtaagaatcaaatgtaaacaaatgtatttaagtacctatcagtgtctggttcagataagtatttgctgctattcctaatttttctattacaatgactcctgcttctattactattaacgctatgttaaagatcttaaggaatcttttaaaaaaattttctccctgagcaagatgaaacttagtaaacaagataaaaaatccagtagaaaaa

SEQ ID NO: 731176 - DNA, 335 bp, Homo sapiens; identical to SEQ ID NO: 10568

SEQ ID NO: 731177 - DNA, 695 bp, Homo sapiens
tcttctatgagtactgcaatggtcattttcaaatctggagttgtaaacagaaactctagaatgagtttcacctatcagattgcaggtgaggccaggaacttcatcttttattcaaaaaagctgccatcattaccattattcgtagaataattacaattatttctagaattgactcctgtgagtaaattaggatttgttaacaaaaaccacatccctctcttaactagaacccagcccaatttagcaaattactacagttggtttctaaagagataaagagaatataatactatccaggatggttagaatgctagcattttcttcaaagtatatgtagttgattttaaaaatatgccaattatcttattaattatacacttaaccacattgaatatacatttttatttacaagaaatatatatgtttatttacaaaagctttatcaaaatataattctcatatcatacaatttacccatttaaagtttatatttcagaggtttttagtattttcacaaaattgaaaatcttagaaaattattttgtaaaaatcaaaaagccttgaaagagttacctgattattataagaagtttattttcacagaacactttatttagtacttattttgaattgactcaaatgaaagcttcctttggttaaaacaaacgaaagtacttttggtatttttttaccaa

SEQ ID NO: 731178 - DNA, 406 bp, Homo sapiens
tgcagacataatgatggcaggagctggagcagccacctgaggacccagagctcaaagccacatgttgagaagggcagagataactgtatccactctggactgctgacctttgaactattatgttatttccagggaaatgcaaaccaaaggatgtggtctctgatctaatccttagagaatgtgaccatgaagacacttttcctacctggtaaacaaaagataatgagaaaagtgaggttggaagttggtttactgagccaggagctataacaggtgctggagcaggggtgtgatctgaatgaccagagggaaggactgatggaattggatggtgagagcctccaggccctttaggcttctccctgactttataatgaaatacaaaagtcagcctccaaaaaaatcc

SEQ ID NO: 731179 - DNA, 716 bp, Homo sapiens; identical to SEQ ID NO: 337898

SEQ ID NO: 731180 - DNA, 1745 bp, Homo sapiens; identical to SEQ ID NO: 337896

SEQ ID NO: 731181 - DNA, 393 bp, Homo sapiens
tgcagacataatgatggcaggagctggagcagccacctgaggacccagagctcaaagccacatgttgagaagggcagagataactgtatccactctggactgctgacctttgaactattatgttatttccagggaaatgcaaaccaaaggatgtggtctctgatctaatccttagagaatgtgaccatgaagacacttttcctacctggtcaaaaggggcaggaattggagagacgtctacaaagcttccaacaccatggccctgggggtgacctcctcggtaccctgcctgcccctccccaacatcctactcatggccagtgtcaaatggcaccaggggcagaaccagacatggaacagaccatccatagcccccaacatcttcctgaagag

SEQ ID NO: 731182 - DNA, 616 bp, Homo sapiens
tttgagacggagtgtcactctgtcgcccaggctggagtgcagtggcgcaatctcagctcactgcaagctctgcctcctgggttcacgccattcttctgcctcagcctcccgagtagttgggactacaggcgcccaccaccacgcctggctaattttttatatttttagtagagatggggttttactatgttagccaggatggtctcgatctcctgaccttgtgatccacccgccttggcctcccaaagtgaaacttttctttaaaatagagatgggatcttgctgtattgcccagactggtctcagactccttgccttaagcagtcctcccacctcagcctcctaaagtgctgggattacaagcgtgaagcattacatccaagtgaaacttcttgagatagttacataatgtttaaatctgctggtgtacaagttaataaagtgtagaactgaataaatattaaatattagatcaagtttctcatgtttaccttaacgtataaagatttatcttaaagcactgattttcacaaaataacatcagtgtgaaattggaaaagaagccaaatattttatttcatgtatcggggaaatgaggtgctttagtcaactgaat

SEQ ID NO: 731183 - DNA, 872 bp, Homo sapiens
tacttttgtcaggtttaagccgttttttccataccagaccttgcaaggatttgaagaagatgaagagcatatccatatacaacaatgggcacttactgaaggccgtcttaaagttacgttgttagaatgtagcaggttactcatttttggatcctatgacagagaggcaaatgttcattgcacacttgagttaagcagtagtgtttgggaagaaaaacagaggagttctattaagacggttgaattaatggaaatttacaaagtgttggacttacacttcgtcttgtccagtcaactgatgggtatgctgggcacgtcatcattgaaactgtggctccaaactcgcctgctgcaattgcagatcttcagcggggagatcgacttatcgccattggaggtggtgtgaaaatcacatcaacactgcaagtgttgaagcttatcaagcaggctggtgactggtcctggtgtactatgggcctgttggccagagtaatcaaggtgcagtgctgcaagataactttggccagttggaagaaaactttttgtcaagctcatgccaatcgggttatgaagaggaagctgccgggttgacagtagatactgaaagtagagagctggattctgaatttgaagacttggcaagtgatgtcagagcacaaaatgagttcaaagatgaggcacaatcattaagtcatagtcccaaacgtgttccaacaacactttctattaaaccccttggaggctatatcaccagttttaaaccggtaaattagctgtaggaagtcacccactaccaccgaaaattcagtccaaagatggaaataaacctccacccctaaaaacttctgagataacagacccagcacaagtgt

SEQ ID NO: 731184 - DNA, 1108 bp, Homo sapiens
tgacccgccgctgggtcaccaagaagatcaaggtggagttcgaggagctgctgcagaccaagacggccgggcgcctgctggaggggctgagcctgcgggacgtgttcctgggcgagacggtgcccttcatcaagaccatccggctcgtgcggccagtcgtgccctcggccaccggggagcccgatggccctgaaggggaggcgctgcccgccgcctgccccgaggagctggccttcgaggcggaggtggagtacaacgggggcttccacctggccatcgacgtggacctggtcttcggcaagtccgcctacttgtttgtcaagctgtcccgcgtggtgggaaggctgcgcttggtctttacgcgcgtgcccttcacccactggttcttctccttcgtgcacgaggctgatcgacttcgaggtgcgctcgcagtttgaagggcggcccatgccccagctcacctccatcatcgtcaaccagctcaagaagatcatcaagcgcaagcacaccctaccgaattacaagatcaggttgaattaatggaaatttacaaagtgttggacttacacttcgtcttgtccagtcaactgatgggtatgctgggcacgtcatcattgaaactgtggctccaaactcgcctgctgcaattgcagatcttcagcggggagatcgacttatcgccattggaggtgtggtcctggtgtactatgggcctgttggccagagtaatcaaggtgcagtgctgcaagataactttggccagttggaagaaaactttttgtcaagctcatgccaatcgggttatgaagaggaagctgccgggttgacagtagatactgaaagtagagagctggattctgaatttgaagacttggcaagtgatgtcagagcacaaaatgagttcaaagatgaggcacaatcattaagtcatagtcccaaacgtgttccaacaacactttctattaaaccccttggaggctatatcaccagttttaaaccggtaaattagctgtaggaagtcacccactaccaccgaaaattcagtccaaagatggaaataaacctccacccctaaaaacttctgagataacagacccagcacaagtgt

SEQ ID NO: 731185 - DNA, 746 bp, Homo sapiens
tgacccgccgctgggtcaccaagaagatcaaggtggagttcgaggagctgctgcagaccaagacggccgggcgcctgctggaggggctgagcctgcgggacgtgttcctgggcgagacggtgcccttcatcaagaccatccggctcgtgcggccagtcgtgccctcggccaccggggagcccgatggccctgaaggggaggcgctgcccgccgcctgccccgaggagctggccttcgaggcggaggtggagtacaacgggggcttccacctggccatcgacgtggacctggtcttcggcaagtccgcctacttgtttgtcaagctgtcccgcgtggtgggaaggctgcgcttggtctttacgcgcgtgcccttcacccactggttcttctccttcgtgcacgaggctgatcgacttcgaggtgcgctcgcagtttgaagggcggcccatgccccagctcacctccatcatcgtcaaccagctcaagaagatcatcaagcgcaagcacaccctaccgaattacaagatcaggttgaattaatggaaatttacaaagtgttggacttacacttcgtcttgtccagtcaactgatgggtatgctgggcacgtcatcattgaaactgtggctccaaactcgcctgctgcaattgcagatcttcagcggggagatcgacttatcgccattggaggtgtggtcctggtgtactatgggcctgttggccagagtaatcaaggtgcagtgctgc

SEQ ID NO: 731186 - DNA, 745 bp, Homo sapiens
ctcgatcccccgaccttgtgatccacccgccttggcctcccaaagtgttgggattacaggtgtgagccaccgtgcctggcctgaaggtcatttttataaagatctctccacgtcttagatttgattcttcctttaaatatttttctcattgacatttgaaagcacctgaccttatataaaatgaacaattttcataactccataaaaggagaattatggcatcatctatttctttctcttgtctcataaatctaaaccatcaacctgcttatttttgtatactgtcacactgtgtattccctgcattgaatgcctgtctgttgacattgtctgtaaaaattgtgggaagttttctgcaccctgaaatttctgttatgcggattaaatatccactatccatgtttttccaagtcttacagtagaaaggggtaaatgcagcccgtcacagcagcctgttgttcgtcctgcaaatgtgtttccatcacattacacaaagcctctttgtcttcgtggttctaccctactaataagtttttaaaaaaattatgtaatgtgtgtatatacaaatacctatatgtatgtgtgtacacatacagctgatatctgctgagattatgtatgcatgaactatagaattaacttgtaattttaagaaaataaattattttgtaaagataaatctcatgtttaagaagaggaattacagttgaatcatttagggatgcctcagcctaaacataatatg

SEQ ID NO: 731187 - DNA, 678 bp, Homo sapiens
agaaaaagagcaagaaacttgaaagtagggaagagaaaaaagaaaaggagcaagagggaatagccagctctcaaaagagtctccaataggaaagcaaaatctgtatctagccagtaccaacatgtgaagaaagagtgagcatagcaaaattgagaaaggttgcttgaaaaccaaacaaaaaaccaaatacctgtaatcctagcactttgggagggtgaggtgggtggattgcctgcactcaggagttcaagaccagctgggcaacatggtgaaaccttgtctctactaaaatccaaaaaaaaaaaaaaaaaaaaaaaaaaattagccaggcatgggctgggcgcgtgttttccaggctggtctcaaattcctgggcttaagtgatcctcccacttcagccttacagtgttgggattacagtcacgagccactgtacccaaccatatgtcattctttagacacactgcttactaaatttctctttttaaaggatatactgaatttccggttgagccaacttaacagctaattttctattttagctttaaaacattgataagcaacatgaagcaatctagaacttaacctttaagtggctttattaaagcaatccagctatgaaaattatgcagaaatgattatctacaatcttaccagcacataagaaattcttcctct

SEQ ID NO: 731188 - DNA, 448 bp, Homo sapiens
cctacacctgggagcagtatctgccactgggataaagtcctactaaaaaaggaacggtaaatgtaccctaatgattaaaccccgtgagatacatatgatttcccaaatagtccatttcattaggaacttttttgtttgaatgaatgtcacataggtatcctcagtaacacagaacgaaattacctttgtattattgtgattagttgttgcttattattttatactcagtaataatgtggtacactgttaatttttttgcttttgtaaattatattctaatttattgccatgtttcctaacacttgtcctacattcattctcctgcttgtaatgaaaatgaaaaaatcattgtaacacttgatggagtgaaattccacgccaggcacagaatttttttgacatagataatttagtaaaataaaaattcagcttataataatgatacaga

SEQ ID NO: 731189 - DNA, 790 bp, Homo sapiens; identical to SEQ ID NO: 118441

SEQ ID NO: 731190 - DNA, 876 bp, Homo sapiens
cgatatttgtggttctggctccagggcctgcccgcgcacacactggggcaccgtcgccagctcagaatccgcttcagtgtctgcacgatcagcagcaccgacacacaacccgtggctttacagagcaataacacaaccgggtgtgacaccccgcgacgtggacacacaaacacaatctcgtgccctcatgtacgagtgtcacagccacagttcactagatgaaccctcaaaacctagccaccccccacattcctttaaggaacacaccctagcatatatcatcttacccacttctggctggaaagcagtgatgcaattatagctaactgcagcacgagccactgcactggctaagttcatacacacacacgtgtgtgtgtgtgtgtgtgtgtgagattctgtggctcaggctggagtgcagtgacacaattatagctcactgcagcatgagccactgcactggctaagttcgtgtgtgtgcgcgcatgtgtgtgtgtgtgtgtgtgtcattctgtggctcaggttggagtgcagtgatgcaattatagctcatggcagcacgagccactgcactaagttcatacacgtgtgtacgtgtgtgtgtgtttgtgtcattctgtggctcaggctggagtgcagtgatgcaattatagctcactgcagcctgcaactcctggacccaagtgattttttacctcagcctcccaagtagccaggactacaaatgtcaaagtgtgggactacaggcatgagccctatacccagcctaatttcacacccttttaagcctgttaaaacatcatgtgacattctaaaatttttcaaatataagcaacttattttctttaagtggagaatcataaatgctcagattaa

SEQ ID NO: 731191 - DNA, 655 bp, Homo sapiens
ggaagaaattaacgcatgattttttgagggggaaaacatgatttttctctaaagggaaacgtgtcgtagccttaaccaagatcaattacctccatgttggtcgcagccttaaccaagatcagtcacctccatgttggttgatcttggttaaggctacaacaggcttgaaggggtctggagggtggctttactggctaggggcagcaccagccagatcagacctataggggatctaggcctcttgtactccataccctgtcttctcttccccatttgccatttgacttggggactccagaagcccttgaggagaggcagcatggagggtaaaagaggggaggaggtcccaggccaaaggagatgccatttctcccctccaaacccacccacagccctctggagagaaatgagagaattacttgttaacatttacatggccatcttaacatttgcaaggaaatactgaggtccagggggacagtaatctgcccgaaatcactcagtcttcctgagtgagagccagacagaaatccaagcctaccgactcccagtctcatactcgggaaatggctggatctgccagccagtaagcagacctcagccctgtaggaaaggtggcctagatttcatgaaagaatggacaataaaaaaaaaa

SEQ ID NO: 731192 - DNA, 441 bp, Homo sapiens
tggcttgagtttttcaaaacaatcaatcctggtttggggaagtttaaatatggcctgtatatgataccattgaattacttgctcatgtactcaggtgcaagtttggtattgtggttctgcgggagaatgtccttattcttaggagttgcaagctgaagaatttaggggtgaggtgctgctatctgcaactgccatccaaaaggttcagaaaaaatgttctatgtatgtatctctttaaatagagaaaaagaaagaaaggccaaactttaacaactggcaaatcttgctgaagggttcatggatatttattgtgctctttttttcaactttctgtagattagaacatttcccaaataaaaacatgaaaaaacaacttttaatagaatagacatttacatcctctccccattcaaaatttgggaaaaaaatcagtgaaagtgg

SEQ ID NO: 731193 - DNA, 581 bp, Homo sapiens; identical to SEQ ID NO: 70268
  misc_feature (575)..(575): n is a, c, g, or t
  misc_feature (577)..(578): n is a, c, g, or t

SEQ ID NO: 731194 - DNA, 2136 bp, Homo sapiens
tacttactagataagccaaaagacctgtttgttacacaaacatgcatgcatccaggtattaatccattctcacactgctatgaagaaatacccgagactgggtaattataaaagaggtttaattttcgactcacagttccacatggctgggaaggcctcaggaaacttaacaatcacggtggaaggcacctcttcacagggcggcaagagtgagaatgagagccagtaggggaaatgccaggcacttataaaaccatcagatctcatgaaagctcactatcatgagaatagcatgagggaaactgcccccatgattcaattacctaccacaacacctgggaattatgaggattaaaattcaagatgagacttgggtggggatacatccaaaccatatcaatccatatatggctgaaatttacatcagacaatggtaaatatctatgttcaaagtccattgatgctttgagattctgagctattttctggtatggaaaacagacttagcatctccatctccattggatgtatgctgcctcctgtgatgatcaaggaatgcaatggttctcccaagtccacagtgcacatttgccttaaagtgcctgctgcaattttctggtcgtcggctccaaccctggctaagccaacacaaagtgtctcctcggtaactgctattaaaaaaaaaagatactgctattcaattcagcaagtgcatcatccatccaacagtcaaacaaacattagtaccacaagtacatttcaagaagccccaaatatcttaaatctcttttgccacttatggaccagttatccattaattcatccaagggattttctaaatcatttgtattacctaatataaaagagtacttccaaactttaccctttcagaattacaaaggcttacactaagcttttaggacttgacaagctatacttacactctacaattgcacagcattcgtttttaaataagttctgagtaaacaatgtttattacacacaggtttttaataacttgcttgagataatgttcatattgacctagatatactgaagaaaccatgagattatgaaataaattcacagatttgagtttctgccttgccatccaattagctgtgtgataaacttcagttttctcattttttaaaatgtaatactccctcttttaaatcatggtaatgagagctaagatagtagatatgagactagtagactatagattccttaacaaataatgagcatttggcactatttatgtttttcagttaaaaacagccagccttagctttagtattattcactctggtgctacagctaaagagctgaccctttaatggttgtattgtttagttgggaaaggggtcttgattgaacaatgatcaaaagggggcaaatggtttatccaaggacaaacaggaatgcaggaaacttctgtacaaagttatggatatagaacatccttgcagactatttgtttcacgactttaacatggcctactaatgagaataaaataagcaacaatcactcaagaatctcttgactgggtgcggtgactcgcacctgtaatcccagcattttgggaggctgaggcaggcggatcgcttgagctcaggagtttgagaccagctgggcaacatggtgaaaccccatctccaccaaaaatacaaaaaaattagctgggtgtggtggcatgcacctgtagtcccagctactcaagtggctaaggtgagagggtggcttgagcccgggaggcagaggttgcagtgagccatgattgcaccactgcactctaacttgggcaacaaagcaagaccccatctcaaaaaaaaaaaaaagtctcacagtgggccaggcgtggtggttcacacctgtaatcccaacactttgggaggctttgggaggctgaggtgggaggattgcttgagccaaggaattcgagaaaagcctgggcaacatggtgaaaccctgtctctaccaaaaacacacaaagaaattagctgggcatggtggcatgcacttgtagttcagctaaggtgggaggatcacttgagcccaggaggtggaggctgcaatgagctgagatagtgcctctgcactccagcctgcgtgacaaagtgagaccctctctc

SEQ ID NO: 731195 - DNA, 485 bp, Homo sapiens
ggctctcacacacacgtgcgtgattggttagttcgcctgtgcatatacccacctatgcccacagggaggtgtttgggggacacatgtcagagacgggcaccaacagctggcagctgacttggcatgggagtttctgacagtggtggagtcccacaataatggcttttagcttaccacatcctgtgcctcagtttacccctcttgtataatagagagagcttggagagactgaggacacaggagacacaggtggttgagtgttctgagatctgcagactgggaggcattatgcctgtaaaatgtaaagttaacaaaggcagaaactggtggtgggaagtggaggaggtccttaaaaagaaagatgggactgggcctggttgtcacgcctgtaatcccagcgcttggggaggctgagacagaaggatcacttgagcccagaaatttgagttcaccctcagcaacataatgagaaccctgtctctgca

SEQ ID NO: 731196 - DNA, 722 bp, Homo sapiens
tgcatgcatgggacaggatgctttcatggagcccttcggtgacacacttggggtctttcagtgcaaaatatacctccttctcttcggtgcttgctcggggctgaaggtgacagtgccatcacacactgtccatggcgtcagaggtcaggccctctacctacccgtccactatggcttccacactccagcatcagacatccagatcatatggctatttgagagaccccacacaatgcccaaatacttactgggctctgtgaataagtctgtggttcctgacttggaataccaacacaagttcaccatgatgccacccaatgcatctctgcttatcaacccactgcagttccctgatgaaggcaattacatcgtgaaggtcaacattcagggaaatggaactctatctgccagtcagaagatacaagtcacggttgatgatcctgtcacaaagccagtggtgcagattcatcctccctctggggctgtggagtatgtggggaacatgaccctgacatgccatgtggaagggggcactcggctagcttaccaatggctaaaaaatgggagacctgtccacaccagctccacctactccttttctccccaaaacaatacccttcatattgctccagtaaccaaggaagacattgggaattacagctgcctggtgaggaaccctgtcagtgaaatggaaagtgatatcattatgcccatcatatatt

SEQ ID NO: 731197 - DNA, 780 bp, Homo sapiens
gtaaccagtactagaatagtcagtacctagaagccactcttctttgaaaaggattatcacctgatcaggttctctctgcatttgcccctttagattgtgaaatgtggctcaaggtcttcacaactttcctttcctttgcaacaggtgcttgctcggggctgaaggtgacagtgccatcacacactgtccatggcgtcagaggtcaggccctctacctacccgtccactatggcttccacactccagcatcagacatccagatcatatggctatttgagagaccccacacaatgcccaaatacttactgggctctgtgaataagtctgtggttcctgacttggaataccaacacaagttcaccatgatgccacccaatgcatctctgcttatcaacccactgcagttccctgatgaaggcaattacatcgtgaaggtcaacattcagggaaatggaactctatctgccagtcagaagatacaagtcacggttgatgatcctgtcacaaagccagtggtgcagattcatcctccctctggggctgtggagtatgtggggaacatgaccctgacatgccatgtggaagggggcactcggctagcttaccaatggctaaaaaatgggagacctgtccacaccagctccacctactccttttctccccaaaacaatacccttcatattgctccagtaaccaaggaagacattgggaattacagctgcctggtgaggaaccctgtcagtgaaatggaaagtgatatcattatgcccatcatatatt

SEQ ID NO: 731198 - DNA, 594 bp, Homo sapiens
ttatttgtgtcttcctccattacattataattttgacttcctgtaattcacctttgattcttcagcacttaatagtctgcctggcactaagtgctcaataaattctgaactcaaatcactaacagcaaaagaattatttatgcattccccttaattgtgtgcctaacacgtttaactgccttattttatttttttacaaacagggtctcactttgtcacccaccctgaggtgcagtggtgtaactatggctcactgcagcctcaacctcccaggctcggatgatcctcctgcctcagcctcccaagtagctaggacaacaggtgcacgccaccatgcccagctaatttttgtattttttgtagagatggggtttcactatatttcccaggctggtcttgaactctgggctcaagcgatcctcctgcctcagcctccctaagtgctgggattacaggtgtgggccaccgcacctgacctgccttattttttttaaatcaaatagtagaacaacattaaaagaaatataattatctaatctctaatagcatatatgttcatatttgcatactctttcagtcaataacgttttatat

SEQ ID NO: 731199 - DNA, 491 bp, Homo sapiens
cagatatataggatgaaatttctcattacattatttatgcattccccttaattgtgtgcctaacacgtttaactgccttattttatttttttacaaacagggtctcactttgtcacccaccctgaggtgcagtggtgtaactatggctcactgcagcctcaacctcccaggctcggatgatcctcctgcctcagcctcccaagtagctaggacaacaggtgcacgccaccatgcccagctaatttttgtattttttgtagagatggggtttcactatatttcccaggctggtcttgaactctgggctcaagcgatcctcctgcctcagcctccctaagtgctgggattacaggtgtgggccaccgcacctgacctgccttattttttttaaatcaaatagtagaacaacattaaaagaaatataattatctaatctctaatagcatatatgttcatatttgcatactctttcagtcaataacgttttatat

SEQ ID NO: 731200 - DNA, 427 bp, Homo sapiens
tcctgggctcaagcgatccccctacctcagcctcccaaagtgctgggattacaagcatgagccaccacactcagccttcaaaggtatttatcatctatgtccattatactatataatagttatttgtgtcttcctccattacattataattttgacttcctgtaattcacctttgattcttcagcacttaatagtctgcctggcactaagtgctcaataaattctgaactcaaatcactaacagcaaaagaaaaattaatgaccagctatttaagacagatatataggatgaaatttctcattacattatttatgcattccccttaattgtgtgcctaacacgtttaactgccttattttatttttttacaaacagggtctcactttgtcacccaccctgaggtgcagtggtgtaactatggctcac

SEQ ID NO: 731201 - DNA, 446 bp, Homo sapiens
  misc_feature (8)..(8): n is a, c, g, or t
  misc_feature (12)..(12): n is a, c, g, or t
  misc_feature (37)..(37): n is a, c, g, or t
  misc_feature (43)..(43): n is a, c, g, or t
  misc_feature (424)..(425): n is a, c, g, or t
  misc_feature (430)..(430): n is a, c, g, or t
  misc_feature (433)..(434): n is a, c, g, or t
aaaaattngggnaacctggtaccccttaaaagttggnccttantcctgtagttacttttaaaaagtatattaagaatattcaataaaaatgtgttatgctgaaacaaaaagacacatgaaactgcttgaaaacttcattgatatggttaggctttatgtctccacccacatctcatcttgaattataattcgcaggtgttgagggaaagacctggtgggaggtgattggattcatgggggcagtttcccccatgctgttctcatgatagtgagttctcacgagatctgatggttttataagcatctggtatttcccttgcttgcacttctctctcttgctgccatgtaaagaaggtccttgcttcccctttgccttccatcatgactaagtttcctgaggcctccccagccatgcagagacagnnggacnaannaacctcttttct

SEQ ID NO: 731202 - DNA, 2269 bp, Homo sapiens; identical to SEQ ID NO: 83320
  misc_feature (294)..(294): n is a, c, g, or t
  misc_feature (1561)..(1561): n is a, c, g, or t
  misc_feature (2042)..(2042): n is a, c, g, or t
  misc_feature (2045)..(2045): n is a, c, g, or t
  misc_feature (2072)..(2072): n is a, c, g, or t
  misc_feature (2129)..(2129): n is a, c, g, or t
  misc_feature (2176)..(2176): n is a, c, g, or t
  misc_feature (2201)..(2201): n is a, c, g, or t
  misc_feature (2213)..(2213): n is a, c, g, or t
  misc_feature (2224)..(2224): n is a, c, g, or t

SEQ ID NO: 731203 - DNA, 483 bp, Homo sapiens
acatgaacatggggcaggaaggagcatggagaagacaagaacaaggctctcagaaggaaatggtgtggctggagccatgagaactggttgtggagggggtgaggaaggcaaatataatttctgacctacgtaatgatgtatgcacaagaagcctctcttgaatgtattaattcagtaaacagttatggagtccttacaatgtgctagtgggactttgaagatgaatccaaatttggatcctggcctggaaaggctcaaagcccaatatgggagcctggatacaaatgtgaaacttatcttcttttattaaccaatcaatcacctcctgccaaaacaacatcagcaaaaacaacagaaaaaaacaaaaacaaaaacaaaaacaaatctgtgtacacaagacctttgtttccacagcagacttggctaaaggtttgggcatgcatatgcatacccccaaaattaaaaatggaaaattgaacactt

SEQ ID NO: 731204 - DNA, 356 bp, Homo sapiens
acatgaacatggggcaggaaggagcatggagaagacaagaacaaggctctcagaaggaaatggtgtggctggagccatgagaactggttgtggagggggtgaggaaggcaaatataatttctgacctacgtaatgatgtatgcacaagaagcctctcttgaatgtattaattcagtaaacagttatggagtccttacaatgtgctagtgggactttgaagatgaatccaaatttggatcctggcctggaaaggctcaaagcccaatatgggagcctggatacaaatgtgaaacttatcttcttttattaaccaatcaatcacctcctgccaaaacaacatcagcaaaaacaacaga

SEQ ID NO: 731205 - DNA, 295 bp, Homo sapiens
acaatgggcttctaagtcccctagagtcccagctgtgtaatttaaggcaaatataatttctgacctacgtaatgatgtatgcacaagaagcctctcttgaatgtattaattcagtaaacagttatggagtccttacaatgtgctagtgggactttgaagatgaatccaaatttggatcctggcctggaaaggctcaaagcccaatatgggagcctggatacaaatgtgaaacttatcttcttttattaaccaatcaatcacctcctgccaaaacaacatcagcaaaaacaacaga

SEQ ID NO: 731206 - DNA, 378 bp, Homo sapiens; identical to SEQ ID NO: 89261

SEQ ID NO: 731207 - DNA, 770 bp, Homo sapiens
tgaaatgacagataaagccataccatataacaacttattgaagatatattaaaactggcaggttaacccacatctagagccagaaagcataaatatttttgacattgattgtcacaaagaaataatgtgaaagtatagggtattttggcatacaaattttgtgtaaatgtcaagaattcaaaggcttttatatctttgtttttggtgaggaattactaatactaaacaactttgtattatcagatattaagactccttttcattctcactaatgttcatcttaatgttttccaaactacactttaaaaccagagctgcaatttctaccacactaatgggaaaatttctggcaataacttttttgcttttataagataaaatattggtgaatgatcaatatgtgatcaacagtcttctgcatgctatttagtataaaactgcctgtttggtttttaaactggaaccactatttacaaaggatgactttaattggctaattcagaaaaatgcagaattacaaaataatcaacaaatatctgtcaagtaccacctcgttgtgtcatttgccatgggatatataaaatcaagtgttaagatatggtccttgctctcacaaaacttaccaaggaactacctaagcaacaaaataattacttcatgaactaaattgcagcaattaaagccaggtgctgtggtacatgccactgcttaggaagctgaggctcaggagtttgaggccagcctggacaacgtaacaagacttcatgtca

SEQ ID NO: 731208 - DNA, 1488 bp, Homo sapiens
caggcttgggggtgggtaaggaagtagaagaagtgggagtggttatcttgctcaaatgagaaaagcctgaaggggtccagaggtaggagctaggaagctctagaagaaaatgtttagaagaagacagacccactctctccccttattacaaaagacagagccaaaaaagaaagggaataatgctgatcctgtttttatttaaaagtaggctattttgttcatcatggattttttgcattaattttgactttaaaataatattgcattaaagtcctatcttgattaataaattgttcaccacccccttaaaatttagtccccccaggtgaatgactcactttgctttaccccagtcctagccctggagactaagctgtaattgggaaggaggttagatctgggggtcggggatgtgtgggggagacaccagaaggcctccttagattctccttagatgaaggtctcctcaagtcaaaggtgggataacttccatgggttgctcaggaagccctcaagctcagatttacagtcccccaggcagtccttttcagactttctcctctagggttcctatttcagggacctcttaccctcataggagggggtcataaactgagcaaacacagacatcacgtttaccaaagaacacatgggttttgcgcaaactcggccttgggctgcagacattatcgacctcatggttcaggactgtccagccaaagggaggagatgtgggggaggacgggcaaaggtctaaaaaggacccagtctcagagcaaatgccaccctctcctcatccaggccttcctcttctccctgtcccactccagcagcccttgcccattccagcttccaggcaggactcctgggtggagcactgggggtgggtgaaaggaaggcaagtcagaggtcctggcagccagctctgagcatgcctctgcctcccacacttgcgtggagggattacagagggaacaggtaaagcctaggtttttattagccatgagacctcaaagatggttctggaaggatggagggacggggtgcctaagaaagaagaggcataaagtgtgagatggatacaatagttcagttctgaggagaccatgtgaagagacagcagagtaggcagactacagcataagcaggcaggctctgtgtcatctggggtgccagttagggcccttgtaggagatagaggacttttcagctgtctgtttttgcttcatcaagagaacttagtgaaggaattatttacagaggtataggcagagttaagggaaccagtatgagatgttgaggccccagggactagcaagatagaaagcctttaggaccccctagtgttgaagcagttatatcagaatgtaggcagagctggggccatggaagggggtagccaggtagtgtagggacacagaatagccacagttacacagaaccatgacacctagacagagagggaacagggataagaaatgccctgac

SEQ ID NO: 731209 - DNA, 540 bp, Homo sapiens
gacgggcaaaggtctaaaaaggacccagtctcagagcaaatgccaccctctcctcatccaggccttcctcttctccctgtcccactccagcagcccttgcccattccagcttccaggcaggactcctgggtggagcactgggggtgggtgaaaggaaggcaagtcagaggtcctggcagccagctctgagcatgcctctgcctcccacacttgcgtgcccacagctggtcagtttactggatgaccaagcatagatctgtctcatcttttggagggattacagagggaacaggtaaagcctaggtttttattagccatgagacctcaaagatggttctggaaggatggagggacggggtgcctaagaaagaagaggcataaagtgtgagatggatacaatagttcagttctgaggagaccatgtgaagagacagcagagtaggcagactacagcataagcaggcaggctctgtgtcatctggggtgccagttagggcccttgtaggagatagaggacttttcagctgtctgtttttgctt

SEQ ID NO: 731210 - DNA, 794 bp, Homo sapiens
ttcatggagtgcaacatgtaactttatattagaaaatggaatgtcacatctttaccatgggacagagacacaggaagatgtcaaagtctgaaatagcaagtgaagctgaatgtagcttatgatagggagggagggctctgctggacagggacagtctctgagcaggtgaactgctgatctcacagaggtcagcaatcggcggattttcaccgtgtaagtagactgaagtcatccgtagaagcacagacgtactggactgtcacatctactagaaaataaagcatctgccacctggggggtggggagggtccagtttagcccaatgggggacaacccagcacatccacctttggaacccaccagttaaaggtattgtcagagtatcctgtttgggaagaattcccatttcaggcaccctcgatgaagagccaggccaggaacatgggatgagagagcgaaatggtggaaaaaggggagataggctaattccagaggcacctgcccagccaacactcagccctggctgcgcgcactgagtcctgtgtctgctgcaggtatcgggctttccgggatgacgatggacattattcccagacctactggaatcttcttgccatccgcctggccttcgtcattgtgtttgaggtagccgaggcacctgctggttctcccatccatggcatgaggccccgaccctgtgctttgcctaattcgagcacgtggtgaggggtcggtgccgtcacttcctgctgtgtcatcttggtcaaatcagagctcttctctgcacctgcgtt

SEQ ID NO: 731211 - DNA, 413 bp, Homo sapiens
catgcggcaagagcgagtcgcaggaacaagtggggaatcttggccgcggccccctcccccgccttataaaaaagaaattgacttttgtttggagtttgtgaaaagtggggctcggggcccagtcaatggggcgccccgcggcgcgggctgagtggagctagcgcgaaccgctcagccgcggccccaattaatccgccctttgtgcggcccgcccggccgcccccgccggcacgcaccagcggcccattgttcggcctcgccgggccgcgggatttacccttttcaaacagccggttttgtccagggcagttcgagcggaagtttctcactgacaatttgccccaaatagatagatttgtcagaagcgacttcgggaaggaagcaaaaagccaccggcccgaaggttgggccca

SEQ ID NO: 731212 - DNA, 528 bp, Homo sapiens; identical to SEQ ID NO: 90986

SEQ ID NO: 731213 - DNA, 1022 bp, Homo sapiens
agatgttttgggctattttatgagaatatttactcataccacttggtataggttgttccaggctgtaaaattcaatgctgggtctgtgaatttatctgtttggcataatgcttctcttcacagtagctactcagtgtgtaaccaactaaataaaacagctataaattctttatgcaacatgtggtctgaaaaagtttgaggctttcctcatttgtgtcagattttccctgtcctgtattcagaaattgagtccataatctcagctcataaggtgcttgataattctaatataacaactaaaactgtcaaatgaagtctcttattctgagaaataataagtctttgtgactgtcataaaacaggaaacaatttttgtttgtttttagagacatagtctccctgtgttgcccaggcttgtcttgaacttctgggctcaatggatcctcccttcctcctaagtagctgggattgcaggtgcatgcctgagaaataataattcttgccgctaatttagtccttctgtatgttattttaagtaagtatttagtctgttcctttagtaattcttctataagtcatggaagacagctactgttggtaactgctggaatgatgtgcagactgagaatatgaaaacagaaactctgacactgaaagtgattggtcacataggcaaatgttgatttattttccaaaaaggaacctggaagagtgaggagttattttctagagttaacctgaagcagtggccgagtgccatgcacacgtgtaatctcagcactttgggaggccaaggcaagaggatcacttgaggccaggaatcgagaccaggctggccaacatggcaaaaccccatctctactaaaaatacaaaaattatctgggcatggtggcacgtgcctgtaatcccagctagggaggctgaggcacaagaatcacttgaacccgggaggcagaggttgcagtgagccgagattgtgccactgtgctccagcctaggtgacacagcaagactctctctc

SEQ ID NO: 731214 - DNA, 311 bp, Homo sapiens
  misc_feature (110)..(110): n is a, c, g, or t
  misc_feature (137)..(137): n is a, c, g, or t
  misc_feature (222)..(222): n is a, c, g, or t
  misc_feature (224)..(224): n is a, c, g, or t
aagtcacttgccctggctctaccttgaagtggttctcagggttggggcgagagtcggggtggggaccgagatgcagctctatcctgtgcccctggtcgcagcaggcagcnccagttcgcgtgttctacttggcctgntcctgccgcctaatgagctcaggtctaggccgagcagagggggcacctggtcggactcggttgggctcggcggccccgccctccncncccccccaggcgggcccttctcgacggcgcggggcggctgcgggcgcggggctgaaggcggaaccacgacgggcagagagcacggag

SEQ ID NO: 731215 - DNA, 1219 bp, Homo sapiens
taaatttaaaaaatgtatctataaaccaagaacagagtctgatatgaaatagacaaactttaataaggaaaaatgcaaaatccggtagttaaaaagcatgatggcaaaactgaagggtagaaggaggcaggagtttttgcaaaataaccagggaattttaatttcaaattaaatataagccaatagtgcaatgcaaccgataaagggaaaaatcaaatacaactgatcaagttggaaaacagtgagctattgggcttcattaatccacaaaaggaaatatgtggtaaagttggaatcacacctggcctatttatacaactttcaggccacacattaaggggaacattggcaaactgatcttctgcctggatgttttatccattattaaaaggggaatattgaagtctaccactattattgtattgctgtcaatttctccattcagatatgtcaatatttgctttgtatatttaaatgctctagtattgaatatgtatatacttataattgttatatcttcttactgaattgatcattttgtcatatggtgacctttatctctagagacaattttcaattttaagtctgttttgcctgacataaatatagccatttctgctttctttttgttaccattttggaatgtctttttctatcttgtcactttcagcctatgtgtatctttacatctagggtgggtttcttgtagatagcaagtcactggatcttgttttcttcataattcagtcttgacgtattgttatattagttcattttcacagtgctataaagaaatacccaagactaggtaatttataaaggaaagaagtttaattgactcacagttccatatggctgtgctgggggaggtcaagtaacttacaatcatggcagaaagcaacggagaagtaagtaccttcttcacaaggcagcgggaaagataaaacgaagggagaagagcctcttataaaaatctccagatctcctgagaactcactcactatcaagagaaaagcctgggggaaatcacccttatgatctaatcacctcttacctagtccctgccgtgacaagtgtggattacagtcagagatgagatttgcgtggggacacagagccaaaccatactgcttgtatatttataagaattcatcaatttcttctatattatccaatttttggcacataattgtaaataaaagtcccttatgatctttta

SEQ ID NO: 731216 - DNA, 1459 bp, Homo sapiens
tgcgatttgttaaaatacagtatactcacagcttttcaaagaaattactgtgtaatgtaagatgcctttttatatagaacatcaatgaaactaaatacttcactttatatttttgtagacttactaattactcatttcagaaacatttattaagcacatactagatatcaagtatttcaaggcactatagatttagagagaagaaaataagaattgtaaaattgagaaggtcatgtttgacttgtacttcaaggactgccaatggatttaccaaatatagaagcagagaagggaattttattcaaaagtgacagcatggacaagggcacagaagtttaaaagagcatggaactttttaaaatataaaataggtcagtgtgattacagtatagtttttatggaggggagtaaaaagataaattggaaataaaaccagagtgtcctatatgcaattcttaatacttggaattaattccatgggaaataggaaacagggagagtcataatcaagctgtatatttataaatatagtagtgatggtgctgttcacaaataacgttgatgagaaataatttggaatggttaaaagcaaagaaactcattaatatggaatagattgtgggagagaggagaaagccttgtttcaaagcattaattctaaataatcataattataagataaagttgtacacatctataaataaataaatacagcttatattataaatactatataatattgaaattataagtataatataaatatagctttaagtaaatcattacaaaaatgtcagttaacaatggaagactgtgagagagaggattaaaacaagagcaaaacagaaaactattaacaaaatggcagttagtaagtcctcagcaatcagtaattattttaatgtaaatggcttaatatcccaaataagaatgcttaaagtagctgagtgaatcaagtcactggatcttgttttcttcataattcagtcttgacgtattgttatattagttcattttcacagtgctataaagaaatacccaagactaggtaatttataaaggaaagaagtttaattgactcacagttccatatggctgtgctgggggaggtcaagtaacttacaatcatggcagaaagcaacggagaagtaagtaccttcttcacaaggcagcgggaaagataaaacgaagggagaagagcctcttataaaaatctccagatctcctgagaactcactcactatcaagagaaaagcctgggggaaatcacccttatgatctaatcacctcttacctagtccctgccgtgacaagtgtggattacagtcagagatgagatttgcgtggggacacagagccaaaccatactgcttgtatatttataagaattcatcaatttcttctatattatccaatttttggcacataattgtaaataaaagtcccttatgatctttta

SEQ ID NO: 731217 - DNA, 1060 bp, Homo sapiens
tgcgatttgttaaaatacagtatactcacagcttttcaaagaaattactgtgtaatgtaagatgcctttttatatagaacatcaatgaaactaaatacttcactttatatttttgtagacttactaattactcatttcagaaacatttattaagcacatactagatatcaagtatttcaaggcactatagatttagagagaagaaaataagaattgtaaaattgagaaggtcatgtttgacttgtacttcaaggactgccaatggatttaccaaatatagaagcagagaagggaattttattcaaaagtgacagcatggacaagggcacagaagtttaaaagagcatggaactttttaaaatataaaataggtcagtgtgattacagtatagtttttatggaggggagtaaaaagataaattggaaataaaaccagagtgtcctatatgcaattcttaatacttggaattaattccatgggaaataggaaacagggagagtcataatcaagctgtatatttataaatatagtagtgatggtgctgttcacaaataacgttgatgagaaataatttggaatggttaaaagcaaagaaactcattaatatggaatagattgtgggagagaggagaaagccttgtttcaaagcattaattctaaataatcataattataagataaagttgtacacatctataaataaataaatacagcttatattataaatactatataatattgaaattataagtataatataaatatagctttaagtaaatcattacaaaaatgtcagttaacaatggaagactgtgagagagaggattaaaacaagagcaaaacagaaaactattaacaaaatggcagttagtaagtcctcagcaatcagtaattattttaatgtaaatggcttaatatcccaaataagaatgcttaaagtagctgagtgaatcaaaaaacatgatccagtgacttgctgtctataagagactcactttagatttaaaaatacatataggctggaagtaaagagatggaaaaggatattatgaaaatggt

SEQ ID NO: 731218 - DNA, 536 bp, Homo sapiens
ccaggaaggaggggcttagcttcggccgccattctgaggcagccacctccacccccacccccaccgcaacagccagccaaggcgctaggagtctccagctgccggcctcagctggtgcactagtaccgcagtcccagcaccttgcccggaatcccgtcaccccgcaggatggggcagggacaggtcatcttcaagccaagggaagagcaggttcactgccacccgcgatccccttttcttcctggatcttacagccaggctagggggcgtcgaacccaatggggccttagatcattccttgtccggaacagaatctctgcggaaccgccagacagacacacagctgctgctgcggatactggcttcttggggccaagacctcaacatgcaggacctcacatttccagcgatgcacacgttttttgagaacatcccgacctttcctcctccccaggaagatgctgcagacgtgcccgccatcccaggtctcgaagagctcttaaggcaaacctccggcacccgggccacacccaccg

SEQ ID NO: 731219 - DNA, 357 bp, Homo sapiens; identical to SEQ ID NO: 324528

SEQ ID NO: 731220 - DNA, 701 bp, Homo sapiens
  misc_feature (8)..(8): n is a, c, g, or t
ttgtcttnttattaatggccatttggactggtgtgagatgatatctcattatggtttagatttgcatttttctgatgattagtgatggcttttctctagggtgaaggtacactcgagcgtggtcattgaggacaagtcgacgagagatcccgagtacgtctacagtcagccttacgagtggactgatcaagttgaaagcaacagaacaagcatctataagaattgattatatgtcccagcactttggaaggctgaggcaagtggatcccttgggcctaggacttcgcgagaccagttgggcaacatgatgaactcctactaattttcgtccttcagaacaagatggaagaaactacggtcacatatgcaaatggagaagatgatgaacacagaaaaattatgcaaagataatccctaaaccttctttctcatcaaaagttatagcaaggtggtttaatatatcactgacggaacacgatgctttgtttaatgaagactcagacggaaaggatcagacatcaacctataaatgcatcaaccagaaggaaagaccaattttgaaaactgttgagcattattctatacctctaagctgttcttttctgaaccatgaatcgggagaattattgtcactcatacatgagtatgagttgtaattctcaattcccaagtaaaaatcttcctgcttttgttatattttt

SEQ ID NO: 731221 - DNA, 1096 bp, Homo sapiens; identical to SEQ ID NO: 64859

SEQ ID NO: 731222 - DNA, 672 bp, Homo sapiens
  misc_feature (8)..(8): n is a, c, g, or t
ttgtcttnttattaatggccatttggactggtgtgagatgatatctcattatggtttagatttgcatttttctgatgattagtgatggcttttctctagggtgaaggtacactcgagcgtggtcattgaggacaagtcgacgagagatcccgagtacgtctacagtcagccttacgagtggactgatcaagttgaaagcaacagaacaagcatctataagaattgattatatgtcccagcactttggaaggctgaggcaagtggatcccttgggcctaggacttcgcgagaccagttgggcaacatgaacaagatggaagaaactacggtcacatatgcaaatggagaagatgatgaacacagaaaaattatgcaaagataatccctaaaccttctttctcatcaaaagttatagcaaggtggtttaatatatcactgacggaacacgatgctttgtttaatgaagactcagacggaaaggatcagacatcaacctataaatgcatcaaccagaaggaaagaccaattttgaaaactgttgagcattattctatacctctaagctgttcttttctgaaccatgaatcgggagaattattgtcactcatacatgagtatgagttgtaattctcaattcccaagtaaaaatcttcctgcttttgttatattttt

SEQ ID NO: 731223 - DNA, 1196 bp, Homo sapiens; identical to SEQ ID NO: 64864

SEQ ID NO: 731224 - DNA, 1029 bp, Homo sapiens; identical to SEQ ID NO: 64869

SEQ ID NO: 731225 - DNA, 1125 bp, Homo sapiens
tgacttaaaactagagaggatctaggaactggagctgctgcctctgtctgctaagatgtgaagtccaagactgaaagtaacatagcagaaggagaaccaaaagatatgttgagtcttgatgctatttgttgaaccagtcctgaatccagctgtgtcggagtcagcgcagcttttgaagctggagagcatcatattttagaaagatcaagcaatgtggatgaggacacattaaaaagagaagaccgagaggaggggacaccactcaggcttataacctccagctcacatttcagcaccaaaggaccaaagcctagacctgagatctggcacttgcaaaaagaaagatcacctggaagaacaaaatagaagactcctgctcccaataggcttgggtcaggaagaaggctgttggcataattgtggagtaggaagatggaaaacaactcctagagatcccaacagctgaacgcgtgcttgggcagtggctgcgggtgaagtcatgggaaggcaagtcatgaagggcattaatcaaggatatgttctgggagtaactcccctgctttccctggatgtgtgcgagaaagcataggcatccactttctgaccaacaggagacccagtctcaggatggagcagacaccatgcatggtagagcagagagacagatacaacctaggtccttgatgaaatgattggccactggatcagccacagttaaagactgcctacctttggacttctggttatcttaggccaaaaatgtcctttttgtttaaggcactttgagccgggttttctaagacctagcagtctcaaccatccaaactaataagctgaattaactagatttcctgtcatgtccttcctgcctgattggtagcccttgactccaatttggcctcattttccgtaccttactggctgccttttcctctactcataggtcacttggaaataaaatatagatttacttcaaactcccactatcacatgcatttcttttcttactgacttcacggccttcaaatacggcctcataatcatttactctctgttaggttcctccaatgacttggatcactcctagcctgtcttgattggccacctccacactaatgccaaaaa

SEQ ID NO: 731226 - DNA, 1028 bp, Homo sapiens; identical to SEQ ID NO: 64860

SEQ ID NO: 731227 - DNA, 654 bp, Homo sapiens
tgacttaaaactagagaggatctaggaactggagctgctgcctctgtctgctaagatgtgaagtccaagactgaaagtaacatagcagaaggagaaccaaaagatatgttgagtcttgatgctatttgttgaaccagtcctgaatccagctgtgtcggagtcagcgcagcttttgaagctggagagcatcatattttagaaagatcaagcaatgtggatgaggacacattaaaaagagaagaccgagaggaggggacaccactcaggcttataacctccagctcacatttcagcaccaaaggaccaaagcctagacctgagatctggcacttgcaaaaagaaagatcacctggaagaacaaaatagaagactcctgctcccaataggcttgggtcaggaagaaggctgttggcataattgtggagtaggaagatggaaaacaactcctagagatcccaacagctgaacgcgtgcttgggcagtggctgcgggtgaagtcatgggaaggcaagtcatgaagggcattaatcaaggtctgttgtggggaaagtcagatgatgtgagtccttgttcacacagtaagtgcccagaaaaccttggtgcttttcctcttcccttccctgaagctgaacttctgcggaaaaatccaagagg

SEQ ID NO: 731228 - DNA, 852 bp, Homo sapiens; identical to SEQ ID NO: 64865

SEQ ID NO: 731229 - DNA, 823 bp, Homo sapiens
gaaaatgtgacaggatatatgcagtttccttaggggcacattctgagatgcttggatgacccacaaggactttgttaaacacaaatcccatcaggaaacaggcagttcactatgaccttatgaaagttttaattcaaagcacttgaagatacttttttttctgggcttcctgatcttacttcagtaaggtttttataaagttaatatccaagtaagagtatagctttcaaaggctattcctcattcttaaatgcattaaactgttgattaataacattatctaaaagctgtcaaataaaaataagaccaaactctttacttgtacagagtggactgatcaagttgaaagcaacagaacaagcatctataagaattgattatatgtcccagcactttggaaggctgaggcaagtggatcccttgggcctaggacttcgcgagaccagttgggcaacatgaacaagatggaagaaactacggtcacatatgcaaatggagaagatgatgaacacagaaaaattatgcaaagataatccctaaaccttctttctcatcaaaagttatagcaaggtggtttaatatatcactgacggaacacgatgctttgtttaatgaagactcagacggaaaggatcagacatcaacctataaatgcatcaaccagaaggaaagaccaattttgaaaactgttgagcattattctatacctctaagctgttcttttctgaaccatgaatcgggagaattattgtcactcatacatgagtatgagttgtaattctcaattcccaagtaaaaatcttcctgcttttgttatattttt

SEQ ID NO: 731230 - DNA, 1280 bp, Homo sapiens; identical to SEQ ID NO: 64868

SEQ ID NO: 731231 - DNA, 1217 bp, Homo sapiens
tgacttaaaactagagaggatctaggaactggagctgctgcctctgtctgctaagatgtgaagtccaagactgaaagtaacatagcagaaggagaaccaaaagatatgttgagtcttgatgctatttgttgaaccagtcctgaatccagctgtgtcggagtcagcgcagcttttgaagctggagagcatcatattttagaaagatcaagcaatgtggatgaggacacattaaaaagagaagaccgagaggaggggacaccactcaggcttataacctccagctcacatttcagcaccaaaggaccaaagcctagacctgagatctggcacttgcaaaaagaaagatcacctggaagaacaaaatagaagactcctgctcccaataggcttgggtcaggaagaaggctgttggcataattgtggagtaggaagatggaaaacaactcctagagatcccaacagctgaacgcgtgcttgggcagtggctgcgggtgaagtcatgggaaggcaagtcatgaagggcattaatcaaggttattttttccacagatgaatttctaatcctaaataatcatttacatgaattcagatttttttgatccagcttttctctagggtgaaggtacactcgagcgtggtcattgaggacaagtcgacgagagatcccgagtacgtctacagtcagccttacgagtggactgatcaagttgaaagcaacagaacaagcatctataagaattgattatatgtcccagcactttggaaggctgaggcaagtggatcccttgggcctaggacttcgcgagaccagttgggcaacatgatgaactcctactaattttcgtccttcagaacaagatggaagaaactacggtcacatatgcaaatggagaagatgatgaacacagaaaaattatgcaaagataatccctaaaccttctttctcatcaaaagttatagcaaggtggtttaatatatcactgacggaacacgatgctttgtttaatgaagactcagacggaaaggatcagacatcaacctataaatgcatcaaccagaaggaaagaccaattttgaaaactgttgagcattattctatacctctaagctgttcttttctgaaccatgaatcgggagaattattgtcactcatacatgagtatgagttgtaattctcaattcccaagtaaaaatcttcctgcttttgttatattttt

SEQ ID NO: 731232 - DNA, 429 bp, Homo sapiens; identical to SEQ ID NO: 95785

SEQ ID NO: 731233 - DNA, 1453 bp, Homo sapiens
tgaagcatgaaaagttaacatcatttgttatcctttctttccccactatatattgtcttacccagagtagggctatactttggtggtgttttaacatcttctaataagtgatcataagcaacatacagatgctaatatttgaaatcttgttttttcttacttcctaataatcaaattatattaatatttcacactacaaaaaaataggattttctaatttgtaaaaacaagagctcctgctatctcttggaagttaagtccttaggaaccctatcttatctttctaaaaataataagtaagaacaatcacatgtgattctggctattaaaatcatacatccctagtggaattaacaagcttgaccaattatgattatgctaaattgttttaggctaggaggactgtcagtccctacttcttcccatttttcttgggatatctttatattggctagatttgttgccaatataaaattgacacagcagagacactcctctaacttaaatttttagtggagtttggtttttgctaaccccgtactaataaacactttaatgacttttttcatttcaaaatatttaaatgtataaaattgcctatgctgcttattgaaagaaccgtccttttgggcataagaagactttttcaacctaaaccgttatgtgtgatttattaacaacttaacaaagaaagtaccaacatctctcaaaatgtagttgatattcttacctatctcagaaatattaacgaattggattcacaaaagaatgtcttacatactgttgacatttatgtgaatattctttatactgttgtaaatgtttcattcaacttaataacattttaaaagatgtatgtatctgatttttctttagaaaatattatatttttatttgtattttttacattttaaagttcatctctatgtgcagctatttttatattgccaaaaactcacataaatacaaaataagtgaaatatgcaaaaaaaaatattttggcaagcattacactgcatatttttttaaatgtttgtgggccagtctcatacaattgattattctaagaatgtgttgtgtcttatcactgtaaatatggcacaaacctgtttatctcagtagtgtaaataattgaaagattgaattctccctgttcaatttttattttaatttccttgtaatttctccagctgacattactgtatcaaaagatgcataagatttttgatttgcggtttggagataattgcattgtgttcagtttccagtttgtttttatttgctttttaaatttgttttcagggttcctagtttgtgagaagttgatcttcagaattatttttacactatttatgacttattttcataatgtaaaaagtgtgtaattattacaatattaatccaaacaatgataatgaattgtattgttataaagctttattgatgttcatga

SEQ ID NO: 731234 - DNA, 496 bp, Homo sapiens
cctgggaggcaggggttgcagtgagcagagatctcgccacttgcactccagcctgggtgatggagcgagactctgtctaaataaataaaaatacaaaaattaggcctgacctcaagtgatatgcctgcctcggcctcccaaggtgttgggattacaggccactgcgcccagcctaaaacaacgtttgaacattagaattaagaattttttttttgtagagattggggggtgtctcactatgttccaggctagtccagaactcctgagctcaacctatccttcagccttgacctcccaaaatgctgggattacagatgacagccacctaactcagataccactttctttttaaatatagacttcccgggccaggtgcggtggctcatgctcgtgatccgcctgcctcggcctcccaaagtgctgggattacagatgtgagccgccgtgcctggctatccactgataattcttgctggaattaattcctgtcatgatg

SEQ ID NO: 731235 - DNA, 2265 bp, Homo sapiens
gcgatggcgatgatgcctctagtcctgcatcatccagagcggcaggcgagctggggtccggactgcgagatggaggaggggcggcgctgcggcacccggcaggcttatctgtcttgggcctcttttgtcacatattgctcatctgtgagctgaggccctgactcactgagtatttttggggagcagaagaaggagacatttctctccgaaaatgaactcaacaggccaccttcaggatgcccccaatgccacctcgctccatgtgcctcactcacaggaaggaaacagcacctctctccaggagggtcttcaggatctcatccacacagccaccttggtgacctgtacttttctactggcggtcatcttctgcctgggttcctatggcaacttcattgtcttcttgtccttcttcgatccagccttcaggaaattcagaaccaactttgatttcatgatcctgaacctgtccttctgtgacctcttcatttgtggagtgacagcccccatgttcacctttgtgttattcttcagctcagccagtagtatcccggatgctttctgcttcactttccatctcaccagttcaggcttcatcatcatgtctctgaagacagtggcagtgatcgccctgcaccggctccggatggtgttggggaaacagcctaatcgcacggcctcctttccctgcaccgtactcctcaccctgcttctctgggccaccagtttcacccttgccaccttggctaccttgaaaaccagcaagtcccacctctgtcttcccatgtccagtctgattgctggaaaagggaaagccattttgtctctctatgtggtcgacttcaccttctgtgttgctgtggtctctgtctcttacatcatgattgctcagaccctgcggaagaacgctcaagtcagaaagtgcccccctgtaatcacagtcgatgcttccagaccacagcctttcatgggggtccctgtgcagggaggtggagatcccatccagtgtgccatgccggctctgtataggaaccagaattacaacaaactgcagcacgttcagacccgtggatataccaagagtcccaaccaactggtcacccctgcagcaagccgactccagctcgtatcagccatcaacctctccactgccaaggattccaaagccgtggtcacctgtgtgatcattgtgctgtcagtcctggtgtgctgtcttccactggggatttccttggtacaggtggttctctccagcaatgggagcttcattctttaccagtttgaattgtttggatttactcttatatttttcaagtcaggattaaacccttttatatattctcggaacagtgcagggctgagaaggaaagtgctctggtgcctccaatacataggcctgggttttttctgctgcaaacaaaagactcgacttcgagccatgggaaaagggaacctcgaagtcaacagaaacaaatcctcccatcatgaaacaaactctgcctacatgttatctccaaagccacagaagaaatttgtggaccaggcttgtggcccaagtcattcaaaagaaagtatggtgagtcccaagatctctgctggacatcaacactgtggtcagagcagctcgacccccatcaacactcggattgaaccttactacagcatctataacagcagcccttcccaggaggagagcagcccatgtaacttacagccagtaaactcttttggatttgccaattcatatattgccatgcattatcacaccactaatgacttagtgcaggaatatgacagcacttcagccaagcagattccagtcccctccgtttaaagtcatggaggctataggatcttatgtaaacagtttttgtttctgatagtaatggactttattctaacttgagatcagtggcggatcaaaacctacaagattcaactgaaaagttggcagttatggttttctttcatctgatgtgtcagtatctgttgatttgctttgtagtttgttgacatcttaagatttgatgtgaaagttttagattttttaccctgctctttgcctcagtcttttgtaccgagcctttaaatagatgccaggaatgaagctactgtgttaaagtagaaagtcaaccgattatcatgatttgagtcagtgttatgtgacttcaaaataaggtattgactggattttttttaaagaatgtgaaaatatgatttttgctgaggtgttatttttattaattgaattgtaaattttgattt

SEQ ID NO: 731236 - DNA, 640 bp, Homo sapiens; identical to SEQ ID NO: 403138

SEQ ID NO: 731237 - DNA, 290 bp, Homo sapiens
  misc_feature (173)..(173): n is a, c, g, or t
  misc_feature (175)..(175): n is a, c, g, or t
  misc_feature (245)..(245): n is a, c, g, or t
  misc_feature (281)..(281): n is a, c, g, or t
acggagccccacacagtgccttcccccaaccatgagccaattctgtcacagtccgaaatagactttttctaagggtttcgtgtccctcttttatccgtcgcagtgtaaagggtctgatccgcagcctgcattgtgcgcgcaccgaggcaggagcggatgtcttctgaggagancnctggctggggttgactctcaggctcccggctgtccgcccgcccacacgcagcgaggaggggcggactgcntttccggaatgcttaaaatatggggaatttcttagngtcaatgga

SEQ ID NO: 731238 - DNA, 679 bp, Homo sapiens; identical to SEQ ID NO: 728765

SEQ ID NO: 731239 - DNA, 901 bp, Homo sapiens
ccccgcttccagtcagagttcaagttaaaacagaaaaaaggaagatggcaagaatattgttacttttcctcccgggtcttgtggctgtatgtgctgtgcatggaatatttatggaccgtctagcttccaagaagctctgtgcagatgatgagtgtgtctatactatttctctggctagtgctcaagaagattataatgccccggactgtagattcattaacgttaaaaaagggcagcagatctatgtgtactcaaagctggtaaaagaaaatggagctggagaattttgggctggcagtgtttatggtgatggccaggacgagatgggagtcgtgggttatttccccaggaacttggtcaaggaacagcgtgtgtaccaggaagctaccaaggaagttcccaccacggatattgacttcttctgcgagtaataaattagttaaaactgcaaatagaaagaaaacaccaaaaataaagaaaagagcaaaagtggccaaaaaatgcatgtctgtaattttggactgacgttttaagaatttgttaccttacagaagagcaagggcttaggggttggaggtggcagataaaagaggattttcaactcaaatcttgtttcctgctggcctggtctgcccacgagctagagcggggaaatgttgagctcaaatgggtaaattgagaccagaaaattattttttcaacctagagaatctcctcttacagggggatgcatataacagatcatgtatgtgtagttatttctaagtagtaattcttcccagctctttgatttgccatatataaaataggtgggtcgtatgtcttccctttagacatgatgttttctactcatttgtctctctggccaattgaattattaataaaaggtctgtattatcaa

SEQ ID NO: 731240 - DNA, 1466 bp, Homo sapiens
ccccgcttccagtcagagttcaagttaaaacagaaaaaaggaagatggcaagaatattgttacttttcctcccgggtcttgtggctgtatgtgctgtgcatggaatatttatggaccgtctagcttccaagaagctctgtgcagatgatgagtgtgtctatactatttctctggctagtgctcaagaagattataatgccccggactgtagattcattaacgttaaaaaagggcagcagatctatgtgtactcaaagctggtaaaagaaaatggagctggagaattttgggctggcagtgtttatggtgatggccaggacgagatgggagtcgtgggttatttccccaggaacttggtcaaggaacagcgtgtgtaccaggaagctaccaaggaagttcccaccacggatattgacttcttctgcgagtaataaattagttaaaactgcaaatagaaagaaaacaccaaaaataaagaaaagagcaaaagtggccaaaaaatgcatgtctgtaattttggactgacgttttaagaatttgttaccttacagaagagcaagggcttaggggttggaggtggcagataaaagaggattttcaactcaaatcttgtttcctgctggcctggtctgcccacgagctagagcggggaaatgttgagctcaaatgggtaaattgagaccagaaaattattttttcaacctagagaatctcctcttacagggggatgcatataacagatcatgtatgtgtagttatttctaagtagtaattcttcccagctctttgatttgccatatataaaataggtgggtcgtatgtcttccctttagacatgatgttttctactcatttgtctctctggccaattgaattattaataaaaggtctgtattatcaaagagtattctagtatttttgttacttttaatatttgatgccttttggaggtaaagctgttgggggaagaagagtttttggacccatagatgtttggatgatgtctctaatttgtcatttagaaaaatctcaaaaatgatttcagttgaataacttgccttctaaatgatcaatttacttctcccccaattttaaagaagtatgtgtatatttaataggggaaggtagtttatggaaatatttttaatggaatagttttcccttaatatgtatccttgctggatattattcaagctgcaagtcatcaaaagacccagaaaaaaaaaagtctgtaggttattttctctacttctatttcaactttgaatttcctcttcctgtgcaaattcctctagtcaagtgtgatatatcaagaaatctgaggaggatgcaggttttgtggtcctgatgggcccacaagtttttctatatttaactggaaatatgctttgattttgtgttattaatataattcttttgatgtagtcatgagtttttctttgtttgcatataattaaaatgcctct

SEQ ID NO: 731241 - DNA, 848 bp, Homo sapiens
ccccgcttccagtcagagttcaagttaaaacagaaaaaaggaagatggcaagaatattgttacttttcctcccgggtcttgtggctgtatgtgctgtgcatggaatatttatggaccgtctagcttccaagaagctctgtgcagatgatgagtgtgtctatactatttctctggctagtgctcaagaagattataatgccccggactgtagattcattaacgttaaaaaagggcagcagatctatgtgtactcaaagctggtaaaagaaaatggagctggagaattttgggctggcagtgtttatggtgatggccaggacgagatgggagtcgtgggttatttccccaggaacttggtcaaggaacagcgtgtgtaccaggaagctaccaaggaagttcccaccacggatattgacttcttctgcgagtaataaattagttaaaactgtgcatgtctgtaattttggactgacgttttaagaatttgttaccttacagaagagcaagggcttaggggttggaggtggcagataaaagaggattttcaactcaaatcttgtttcctgctggcctggtctgcccacgagctagagcggggaaatgttgagctcaaatgggtaaattgagaccagaaaattattttttcaacctagagaatctcctcttacagggggatgcatataacagatcatgtatgtgtagttatttctaagtagtaattcttcccagctctttgatttgccatatataaaataggtgggtcgtatgtcttccctttagacatgatgttttctactcatttgtctctctggccaattgaattattaataaaaggtctgtattatcaa

SEQ ID NO: 731242 - DNA, 834 bp, Homo sapiens
agagtattctagtatttttgttacttttaatatttgatgccttttggaggtaaagctgttgggggaagaagagtttttggacccatagatgtttggatgatgtctctaatttgtcatttagaaaaatctcaaaaatgatttcagttgaataacttgccttctaaatgatcaatttacttctcccccaattttaaagaagtatgtgtatatttaataggggaaggtagtttatggaaatatttttaatggaatagttttcccttaatatgtatccttgctggatattattcaagctgcaagtcatcaaaagacccagaaaaaaaaaagtctgtaggttattttctctacttctatttcaactttgaatttcctcttcctgtgcaaattcctctagtcaagtgtgatatatcaagaaatctgaggaggatgcaggttttgtggtcctgatgggcccacaagtttttctatatttaactggaaatatgctttgattttgtgttattaatataattcttttgatgtagtcatgagtttttctttgtttgcatataattaaaatgcctctacttaatgtcacaattctgagttttttctaaaacatttttcaccttagagaatgaaagtgtgggggagttgggaatgaagcttgtttttcagttctctgtgatctggacatcccctaagcatgaagaagagagcagaagagggcatttagggtgagccacagacttggcccagggtcattttttagctctgtcagctgtgattttgggtgaatatctttttaccaaattcttatgtaggtcggtcaagtaaagtaccaaaatgcaaaac

SEQ ID NO: 731243 - DNA, 786 bp, Homo sapiens
tgcgcaagctggagtgcaatggcgtgatcttggctcactgcaacctctgcctcccgggttcaagcgattctcctgcctcagcctcctgagtagctgggattacaggcacgtgccactacgttcagctaattttttgtatttttagtagaaatggggtttcaccattttagccaggctgatcttgaattcctgacctcaggtgatctgcccgccttggcctcccaaagtgctgggattacaggcatgagccactgtgcccggcctgaatatgtccaactgatttttggcaaaagtggaaaagcaattcaatgcagaaaggacacacttttcaataacttatactagaacaactggacatgcatgagccactgcatctggcaagtttttcatatattttgaatatcaatccctcatcagatatatgatttgcatgtatttttcctatcctatgggttgctgtttcagtctgttgatactattctttgatacacaaaagttttaaattttcatgaagtccaacttatttttttttcttttattgcccactcttttttttttgacagggtcttgcactgtcacccaggctagagtgcagtggcaaattctagactcactgcagcccctgcctcccaggttcaagcaattctcctgcctcaccctcccaagtagctgggattacagtcatgcaccagcacacctggctaatttttatgtttttaatagagagggggttttcccatgttggccaggctggtctcaaactcctggcctcaagtgatccgccca

SEQ ID NO: 731244 - DNA, 1069 bp, Homo sapiens
ctcccaaagtgctgggattacaggcatgagccactgtgcttggccacctttgaaactttttaagtgtacagttctgtggtattgagtgcatttacattgttgtgccatctttaccacccttatccacagaattattttcattttataaaactgaaactctgaacctattaataactctctatagtcttttctccccagcccctggcagccaccattctactttctgtctccgtgagtttaactactttgtgtacctcatataagtggaatcatacagtatttgaccttttgtgactggcttatttcatttagcgtaatgtcctcaagattcatccatgttgtagcatgtgtcagaattttctctttttttttttttggagatagggtctcgctctgtcatgcgtgctgaagtgtagtggctcaatcatagctcactgcagccttgacctcctgggctcaagtgatcctcccacttcagcctcctgagtagctgggaccacaggcatgtgccaccacgcctggctacttttttttttcttttttgtagagatggggtctccttatgttgcccaggctggccttgaactcctgggctcaagcaatccattccgccttggcctcccgaagtgcaaggattacaggcatgagccactgcatctggcaagtttttcatatattttgaatatcaatccctcatcagatatatgatttgcatgtatttttcctatcctatgggttgctgtttcagtctgttgatactattctttgatacacaaaagttttaaattttcatgaagtccaacttatttttttttcttttattgcccactcttttttttttgacagggtcttgcactgtcacccaggctagagtgcagtggcaaattctagactcactgcagcccctgcctcccaggttcaagcaattctcctgcctcaccctcccaagtagctgggattacagtcatgcaccagcacacctggctaatttttatgtttttaatagagagggggttttcccatgttggccaggctggtctcaaactcctggcctcaagtgatccgccca

SEQ ID NO: 731245 - DNA, 847 bp, Homo sapiens
gacatagtggtctttagtagcacatgagaaagactatccccagtgatgtgcttatgatgttgtgttctcattgtagcctagggcttttcctcgcctcctctgtttccttttccctagagccctgtgtcagcggcaatgaatgcttaagtaggctctgtcaggaaaacgctccgtgaccttggaaacggtatttaacctttctgtggatcagcatccaaatagcaaagcaataatgacaggagctgcctccttcacaagcctatgagttgtgactaagaaaagggattgtaaaacactctgaacatcttaaatactacggacaaatctaacaatgttaatcactcaccagctcatgcccagtggtcatcaccagacccttaaaatcagttggctttctaggagtcctaggtcacttcctgctggaaatggcaacaattttcaccagcattagatgcttgtttataagaaaactgtggattttctgaaataaatgtgaggtcgatcaatgctataacaaagtgcttttcccgtggttaagctgaggttatgagtgctttagtgtggctccattgaccagcactaacttcatgaaaatatttagaaaaagtttttgaaaacatatttttttaaggagaagaaaacagatttggcataagttatatgacagccacagtgaggctttcttatatatgaaagacattgacaatcagtcccatggggtttatgtaatttgagaatatagctttaaaaatcatattacaggcagcagtacttaagattaatacagaggccatttacctttttattacgtgttttattagcacttagcagcttgacttatgaaaga

SEQ ID NO: 731246 - DNA, 609 bp, Homo sapiens
ccatgtctgtcctgtctgaacttcggtgactcttcacaaaatagtacggtaagaaaattatttccatccatttcaggcttttgcagactttctgcattaacagagttaggggtaacaggcttagcatcctttgcatatgagagcctttctagccgccatggctggcaggttgtgaagggtgcctactgcaccctggcctgtcctggggagcctagacacgagctctgtgacagccatgctcctggggctgctccctactcctgtttttagaaacaagcatataattacttcattgataacagtcacagtggagcctagcaaccgatgaaaggaaatagagaaagaaaaagagaaagcaggaaaagaagggtgggatgattttttcctgtagggtggagttcatttccatggcttgattttcacacaggagatggtgttgtataattctgttggaactttcttttcagcacaattaagaattataatcaagtaaaatgttttccatttaatccaacatatgttaatttctttttgaattttaataaagttccttatttttctcaaaattgactgctgaatatctgacagcataaatcaattgtattctaa

SEQ ID NO: 731247 - DNA, 741 bp, Homo sapiens
aatggaaggcattctggcttcacatattatcacatgccccatcatttcacctagatagacgacaaaagctttcctgggaacattaaagacataataaatgtgtgttcacttacagagctttggatattttctgagctgtgtcagtcagttctgctgtcctttgctttggtcgttggcctcagtctcttctatctgcgcgtcaccattgcttggatctgagatgattcttttgctcagttgttgttggatgtctgactcaaactgaatcactggtgctgcatcaaaagagaatgagaagagcctagataagtggaatgacattctgtttaattatttagctcttccttaagaggatcgatcattgtatttccagttttagagcttctcaacattctcttaaaatgagtcagaactatctttcaggctcacttaaaatgttaccatggggagttttatgggaagaaaggctaagagaaggtcaaattagcaaatataatactaaattttccaggatttcagatacgatcctgcttggtcgtgtcctatttttggttagatgtgagaaagataagtgtcttcttttcagccattagtacccatataagaatgagaaaatattttcttaatgagtcacttcctgttttaagagattatgtaattgtcctgtacttctggttttggtcagttttgtttcattcatcagtagatgttgtacgtatatctgttgtatgagagaatcat

SEQ ID NO: 731248 - DNA, 2037 bp, Homo sapiens; identical to SEQ ID NO: 114042

SEQ ID NO: 731249 - DNA, 1848 bp, Homo sapiens; identical to SEQ ID NO: 114044

SEQ ID NO: 731250 - DNA, 2062 bp, Homo sapiens; identical to SEQ ID NO: 114045

SEQ ID NO: 731251 - DNA, 1973 bp, Homo sapiens; identical to SEQ ID NO: 114043

SEQ ID NO: 731252 - DNA, 1967 bp, Homo sapiens
  misc_feature (1268)..(1268): n is a, c, g, or t
tccaggtttgttctggaaaacactaggtctgagagacagcaacaacaaaagtatactctaccattaaagaaataatgccgtatatgtagtagcacttttcaaagaaggaagaaaggtgggagtcatttccagggtaattttgacaagaggaactgtcattatgaacatggtgggtatgaacttctgccttcacgctgccaggagaatgatggaagcatggagatgagggatgtccacaaggaccgccaactaagacacactccttatagaatccaatgcaacaggaagctagtgaaatgacatagtgaagatcaaatccatattaccatttggagaaatagaaaacctccagagagaaaaatgaggcggaacacacaagatgaaaacatgaggaaatggttcaaggtcacaatatgtatatttgtcagtcattttactgcgccctactctgtgaagaataagttgaagccaggccaaatggagatgctaaagctgaccatgaacaaacggtacaatgtctcccagcaagctcttgatctccagaatctccgctttgacccagacttgatgggccgtgacattgatataatcctgaatcgaagaaactgcatggctgccaccctgaagatcactgaaagaaatttccctgagctgttgtctttgaacttgtgcaacaacaaactgtaccagctggatggcctttctgacattacagagaaggctcccaaagtcaagaccctgaatctctccaaaaataagctggagtcggcgtgggagttgggcaaggtgaaagggctgaagctcgaagagctatggctagaagggaacccgttgtgcagcaccttctcggaccagtctgcctatgtaagtgccatccgggattgtttccccaagttgttacgcctggacggccgagagttatccgcaccagtgattgttgacattgacagctctgagacaatgaaaccctgcaaggaaaactttactggatctgagaccctaaagcatttagtcctgcaattcctgcagcagagcaacttgtgcaagtacttcaaggatagcaggaatataaaaattctcaaagacccctacctgcagaggaagctgctaaagcacacaaaatgtccacgaaacgtggactccctcagtgcattgcctgaaactcagcatgacttcacctccatcctggtggacatgtggtaccagaccgtgaacacctgcttcctccctcgggcaggcccagagagccagaggtgggtaggaggttnaggaggatcctgagcacctgagcgcttccttttcaggaaaggatgctctgcttttctgtcaacggagtgttcaaggaaggtggtggtgtttgttgtctctgaagtggaaggatggtctcagggttctgatcttgccttcatgtggaccttcatcactacctctggccgcaattccagtctgtgcatcatgaatgataagctgtttctgagggatgccagcccccaagagactcagagtgccttctccatcccagtgtccacactctcctccagctctgagccctccctctcctaggagcacaggaaatggtgcaggctttctctgcccagtctgggatgaaactagagtggtctcagaagtgccttcaggacaataagtggaactacattagagctggtcaggtcttcactatgctccagactgagggcaagatcccagtggaggccttcaagcaaatcccctaaaaggagccctttgatgtcatctttgtcttccttctcatcctctttgtttcctcttttcaccagcctaagaccactctaaggactggggttggaggcctggctgaccaagaagccaaagttaacttgcaggccacaggacatagccacctgaagagccagttgttctgtgtatttgccccactcatgatcaccgtttattttcataataaacagtgacgttacatgttgtatgtt

SEQ ID NO: 731253 - DNA, 1083 bp, Homo sapiens; identical to SEQ ID NO: 114019

SEQ ID NO: 731254 - DNA, 903 bp, Homo sapiens; identical to SEQ ID NO: 114018

SEQ ID NO: 731255 - DNA, 566 bp, Homo sapiens
aggctgacaagtctgcctacctcatggggctgaactcagccgacctgctcaaggggctgtgccaccctcgggtgaaagtgggcaatgagtacgtcaccaaggggcagaatgtccagcaggtgatatatgccactggggcactggccaaggcagtgtatgagaggatgttcaactggatggtgacgcgcatcaatgccaccctggagaccaagcagccacgccagtacttcataggagtcctggacatcgctggcttcgagatcttcgatttcaacagctttgagcagctctgcatcaacttcaccaacgagaagctgcagcagttcttcaaccaccacatgtttgtgctggagcaggaggagtacaagaaggagggcatcgagtggacattcattgactttggcatggacctgcaggcctgcattgacctcatcgagaagcccatgggcatcatgtccatcctggaagaggagtgcatgttccccaaggccaccgacatgaccttcaaggccaagctgtttgacaaccacctgggcaacaagagtgaaactccatctcaaaataaa

SEQ ID NO: 731256 - DNA, 5956 bp, Homo sapiens
  misc_feature (1233)..(1233): n is a, c, g, or t
  misc_feature (1341)..(1341): n is a, c, g, or t
  misc_feature (2100)..(2100): n is a, c, g, or t
  misc_feature (2308)..(2308): n is a, c, g, or t
  misc_feature (2385)..(2385): n is a, c, g, or t
  misc_feature (2394)..(2394): n is a, c, g, or t
  misc_feature (2409)..(2409): n is a, c, g, or t
  misc_feature (2413)..(2413): n is a, c, g, or t
  misc_feature (2418)..(2418): n is a, c, g, or t
  misc_feature (2445)..(2445): n is a, c, g, or t
  misc_feature (2448)..(2448): n is a, c, g, or t
  misc_feature (2919)..(2919): n is a, c, g, or t
  misc_feature (3119)..(3120): n is a, c, g, or t
  misc_feature (3123)..(3123): n is a, c, g, or t
  misc_feature (3140)..(3140): n is a, c, g, or t
  misc_feature (3552)..(3552): n is a, c, g, or t
  misc_feature (3946)..(3946): n is a, c, g, or t
  misc_feature (3987)..(3987): n is a, c, g, or t
  misc_feature (3993)..(3993): n is a, c, g, or t
  misc_feature (4197)..(4197): n is a, c, g, or t
gaattcacagatagagagactctgcggcccagattcttcaggattctccgtgaagggataaccaggggaagcaccaagatgaccgatgcccagatggctgactttggggcagcggcccagtacctccgcaagtcagagaaggagcgtctagaggcccagacccggccctttgacattcgcactgagtgcttcgtgcccgatgacaaggaagagtttgtcaaagccaagattttgtcccgggagggaggcaaggtcattgctgaaaccgagaatgggaagacggtgactgtgaaggaggaccaggtgttgcagcagaacccacccaagttcgacaagattgaggacatggccatgctgaccttcctgcacgagcccgcggtgcttttcaacctcaaggagcgctacgcggcctggatgatatatacctactcgggcctcttctgtgtcactgtcaacccctacaagtggctgccggtgtacaatgccgaggtggtggccgcctaccggggcaagaagaggagtgaggccccgccccacatcttctccatctccgacaacgcctatcagtacatgctgacagatcgggagaaccagtccatcctcatcacgggagaatccggggcggggaagactgtgaacaccaagcgtgtcatccagtactttgccagcattgcagccataggtgaccgtggcaagaaggacaatgccaatgcgaacaagggcaccctggaggaccagatcatccaggccaaccccgctctggaggccttcggcaatgccaagactgtccggaacgacaactcctcccgctttgggaaattcattaggatccactttggggccactggaaagctggcttctgcagacatagagacctacctgctggagaagtcccgggtgatcttccagctgaaagctgagagaaactaccacatcttctaccagattctgtccaacaagaagccggagttgctggacatgctgctggtcaccaacaatccctacgactacgccttcgtgtctcagggagaggtgtccgtggcctccattgatgactccgaggagctcatggccaccgatagtgcctttgacgtgctgggcttcacttcagaggagaaagctggcgtctacaagctgacgggagccatcatgcactacgggaacatgaagttcaagcagaagcagcgggaggagcaggcggagccagacggcaccgaagatgctgacaagtcngcctacctcatggggctgaactcagctgacctgctcaaggggctgtgccaccctcgggtgaaagtgggcaacgagtatgtcaccaaggggcagagcgtgcagcaggtntactactccatcggggctctggccaaggcagtgtatgagaagatgttcaactggatggtgacgcgcatcaacgccaccctggagaccaagcagccacgccagtacttcataggagtcctggacatcgctggcttcgagatcttcgacttcaacagctttgagcagctctgcatcaacttcaccaacgagaagctgcagcagttcttcaaccaccacatgttcgtgctggagcaggaggagtacaagaaggagggcattgagtggacattcattgactttggcatggacctgcaggcctgcattgacctcatcgagaagcccatgggcatcatgtccatcctggaggaggagtgcatgttccccaaggccactgacatgaccttcaaggccaagctgtacgacaaccacctgggcaagtccaacaatttccagaagccacgcaacatcaaggggaagcaggaagcccacttctccctgatccactacgccggcactgtggactacaacatcctgggctggctggaaaaaaacaaggatcctctcaacgagactgttgtggccctgtaccagaagtcctccctcaagctcatggccactctcttctcctcctacgcaactgccgatactggggacagtggtaaaagcaaaggaggcaagaaaaagggctcatccttccagacggtgtcggctctccaccgggaaaatctcaacaagctaatgaccaacctgaggaccacccatcctcactttgtgcgttgnatcatccccaatgagcggaaggctccaggggtgatggacaaccccctggtcatgcaccagctgcgctgcaatggcgtgctggagggcatccgcatctgcaggaagggcttccccaaccgcatcctctacggggacttccggcagaggtatcgcatcctgaacccagtggccatccctgagggacagttcattgatagcaggaaggggncagagaagctgctcagctctctggacattgatcacaaccagtacaagtttggccacaccaaggtgttcttcaaggcngggctgctngggctgctggagganatgngggangagaggctgagccgcatcatcacgcgnatncaggcccaagcccggggccagctcatgcgcattgagttcaagaagatagtggaacgcagggatgccctgctggtaatccagtggaacattcgggccttcatgggggtcaagaattggccctggatgaagctctacttcaagatcaagccgctgctgaagagcgcagagacggagaaggagatggccaccatgaaggaagagttcgggcgcatcaaagagacgctggagaagtccgaggctcgccgcaaggagctggaggagaagatggtgtccctgctgcaggagaagaatgacctgcagctccaagtgcaggcggaacaagacaacctcaatgatgctgaggagcgctgcgaccagctgatcaaaaacaagattcagctggaggccaaagtaaaggagatgaatgagaggctggaggatgaggaggagatgaacgcggagctcactgccaagaagcgcaagctggaagangagtgctcagagctcaagaaggacattgatgacctggagctgacactggccaaggtggagaaggagaagcatgcaacagagaacaaggtgaagaacctaacagaggagatggctgggctggatgaaatcatcgctaagctgaccaaggagaagaaagctctacaagaggcccatcagcaggccctggatgaccttcaggnngangaagacaaggtcaacancctgtccaagtctaaggtcaagctggagcagcaggtggatgatctggagggatccctagagcaagagaagaaggtgcgcatggacctggagcgagcaaagcggaaactggagggcgacctgaagctgacccaggagagcatcatggacctggaaaatgataaactgcagctggaagaaaagcttaagaagaaggagtttgacattaatcagcagaacagtaagattgaggatgagcaggtgctggcccttcaactacagaagaaactgaaggaaaaccaggcacgcatcgaggagctggaggaggagctggaggccgagcgcaccgccagggctaaggtggagaagctgcgctcagacctgtctcgggagctggaggagatcagcgagcggctggaagaggccggcggggcnacgtccgtgcagatcgagatgaacaagaagcgcgaggccgagttccagaagatgcggcgggacctggaggaggccacgctgcagcacgaggccactgccgcggccctgcgcaagaagcacgccgacagcgtggccgagctgggcgagcagatcgacaacctgcagcgggtgaagcagaagctggagaaggagaagagcgagttcaagctggagctggatgacgtcacctccaacatggagcagatcatcaaggccaaggcaaacctggagaaagtgtctcggacgctggaggaccaggccaatgagtaccgcgtgaagctagaagaggcccaacgctccctcaatgatttcaccacccagcgagccaagctgcagaccgagaatggagagttgncccggcagctagaggaaaaggaggcgctaatctcgcagctnacccgngggaagctctcttatacccagcaaatggaggacctcaaaaggcagctggaggaggagggcaaggcgaagaacgccctggcccatgcactgcagtcggcccggcatgactgcgacctgctgcgggagcagtacgaggaggagacagaggccaaggccgagctgcagcgcgtcctgtccaaggccaactcggaggtggcccagtgnaggaccaagtatgagacggacgccattcagcggactgaggagctcgaagaggccaaaaagaagctggcccagcggctgcaggatgccgaggaggccgtggaggctgttaatgccaagtgctcctcactggagaagaccaagcaccggctacagaatgagatagaggacttgatggtggacgtagagcgctccaatgctgctgctgcagccctggacaagaagcagagaaactttgacaagatcctggccgagtggaagcagaagtatgaggagtcgcagtctgagctggagtcctcacagaaggaggctcgctccctcagcacagagctcttcaagctcaagaacgcctacgaggagtccctggagcacctagagaccttcaagcgggagaacaagaaccttcaggaggaaatctcggaccttactgagcagctaggagaaggaggaaagaatgtgcatgagctggagaaggtccgcaaacagctggaggtggagaagctggagctgcagtcagccctggaggaggcagaggcctccctggagcacgaggagggcaagatcctccgggcccagctagagttcaaccagatcaaggcagagatcgagcggaagctggcagagaaggacgaggagatggaacaggccaagcgcaaccaccagcgggtggtggactcgctgcagacctccctggatgcagagacacgcagccgcaacgaggtcctgagggtgaagaagaagatggaaggagacctcaatgagatggagatccagctcagccacgccaaccgcatggctgccgaggcccagaagcaagtcaagagcctccagagcttgctgaaggacacccagatccagctggacgatgcggtccgtgccaacgacgacctgaaggagaacatcgccatcgtggagcggcgcaacaacctgctgcaggctgagctggaggagctgcgtgccgtggtggagcagacagagcggtcccggaagctggcggagcaggagctgattgagaccagcgagcgggtgcagctgctgcattcccagaacaccagcctcatcaaccagaagaagaagatggatgctgacctgtcccagctccagtcggaagtggaggaggcagtgcaggagtgcagaaacgccgaggagaaggccaagaaggccatcacggatgccgccatgatggcagaggagctgaagaaggagcaggacaccagcgcccacctggagcgcatgaagaagaacatggagcagaccattaaggacctgcagcaccggctggacgaggccgagcagatcgccctcaagggcggcaagaagcagctgcagaagctggaagcgcgggtgcgggagctggagggtgagctggaggccgagcagaagcgcaacgcagagtcggtgaagggcatgaggaagagcgagcggcgcatcaaggagctcacctaccagacagaggaagacaaaaagaacctgctgcggctacaggacctggtggacaagctgcaactgaaggtcaaggcctacaagcgccaggccgaggaggcggaggagcaagccaacaccaacctgtccaagttccgcaaggtgcagcatgagctggatgaggcagaggagcgggcggacatcgctgagtcccaggtcaacaagcttcgagccaagagccgtgacattggtgccaagcaaaaaatgcacgatgaggagtgacactgcctcgggaacctcactcttgccaacctgtaataaatatgagtgccaaactctg

SEQ ID NO: 731257 - DNA, 1373 bp, Homo sapiens
caggcagtgcaggagtatggttgagatgctaccaactgccattctgctggtcttggcagtgtccgtggttgctaaagataacgccacgtgtgatggcccctgtgggttacggttcaggcaaaacccacagggtggtgtccgcatcgtcggcgggaaggctgcacagcatggggcctggccctggatggtcagcctccagatcttcacgtacaacagccacaggtaccacacatgtggaggcagcttgctgaattcacgatgggtgctcactgctgctcactgcttcgtcggcaaaaataatgtgcatgactggagactggttttcggagcaaaggaaattacatatgggaacaataaaccagtaaaggcgcctgtgcaagagagatatgtggagaaaatcatcattcatgaaaaatacaactctgcgacagagggaaatgacattgccctcgtggagatcacccctcccatttcgtgtgggcgcttcattgggccgggctgcctgccccacttgaaggcaggcctccccagaggctcccagagctgctgggtggccggctggggatatatagaagagaaagcccccaggccatcatctatactgatggaggcacgtgtggatctcatcgacctggacttgtgtaactcgacccagtggtacaatgggcgcgttcagccaaccaatgtgtgcgcggggtatcctgtaggcaagatcgacacctgccagggagacagcggcgggcctctcatgtgcaaagacagcaaggaaagcgcctatgtggtcgtgggaatcacaagctggggggtaggctgtgcccgtgccaagcgccccggaatctacacggccacctggccttatctgaactggatcgcctccaagattggttctaacgctttgcgtatgattcaatcggccacccctccaccgcccaccactcgaccgcccccgattcgaccccccttctcccaccctatctctgctcaccttccttggtatttccaaccgccccctcgaccacttccaccccgaccaccggcagcccagccccgacccccaccttcacccccgcccccacccccacctccagcctcacctttacccccacccccacccccacccccacctacaccctcatctaccacaaaacttccccaaggactttcttttgccaagcgcctacagcagctcatagaggtcttgaaggggaagacctattccgacggaaagaaccattatgacatggagaccacagagctcccagaactgacctcgacctcctgatctgacctggttctcaacagacccagtgagcccttcactcctgagaaaaaggaaagatgaaataaataaataaacatatatatatagatat

SEQ ID NO: 731258 - DNA, 718 bp, Homo sapiens
caggcagtgcaggagtatggttgagatgctaccaactgccattctgctggtcttggcagtgtccgtggttgctaaagataacgccacgtgtgatggcccctgtgggttacggttcaggcaaaacccacagggtggtgtccgcatcgtcggcgggaaggctgcacagcatggggcctggccctggatggtcagcctccagatcttcacgtacaacagccacaggtaccacacatgtggaggcagcttgctgaattcacgatgggtgctcactgctgctcactgcttcgtcggcaaaaataatgtgcatgactggagactggttttcggagcaaaggaaattacatatgggaacaataaaccagtaaaggcgcctgtgcaagagagatatgtggagaaaatcatcattcatgaaaaatacaactctgcgacagagggaaatgacattgccctcgtggagatcacccctcccatttcgtgtgggcgcttcattgggccgggctgcctgccccacttgaaggcaggcctccccagaggctcccagagctgctgggtggccggctggggatatatagaagagaaaggcttcctggagtgtccggcaggtacctctccattcaagacgggtgtagctgtcgctctagagctctgtccataaccaagctgtctctctctcccctggctcccagaagatctcttgcccatccaacactacctgata

SEQ ID NO: 731259 - DNA, 791 bp, Homo sapiens
ggagacagcggcgggcctctcatgtgcaaagacagcaaggaaagcgcctatgtggtcgtgggaatcacaagctggggggtaggctgtgcccgtgccaagcgccccggaatctacacggccacctggccttatctgaactggatcgcctccaagattggttctaacgctttgcgtatgattcaatcggccacccctccaccgcccaccactcgaccgcccccgattcgaccccccttctcccaccctatctctgctcaccttccttggtatttccaaccgccccctcgaccacttccaccccgaccaccggcagcccagccccgacccccaccttcacccccgcccccacccccacctccagcctcacctttacccccacccccacccccacccccacctacaccctcatctaccacaaaacttccccaaggactttcttttgccaagcgcctacagcagctcatagaggtcttgaaggggaagacctattccgacggaaagaaccattatgacatggagaccacagagctcccagaactgacctcgacctcctgatctgacctggttctcaacagacccagtgagcccttcactcctgagaaaaaggaaagatgaaataaataaataaacatatatatatagatatacacacacacatatctgtatgtatacatgcatatacatcaagagatgctttctggacttcttcctatcccccctcccaacccaaatttcccctataaaatctaccctctctccttcaccctacaataaggcggaattgcttgtac

SEQ ID NO: 731260 - DNA, 2141 bp, Homo sapiens
gtccctagcaggcaagtcttctggaggggagaggctcctggcagccgtgaagcccagcgtgtgaggtcccaggtaagagagagggttggccacaaaggactccagcaggtgaggccccaggaaacctgccatggcctcctggtgagctgtcctcatccactgctcgctgcctctccagatactctgacccatggatcccctgggtgcagccaagccacaatggccatggcgccgctgtctggccgcactgctatttcagctgctggtggctgtgtgtttcttctcctacctgcgtgtgtcccgagacgatgccactggatcccctagggctcccagtgggtcctcccgacaggacaccactcccacccgccccaccctcctgatcctgctatggacatggcctttccacatccctgtggctctgtcccgctgttcagagatggtgcccggcacagccgactgccacatcactgccgaccgcaaggtgtacccacaggcagacacggtcatcgtgcaccactgggatatcatgtccaaccctaagtcacgcctcccaccttccccgaggccgcaggggcagcgctggatctggttcaacttggagccaccccctaactgccagcacctggaagccctggacagatacttcaatctcaccatgtcctaccgcagcgactccgacatcttcacgccctacggctggctggagccgtggtccggccagcctgcccacccaccgctcaacctctcggccaagaccgagctggtggcctgggcggtgtccaactggaagccggactcagccagggtgcgctactaccagagcctgcaggctcatctcaaggtggacgtgtacggacgctcccacaagcccctgcccaaggggaccatgatggagacgctgtcccggtacaagttctacctggccttcgagaactccttgcaccccgactacatcaccgagaagctgtggaggaacgccctggaggcctgggccgtgcccgtggtgctgggccccagcagaagcaactacgagaggttcctgccacccgacgccttcatccacgtggacgacttccagagccccaaggacctggcccggtacctgcaggagctggacaaggaccacgcccgctacctgagctactttcgctggcgggagacgctgcggcctcgctccttcagctgggcactggatttctgcaaggcctgctggaaactgcagcaggaatccaggtaccagacggtgcgcagcatagcggcttggttcacctgagaggccggcatggtgcctgggctgccgggaacctcatctgcctggggcctcacctgctggagtcctttgtggccaaccctctctcttacctgggacctcacacgctgggcttcacggctgccaggagcctctcccctccagaagacttgcctgctagggacctcgcctgctggggacctcgcctgttggggacctcacctgctggggacctcacctgctggggaccttggctgctggaggctgcacctactgaggatgtcggcggtcggggactttacctgctgggacctgctcccagagaccttgccacactgaatctcacctgctggggacctcaccctggagggccctgggccctggggaactggcttacttggggccccacccgggagtgatggttctggctgatttgtttgtgatgttgttagccgcctgtgaggggtgcagagagatcatcacggcacggtttccagatgtaatactgcaaggaaaaatgatgacgtgtctcctcactctagaggggttggtcccatgggttaagagctcaccccaggttctcacctcaggggttaagagctcagagttcagacaggtccaagttcaagcccaggaccaccacttatagggtacaggtgggatcgactgtaaatgaggacttctggaacattccaaatattctggggttgagggaaattgctgctgtctacaaaatgccaagggtggacaggcgctgtggctcacgcctgtaattccagcactttgggaggctgaggtaggaggattgattgaggccaagagttaaagaccagcctggtcaatatagcaagaccacgtctctaaataaaaaataataggccggccagca

SEQ ID NO: 731261 - DNA, 2583 bp, Homo sapiens
gttcccacttcctcccgccccaggaaacctgccatggcctcctggtgagctgtcctcatccactgctcgctgcctctccagatcttcagttgcttcaggccactttgaatgtatatgagccggtcgtaggggatatcgatggcttagcttgggctcagaggcctgaaaatcgcccccaccaatcacctgtttcccccaatctaccctcctgaaggtcactgacaaagacttcattgtctcctaggagaggctgccatatatcagggctgacgtaattccatcttaatatcagttacattataaaaatttacctcgtgcctgaggccccagagcccaagggtgcaaagcagtaattagtcaaagttcaacttcccctcccactctgggctcaggctgtccctgagggcctgtgttttgagtctctttccagaaccttggtgtgaacttaggtcttggcgtcgggatcccttttcgtcacactcaggtgacctacaggctccgctcgacactgcaaggcttagaccagttcggtccaacagagaaagcaggcaaccaccatgtcatttgaaaacagtttcatcgggatataattcgcaacccatacagtgaatccatttaagatactctgacccatggatcccctgggtgcagccaagccacaatggccatggcgccgctgtctggccgcactgctatttcagctgctggtggctgtgtgtttcttctcctacctgcgtgtgtcccgagacgatgccactggatcccctagggctcccagtgggtcctcccgacaggacaccactcccacccgccccaccctcctgatcctgctatggacatggcctttccacatccctgtggctctgtcccgctgttcagagatggtgcccggcacagccgactgccacatcactgccgaccgcaaggtgtacccacaggcagacacggtcatcgtgcaccactgggatatcatgtccaaccctaagtcacgcctcccaccttccccgaggccgcaggggcagcgctggatctggttcaacttggagccaccccctaactgccagcacctggaagccctggacagatacttcaatctcaccatgtcctaccgcagcgactccgacatcttcacgccctacggctggctggagccgtggtccggccagcctgcccacccaccgctcaacctctcggccaagaccgagctggtggcctgggcggtgtccaactggaagccggactcagccagggtgcgctactaccagagcctgcaggctcatctcaaggtggacgtgtacggacgctcccacaagcccctgcccaaggggaccatgatggagacgctgtcccggtacaagttctacctggccttcgagaactccttgcaccccgactacatcaccgagaagctgtggaggaacgccctggaggcctgggccgtgcccgtggtgctgggccccagcagaagcaactacgagaggttcctgccacccgacgccttcatccacgtggacgacttccagagccccaaggacctggcccggtacctgcaggagctggacaaggaccacgcccgctacctgagctactttcgctggcgggagacgctgcggcctcgctccttcagctgggcactggatttctgcaaggcctgctggaaactgcagcaggaatccaggtaccagacggtgcgcagcatagcggcttggttcacctgagaggccggcatggtgcctgggctgccgggaacctcatctgcctggggcctcacctgctggagtcctttgtggccaaccctctctcttacctgggacctcacacgctgggcttcacggctgccaggagcctctcccctccagaagacttgcctgctagggacctcgcctgctggggacctcgcctgttggggacctcacctgctggggacctcacctgctggggaccttggctgctggaggctgcacctactgaggatgtcggcggtcggggactttacctgctgggacctgctcccagagaccttgccacactgaatctcacctgctggggacctcaccctggagggccctgggccctggggaactggcttacttggggccccacccgggagtgatggttctggctgatttgtttgtgatgttgttagccgcctgtgaggggtgcagagagatcatcacggcacggtttccagatgtaatactgcaaggaaaaatgatgacgtgtctcctcactctagaggggttggtcccatgggttaagagctcaccccaggttctcacctcaggggttaagagctcagagttcagacaggtccaagttcaagcccaggaccaccacttatagggtacaggtgggatcgactgtaaatgaggacttctggaacattccaaatattctggggttgagggaaattgctgctgtctacaaaatgccaagggtggacaggcgctgtggctcacgcctgtaattccagcactttgggaggctgaggtaggaggattgattgaggccaagagttaaagaccagcctggtcaatatagcaagaccacgtctctaaataaaaaataataggccggccagca

SEQ ID NO: 731262 - DNA, 2180 bp, Homo sapiens
gttcccacttcctcccgccccaggaaacctgccatggcctcctggtgagctgtcctcatccactgctcgctgcctctccaggtgacctacaggctccgctcgacactgcaaggcttagaccagttcggtccaacagagaaagcaggcaaccaccatgtcatttgaaaacagtttcatcgggatataattcgcaacccatacagtgaatccatttaagatactctgacccatggatcccctgggtgcagccaagccacaatggccatggcgccgctgtctggccgcactgctatttcagctgctggtggctgtgtgtttcttctcctacctgcgtgtgtcccgagacgatgccactggatcccctagggctcccagtgggtcctcccgacaggacaccactcccacccgccccaccctcctgatcctgctatggacatggcctttccacatccctgtggctctgtcccgctgttcagagatggtgcccggcacagccgactgccacatcactgccgaccgcaaggtgtacccacaggcagacacggtcatcgtgcaccactgggatatcatgtccaaccctaagtcacgcctcccaccttccccgaggccgcaggggcagcgctggatctggttcaacttggagccaccccctaactgccagcacctggaagccctggacagatacttcaatctcaccatgtcctaccgcagcgactccgacatcttcacgccctacggctggctggagccgtggtccggccagcctgcccacccaccgctcaacctctcggccaagaccgagctggtggcctgggcggtgtccaactggaagccggactcagccagggtgcgctactaccagagcctgcaggctcatctcaaggtggacgtgtacggacgctcccacaagcccctgcccaaggggaccatgatggagacgctgtcccggtacaagttctacctggccttcgagaactccttgcaccccgactacatcaccgagaagctgtggaggaacgccctggaggcctgggccgtgcccgtggtgctgggccccagcagaagcaactacgagaggttcctgccacccgacgccttcatccacgtggacgacttccagagccccaaggacctggcccggtacctgcaggagctggacaaggaccacgcccgctacctgagctactttcgctggcgggagacgctgcggcctcgctccttcagctgggcactggatttctgcaaggcctgctggaaactgcagcaggaatccaggtaccagacggtgcgcagcatagcggcttggttcacctgagaggccggcatggtgcctgggctgccgggaacctcatctgcctggggcctcacctgctggagtcctttgtggccaaccctctctcttacctgggacctcacacgctgggcttcacggctgccaggagcctctcccctccagaagacttgcctgctagggacctcgcctgctggggacctcgcctgttggggacctcacctgctggggacctcacctgctggggaccttggctgctggaggctgcacctactgaggatgtcggcggtcggggactttacctgctgggacctgctcccagagaccttgccacactgaatctcacctgctggggacctcaccctggagggccctgggccctggggaactggcttacttggggccccacccgggagtgatggttctggctgatttgtttgtgatgttgttagccgcctgtgaggggtgcagagagatcatcacggcacggtttccagatgtaatactgcaaggaaaaatgatgacgtgtctcctcactctagaggggttggtcccatgggttaagagctcaccccaggttctcacctcaggggttaagagctcagagttcagacaggtccaagttcaagcccaggaccaccacttatagggtacaggtgggatcgactgtaaatgaggacttctggaacattccaaatattctggggttgagggaaattgctgctgtctacaaaatgccaagggtggacaggcgctgtggctcacgcctgtaattccagcactttgggaggctgaggtaggaggattgattgaggccaagagttaaagaccagcctggtcaatatagcaagaccacgtctctaaataaaaaataataggccggccagca

SEQ ID NO: 731263 - DNA, 2234 bp, Homo sapiens
gttcccacttcctcccgccccaggaaacctgccatggcctcctggtgagctgtcctcatccactgctcgctgcctctccagaaccttggtgtgaacttaggtcttggcgtcgggatcccttttcgtcacactcaggtgacctacaggctccgctcgacactgcaaggcttagaccagttcggtccaacagagaaagcaggcaaccaccatgtcatttgaaaacagtttcatcgggatataattcgcaacccatacagtgaatccatttaagatactctgacccatggatcccctgggtgcagccaagccacaatggccatggcgccgctgtctggccgcactgctatttcagctgctggtggctgtgtgtttcttctcctacctgcgtgtgtcccgagacgatgccactggatcccctagggctcccagtgggtcctcccgacaggacaccactcccacccgccccaccctcctgatcctgctatggacatggcctttccacatccctgtggctctgtcccgctgttcagagatggtgcccggcacagccgactgccacatcactgccgaccgcaaggtgtacccacaggcagacacggtcatcgtgcaccactgggatatcatgtccaaccctaagtcacgcctcccaccttccccgaggccgcaggggcagcgctggatctggttcaacttggagccaccccctaactgccagcacctggaagccctggacagatacttcaatctcaccatgtcctaccgcagcgactccgacatcttcacgccctacggctggctggagccgtggtccggccagcctgcccacccaccgctcaacctctcggccaagaccgagctggtggcctgggcggtgtccaactggaagccggactcagccagggtgcgctactaccagagcctgcaggctcatctcaaggtggacgtgtacggacgctcccacaagcccctgcccaaggggaccatgatggagacgctgtcccggtacaagttctacctggccttcgagaactccttgcaccccgactacatcaccgagaagctgtggaggaacgccctggaggcctgggccgtgcccgtggtgctgggccccagcagaagcaactacgagaggttcctgccacccgacgccttcatccacgtggacgacttccagagccccaaggacctggcccggtacctgcaggagctggacaaggaccacgcccgctacctgagctactttcgctggcgggagacgctgcggcctcgctccttcagctgggcactggatttctgcaaggcctgctggaaactgcagcaggaatccaggtaccagacggtgcgcagcatagcggcttggttcacctgagaggccggcatggtgcctgggctgccgggaacctcatctgcctggggcctcacctgctggagtcctttgtggccaaccctctctcttacctgggacctcacacgctgggcttcacggctgccaggagcctctcccctccagaagacttgcctgctagggacctcgcctgctggggacctcgcctgttggggacctcacctgctggggacctcacctgctggggaccttggctgctggaggctgcacctactgaggatgtcggcggtcggggactttacctgctgggacctgctcccagagaccttgccacactgaatctcacctgctggggacctcaccctggagggccctgggccctggggaactggcttacttggggccccacccgggagtgatggttctggctgatttgtttgtgatgttgttagccgcctgtgaggggtgcagagagatcatcacggcacggtttccagatgtaatactgcaaggaaaaatgatgacgtgtctcctcactctagaggggttggtcccatgggttaagagctcaccccaggttctcacctcaggggttaagagctcagagttcagacaggtccaagttcaagcccaggaccaccacttatagggtacaggtgggatcgactgtaaatgaggacttctggaacattccaaatattctggggttgagggaaattgctgctgtctacaaaatgccaagggtggacaggcgctgtggctcacgcctgtaattccagcactttgggaggctgaggtaggaggattgattgaggccaagagttaaagaccagcctggtcaatatagcaagaccacgtctctaaataaaaaataataggccggccagca

SEQ ID NO: 731264 - DNA, 2077 bp, Homo sapiens; identical to SEQ ID NO: 704552

SEQ ID NO: 731265 - DNA, 3320 bp, Homo sapiens; identical to SEQ ID NO: 47600

SEQ ID NO: 731266 - DNA, 3194 bp, Homo sapiens; identical to SEQ ID NO: 47601

SEQ ID NO: 731267 - DNA, 1165 bp, Homo sapiens; identical to SEQ ID NO: 58007

SEQ ID NO: 731268 - DNA, 2577 bp, Homo sapiens
cggcaacaagtcctgtttttataagagagcgaggaggacacttctcagaaggggttgttttgcttttgcttatttccgtccatttccctctctgcgcgcggaccttccttttccagatggtgagagccgcggggacacccgacgccggggcaggctgatccacgatcctgggtgtgcgtaacgccgcctggggctccgtgggcgagggacgtgtggggacaggtgcaccggaaactgccagactggagagttgaggcatcggaggcgcgagaacagcactactactgcggcgagacgagcgcggcgcatcccaaagcccggccaaatgcgctcgtccctgggaggggagggaggcgcgcctggagcggggacagtcttggtccgcgccctcctcccgggtctgtgccgggacccgggacccgggagccgtcgcaggtctcggtccaaggggccccttttctcggaagggcggcggccaagagcggggaaggtggatctcaggtagcgagtctgggcttcggggacggcggggaggggagccggacgggaggatgagctcccctggcaccgagagcgcgggaaagagcctgcagtaccgagtggaccacctgctgagcgccgtggagaatgagctgcaggcgggcagcgagaagggcgaccccacagagcgcgaactgcgcgtgggcctggaggagagcgagctgtggctgcgcttcaaggagctcaccaatgagatgatcgtgaccaagaacggcaggaggatgtttccggtgctgaaggtgaacgtgtctggcctggaccccaacgccatgtactccttcctgctggacttcgtggcggcggacaaccaccgctggaagtacgtgaacggggaatgggtgccggggggcaagccggagccgcaggcgcccagctgcgtctacatccaccccgactcgcccaacttcggggcccactggatgaaggctcccgtctccttcagcaaagtcaagctcaccaacaagctcaacggagggggccagatcatgctgaactccttgcataagtatgagcctcgaatccacatagtgagagttggggatccacagcgcatgatcaccagccactgcttccctgagacccagttcatagcggtgactgcttatcagaacgaggagatcacagctcttaaaattaagtacaatccatttgcaaaagctttccttgatgcaaaggaaagaagtgatcacaaagagatgatggaggaacccggagacagccagcaacctgggtactcccaatggggggtggcttcttcctggaaccagcaccctgtgtccacctgcaaatcctcatcctcagtttggaggtgccctctccctcccctccacgcacagctgtgacaggtacccaaccctgaggagccaccggtcctcaccctaccccagcccctatgctcatcggaacaattctccaacctattctgacaactcacctgcatgtttatccatgctgcaatcccatgacaattggtccagccttggaatgcctgcccatcccagcatgctccccgtgagccacaatgccagcccacctaccagctccagtcagtaccccagcctgtggtctgtgagcaacggcgccgtcaccccgggctcccaggcagcagccgtgtccaacgggctgggggcccagttcttccggggctcccccgcgcactacacacccctcacccatccggtctcggcgccctcttcctcgggatccccactgtacgaaggggcggccgcggccacagacatcgtggacagccagtacgacgccgcagcccaaggccgcctcatagcctcatggacacctgtgtcgccaccttccatgtgaagcagcaaggcccaggtcccgaaagatgcagtgactttttgtcgtggcagccagtggtgactggattgacctactaggtacccagtggcagtctcaggttaagaaggaaatgcagcctcagtaacttccttttcaaagcagtggaggagcacacggcacctttccccagagccccagcatcccttgctcacacctgcagtagtggtgctgtcccaggtggcttccagatgaacccaactgtggagatgatgcagttggcccaacctcactgacggtggaaaaatgtttgccagggtccagaaactttttttggtttatttctcatacagtgtattggcaactttggcacaccagaatttataaactccaccagtcctactttagtgagataaaaagcacactcttaatcttcttccttgttgctttcaagtagttagagttgagctgttaaggacagaataaaatcatagttgaggacagcaggttttagttgaattgaaaatttgactgctctgccccctagaatgtgtgtattttaagcatatgtagctaatctcttgtgttgttaaactataactgtttcatatttttcttttgacaaagtagccaaagacaatcagcagaaagcattttctgcacaataaatgcaatatgcaaaatgtgattcgtccagttattagtgaagcccctccttttgtgagtatttactgtttattg

SEQ ID NO: 731269 - DNA, 2484 bp, Homo sapiens
cggcaacaagtcctgtttttataagagagcgaggaggacacttctcagaaggggttgttttgcttttgcttatttccgtccatttccctctctgcgcgcggaccttccttttccagatggtgagagccgcggggacacccgacgccggggcaggctgatccacgatcctgggtgtgcgtaacgccgcctggggctccgtgggcgagggacgtgtggggacaggtgcaccggaaactgccagactggagagttgaggcatcggaggcgcgagaacagcactactactgcggcgagacgagcgcggcgcatcccaaagcccggccaaatgcgctcgtccctgggaggggagggaggcgcgcctggagcggggacagggcggcggccaagagcggggaaggtggatctcaggtagcgagtctgggcttcggggacggcggggaggggagccggacgggaggatgagctcccctggcaccgagagcgcgggaaagagcctgcagtaccgagtggaccacctgctgagcgccgtggagaatgagctgcaggcgggcagcgagaagggcgaccccacagagcgcgaactgcgcgtgggcctggaggagagcgagctgtggctgcgcttcaaggagctcaccaatgagatgatcgtgaccaagaacggcaggaggatgtttccggtgctgaaggtgaacgtgtctggcctggaccccaacgccatgtactccttcctgctggacttcgtggcggcggacaaccaccgctggaagtacgtgaacggggaatgggtgccggggggcaagccggagccgcaggcgcccagctgcgtctacatccaccccgactcgcccaacttcggggcccactggatgaaggctcccgtctccttcagcaaagtcaagctcaccaacaagctcaacggagggggccagatcatgctgaactccttgcataagtatgagcctcgaatccacatagtgagagttggggatccacagcgcatgatcaccagccactgcttccctgagacccagttcatagcggtgactgcttatcagaacgaggagatcacagctcttaaaattaagtacaatccatttgcaaaagctttccttgatgcaaaggaaagaagtgatcacaaagagatgatggaggaacccggagacagccagcaacctgggtactcccaatggggggtggcttcttcctggaaccagcaccctgtgtccacctgcaaatcctcatcctcagtttggaggtgccctctccctcccctccacgcacagctgtgacaggtacccaaccctgaggagccaccggtcctcaccctaccccagcccctatgctcatcggaacaattctccaacctattctgacaactcacctgcatgtttatccatgctgcaatcccatgacaattggtccagccttggaatgcctgcccatcccagcatgctccccgtgagccacaatgccagcccacctaccagctccagtcagtaccccagcctgtggtctgtgagcaacggcgccgtcaccccgggctcccaggcagcagccgtgtccaacgggctgggggcccagttcttccggggctcccccgcgcactacacacccctcacccatccggtctcggcgccctcttcctcgggatccccactgtacgaaggggcggccgcggccacagacatcgtggacagccagtacgacgccgcagcccaaggccgcctcatagcctcatggacacctgtgtcgccaccttccatgtgaagcagcaaggcccaggtcccgaaagatgcagtgactttttgtcgtggcagccagtggtgactggattgacctactaggtacccagtggcagtctcaggttaagaaggaaatgcagcctcagtaacttccttttcaaagcagtggaggagcacacggcacctttccccagagccccagcatcccttgctcacacctgcagtagtggtgctgtcccaggtggcttccagatgaacccaactgtggagatgatgcagttggcccaacctcactgacggtggaaaaatgtttgccagggtccagaaactttttttggtttatttctcatacagtgtattggcaactttggcacaccagaatttataaactccaccagtcctactttagtgagataaaaagcacactcttaatcttcttccttgttgctttcaagtagttagagttgagctgttaaggacagaataaaatcatagttgaggacagcaggttttagttgaattgaaaatttgactgctctgccccctagaatgtgtgtattttaagcatatgtagctaatctcttgtgttgttaaactataactgtttcatatttttcttttgacaaagtagccaaagacaatcagcagaaagcattttctgcacaataaatgcaatatgcaaaatgtgattcgtccagttattagtgaagcccctccttttgtgagtatttactgtttattg

SEQ ID NO: 731270 - DNA, 1672 bp, Homo sapiens; identical to SEQ ID NO: 58011

SEQ ID NO: 731271 - DNA, 2384 bp, Homo sapiens
cggcaacaagtcctgtttttataagagagcgaggaggacacttctcagaaggggttgttttgcttttgcttatttccgtccatttccctctctgcgcgcggaccttccttttccagatggtgagagccgcggggacacccgacgccggggcaggctgatccacgatcctgggtgtgcgtaacgccgcctggggctccgtgggcgagggacgtgtggggacaggtgcaccggaaactgccagactggagagttgaggcatcggaggcgcgagaacagcactactactgcggcgagacgagcgcggcgcatcccaaagcccggccaaatgcgctcgtccctgggaggggagggaggcgcgcctggagcggggacagtcttggtccgcgccctcctcccgggtctgtgccgggacccgggacccgggagccgtcgcaggtctcggtccaaggggccccttttctcggaagggcggcggccaagagcggggaaggtggatctcaggtagcgagtctgggcttcggggacggcggggaggggagccggacgggaggatgagctcccctggcaccgagagcgcgggaaagagcctgcagtaccgagtggaccacctgctgagcgccgtggagaatgagctgcaggcgggcagcgagaagggcgaccccacagagcgcgaactgcgcgtgggcctggaggagagcgaccggagccgcaggcgcccagttgcgtctacatccaccccgactcgcccaacttcggggcccactggatgaaggctcccgtctccttcagcaaagtcaagctccccaacaagctcaacggaggggcccagatcatgctgaactccttgcataagtatgagcctcgaatccacatagtgagagttggggatccacagcgcatgatcaccagccactgcttccctgagacccagttcatagcggtgactgcttatcagaacgaggagatcacagctcttaaaattaagtacaatccatttgcaaaagctttccttgatgcaaaggaaagaagtgatcacaaagagatgatggaggaacccggagacagccagcaacctgggtactcccaatggggggtggcttcttcctggaaccagcaccctgtgtccacctgcaaatcctcatcctcagtttggaggtgccctctccctcccctccacgcacagctgtgacaggtacccaaccctgaggagccaccggtcctcaccctaccccagcccctatgctcatcggaacaattctccaacctattctgacaactcacctgcatgtttatccatgctgcaatcccatgacaattggtccagccttggaatgcctgcccatcccagcatgctccccgtgagccacaatgccagcccacctaccagctccagtcagtaccccagcctgtggtctgtgagcaacggcgccgtcaccccgggctcccaggcagcagccgtgtccaacgggctgggggcccagttcttccggggctcccccgcgcactacacacccctcacccatccggtctcggcgccctcttcctcgggatccccactgtacgaaggggcggccgcggccacagacatcgtggacagccagtacgacgccgcagcccaaggccgcctcatagcctcatggacacctgtgtcgccaccttccatgtgaagcagcaaggcccaggtcccgaaagatgcagtgactttttgtcgtggcagccagtggtgactggattgacctactaggtacccagtggcagtctcaggttaagaaggaaatgcagcctcagtaacttccttttcaaagcagtggaggagcacacggcacctttccccagagccccagcatcccttgctcacacctgcagtagtggtgctgtcccaggtggcttccagatgaacccaactgtggagatgatgcagttggcccaacctcactgacggtggaaaaatgtttgccagggtccagaaactttttttggtttatttctcatacagtgtattggcaactttggcacaccagaatttataaactccaccagtcctactttagtgagataaaaagcacactcttaatcttcttccttgttgctttcaagtagttagagttgagctgttaaggacagaataaaatcatagttgaggacagcaggttttagttgaattgaaaatttgactgctctgccccctagaatgtgtgtattttaagcatatgtagctaatctcttgtgttgttaaactataactgtttcatatttttcttttgacaaagtagccaaagacaatcagcagaaagcattttctgcacaataaatgcaatatgcaaaatgtgattcgtccagttattagtgaagcccctccttttgtgagtatttactgtttattg

SEQ ID NO: 731272 - DNA, 1482 bp, Homo sapiens; identical to SEQ ID NO: 51987

SEQ ID NO: 731273 - DNA, 458 bp, Homo sapiens; identical to SEQ ID NO: 51986

SEQ ID NO: 731274 - DNA, 1649 bp, Homo sapiens
ggaaggcaagagatctaggacttctagcccctgaactttcagccgaatacatcttttccaaaggagtgaattcaggcccttgtatcactggcagcaggacgtgaccatggagaagctgttgtgtttcttggtcttgaccagcctctctcatgcttttggccagacagacatgtcgaggaaggcttttgtgtttcccaaagagtcggatacttcctatgtatccctcaaagcaccgttaacgaagcctctcaaagccttcactgtgtgcctccacttctacacggaactgtcctcgacccgtgggtacagtattttctcgtatgccaccaagagacaagacaatgagattctcatattttggtctaaggatataggatacagttttacagtgggtgggtctgaaatattattcgaggttcctgaagtcacagtagctccagtacacatttgtacaagctgggagtccgcctcagggatcgtggagttctgggtagatgggaagcccagggtgaggaagagtctgaagaagggatacactgtgggggcagaagcaagcatcatcttggggcaggagcaggattccttcggtgggaactttgaaggaagccagtccctggtgggagacattggaaatgtgaacatgtgggactttgtgctgtcaccagatgagattaacaccatctatcttggcgggcccttcagtcctaatgtcctgaactggcgggcactgaagtatgaagtgcaaggcgaagtgttcaccaaaccccagctgtggccctgaggcccagctgtgggtcctgaaggtacctcccggttttttacaccgcatgggccccacgtctctgtctctggtacctcccgcttttttacactgcatggttcccacgtctctgtctctgggcctttgttcccctatatgcattgcaggcctgctccaccctcctcagcgcctgagaatggaggtaaagtgtctggtctgggagctcgttaactatgctgggaaacggtccaaaagaatcagaatttgaggtgttttgttttcatttttatttcaagttggacagatcttggagataatttcttacctcacatagatgagaaaactaacacccagaaaggagaaatgatgttataaaaaactcataaggcaagagctgagaaggaagcgctgatcttctatttaattccccacccatgacccccagaaagcaggagggcattgcccacattcacagggctcttcagtctcagaatcaggacactggccaggtgtctggtttgggtccagagtgctcatcatcatgtcatagaactgctgggcccaggtctcctgaaatgggaagcccagcaataccacgcagtccctccactttctcaaagcacactggaaaggccattagaattgccccagcagagcagatctgctttttttccagagcaaaatgaagcactaggtataaatatgttgttactgccaagaacttaaatgactggtttttgtttgcttgcagtgctttcttaattttatggctcttctgggaaactcctccccttttccacacgaaccttgtggggctgtgaattctttcttcatccccgcattcccaatatacccaggccacaagagtggacgtgaaccacagggtgtc

SEQ ID NO: 731275 - DNA, 745 bp, Homo sapiens; identical to SEQ ID NO: 450653
  misc_feature (692)..(692): n is a, c, g, or t
  misc_feature (709)..(709): n is a, c, g, or t
  misc_feature (714)..(714): n is a, c, g, or t
  misc_feature (718)..(718): n is a, c, g, or t
  misc_feature (729)..(729): n is a, c, g, or t

SEQ ID NO: 731276 - DNA, 694 bp, Homo sapiens
ggaaggcaagagatctaggacttctagcccctgaactttcagccgaatacatcttttccaaaggagtgaattcaggcccttgtatcactggcagcaggacaatgagattctcatattttggtctaaggatataggatacagttttacagtgggtgggtctgaaatattattcgaggttcctgaagtcacagtagctccagtacacatttgtacaagctgggagtccgcctcagggatcgtggagttctgggtagatgggaagcccagggtgaggaagagtctgaagaagggatacactgtgggggcagaagcaagcatcatcttggggcaggagcaggattccttcggtgggaactttgaaggaagccagtccctggtgggagacattggaaatgtgaacatgtgggactttgtgctgtcaccagatgagattaacaccatctatcttggcgggcccttcagtcctaatgtcctgaactggcgggcactgaagtatgaagtgcaaggcgaagtgttcaccaaaccccagctgtggccctgaggcccagctgtgggttgctttcttaattttatggctcttctgggaaactcctccccttttccacacgaaccttgtggggctgtgaattctttcttcatccccgcattcccaatatacccaggccacaagagtggacgtgaaccacagggtgtc

SEQ ID NO: 731277 - DNA, 594 bp, Homo sapiens
ggaaggcaagagatctaggacttctagcccctgaactttcagccgaatacatcttttccaaaggagtgaattcaggcccttgtatcactggcagcaggacgtgaccatggagaagctgttgtgtttcttggtcttgaccagcctctctcatgcttttggccagacagacatgtcgaggaaggcttttgtgtttcccaaagagtcggatacttcctatgtatccctcaaagcaccgttaacgaagcctctcaaagccttcactgtgtgcctccacttctacacggaactgtcctcgacccgtgggtacagtattttctcgtatgccaccaagagacaagacaatgagattctcatattttggtctaaggatataggatacagttttacagtgggtgggtctgaaatattattcgaggttcctgaagtcacagtagctccagtacacatttgtacaagctgggagtccgcctcagggatcgtggagttctgggtagatgggaagcccagggtgaggaactgaatcagccttgtctggaaccagatctacacctggactgcccaggtctataagccaataaagcccctgtttacttg

SEQ ID NO: 731278 - DNA, 1167 bp, Homo sapiens; identical to SEQ ID NO: 450673

SEQ ID NO: 731279 - DNA, 2246 bp, Homo sapiens; identical to SEQ ID NO: 450679

SEQ ID NO: 731280 - DNA, 2192 bp, Homo sapiens
ggaaggcaagagatctaggacttctagcccctgaactttcagccgaatacatcttttccaaaggagtgaattcaggcccttgtatcactggcagcaggacgtgaccatggagaagctgttgtgtttcttggtcttgaccagcctctctcatgcttttggccagacagacatgtcgaggaaggcttttgtgtttcccaaagagtcggatacttcctatgtatccctcaaagcaccgttaacgaagcctctcaaagccttcactgtgtgcctccacttctacacggaactgtcctcgacccgtgggtacagtattttctcgtatgccaccaagagacaagacaatgagattctcatattttggtctaaggatataggatacagttttacagtgggtgggtctgaaatattattcgaggttcctgaagtcacagtagctccagtacacatttgtacaagctgggagtccgcctcagggatcgtggagttctgggtagatgggaagcccagggtgaggaagagtctgaagaagggatacactgtgggggcagaagcaagcatcatcttggggcaggagcaggattccttcggtgggaactttgaaggaagccagtccctggtgggagacattggaaatgtgaacatgtgggactttgtgctgtcaccagatgagattaacaccatctatcttggcgggcccttcagtcctaatgtcctgaactggcgggcactgaagtatgaagtgcaaggcgaagtgttcaccaaaccccagctgtggccctgaggcccagctgtgggtcctgaaggtacctcccggttttttacaccgcatgggccccacgtctctgtctctggtacctcccgcttttttacactgcatggttcccacgtctctgtctctgggcctttgttcccctatatgcattgcaggcctgctccaccctcctcagcgcctgagaatggaggtaaagtgtctggtctgggagctcgttaactatgctgggaaacggtccaaaagaatcagaatttgaggtgttttgttttcatttttatttcaagttggacagatcttggagataatttcttacctcacatagatgagaaaactaacacccagaaaggagaaatgatgttataacacccatgacccccagaaagcaggagggcattgcccacattcacagggctcttcagtctcagaatcaggacactggccaggtgtctggtttgggtccagagtgctcatcatcatgtcatagaactgctgggcccaggtctcctgaaatgggaagcccagcaataccacgcagtccctccactttctcaaagcacactggaaaggccattagaattgccccagcagagcagatctgctttttttccagagcaaaatgaagcactaggtataaatatgttgttactgccaagaacttaaatgactggtttttgtttgcttgcagtgctttcttaattttatggctcttctgggaaactcctccccttttccacacgaaccttgtggggctgtgaattctttcttcatccccgcattcccaatatacccaggccacaagagtggacgtgaaccacagggtgtcctgtcagaggagcccatctcccatctccccagctccctatctggaggatagttggatagttacgtgttcctagcaggaccaactacagtcttcccaaggattgagttatggactttgggagtgagacatcttcttgctgctggatttccaagctgagaggacgtgaacctgggaccaccagtagccatcttgtttgccacatggagagagactgtgaggacagaagccaaactggaagtggaggagccaagggattgacaaacaacagagccttgaccacgtggagtctctgaatcagccttgtctggaaccagatctacacctggactgcccaggtctataagccaataaagcccctgtttacttgtgatgagtgagtccaagctgttttctgatagttgctttagaagttgtgactaacttctctaatgacctttgaaatcaagtccctgtaagtttacacttcccattacacaacatatccatggcactttaacctgtccaagagtcccctgaagggattccctctgacaagcacagtccctcttttgagatagctggccattcatgtagggccagttgtgggggttttagtac

SEQ ID NO: 731281 - DNA, 1531 bp, Homo sapiens; identical to SEQ ID NO: 450685

SEQ ID NO: 731282 - DNA, 1285 bp, Homo sapiens
ggaaggcaagagatctaggacttctagcccctgaactttcagccgaatacatcttttccaaaggagtgaattcaggcccttgtatcactggcagcaggacgtgaccatggagaagctgttgtgtttcttggtcttgaccagcctctctcatgcttttggccagacagacatgtcgaggaaggcttttgtgtttcccaaagagtcggatacttcctatgtatccctcaaagcaccgttaacgaagcctctcaaagccttcactgtgtgcctccacttctacacggaactgtcctcgacccgtatgagattaacaccatctatcttggcgggcccttcagtcctaatgtcctgaactggcgggcactgaagtatgaagtgcaaggcgaagtgttcaccaaaccccagctgtggccctgaggcccagctgtgggtcctgaaggtacctcccggttttttacaccgcatgggccccacgtctctgtctctggtacctcccgcttttttacactgcatggttcccacgtctctgtctctgggcctttgttcccctatatgcattgcaggcctgctccaccctcctcagcgcctgagaatggaggtaaagtgtctggtctgggagctcgttaactatgctgggaaacggtccaaaagaatcagaatttgaggtgttttgttttcatttttatttcaagttggacagatcttggagataatttcttacctcacatagatgagaaaactaacacccagaaaggagaaatgatgttataaaaaactcataaggcaagagctgagaaggaagcgctgatcttctatttaattccccacccatgacccccagaaagcaggagggcattgcccacattcacagggctcttcagtctcagaatcaggacactggccaggtgtctggtttgggtccagagtgctcatcatcatgtcatagaactgctgggcccaggtctcctgaaatgggaagcccagcaataccacgcagtccctccactttctcaaagcacactggaaaggccattagaattgccccagcagagcagatctgctttttttccagagcaaaatgaagcactaggtataaatatgttgttactgccaagaacttaaatgactggtttttgtttgcttgcagtgctttcttaattttatggctcttctgggaaactcctccccttttccacacgaaccttgtggggctgtgaattctttcttcatccccgcattcccaatatacccaggccacaagagtggacgtgaaccacagggtgtc

SEQ ID NO: 731283 - DNA, 1882 bp, Homo sapiens
ggaaggcaagagatctaggacttctagcccctgaactttcagccgaatacatcttttccaaaggagtgaattcaggcccttgtatcactggcagcaggacgtgaccatggagaagctgttgtgtttcttggtcttgaccagcctctctcatgcttttggccagacagacatgtcgaggaaggcttttgtgtttcccaaagagtcggatacttcctatgtatccctcaaagcaccgttaacgaagcctctcaaagccttcactgtgtgcctccacttctacacggaactgtcctcgacccgtatgagattaacaccatctatcttggcgggcccttcagtcctaatgtcctgaactggcgggcactgaagtatgaagtgcaaggcgaagtgttcaccaaaccccagctgtggccctgaggcccagctgtgggtcctgaaggtacctcccggttttttacaccgcatgggccccacgtctctgtctctggtacctcccgcttttttacactgcatggttcccacgtctctgtctctgggcctttgttcccctatatgcattgcaggcctgctccaccctcctcagcgcctgagaatggaggtaaagtgtctggtctgggagctcgttaactatgctgggaaacggtccaaaagaatcagaatttgaggtgttttgttttcatttttatttcaagttggacagatcttggagataatttcttacctcacatagatgagaaaactaacacccagaaaggagaaatgatgttataaaaaactcataaggcaagagctgagaaggaagcgctgatcttctatttaattccccacccatgacccccagaaagcaggagggcattgcccacattcacagggctcttcagtctcagaatcaggacactggccaggtgtctggtttgggtccagagtgctcatcatcatgtcatagaactgctgggcccaggtctcctgaaatgggaagcccagcaataccacgcagtccctccactttctcaaagcacactggaaaggccattagaattgccccagcagagcagatctgctttttttccagagcaaaatgaagcactaggtataaatatgttgttactgccaagaacttaaatgactggtttttgtttgcttgcagtgctttcttaattttatggctcttctgggaaactcctccccttttccacacgaaccttgtggggctgtgaattctttcttcatccccgcattcccaatatacccaggccacaagagtggacgtgaaccacagggtgtcctgtcagaggagcccatctcccatctccccagctccctatctggaggatagttggatagttacgtgttcctagcaggaccaactacagtcttcccaaggattgagttatggactttgggagtgagacatcttcttgctgctggatttccaagctgagaggacgtgaacctgggaccaccagtagccatcttgtttgccacatggagagagactgtgaggacagaagccaaactggaagtggaggagccaagggattgacaaacaacagagccttgaccacgtggagtctctgaatcagccttgtctggaaccagatctacacctggactgcccaggtctataagccaataaagcccctgtttacttgtgatgagtgagtccaagctgttttctgatagttgctttagaagttgtgactaacttctctaatgacctttgaaatcaagtccctgtaagtttacacttcccattacacaacatatccatggcactttaacctgtccaagagtcccctgaagggattccctctgacaagcacagtccctcttttgagatagctggccattcatgtagggccagttgtgggggttttagtac

SEQ ID NO: 731284 - DNA, 1828 bp, Homo sapiens
ggaaggcaagagatctaggacttctagcccctgaactttcagccgaatacatcttttccaaaggagtgaattcaggcccttgtatcactggcagcaggacgtgaccatggagaagctgttgtgtttcttggtcttgaccagcctctctcatgcttttggccagacagacatgtcgaggaaggcttttgtgtttcccaaagagtcggatacttcctatgtatccctcaaagcaccgttaacgaagcctctcaaagccttcactgtgtgcctccacttctacacggaactgtcctcgacccgtatgagattaacaccatctatcttggcgggcccttcagtcctaatgtcctgaactggcgggcactgaagtatgaagtgcaaggcgaagtgttcaccaaaccccagctgtggccctgaggcccagctgtgggtcctgaaggtacctcccggttttttacaccgcatgggccccacgtctctgtctctggtacctcccgcttttttacactgcatggttcccacgtctctgtctctgggcctttgttcccctatatgcattgcaggcctgctccaccctcctcagcgcctgagaatggaggtaaagtgtctggtctgggagctcgttaactatgctgggaaacggtccaaaagaatcagaatttgaggtgttttgttttcatttttatttcaagttggacagatcttggagataatttcttacctcacatagatgagaaaactaacacccagaaaggagaaatgatgttataacacccatgacccccagaaagcaggagggcattgcccacattcacagggctcttcagtctcagaatcaggacactggccaggtgtctggtttgggtccagagtgctcatcatcatgtcatagaactgctgggcccaggtctcctgaaatgggaagcccagcaataccacgcagtccctccactttctcaaagcacactggaaaggccattagaattgccccagcagagcagatctgctttttttccagagcaaaatgaagcactaggtataaatatgttgttactgccaagaacttaaatgactggtttttgtttgcttgcagtgctttcttaattttatggctcttctgggaaactcctccccttttccacacgaaccttgtggggctgtgaattctttcttcatccccgcattcccaatatacccaggccacaagagtggacgtgaaccacagggtgtcctgtcagaggagcccatctcccatctccccagctccctatctggaggatagttggatagttacgtgttcctagcaggaccaactacagtcttcccaaggattgagttatggactttgggagtgagacatcttcttgctgctggatttccaagctgagaggacgtgaacctgggaccaccagtagccatcttgtttgccacatggagagagactgtgaggacagaagccaaactggaagtggaggagccaagggattgacaaacaacagagccttgaccacgtggagtctctgaatcagccttgtctggaaccagatctacacctggactgcccaggtctataagccaataaagcccctgtttacttgtgatgagtgagtccaagctgttttctgatagttgctttagaagttgtgactaacttctctaatgacctttgaaatcaagtccctgtaagtttacacttcccattacacaacatatccatggcactttaacctgtccaagagtcccctgaagggattccctctgacaagcacagtccctcttttgagatagctggccattcatgtagggccagttgtgggggttttagtac

SEQ ID NO: 731285 - DNA, 2073 bp, Homo sapiens; identical to SEQ ID NO: 450655
  misc_feature (2020)..(2020): n is a, c, g, or t
  misc_feature (2037)..(2037): n is a, c, g, or t
  misc_feature (2042)..(2042): n is a, c, g, or t
  misc_feature (2046)..(2046): n is a, c, g, or t
  misc_feature (2057)..(2057): n is a, c, g, or t

SEQ ID NO: 731286 - DNA, 2019 bp, Homo sapiens
  misc_feature (1966)..(1966): n is a, c, g, or t
  misc_feature (1983)..(1983): n is a, c, g, or t
  misc_feature (1988)..(1988): n is a, c, g, or t
  misc_feature (1992)..(1992): n is a, c, g, or t
  misc_feature (2003)..(2003): n is a, c, g, or t
ggaaggcaagagatctaggacttctagcccctgaactttcagccgaatacatcttttccaaaggagtgaattcaggcccttgtatcactggcagcaggacgtgaccatggagaagctgttgtgtttcttggtcttgaccagcctctctcatgcttttggccagacagacatgtcgaggaaggcttttgtgtttcccaaagagtcggatacttcctatgtatccctcaaagcaccgttaacgaagcctctcaaagccttcactgtgtgcctccacttctacacggaactgtcctcgacccgtgggtacagtattttctcgtatgccaccaagagacaagacaatgagattctcatattttggtctaaggatataggatacagttttacagtgggtgggtctgaaatattattcgaggttcctgaagtcacagtagctccagtacacatttgtacaagctgggagtccgcctcagggatcgtggagttctgggtagatgggaagcccagggtgaggaagagtctgaagaagggatacactgtgggggcagaagcaagcatcatcttggggcaggagcaggattccttcggtgggaactttgaaggaagccagtccctggtgggagacattggaaatgtgaacatgtgggactttgtgctgtcaccagatgagattaacaccatctatcttggcgggcccttcagtcctaatgtcctgaactggcgggcactgaagtatgaagtgcaaggcgaagtgttcaccaaaccccagctgtggccctgaggcccagctgtgggtcctgaaggtacctcccggttttttacaccgcatgggccccacgtctctgtctctggtacctcccgcttttttacactgcatggttcccacgtctctgtctctgggcctttgttcccctatatgcattgcaggcctgctccaccctcctcagcgcctgagaatggaggtaaagtgtctggtctgggagctcgttaactatgctgggaaacggtccaaaagaatcagaatttgaggtgttttgttttcatttttatttcaagttggacagatcttggagataatttcttacctcacatagatgagaaaactaacacccagaaaggagaaatgatgttataacacccatgacccccagaaagcaggagggcattgcccacattcacagggctcttcagtctcagaatcaggacactggccaggtgtctggtttgggtccagagtgctcatcatcatgtcatagaactgctgggcccaggtctcctgaaatgggaagcccagcaataccacgcagtccctccactttctcaaagcacactggaaaggccattagaattgccccagcagagcagatctgctttttttccagagcaaaatgaagcactaggtataaatatgttgttactgccaagaacttaaatgactggtttttgtttgcttgcagtgctttcttaattttatggctcttctgggaaactcctccccttttccacacgaaccttgtggggctgtgaattctttcttcatccccgcattcccaatatacccaggccacaagagtggacgtgaaccacagggtgtcctgtcagaggagcccatctcccatctccccagctccctatctggaggatagttggatagttacgtgttcctagcaggaccaactacagtcttcccaaggattgagttatggactttgggagtgagacatcttcttgctgctggatttccaagctgagaggacgtgaacctgggaccaccagtagccatcttgtttgccacatggagagagactgtgaggacagaagccaaactggaagtggaggagccaagggattgacaaacaacagagccttgaccacgtggagtctctgaatcagccttgtctggaaccagatctacacctggactgcccaggtctataagccaataaagcccctgtttacttgcaanaaaaaaaaaaaaaaaantttgngggngctgggcccgnaaagttttaaaaccat

SEQ ID NO: 731287 - DNA, 1130 bp, Homo sapiens; identical to SEQ ID NO: 450674

SEQ ID NO: 731288 - DNA, 1709 bp, Homo sapiens
  misc_feature (1656)..(1656): n is a, c, g, or t
  misc_feature (1673)..(1673): n is a, c, g, or t
  misc_feature (1678)..(1678): n is a, c, g, or t
  misc_feature (1682)..(1682): n is a, c, g, or t
  misc_feature (1693)..(1693): n is a, c, g, or t
ggaaggcaagagatctaggacttctagcccctgaactttcagccgaatacatcttttccaaaggagtgaattcaggcccttgtatcactggcagcaggacgtgaccatggagaagctgttgtgtttcttggtcttgaccagcctctctcatgcttttggccagacagacatgtcgaggaaggcttttgtgtttcccaaagagtcggatacttcctatgtatccctcaaagcaccgttaacgaagcctctcaaagccttcactgtgtgcctccacttctacacggaactgtcctcgacccgtatgagattaacaccatctatcttggcgggcccttcagtcctaatgtcctgaactggcgggcactgaagtatgaagtgcaaggcgaagtgttcaccaaaccccagctgtggccctgaggcccagctgtgggtcctgaaggtacctcccggttttttacaccgcatgggccccacgtctctgtctctggtacctcccgcttttttacactgcatggttcccacgtctctgtctctgggcctttgttcccctatatgcattgcaggcctgctccaccctcctcagcgcctgagaatggaggtaaagtgtctggtctgggagctcgttaactatgctgggaaacggtccaaaagaatcagaatttgaggtgttttgttttcatttttatttcaagttggacagatcttggagataatttcttacctcacatagatgagaaaactaacacccagaaaggagaaatgatgttataaaaaactcataaggcaagagctgagaaggaagcgctgatcttctatttaattccccacccatgacccccagaaagcaggagggcattgcccacattcacagggctcttcagtctcagaatcaggacactggccaggtgtctggtttgggtccagagtgctcatcatcatgtcatagaactgctgggcccaggtctcctgaaatgggaagcccagcaataccacgcagtccctccactttctcaaagcacactggaaaggccattagaattgccccagcagagcagatctgctttttttccagagcaaaatgaagcactaggtataaatatgttgttactgccaagaacttaaatgactggtttttgtttgcttgcagtgctttcttaattttatggctcttctgggaaactcctccccttttccacacgaaccttgtggggctgtgaattctttcttcatccccgcattcccaatatacccaggccacaagagtggacgtgaaccacagggtgtcctgtcagaggagcccatctcccatctccccagctccctatctggaggatagttggatagttacgtgttcctagcaggaccaactacagtcttcccaaggattgagttatggactttgggagtgagacatcttcttgctgctggatttccaagctgagaggacgtgaacctgggaccaccagtagccatcttgtttgccacatggagagagactgtgaggacagaagccaaactggaagtggaggagccaagggattgacaaacaacagagccttgaccacgtggagtctctgaatcagccttgtctggaaccagatctacacctggactgcccaggtctataagccaataaagcccctgtttacttgcaanaaaaaaaaaaaaaaaantttgngggngctgggcccgnaaagttttaaaaccat

SEQ ID NO: 731289 - DNA, 1655 bp, Homo sapiens
  misc_feature (1602)..(1602): n is a, c, g, or t
  misc_feature (1619)..(1619): n is a, c, g, or t
  misc_feature (1624)..(1624): n is a, c, g, or t
  misc_feature (1628)..(1628): n is a, c, g, or t
  misc_feature (1639)..(1639): n is a, c, g, or t
ggaaggcaagagatctaggacttctagcccctgaactttcagccgaatacatcttttccaaaggagtgaattcaggcccttgtatcactggcagcaggacgtgaccatggagaagctgttgtgtttcttggtcttgaccagcctctctcatgcttttggccagacagacatgtcgaggaaggcttttgtgtttcccaaagagtcggatacttcctatgtatccctcaaagcaccgttaacgaagcctctcaaagccttcactgtgtgcctccacttctacacggaactgtcctcgacccgtatgagattaacaccatctatcttggcgggcccttcagtcctaatgtcctgaactggcgggcactgaagtatgaagtgcaaggcgaagtgttcaccaaaccccagctgtggccctgaggcccagctgtgggtcctgaaggtacctcccggttttttacaccgcatgggccccacgtctctgtctctggtacctcccgcttttttacactgcatggttcccacgtctctgtctctgggcctttgttcccctatatgcattgcaggcctgctccaccctcctcagcgcctgagaatggaggtaaagtgtctggtctgggagctcgttaactatgctgggaaacggtccaaaagaatcagaatttgaggtgttttgttttcatttttatttcaagttggacagatcttggagataatttcttacctcacatagatgagaaaactaacacccagaaaggagaaatgatgttataacacccatgacccccagaaagcaggagggcattgcccacattcacagggctcttcagtctcagaatcaggacactggccaggtgtctggtttgggtccagagtgctcatcatcatgtcatagaactgctgggcccaggtctcctgaaatgggaagcccagcaataccacgcagtccctccactttctcaaagcacactggaaaggccattagaattgccccagcagagcagatctgctttttttccagagcaaaatgaagcactaggtataaatatgttgttactgccaagaacttaaatgactggtttttgtttgcttgcagtgctttcttaattttatggctcttctgggaaactcctccccttttccacacgaaccttgtggggctgtgaattctttcttcatccccgcattcccaatatacccaggccacaagagtggacgtgaaccacagggtgtcctgtcagaggagcccatctcccatctccccagctccctatctggaggatagttggatagttacgtgttcctagcaggaccaactacagtcttcccaaggattgagttatggactttgggagtgagacatcttcttgctgctggatttccaagctgagaggacgtgaacctgggaccaccagtagccatcttgtttgccacatggagagagactgtgaggacagaagccaaactggaagtggaggagccaagggattgacaaacaacagagccttgaccacgtggagtctctgaatcagccttgtctggaaccagatctacacctggactgcccaggtctataagccaataaagcccctgtttacttgcaanaaaaaaaaaaaaaaaantttgngggngctgggcccgnaaagttttaaaaccat

SEQ ID NO: 731290 - DNA, 1296 bp, Homo sapiens
ggaaggcaagagatctaggacttctagcccctgaactttcagccgaatacatcttttccaaaggaaatcagaatttgaggtgttttgttttcatttttatttcaagttggacagatcttggagataatttcttacctcacatagatgagaaaactaacacccagaaaggagaaatgatgttataaaaaactcataaggcaagagctgagaaggaagcgctgatcttctatttaattccccacccatgacccccagaaagcaggagggcattgcccacattcacagggctcttcagtctcagaatcaggacactggccaggtgtctggtttgggtccagagtgctcatcatcatgtcatagaactgctgggcccaggtctcctgaaatgggaagcccagcaataccacgcagtccctccactttctcaaagcacactggaaaggccattagaattgccccagcagagcagatctgctttttttccagagcaaaatgaagcactaggtataaatatgttgttactgccaagaacttaaatgactggtttttgtttgcttgcagtgctttcttaattttatggctcttctgggaaactcctccccttttccacacgaaccttgtggggctgtgaattctttcttcatccccgcattcccaatatacccaggccacaagagtggacgtgaaccacagggtgtcctgtcagaggagcccatctcccatctccccagctccctatctggaggatagttggatagttacgtgttcctagcaggaccaactacagtcttcccaaggattgagttatggactttgggagtgagacatcttcttgctgctggatttccaagctgagaggacgtgaacctgggaccaccagtagccatcttgtttgccacatggagagagactgtgaggacagaagccaaactggaagtggaggagccaagggattgacaaacaacagagccttgaccacgtggagtctctgaatcagccttgtctggaaccagatctacacctggactgcccaggtctataagccaataaagcccctgtttacttgtgatgagtgagtccaagctgttttctgatagttgctttagaagttgtgactaacttctctaatgacctttgaaatcaagtccctgtaagtttacacttcccattacacaacatatccatggcactttaacctgtccaagagtcccctgaagggattccctctgacaagcacagtccctcttttgagatagctggccattcatgtagggccagttgtgggggttttagtac

SEQ ID NO: 731291 - DNA, 1123 bp, Homo sapiens
  misc_feature (1070)..(1070): n is a, c, g, or t
  misc_feature (1087)..(1087): n is a, c, g, or t
  misc_feature (1092)..(1092): n is a, c, g, or t
  misc_feature (1096)..(1096): n is a, c, g, or t
  misc_feature (1107)..(1107): n is a, c, g, or t
ggaaggcaagagatctaggacttctagcccctgaactttcagccgaatacatcttttccaaaggaaatcagaatttgaggtgttttgttttcatttttatttcaagttggacagatcttggagataatttcttacctcacatagatgagaaaactaacacccagaaaggagaaatgatgttataaaaaactcataaggcaagagctgagaaggaagcgctgatcttctatttaattccccacccatgacccccagaaagcaggagggcattgcccacattcacagggctcttcagtctcagaatcaggacactggccaggtgtctggtttgggtccagagtgctcatcatcatgtcatagaactgctgggcccaggtctcctgaaatgggaagcccagcaataccacgcagtccctccactttctcaaagcacactggaaaggccattagaattgccccagcagagcagatctgctttttttccagagcaaaatgaagcactaggtataaatatgttgttactgccaagaacttaaatgactggtttttgtttgcttgcagtgctttcttaattttatggctcttctgggaaactcctccccttttccacacgaaccttgtggggctgtgaattctttcttcatccccgcattcccaatatacccaggccacaagagtggacgtgaaccacagggtgtcctgtcagaggagcccatctcccatctccccagctccctatctggaggatagttggatagttacgtgttcctagcaggaccaactacagtcttcccaaggattgagttatggactttgggagtgagacatcttcttgctgctggatttccaagctgagaggacgtgaacctgggaccaccagtagccatcttgtttgccacatggagagagactgtgaggacagaagccaaactggaagtggaggagccaagggattgacaaacaacagagccttgaccacgtggagtctctgaatcagccttgtctggaaccagatctacacctggactgcccaggtctataagccaataaagcccctgtttacttgcaanaaaaaaaaaaaaaaaantttgngggngctgggcccgnaaagttttaaaaccat

SEQ ID NO: 731292 - DNA, 1050 bp, Homo sapiens
ggaaggcaagagatctaggacttctagcccctgaactttcagccgaatacatcttttccaaaggagtgaattcaggcccttgtatcactggcagcaggacgtgaccatggagaagctgttgtgtttcttggtcttgaccagcctctctcatgcttttggccagacagacatgtcgaggaaggcttttgtgtttcccaaagagtcggatacttcctatgtatccctcaaagcaccgttaacgaagcctctcaaagccttcactgtgtgcctccacttctacacggaactgtcctcgacccgtgcctttgttcccctatatgcattgcaggcctgctccaccctcctcagcgcctgagaatggaggtaaagtgtctggtctgggagctcgttaactatgctgggaaacggtccaaaagaatcagaatttgaggtgttttgttttcatttttatttcaagttggacagatcttggagataatttcttacctcacatagatgagaaaactaacacccagaaaggagaaatgatgttataaaaaactcataaggcaagagctgagaaggaagcgctgatcttctatttaattccccacccatgacccccagaaagcaggagggcattgcccacattcacagggctcttcagtctcagaatcaggacactggccaggtgtctggtttgggtccagagtgctcatcatcatgtcatagaactgctgggcccaggtctcctgaaatgggaagcccagcaataccacgcagtccctccactttctcaaagcacactggaaaggccattagaattgccccagcagagcagatctgctttttttccagagcaaaatgaagcactaggtataaatatgttgttactgccaagaacttaaatgactggtttttgtttgcttgcagtgctttcttaattttatggctcttctgggaaactcctccccttttccacacgaaccttgtggggctgtgaattctttcttcatccccgcattcccaatatacccaggccacaagagtggacgtgaaccacagggtgtc

SEQ ID NO: 731293 - DNA, 1647 bp, Homo sapiens
ggaaggcaagagatctaggacttctagcccctgaactttcagccgaatacatcttttccaaaggagtgaattcaggcccttgtatcactggcagcaggacgtgaccatggagaagctgttgtgtttcttggtcttgaccagcctctctcatgcttttggccagacagacatgtcgaggaaggcttttgtgtttcccaaagagtcggatacttcctatgtatccctcaaagcaccgttaacgaagcctctcaaagccttcactgtgtgcctccacttctacacggaactgtcctcgacccgtgcctttgttcccctatatgcattgcaggcctgctccaccctcctcagcgcctgagaatggaggtaaagtgtctggtctgggagctcgttaactatgctgggaaacggtccaaaagaatcagaatttgaggtgttttgttttcatttttatttcaagttggacagatcttggagataatttcttacctcacatagatgagaaaactaacacccagaaaggagaaatgatgttataaaaaactcataaggcaagagctgagaaggaagcgctgatcttctatttaattccccacccatgacccccagaaagcaggagggcattgcccacattcacagggctcttcagtctcagaatcaggacactggccaggtgtctggtttgggtccagagtgctcatcatcatgtcatagaactgctgggcccaggtctcctgaaatgggaagcccagcaataccacgcagtccctccactttctcaaagcacactggaaaggccattagaattgccccagcagagcagatctgctttttttccagagcaaaatgaagcactaggtataaatatgttgttactgccaagaacttaaatgactggtttttgtttgcttgcagtgctttcttaattttatggctcttctgggaaactcctccccttttccacacgaaccttgtggggctgtgaattctttcttcatccccgcattcccaatatacccaggccacaagagtggacgtgaaccacagggtgtcctgtcagaggagcccatctcccatctccccagctccctatctggaggatagttggatagttacgtgttcctagcaggaccaactacagtcttcccaaggattgagttatggactttgggagtgagacatcttcttgctgctggatttccaagctgagaggacgtgaacctgggaccaccagtagccatcttgtttgccacatggagagagactgtgaggacagaagccaaactggaagtggaggagccaagggattgacaaacaacagagccttgaccacgtggagtctctgaatcagccttgtctggaaccagatctacacctggactgcccaggtctataagccaataaagcccctgtttacttgtgatgagtgagtccaagctgttttctgatagttgctttagaagttgtgactaacttctctaatgacctttgaaatcaagtccctgtaagtttacacttcccattacacaacatatccatggcactttaacctgtccaagagtcccctgaagggattccctctgacaagcacagtccctcttttgagatagctggccattcatgtagggccagttgtgggggttttagtac

SEQ ID NO: 731294 - DNA, 1474 bp, Homo sapiens
  misc_feature (1421)..(1421): n is a, c, g, or t
  misc_feature (1438)..(1438): n is a, c, g, or t
  misc_feature (1443)..(1443): n is a, c, g, or t
  misc_feature (1447)..(1447): n is a, c, g, or t
  misc_feature (1458)..(1458): n is a, c, g, or t
ggaaggcaagagatctaggacttctagcccctgaactttcagccgaatacatcttttccaaaggagtgaattcaggcccttgtatcactggcagcaggacgtgaccatggagaagctgttgtgtttcttggtcttgaccagcctctctcatgcttttggccagacagacatgtcgaggaaggcttttgtgtttcccaaagagtcggatacttcctatgtatccctcaaagcaccgttaacgaagcctctcaaagccttcactgtgtgcctccacttctacacggaactgtcctcgacccgtgcctttgttcccctatatgcattgcaggcctgctccaccctcctcagcgcctgagaatggaggtaaagtgtctggtctgggagctcgttaactatgctgggaaacggtccaaaagaatcagaatttgaggtgttttgttttcatttttatttcaagttggacagatcttggagataatttcttacctcacatagatgagaaaactaacacccagaaaggagaaatgatgttataaaaaactcataaggcaagagctgagaaggaagcgctgatcttctatttaattccccacccatgacccccagaaagcaggagggcattgcccacattcacagggctcttcagtctcagaatcaggacactggccaggtgtctggtttgggtccagagtgctcatcatcatgtcatagaactgctgggcccaggtctcctgaaatgggaagcccagcaataccacgcagtccctccactttctcaaagcacactggaaaggccattagaattgccccagcagagcagatctgctttttttccagagcaaaatgaagcactaggtataaatatgttgttactgccaagaacttaaatgactggtttttgtttgcttgcagtgctttcttaattttatggctcttctgggaaactcctccccttttccacacgaaccttgtggggctgtgaattctttcttcatccccgcattcccaatatacccaggccacaagagtggacgtgaaccacagggtgtcctgtcagaggagcccatctcccatctccccagctccctatctggaggatagttggatagttacgtgttcctagcaggaccaactacagtcttcccaaggattgagttatggactttgggagtgagacatcttcttgctgctggatttccaagctgagaggacgtgaacctgggaccaccagtagccatcttgtttgccacatggagagagactgtgaggacagaagccaaactggaagtggaggagccaagggattgacaaacaacagagccttgaccacgtggagtctctgaatcagccttgtctggaaccagatctacacctggactgcccaggtctataagccaataaagcccctgtttacttgcaanaaaaaaaaaaaaaaaantttgngggngctgggcccgnaaagttttaaaaccat

SEQ ID NO: 731295 - DNA, 1459 bp, Homo sapiens
ggaaggcaagagatctaggacttctagcccctgaactttcagccgaatacatcttttccaaaggagtgaattcaggcccttgtatcactggcagcaggacgtgaccatggagaagctgttgtgtttcttggtcttgaccagcctctctcatgcttttggccagacagacatgtcgaggaaggcttttgtgtttcccaaagagtcggatacttcctatgtatccctcaaagcaccgttaacgaagcctctcaaagccttcactgtgtgcctccacttctacacggaactgtcctcgacccgtgggtacagtattttctcgtatgccaccaagagacaagacaatgagattctcatattttggtctaaggatataggatacagttttacagtgggtgggtctgaaatattattcgaggttcctgaagtcacagtagctccagtacacatttgtacaagctgggagtccgcctcagggatcgtggagttctgggtagatgggaagcccagggtgaggaagagtctgaagaagggatacactgtgggggcagaagcaagcatcatcttggggcaggagcaggattccttcggtgggaactttgaaggaagcctgaaggtacctcccggttttttacaccgcatgggccccacgtctctgtctctggtacctcccgcttttttacactgcatggttcccacgtctctgtctctgggcctttgttcccctatatgcattgcaggcctgctccaccctcctcagcgcctgagaatggaggtaaagtgtctggtctgggagctcgttaactatgctgggaaacggtccaaaagaatcagaatttgaggtgttttgttttcatttttatttcaagttggacagatcttggagataatttcttacctcacatagatgagaaaactaacacccagaaaggagaaatgatgttataaaaaactcataaggcaagagctgagaaggaagcgctgatcttctatttaattccccacccatgacccccagaaagcaggagggcattgcccacattcacagggctcttcagtctcagaatcaggacactggccaggtgtctggtttgggtccagagtgctcatcatcatgtcatagaactgctgggcccaggtctcctgaaatgggaagcccagcaataccacgcagtccctccactttctcaaagcacactggaaaggccattagaattgccccagcagagcagatctgctttttttccagagcaaaatgaagcactaggtataaatatgttgttactgccaagaacttaaatgactggtttttgtttgcttgcagtgctttcttaattttatggctcttctgggaaactcctccccttttccacacgaaccttgtggggctgtgaattctttcttcatccccgcattcccaatatacccaggccacaagagtggacgtgaaccacagggtgtc

SEQ ID NO: 731296 - DNA, 2056 bp, Homo sapiens
ggaaggcaagagatctaggacttctagcccctgaactttcagccgaatacatcttttccaaaggagtgaattcaggcccttgtatcactggcagcaggacgtgaccatggagaagctgttgtgtttcttggtcttgaccagcctctctcatgcttttggccagacagacatgtcgaggaaggcttttgtgtttcccaaagagtcggatacttcctatgtatccctcaaagcaccgttaacgaagcctctcaaagccttcactgtgtgcctccacttctacacggaactgtcctcgacccgtgggtacagtattttctcgtatgccaccaagagacaagacaatgagattctcatattttggtctaaggatataggatacagttttacagtgggtgggtctgaaatattattcgaggttcctgaagtcacagtagctccagtacacatttgtacaagctgggagtccgcctcagggatcgtggagttctgggtagatgggaagcccagggtgaggaagagtctgaagaagggatacactgtgggggcagaagcaagcatcatcttggggcaggagcaggattccttcggtgggaactttgaaggaagcctgaaggtacctcccggttttttacaccgcatgggccccacgtctctgtctctggtacctcccgcttttttacactgcatggttcccacgtctctgtctctgggcctttgttcccctatatgcattgcaggcctgctccaccctcctcagcgcctgagaatggaggtaaagtgtctggtctgggagctcgttaactatgctgggaaacggtccaaaagaatcagaatttgaggtgttttgttttcatttttatttcaagttggacagatcttggagataatttcttacctcacatagatgagaaaactaacacccagaaaggagaaatgatgttataaaaaactcataaggcaagagctgagaaggaagcgctgatcttctatttaattccccacccatgacccccagaaagcaggagggcattgcccacattcacagggctcttcagtctcagaatcaggacactggccaggtgtctggtttgggtccagagtgctcatcatcatgtcatagaactgctgggcccaggtctcctgaaatgggaagcccagcaataccacgcagtccctccactttctcaaagcacactggaaaggccattagaattgccccagcagagcagatctgctttttttccagagcaaaatgaagcactaggtataaatatgttgttactgccaagaacttaaatgactggtttttgtttgcttgcagtgctttcttaattttatggctcttctgggaaactcctccccttttccacacgaaccttgtggggctgtgaattctttcttcatccccgcattcccaatatacccaggccacaagagtggacgtgaaccacagggtgtcctgtcagaggagcccatctcccatctccccagctccctatctggaggatagttggatagttacgtgttcctagcaggaccaactacagtcttcccaaggattgagttatggactttgggagtgagacatcttcttgctgctggatttccaagctgagaggacgtgaacctgggaccaccagtagccatcttgtttgccacatggagagagactgtgaggacagaagccaaactggaagtggaggagccaagggattgacaaacaacagagccttgaccacgtggagtctctgaatcagccttgtctggaaccagatctacacctggactgcccaggtctataagccaataaagcccctgtttacttgtgatgagtgagtccaagctgttttctgatagttgctttagaagttgtgactaacttctctaatgacctttgaaatcaagtccctgtaagtttacacttcccattacacaacatatccatggcactttaacctgtccaagagtcccctgaagggattccctctgacaagcacagtccctcttttgagatagctggccattcatgtagggccagttgtgggggttttagtac

SEQ ID NO: 731297 - DNA, 1883 bp, Homo sapiens
  misc_feature (1830)..(1830): n is a, c, g, or t
  misc_feature (1847)..(1847): n is a, c, g, or t
  misc_feature (1852)..(1852): n is a, c, g, or t
  misc_feature (1856)..(1856): n is a, c, g, or t
  misc_feature (1867)..(1867): n is a, c, g, or t
ggaaggcaagagatctaggacttctagcccctgaactttcagccgaatacatcttttccaaaggagtgaattcaggcccttgtatcactggcagcaggacgtgaccatggagaagctgttgtgtttcttggtcttgaccagcctctctcatgcttttggccagacagacatgtcgaggaaggcttttgtgtttcccaaagagtcggatacttcctatgtatccctcaaagcaccgttaacgaagcctctcaaagccttcactgtgtgcctccacttctacacggaactgtcctcgacccgtgggtacagtattttctcgtatgccaccaagagacaagacaatgagattctcatattttggtctaaggatataggatacagttttacagtgggtgggtctgaaatattattcgaggttcctgaagtcacagtagctccagtacacatttgtacaagctgggagtccgcctcagggatcgtggagttctgggtagatgggaagcccagggtgaggaagagtctgaagaagggatacactgtgggggcagaagcaagcatcatcttggggcaggagcaggattccttcggtgggaactttgaaggaagcctgaaggtacctcccggttttttacaccgcatgggccccacgtctctgtctctggtacctcccgcttttttacactgcatggttcccacgtctctgtctctgggcctttgttcccctatatgcattgcaggcctgctccaccctcctcagcgcctgagaatggaggtaaagtgtctggtctgggagctcgttaactatgctgggaaacggtccaaaagaatcagaatttgaggtgttttgttttcatttttatttcaagttggacagatcttggagataatttcttacctcacatagatgagaaaactaacacccagaaaggagaaatgatgttataaaaaactcataaggcaagagctgagaaggaagcgctgatcttctatttaattccccacccatgacccccagaaagcaggagggcattgcccacattcacagggctcttcagtctcagaatcaggacactggccaggtgtctggtttgggtccagagtgctcatcatcatgtcatagaactgctgggcccaggtctcctgaaatgggaagcccagcaataccacgcagtccctccactttctcaaagcacactggaaaggccattagaattgccccagcagagcagatctgctttttttccagagcaaaatgaagcactaggtataaatatgttgttactgccaagaacttaaatgactggtttttgtttgcttgcagtgctttcttaattttatggctcttctgggaaactcctccccttttccacacgaaccttgtggggctgtgaattctttcttcatccccgcattcccaatatacccaggccacaagagtggacgtgaaccacagggtgtcctgtcagaggagcccatctcccatctccccagctccctatctggaggatagttggatagttacgtgttcctagcaggaccaactacagtcttcccaaggattgagttatggactttgggagtgagacatcttcttgctgctggatttccaagctgagaggacgtgaacctgggaccaccagtagccatcttgtttgccacatggagagagactgtgaggacagaagccaaactggaagtggaggagccaagggattgacaaacaacagagccttgaccacgtggagtctctgaatcagccttgtctggaaccagatctacacctggactgcccaggtctataagccaataaagcccctgtttacttgcaanaaaaaaaaaaaaaaaantttgngggngctgggcccgnaaagttttaaaaccat

SEQ ID NO: 731298 - DNA, 2002 bp, Homo sapiens
ggaaggcaagagatctaggacttctagcccctgaactttcagccgaatacatcttttccaaaggagtgaattcaggcccttgtatcactggcagcaggacgtgaccatggagaagctgttgtgtttcttggtcttgaccagcctctctcatgcttttggccagacagacatgtcgaggaaggcttttgtgtttcccaaagagtcggatacttcctatgtatccctcaaagcaccgttaacgaagcctctcaaagccttcactgtgtgcctccacttctacacggaactgtcctcgacccgtgggtacagtattttctcgtatgccaccaagagacaagacaatgagattctcatattttggtctaaggatataggatacagttttacagtgggtgggtctgaaatattattcgaggttcctgaagtcacagtagctccagtacacatttgtacaagctgggagtccgcctcagggatcgtggagttctgggtagatgggaagcccagggtgaggaagagtctgaagaagggatacactgtgggggcagaagcaagcatcatcttggggcaggagcaggattccttcggtgggaactttgaaggaagcctgaaggtacctcccggttttttacaccgcatgggccccacgtctctgtctctggtacctcccgcttttttacactgcatggttcccacgtctctgtctctgggcctttgttcccctatatgcattgcaggcctgctccaccctcctcagcgcctgagaatggaggtaaagtgtctggtctgggagctcgttaactatgctgggaaacggtccaaaagaatcagaatttgaggtgttttgttttcatttttatttcaagttggacagatcttggagataatttcttacctcacatagatgagaaaactaacacccagaaaggagaaatgatgttataacacccatgacccccagaaagcaggagggcattgcccacattcacagggctcttcagtctcagaatcaggacactggccaggtgtctggtttgggtccagagtgctcatcatcatgtcatagaactgctgggcccaggtctcctgaaatgggaagcccagcaataccacgcagtccctccactttctcaaagcacactggaaaggccattagaattgccccagcagagcagatctgctttttttccagagcaaaatgaagcactaggtataaatatgttgttactgccaagaacttaaatgactggtttttgtttgcttgcagtgctttcttaattttatggctcttctgggaaactcctccccttttccacacgaaccttgtggggctgtgaattctttcttcatccccgcattcccaatatacccaggccacaagagtggacgtgaaccacagggtgtcctgtcagaggagcccatctcccatctccccagctccctatctggaggatagttggatagttacgtgttcctagcaggaccaactacagtcttcccaaggattgagttatggactttgggagtgagacatcttcttgctgctggatttccaagctgagaggacgtgaacctgggaccaccagtagccatcttgtttgccacatggagagagactgtgaggacagaagccaaactggaagtggaggagccaagggattgacaaacaacagagccttgaccacgtggagtctctgaatcagccttgtctggaaccagatctacacctggactgcccaggtctataagccaataaagcccctgtttacttgtgatgagtgagtccaagctgttttctgatagttgctttagaagttgtgactaacttctctaatgacctttgaaatcaagtccctgtaagtttacacttcccattacacaacatatccatggcactttaacctgtccaagagtcccctgaagggattccctctgacaagcacagtccctcttttgagatagctggccattcatgtagggccagttgtgggggttttagtac

SEQ ID NO: 731299 - DNA, 1829 bp, Homo sapiens
  misc_feature (1776)..(1776): n is a, c, g, or t
  misc_feature (1793)..(1793): n is a, c, g, or t
  misc_feature (1798)..(1798): n is a, c, g, or t
  misc_feature (1802)..(1802): n is a, c, g, or t
  misc_feature (1813)..(1813): n is a, c, g, or t
ggaaggcaagagatctaggacttctagcccctgaactttcagccgaatacatcttttccaaaggagtgaattcaggcccttgtatcactggcagcaggacgtgaccatggagaagctgttgtgtttcttggtcttgaccagcctctctcatgcttttggccagacagacatgtcgaggaaggcttttgtgtttcccaaagagtcggatacttcctatgtatccctcaaagcaccgttaacgaagcctctcaaagccttcactgtgtgcctccacttctacacggaactgtcctcgacccgtgggtacagtattttctcgtatgccaccaagagacaagacaatgagattctcatattttggtctaaggatataggatacagttttacagtgggtgggtctgaaatattattcgaggttcctgaagtcacagtagctccagtacacatttgtacaagctgggagtccgcctcagggatcgtggagttctgggtagatgggaagcccagggtgaggaagagtctgaagaagggatacactgtgggggcagaagcaagcatcatcttggggcaggagcaggattccttcggtgggaactttgaaggaagcctgaaggtacctcccggttttttacaccgcatgggccccacgtctctgtctctggtacctcccgcttttttacactgcatggttcccacgtctctgtctctgggcctttgttcccctatatgcattgcaggcctgctccaccctcctcagcgcctgagaatggaggtaaagtgtctggtctgggagctcgttaactatgctgggaaacggtccaaaagaatcagaatttgaggtgttttgttttcatttttatttcaagttggacagatcttggagataatttcttacctcacatagatgagaaaactaacacccagaaaggagaaatgatgttataacacccatgacccccagaaagcaggagggcattgcccacattcacagggctcttcagtctcagaatcaggacactggccaggtgtctggtttgggtccagagtgctcatcatcatgtcatagaactgctgggcccaggtctcctgaaatgggaagcccagcaataccacgcagtccctccactttctcaaagcacactggaaaggccattagaattgccccagcagagcagatctgctttttttccagagcaaaatgaagcactaggtataaatatgttgttactgccaagaacttaaatgactggtttttgtttgcttgcagtgctttcttaattttatggctcttctgggaaactcctccccttttccacacgaaccttgtggggctgtgaattctttcttcatccccgcattcccaatatacccaggccacaagagtggacgtgaaccacagggtgtcctgtcagaggagcccatctcccatctccccagctccctatctggaggatagttggatagttacgtgttcctagcaggaccaactacagtcttcccaaggattgagttatggactttgggagtgagacatcttcttgctgctggatttccaagctgagaggacgtgaacctgggaccaccagtagccatcttgtttgccacatggagagagactgtgaggacagaagccaaactggaagtggaggagccaagggattgacaaacaacagagccttgaccacgtggagtctctgaatcagccttgtctggaaccagatctacacctggactgcccaggtctataagccaataaagcccctgtttacttgcaanaaaaaaaaaaaaaaaantttgngggngctgggcccgnaaagttttaaaaccat

SEQ ID NO: 731300 - DNA, 1835 bp, Homo sapiens; identical to SEQ ID NO: 450684

SEQ ID NO: 731301 - DNA, 955 bp, Homo sapiens; identical to SEQ ID NO: 450677

SEQ ID NO: 731302 - DNA, 1471 bp, Homo sapiens
ggaaggcaagagatctaggacttctagcccctgaactttcagccgaatacatcttttccaaaggagtgaattcaggcccttgtatcactggcagcaggacgtgaccatggagaagctgttgtgtttcttggtcttgaccagcctctctcatgcttttggccagacagacatgtcgaggaaggcttttgtgtttcccaaagagtcggatacttcctatgtatccctcaaagcaccgttaacgaagcctctcaaagccttcactgtgtgcctccacttctacacggaactgtcctcgacccgtatgagattaacaccatctatcttggcgggcccttcagtcctaatgtcctgaactggcgggcactgaagtatgaagtgcaaggcgaagtgttcaccaaaccccagctgtggccctgaggcccagctgtgggtcctgaaggtacctcccggttttttacaccgcatgggccccacgtctctgtctctggtacctcccgcttttttacactgcatggttcccacgtctctgtctctgggcctttgttcccctatatgcattgcaggcctgctccaccctcctcagcgcctgagaatggaggtaaagtgtctggtctgggagctcgttaactatgctgggaaacggtccaaaagaatcagaatttgaggtgttttgttttcatttttatttcaagttggacagatcttggagataatttcttacctcacatagatgagaaaactaacacccagaaaggagaaatgatgttataactccccttttccacacgaaccttgtggggctgtgaattctttcttcatccccgcattcccaatatacccaggccacaagagtggacgtgaaccacagggtgtcctgtcagaggagcccatctcccatctccccagctccctatctggaggatagttggatagttacgtgttcctagcaggaccaactacagtcttcccaaggattgagttatggactttgggagtgagacatcttcttgctgctggatttccaagctgagaggacgtgaacctgggaccaccagtagccatcttgtttgccacatggagagagactgtgaggacagaagccaaactggaagtggaggagccaagggattgacaaacaacagagccttgaccacgtggagtctctgaatcagccttgtctggaaccagatctacacctggactgcccaggtctataagccaataaagcccctgtttacttgtgatgagtgagtccaagctgttttctgatagttgctttagaagttgtgactaacttctctaatgacctttgaaatcaagtccctgtaagtttacacttcccattacacaacatatccatggcactttaacctgtccaagagtcccctgaagggattccctctgacaagcacagtccctcttttgagatagctggccattcatgtagggccagttgtgggggttttagtac

SEQ ID NO: 731303 - DNA, 1353 bp, Homo sapiens
ggaaggcaagagatctaggacttctagcccctgaactttcagccgaatacatcttttccaaaggagtgaattcaggcccttgtatcactggcagcaggacgtgaccatggagaagctgttgtgtttcttggtcttgaccagcctctctcatgcttttggccagacagacatgtcgaggaaggcttttgtgtttcccaaagagtcggatacttcctatgtatccctcaaagcaccgttaacgaagcctctcaaagccttcactgtgtgcctccacttctacacggaactgtcctcgacccgtgggtacagtattttctcgtatgccaccaagagacaagacaatgagattctcatattttggtctaaggatataggatacagttttacagtgggtgggtctgaaatattattcgaggttcctgaagtcacagtagctccagtacacatttgtacaagctgggagtccgcctcagggatcgtggagttctgggtagatgggaagcccagggtgaggaacaataccacgcagtccctccactttagagcaaaatgaagcactaggtataaatatgttgttactgccaagaacttaaatgactggtttttgtttgcttgcagtgctttcttaattttatggctcttctgggaaactcctccccttttccacacgaaccttgtggggctgtgaattctttcttcatccccgcattcccaatatacccaggccacaagagtggacgtgaaccacagggtgtcctgtcagaggagcccatctcccatctccccagctccctatctggaggatagttggatagttacgtgttcctagcaggaccaactacagtcttcccaaggattgagttatggactttgggagtgagacatcttcttgctgctggatttccaagctgagaggacgtgaacctgggaccaccagtagccatcttgtttgccacatggagagagactgtgaggacagaagccaaactggaagtggaggagccaagggattgacaaacaacagagccttgaccacgtggagtctctgaatcagccttgtctggaaccagatctacacctggactgcccaggtctataagccaataaagcccctgtttacttgtgatgagtgagtccaagctgttttctgatagttgctttagaagttgtgactaacttctctaatgacctttgaaatcaagtccctgtaagtttacacttcccattacacaacatatccatggcactttaacctgtccaagagtcccctgaagggattccctctgacaagcacagtccctcttttgagatagctggccattcatgtagggccagttgtgggggttttagtac

SEQ ID NO: 731304 - DNA, 1180 bp, Homo sapiens
  misc_feature (1127)..(1127): n is a, c, g, or t
  misc_feature (1144)..(1144): n is a, c, g, or t
  misc_feature (1149)..(1149): n is a, c, g, or t
  misc_feature (1153)..(1153): n is a, c, g, or t
  misc_feature (1164)..(1164): n is a, c, g, or t
ggaaggcaagagatctaggacttctagcccctgaactttcagccgaatacatcttttccaaaggagtgaattcaggcccttgtatcactggcagcaggacgtgaccatggagaagctgttgtgtttcttggtcttgaccagcctctctcatgcttttggccagacagacatgtcgaggaaggcttttgtgtttcccaaagagtcggatacttcctatgtatccctcaaagcaccgttaacgaagcctctcaaagccttcactgtgtgcctccacttctacacggaactgtcctcgacccgtgggtacagtattttctcgtatgccaccaagagacaagacaatgagattctcatattttggtctaaggatataggatacagttttacagtgggtgggtctgaaatattattcgaggttcctgaagtcacagtagctccagtacacatttgtacaagctgggagtccgcctcagggatcgtggagttctgggtagatgggaagcccagggtgaggaacaataccacgcagtccctccactttagagcaaaatgaagcactaggtataaatatgttgttactgccaagaacttaaatgactggtttttgtttgcttgcagtgctttcttaattttatggctcttctgggaaactcctccccttttccacacgaaccttgtggggctgtgaattctttcttcatccccgcattcccaatatacccaggccacaagagtggacgtgaaccacagggtgtcctgtcagaggagcccatctcccatctccccagctccctatctggaggatagttggatagttacgtgttcctagcaggaccaactacagtcttcccaaggattgagttatggactttgggagtgagacatcttcttgctgctggatttccaagctgagaggacgtgaacctgggaccaccagtagccatcttgtttgccacatggagagagactgtgaggacagaagccaaactggaagtggaggagccaagggattgacaaacaacagagccttgaccacgtggagtctctgaatcagccttgtctggaaccagatctacacctggactgcccaggtctataagccaataaagcccctgtttacttgcaanaaaaaaaaaaaaaaaantttgngggngctgggcccgnaaagttttaaaaccat

SEQ ID NO: 731305 - DNA, 908 bp, Homo sapiens
ggaaggcaagagatctaggacttctagcccctgaactttcagccgaatacatcttttccaaaggagtgaattcaggcccttgtatcactggcagcaggacgtgaccatggagaagctgttgtgtttcttggtcttgaccagcctctctcatgcttttggccagacagacatgtcgaggaaggcttttgtgtttcccaaagagtcggatacttcctatgtatccctcaaagcaccgttaagagctcgttaactatgctgggaaacggtccaaaagaatcagaatttgaggtgttttgttttcatttttatttcaagttggacagatcttggagataatttcttacctcacatagatgagaaaactaacacccagaaaggagaaatgatgttataaaaaactcataaggcaagagctgagaaggaagcgctgatcttctatttaattccccacccatgacccccagaaagcaggagggcattgcccacattcacagggctcttcagtctcagaatcaggacactggccaggtgtctggtttgggtccagagtgctcatcatcatgtcatagaactgctgggcccaggtctcctgaaatgggaagcccagcaataccacgcagtccctccactttctcaaagcacactggaaaggccattagaattgccccagcagagcagatctgctttttttccagagcaaaatgaagcactaggtataaatatgttgttactgccaagaacttaaatgactggtttttgtttgcttgcagtgctttcttaattttatggctcttctgggaaactcctccccttttccacacgaaccttgtggggctgtgaattctttcttcatccccgcattcccaatatacccaggccacaagagtggacgtgaaccacagggtgtc

SEQ ID NO: 731306 - DNA, 1505 bp, Homo sapiens
ggaaggcaagagatctaggacttctagcccctgaactttcagccgaatacatcttttccaaaggagtgaattcaggcccttgtatcactggcagcaggacgtgaccatggagaagctgttgtgtttcttggtcttgaccagcctctctcatgcttttggccagacagacatgtcgaggaaggcttttgtgtttcccaaagagtcggatacttcctatgtatccctcaaagcaccgttaagagctcgttaactatgctgggaaacggtccaaaagaatcagaatttgaggtgttttgttttcatttttatttcaagttggacagatcttggagataatttcttacctcacatagatgagaaaactaacacccagaaaggagaaatgatgttataaaaaactcataaggcaagagctgagaaggaagcgctgatcttctatttaattccccacccatgacccccagaaagcaggagggcattgcccacattcacagggctcttcagtctcagaatcaggacactggccaggtgtctggtttgggtccagagtgctcatcatcatgtcatagaactgctgggcccaggtctcctgaaatgggaagcccagcaataccacgcagtccctccactttctcaaagcacactggaaaggccattagaattgccccagcagagcagatctgctttttttccagagcaaaatgaagcactaggtataaatatgttgttactgccaagaacttaaatgactggtttttgtttgcttgcagtgctttcttaattttatggctcttctgggaaactcctccccttttccacacgaaccttgtggggctgtgaattctttcttcatccccgcattcccaatatacccaggccacaagagtggacgtgaaccacagggtgtcctgtcagaggagcccatctcccatctccccagctccctatctggaggatagttggatagttacgtgttcctagcaggaccaactacagtcttcccaaggattgagttatggactttgggagtgagacatcttcttgctgctggatttccaagctgagaggacgtgaacctgggaccaccagtagccatcttgtttgccacatggagagagactgtgaggacagaagccaaactggaagtggaggagccaagggattgacaaacaacagagccttgaccacgtggagtctctgaatcagccttgtctggaaccagatctacacctggactgcccaggtctataagccaataaagcccctgtttacttgtgatgagtgagtccaagctgttttctgatagttgctttagaagttgtgactaacttctctaatgacctttgaaatcaagtccctgtaagtttacacttcccattacacaacatatccatggcactttaacctgtccaagagtcccctgaagggattccctctgacaagcacagtccctcttttgagatagctggccattcatgtagggccagttgtgggggttttagtac

SEQ ID NO: 731307 - DNA, 1332 bp, Homo sapiens
  misc_feature (1279)..(1279): n is a, c, g, or t
  misc_feature (1296)..(1296): n is a, c, g, or t
  misc_feature (1301)..(1301): n is a, c, g, or t
  misc_feature (1305)..(1305): n is a, c, g, or t
  misc_feature (1316)..(1316): n is a, c, g, or t
ggaaggcaagagatctaggacttctagcccctgaactttcagccgaatacatcttttccaaaggagtgaattcaggcccttgtatcactggcagcaggacgtgaccatggagaagctgttgtgtttcttggtcttgaccagcctctctcatgcttttggccagacagacatgtcgaggaaggcttttgtgtttcccaaagagtcggatacttcctatgtatccctcaaagcaccgttaagagctcgttaactatgctgggaaacggtccaaaagaatcagaatttgaggtgttttgttttcatttttatttcaagttggacagatcttggagataatttcttacctcacatagatgagaaaactaacacccagaaaggagaaatgatgttataaaaaactcataaggcaagagctgagaaggaagcgctgatcttctatttaattccccacccatgacccccagaaagcaggagggcattgcccacattcacagggctcttcagtctcagaatcaggacactggccaggtgtctggtttgggtccagagtgctcatcatcatgtcatagaactgctgggcccaggtctcctgaaatgggaagcccagcaataccacgcagtccctccactttctcaaagcacactggaaaggccattagaattgccccagcagagcagatctgctttttttccagagcaaaatgaagcactaggtataaatatgttgttactgccaagaacttaaatgactggtttttgtttgcttgcagtgctttcttaattttatggctcttctgggaaactcctccccttttccacacgaaccttgtggggctgtgaattctttcttcatccccgcattcccaatatacccaggccacaagagtggacgtgaaccacagggtgtcctgtcagaggagcccatctcccatctccccagctccctatctggaggatagttggatagttacgtgttcctagcaggaccaactacagtcttcccaaggattgagttatggactttgggagtgagacatcttcttgctgctggatttccaagctgagaggacgtgaacctgggaccaccagtagccatcttgtttgccacatggagagagactgtgaggacagaagccaaactggaagtggaggagccaagggattgacaaacaacagagccttgaccacgtggagtctctgaatcagccttgtctggaaccagatctacacctggactgcccaggtctataagccaataaagcccctgtttacttgcaanaaaaaaaaaaaaaaaantttgngggngctgggcccgnaaagttttaaaaccat

SEQ ID NO: 731308 - DNA, 1388 bp, Homo sapiens
ggaaggcaagagatctaggacttctagcccctgaactttcagccgaatacatcttttccaaaggagtgaattcaggcccttgtatcactggcagcaggacgtgaccatggagaagctgttgtgtttcttggtcttgaccagcctctctcatgcttttggccagacagacatgtcgaggaaggcttttgtgtttcccaaagagtcggatacttcctatgtatccctcaaagcaccgttaacgaagcctctcaaagccttcactgtgtgcctccacttctacacggaactgtcctcgacccgtgggtacagtattttctcgtatgccaccaagagacaagacaatgagattctcatattttggtctaaggatataggatacagttttacagtgggtgggtctgaaatattattcgaggttcctgaagtcacagtagctccagtacacatttgtacaagctgggagccaggtctcctgaaatgggaagcccagcaataccacgcagtccctccactttctcaaagcacactggaaaggccattagaattgccccagcagagcagatctgctttttttccagagcaaaatgaagcactaggtataaatatgttgttactgccaagaacttaaatgactggtttttgtttgcttgcagtgctttcttaattttatggctcttctgggaaactcctccccttttccacacgaaccttgtggggctgtgaattctttcttcatccccgcattcccaatatacccaggccacaagagtggacgtgaaccacagggtgtcctgtcagaggagcccatctcccatctccccagctccctatctggaggatagttggatagttacgtgttcctagcaggaccaactacagtcttcccaaggattgagttatggactttgggagtgagacatcttcttgctgctggatttccaagctgagaggacgtgaacctgggaccaccagtagccatcttgtttgccacatggagagagactgtgaggacagaagccaaactggaagtggaggagccaagggattgacaaacaacagagccttgaccacgtggagtctctgaatcagccttgtctggaaccagatctacacctggactgcccaggtctataagccaataaagcccctgtttacttgtgatgagtgagtccaagctgttttctgatagttgctttagaagttgtgactaacttctctaatgacctttgaaatcaagtccctgtaagtttacacttcccattacacaacatatccatggcactttaacctgtccaagagtcccctgaagggattccctctgacaagcacagtccctcttttgagatagctggccattcatgtagggccagttgtgggggttttagtac

SEQ ID NO: 731309 - DNA, 1215 bp, Homo sapiens
  misc_feature (1162)..(1162): n is a, c, g, or t
  misc_feature (1179)..(1179): n is a, c, g, or t
  misc_feature (1184)..(1184): n is a, c, g, or t
  misc_feature (1188)..(1188): n is a, c, g, or t
  misc_feature (1199)..(1199): n is a, c, g, or t
ggaaggcaagagatctaggacttctagcccctgaactttcagccgaatacatcttttccaaaggagtgaattcaggcccttgtatcactggcagcaggacgtgaccatggagaagctgttgtgtttcttggtcttgaccagcctctctcatgcttttggccagacagacatgtcgaggaaggcttttgtgtttcccaaagagtcggatacttcctatgtatccctcaaagcaccgttaacgaagcctctcaaagccttcactgtgtgcctccacttctacacggaactgtcctcgacccgtgggtacagtattttctcgtatgccaccaagagacaagacaatgagattctcatattttggtctaaggatataggatacagttttacagtgggtgggtctgaaatattattcgaggttcctgaagtcacagtagctccagtacacatttgtacaagctgggagccaggtctcctgaaatgggaagcccagcaataccacgcagtccctccactttctcaaagcacactggaaaggccattagaattgccccagcagagcagatctgctttttttccagagcaaaatgaagcactaggtataaatatgttgttactgccaagaacttaaatgactggtttttgtttgcttgcagtgctttcttaattttatggctcttctgggaaactcctccccttttccacacgaaccttgtggggctgtgaattctttcttcatccccgcattcccaatatacccaggccacaagagtggacgtgaaccacagggtgtcctgtcagaggagcccatctcccatctccccagctccctatctggaggatagttggatagttacgtgttcctagcaggaccaactacagtcttcccaaggattgagttatggactttgggagtgagacatcttcttgctgctggatttccaagctgagaggacgtgaacctgggaccaccagtagccatcttgtttgccacatggagagagactgtgaggacagaagccaaactggaagtggaggagccaagggattgacaaacaacagagccttgaccacgtggagtctctgaatcagccttgtctggaaccagatctacacctggactgcccaggtctataagccaataaagcccctgtttacttgcaanaaaaaaaaaaaaaaaantttgngggngctgggcccgnaaagttttaaaaccat

SEQ ID NO: 731310 - DNA, 1331 bp, Homo sapiens
ggaaggcaagagatctaggacttctagcccctgaactttcagccgaatacatcttttccaaaggagtgaattcaggcccttgtatcactggcagcaggacgtgaccatggagaagctgttgtgtttcttggtcttgaccagcctctctcatgcttttggccagacagacatgtcgaggaaggcttttgtgtttcccaaagagtcggatacttcctatgtatccctcaaagcaccgttaacgaagcctctcaaagccttcactgtgtgcctccacttctacacggaactgtcctcgacccgtgggtacagtattttctcgtatgccaccaagagacaagacaatgagattctcatattttggtctaaggatataggatacagttttacagtgggtgggtctgaaatattattcgaggttcctgaagtcacagtagctccagtacacatttgtacaagctgggagccaggtctcctgaaatgggaagcccagcaataccacgcagtccctccactttctcaaagcacactggaaaggccattagaattgccccagcagagcagatctgctttttttcctggtttttgtttgcttgcagtgctttcttaattttatggctcttctgggaaactcctccccttttccacacgaaccttgtggggctgtgaattctttcttcatccccgcattcccaatatacccaggccacaagagtggacgtgaaccacagggtgtcctgtcagaggagcccatctcccatctccccagctccctatctggaggatagttggatagttacgtgttcctagcaggaccaactacagtcttcccaaggattgagttatggactttgggagtgagacatcttcttgctgctggatttccaagctgagaggacgtgaacctgggaccaccagtagccatcttgtttgccacatggagagagactgtgaggacagaagccaaactggaagtggaggagccaagggattgacaaacaacagagccttgaccacgtggagtctctgaatcagccttgtctggaaccagatctacacctggactgcccaggtctataagccaataaagcccctgtttacttgtgatgagtgagtccaagctgttttctgatagttgctttagaagttgtgactaacttctctaatgacctttgaaatcaagtccctgtaagtttacacttcccattacacaacatatccatggcactttaacctgtccaagagtcccctgaagggattccctctgacaagcacagtccctcttttgagatagctggccattcatgtagggccagttgtgggggttttagtac

SEQ ID NO: 731311 - DNA, 1492 bp, Homo sapiens
ggaaggcaagagatctaggacttctagcccctgaactttcagccgaatacatcttttccaaaggagtgaattcaggcccttgtatcactggcagcaggacgtgaccatggagaagctgttgtgtttcttggtcttgaccagcctctctcatgcttttggccagacagacatgtcgaggaaggcttttgtgtttcccaaagagtcggatacttcctatgtatccctcaaagcaccgttaacgaagcctctcaaagccttcactgtgtgcctccacttctacacggaactgtcctcgacccgtgggtacagtattttctcgtatgccaccaagagacaagacatgagaaaactaacacccagaaaggagaaatgatgttataaaaaactcataaggcaagagctgagaaggaagcgctgatcttctatttaattccccacccatgacccccagaaagcaggagggcattgcccacattcacagggctcttcagtctcagaatcaggacactggccaggtgtctggtttgggtccagagtgctcatcatcatgtcatagaactgctgggcccaggtctcctgaaatgggaagcccagcaataccacgcagtccctccactttctcaaagcacactggaaaggccattagaattgccccagcagagcagatctgctttttttccagagcaaaatgaagcactaggtataaatatgttgttactgccaagaacttaaatgactggtttttgtttgcttgcagtgctttcttaattttatggctcttctgggaaactcctccccttttccacacgaaccttgtggggctgtgaattctttcttcatccccgcattcccaatatacccaggccacaagagtggacgtgaaccacagggtgtcctgtcagaggagcccatctcccatctccccagctccctatctggaggatagttggatagttacgtgttcctagcaggaccaactacagtcttcccaaggattgagttatggactttgggagtgagacatcttcttgctgctggatttccaagctgagaggacgtgaacctgggaccaccagtagccatcttgtttgccacatggagagagactgtgaggacagaagccaaactggaagtggaggagccaagggattgacaaacaacagagccttgaccacgtggagtctctgaatcagccttgtctggaaccagatctacacctggactgcccaggtctataagccaataaagcccctgtttacttgtgatgagtgagtccaagctgttttctgatagttgctttagaagttgtgactaacttctctaatgacctttgaaatcaagtccctgtaagtttacacttcccattacacaacatatccatggcactttaacctgtccaagagtcccctgaagggattccctctgacaagcacagtccctcttttgagatagctggccattcatgtagggccagttgtgggggttttagtac

SEQ ID NO: 731312 - DNA, 1319 bp, Homo sapiens
  misc_feature (1266)..(1266): n is a, c, g, or t
  misc_feature (1283)..(1283): n is a, c, g, or t
  misc_feature (1288)..(1288): n is a, c, g, or t
  misc_feature (1292)..(1292): n is a, c, g, or t
  misc_feature (1303)..(1303): n is a, c, g, or t
ggaaggcaagagatctaggacttctagcccctgaactttcagccgaatacatcttttccaaaggagtgaattcaggcccttgtatcactggcagcaggacgtgaccatggagaagctgttgtgtttcttggtcttgaccagcctctctcatgcttttggccagacagacatgtcgaggaaggcttttgtgtttcccaaagagtcggatacttcctatgtatccctcaaagcaccgttaacgaagcctctcaaagccttcactgtgtgcctccacttctacacggaactgtcctcgacccgtgggtacagtattttctcgtatgccaccaagagacaagacatgagaaaactaacacccagaaaggagaaatgatgttataaaaaactcataaggcaagagctgagaaggaagcgctgatcttctatttaattccccacccatgacccccagaaagcaggagggcattgcccacattcacagggctcttcagtctcagaatcaggacactggccaggtgtctggtttgggtccagagtgctcatcatcatgtcatagaactgctgggcccaggtctcctgaaatgggaagcccagcaataccacgcagtccctccactttctcaaagcacactggaaaggccattagaattgccccagcagagcagatctgctttttttccagagcaaaatgaagcactaggtataaatatgttgttactgccaagaacttaaatgactggtttttgtttgcttgcagtgctttcttaattttatggctcttctgggaaactcctccccttttccacacgaaccttgtggggctgtgaattctttcttcatccccgcattcccaatatacccaggccacaagagtggacgtgaaccacagggtgtcctgtcagaggagcccatctcccatctccccagctccctatctggaggatagttggatagttacgtgttcctagcaggaccaactacagtcttcccaaggattgagttatggactttgggagtgagacatcttcttgctgctggatttccaagctgagaggacgtgaacctgggaccaccagtagccatcttgtttgccacatggagagagactgtgaggacagaagccaaactggaagtggaggagccaagggattgacaaacaacagagccttgaccacgtggagtctctgaatcagccttgtctggaaccagatctacacctggactgcccaggtctataagccaataaagcccctgtttacttgcaanaaaaaaaaaaaaaaaantttgngggngctgggcccgnaaagttttaaaaccat

SEQ ID NO: 731313 - DNA, 1435 bp, Homo sapiens
ggaaggcaagagatctaggacttctagcccctgaactttcagccgaatacatcttttccaaaggagtgaattcaggcccttgtatcactggcagcaggacgtgaccatggagaagctgttgtgtttcttggtcttgaccagcctctctcatgcttttggccagacagacatgtcgaggaaggcttttgtgtttcccaaagagtcggatacttcctatgtatccctcaaagcaccgttaacgaagcctctcaaagccttcactgtgtgcctccacttctacacggaactgtcctcgacccgtgggtacagtattttctcgtatgccaccaagagacaagacatgagaaaactaacacccagaaaggagaaatgatgttataaaaaactcataaggcaagagctgagaaggaagcgctgatcttctatttaattccccacccatgacccccagaaagcaggagggcattgcccacattcacagggctcttcagtctcagaatcaggacactggccaggtgtctggtttgggtccagagtgctcatcatcatgtcatagaactgctgggcccaggtctcctgaaatgggaagcccagcaataccacgcagtccctccactttctcaaagcacactggaaaggccattagaattgccccagcagagcagatctgctttttttcctggtttttgtttgcttgcagtgctttcttaattttatggctcttctgggaaactcctccccttttccacacgaaccttgtggggctgtgaattctttcttcatccccgcattcccaatatacccaggccacaagagtggacgtgaaccacagggtgtcctgtcagaggagcccatctcccatctccccagctccctatctggaggatagttggatagttacgtgttcctagcaggaccaactacagtcttcccaaggattgagttatggactttgggagtgagacatcttcttgctgctggatttccaagctgagaggacgtgaacctgggaccaccagtagccatcttgtttgccacatggagagagactgtgaggacagaagccaaactggaagtggaggagccaagggattgacaaacaacagagccttgaccacgtggagtctctgaatcagccttgtctggaaccagatctacacctggactgcccaggtctataagccaataaagcccctgtttacttgtgatgagtgagtccaagctgttttctgatagttgctttagaagttgtgactaacttctctaatgacctttgaaatcaagtccctgtaagtttacacttcccattacacaacatatccatggcactttaacctgtccaagagtcccctgaagggattccctctgacaagcacagtccctcttttgagatagctggccattcatgtagggccagttgtgggggttttagtac

SEQ ID NO: 731314 - DNA, 1590 bp, Homo sapiens
ggaaggcaagagatctaggacttctagcccctgaactttcagccgaatacatcttttccaaaggagtgaattcaggcccttgtatcactggcagcaggacgtgaccatggagaagctgttgtgtttcttggtcttgaccagcctctctcatgcttttggccagacagacatgtcgaggaaggcttttgtgtttcccaaagagtcggatacttcctatgtatccctcaaagcaccgttaacgaagcctctcaaagccttcactgtgtgcctccacttctacacggaactgtcctcgacccgtgcctttgttcccctatatgcattgcaggcctgctccaccctcctcagcgcctgagaatggaggtaaagtgtctggtctgggagctcgttaactatgctgggaaacggtccaaaagaatcagaatttgaggtgttttgttttcatttttatttcaagttggacagatcttggagataatttcttacctcacatagatgagaaaactaacacccagaaaggagaaatgatgttataaaaaactcataaggcaagagctgagaaggaagcgctgatcttctatttaattccccacccatgacccccagaaagcaggagggcattgcccacattcacagggctcttcagtctcagaatcaggacactggccaggtgtctggtttgggtccagagtgctcatcatcatgtcatagaactgctgggcccaggtctcctgaaatgggaagcccagcaataccacgcagtccctccactttctcaaagcacactggaaaggccattagaattgccccagcagagcagatctgctttttttcctggtttttgtttgcttgcagtgctttcttaattttatggctcttctgggaaactcctccccttttccacacgaaccttgtggggctgtgaattctttcttcatccccgcattcccaatatacccaggccacaagagtggacgtgaaccacagggtgtcctgtcagaggagcccatctcccatctccccagctccctatctggaggatagttggatagttacgtgttcctagcaggaccaactacagtcttcccaaggattgagttatggactttgggagtgagacatcttcttgctgctggatttccaagctgagaggacgtgaacctgggaccaccagtagccatcttgtttgccacatggagagagactgtgaggacagaagccaaactggaagtggaggagccaagggattgacaaacaacagagccttgaccacgtggagtctctgaatcagccttgtctggaaccagatctacacctggactgcccaggtctataagccaataaagcccctgtttacttgtgatgagtgagtccaagctgttttctgatagttgctttagaagttgtgactaacttctctaatgacctttgaaatcaagtccctgtaagtttacacttcccattacacaacatatccatggcactttaacctgtccaagagtcccctgaagggattccctctgacaagcacagtccctcttttgagatagctggccattcatgtagggccagttgtgggggttttagtac

SEQ ID NO: 731315 - DNA, 1284 bp, Homo sapiens
ggaaggcaagagatctaggacttctagcccctgaactttcagccgaatacatcttttccaaaggagtgaattcaggcccttgtatcactggcagcaggacgtgaccatggagaagctgttgtgtttcttggtcttgaccagcctctctcatgcttttggccagacagacatgtcgaggaaggcttttgtgtttcccaaagagtcggatacttcctatgtatccctcaaagcaccgttaacgaagcctctcaaagccttcactgtgtgcctccacttctacacggaactgtcctcgacccgtgggtacagtattttctcgtatgccaccaagagacaagacaatgagattctcatattttggtctaaggatataggatacagttttacagtgggtgggtctgaaatattattcgaggttcctgaagtcacagcctgaaggtacctcccggttttttacaccgcatgggccccacgtctctgtctctggtacctcccgcttttttacactgcatggttcccacgtctctgtctctgggcctttgttcccctatatgcattgcaggcctgctccaccctcctcagcgcctgagaatggaggtaaagtgtctggtctgggagctcgttaactatgctgggaaacggtccaaaagaatcagaatttgaggtgttttgttttcatttttatttcaagttggacagatcttggagataatttcttacctcacatagatgagaaaactaacacccagaaaggagaaatgatgttataaaaaactcataaggcaagagctgagaaggaagcgctgatcttctatttaattccccacccatgacccccagaaagcaggagggcattgcccacattcacagggctcttcagtctcagaatcaggacactggccaggtgtctggtttgggtccagagtgctcatcatcatgtcatagaactgctgggcccaggtctcctgaaatgggaagcccagcaataccacgcagtccctccactttctcaaagcacactggaaaggccattagaattgccccagcagagcagatctgctttttttccagagcaaaatgaagcactaggtataaatatgttgttactgccaagaacttaaatgactggtttttgtttgcttgcagtgctttcttaattttatggctcttctgggaaactcctccccttttccacacgaaccttgtggggctgtgaattctttcttcatccccgcattcccaatatacccaggccacaagagtggacgtgaaccacagggtgtc

SEQ ID NO: 731316 - DNA, 1881 bp, Homo sapiens
ggaaggcaagagatctaggacttctagcccctgaactttcagccgaatacatcttttccaaaggagtgaattcaggcccttgtatcactggcagcaggacgtgaccatggagaagctgttgtgtttcttggtcttgaccagcctctctcatgcttttggccagacagacatgtcgaggaaggcttttgtgtttcccaaagagtcggatacttcctatgtatccctcaaagcaccgttaacgaagcctctcaaagccttcactgtgtgcctccacttctacacggaactgtcctcgacccgtgggtacagtattttctcgtatgccaccaagagacaagacaatgagattctcatattttggtctaaggatataggatacagttttacagtgggtgggtctgaaatattattcgaggttcctgaagtcacagcctgaaggtacctcccggttttttacaccgcatgggccccacgtctctgtctctggtacctcccgcttttttacactgcatggttcccacgtctctgtctctgggcctttgttcccctatatgcattgcaggcctgctccaccctcctcagcgcctgagaatggaggtaaagtgtctggtctgggagctcgttaactatgctgggaaacggtccaaaagaatcagaatttgaggtgttttgttttcatttttatttcaagttggacagatcttggagataatttcttacctcacatagatgagaaaactaacacccagaaaggagaaatgatgttataaaaaactcataaggcaagagctgagaaggaagcgctgatcttctatttaattccccacccatgacccccagaaagcaggagggcattgcccacattcacagggctcttcagtctcagaatcaggacactggccaggtgtctggtttgggtccagagtgctcatcatcatgtcatagaactgctgggcccaggtctcctgaaatgggaagcccagcaataccacgcagtccctccactttctcaaagcacactggaaaggccattagaattgccccagcagagcagatctgctttttttccagagcaaaatgaagcactaggtataaatatgttgttactgccaagaacttaaatgactggtttttgtttgcttgcagtgctttcttaattttatggctcttctgggaaactcctccccttttccacacgaaccttgtggggctgtgaattctttcttcatccccgcattcccaatatacccaggccacaagagtggacgtgaaccacagggtgtcctgtcagaggagcccatctcccatctccccagctccctatctggaggatagttggatagttacgtgttcctagcaggaccaactacagtcttcccaaggattgagttatggactttgggagtgagacatcttcttgctgctggatttccaagctgagaggacgtgaacctgggaccaccagtagccatcttgtttgccacatggagagagactgtgaggacagaagccaaactggaagtggaggagccaagggattgacaaacaacagagccttgaccacgtggagtctctgaatcagccttgtctggaaccagatctacacctggactgcccaggtctataagccaataaagcccctgtttacttgtgatgagtgagtccaagctgttttctgatagttgctttagaagttgtgactaacttctctaatgacctttgaaatcaagtccctgtaagtttacacttcccattacacaacatatccatggcactttaacctgtccaagagtcccctgaagggattccctctgacaagcacagtccctcttttgagatagctggccattcatgtagggccagttgtgggggttttagtac

SEQ ID NO: 731317 - DNA, 1708 bp, Homo sapiens
  misc_feature (1655)..(1655): n is a, c, g, or t
  misc_feature (1672)..(1672): n is a, c, g, or t
  misc_feature (1677)..(1677): n is a, c, g, or t
  misc_feature (1681)..(1681): n is a, c, g, or t
  misc_feature (1692)..(1692): n is a, c, g, or t
ggaaggcaagagatctaggacttctagcccctgaactttcagccgaatacatcttttccaaaggagtgaattcaggcccttgtatcactggcagcaggacgtgaccatggagaagctgttgtgtttcttggtcttgaccagcctctctcatgcttttggccagacagacatgtcgaggaaggcttttgtgtttcccaaagagtcggatacttcctatgtatccctcaaagcaccgttaacgaagcctctcaaagccttcactgtgtgcctccacttctacacggaactgtcctcgacccgtgggtacagtattttctcgtatgccaccaagagacaagacaatgagattctcatattttggtctaaggatataggatacagttttacagtgggtgggtctgaaatattattcgaggttcctgaagtcacagcctgaaggtacctcccggttttttacaccgcatgggccccacgtctctgtctctggtacctcccgcttttttacactgcatggttcccacgtctctgtctctgggcctttgttcccctatatgcattgcaggcctgctccaccctcctcagcgcctgagaatggaggtaaagtgtctggtctgggagctcgttaactatgctgggaaacggtccaaaagaatcagaatttgaggtgttttgttttcatttttatttcaagttggacagatcttggagataatttcttacctcacatagatgagaaaactaacacccagaaaggagaaatgatgttataaaaaactcataaggcaagagctgagaaggaagcgctgatcttctatttaattccccacccatgacccccagaaagcaggagggcattgcccacattcacagggctcttcagtctcagaatcaggacactggccaggtgtctggtttgggtccagagtgctcatcatcatgtcatagaactgctgggcccaggtctcctgaaatgggaagcccagcaataccacgcagtccctccactttctcaaagcacactggaaaggccattagaattgccccagcagagcagatctgctttttttccagagcaaaatgaagcactaggtataaatatgttgttactgccaagaacttaaatgactggtttttgtttgcttgcagtgctttcttaattttatggctcttctgggaaactcctccccttttccacacgaaccttgtggggctgtgaattctttcttcatccccgcattcccaatatacccaggccacaagagtggacgtgaaccacagggtgtcctgtcagaggagcccatctcccatctccccagctccctatctggaggatagttggatagttacgtgttcctagcaggaccaactacagtcttcccaaggattgagttatggactttgggagtgagacatcttcttgctgctggatttccaagctgagaggacgtgaacctgggaccaccagtagccatcttgtttgccacatggagagagactgtgaggacagaagccaaactggaagtggaggagccaagggattgacaaacaacagagccttgaccacgtggagtctctgaatcagccttgtctggaaccagatctacacctggactgcccaggtctataagccaataaagcccctgtttacttgcaanaaaaaaaaaaaaaaaantttgngggngctgggcccgnaaagttttaaaaccat

SEQ ID NO: 731318 - DNA, 1824 bp, Homo sapiens
ggaaggcaagagatctaggacttctagcccctgaactttcagccgaatacatcttttccaaaggagtgaattcaggcccttgtatcactggcagcaggacgtgaccatggagaagctgttgtgtttcttggtcttgaccagcctctctcatgcttttggccagacagacatgtcgaggaaggcttttgtgtttcccaaagagtcggatacttcctatgtatccctcaaagcaccgttaacgaagcctctcaaagccttcactgtgtgcctccacttctacacggaactgtcctcgacccgtgggtacagtattttctcgtatgccaccaagagacaagacaatgagattctcatattttggtctaaggatataggatacagttttacagtgggtgggtctgaaatattattcgaggttcctgaagtcacagcctgaaggtacctcccggttttttacaccgcatgggccccacgtctctgtctctggtacctcccgcttttttacactgcatggttcccacgtctctgtctctgggcctttgttcccctatatgcattgcaggcctgctccaccctcctcagcgcctgagaatggaggtaaagtgtctggtctgggagctcgttaactatgctgggaaacggtccaaaagaatcagaatttgaggtgttttgttttcatttttatttcaagttggacagatcttggagataatttcttacctcacatagatgagaaaactaacacccagaaaggagaaatgatgttataaaaaactcataaggcaagagctgagaaggaagcgctgatcttctatttaattccccacccatgacccccagaaagcaggagggcattgcccacattcacagggctcttcagtctcagaatcaggacactggccaggtgtctggtttgggtccagagtgctcatcatcatgtcatagaactgctgggcccaggtctcctgaaatgggaagcccagcaataccacgcagtccctccactttctcaaagcacactggaaaggccattagaattgccccagcagagcagatctgctttttttcctggtttttgtttgcttgcagtgctttcttaattttatggctcttctgggaaactcctccccttttccacacgaaccttgtggggctgtgaattctttcttcatccccgcattcccaatatacccaggccacaagagtggacgtgaaccacagggtgtcctgtcagaggagcccatctcccatctccccagctccctatctggaggatagttggatagttacgtgttcctagcaggaccaactacagtcttcccaaggattgagttatggactttgggagtgagacatcttcttgctgctggatttccaagctgagaggacgtgaacctgggaccaccagtagccatcttgtttgccacatggagagagactgtgaggacagaagccaaactggaagtggaggagccaagggattgacaaacaacagagccttgaccacgtggagtctctgaatcagccttgtctggaaccagatctacacctggactgcccaggtctataagccaataaagcccctgtttacttgtgatgagtgagtccaagctgttttctgatagttgctttagaagttgtgactaacttctctaatgacctttgaaatcaagtccctgtaagtttacacttcccattacacaacatatccatggcactttaacctgtccaagagtcccctgaagggattccctctgacaagcacagtccctcttttgagatagctggccattcatgtagggccagttgtgggggttttagtac

SEQ ID NO: 731319 - DNA, 1827 bp, Homo sapiens
ggaaggcaagagatctaggacttctagcccctgaactttcagccgaatacatcttttccaaaggagtgaattcaggcccttgtatcactggcagcaggacgtgaccatggagaagctgttgtgtttcttggtcttgaccagcctctctcatgcttttggccagacagacatgtcgaggaaggcttttgtgtttcccaaagagtcggatacttcctatgtatccctcaaagcaccgttaacgaagcctctcaaagccttcactgtgtgcctccacttctacacggaactgtcctcgacccgtgggtacagtattttctcgtatgccaccaagagacaagacaatgagattctcatattttggtctaaggatataggatacagttttacagtgggtgggtctgaaatattattcgaggttcctgaagtcacagcctgaaggtacctcccggttttttacaccgcatgggccccacgtctctgtctctggtacctcccgcttttttacactgcatggttcccacgtctctgtctctgggcctttgttcccctatatgcattgcaggcctgctccaccctcctcagcgcctgagaatggaggtaaagtgtctggtctgggagctcgttaactatgctgggaaacggtccaaaagaatcagaatttgaggtgttttgttttcatttttatttcaagttggacagatcttggagataatttcttacctcacatagatgagaaaactaacacccagaaaggagaaatgatgttataacacccatgacccccagaaagcaggagggcattgcccacattcacagggctcttcagtctcagaatcaggacactggccaggtgtctggtttgggtccagagtgctcatcatcatgtcatagaactgctgggcccaggtctcctgaaatgggaagcccagcaataccacgcagtccctccactttctcaaagcacactggaaaggccattagaattgccccagcagagcagatctgctttttttccagagcaaaatgaagcactaggtataaatatgttgttactgccaagaacttaaatgactggtttttgtttgcttgcagtgctttcttaattttatggctcttctgggaaactcctccccttttccacacgaaccttgtggggctgtgaattctttcttcatccccgcattcccaatatacccaggccacaagagtggacgtgaaccacagggtgtcctgtcagaggagcccatctcccatctccccagctccctatctggaggatagttggatagttacgtgttcctagcaggaccaactacagtcttcccaaggattgagttatggactttgggagtgagacatcttcttgctgctggatttccaagctgagaggacgtgaacctgggaccaccagtagccatcttgtttgccacatggagagagactgtgaggacagaagccaaactggaagtggaggagccaagggattgacaaacaacagagccttgaccacgtggagtctctgaatcagccttgtctggaaccagatctacacctggactgcccaggtctataagccaataaagcccctgtttacttgtgatgagtgagtccaagctgttttctgatagttgctttagaagttgtgactaacttctctaatgacctttgaaatcaagtccctgtaagtttacacttcccattacacaacatatccatggcactttaacctgtccaagagtcccctgaagggattccctctgacaagcacagtccctcttttgagatagctggccattcatgtagggccagttgtgggggttttagtac

SEQ ID NO: 731320 - DNA, 1654 bp, Homo sapiens
  misc_feature (1601)..(1601): n is a, c, g, or t
  misc_feature (1618)..(1618): n is a, c, g, or t
  misc_feature (1623)..(1623): n is a, c, g, or t
  misc_feature (1627)..(1627): n is a, c, g, or t
  misc_feature (1638)..(1638): n is a, c, g, or t
ggaaggcaagagatctaggacttctagcccctgaactttcagccgaatacatcttttccaaaggagtgaattcaggcccttgtatcactggcagcaggacgtgaccatggagaagctgttgtgtttcttggtcttgaccagcctctctcatgcttttggccagacagacatgtcgaggaaggcttttgtgtttcccaaagagtcggatacttcctatgtatccctcaaagcaccgttaacgaagcctctcaaagccttcactgtgtgcctccacttctacacggaactgtcctcgacccgtgggtacagtattttctcgtatgccaccaagagacaagacaatgagattctcatattttggtctaaggatataggatacagttttacagtgggtgggtctgaaatattattcgaggttcctgaagtcacagcctgaaggtacctcccggttttttacaccgcatgggccccacgtctctgtctctggtacctcccgcttttttacactgcatggttcccacgtctctgtctctgggcctttgttcccctatatgcattgcaggcctgctccaccctcctcagcgcctgagaatggaggtaaagtgtctggtctgggagctcgttaactatgctgggaaacggtccaaaagaatcagaatttgaggtgttttgttttcatttttatttcaagttggacagatcttggagataatttcttacctcacatagatgagaaaactaacacccagaaaggagaaatgatgttataacacccatgacccccagaaagcaggagggcattgcccacattcacagggctcttcagtctcagaatcaggacactggccaggtgtctggtttgggtccagagtgctcatcatcatgtcatagaactgctgggcccaggtctcctgaaatgggaagcccagcaataccacgcagtccctccactttctcaaagcacactggaaaggccattagaattgccccagcagagcagatctgctttttttccagagcaaaatgaagcactaggtataaatatgttgttactgccaagaacttaaatgactggtttttgtttgcttgcagtgctttcttaattttatggctcttctgggaaactcctccccttttccacacgaaccttgtggggctgtgaattctttcttcatccccgcattcccaatatacccaggccacaagagtggacgtgaaccacagggtgtcctgtcagaggagcccatctcccatctccccagctccctatctggaggatagttggatagttacgtgttcctagcaggaccaactacagtcttcccaaggattgagttatggactttgggagtgagacatcttcttgctgctggatttccaagctgagaggacgtgaacctgggaccaccagtagccatcttgtttgccacatggagagagactgtgaggacagaagccaaactggaagtggaggagccaagggattgacaaacaacagagccttgaccacgtggagtctctgaatcagccttgtctggaaccagatctacacctggactgcccaggtctataagccaataaagcccctgtttacttgcaanaaaaaaaaaaaaaaaantttgngggngctgggcccgnaaagttttaaaaccat

SEQ ID NO: 731321 - DNA, 1470 bp, Homo sapiens
ggaaggcaagagatctaggacttctagcccctgaactttcagccgaatacatcttttccaaaggagtgaattcaggcccttgtatcactggcagcaggacgtgaccatggagaagctgttgtgtttcttggtcttgaccagcctctctcatgcttttggccagacagacatgtcgaggaaggcttttgtgtttcccaaagagtcggatacttcctatgtatccctcaaagcaccgttaacgaagcctctcaaagccttcactgtgtgcctccacttctacacggaactgtcctcgacccgtgggtacagtattttctcgtatgccaccaagagacaagacaatgagattctcatattttggtctaaggatataggatacagttttacagtgggtgggtctgaaatattattcgaggttcctgaagtcacagcctgaaggtacctcccggttttttacaccgcatgggccccacgtctctgtctctggtacctcccgcttttttacactgcatggttcccacgtctctgtctctgggcctttgttcccctatatgcattgcaggcctgctccaccctcctcagcgcctgagaatggaggtaaagtgtctggtctgggagctcgttaactatgctgggaaacggtccaaaagaatcagaatttgaggtgttttgttttcatttttatttcaagttggacagatcttggagataatttcttacctcacatagatgagaaaactaacacccagaaaggagaaatgatgttataactccccttttccacacgaaccttgtggggctgtgaattctttcttcatccccgcattcccaatatacccaggccacaagagtggacgtgaaccacagggtgtcctgtcagaggagcccatctcccatctccccagctccctatctggaggatagttggatagttacgtgttcctagcaggaccaactacagtcttcccaaggattgagttatggactttgggagtgagacatcttcttgctgctggatttccaagctgagaggacgtgaacctgggaccaccagtagccatcttgtttgccacatggagagagactgtgaggacagaagccaaactggaagtggaggagccaagggattgacaaacaacagagccttgaccacgtggagtctctgaatcagccttgtctggaaccagatctacacctggactgcccaggtctataagccaataaagcccctgtttacttgtgatgagtgagtccaagctgttttctgatagttgctttagaagttgtgactaacttctctaatgacctttgaaatcaagtccctgtaagtttacacttcccattacacaacatatccatggcactttaacctgtccaagagtcccctgaagggattccctctgacaagcacagtccctcttttgagatagctggccattcatgtagggccagttgtgggggttttagtac

SEQ ID NO: 731322 - DNA, 1142 bp, Homo sapiens
ggaaggcaagagatctaggacttctagcccctgaactttcagccgaatacatcttttccaaaggagtgaattcaggcccttgtatcactggcagcaggacgtgaccatggagaagctgttgtgtttcttggtcttgaccagcctctctcatgcttttggccagacagacatgtcgaggaaggcttttgtgtttcccaaagagtcggatacttcctatgtatccctcaaagcaccgttaacgaagcctctcaaagccttcactgtgtgcctccacttctacacggaactgtcctcgacccgtgggtacagtattttctcgtatgccaccaagagacaagacaatgagattctcatattttggtctaaggatataggatacagttttacagtgggtgggtctgaaatattattcgaggttcctgaagtcacagcctcctcagcgcctgagaatggaggtaaagtgtctggtctgggagctcgttaactatgctgggaaacggtccaaaagaatcagaatttgaggtgttttgttttcatttttatttcaagttggacagatcttggagataatttcttacctcacatagatgagaaaactaacacccagaaaggagaaatgatgttataaaaaactcataaggcaagagctgagaaggaagcgctgatcttctatttaattccccacccatgacccccagaaagcaggagggcattgcccacattcacagggctcttcagtctcagaatcaggacactggccaggtgtctggtttgggtccagagtgctcatcatcatgtcatagaactgctgggcccaggtctcctgaaatgggaagcccagcaataccacgcagtccctccactttctcaaagcacactggaaaggccattagaattgccccagcagagcagatctgctttttttccagagcaaaatgaagcactaggtataaatatgttgttactgccaagaacttaaatgactggtttttgtttgcttgcagtgctttcttaattttatggctcttctgggaaactcctccccttttccacacgaaccttgtggggctgtgaattctttcttcatccccgcattcccaatatacccaggccacaagagtggacgtgaaccacagggtgtc

SEQ ID NO: 731323 - DNA, 1739 bp, Homo sapiens
ggaaggcaagagatctaggacttctagcccctgaactttcagccgaatacatcttttccaaaggagtgaattcaggcccttgtatcactggcagcaggacgtgaccatggagaagctgttgtgtttcttggtcttgaccagcctctctcatgcttttggccagacagacatgtcgaggaaggcttttgtgtttcccaaagagtcggatacttcctatgtatccctcaaagcaccgttaacgaagcctctcaaagccttcactgtgtgcctccacttctacacggaactgtcctcgacccgtgggtacagtattttctcgtatgccaccaagagacaagacaatgagattctcatattttggtctaaggatataggatacagttttacagtgggtgggtctgaaatattattcgaggttcctgaagtcacagcctcctcagcgcctgagaatggaggtaaagtgtctggtctgggagctcgttaactatgctgggaaacggtccaaaagaatcagaatttgaggtgttttgttttcatttttatttcaagttggacagatcttggagataatttcttacctcacatagatgagaaaactaacacccagaaaggagaaatgatgttataaaaaactcataaggcaagagctgagaaggaagcgctgatcttctatttaattccccacccatgacccccagaaagcaggagggcattgcccacattcacagggctcttcagtctcagaatcaggacactggccaggtgtctggtttgggtccagagtgctcatcatcatgtcatagaactgctgggcccaggtctcctgaaatgggaagcccagcaataccacgcagtccctccactttctcaaagcacactggaaaggccattagaattgccccagcagagcagatctgctttttttccagagcaaaatgaagcactaggtataaatatgttgttactgccaagaacttaaatgactggtttttgtttgcttgcagtgctttcttaattttatggctcttctgggaaactcctccccttttccacacgaaccttgtggggctgtgaattctttcttcatccccgcattcccaatatacccaggccacaagagtggacgtgaaccacagggtgtcctgtcagaggagcccatctcccatctccccagctccctatctggaggatagttggatagttacgtgttcctagcaggaccaactacagtcttcccaaggattgagttatggactttgggagtgagacatcttcttgctgctggatttccaagctgagaggacgtgaacctgggaccaccagtagccatcttgtttgccacatggagagagactgtgaggacagaagccaaactggaagtggaggagccaagggattgacaaacaacagagccttgaccacgtggagtctctgaatcagccttgtctggaaccagatctacacctggactgcccaggtctataagccaataaagcccctgtttacttgtgatgagtgagtccaagctgttttctgatagttgctttagaagttgtgactaacttctctaatgacctttgaaatcaagtccctgtaagtttacacttcccattacacaacatatccatggcactttaacctgtccaagagtcccctgaagggattccctctgacaagcacagtccctcttttgagatagctggccattcatgtagggccagttgtgggggttttagtac

SEQ ID NO: 731324 - DNA, 1566 bp, Homo sapiens
  misc_feature (1513)..(1513): n is a, c, g, or t
  misc_feature (1530)..(1530): n is a, c, g, or t
  misc_feature (1535)..(1535): n is a, c, g, or t
  misc_feature (1539)..(1539): n is a, c, g, or t
  misc_feature (1550)..(1550): n is a, c, g, or t
ggaaggcaagagatctaggacttctagcccctgaactttcagccgaatacatcttttccaaaggagtgaattcaggcccttgtatcactggcagcaggacgtgaccatggagaagctgttgtgtttcttggtcttgaccagcctctctcatgcttttggccagacagacatgtcgaggaaggcttttgtgtttcccaaagagtcggatacttcctatgtatccctcaaagcaccgttaacgaagcctctcaaagccttcactgtgtgcctccacttctacacggaactgtcctcgacccgtgggtacagtattttctcgtatgccaccaagagacaagacaatgagattctcatattttggtctaaggatataggatacagttttacagtgggtgggtctgaaatattattcgaggttcctgaagtcacagcctcctcagcgcctgagaatggaggtaaagtgtctggtctgggagctcgttaactatgctgggaaacggtccaaaagaatcagaatttgaggtgttttgttttcatttttatttcaagttggacagatcttggagataatttcttacctcacatagatgagaaaactaacacccagaaaggagaaatgatgttataaaaaactcataaggcaagagctgagaaggaagcgctgatcttctatttaattccccacccatgacccccagaaagcaggagggcattgcccacattcacagggctcttcagtctcagaatcaggacactggccaggtgtctggtttgggtccagagtgctcatcatcatgtcatagaactgctgggcccaggtctcctgaaatgggaagcccagcaataccacgcagtccctccactttctcaaagcacactggaaaggccattagaattgccccagcagagcagatctgctttttttccagagcaaaatgaagcactaggtataaatatgttgttactgccaagaacttaaatgactggtttttgtttgcttgcagtgctttcttaattttatggctcttctgggaaactcctccccttttccacacgaaccttgtggggctgtgaattctttcttcatccccgcattcccaatatacccaggccacaagagtggacgtgaaccacagggtgtcctgtcagaggagcccatctcccatctccccagctccctatctggaggatagttggatagttacgtgttcctagcaggaccaactacagtcttcccaaggattgagttatggactttgggagtgagacatcttcttgctgctggatttccaagctgagaggacgtgaacctgggaccaccagtagccatcttgtttgccacatggagagagactgtgaggacagaagccaaactggaagtggaggagccaagggattgacaaacaacagagccttgaccacgtggagtctctgaatcagccttgtctggaaccagatctacacctggactgcccaggtctataagccaataaagcccctgtttacttgcaanaaaaaaaaaaaaaaaantttgngggngctgggcccgnaaagttttaaaaccat

SEQ ID NO: 731325 - DNA, 1682 bp, Homo sapiens
ggaaggcaagagatctaggacttctagcccctgaactttcagccgaatacatcttttccaaaggagtgaattcaggcccttgtatcactggcagcaggacgtgaccatggagaagctgttgtgtttcttggtcttgaccagcctctctcatgcttttggccagacagacatgtcgaggaaggcttttgtgtttcccaaagagtcggatacttcctatgtatccctcaaagcaccgttaacgaagcctctcaaagccttcactgtgtgcctccacttctacacggaactgtcctcgacccgtgggtacagtattttctcgtatgccaccaagagacaagacaatgagattctcatattttggtctaaggatataggatacagttttacagtgggtgggtctgaaatattattcgaggttcctgaagtcacagcctcctcagcgcctgagaatggaggtaaagtgtctggtctgggagctcgttaactatgctgggaaacggtccaaaagaatcagaatttgaggtgttttgttttcatttttatttcaagttggacagatcttggagataatttcttacctcacatagatgagaaaactaacacccagaaaggagaaatgatgttataaaaaactcataaggcaagagctgagaaggaagcgctgatcttctatttaattccccacccatgacccccagaaagcaggagggcattgcccacattcacagggctcttcagtctcagaatcaggacactggccaggtgtctggtttgggtccagagtgctcatcatcatgtcatagaactgctgggcccaggtctcctgaaatgggaagcccagcaataccacgcagtccctccactttctcaaagcacactggaaaggccattagaattgccccagcagagcagatctgctttttttcctggtttttgtttgcttgcagtgctttcttaattttatggctcttctgggaaactcctccccttttccacacgaaccttgtggggctgtgaattctttcttcatccccgcattcccaatatacccaggccacaagagtggacgtgaaccacagggtgtcctgtcagaggagcccatctcccatctccccagctccctatctggaggatagttggatagttacgtgttcctagcaggaccaactacagtcttcccaaggattgagttatggactttgggagtgagacatcttcttgctgctggatttccaagctgagaggacgtgaacctgggaccaccagtagccatcttgtttgccacatggagagagactgtgaggacagaagccaaactggaagtggaggagccaagggattgacaaacaacagagccttgaccacgtggagtctctgaatcagccttgtctggaaccagatctacacctggactgcccaggtctataagccaataaagcccctgtttacttgtgatgagtgagtccaagctgttttctgatagttgctttagaagttgtgactaacttctctaatgacctttgaaatcaagtccctgtaagtttacacttcccattacacaacatatccatggcactttaacctgtccaagagtcccctgaagggattccctctgacaagcacagtccctcttttgagatagctggccattcatgtagggccagttgtgggggttttagtac

SEQ ID NO: 731326 - DNA, 1185 bp, Homo sapiens
ggaaggcaagagatctaggacttctagcccctgaactttcagccgaatacatcttttccaaaggagtgaattcaggcccttgtatcactggcagcaggacgtgaccatggagaagctgttgtgtttcttggtcttgaccagcctctctcatgcttttggccagacagacatgtcgaggaaggcttttgtgtttcccaaagagtcggatacttcctatgtatccctcaaagcaccgttaacgaagcctctcaaagccttcactgtgtgcctccacttctacacggaactgtcctcgacccgtgggtacagtattttctcgtatgccaccaagagacaagacaatgagattctcatattttggtctaaggatataggatacagttttacagtgggtgggtctgaaatattattcgaggttcctgaagtcacagtagctccagtacacatttgtacaagctgggagtccgcctcagggatcgtggagttctgggtagatgggaagcccagggtgaggaagagctcgttaactatgctgggaaacggtccaaaagaatcagaatttgaggtgttttgttttcatttttatttcaagttggacagatcttggagataatttcttacctcacatagatgagaaaactaacacccagaaaggagaaatgatgttataaaaaactcataaggcaagagctgagaaggaagcgctgatcttctatttaattccccacccatgacccccagaaagcaggagggcattgcccacattcacagggctcttcagtctcagaatcaggacactggccaggtgtctggtttgggtccagagtgctcatcatcatgtcatagaactgctgggcccaggtctcctgaaatgggaagcccagcaataccacgcagtccctccactttctcaaagcacactggaaaggccattagaattgccccagcagagcagatctgctttttttccagagcaaaatgaagcactaggtataaatatgttgttactgccaagaacttaaatgactggtttttgtttgcttgcagtgctttcttaattttatggctcttctgggaaactcctccccttttccacacgaaccttgtggggctgtgaattctttcttcatccccgcattcccaatatacccaggccacaagagtggacgtgaaccacagggtgtc

SEQ ID NO: 731327 - DNA, 1782 bp, Homo sapiens
ggaaggcaagagatctaggacttctagcccctgaactttcagccgaatacatcttttccaaaggagtgaattcaggcccttgtatcactggcagcaggacgtgaccatggagaagctgttgtgtttcttggtcttgaccagcctctctcatgcttttggccagacagacatgtcgaggaaggcttttgtgtttcccaaagagtcggatacttcctatgtatccctcaaagcaccgttaacgaagcctctcaaagccttcactgtgtgcctccacttctacacggaactgtcctcgacccgtgggtacagtattttctcgtatgccaccaagagacaagacaatgagattctcatattttggtctaaggatataggatacagttttacagtgggtgggtctgaaatattattcgaggttcctgaagtcacagtagctccagtacacatttgtacaagctgggagtccgcctcagggatcgtggagttctgggtagatgggaagcccagggtgaggaagagctcgttaactatgctgggaaacggtccaaaagaatcagaatttgaggtgttttgttttcatttttatttcaagttggacagatcttggagataatttcttacctcacatagatgagaaaactaacacccagaaaggagaaatgatgttataaaaaactcataaggcaagagctgagaaggaagcgctgatcttctatttaattccccacccatgacccccagaaagcaggagggcattgcccacattcacagggctcttcagtctcagaatcaggacactggccaggtgtctggtttgggtccagagtgctcatcatcatgtcatagaactgctgggcccaggtctcctgaaatgggaagcccagcaataccacgcagtccctccactttctcaaagcacactggaaaggccattagaattgccccagcagagcagatctgctttttttccagagcaaaatgaagcactaggtataaatatgttgttactgccaagaacttaaatgactggtttttgtttgcttgcagtgctttcttaattttatggctcttctgggaaactcctccccttttccacacgaaccttgtggggctgtgaattctttcttcatccccgcattcccaatatacccaggccacaagagtggacgtgaaccacagggtgtcctgtcagaggagcccatctcccatctccccagctccctatctggaggatagttggatagttacgtgttcctagcaggaccaactacagtcttcccaaggattgagttatggactttgggagtgagacatcttcttgctgctggatttccaagctgagaggacgtgaacctgggaccaccagtagccatcttgtttgccacatggagagagactgtgaggacagaagccaaactggaagtggaggagccaagggattgacaaacaacagagccttgaccacgtggagtctctgaatcagccttgtctggaaccagatctacacctggactgcccaggtctataagccaataaagcccctgtttacttgtgatgagtgagtccaagctgttttctgatagttgctttagaagttgtgactaacttctctaatgacctttgaaatcaagtccctgtaagtttacacttcccattacacaacatatccatggcactttaacctgtccaagagtcccctgaagggattccctctgacaagcacagtccctcttttgagatagctggccattcatgtagggccagttgtgggggttttagtac

SEQ ID NO: 731328 - DNA, 1609 bp, Homo sapiens
  misc_feature (1556)..(1556): n is a, c, g, or t
  misc_feature (1573)..(1573): n is a, c, g, or t
  misc_feature (1578)..(1578): n is a, c, g, or t
  misc_feature (1582)..(1582): n is a, c, g, or t
  misc_feature (1593)..(1593): n is a, c, g, or t
ggaaggcaagagatctaggacttctagcccctgaactttcagccgaatacatcttttccaaaggagtgaattcaggcccttgtatcactggcagcaggacgtgaccatggagaagctgttgtgtttcttggtcttgaccagcctctctcatgcttttggccagacagacatgtcgaggaaggcttttgtgtttcccaaagagtcggatacttcctatgtatccctcaaagcaccgttaacgaagcctctcaaagccttcactgtgtgcctccacttctacacggaactgtcctcgacccgtgggtacagtattttctcgtatgccaccaagagacaagacaatgagattctcatattttggtctaaggatataggatacagttttacagtgggtgggtctgaaatattattcgaggttcctgaagtcacagtagctccagtacacatttgtacaagctgggagtccgcctcagggatcgtggagttctgggtagatgggaagcccagggtgaggaagagctcgttaactatgctgggaaacggtccaaaagaatcagaatttgaggtgttttgttttcatttttatttcaagttggacagatcttggagataatttcttacctcacatagatgagaaaactaacacccagaaaggagaaatgatgttataaaaaactcataaggcaagagctgagaaggaagcgctgatcttctatttaattccccacccatgacccccagaaagcaggagggcattgcccacattcacagggctcttcagtctcagaatcaggacactggccaggtgtctggtttgggtccagagtgctcatcatcatgtcatagaactgctgggcccaggtctcctgaaatgggaagcccagcaataccacgcagtccctccactttctcaaagcacactggaaaggccattagaattgccccagcagagcagatctgctttttttccagagcaaaatgaagcactaggtataaatatgttgttactgccaagaacttaaatgactggtttttgtttgcttgcagtgctttcttaattttatggctcttctgggaaactcctccccttttccacacgaaccttgtggggctgtgaattctttcttcatccccgcattcccaatatacccaggccacaagagtggacgtgaaccacagggtgtcctgtcagaggagcccatctcccatctccccagctccctatctggaggatagttggatagttacgtgttcctagcaggaccaactacagtcttcccaaggattgagttatggactttgggagtgagacatcttcttgctgctggatttccaagctgagaggacgtgaacctgggaccaccagtagccatcttgtttgccacatggagagagactgtgaggacagaagccaaactggaagtggaggagccaagggattgacaaacaacagagccttgaccacgtggagtctctgaatcagccttgtctggaaccagatctacacctggactgcccaggtctataagccaataaagcccctgtttacttgcaanaaaaaaaaaaaaaaaantttgngggngctgggcccgnaaagttttaaaaccat

SEQ ID NO: 731329 - DNA, 1725 bp, Homo sapiens
ggaaggcaagagatctaggacttctagcccctgaactttcagccgaatacatcttttccaaaggagtgaattcaggcccttgtatcactggcagcaggacgtgaccatggagaagctgttgtgtttcttggtcttgaccagcctctctcatgcttttggccagacagacatgtcgaggaaggcttttgtgtttcccaaagagtcggatacttcctatgtatccctcaaagcaccgttaacgaagcctctcaaagccttcactgtgtgcctccacttctacacggaactgtcctcgacccgtgggtacagtattttctcgtatgccaccaagagacaagacaatgagattctcatattttggtctaaggatataggatacagttttacagtgggtgggtctgaaatattattcgaggttcctgaagtcacagtagctccagtacacatttgtacaagctgggagtccgcctcagggatcgtggagttctgggtagatgggaagcccagggtgaggaagagctcgttaactatgctgggaaacggtccaaaagaatcagaatttgaggtgttttgttttcatttttatttcaagttggacagatcttggagataatttcttacctcacatagatgagaaaactaacacccagaaaggagaaatgatgttataaaaaactcataaggcaagagctgagaaggaagcgctgatcttctatttaattccccacccatgacccccagaaagcaggagggcattgcccacattcacagggctcttcagtctcagaatcaggacactggccaggtgtctggtttgggtccagagtgctcatcatcatgtcatagaactgctgggcccaggtctcctgaaatgggaagcccagcaataccacgcagtccctccactttctcaaagcacactggaaaggccattagaattgccccagcagagcagatctgctttttttcctggtttttgtttgcttgcagtgctttcttaattttatggctcttctgggaaactcctccccttttccacacgaaccttgtggggctgtgaattctttcttcatccccgcattcccaatatacccaggccacaagagtggacgtgaaccacagggtgtcctgtcagaggagcccatctcccatctccccagctccctatctggaggatagttggatagttacgtgttcctagcaggaccaactacagtcttcccaaggattgagttatggactttgggagtgagacatcttcttgctgctggatttccaagctgagaggacgtgaacctgggaccaccagtagccatcttgtttgccacatggagagagactgtgaggacagaagccaaactggaagtggaggagccaagggattgacaaacaacagagccttgaccacgtggagtctctgaatcagccttgtctggaaccagatctacacctggactgcccaggtctataagccaataaagcccctgtttacttgtgatgagtgagtccaagctgttttctgatagttgctttagaagttgtgactaacttctctaatgacctttgaaatcaagtccctgtaagtttacacttcccattacacaacatatccatggcactttaacctgtccaagagtcccctgaagggattccctctgacaagcacagtccctcttttgagatagctggccattcatgtagggccagttgtgggggttttagtac

SEQ ID NO: 731330 - DNA, 1137 bp, Homo sapiens
ggaaggcaagagatctaggacttctagcccctgaactttcagccgaatacatcttttccaaaggagtgaattcaggcccttgtatcactggcagcaggacgtgaccatggagaagctgttgtgtttcttggtcttgaccagcctctctcatgcttttggccagacagacatgtcgaggaaggcttttgtgtttcccaaagagtcggatacttcctatgtatccctcaaagcaccgttaagtgttcaccaaaccccagctgtggccctgaggcccagctgtgggtcctgaaggtacctcccggttttttacaccgcatgggccccacgtctctgtctctggtacctcccgcttttttacactgcatggttcccacgtctctgtctctgggcctttgttcccctatatgcattgcaggcctgctccaccctcctcagcgcctgagaatggaggtaaagtgtctggtctgggagctcgttaactatgctgggaaacggtccaaaagaatcagaatttgaggtgttttgttttcatttttatttcaagttggacagatcttggagataatttcttacctcacatagatgagaaaactaacacccagaaaggagaaatgatgttataaaaaactcataaggcaagagctgagaaggaagcgctgatcttctatttaattccccacccatgacccccagaaagcaggagggcattgcccacattcacagggctcttcagtctcagaatcaggacactggccaggtgtctggtttgggtccagagtgctcatcatcatgtcatagaactgctgggcccaggtctcctgaaatgggaagcccagcaataccacgcagtccctccactttctcaaagcacactggaaaggccattagaattgccccagcagagcagatctgctttttttccagagcaaaatgaagcactaggtataaatatgttgttactgccaagaacttaaatgactggtttttgtttgcttgcagtgctttcttaattttatggctcttctgggaaactcctccccttttccacacgaaccttgtggggctgtgaattctttcttcatccccgcattcccaatatacccaggccacaagagtggacgtgaaccacagggtgtc

SEQ ID NO: 731331 - DNA, 1734 bp, Homo sapiens
ggaaggcaagagatctaggacttctagcccctgaactttcagccgaatacatcttttccaaaggagtgaattcaggcccttgtatcactggcagcaggacgtgaccatggagaagctgttgtgtttcttggtcttgaccagcctctctcatgcttttggccagacagacatgtcgaggaaggcttttgtgtttcccaaagagtcggatacttcctatgtatccctcaaagcaccgttaagtgttcaccaaaccccagctgtggccctgaggcccagctgtgggtcctgaaggtacctcccggttttttacaccgcatgggccccacgtctctgtctctggtacctcccgcttttttacactgcatggttcccacgtctctgtctctgggcctttgttcccctatatgcattgcaggcctgctccaccctcctcagcgcctgagaatggaggtaaagtgtctggtctgggagctcgttaactatgctgggaaacggtccaaaagaatcagaatttgaggtgttttgttttcatttttatttcaagttggacagatcttggagataatttcttacctcacatagatgagaaaactaacacccagaaaggagaaatgatgttataaaaaactcataaggcaagagctgagaaggaagcgctgatcttctatttaattccccacccatgacccccagaaagcaggagggcattgcccacattcacagggctcttcagtctcagaatcaggacactggccaggtgtctggtttgggtccagagtgctcatcatcatgtcatagaactgctgggcccaggtctcctgaaatgggaagcccagcaataccacgcagtccctccactttctcaaagcacactggaaaggccattagaattgccccagcagagcagatctgctttttttccagagcaaaatgaagcactaggtataaatatgttgttactgccaagaacttaaatgactggtttttgtttgcttgcagtgctttcttaattttatggctcttctgggaaactcctccccttttccacacgaaccttgtggggctgtgaattctttcttcatccccgcattcccaatatacccaggccacaagagtggacgtgaaccacagggtgtcctgtcagaggagcccatctcccatctccccagctccctatctggaggatagttggatagttacgtgttcctagcaggaccaactacagtcttcccaaggattgagttatggactttgggagtgagacatcttcttgctgctggatttccaagctgagaggacgtgaacctgggaccaccagtagccatcttgtttgccacatggagagagactgtgaggacagaagccaaactggaagtggaggagccaagggattgacaaacaacagagccttgaccacgtggagtctctgaatcagccttgtctggaaccagatctacacctggactgcccaggtctataagccaataaagcccctgtttacttgtgatgagtgagtccaagctgttttctgatagttgctttagaagttgtgactaacttctctaatgacctttgaaatcaagtccctgtaagtttacacttcccattacacaacatatccatggcactttaacctgtccaagagtcccctgaagggattccctctgacaagcacagtccctcttttgagatagctggccattcatgtagggccagttgtgggggttttagtac

SEQ ID NO: 731332 - DNA, 1561 bp, Homo sapiens
  misc_feature (1508)..(1508): n is a, c, g, or t
  misc_feature (1525)..(1525): n is a, c, g, or t
  misc_feature (1530)..(1530): n is a, c, g, or t
  misc_feature (1534)..(1534): n is a, c, g, or t
  misc_feature (1545)..(1545): n is a, c, g, or t
ggaaggcaagagatctaggacttctagcccctgaactttcagccgaatacatcttttccaaaggagtgaattcaggcccttgtatcactggcagcaggacgtgaccatggagaagctgttgtgtttcttggtcttgaccagcctctctcatgcttttggccagacagacatgtcgaggaaggcttttgtgtttcccaaagagtcggatacttcctatgtatccctcaaagcaccgttaagtgttcaccaaaccccagctgtggccctgaggcccagctgtgggtcctgaaggtacctcccggttttttacaccgcatgggccccacgtctctgtctctggtacctcccgcttttttacactgcatggttcccacgtctctgtctctgggcctttgttcccctatatgcattgcaggcctgctccaccctcctcagcgcctgagaatggaggtaaagtgtctggtctgggagctcgttaactatgctgggaaacggtccaaaagaatcagaatttgaggtgttttgttttcatttttatttcaagttggacagatcttggagataatttcttacctcacatagatgagaaaactaacacccagaaaggagaaatgatgttataaaaaactcataaggcaagagctgagaaggaagcgctgatcttctatttaattccccacccatgacccccagaaagcaggagggcattgcccacattcacagggctcttcagtctcagaatcaggacactggccaggtgtctggtttgggtccagagtgctcatcatcatgtcatagaactgctgggcccaggtctcctgaaatgggaagcccagcaataccacgcagtccctccactttctcaaagcacactggaaaggccattagaattgccccagcagagcagatctgctttttttccagagcaaaatgaagcactaggtataaatatgttgttactgccaagaacttaaatgactggtttttgtttgcttgcagtgctttcttaattttatggctcttctgggaaactcctccccttttccacacgaaccttgtggggctgtgaattctttcttcatccccgcattcccaatatacccaggccacaagagtggacgtgaaccacagggtgtcctgtcagaggagcccatctcccatctccccagctccctatctggaggatagttggatagttacgtgttcctagcaggaccaactacagtcttcccaaggattgagttatggactttgggagtgagacatcttcttgctgctggatttccaagctgagaggacgtgaacctgggaccaccagtagccatcttgtttgccacatggagagagactgtgaggacagaagccaaactggaagtggaggagccaagggattgacaaacaacagagccttgaccacgtggagtctctgaatcagccttgtctggaaccagatctacacctggactgcccaggtctataagccaataaagcccctgtttacttgcaanaaaaaaaaaaaaaaaantttgngggngctgggcccgnaaagttttaaaaccat

SEQ ID NO: 731333 - DNA, 1677 bp, Homo sapiens
ggaaggcaagagatctaggacttctagcccctgaactttcagccgaatacatcttttccaaaggagtgaattcaggcccttgtatcactggcagcaggacgtgaccatggagaagctgttgtgtttcttggtcttgaccagcctctctcatgcttttggccagacagacatgtcgaggaaggcttttgtgtttcccaaagagtcggatacttcctatgtatccctcaaagcaccgttaagtgttcaccaaaccccagctgtggccctgaggcccagctgtgggtcctgaaggtacctcccggttttttacaccgcatgggccccacgtctctgtctctggtacctcccgcttttttacactgcatggttcccacgtctctgtctctgggcctttgttcccctatatgcattgcaggcctgctccaccctcctcagcgcctgagaatggaggtaaagtgtctggtctgggagctcgttaactatgctgggaaacggtccaaaagaatcagaatttgaggtgttttgttttcatttttatttcaagttggacagatcttggagataatttcttacctcacatagatgagaaaactaacacccagaaaggagaaatgatgttataaaaaactcataaggcaagagctgagaaggaagcgctgatcttctatttaattccccacccatgacccccagaaagcaggagggcattgcccacattcacagggctcttcagtctcagaatcaggacactggccaggtgtctggtttgggtccagagtgctcatcatcatgtcatagaactgctgggcccaggtctcctgaaatgggaagcccagcaataccacgcagtccctccactttctcaaagcacactggaaaggccattagaattgccccagcagagcagatctgctttttttcctggtttttgtttgcttgcagtgctttcttaattttatggctcttctgggaaactcctccccttttccacacgaaccttgtggggctgtgaattctttcttcatccccgcattcccaatatacccaggccacaagagtggacgtgaaccacagggtgtcctgtcagaggagcccatctcccatctccccagctccctatctggaggatagttggatagttacgtgttcctagcaggaccaactacagtcttcccaaggattgagttatggactttgggagtgagacatcttcttgctgctggatttccaagctgagaggacgtgaacctgggaccaccagtagccatcttgtttgccacatggagagagactgtgaggacagaagccaaactggaagtggaggagccaagggattgacaaacaacagagccttgaccacgtggagtctctgaatcagccttgtctggaaccagatctacacctggactgcccaggtctataagccaataaagcccctgtttacttgtgatgagtgagtccaagctgttttctgatagttgctttagaagttgtgactaacttctctaatgacctttgaaatcaagtccctgtaagtttacacttcccattacacaacatatccatggcactttaacctgtccaagagtcccctgaagggattccctctgacaagcacagtccctcttttgagatagctggccattcatgtagggccagttgtgggggttttagtac

SEQ ID NO: 731334 - DNA, 1999 bp, Homo sapiens
ggaaggcaagagatctaggacttctagcccctgaactttcagccgaatacatcttttccaaaggagtgaattcaggcccttgtatcactggcagcaggacgtgaccatggagaagctgttgtgtttcttggtcttgaccagcctctctcatgcttttggccagacagacatgtcgaggaaggcttttgtgtttcccaaagagtcggatacttcctatgtatccctcaaagcaccgttaacgaagcctctcaaagccttcactgtgtgcctccacttctacacggaactgtcctcgacccgtgggtacagtattttctcgtatgccaccaagagacaagacaatgagattctcatattttggtctaaggatataggatacagttttacagtgggtgggtctgaaatattattcgaggttcctgaagtcacagtagctccagtacacatttgtacaagctgggagtccgcctcagggatcgtggagttctgggtagatgggaagcccagggtgaggaagagtctgaagaagggatacactgtgggggcagaagcaagcatcatcttggggcaggagcaggattccttcggtgggaactttgaaggaagcctgaaggtacctcccggttttttacaccgcatgggccccacgtctctgtctctggtacctcccgcttttttacactgcatggttcccacgtctctgtctctgggcctttgttcccctatatgcattgcaggcctgctccaccctcctcagcgcctgagaatggaggtaaagtgtctggtctgggagctcgttaactatgctgggaaacggtccaaaagaatcagaatttgaggtgttttgttttcatttttatttcaagttggacagatcttggagataatttcttacctcacatagatgagaaaactaacacccagaaaggagaaatgatgttataaaaaactcataaggcaagagctgagaaggaagcgctgatcttctatttaattccccacccatgacccccagaaagcaggagggcattgcccacattcacagggctcttcagtctcagaatcaggacactggccaggtgtctggtttgggtccagagtgctcatcatcatgtcatagaactgctgggcccaggtctcctgaaatgggaagcccagcaataccacgcagtccctccactttctcaaagcacactggaaaggccattagaattgccccagcagagcagatctgctttttttcctggtttttgtttgcttgcagtgctttcttaattttatggctcttctgggaaactcctccccttttccacacgaaccttgtggggctgtgaattctttcttcatccccgcattcccaatatacccaggccacaagagtggacgtgaaccacagggtgtcctgtcagaggagcccatctcccatctccccagctccctatctggaggatagttggatagttacgtgttcctagcaggaccaactacagtcttcccaaggattgagttatggactttgggagtgagacatcttcttgctgctggatttccaagctgagaggacgtgaacctgggaccaccagtagccatcttgtttgccacatggagagagactgtgaggacagaagccaaactggaagtggaggagccaagggattgacaaacaacagagccttgaccacgtggagtctctgaatcagccttgtctggaaccagatctacacctggactgcccaggtctataagccaataaagcccctgtttacttgtgatgagtgagtccaagctgttttctgatagttgctttagaagttgtgactaacttctctaatgacctttgaaatcaagtccctgtaagtttacacttcccattacacaacatatccatggcactttaacctgtccaagagtcccctgaagggattccctctgacaagcacagtccctcttttgagatagctggccattcatgtagggccagttgtgggggttttagtac

SEQ ID NO: 731335 - DNA, 2189 bp, Homo sapiens; identical to SEQ ID NO: 450659

SEQ ID NO: 731336 - DNA, 1163 bp, Homo sapiens; identical to SEQ ID NO: 450671

SEQ ID NO: 731337 - DNA, 968 bp, Homo sapiens; identical to SEQ ID NO: 450676

SEQ ID NO: 731338 - DNA, 1113 bp, Homo sapiens; identical to SEQ ID NO: 450687

SEQ ID NO: 731339 - DNA, 1598 bp, Homo sapiens
ggaaggcaagagatctaggacttctagcccctgaactttcagccgaatacatcttttccaaaggagtgaattcaggcccttgtatcactggcagcaggacgtgaccatggagaagctgttgtgtttcttggtcttgaccagcctctctcatgcttttggccagacagacatgtcgaggaaggcttttgtgtttcccaaagagtcggatacttcctatgtatccctcaaagcaccgttaacgaagcctctcaaagccttcactgtgtgcctccacttctacacggaactgtcctcgacccgtgggtacagtattttctcgtatgccaccaagagacaagacaatgagattctcatattttggtctaaggatataggatacagttttacagtgggtgggtctgaaatattattcgaggttcctgaagtcacagtagctccagtacacatttgtacaagctgggagtccgcctcagggatcgtggagttctgggtagatgggaagcccagggtgaggaagagtctgaagaagggatacactgtgggggcagaagcaagccagtccctggtgggagacattggaaatgtgaacatgtgggactttgtgctgtcaccagatgagattaacaccatctatcttggcgggcccttcagtcctaatgtcctgaactggcgggcactgaagtatgaagtgcaaggcgaagtgttcaccaaaccccagctgtggccctgaggcccagctgtgggtcctgaaggtacctcccggttttttacaccgcatgggccccacgtctctgtctctggtacctcccgcttttttacactgcatggttcccacgtctctgtctctgggcctttgttcccctatatgcattgcaggcctgctccaccctcctcagcgcctgagaatggaggtaaagtgtctggtctgggagctcgttaactatgctgggaaacggtccaaaagaatcagaatttgaggtgttttgttttcatttttatttcaagttggacagatcttggagataatttcttacctcacatagatgagaaaactaacacccagaaaggagaaatgatgttataaaaaactcataaggcaagagctgagaaggaagcgctgatcttctatttaattccccacccatgacccccagaaagcaggagggcattgcccacattcacagggctcttcagtctcagaatcaggacactggccaggtgtctggtttgggtccagagtgctcatcatcatgtcatagaactgctgggcccaggtctcctgaaatgggaagcccagcaataccacgcagtccctccactttctcaaagcacactggaaaggccattagaattgccccagcagagcagatctgctttttttccagagcaaaatgaagcactaggtataaatatgttgttactgccaagaacttaaatgactggtttttgtttgcttgcagtgctttcttaattttatggctcttctgggaaactcctccccttttccacacgaaccttgtggggctgtgaattctttcttcatccccgcattcccaatatacccaggccacaagagtggacgtgaaccacagggtgtc

SEQ ID NO: 731340 - DNA, 2195 bp, Homo sapiens
ggaaggcaagagatctaggacttctagcccctgaactttcagccgaatacatcttttccaaaggagtgaattcaggcccttgtatcactggcagcaggacgtgaccatggagaagctgttgtgtttcttggtcttgaccagcctctctcatgcttttggccagacagacatgtcgaggaaggcttttgtgtttcccaaagagtcggatacttcctatgtatccctcaaagcaccgttaacgaagcctctcaaagccttcactgtgtgcctccacttctacacggaactgtcctcgacccgtgggtacagtattttctcgtatgccaccaagagacaagacaatgagattctcatattttggtctaaggatataggatacagttttacagtgggtgggtctgaaatattattcgaggttcctgaagtcacagtagctccagtacacatttgtacaagctgggagtccgcctcagggatcgtggagttctgggtagatgggaagcccagggtgaggaagagtctgaagaagggatacactgtgggggcagaagcaagccagtccctggtgggagacattggaaatgtgaacatgtgggactttgtgctgtcaccagatgagattaacaccatctatcttggcgggcccttcagtcctaatgtcctgaactggcgggcactgaagtatgaagtgcaaggcgaagtgttcaccaaaccccagctgtggccctgaggcccagctgtgggtcctgaaggtacctcccggttttttacaccgcatgggccccacgtctctgtctctggtacctcccgcttttttacactgcatggttcccacgtctctgtctctgggcctttgttcccctatatgcattgcaggcctgctccaccctcctcagcgcctgagaatggaggtaaagtgtctggtctgggagctcgttaactatgctgggaaacggtccaaaagaatcagaatttgaggtgttttgttttcatttttatttcaagttggacagatcttggagataatttcttacctcacatagatgagaaaactaacacccagaaaggagaaatgatgttataaaaaactcataaggcaagagctgagaaggaagcgctgatcttctatttaattccccacccatgacccccagaaagcaggagggcattgcccacattcacagggctcttcagtctcagaatcaggacactggccaggtgtctggtttgggtccagagtgctcatcatcatgtcatagaactgctgggcccaggtctcctgaaatgggaagcccagcaataccacgcagtccctccactttctcaaagcacactggaaaggccattagaattgccccagcagagcagatctgctttttttccagagcaaaatgaagcactaggtataaatatgttgttactgccaagaacttaaatgactggtttttgtttgcttgcagtgctttcttaattttatggctcttctgggaaactcctccccttttccacacgaaccttgtggggctgtgaattctttcttcatccccgcattcccaatatacccaggccacaagagtggacgtgaaccacagggtgtcctgtcagaggagcccatctcccatctccccagctccctatctggaggatagttggatagttacgtgttcctagcaggaccaactacagtcttcccaaggattgagttatggactttgggagtgagacatcttcttgctgctggatttccaagctgagaggacgtgaacctgggaccaccagtagccatcttgtttgccacatggagagagactgtgaggacagaagccaaactggaagtggaggagccaagggattgacaaacaacagagccttgaccacgtggagtctctgaatcagccttgtctggaaccagatctacacctggactgcccaggtctataagccaataaagcccctgtttacttgtgatgagtgagtccaagctgttttctgatagttgctttagaagttgtgactaacttctctaatgacctttgaaatcaagtccctgtaagtttacacttcccattacacaacatatccatggcactttaacctgtccaagagtcccctgaagggattccctctgacaagcacagtccctcttttgagatagctggccattcatgtagggccagttgtgggggttttagtac

SEQ ID NO: 731341 - DNA, 2022 bp, Homo sapiens
  misc_feature (1969)..(1969): n is a, c, g, or t
  misc_feature (1986)..(1986): n is a, c, g, or t
  misc_feature (1991)..(1991): n is a, c, g, or t
  misc_feature (1995)..(1995): n is a, c, g, or t
  misc_feature (2006)..(2006): n is a, c, g, or t
ggaaggcaagagatctaggacttctagcccctgaactttcagccgaatacatcttttccaaaggagtgaattcaggcccttgtatcactggcagcaggacgtgaccatggagaagctgttgtgtttcttggtcttgaccagcctctctcatgcttttggccagacagacatgtcgaggaaggcttttgtgtttcccaaagagtcggatacttcctatgtatccctcaaagcaccgttaacgaagcctctcaaagccttcactgtgtgcctccacttctacacggaactgtcctcgacccgtgggtacagtattttctcgtatgccaccaagagacaagacaatgagattctcatattttggtctaaggatataggatacagttttacagtgggtgggtctgaaatattattcgaggttcctgaagtcacagtagctccagtacacatttgtacaagctgggagtccgcctcagggatcgtggagttctgggtagatgggaagcccagggtgaggaagagtctgaagaagggatacactgtgggggcagaagcaagccagtccctggtgggagacattggaaatgtgaacatgtgggactttgtgctgtcaccagatgagattaacaccatctatcttggcgggcccttcagtcctaatgtcctgaactggcgggcactgaagtatgaagtgcaaggcgaagtgttcaccaaaccccagctgtggccctgaggcccagctgtgggtcctgaaggtacctcccggttttttacaccgcatgggccccacgtctctgtctctggtacctcccgcttttttacactgcatggttcccacgtctctgtctctgggcctttgttcccctatatgcattgcaggcctgctccaccctcctcagcgcctgagaatggaggtaaagtgtctggtctgggagctcgttaactatgctgggaaacggtccaaaagaatcagaatttgaggtgttttgttttcatttttatttcaagttggacagatcttggagataatttcttacctcacatagatgagaaaactaacacccagaaaggagaaatgatgttataaaaaactcataaggcaagagctgagaaggaagcgctgatcttctatttaattccccacccatgacccccagaaagcaggagggcattgcccacattcacagggctcttcagtctcagaatcaggacactggccaggtgtctggtttgggtccagagtgctcatcatcatgtcatagaactgctgggcccaggtctcctgaaatgggaagcccagcaataccacgcagtccctccactttctcaaagcacactggaaaggccattagaattgccccagcagagcagatctgctttttttccagagcaaaatgaagcactaggtataaatatgttgttactgccaagaacttaaatgactggtttttgtttgcttgcagtgctttcttaattttatggctcttctgggaaactcctccccttttccacacgaaccttgtggggctgtgaattctttcttcatccccgcattcccaatatacccaggccacaagagtggacgtgaaccacagggtgtcctgtcagaggagcccatctcccatctccccagctccctatctggaggatagttggatagttacgtgttcctagcaggaccaactacagtcttcccaaggattgagttatggactttgggagtgagacatcttcttgctgctggatttccaagctgagaggacgtgaacctgggaccaccagtagccatcttgtttgccacatggagagagactgtgaggacagaagccaaactggaagtggaggagccaagggattgacaaacaacagagccttgaccacgtggagtctctgaatcagccttgtctggaaccagatctacacctggactgcccaggtctataagccaataaagcccctgtttacttgcaanaaaaaaaaaaaaaaaantttgngggngctgggcccgnaaagttttaaaaccat

SEQ ID NO: 731342 - DNA, 2138 bp, Homo sapiens
ggaaggcaagagatctaggacttctagcccctgaactttcagccgaatacatcttttccaaaggagtgaattcaggcccttgtatcactggcagcaggacgtgaccatggagaagctgttgtgtttcttggtcttgaccagcctctctcatgcttttggccagacagacatgtcgaggaaggcttttgtgtttcccaaagagtcggatacttcctatgtatccctcaaagcaccgttaacgaagcctctcaaagccttcactgtgtgcctccacttctacacggaactgtcctcgacccgtgggtacagtattttctcgtatgccaccaagagacaagacaatgagattctcatattttggtctaaggatataggatacagttttacagtgggtgggtctgaaatattattcgaggttcctgaagtcacagtagctccagtacacatttgtacaagctgggagtccgcctcagggatcgtggagttctgggtagatgggaagcccagggtgaggaagagtctgaagaagggatacactgtgggggcagaagcaagccagtccctggtgggagacattggaaatgtgaacatgtgggactttgtgctgtcaccagatgagattaacaccatctatcttggcgggcccttcagtcctaatgtcctgaactggcgggcactgaagtatgaagtgcaaggcgaagtgttcaccaaaccccagctgtggccctgaggcccagctgtgggtcctgaaggtacctcccggttttttacaccgcatgggccccacgtctctgtctctggtacctcccgcttttttacactgcatggttcccacgtctctgtctctgggcctttgttcccctatatgcattgcaggcctgctccaccctcctcagcgcctgagaatggaggtaaagtgtctggtctgggagctcgttaactatgctgggaaacggtccaaaagaatcagaatttgaggtgttttgttttcatttttatttcaagttggacagatcttggagataatttcttacctcacatagatgagaaaactaacacccagaaaggagaaatgatgttataaaaaactcataaggcaagagctgagaaggaagcgctgatcttctatttaattccccacccatgacccccagaaagcaggagggcattgcccacattcacagggctcttcagtctcagaatcaggacactggccaggtgtctggtttgggtccagagtgctcatcatcatgtcatagaactgctgggcccaggtctcctgaaatgggaagcccagcaataccacgcagtccctccactttctcaaagcacactggaaaggccattagaattgccccagcagagcagatctgctttttttcctggtttttgtttgcttgcagtgctttcttaattttatggctcttctgggaaactcctccccttttccacacgaaccttgtggggctgtgaattctttcttcatccccgcattcccaatatacccaggccacaagagtggacgtgaaccacagggtgtcctgtcagaggagcccatctcccatctccccagctccctatctggaggatagttggatagttacgtgttcctagcaggaccaactacagtcttcccaaggattgagttatggactttgggagtgagacatcttcttgctgctggatttccaagctgagaggacgtgaacctgggaccaccagtagccatcttgtttgccacatggagagagactgtgaggacagaagccaaactggaagtggaggagccaagggattgacaaacaacagagccttgaccacgtggagtctctgaatcagccttgtctggaaccagatctacacctggactgcccaggtctataagccaataaagcccctgtttacttgtgatgagtgagtccaagctgttttctgatagttgctttagaagttgtgactaacttctctaatgacctttgaaatcaagtccctgtaagtttacacttcccattacacaacatatccatggcactttaacctgtccaagagtcccctgaagggattccctctgacaagcacagtccctcttttgagatagctggccattcatgtagggccagttgtgggggttttagtac

SEQ ID NO: 731343 - DNA, 2141 bp, Homo sapiens
ggaaggcaagagatctaggacttctagcccctgaactttcagccgaatacatcttttccaaaggagtgaattcaggcccttgtatcactggcagcaggacgtgaccatggagaagctgttgtgtttcttggtcttgaccagcctctctcatgcttttggccagacagacatgtcgaggaaggcttttgtgtttcccaaagagtcggatacttcctatgtatccctcaaagcaccgttaacgaagcctctcaaagccttcactgtgtgcctccacttctacacggaactgtcctcgacccgtgggtacagtattttctcgtatgccaccaagagacaagacaatgagattctcatattttggtctaaggatataggatacagttttacagtgggtgggtctgaaatattattcgaggttcctgaagtcacagtagctccagtacacatttgtacaagctgggagtccgcctcagggatcgtggagttctgggtagatgggaagcccagggtgaggaagagtctgaagaagggatacactgtgggggcagaagcaagccagtccctggtgggagacattggaaatgtgaacatgtgggactttgtgctgtcaccagatgagattaacaccatctatcttggcgggcccttcagtcctaatgtcctgaactggcgggcactgaagtatgaagtgcaaggcgaagtgttcaccaaaccccagctgtggccctgaggcccagctgtgggtcctgaaggtacctcccggttttttacaccgcatgggccccacgtctctgtctctggtacctcccgcttttttacactgcatggttcccacgtctctgtctctgggcctttgttcccctatatgcattgcaggcctgctccaccctcctcagcgcctgagaatggaggtaaagtgtctggtctgggagctcgttaactatgctgggaaacggtccaaaagaatcagaatttgaggtgttttgttttcatttttatttcaagttggacagatcttggagataatttcttacctcacatagatgagaaaactaacacccagaaaggagaaatgatgttataacacccatgacccccagaaagcaggagggcattgcccacattcacagggctcttcagtctcagaatcaggacactggccaggtgtctggtttgggtccagagtgctcatcatcatgtcatagaactgctgggcccaggtctcctgaaatgggaagcccagcaataccacgcagtccctccactttctcaaagcacactggaaaggccattagaattgccccagcagagcagatctgctttttttccagagcaaaatgaagcactaggtataaatatgttgttactgccaagaacttaaatgactggtttttgtttgcttgcagtgctttcttaattttatggctcttctgggaaactcctccccttttccacacgaaccttgtggggctgtgaattctttcttcatccccgcattcccaatatacccaggccacaagagtggacgtgaaccacagggtgtcctgtcagaggagcccatctcccatctccccagctccctatctggaggatagttggatagttacgtgttcctagcaggaccaactacagtcttcccaaggattgagttatggactttgggagtgagacatcttcttgctgctggatttccaagctgagaggacgtgaacctgggaccaccagtagccatcttgtttgccacatggagagagactgtgaggacagaagccaaactggaagtggaggagccaagggattgacaaacaacagagccttgaccacgtggagtctctgaatcagccttgtctggaaccagatctacacctggactgcccaggtctataagccaataaagcccctgtttacttgtgatgagtgagtccaagctgttttctgatagttgctttagaagttgtgactaacttctctaatgacctttgaaatcaagtccctgtaagtttacacttcccattacacaacatatccatggcactttaacctgtccaagagtcccctgaagggattccctctgacaagcacagtccctcttttgagatagctggccattcatgtagggccagttgtgggggttttagtac

SEQ ID NO: 731344 - DNA, 1968 bp, Homo sapiens
  misc_feature (1915)..(1915): n is a, c, g, or t
  misc_feature (1932)..(1932): n is a, c, g, or t
  misc_feature (1937)..(1937): n is a, c, g, or t
  misc_feature (1941)..(1941): n is a, c, g, or t
  misc_feature (1952)..(1952): n is a, c, g, or t
ggaaggcaagagatctaggacttctagcccctgaactttcagccgaatacatcttttccaaaggagtgaattcaggcccttgtatcactggcagcaggacgtgaccatggagaagctgttgtgtttcttggtcttgaccagcctctctcatgcttttggccagacagacatgtcgaggaaggcttttgtgtttcccaaagagtcggatacttcctatgtatccctcaaagcaccgttaacgaagcctctcaaagccttcactgtgtgcctccacttctacacggaactgtcctcgacccgtgggtacagtattttctcgtatgccaccaagagacaagacaatgagattctcatattttggtctaaggatataggatacagttttacagtgggtgggtctgaaatattattcgaggttcctgaagtcacagtagctccagtacacatttgtacaagctgggagtccgcctcagggatcgtggagttctgggtagatgggaagcccagggtgaggaagagtctgaagaagggatacactgtgggggcagaagcaagccagtccctggtgggagacattggaaatgtgaacatgtgggactttgtgctgtcaccagatgagattaacaccatctatcttggcgggcccttcagtcctaatgtcctgaactggcgggcactgaagtatgaagtgcaaggcgaagtgttcaccaaaccccagctgtggccctgaggcccagctgtgggtcctgaaggtacctcccggttttttacaccgcatgggccccacgtctctgtctctggtacctcccgcttttttacactgcatggttcccacgtctctgtctctgggcctttgttcccctatatgcattgcaggcctgctccaccctcctcagcgcctgagaatggaggtaaagtgtctggtctgggagctcgttaactatgctgggaaacggtccaaaagaatcagaatttgaggtgttttgttttcatttttatttcaagttggacagatcttggagataatttcttacctcacatagatgagaaaactaacacccagaaaggagaaatgatgttataacacccatgacccccagaaagcaggagggcattgcccacattcacagggctcttcagtctcagaatcaggacactggccaggtgtctggtttgggtccagagtgctcatcatcatgtcatagaactgctgggcccaggtctcctgaaatgggaagcccagcaataccacgcagtccctccactttctcaaagcacactggaaaggccattagaattgccccagcagagcagatctgctttttttccagagcaaaatgaagcactaggtataaatatgttgttactgccaagaacttaaatgactggtttttgtttgcttgcagtgctttcttaattttatggctcttctgggaaactcctccccttttccacacgaaccttgtggggctgtgaattctttcttcatccccgcattcccaatatacccaggccacaagagtggacgtgaaccacagggtgtcctgtcagaggagcccatctcccatctccccagctccctatctggaggatagttggatagttacgtgttcctagcaggaccaactacagtcttcccaaggattgagttatggactttgggagtgagacatcttcttgctgctggatttccaagctgagaggacgtgaacctgggaccaccagtagccatcttgtttgccacatggagagagactgtgaggacagaagccaaactggaagtggaggagccaagggattgacaaacaacagagccttgaccacgtggagtctctgaatcagccttgtctggaaccagatctacacctggactgcccaggtctataagccaataaagcccctgtttacttgcaanaaaaaaaaaaaaaaaantttgngggngctgggcccgnaaagttttaaaaccat

SEQ ID NO: 731345 - DNA, 1784 bp, Homo sapiens
ggaaggcaagagatctaggacttctagcccctgaactttcagccgaatacatcttttccaaaggagtgaattcaggcccttgtatcactggcagcaggacgtgaccatggagaagctgttgtgtttcttggtcttgaccagcctctctcatgcttttggccagacagacatgtcgaggaaggcttttgtgtttcccaaagagtcggatacttcctatgtatccctcaaagcaccgttaacgaagcctctcaaagccttcactgtgtgcctccacttctacacggaactgtcctcgacccgtgggtacagtattttctcgtatgccaccaagagacaagacaatgagattctcatattttggtctaaggatataggatacagttttacagtgggtgggtctgaaatattattcgaggttcctgaagtcacagtagctccagtacacatttgtacaagctgggagtccgcctcagggatcgtggagttctgggtagatgggaagcccagggtgaggaagagtctgaagaagggatacactgtgggggcagaagcaagccagtccctggtgggagacattggaaatgtgaacatgtgggactttgtgctgtcaccagatgagattaacaccatctatcttggcgggcccttcagtcctaatgtcctgaactggcgggcactgaagtatgaagtgcaaggcgaagtgttcaccaaaccccagctgtggccctgaggcccagctgtgggtcctgaaggtacctcccggttttttacaccgcatgggccccacgtctctgtctctggtacctcccgcttttttacactgcatggttcccacgtctctgtctctgggcctttgttcccctatatgcattgcaggcctgctccaccctcctcagcgcctgagaatggaggtaaagtgtctggtctgggagctcgttaactatgctgggaaacggtccaaaagaatcagaatttgaggtgttttgttttcatttttatttcaagttggacagatcttggagataatttcttacctcacatagatgagaaaactaacacccagaaaggagaaatgatgttataactccccttttccacacgaaccttgtggggctgtgaattctttcttcatccccgcattcccaatatacccaggccacaagagtggacgtgaaccacagggtgtcctgtcagaggagcccatctcccatctccccagctccctatctggaggatagttggatagttacgtgttcctagcaggaccaactacagtcttcccaaggattgagttatggactttgggagtgagacatcttcttgctgctggatttccaagctgagaggacgtgaacctgggaccaccagtagccatcttgtttgccacatggagagagactgtgaggacagaagccaaactggaagtggaggagccaagggattgacaaacaacagagccttgaccacgtggagtctctgaatcagccttgtctggaaccagatctacacctggactgcccaggtctataagccaataaagcccctgtttacttgtgatgagtgagtccaagctgttttctgatagttgctttagaagttgtgactaacttctctaatgacctttgaaatcaagtccctgtaagtttacacttcccattacacaacatatccatggcactttaacctgtccaagagtcccctgaagggattccctctgacaagcacagtccctcttttgagatagctggccattcatgtagggccagttgtgggggttttagtac

SEQ ID NO: 731346 - DNA, 1480 bp, Homo sapiens
ggaaggcaagagatctaggacttctagcccctgaactttcagccgaatacatcttttccaaaggagtgaattcaggcccttgtatcactggcagcaggacgtgaccatggagaagctgttgtgtttcttggtcttgaccagcctctctcatgcttttggccagacagacatgtcgaggaaggcttttgtgtttcccaaagagtcggatacttcctatgtatccctcaaagcaccgttaacgaagcctctcaaagccttcactgtgtgcctccacttctacacggaactgtcctcgacccgtgggtacagtattttctcgtatgccaccaagagacaagacaatgagattctcatattttggtctaaggatataggatacagttttacagtgggtgggtctgaaatattattcgaggttcctgaagtcacagtagctccagtacacatttgtacaagctgggagtccgcctcagggatcgtggagttctgggtagatgggaagcccagggtgaggaagagtctgaagaagggatacactgtgggggcagaagcaagccagtccctggtgggagacattggaaatgtgaacatgtgggactttgtgctgtcaccagatgagattaacaccatctatcttggcgggcccttcagtcctaatgtcctgaactggcgggcactgaagtatgaagtgcaaggcgaagtgttcaccaaaccccagctgtggccctgaggcccagctgtgggttgctttcttaattttatggctcttctgggaaactcctccccttttccacacgaaccttgtggggctgtgaattctttcttcatccccgcattcccaatatacccaggccacaagagtggacgtgaaccacagggtgtcctgtcagaggagcccatctcccatctccccagctccctatctggaggatagttggatagttacgtgttcctagcaggaccaactacagtcttcccaaggattgagttatggactttgggagtgagacatcttcttgctgctggatttccaagctgagaggacgtgaacctgggaccaccagtagccatcttgtttgccacatggagagagactgtgaggacagaagccaaactggaagtggaggagccaagggattgacaaacaacagagccttgaccacgtggagtctctgaatcagccttgtctggaaccagatctacacctggactgcccaggtctataagccaataaagcccctgtttacttgtgatgagtgagtccaagctgttttctgatagttgctttagaagttgtgactaacttctctaatgacctttgaaatcaagtccctgtaagtttacacttcccattacacaacatatccatggcactttaacctgtccaagagtcccctgaagggattccctctgacaagcacagtccctcttttgagatagctggccattcatgtagggccagttgtgggggttttagtac

SEQ ID NO: 731347 - DNA, 1604 bp, Homo sapiens
ggaaggcaagagatctaggacttctagcccctgaactttcagccgaatacatcttttccaaaggagtgaattcaggcccttgtatcactggcagcaggacgtgaccatggagaagctgttgtgtttcttggtcttgaccagcctctctcatgcttttggccagacagacatgtcgaggaaggcttttgtgtttcccaaagagtcggatacttcctatgtatccctcaaagcaccgttaacgaagcctctcaaagccttcactgtgtgcctccacttctacacggaactgtcctcgacccgtgggtacagtattttctcgtatgccaccaagagacaagacaatgagattctcatattttggtctaaggatataggatacagttttacagtgggtgggtctgaaatattattcgaggttcctgaagtcacagtagctccagtacacatttgtacaagctgggagtccgcctcagggatcgtggagttctgggtagatgggaagcccagggtgaggaagagtctgaagaagggatacactgtgggggcagaagcaagcatcatcttggggcaggagcaggattccttcggtgggaactttgaaggaagccagtccctggtgggagacattggaaatgtgaacatgtgggactttgtgctgtcaccagatgagattaacaccatctatcttggcgggcccttcagtcctaatgtcctgaactggcgggcactgaagtatgaagtgcaaggcgaacctgaaggtacctcccggttttttacaccgcatgggccccacgtctctgtctctggtacctcccgcttttttacactgcatggttcccacgtctctgtctctgggcctttgttcccctatatgcattgcaggcctgctccaccctcctcagcgcctgagaatggaggtaaagtgtctggtctgggagctcgttaactatgctgggaaacggtccaaaagaatcagaatttgaggtgttttgttttcatttttatttcaagttggacagatcttggagataatttcttacctcacatagatgagaaaactaacacccagaaaggagaaatgatgttataaaaaactcataaggcaagagctgagaaggaagcgctgatcttctatttaattccccacccatgacccccagaaagcaggagggcattgcccacattcacagggctcttcagtctcagaatcaggacactggccaggtgtctggtttgggtccagagtgctcatcatcatgtcatagaactgctgggcccaggtctcctgaaatgggaagcccagcaataccacgcagtccctccactttctcaaagcacactggaaaggccattagaattgccccagcagagcagatctgctttttttccagagcaaaatgaagcactaggtataaatatgttgttactgccaagaacttaaatgactggtttttgtttgcttgcagtgctttcttaattttatggctcttctgggaaactcctccccttttccacacgaaccttgtggggctgtgaattctttcttcatccccgcattcccaatatacccaggccacaagagtggacgtgaaccacagggtgtc

SEQ ID NO: 731348 - DNA, 2201 bp, Homo sapiens
ggaaggcaagagatctaggacttctagcccctgaactttcagccgaatacatcttttccaaaggagtgaattcaggcccttgtatcactggcagcaggacgtgaccatggagaagctgttgtgtttcttggtcttgaccagcctctctcatgcttttggccagacagacatgtcgaggaaggcttttgtgtttcccaaagagtcggatacttcctatgtatccctcaaagcaccgttaacgaagcctctcaaagccttcactgtgtgcctccacttctacacggaactgtcctcgacccgtgggtacagtattttctcgtatgccaccaagagacaagacaatgagattctcatattttggtctaaggatataggatacagttttacagtgggtgggtctgaaatattattcgaggttcctgaagtcacagtagctccagtacacatttgtacaagctgggagtccgcctcagggatcgtggagttctgggtagatgggaagcccagggtgaggaagagtctgaagaagggatacactgtgggggcagaagcaagcatcatcttggggcaggagcaggattccttcggtgggaactttgaaggaagccagtccctggtgggagacattggaaatgtgaacatgtgggactttgtgctgtcaccagatgagattaacaccatctatcttggcgggcccttcagtcctaatgtcctgaactggcgggcactgaagtatgaagtgcaaggcgaacctgaaggtacctcccggttttttacaccgcatgggccccacgtctctgtctctggtacctcccgcttttttacactgcatggttcccacgtctctgtctctgggcctttgttcccctatatgcattgcaggcctgctccaccctcctcagcgcctgagaatggaggtaaagtgtctggtctgggagctcgttaactatgctgggaaacggtccaaaagaatcagaatttgaggtgttttgttttcatttttatttcaagttggacagatcttggagataatttcttacctcacatagatgagaaaactaacacccagaaaggagaaatgatgttataaaaaactcataaggcaagagctgagaaggaagcgctgatcttctatttaattccccacccatgacccccagaaagcaggagggcattgcccacattcacagggctcttcagtctcagaatcaggacactggccaggtgtctggtttgggtccagagtgctcatcatcatgtcatagaactgctgggcccaggtctcctgaaatgggaagcccagcaataccacgcagtccctccactttctcaaagcacactggaaaggccattagaattgccccagcagagcagatctgctttttttccagagcaaaatgaagcactaggtataaatatgttgttactgccaagaacttaaatgactggtttttgtttgcttgcagtgctttcttaattttatggctcttctgggaaactcctccccttttccacacgaaccttgtggggctgtgaattctttcttcatccccgcattcccaatatacccaggccacaagagtggacgtgaaccacagggtgtcctgtcagaggagcccatctcccatctccccagctccctatctggaggatagttggatagttacgtgttcctagcaggaccaactacagtcttcccaaggattgagttatggactttgggagtgagacatcttcttgctgctggatttccaagctgagaggacgtgaacctgggaccaccagtagccatcttgtttgccacatggagagagactgtgaggacagaagccaaactggaagtggaggagccaagggattgacaaacaacagagccttgaccacgtggagtctctgaatcagccttgtctggaaccagatctacacctggactgcccaggtctataagccaataaagcccctgtttacttgtgatgagtgagtccaagctgttttctgatagttgctttagaagttgtgactaacttctctaatgacctttgaaatcaagtccctgtaagtttacacttcccattacacaacatatccatggcactttaacctgtccaagagtcccctgaagggattccctctgacaagcacagtccctcttttgagatagctggccattcatgtagggccagttgtgggggttttagtac

SEQ ID NO: 731349 - DNA, 2028 bp, Homo sapiens
  misc_feature (1975)..(1975): n is a, c, g, or t
  misc_feature (1992)..(1992): n is a, c, g, or t
  misc_feature (1997)..(1997): n is a, c, g, or t
  misc_feature (2001)..(2001): n is a, c, g, or t
  misc_feature (2012)..(2012): n is a, c, g, or t
ggaaggcaagagatctaggacttctagcccctgaactttcagccgaatacatcttttccaaaggagtgaattcaggcccttgtatcactggcagcaggacgtgaccatggagaagctgttgtgtttcttggtcttgaccagcctctctcatgcttttggccagacagacatgtcgaggaaggcttttgtgtttcccaaagagtcggatacttcctatgtatccctcaaagcaccgttaacgaagcctctcaaagccttcactgtgtgcctccacttctacacggaactgtcctcgacccgtgggtacagtattttctcgtatgccaccaagagacaagacaatgagattctcatattttggtctaaggatataggatacagttttacagtgggtgggtctgaaatattattcgaggttcctgaagtcacagtagctccagtacacatttgtacaagctgggagtccgcctcagggatcgtggagttctgggtagatgggaagcccagggtgaggaagagtctgaagaagggatacactgtgggggcagaagcaagcatcatcttggggcaggagcaggattccttcggtgggaactttgaaggaagccagtccctggtgggagacattggaaatgtgaacatgtgggactttgtgctgtcaccagatgagattaacaccatctatcttggcgggcccttcagtcctaatgtcctgaactggcgggcactgaagtatgaagtgcaaggcgaacctgaaggtacctcccggttttttacaccgcatgggccccacgtctctgtctctggtacctcccgcttttttacactgcatggttcccacgtctctgtctctgggcctttgttcccctatatgcattgcaggcctgctccaccctcctcagcgcctgagaatggaggtaaagtgtctggtctgggagctcgttaactatgctgggaaacggtccaaaagaatcagaatttgaggtgttttgttttcatttttatttcaagttggacagatcttggagataatttcttacctcacatagatgagaaaactaacacccagaaaggagaaatgatgttataaaaaactcataaggcaagagctgagaaggaagcgctgatcttctatttaattccccacccatgacccccagaaagcaggagggcattgcccacattcacagggctcttcagtctcagaatcaggacactggccaggtgtctggtttgggtccagagtgctcatcatcatgtcatagaactgctgggcccaggtctcctgaaatgggaagcccagcaataccacgcagtccctccactttctcaaagcacactggaaaggccattagaattgccccagcagagcagatctgctttttttccagagcaaaatgaagcactaggtataaatatgttgttactgccaagaacttaaatgactggtttttgtttgcttgcagtgctttcttaattttatggctcttctgggaaactcctccccttttccacacgaaccttgtggggctgtgaattctttcttcatccccgcattcccaatatacccaggccacaagagtggacgtgaaccacagggtgtcctgtcagaggagcccatctcccatctccccagctccctatctggaggatagttggatagttacgtgttcctagcaggaccaactacagtcttcccaaggattgagttatggactttgggagtgagacatcttcttgctgctggatttccaagctgagaggacgtgaacctgggaccaccagtagccatcttgtttgccacatggagagagactgtgaggacagaagccaaactggaagtggaggagccaagggattgacaaacaacagagccttgaccacgtggagtctctgaatcagccttgtctggaaccagatctacacctggactgcccaggtctataagccaataaagcccctgtttacttgcaanaaaaaaaaaaaaaaaantttgngggngctgggcccgnaaagttttaaaaccat

SEQ ID NO: 731350 - DNA, 2144 bp, Homo sapiens
ggaaggcaagagatctaggacttctagcccctgaactttcagccgaatacatcttttccaaaggagtgaattcaggcccttgtatcactggcagcaggacgtgaccatggagaagctgttgtgtttcttggtcttgaccagcctctctcatgcttttggccagacagacatgtcgaggaaggcttttgtgtttcccaaagagtcggatacttcctatgtatccctcaaagcaccgttaacgaagcctctcaaagccttcactgtgtgcctccacttctacacggaactgtcctcgacccgtgggtacagtattttctcgtatgccaccaagagacaagacaatgagattctcatattttggtctaaggatataggatacagttttacagtgggtgggtctgaaatattattcgaggttcctgaagtcacagtagctccagtacacatttgtacaagctgggagtccgcctcagggatcgtggagttctgggtagatgggaagcccagggtgaggaagagtctgaagaagggatacactgtgggggcagaagcaagcatcatcttggggcaggagcaggattccttcggtgggaactttgaaggaagccagtccctggtgggagacattggaaatgtgaacatgtgggactttgtgctgtcaccagatgagattaacaccatctatcttggcgggcccttcagtcctaatgtcctgaactggcgggcactgaagtatgaagtgcaaggcgaacctgaaggtacctcccggttttttacaccgcatgggccccacgtctctgtctctggtacctcccgcttttttacactgcatggttcccacgtctctgtctctgggcctttgttcccctatatgcattgcaggcctgctccaccctcctcagcgcctgagaatggaggtaaagtgtctggtctgggagctcgttaactatgctgggaaacggtccaaaagaatcagaatttgaggtgttttgttttcatttttatttcaagttggacagatcttggagataatttcttacctcacatagatgagaaaactaacacccagaaaggagaaatgatgttataaaaaactcataaggcaagagctgagaaggaagcgctgatcttctatttaattccccacccatgacccccagaaagcaggagggcattgcccacattcacagggctcttcagtctcagaatcaggacactggccaggtgtctggtttgggtccagagtgctcatcatcatgtcatagaactgctgggcccaggtctcctgaaatgggaagcccagcaataccacgcagtccctccactttctcaaagcacactggaaaggccattagaattgccccagcagagcagatctgctttttttcctggtttttgtttgcttgcagtgctttcttaattttatggctcttctgggaaactcctccccttttccacacgaaccttgtggggctgtgaattctttcttcatccccgcattcccaatatacccaggccacaagagtggacgtgaaccacagggtgtcctgtcagaggagcccatctcccatctccccagctccctatctggaggatagttggatagttacgtgttcctagcaggaccaactacagtcttcccaaggattgagttatggactttgggagtgagacatcttcttgctgctggatttccaagctgagaggacgtgaacctgggaccaccagtagccatcttgtttgccacatggagagagactgtgaggacagaagccaaactggaagtggaggagccaagggattgacaaacaacagagccttgaccacgtggagtctctgaatcagccttgtctggaaccagatctacacctggactgcccaggtctataagccaataaagcccctgtttacttgtgatgagtgagtccaagctgttttctgatagttgctttagaagttgtgactaacttctctaatgacctttgaaatcaagtccctgtaagtttacacttcccattacacaacatatccatggcactttaacctgtccaagagtcccctgaagggattccctctgacaagcacagtccctcttttgagatagctggccattcatgtagggccagttgtgggggttttagtac

SEQ ID NO: 731351 - DNA, 1626 bp, Homo sapiens
ggaaggcaagagatctaggacttctagcccctgaactttcagccgaatacatcttttccaaaggagtgaattcaggcccttgtatcactggcagcaggacgtgaccatggagaagctgttgtgtttcttggtcttgaccagcctctctcatgcttttggccagacagacatgtcgaggaaggcttttgtgtttcccaaagagtcggatacttcctatgtatccctcaaagcaccgttaacgaagcctctcaaagccttcactgtgtgcctccacttctacacggaactgtcctcgacccgtgggtacagtattttctcgtatgccaccaagagacaagacaatgagattctcatattttggtctaaggatataggatacagttttacagtgggtgggtctgaaatattattcgaggttcctgaagtcacagtagctccagtacacatttgtacaagctgggagtccgcctcagggatcgtggagttctgggtagatgggaagcccagggtgaggaagagtctgaagaagggatacactgtgggggcagaagcaagcatcatcttggggcaggagcaggattccttcggtgggaactttgaaggaagccagtccctggtgggagacattggaaatgtgaacatatgagattaacaccatctatcttggcgggcccttcagtcctaatgtcctgaactggcgggcactgaagtatgaagtgcaaggcgaagtgttcaccaaaccccagctgtggccctgaggcccagctgtgggtcctgaaggtacctcccggttttttacaccgcatgggccccacgtctctgtctctggtacctcccgcttttttacactgcatggttcccacgtctctgtctctgggcctttgttcccctatatgcattgcaggcctgctccaccctcctcagcgcctgagaatggaggtaaagtgtctggtctgggagctcgttaactatgctgggaaacggtccaaaagaatcagaatttgaggtgttttgttttcatttttatttcaagttggacagatcttggagataatttcttacctcacatagatgagaaaactaacacccagaaaggagaaatgatgttataaaaaactcataaggcaagagctgagaaggaagcgctgatcttctatttaattccccacccatgacccccagaaagcaggagggcattgcccacattcacagggctcttcagtctcagaatcaggacactggccaggtgtctggtttgggtccagagtgctcatcatcatgtcatagaactgctgggcccaggtctcctgaaatgggaagcccagcaataccacgcagtccctccactttctcaaagcacactggaaaggccattagaattgccccagcagagcagatctgctttttttccagagcaaaatgaagcactaggtataaatatgttgttactgccaagaacttaaatgactggtttttgtttgcttgcagtgctttcttaattttatggctcttctgggaaactcctccccttttccacacgaaccttgtggggctgtgaattctttcttcatccccgcattcccaatatacccaggccacaagagtggacgtgaaccacagggtgtc

SEQ ID NO: 731352 - DNA, 2223 bp, Homo sapiens
ggaaggcaagagatctaggacttctagcccctgaactttcagccgaatacatcttttccaaaggagtgaattcaggcccttgtatcactggcagcaggacgtgaccatggagaagctgttgtgtttcttggtcttgaccagcctctctcatgcttttggccagacagacatgtcgaggaaggcttttgtgtttcccaaagagtcggatacttcctatgtatccctcaaagcaccgttaacgaagcctctcaaagccttcactgtgtgcctccacttctacacggaactgtcctcgacccgtgggtacagtattttctcgtatgccaccaagagacaagacaatgagattctcatattttggtctaaggatataggatacagttttacagtgggtgggtctgaaatattattcgaggttcctgaagtcacagtagctccagtacacatttgtacaagctgggagtccgcctcagggatcgtggagttctgggtagatgggaagcccagggtgaggaagagtctgaagaagggatacactgtgggggcagaagcaagcatcatcttggggcaggagcaggattccttcggtgggaactttgaaggaagccagtccctggtgggagacattggaaatgtgaacatatgagattaacaccatctatcttggcgggcccttcagtcctaatgtcctgaactggcgggcactgaagtatgaagtgcaaggcgaagtgttcaccaaaccccagctgtggccctgaggcccagctgtgggtcctgaaggtacctcccggttttttacaccgcatgggccccacgtctctgtctctggtacctcccgcttttttacactgcatggttcccacgtctctgtctctgggcctttgttcccctatatgcattgcaggcctgctccaccctcctcagcgcctgagaatggaggtaaagtgtctggtctgggagctcgttaactatgctgggaaacggtccaaaagaatcagaatttgaggtgttttgttttcatttttatttcaagttggacagatcttggagataatttcttacctcacatagatgagaaaactaacacccagaaaggagaaatgatgttataaaaaactcataaggcaagagctgagaaggaagcgctgatcttctatttaattccccacccatgacccccagaaagcaggagggcattgcccacattcacagggctcttcagtctcagaatcaggacactggccaggtgtctggtttgggtccagagtgctcatcatcatgtcatagaactgctgggcccaggtctcctgaaatgggaagcccagcaataccacgcagtccctccactttctcaaagcacactggaaaggccattagaattgccccagcagagcagatctgctttttttccagagcaaaatgaagcactaggtataaatatgttgttactgccaagaacttaaatgactggtttttgtttgcttgcagtgctttcttaattttatggctcttctgggaaactcctccccttttccacacgaaccttgtggggctgtgaattctttcttcatccccgcattcccaatatacccaggccacaagagtggacgtgaaccacagggtgtcctgtcagaggagcccatctcccatctccccagctccctatctggaggatagttggatagttacgtgttcctagcaggaccaactacagtcttcccaaggattgagttatggactttgggagtgagacatcttcttgctgctggatttccaagctgagaggacgtgaacctgggaccaccagtagccatcttgtttgccacatggagagagactgtgaggacagaagccaaactggaagtggaggagccaagggattgacaaacaacagagccttgaccacgtggagtctctgaatcagccttgtctggaaccagatctacacctggactgcccaggtctataagccaataaagcccctgtttacttgtgatgagtgagtccaagctgttttctgatagttgctttagaagttgtgactaacttctctaatgacctttgaaatcaagtccctgtaagtttacacttcccattacacaacatatccatggcactttaacctgtccaagagtcccctgaagggattccctctgacaagcacagtccctcttttgagatagctggccattcatgtagggccagttgtgggggttttagtac

SEQ ID NO: 731353 - DNA, 2050 bp, Homo sapiens
  misc_feature (1997)..(1997): n is a, c, g, or t
  misc_feature (2014)..(2014): n is a, c, g, or t
  misc_feature (2019)..(2019): n is a, c, g, or t
  misc_feature (2023)..(2023): n is a, c, g, or t
  misc_feature (2034)..(2034): n is a, c, g, or t
ggaaggcaagagatctaggacttctagcccctgaactttcagccgaatacatcttttccaaaggagtgaattcaggcccttgtatcactggcagcaggacgtgaccatggagaagctgttgtgtttcttggtcttgaccagcctctctcatgcttttggccagacagacatgtcgaggaaggcttttgtgtttcccaaagagtcggatacttcctatgtatccctcaaagcaccgttaacgaagcctctcaaagccttcactgtgtgcctccacttctacacggaactgtcctcgacccgtgggtacagtattttctcgtatgccaccaagagacaagacaatgagattctcatattttggtctaaggatataggatacagttttacagtgggtgggtctgaaatattattcgaggttcctgaagtcacagtagctccagtacacatttgtacaagctgggagtccgcctcagggatcgtggagttctgggtagatgggaagcccagggtgaggaagagtctgaagaagggatacactgtgggggcagaagcaagcatcatcttggggcaggagcaggattccttcggtgggaactttgaaggaagccagtccctggtgggagacattggaaatgtgaacatatgagattaacaccatctatcttggcgggcccttcagtcctaatgtcctgaactggcgggcactgaagtatgaagtgcaaggcgaagtgttcaccaaaccccagctgtggccctgaggcccagctgtgggtcctgaaggtacctcccggttttttacaccgcatgggccccacgtctctgtctctggtacctcccgcttttttacactgcatggttcccacgtctctgtctctgggcctttgttcccctatatgcattgcaggcctgctccaccctcctcagcgcctgagaatggaggtaaagtgtctggtctgggagctcgttaactatgctgggaaacggtccaaaagaatcagaatttgaggtgttttgttttcatttttatttcaagttggacagatcttggagataatttcttacctcacatagatgagaaaactaacacccagaaaggagaaatgatgttataaaaaactcataaggcaagagctgagaaggaagcgctgatcttctatttaattccccacccatgacccccagaaagcaggagggcattgcccacattcacagggctcttcagtctcagaatcaggacactggccaggtgtctggtttgggtccagagtgctcatcatcatgtcatagaactgctgggcccaggtctcctgaaatgggaagcccagcaataccacgcagtccctccactttctcaaagcacactggaaaggccattagaattgccccagcagagcagatctgctttttttccagagcaaaatgaagcactaggtataaatatgttgttactgccaagaacttaaatgactggtttttgtttgcttgcagtgctttcttaattttatggctcttctgggaaactcctccccttttccacacgaaccttgtggggctgtgaattctttcttcatccccgcattcccaatatacccaggccacaagagtggacgtgaaccacagggtgtcctgtcagaggagcccatctcccatctccccagctccctatctggaggatagttggatagttacgtgttcctagcaggaccaactacagtcttcccaaggattgagttatggactttgggagtgagacatcttcttgctgctggatttccaagctgagaggacgtgaacctgggaccaccagtagccatcttgtttgccacatggagagagactgtgaggacagaagccaaactggaagtggaggagccaagggattgacaaacaacagagccttgaccacgtggagtctctgaatcagccttgtctggaaccagatctacacctggactgcccaggtctataagccaataaagcccctgtttacttgcaanaaaaaaaaaaaaaaaantttgngggngctgggcccgnaaagttttaaaaccat

SEQ ID NO: 731354 - DNA, 2166 bp, Homo sapiens
ggaaggcaagagatctaggacttctagcccctgaactttcagccgaatacatcttttccaaaggagtgaattcaggcccttgtatcactggcagcaggacgtgaccatggagaagctgttgtgtttcttggtcttgaccagcctctctcatgcttttggccagacagacatgtcgaggaaggcttttgtgtttcccaaagagtcggatacttcctatgtatccctcaaagcaccgttaacgaagcctctcaaagccttcactgtgtgcctccacttctacacggaactgtcctcgacccgtgggtacagtattttctcgtatgccaccaagagacaagacaatgagattctcatattttggtctaaggatataggatacagttttacagtgggtgggtctgaaatattattcgaggttcctgaagtcacagtagctccagtacacatttgtacaagctgggagtccgcctcagggatcgtggagttctgggtagatgggaagcccagggtgaggaagagtctgaagaagggatacactgtgggggcagaagcaagcatcatcttggggcaggagcaggattccttcggtgggaactttgaaggaagccagtccctggtgggagacattggaaatgtgaacatatgagattaacaccatctatcttggcgggcccttcagtcctaatgtcctgaactggcgggcactgaagtatgaagtgcaaggcgaagtgttcaccaaaccccagctgtggccctgaggcccagctgtgggtcctgaaggtacctcccggttttttacaccgcatgggccccacgtctctgtctctggtacctcccgcttttttacactgcatggttcccacgtctctgtctctgggcctttgttcccctatatgcattgcaggcctgctccaccctcctcagcgcctgagaatggaggtaaagtgtctggtctgggagctcgttaactatgctgggaaacggtccaaaagaatcagaatttgaggtgttttgttttcatttttatttcaagttggacagatcttggagataatttcttacctcacatagatgagaaaactaacacccagaaaggagaaatgatgttataaaaaactcataaggcaagagctgagaaggaagcgctgatcttctatttaattccccacccatgacccccagaaagcaggagggcattgcccacattcacagggctcttcagtctcagaatcaggacactggccaggtgtctggtttgggtccagagtgctcatcatcatgtcatagaactgctgggcccaggtctcctgaaatgggaagcccagcaataccacgcagtccctccactttctcaaagcacactggaaaggccattagaattgccccagcagagcagatctgctttttttcctggtttttgtttgcttgcagtgctttcttaattttatggctcttctgggaaactcctccccttttccacacgaaccttgtggggctgtgaattctttcttcatccccgcattcccaatatacccaggccacaagagtggacgtgaaccacagggtgtcctgtcagaggagcccatctcccatctccccagctccctatctggaggatagttggatagttacgtgttcctagcaggaccaactacagtcttcccaaggattgagttatggactttgggagtgagacatcttcttgctgctggatttccaagctgagaggacgtgaacctgggaccaccagtagccatcttgtttgccacatggagagagactgtgaggacagaagccaaactggaagtggaggagccaagggattgacaaacaacagagccttgaccacgtggagtctctgaatcagccttgtctggaaccagatctacacctggactgcccaggtctataagccaataaagcccctgtttacttgtgatgagtgagtccaagctgttttctgatagttgctttagaagttgtgactaacttctctaatgacctttgaaatcaagtccctgtaagtttacacttcccattacacaacatatccatggcactttaacctgtccaagagtcccctgaagggattccctctgacaagcacagtccctcttttgagatagctggccattcatgtagggccagttgtgggggttttagtac

SEQ ID NO: 731355 - DNA, 2169 bp, Homo sapiens
ggaaggcaagagatctaggacttctagcccctgaactttcagccgaatacatcttttccaaaggagtgaattcaggcccttgtatcactggcagcaggacgtgaccatggagaagctgttgtgtttcttggtcttgaccagcctctctcatgcttttggccagacagacatgtcgaggaaggcttttgtgtttcccaaagagtcggatacttcctatgtatccctcaaagcaccgttaacgaagcctctcaaagccttcactgtgtgcctccacttctacacggaactgtcctcgacccgtgggtacagtattttctcgtatgccaccaagagacaagacaatgagattctcatattttggtctaaggatataggatacagttttacagtgggtgggtctgaaatattattcgaggttcctgaagtcacagtagctccagtacacatttgtacaagctgggagtccgcctcagggatcgtggagttctgggtagatgggaagcccagggtgaggaagagtctgaagaagggatacactgtgggggcagaagcaagcatcatcttggggcaggagcaggattccttcggtgggaactttgaaggaagccagtccctggtgggagacattggaaatgtgaacatatgagattaacaccatctatcttggcgggcccttcagtcctaatgtcctgaactggcgggcactgaagtatgaagtgcaaggcgaagtgttcaccaaaccccagctgtggccctgaggcccagctgtgggtcctgaaggtacctcccggttttttacaccgcatgggccccacgtctctgtctctggtacctcccgcttttttacactgcatggttcccacgtctctgtctctgggcctttgttcccctatatgcattgcaggcctgctccaccctcctcagcgcctgagaatggaggtaaagtgtctggtctgggagctcgttaactatgctgggaaacggtccaaaagaatcagaatttgaggtgttttgttttcatttttatttcaagttggacagatcttggagataatttcttacctcacatagatgagaaaactaacacccagaaaggagaaatgatgttataacacccatgacccccagaaagcaggagggcattgcccacattcacagggctcttcagtctcagaatcaggacactggccaggtgtctggtttgggtccagagtgctcatcatcatgtcatagaactgctgggcccaggtctcctgaaatgggaagcccagcaataccacgcagtccctccactttctcaaagcacactggaaaggccattagaattgccccagcagagcagatctgctttttttccagagcaaaatgaagcactaggtataaatatgttgttactgccaagaacttaaatgactggtttttgtttgcttgcagtgctttcttaattttatggctcttctgggaaactcctccccttttccacacgaaccttgtggggctgtgaattctttcttcatccccgcattcccaatatacccaggccacaagagtggacgtgaaccacagggtgtcctgtcagaggagcccatctcccatctccccagctccctatctggaggatagttggatagttacgtgttcctagcaggaccaactacagtcttcccaaggattgagttatggactttgggagtgagacatcttcttgctgctggatttccaagctgagaggacgtgaacctgggaccaccagtagccatcttgtttgccacatggagagagactgtgaggacagaagccaaactggaagtggaggagccaagggattgacaaacaacagagccttgaccacgtggagtctctgaatcagccttgtctggaaccagatctacacctggactgcccaggtctataagccaataaagcccctgtttacttgtgatgagtgagtccaagctgttttctgatagttgctttagaagttgtgactaacttctctaatgacctttgaaatcaagtccctgtaagtttacacttcccattacacaacatatccatggcactttaacctgtccaagagtcccctgaagggattccctctgacaagcacagtccctcttttgagatagctggccattcatgtagggccagttgtgggggttttagtac

SEQ ID NO: 731356 - DNA, 1996 bp, Homo sapiens
  misc_feature (1943)..(1943): n is a, c, g, or t
  misc_feature (1960)..(1960): n is a, c, g, or t
  misc_feature (1965)..(1965): n is a, c, g, or t
  misc_feature (1969)..(1969): n is a, c, g, or t
  misc_feature (1980)..(1980): n is a, c, g, or t
ggaaggcaagagatctaggacttctagcccctgaactttcagccgaatacatcttttccaaaggagtgaattcaggcccttgtatcactggcagcaggacgtgaccatggagaagctgttgtgtttcttggtcttgaccagcctctctcatgcttttggccagacagacatgtcgaggaaggcttttgtgtttcccaaagagtcggatacttcctatgtatccctcaaagcaccgttaacgaagcctctcaaagccttcactgtgtgcctccacttctacacggaactgtcctcgacccgtgggtacagtattttctcgtatgccaccaagagacaagacaatgagattctcatattttggtctaaggatataggatacagttttacagtgggtgggtctgaaatattattcgaggttcctgaagtcacagtagctccagtacacatttgtacaagctgggagtccgcctcagggatcgtggagttctgggtagatgggaagcccagggtgaggaagagtctgaagaagggatacactgtgggggcagaagcaagcatcatcttggggcaggagcaggattccttcggtgggaactttgaaggaagccagtccctggtgggagacattggaaatgtgaacatatgagattaacaccatctatcttggcgggcccttcagtcctaatgtcctgaactggcgggcactgaagtatgaagtgcaaggcgaagtgttcaccaaaccccagctgtggccctgaggcccagctgtgggtcctgaaggtacctcccggttttttacaccgcatgggccccacgtctctgtctctggtacctcccgcttttttacactgcatggttcccacgtctctgtctctgggcctttgttcccctatatgcattgcaggcctgctccaccctcctcagcgcctgagaatggaggtaaagtgtctggtctgggagctcgttaactatgctgggaaacggtccaaaagaatcagaatttgaggtgttttgttttcatttttatttcaagttggacagatcttggagataatttcttacctcacatagatgagaaaactaacacccagaaaggagaaatgatgttataacacccatgacccccagaaagcaggagggcattgcccacattcacagggctcttcagtctcagaatcaggacactggccaggtgtctggtttgggtccagagtgctcatcatcatgtcatagaactgctgggcccaggtctcctgaaatgggaagcccagcaataccacgcagtccctccactttctcaaagcacactggaaaggccattagaattgccccagcagagcagatctgctttttttccagagcaaaatgaagcactaggtataaatatgttgttactgccaagaacttaaatgactggtttttgtttgcttgcagtgctttcttaattttatggctcttctgggaaactcctccccttttccacacgaaccttgtggggctgtgaattctttcttcatccccgcattcccaatatacccaggccacaagagtggacgtgaaccacagggtgtcctgtcagaggagcccatctcccatctccccagctccctatctggaggatagttggatagttacgtgttcctagcaggaccaactacagtcttcccaaggattgagttatggactttgggagtgagacatcttcttgctgctggatttccaagctgagaggacgtgaacctgggaccaccagtagccatcttgtttgccacatggagagagactgtgaggacagaagccaaactggaagtggaggagccaagggattgacaaacaacagagccttgaccacgtggagtctctgaatcagccttgtctggaaccagatctacacctggactgcccaggtctataagccaataaagcccctgtttacttgcaanaaaaaaaaaaaaaaaantttgngggngctgggcccgnaaagttttaaaaccat

SEQ ID NO: 731357 - DNA, 1812 bp, Homo sapiens
ggaaggcaagagatctaggacttctagcccctgaactttcagccgaatacatcttttccaaaggagtgaattcaggcccttgtatcactggcagcaggacgtgaccatggagaagctgttgtgtttcttggtcttgaccagcctctctcatgcttttggccagacagacatgtcgaggaaggcttttgtgtttcccaaagagtcggatacttcctatgtatccctcaaagcaccgttaacgaagcctctcaaagccttcactgtgtgcctccacttctacacggaactgtcctcgacccgtgggtacagtattttctcgtatgccaccaagagacaagacaatgagattctcatattttggtctaaggatataggatacagttttacagtgggtgggtctgaaatattattcgaggttcctgaagtcacagtagctccagtacacatttgtacaagctgggagtccgcctcagggatcgtggagttctgggtagatgggaagcccagggtgaggaagagtctgaagaagggatacactgtgggggcagaagcaagcatcatcttggggcaggagcaggattccttcggtgggaactttgaaggaagccagtccctggtgggagacattggaaatgtgaacatatgagattaacaccatctatcttggcgggcccttcagtcctaatgtcctgaactggcgggcactgaagtatgaagtgcaaggcgaagtgttcaccaaaccccagctgtggccctgaggcccagctgtgggtcctgaaggtacctcccggttttttacaccgcatgggccccacgtctctgtctctggtacctcccgcttttttacactgcatggttcccacgtctctgtctctgggcctttgttcccctatatgcattgcaggcctgctccaccctcctcagcgcctgagaatggaggtaaagtgtctggtctgggagctcgttaactatgctgggaaacggtccaaaagaatcagaatttgaggtgttttgttttcatttttatttcaagttggacagatcttggagataatttcttacctcacatagatgagaaaactaacacccagaaaggagaaatgatgttataactccccttttccacacgaaccttgtggggctgtgaattctttcttcatccccgcattcccaatatacccaggccacaagagtggacgtgaaccacagggtgtcctgtcagaggagcccatctcccatctccccagctccctatctggaggatagttggatagttacgtgttcctagcaggaccaactacagtcttcccaaggattgagttatggactttgggagtgagacatcttcttgctgctggatttccaagctgagaggacgtgaacctgggaccaccagtagccatcttgtttgccacatggagagagactgtgaggacagaagccaaactggaagtggaggagccaagggattgacaaacaacagagccttgaccacgtggagtctctgaatcagccttgtctggaaccagatctacacctggactgcccaggtctataagccaataaagcccctgtttacttgtgatgagtgagtccaagctgttttctgatagttgctttagaagttgtgactaacttctctaatgacctttgaaatcaagtccctgtaagtttacacttcccattacacaacatatccatggcactttaacctgtccaagagtcccctgaagggattccctctgacaagcacagtccctcttttgagatagctggccattcatgtagggccagttgtgggggttttagtac

SEQ ID NO: 731358 - DNA, 1508 bp, Homo sapiens
ggaaggcaagagatctaggacttctagcccctgaactttcagccgaatacatcttttccaaaggagtgaattcaggcccttgtatcactggcagcaggacgtgaccatggagaagctgttgtgtttcttggtcttgaccagcctctctcatgcttttggccagacagacatgtcgaggaaggcttttgtgtttcccaaagagtcggatacttcctatgtatccctcaaagcaccgttaacgaagcctctcaaagccttcactgtgtgcctccacttctacacggaactgtcctcgacccgtgggtacagtattttctcgtatgccaccaagagacaagacaatgagattctcatattttggtctaaggatataggatacagttttacagtgggtgggtctgaaatattattcgaggttcctgaagtcacagtagctccagtacacatttgtacaagctgggagtccgcctcagggatcgtggagttctgggtagatgggaagcccagggtgaggaagagtctgaagaagggatacactgtgggggcagaagcaagcatcatcttggggcaggagcaggattccttcggtgggaactttgaaggaagccagtccctggtgggagacattggaaatgtgaacatatgagattaacaccatctatcttggcgggcccttcagtcctaatgtcctgaactggcgggcactgaagtatgaagtgcaaggcgaagtgttcaccaaaccccagctgtggccctgaggcccagctgtgggttgctttcttaattttatggctcttctgggaaactcctccccttttccacacgaaccttgtggggctgtgaattctttcttcatccccgcattcccaatatacccaggccacaagagtggacgtgaaccacagggtgtcctgtcagaggagcccatctcccatctccccagctccctatctggaggatagttggatagttacgtgttcctagcaggaccaactacagtcttcccaaggattgagttatggactttgggagtgagacatcttcttgctgctggatttccaagctgagaggacgtgaacctgggaccaccagtagccatcttgtttgccacatggagagagactgtgaggacagaagccaaactggaagtggaggagccaagggattgacaaacaacagagccttgaccacgtggagtctctgaatcagccttgtctggaaccagatctacacctggactgcccaggtctataagccaataaagcccctgtttacttgtgatgagtgagtccaagctgttttctgatagttgctttagaagttgtgactaacttctctaatgacctttgaaatcaagtccctgtaagtttacacttcccattacacaacatatccatggcactttaacctgtccaagagtcccctgaagggattccctctgacaagcacagtccctcttttgagatagctggccattcatgtagggccagttgtgggggttttagtac

SEQ ID NO: 731359 - DNA, 1556 bp, Homo sapiens
ggaaggcaagagatctaggacttctagcccctgaactttcagccgaatacatcttttccaaaggagtgaattcaggcccttgtatcactggcagcaggacgtgaccatggagaagctgttgtgtttcttggtcttgaccagcctctctcatgcttttggccagacagacatgtcgaggaaggcttttgtgtttcccaaagagtcggatacttcctatgtatccctcaaagcaccgttaacgaagcctctcaaagccttcactgtgtgcctccacttctacacggaactgtcctcgacccgtgggtacagtattttctcgtatgccaccaagagacaagacaatgagattctcatattttggtctaaggatataggatacagttttacagtgggtgggtctgaaatattattcgaggttcctgaagtcacagtagctccagtacacatttgtacaagctgggagtccgcctcagggatcgtggagttctgggtagatgggaagcccagggtgaggaagagtctgaagaagggatacactgtgggggcagaagcaagtctcagaatcaggacactggccaggtgtctggtttgggtccagagtgctcatcatcatgtcatagaactgctgggcccaggtctcctgaaatgggaagcccagcaataccacgcagtccctccactttctcaaagcacactggaaaggccattagaattgccccagcagagcagatctgctttttttccagagcaaaatgaagcactaggtataaatatgttgttactgccaagaacttaaatgactggtttttgtttgcttgcagtgctttcttaattttatggctcttctgggaaactcctccccttttccacacgaaccttgtggggctgtgaattctttcttcatccccgcattcccaatatacccaggccacaagagtggacgtgaaccacagggtgtcctgtcagaggagcccatctcccatctccccagctccctatctggaggatagttggatagttacgtgttcctagcaggaccaactacagtcttcccaaggattgagttatggactttgggagtgagacatcttcttgctgctggatttccaagctgagaggacgtgaacctgggaccaccagtagccatcttgtttgccacatggagagagactgtgaggacagaagccaaactggaagtggaggagccaagggattgacaaacaacagagccttgaccacgtggagtctctgaatcagccttgtctggaaccagatctacacctggactgcccaggtctataagccaataaagcccctgtttacttgtgatgagtgagtccaagctgttttctgatagttgctttagaagttgtgactaacttctctaatgacctttgaaatcaagtccctgtaagtttacacttcccattacacaacatatccatggcactttaacctgtccaagagtcccctgaagggattccctctgacaagcacagtccctcttttgagatagctggccattcatgtagggccagttgtgggggttttagtac

SEQ ID NO: 731360 - DNA, 1383 bp, Homo sapiens
  misc_feature (1330)..(1330): n is a, c, g, or t
  misc_feature (1347)..(1347): n is a, c, g, or t
  misc_feature (1352)..(1352): n is a, c, g, or t
  misc_feature (1356)..(1356): n is a, c, g, or t
  misc_feature (1367)..(1367): n is a, c, g, or t
ggaaggcaagagatctaggacttctagcccctgaactttcagccgaatacatcttttccaaaggagtgaattcaggcccttgtatcactggcagcaggacgtgaccatggagaagctgttgtgtttcttggtcttgaccagcctctctcatgcttttggccagacagacatgtcgaggaaggcttttgtgtttcccaaagagtcggatacttcctatgtatccctcaaagcaccgttaacgaagcctctcaaagccttcactgtgtgcctccacttctacacggaactgtcctcgacccgtgggtacagtattttctcgtatgccaccaagagacaagacaatgagattctcatattttggtctaaggatataggatacagttttacagtgggtgggtctgaaatattattcgaggttcctgaagtcacagtagctccagtacacatttgtacaagctgggagtccgcctcagggatcgtggagttctgggtagatgggaagcccagggtgaggaagagtctgaagaagggatacactgtgggggcagaagcaagtctcagaatcaggacactggccaggtgtctggtttgggtccagagtgctcatcatcatgtcatagaactgctgggcccaggtctcctgaaatgggaagcccagcaataccacgcagtccctccactttctcaaagcacactggaaaggccattagaattgccccagcagagcagatctgctttttttccagagcaaaatgaagcactaggtataaatatgttgttactgccaagaacttaaatgactggtttttgtttgcttgcagtgctttcttaattttatggctcttctgggaaactcctccccttttccacacgaaccttgtggggctgtgaattctttcttcatccccgcattcccaatatacccaggccacaagagtggacgtgaaccacagggtgtcctgtcagaggagcccatctcccatctccccagctccctatctggaggatagttggatagttacgtgttcctagcaggaccaactacagtcttcccaaggattgagttatggactttgggagtgagacatcttcttgctgctggatttccaagctgagaggacgtgaacctgggaccaccagtagccatcttgtttgccacatggagagagactgtgaggacagaagccaaactggaagtggaggagccaagggattgacaaacaacagagccttgaccacgtggagtctctgaatcagccttgtctggaaccagatctacacctggactgcccaggtctataagccaataaagcccctgtttacttgcaanaaaaaaaaaaaaaaaantttgngggngctgggcccgnaaagttttaaaaccat

SEQ ID NO: 731361 - DNA, 1825 bp, Homo sapiens
ggaaggcaagagatctaggacttctagcccctgaactttcagccgaatacatcttttccaaaggagtgaattcaggcccttgtatcactggcagcaggacgtgaccatggagaagctgttgtgtttcttggtcttgaccagcctctctcatgcttttggccagacagacatgtcgaggaaggcttttgtgtttcccaaagagtcggatacttcctatgtatccctcaaagcaccgttaacgaagcctctcaaagccttcactgtgtgcctccacttctacacggaactgtcctcgacccgtatgagattaacaccatctatcttggcgggcccttcagtcctaatgtcctgaactggcgggcactgaagtatgaagtgcaaggcgaagtgttcaccaaaccccagctgtggccctgaggcccagctgtgggtcctgaaggtacctcccggttttttacaccgcatgggccccacgtctctgtctctggtacctcccgcttttttacactgcatggttcccacgtctctgtctctgggcctttgttcccctatatgcattgcaggcctgctccaccctcctcagcgcctgagaatggaggtaaagtgtctggtctgggagctcgttaactatgctgggaaacggtccaaaagaatcagaatttgaggtgttttgttttcatttttatttcaagttggacagatcttggagataatttcttacctcacatagatgagaaaactaacacccagaaaggagaaatgatgttataaaaaactcataaggcaagagctgagaaggaagcgctgatcttctatttaattccccacccatgacccccagaaagcaggagggcattgcccacattcacagggctcttcagtctcagaatcaggacactggccaggtgtctggtttgggtccagagtgctcatcatcatgtcatagaactgctgggcccaggtctcctgaaatgggaagcccagcaataccacgcagtccctccactttctcaaagcacactggaaaggccattagaattgccccagcagagcagatctgctttttttcctggtttttgtttgcttgcagtgctttcttaattttatggctcttctgggaaactcctccccttttccacacgaaccttgtggggctgtgaattctttcttcatccccgcattcccaatatacccaggccacaagagtggacgtgaaccacagggtgtcctgtcagaggagcccatctcccatctccccagctccctatctggaggatagttggatagttacgtgttcctagcaggaccaactacagtcttcccaaggattgagttatggactttgggagtgagacatcttcttgctgctggatttccaagctgagaggacgtgaacctgggaccaccagtagccatcttgtttgccacatggagagagactgtgaggacagaagccaaactggaagtggaggagccaagggattgacaaacaacagagccttgaccacgtggagtctctgaatcagccttgtctggaaccagatctacacctggactgcccaggtctataagccaataaagcccctgtttacttgtgatgagtgagtccaagctgttttctgatagttgctttagaagttgtgactaacttctctaatgacctttgaaatcaagtccctgtaagtttacacttcccattacacaacatatccatggcactttaacctgtccaagagtcccctgaagggattccctctgacaagcacagtccctcttttgagatagctggccattcatgtagggccagttgtgggggttttagtac

SEQ ID NO: 731362 - DNA, 1036 bp, Homo sapiens; identical to SEQ ID NO: 450675

SEQ ID NO: 731363 - DNA, 194 bp, Homo sapiens
tcagcctctctggtagctgggattacaggactaccgtgaggatggattggacattacaccacactggaaaagtgaaacatctcattcagttggtgatcttcctgtcatgaaagttgcttgacagctctaattacgaattgaacacattaaacacctggtgaaattatcaattaaaaacatctagtcaccataaa

SEQ ID NO: 731364 - DNA, 2103 bp, Homo sapiens; identical to SEQ ID NO: 52411

SEQ ID NO: 731365 - DNA, 2089 bp, Homo sapiens; identical to SEQ ID NO: 683490

SEQ ID NO: 731366 - DNA, 343 bp, Homo sapiens; identical to SEQ ID NO: 683493

SEQ ID NO: 731367 - DNA, 1630 bp, Homo sapiens
ttggggtccattgcaacccgaggcgagactagagttcccaagcgagaagggaagaggcagtgggtgcacgtggaaggcggacagagggctggaaacaagacgctccagaatcaggagcttcccctcaggaaatagcatcctgtgtccccgcactgcagttgtctggtctctccagcagtttggtacttccggctgctgcaatgcgtgtggtggtgattggagcaggagtcatcgggctgtccaccgccctctgcatccatgagcgctaccactcagtcctgcagccactgcacataaaggtctacgcggaccgcttcaccccactcaccaccaccgacgtggctgccggcctctggcagccctacctttctgaccccaacaacccacaggaggcggactggagccaacagacctttgactatctcctgagccatgtccattctcccaacgctgaaaacctgggcctgttcctaatctcgggctacaacctcttccatgaagccattccggacccttcctggaaggacacagttctgggatttcggaagctgacccccagagagctggatatgttcccagattacggctatggctggttccacacaagcctaattctggagggaaagaactatctacagtggctgactgaaaggttaactgagaggggagtgaagttcttccagcggaaagtggagtcttttgaggaggtggcaagagaaggcgcagacgtgattgtcaactgcactggggtatgggctggggcgctacaacgagaccccctgctgcagccaggccgggggcagatcatgaaggtggacgccccttggatgaagcacttcattctcacccatgacccagagagaggcatctacaattccccgtacatcatcccagggacccagacagttactcttggaggcatcttccagttgggaaactggagtgaactaaacaatatccaggaccacaacaccatttgggaaggctgctgcagactggagcccacactgaagaatgcaagaattattggtgaacgaactggcttccggccagtacgcccccagattcggctagaaagagaacagcttcgcactggaccttcaaacacagaggtcatccacaactatggccatggaggctacgggctcaccatccactggggatgtgccctggaggcagccaagctctttgggagaatcctggaagaaaagaaattgtccagaatgccaccatcccacctctgaagactccagtgactgctgcctccccccacaagaactcccttctcccctcagccaatgaatcaatgtgctccttcataagccattgcttctccctcacttctttcctcaaagaagcatgaggtgagagaaagccacaaagtcagtgcctggagaagggttcagcccaacatggggcccctctcatcactgaaatccctctaccttctctgggtctggcattataaagaacagctgaggctgtcattccatgagtcttcagaagaaaggacagctcagaaaatcaaagaggccaactgcccagagccacagaaaatggaggataattgaggctaagtaacctgattacaagttgtactaacatattaaaggttctgaaaagtcctgca

SEQ ID NO: 731368 - DNA, 1365 bp, Homo sapiens
ggcggacagagggctggaaacaagacgctccagaatcaggagcttcccctcaggaaatagcatcctgtgtccccgcactgcagttgtctggtctctccagcagtttggtacttccggacccttcctggaaggacacagttctgggatttcggaagctgacccccagagagctggatatgttcccagattacggctatggctggttccacacaagcctaattctggagggaaagaactatctacagtggctgactgaaaggttaactgagaggggagtgaagttcttccagcggaaagtggagtcttttgaggaggtggcaagagaaggcgcagacgtgattgtcaactgcactggggtatgggctggggcgctacaacgagaccccctgctgcagccaggccgggggcagatcatgaaggtggacgccccttggatgaagcacttcattctcacccatgacccagagagaggcatctacaattccccgtacatcatcccagggacccagacagttactcttggaggcatcttccagttgggaaactggagtgaactaaacaatatccaggaccacaacaccatttgggaaggctgctgcagactggagcccacactgaagaatgcaagaattattggtgaacgaactggcttccggccagtacgcccccagattcggctagaaagagaacagcttcgcactggaccttcaaacacagaggtcatccacaactatggccatggaggctacgggctcaccatccactggggatgtgccctggaggcagccaagctctttgggagaatcctggaagaaaagaaattgtccagaatgccaccatcccacctctgaagactccagtgactgctgcctccccccacaagaactcccttctcccctcagccaatgaatcaatgtgctccttcataagccattgcttctccctcacttctttcctcaaagaagcatgaggtgagagaaagccacaaagtcagtgcctggagaagggttcagcccaacatggggcccctctcatcactgaaatccctctaccttctctgggtctggcattataaagaacagctgaggctgtcattccatgagtcttcagaagaaaggacagctcagaaaatcaaagaggccaactgcccagagccacagaaaatggaggataattgaggctaagtaacctgattacaagttgtactaacatattaaaggttctgaaaagtcctgcagcaaagacaactatctgatgttgtttaacccagtgcttgctaaacctatctggctatggaactcttttgcccagagcacccatgaatgccatgacacaaatctgagaaaatgctggaacagattttgt

SEQ ID NO: 731369 - DNA, 1311 bp, Homo sapiens
ggcggacagagggctggaaacaagacgctccagaatcaggagcttcccctcaggaaatagcatcctgtgtccccgcactgcagttgtctggtctctccagcagtttggtacttccggacccttcctggaaggacacagttctgggatttcggaagctgacccccagagagctggatatgttcccagattacggctatggctggttccacacaagcctaattctggagggaaagaactatctacagtggctgactgaaaggttaactgagaggggagtgaagttcttccagcggaaagtggagtcttttgaggaggtggcaagagaaggcgcagacgtgattgtcaactgcactggggtatgggctggggcgctacaacgagaccccctgctgcagccaggccgggggcagatcatgaaggtggacgccccttggatgaagcacttcattctcacccatgacccagagagaggcatctacaattccccgtacatcatcccagggacccagacagttactcttggaggcatcttccagttgggaaactggagtgaactaaacaatatccaggaccacaacaccatttgggaaggctgctgcagactggagcccacactgaagaatgcaagaattattggtgaacgaactggcttccggccagtacgcccccagattcggctagaaagagaacagcttcgcactggaccttcaaacacagaggtcatccacaactatggccatggaggctacgggctcaccatccactggggatgtgccctggaggcagccaagctctttgggagaatcctggaagtgcctccccccacaagaactcccttctcccctcagccaatgaatcaatgtgctccttcataagccattgcttctccctcacttctttcctcaaagaagcatgaggtgagagaaagccacaaagtcagtgcctggagaagggttcagcccaacatggggcccctctcatcactgaaatccctctaccttctctgggtctggcattataaagaacagctgaggctgtcattccatgagtcttcagaagaaaggacagctcagaaaatcaaagaggccaactgcccagagccacagaaaatggaggataattgaggctaagtaacctgattacaagttgtactaacatattaaaggttctgaaaagtcctgcagcaaagacaactatctgatgttgtttaacccagtgcttgctaaacctatctggctatggaactcttttgcccagagcacccatgaatgccatgacacaaatctgagaaaatgctggaacagattttgt

SEQ ID NO: 731370 - DNA, 1183 bp, Homo sapiens
ggcggacagagggctggaaacaagacgctccagaatcaggagcttcccctcaggaaatagcatcctgtgtccccgcactgcagttgtctggtctctccagcagtttggtacttccggacccttcctggaaggacacagttctgggatttcggaagctgacccccagagagctggatatgttcccagattacggctatggctggttccacacaagcctaattctggagggaaagaactatctacagtggctgactgaaaggttaactgagaggggagtgaagttcttccagcggaaagtggagtcttttgaggaggtggcaagagaaggcgcagacgtgattgtcaactgcactggggtatgggctggggcgctacaacgagaccccctgctgcagccaggccgggggcagatcatgaaggtggacgccccttggatgaagcacttcattctcacccatgacccagagagaggcatctacaattccccgtacatcatcccagggacccagacagttactcttggaggcatcttccagttgggaaactggagtgaactaaacaatatccaggaccacaacaccatttgggaaggctgctgcagactggagcccacactgaagaatgcaagaattattggtgaacgaactggcttccggccagtacgcccccagattcggctagaaagagaacagcttcgcactggaccttcaaacacagaggtcatccacaactatggccatggaggctacgggctcaccatccactggggatgtgccctggaggcagccaagctctttgggagaatcctggaagtgcctccccccacaagaactcccttctcccctcagccaatgaatcaatgtgctccttcataagccattgcttctccctcacttctttcctcaaagaagcatgaggtgagagaaagccacaaagtcagtgcctggagaagggttcagcccaacatggggcccctctcatcactgaaatccctctaccttctctgggtctggcattataaagaacagctgaggctgtcattccatgagtcttcagaagaaaggacagctcagaaaatcaaagaggccaactgcccagagccacagaaaatggaggataattgaggctaagtaacctgattacaagttgtactaacatattaaaggttctgaaaagtcctgca

SEQ ID NO: 731371 - DNA, 1237 bp, Homo sapiens
ggcggacagagggctggaaacaagacgctccagaatcaggagcttcccctcaggaaatagcatcctgtgtccccgcactgcagttgtctggtctctccagcagtttggtacttccggacccttcctggaaggacacagttctgggatttcggaagctgacccccagagagctggatatgttcccagattacggctatggctggttccacacaagcctaattctggagggaaagaactatctacagtggctgactgaaaggttaactgagaggggagtgaagttcttccagcggaaagtggagtcttttgaggaggtggcaagagaaggcgcagacgtgattgtcaactgcactggggtatgggctggggcgctacaacgagaccccctgctgcagccaggccgggggcagatcatgaaggtggacgccccttggatgaagcacttcattctcacccatgacccagagagaggcatctacaattccccgtacatcatcccagggacccagacagttactcttggaggcatcttccagttgggaaactggagtgaactaaacaatatccaggaccacaacaccatttgggaaggctgctgcagactggagcccacactgaagaatgcaagaattattggtgaacgaactggcttccggccagtacgcccccagattcggctagaaagagaacagcttcgcactggaccttcaaacacagaggtcatccacaactatggccatggaggctacgggctcaccatccactggggatgtgccctggaggcagccaagctctttgggagaatcctggaagaaaagaaattgtccagaatgccaccatcccacctctgaagactccagtgactgctgcctccccccacaagaactcccttctcccctcagccaatgaatcaatgtgctccttcataagccattgcttctccctcacttctttcctcaaagaagcatgaggtgagagaaagccacaaagtcagtgcctggagaagggttcagcccaacatggggcccctctcatcactgaaatccctctaccttctctgggtctggcattataaagaacagctgaggctgtcattccatgagtcttcagaagaaaggacagctcagaaaatcaaagaggccaactgcccagagccacagaaaatggaggataattgaggctaagtaacctgattacaagttgtactaacatattaaaggttctgaaaagtcctgca

SEQ ID NO: 731372 - DNA, 1726 bp, Homo sapiens; identical to SEQ ID NO: 446519

SEQ ID NO: 731373 - DNA, 1950 bp, Homo sapiens; identical to SEQ ID NO: 446515

SEQ ID NO: 731374 - DNA, 627 bp, Homo sapiens
gccccaaccatcctgaagctacaggtgctccctcctggaatctccaatggatttcagtcgcagaagcttccacagaagcctgagctcctccttgcaggcccctgtagtcagtacagtgggcatgcagcgcctcgggacgacacccagcgtttatgggggtgctggaggccggggcatccgcatctccaactccagacacacggtgaactatgggagcgatctcacaggcggcggggacctgtttgttggcaatgagaaaatggccatgcagaacctaaatgaccgtctagcgagctacctagaaaaggtgcggaccctggagcagtccaactccaaacttgaagtgcaaatcaagcagtggtacgaaaccaacgccccgagggctggtcgcgactacagtgcatattacagacaaattgaagagctgcgaagtcagattaaggatgctcaactgcaaaatgctcggtgtgtcctgcaaattgataatgctaaactggctgctgaggacttcagactgaagtaggttccctaatacgtggcaaaagtttctgaaaaagaattcctttagtagtccttccagatactcagctttccatatcattgttgataaaggaagcacggttcaat

SEQ ID NO: 731375 - DNA, 1489 bp, Homo sapiens; identical to SEQ ID NO: 446520

SEQ ID NO: 731376 - DNA, 310 bp, Homo sapiens; identical to SEQ ID NO: 446518

SEQ ID NO: 731377 - DNA, 1601 bp, Homo sapiens; identical to SEQ ID NO: 415203

SEQ ID NO: 731378 - DNA, 700 bp, Homo sapiens
gcccgtcacacataagagcaaggaaactctctgaatgcccagcatactacaatgcacttgacccagagtttacaaccctctagcacaaaggtgcatctcaactcatgtgcctgtcagaagtgcacgccctgccaacgggaggcagaaatctcacctatgctccagggcaggtgggaagggcggctgggaacccctgtacccaggatgccttagaggaagggaaggcctccccaaagacctctacctacccaatcaagggcaggcccttattttcccttcttgggttccccagaggccgcagtaccctagcagaaacagttactgaggtggctgacagggtgtcccttcccaaatcaccctcccaccttaggcctacagccccacttcaatggcgtttgtgtgtctgtgtctgtacacgcctgtgctctggactcgctgtgcagggtccggctccgaggcgctggtcggcagtccgaacggagggagcgagacccccaagagcaacggcggcagtggtgggggcggctcgcaaggcaccctggcgtgcagcgccagtgaccagatgcgtcgttaccgcaccgccttcacccgagagcagattgcgcggctggagaaggaattctaccgggagaactacgtatccaggccgcggagatgtgagctggcggccgccctaaacctgccggaaaccaccatcaag

SEQ ID NO: 731379 - DNA, 883 bp, Homo sapiens
agctaccccatgcagccagtcactgcacctccatcctaccctcctaccagctattcctctacacagccgactagttatgatcagagcagttactctcagcagaacacctatgggcaaccgagcagctatggacagcagagtagctatggtcaacaaagcagctatgggcagcagcctcccactagttacccaccccaaactggatcctacagccaagctccaagtcaatatagccaacagagcagcagctacgggcagcagatgttcaagaaggaagtgtatcttcatacatcaccacacctgaaagcagatgtgcttttccagactgatccaactgcagagatggcagctgagtcattgcctttctccttcgggacactgtccagctgggagctggaagcctggtatgaggacctgcaagaggtcctgtcttcagatgaaaatgggggtacctatgtttcacctcctggaaatgaagaggaagaatcaaaaatcttcaccactcttgaccctgcttctctggcttggctgactgaggaggagccagaaccagcagaggtcacaagcacctcccagagccctcactctccagattccagtcagagctccctggctcaggaggaagaggaggaagaccaagggagaaccaggaaacggaaacagagtggtcattccccagcccgggctggaaagcagcgcatgaaggagaaagaacaggagaatgaaaggaaagtggcacagctagctgaagagaatgaacggctcaagcaggaaatcgagcgcctgaccagggaagtagaggcgactcgccgagctctgattgaccgaatggtgaatctgcaccaagcatgaacaattgggagcatcagtcccccacttgggc

SEQ ID NO: 731380 - DNA, 914 bp, Homo sapiens
  misc_feature (4)..(4): n is a, c, g, or t
  misc_feature (6)..(9): n is a, c, g, or t
  misc_feature (14)..(15): n is a, c, g, or t
ggcncnnnngaggnnagagacttaagtctaaggcactgagcgtatcatgttaaagatgagcgggtggcagcgacagagccaaaatcagagctggaacctgaggagagagtgttcaagaaggaagtgtatcttcatacatcaccacacctgaaagcagatgtgcttttccagactgatccaactgcagagatggcagctgagtcattgcctttctcctttgggacactgtccagctgggagctggaagcctggtatgaggacctgcaagaggtcctgtcttcagatgaaaatgggggtacctatgtttcacctcctggaaatgaagaggaagaatcaaaaatcttcaccactcttgaccctgcttctctggcttggctgactgaggaggagccagaaccagcagaggtcacaagcacctcccagagccctcactctccagattccagtcagagctccctggctcaggaggaagaggaggaagaccaagggagaaccaggaaacggaaacagagtggtcattccccagcccgggctggaaagcagcgcatgaaggagaaagaacaggagaatgaaaggaaagtggcacagctagctgaagagaatgaacggctcaagcaggaaatcgagcgcctgaccagggaagtagaggcgactcgccgagctctgattgaccgaatggtgaatctgcaccaagcatgaacaattgggagcatcagtcccccacttgggccacactacccacctttcccagaagtggctactgactaccctctcactagtgccaatgatgtgaccctcaatcccacatacgcagggggaaggcttggagtagacaaaaggaaaggtctcagcttgtatatagagattgtacatttatttattactgtccctatctattaaagtgactttctatg

SEQ ID NO: 731381 - DNA, 739 bp, Homo sapiens
tattcccagcagagcagtcagccctacggacagcagagttacagtggttatagccagtccacggacacttcaggctatggccagagcagctattcttcttatggccagagccagaacatgttcaagaaggaagtgtatcttcatacatcaccacacctgaaagcagatgtgcttttccagactgatccaactgcagagatggcagctgagtcattgcctttctccttcgggacactgtccagctgggagctggaagcctggtatgaggacctgcaagaggtcctgtcttcagatgaaaatgggggtacctatgtttcacctcctggaaatgaagaggaagaatcaaaaatcttcaccactcttgaccctgcttctctggcttggctgactgaggaggagccagaaccagcagaggtcacaagcacctcccagagccctcactctccagattccagtcagagctccctggctcaggaggaagaggaggaagaccaagggagaaccaggaaacggaaacagagtggtcattccccagcccgggctggaaagcagcgcatgaaggagaaagaacaggagaatgaaaggaaagtggcacagctagctgaagagaatgaacggctcaagcaggaaatcgagcgcctgaccagggaagtagaggcgactcgccgagctctgattgaccgaatggtgaatctgcaccaagcatgaacaattgggagcatcagtcccccacttgggc

SEQ ID NO: 731382 - DNA, 346 bp, Homo sapiens
tggtgactggaagtgtcctaatcccacctgtgagaatatgaacttctcttggaggaatgaatgcaaccagtgtaaggcccctaaaccagatggcccaggagggggaccaggtggctctcacatgggggtgttcaagaaggaagtgtatcttcatacatcaccacacctgaaagcagatgtgcttttccagactgatccaactgcagagatggcagctgagtcattgcctttctcctttgggacactgtccagctgggagctggaagcctggtatgaggacctgcaagaggtcctgtcttcagatgaaaatgggggtacctatgtttcacctcctggaaatgaagag

SEQ ID NO: 731383 - DNA, 1367 bp, Homo sapiens; identical to SEQ ID NO: 24958
  misc_feature (54)..(54): n is a, c, g, or t
  misc_feature (56)..(56): n is a, c, g, or t
  misc_feature (60)..(62): n is a, c, g, or t
  misc_feature (64)..(64): n is a, c, g, or t
  misc_feature (1334)..(1335): n is a, c, g, or t
  misc_feature (1339)..(1343): n is a, c, g, or t
  misc_feature (1347)..(1347): n is a, c, g, or t
  misc_feature (1352)..(1352): n is a, c, g, or t
  misc_feature (1358)..(1358): n is a, c, g, or t
  misc_feature (1360)..(1360): n is a, c, g, or t
  misc_feature (1362)..(1362): n is a, c, g, or t
  misc_feature (1367)..(1367): n is a, c, g, or t

SEQ ID NO: 731384 - DNA, 2872 bp, Homo sapiens; identical to SEQ ID NO: 24960
  misc_feature (54)..(54): n is a, c, g, or t
  misc_feature (56)..(56): n is a, c, g, or t
  misc_feature (60)..(62): n is a, c, g, or t
  misc_feature (64)..(64): n is a, c, g, or t

SEQ ID NO: 731385 - DNA, 1958 bp, Homo sapiens
  misc_feature (1340)..(1340): n is a, c, g, or t
tgcgcctgcgccttgtgctcctgactggctgcgctccctgcccccaacaccgccgtggcctgggaaacggtcccagagctgctgagccgacctactggtgtcatggcagccccaaagacagcagctgtggggccgttggtgggagcggtggtccaggcaccaactccactcgctttctggttttcaattcaaaaacagcggaactacttagtcatcacaaagtggaattaacacaagagttcccaaaagaaggatgggtggaacaagaccctaaagaaattcttcagtctgtctacgagtgtatagcgagaacgtgtgagaaacttgacgaactgaatattgatatatccaacataaaagctgttggtgtcagcaatcagagggaaaccactgtaatctgggacaagttaacaggagagcctctctacaatgctgtggtgtggcttgatctaagaacccagactactgttgaggatcttagtaaaaaaattccaggaaatagtaacttcgtcaagtctaagacaggccttccactcagcacttacttcagtgcagtaaaacttcgttggatgcttgacaatgtgagaaacgtccaaaaggctgttgaagaaggtagagctctttttggtaccattgattcatggcttatctggagtttgacaggaggagttaatggaggcgtgcattgtacagatgtaacaaatgcaagtaggacaatgctttttaatatccattctttggaatgggataaagagctctgtgacttttttgaaattccaatggaccttcttccaaatgtcttcagttcttctgagatctatggcctaattaaaactggagccctggaaggtgtgccaatatctgggtgtttgggggaccaatgtgctgcattagtaggacaaatgtgcttccaggagggacaagccaaaaacacctatggaacaggttgcttcttactgtgtaatacgggtcgtaaatgtgtgttttctgaacatggccttttgaccacagtagcttacaaactaggcagagagaagccagcatattatgcactggaaggttctgttgctatagcaggtgctgttattcgttggctaagagacaatcttggaattatagagacctcaggagacattgaaagacttgctaaagaagtaggaacttcttatggctgttactttgtcccagccttttcagggttatatgcaccttattgggagcccagtgcaagagggatactctgtggcctcactcagtttaccaataaatgtcatattgcttttgctgcattagaagctgtttgtttccaaacccgagagattttggaagccatgaaccgngactgtggaattccacttcgtcatttgcaggtagatggaggaatgaccaacaacaaagttcttatgcagctacaagcagatattcttcatattccagtaataaaaccctttatgcctgaaacaactgcactaggagctgccatggcagcaggggctgcagagggagtaagcgtttggagccttgaaccccaggctttgtcagttctcaggatggaacgatttgaaccacagatccaggccacagaaagtgaaattcgttatgccacatggaagaaagccgtaatgaagtcaatgggttgggttaccagtcagtctcctgaaggtggtgatccttctatcttctctagtctgcctttgggattttttatagtgagtagcatggtaatgctaattggagcaagatatatctcgggtgtgccataataataccagctatggagtcccaagatgtaaacattttacataatgaaagcatatagcagttctgcctcttaatataatgacactattatagactctgattttgtttataaaccacttgctacatgacccatgaaaaccctagacttgtgacctgaaataaagaaaatacgttagaagagcactgtaaaaaaaaaa

SEQ ID NO: 731386 - DNA, 1374 bp, Homo sapiens; identical to SEQ ID NO: 446221

SEQ ID NO: 731387 - DNA, 416 bp, Homo sapiens
tcggtacccgtatctctaacattagaataggatgcactatgatcagtcccaacctccctactacaatgtgacagccatgaatgtaccaattgcagtgtggaacggtggcaaggacctgttggctgacccccaagatgttggccttttgcttccaaaactccccaatcttatttaccacaaggagattcctttttacaatcacttggactttatctgggcaatggatgcccctcaagaagtttacaatgacattgtttctatgatatcagaagataaaaagtagttctggatttaaagaattatccgtttgtttttccaaaatactttattctctcatacatagtattttcataatgtttgacatgcagtgcttctttctgtaattttgactttagaaatatattggcatcaacaaa

SEQ ID NO: 731388 - DNA, 607 bp, Homo sapiens; identical to SEQ ID NO: 446222

SEQ ID NO: 731389 - DNA, 583 bp, Homo sapiens; identical to SEQ ID NO: 446225

SEQ ID NO: 731390 - DNA, 448 bp, Homo sapiens; identical to SEQ ID NO: 446224

SEQ ID NO: 731391 - DNA, 1166 bp, Homo sapiens
  misc_feature (3)..(4): n is a, c, g, or t
  misc_feature (7)..(7): n is a, c, g, or t
  misc_feature (14)..(14): n is a, c, g, or t
  misc_feature (21)..(21): n is a, c, g, or t
  misc_feature (36)..(36): n is a, c, g, or t
gannaanaaaaacngggcgantggggaccgggcccnttttcgacccacgcgtccgcacagagcacatcaaaagttcccaaagagggcttgctctctcttcacctgctctgttctacagcacactaccagaagacagcagaaatgaaaagcatttactttgtggctggattatttgtaatgctggtacaaggcagctggcaacgttcccttcaagacacagaggagaaatccagatcattctcagcttcccaggcagacccactcagtgatcctgatcagatgaacgaggacaagcgccattcacagggcacattcaccagtgactacagcaagtatctggactccaggcgtgcccaagattttgtgcagtggttgatgaataccaagaggaacaggaataacattgccaaacgtcacgatgaatttgagagacatgctgaagggacctttaccagtgatgtaagttcttatttggaaggccaagctgccaaggaattcattgcttggctggtgaaaggccgaggaaggcgagatttcccagaagaggtcgccattgttgaagaacttggccgcagacatgctgatggttctttctctgatgagatgaacaccattcttgataatcttgccgccagggactttataaactggttgattcagaccaaaatcactgacaggaaataactatatcactattcaagatcatcttcacaacatcacctgctagccacgtgggatgtttgaaatgttaagtcctgtaaatttaagaggtgtattctgaggccacattgctttgcatgccaataaataaattttcttttagtgttgtgtagccaaaaattacaaatggaataaagttttatcaaaatattgctaaaatatcagctttaaaatatgaaagtgctagattctgttattttcttcttattttggatgaagtaccccaacctgtttacatttagcgataaaattatttttctatgatataatttgtaaatgtaaattattccgatctgacatatctgcattataataataggagaatagaagaactggtagccacagtggtgaaattggaaagagaactttcttcctgaaacctttgtcttaaaaatactcagctttcaatgtatcaaagatacaattaaataaaattttcaagcttc

SEQ ID NO: 731392 - DNA, 1157 bp, Homo sapiens
cggacgcgtgggcggacgcgttgtggtcggcccacgcgtccgcaaagacagagcacatcaaaagttcccaaagagggcttgctctctcttcacctgctctgttctacagcacactaccagaagacagcagaaatgaaaagcatttactttgtggctggattatttgtaatgctggtacaaggcagctggcaacgttcccttcaagacacagaggagaaatccagatcattctcagcttcccaggcagacccactcagtgatcctgatcagatgaacgaggacaagcgccattcacagggcacattcaccagtgactacagcaagtatctggactccaggcgtgcccaagattttgtgcagtggttgatgaataccaagaggaacaggaataacattgccaaacgtcacgatgaatttgagagacatgctgaagggacctttaccagtgatgtaagttcttatttggaaggccaagctgccaaggaattcattgcttggctggtgaaaggccgaggaaggcgagatttcccagaagaggtcgccattgttgaagaacttggccgcagacatgctgatggttctttctctgatgagatgaacaccattcttgataatcttgccgccagggactttataaactggttgattcagaccaaaatcactgacaggaaataactatatcactattcaagatcatcttcacaacatcacctgctagccacgtgggatgtttgaaatgttaagtcctgtaaatttaagaggtgtattctgaggccacattgctttgcatgccaataaataaattttcttttagtgttgtgtagccaaaaattacaaatggaataaagttttatcaaaatattgctaaaatatcagctttaaaatatgaaagtgctagattctgttattttcttcttattttggatgaagtaccccaacctgtttacatttagcgataaaattatttttctatgatataatttgtaaatgtaaattattccgatctgacatatctgcattataataataggagaatagaagaactggtagccacagtggtgaaattggaaagagaactttcttcctgaaacctttgtcttaaaaatactcagctttcaatgtatcaaagatacaattaaataaaattttcaagcttc

SEQ ID NO: 731393 - DNA, 1090 bp, Homo sapiens
  misc_feature (3)..(4): n is a, c, g, or t
  misc_feature (7)..(7): n is a, c, g, or t
  misc_feature (14)..(14): n is a, c, g, or t
  misc_feature (21)..(21): n is a, c, g, or t
  misc_feature (36)..(36): n is a, c, g, or t
gannaanaaaaacngggcgantggggaccgggcccnttttcgacccacgcgtccgcacagagcacatcaaaagttcccaaagagggcttgctctctcttcacctgctctgttctacagcacactaccagaagacagcagaaatgaaaagcatttactttgtggctggattatttgtaatgctggtacaaggcagctggcaacgttcccttcaagacacagaggagaaatccagatcattctcagcttcccaggcagacccactcagtgatcctgatcagatgaacgaggacaagcgccattcacagggcacattcaccagtgactacagcaagtatctggactccaggcgtgcccaagattttgtgcagtggttgatgaataccaagaggaacaggaataacattgccaaacgtcacgatgaatttgagagacatgctgaagggacctttaccagtgtttcccagaagaggtcgccattgttgaagaacttggccgcagacatgctgatggttctttctctgatgagatgaacaccattcttgataatcttgccgccagggactttataaactggttgattcagaccaaaatcactgacaggaaataactatatcactattcaagatcatcttcacaacatcacctgctagccacgtgggatgtttgaaatgttaagtcctgtaaatttaagaggtgtattctgaggccacattgctttgcatgccaataaataaattttcttttagtgttgtgtagccaaaaattacaaatggaataaagttttatcaaaatattgctaaaatatcagctttaaaatatgaaagtgctagattctgttattttcttcttattttggatgaagtaccccaacctgtttacatttagcgataaaattatttttctatgatataatttgtaaatgtaaattattccgatctgacatatctgcattataataataggagaatagaagaactggtagccacagtggtgaaattggaaagagaactttcttcctgaaacctttgtcttaaaaatactcagctttcaatgtatcaaagatacaattaaataaaattttcaagcttc

SEQ ID NO: 731394 - DNA, 1246 bp, Homo sapiens
gtcatttgtaacaaaaactcattatttacagatgagaaatttatattgtcagcgtaatatctgtgaggctaaacagagctggagagtatataaaagcagtgcgccttggtgcagaagtacagagcttaggacacagacagagcacatcaaaagttcccaaagagggcttgctctctcttcacctgctctgttctacagcacactaccagaagacagcagaaatgaaaagcatttactttgtggctggattatttgtaatgctggtacaaggcagctggcaacgttcccttcaagacacagaggagaaatccagatcattctcagcttcccaggcagacccactcagtgatcctgatcagatgaacgaggacaagcgccattcacagggcacattcaccagtgactacagcaagtatctggactccaggcgtgcccaagattttgtgcagtggttgatgaataccaagaggaacaggaataacattgccaaacgtcacgatgaatttgagagacatgctgaagggacctttaccagtgatgtaagttcttatttggaaggccaagctgccaaggaattcattgcttggctggtgaaaggccgaggaaggcgagatttcccagaagaggtcgccattgttgaagaacttggccgcagacatgctgatggttctttctctgatgagatgaacaccattcttgataatcttgccgccagggactttataaactggttgattcagaccaaaatcactgacaggaaataactatatcactattcaagatcatcttcacaacatcacctgctagccacgtgggatgtttgaaatgttaagtcctgtaaatttaagaggtgtattctgaggccacattgctttgcatgccaataaataaattttcttttagtgttgtgtagccaaaaattacaaatggaataaagttttatcaaaatattgctaaaatatcagctttaaaatatgaaagtgctagattctgttattttcttcttattttggatgaagtaccccaacctgtttacatttagcgataaaattatttttctatgatataatttgtaaatgtaaattattccgatctgacatatctgcattataataataggagaatagaagaactggtagccacagtggtgaaattggaaagagaactttcttcctgaaacctttgtcttaaaaatactcagctttcaatgtatcaaagatacaattaaataaaattttcaagcttc

SEQ ID NO: 731395 - DNA, 765 bp, Homo sapiens
  misc_feature (3)..(4): n is a, c, g, or t
  misc_feature (7)..(7): n is a, c, g, or t
  misc_feature (14)..(14): n is a, c, g, or t
  misc_feature (21)..(21): n is a, c, g, or t
  misc_feature (36)..(36): n is a, c, g, or t
gannaanaaaaacngggcgantggggaccgggcccnttttcgacccacgcgtccgcatgtaagttcttatttggaaggccaagctgccaaggaattcattgcttggctggtgaaaggccgaggaaggcgagatttcccagaagaggtcgccattgttgaagaacttggccgcagacatgctgatggttctttctctgatgagatgaacaccattcttgataatcttgccgccagggactttataaactggttgattcagaccaaaatcactgacaggaaataactatatcactattcaagatcatcttcacaacatcacctgctagccacgtgggatgtttgaaatgttaagtcctgtaaatttaagaggtgtattctgaggccacattgctttgcatgccaataaataaattttcttttagtgttgtgtagccaaaaattacaaatggaataaagttttatcaaaatattgctaaaatatcagctttaaaatatgaaagtgctagattctgttattttcttcttattttggatgaagtaccccaacctgtttacatttagcgataaaattatttttctatgatataatttgtaaatgtaaattattccgatctgacatatctgcattataataataggagaatagaagaactggtagccacagtggtgaaattggaaagagaactttcttcctgaaacctttgtcttaaaaatactcagctttcaatgtatcaaagatacaattaaataaaattttcaagcttc

SEQ ID NO: 731396 - DNA, 1135 bp, Homo sapiens
cggacgcgtgggcggacgcgttgtggtcggcccacgcgtccgcaaagacagagcacatcaaaagttcccaaagagggcttgctctctcttcacctgctctgttctacagcacactaccagaagacagcagaaatgaaaagcatttactttgtggctggattatttgtaatgctggtacaaggcagctggcaacgttcccttcaagacacagaggagaaatccagatcattctcagcttcccaggcagacccactcagtgatcctgatcagatgaacgaggacaagcgccattcacagggcacattcaccagtgactacagcaagtatctggactccaggcgtgcccaagattttgtgcagtggttgatgaataccaagaggaacaggaataacattgccaaacgtcacgatgaatttgagagacatgctgaagggacctttaccagtgatgtaagttcttatttggaaggccaagctgccaaggaattcattgcttggctggtgaaaggccgaggaaggcgagatttcccagaagaggtcgccattgttgaagaacttggccgcagacatgctgatggttctttctctgatgagatgaacaccattcttgataatcttgccgccagggactttataaactggttgattcagaccaaaatcactgacaggaaataactatatcactattcaagatcatcacgtgggatgtttgaaatgttaagtcctgtaaatttaagaggtgtattctgaggccacattgctttgcatgccaataaataaattttcttttagtgttgtgtagccaaaaattacaaatggaataaagttttatcaaaatattgctaaaatatcagctttaaaatatgaaagtgctagattctgttattttcttcttattttggatgaagtaccccaacctgtttacatttagcgataaaattatttttctatgatataatttgtaaatgtaaattattccgatctgacatatctgcattataataataggagaatagaagaactggtagccacagtggtgaaattggaaagagaactttcttcctgaaacctttgtcttaaaaatactcagctttcaatgtatcaaagatacaattaaataaaattttcaagcttc

SEQ ID NO: 731397 - DNA, 1224 bp, Homo sapiens
gtcatttgtaacaaaaactcattatttacagatgagaaatttatattgtcagcgtaatatctgtgaggctaaacagagctggagagtatataaaagcagtgcgccttggtgcagaagtacagagcttaggacacagacagagcacatcaaaagttcccaaagagggcttgctctctcttcacctgctctgttctacagcacactaccagaagacagcagaaatgaaaagcatttactttgtggctggattatttgtaatgctggtacaaggcagctggcaacgttcccttcaagacacagaggagaaatccagatcattctcagcttcccaggcagacccactcagtgatcctgatcagatgaacgaggacaagcgccattcacagggcacattcaccagtgactacagcaagtatctggactccaggcgtgcccaagattttgtgcagtggttgatgaataccaagaggaacaggaataacattgccaaacgtcacgatgaatttgagagacatgctgaagggacctttaccagtgatgtaagttcttatttggaaggccaagctgccaaggaattcattgcttggctggtgaaaggccgaggaaggcgagatttcccagaagaggtcgccattgttgaagaacttggccgcagacatgctgatggttctttctctgatgagatgaacaccattcttgataatcttgccgccagggactttataaactggttgattcagaccaaaatcactgacaggaaataactatatcactattcaagatcatcacgtgggatgtttgaaatgttaagtcctgtaaatttaagaggtgtattctgaggccacattgctttgcatgccaataaataaattttcttttagtgttgtgtagccaaaaattacaaatggaataaagttttatcaaaatattgctaaaatatcagctttaaaatatgaaagtgctagattctgttattttcttcttattttggatgaagtaccccaacctgtttacatttagcgataaaattatttttctatgatataatttgtaaatgtaaattattccgatctgacatatctgcattataataataggagaatagaagaactggtagccacagtggtgaaattggaaagagaactttcttcctgaaacctttgtcttaaaaatactcagctttcaatgtatcaaagatacaattaaataaaattttcaagcttc

SEQ ID NO: 731398 - DNA, 916 bp, Homo sapiens
  misc_feature (3)..(4): n is a, c, g, or t
  misc_feature (7)..(7): n is a, c, g, or t
  misc_feature (14)..(14): n is a, c, g, or t
  misc_feature (21)..(21): n is a, c, g, or t
  misc_feature (36)..(36): n is a, c, g, or t
gannaanaaaaacngggcgantggggaccgggcccnttttcgacccacgcgtccgcggcacattcaccagtgactacagcaagtatctggactccaggcgtgcccaagattttgtgcagtggttgatgaataccaagaggaacaggaataacattgccaaacgtcacgatgaatttgagagacatgctgaagggacctttaccagtgatgtaagttcttatttggaaggccaagctgccaaggaattcattgcttggctggtgaaaggccgaggaaggcgagatttcccagaagaggtcgccattgttgaagaacttggccgcagacatgctgatggttctttctctgatgagatgaacaccattcttgataatcttgccgccagggactttataaactggttgattcagaccaaaatcactgacaggaaataactatatcactattcaagatcatcttcacaacatcacctgctagccacgtgggatgtttgaaatgttaagtcctgtaaatttaagaggtgtattctgaggccacattgctttgcatgccaataaataaattttcttttagtgttgtgtagccaaaaattacaaatggaataaagttttatcaaaatattgctaaaatatcagctttaaaatatgaaagtgctagattctgttattttcttcttattttggatgaagtaccccaacctgtttacatttagcgataaaattatttttctatgatataatttgtaaatgtaaattattccgatctgacatatctgcattataataataggagaatagaagaactggtagccacagtggtgaaattggaaagagaactttcttcctgaaacctttgtcttaaaaatactcagctttcaatgtatcaaagatacaattaaataaaattttcaagcttc

SEQ ID NO: 731399 - DNA, 1144 bp, Homo sapiens
  misc_feature (3)..(4): n is a, c, g, or t
  misc_feature (7)..(7): n is a, c, g, or t
  misc_feature (14)..(14): n is a, c, g, or t
  misc_feature (21)..(21): n is a, c, g, or t
  misc_feature (36)..(36): n is a, c, g, or t
gannaanaaaaacngggcgantggggaccgggcccnttttcgacccacgcgtccgcacagagcacatcaaaagttcccaaagagggcttgctctctcttcacctgctctgttctacagcacactaccagaagacagcagaaatgaaaagcatttactttgtggctggattatttgtaatgctggtacaaggcagctggcaacgttcccttcaagacacagaggagaaatccagatcattctcagcttcccaggcagacccactcagtgatcctgatcagatgaacgaggacaagcgccattcacagggcacattcaccagtgactacagcaagtatctggactccaggcgtgcccaagattttgtgcagtggttgatgaataccaagaggaacaggaataacattgccaaacgtcacgatgaatttgagagacatgctgaagggacctttaccagtgatgtaagttcttatttggaaggccaagctgccaaggaattcattgcttggctggtgaaaggccgaggaaggcgagatttcccagaagaggtcgccattgttgaagaacttggccgcagacatgctgatggttctttctctgatgagatgaacaccattcttgataatcttgccgccagggactttataaactggttgattcagaccaaaatcactgacaggaaataactatatcactattcaagatcatcacgtgggatgtttgaaatgttaagtcctgtaaatttaagaggtgtattctgaggccacattgctttgcatgccaataaataaattttcttttagtgttgtgtagccaaaaattacaaatggaataaagttttatcaaaatattgctaaaatatcagctttaaaatatgaaagtgctagattctgttattttcttcttattttggatgaagtaccccaacctgtttacatttagcgataaaattatttttctatgatataatttgtaaatgtaaattattccgatctgacatatctgcattataataataggagaatagaagaactggtagccacagtggtgaaattggaaagagaactttcttcctgaaacctttgtcttaaaaatactcagctttcaatgtatcaaagatacaattaaataaaattttcaagcttc

SEQ ID NO: 731400 - DNA, 1301 bp, Homo sapiens; identical to SEQ ID NO: 311693

SEQ ID NO: 731401 - DNA, 1123 bp, Homo sapiens; identical to SEQ ID NO: 311694

SEQ ID NO: 731402 - DNA, 1181 bp, Homo sapiens
tatcagccccctgggactccctggccccaacctgccacctcaccaaagctctgagccctgctagccttgaggcgcggaccctcccccatacctcccacagtatcccagcgcctcatgcccccaaccccaagccctgcccttcaccgcccggctgcactggcctctaggactcacagcagccagccccagctaggaacgggcaggacttggggcagctgaagctcacggtgactcagcagtgcccaactgaccaatctcccgcagctctcctgcccctgggggcccacgactcacctggtgggcctgggctcagcaaacagccctccctcccagtatttcatcaaggacagggaatatccctcccacacacaggccagctgctcaccctgccacctccatgtgacaagtttgacacctgtctacccagagccagtgactgtccctcccagcagcctccaaagggtccaaagtccaagctagctctggcctgtgtggcccccacataaataaattagtggggagggggcagacctgggggcccttgggtgccagagtgagacacagcaggacccttccccaaatactaggctcagagcaacctccagccttctccagcaggatctgctccctgtgtccttggacagcagatccacacaccacttccccacccacacacagtaccctgggctggttggacaacaggatggtgtgttaaggggttaagggagggtactgttgacaccagctatggccaatagctgggctgtcctgaggggtggctggggacagagtccagctcccttggatcagcccagaggattcaggataggacaaaggccctggctgtgcccaaaaagggtctacctcaggtggggttacaagcaaacctgggtgaccctcttgtccctaccagcagcttctcttgccccttccattcagggttccctggcaggggaagctgagagccatggctgaactatcagggacaaaggcccatgtccccacatccctgctccctccttcctcatccagcaccaaatctttgcttatgttccacagccagggcctgtgctgcagtcggggacaaggagcttccgtctggcaaggccggggcacaatttgcactcccctcagctagacgcacagactcagcaataaacctttgcatcaggctccagctg

SEQ ID NO: 731403 - DNA, 356 bp, Homo sapiens
caaaagagctaattccctctgagcctcctggagacacctgcaccccttcaggtgaaatgcaaggggtttacccgcctcaaataacccagtgcttgcggtaccagaggctcccacgaggtggcgatgacgctccgggatttcttcattgcagtctcacagcataataaaggctgcctgtgccggggtcttggggactcccctgtcccagaacagttgaggtcgttgagtcccctcgttggcttcctttcttcactttcctggcatttgcaaaccttgtgacttcaggatgtcaggacttaatttggatgggggggtgccggtgagtccgggaagagcaccatcgtcaagcagatgaa

SEQ ID NO: 731404 - DNA, 1013 bp, Homo sapiens
aaagtgtcagctttcaggatgttatgtgtatggctcaataaaattacgtacaaagtgacagcgtactctcttttcatgggctgaccttgtcgtcaccatcacctgaaaatggctccaaacaaaaatgacctaagggttgaaacaagataagatcaaattgacgtcatggtaaaaattgacgtcatggtaattacaccaagtacccttcaatcattggatggaatttcctgttgatcccagggcttagatgcaggtggaaacactctgctggtataaaagcaggtgaggacttcattaactgcagttactgcagttactgagaactcataagacgaagctaaaatccctcttcggatccacagtcaaccgccctgaacacatcctgcaaaaagcccagagaaaggagcgccatggattactacagaaaatatgcagctatctttctggtcacattgtcggtgtttctgcatgttctccattccgctcctgatgtgcaggattgcccagaatgcacgctacaggaaaacccattcttctcccagccgggtgccccaatacttcagtgcatgggctgctgcttctctagagcatatcccactccactaaggtccaagaagacgatgttggtccaaaagaacgtcacctcagagtccacttgctgtgtagctaaatcatataacagggtcacagtaatggggggtttcaaagtggagaaccacacggcgtgccactgcagtacttgttattatcacaaatcttaaatgttttaccaagtgctgtcttgatgactgctgattttctggaatggaaaattaagttgtttagtgtttatggctttgtgagataaaactctccttttccttaccataccactttgacacgcttcaaggatatactgcagctttactgccttcctccttatcctacagtacaatcagcagtctagttcttttcatttggaatgaatacagcatttagcttgttccactgcaaataaagccttttaaatcatc

SEQ ID NO: 731405 - DNA, 1738 bp, Homo sapiens
aaagtgtcagctttcaggatgttatgtgtatggctcaataaaattacgtacaaagtgacagcgtactctcttttcatgggctgaccttgtcgtcaccatcacctgaaaatggctccaaacaaaaatgacctaagggttgaaacaagataagatcaaattgacgtcatggtaaaaattgacgtcatggtaattacaccaagtacccttcaatcattggatggaatttcctgttgatcccagggcttagatgcaggtggaaacactctgctggtataaaagcaggtgaggacttcattaactgcagttactgcagttactgagaactcataagacgaagctaaaatccctcttcggatccacagtcaaccgccctgaacacatcctgcaaaaagcccagagaaaggagcgccatggattactacagaaaatatgcagctatctttctggtcacattgtcggtgtttctgcatgttctccattccgctcctgatgtgcaggattgcccagaatgcacgctacaggaaaacccattcttctcccagccgggtgccccaatacttcagtgcatgggctgctgcttctctagagcatatcccactccactaaggtccaagaagacgatgttggtccaaaagaacgtcacctcagagtccacttgctgtgtagctaaatcatataacagggtcacagtaatggggggtttcaaagtggagaaccacacggcgtgccactgcagtacttgttattatcacaaatcttaaatgttttaccaagtgctgtcttgatgactgctgattttctggaatggaaaattaagttgtttagtgtttatggctttgtgagataaaactctccttttccttaccataccactttgacacgcttcaaggatatactgcagctttactgccttcctccttatcctacagtacaatcagcagtctagttcttttcatttggaatgaatacagcatttagcttgttccactgcaaataaagccttttaaatcatcaaacaaaaacaacaaacaaacaaaaaaaaaaaaacaaaaacaaaaaaaacaaaaaaaaaaaaaaaaaaaaaaaaaatgggggggggggggccggcgcggccagaaagaaattaaacaccgggggggggggggggcccaagaagcaaaccagtgtcacaccatcgtttccccagaaaaacatcggggtgaaagcaaggcgggggggggtcttccccaccaaaaaaaaagcgcgcgcgggggaacacccccagagggtctttcaaacacaccacacgaggaggcccgggcgcacacgggcggggtcccaaaaccagggagcgacccccagagcgggcgccggctaataaaaaatagccacccgcaccgcaggggacaccatcagactcacctgccacagcatcattactatgcaccatcactacacaatcacagtccgggtgcacagcaagagccaccgacaagtacatcatcaacagcagcagacctaagcacaaagcgctacccacacaccacccacacgaacaacaaccaccagcaacccaaccacccaacccagcacgcacaagcaccgacaagccaggaacgcaccaccctagacacgcaaaaaccacaccctagcagacccacaccacgccccaaccccaaccaaccaccacacccccaacttcaccatcaccccacccacgtgccccacggacgaaaagcacaccccagaacctacgaaa

SEQ ID NO: 731406 - DNA, 1153 bp, Homo sapiens
aaagtgtcagctttcaggatgttatgtgtatggctcaataaaattacgtacaaagtgacagcgtactctcttttcatgggctgaccttgtcgtcaccatcacctgaaaatggctccaaacaaaaatgacctaagggttgaaacaagataagatcaaattgacgtcatggtaaaaattgacgtcatggtaattacaccaagtacccttcaatcattggatggaatttcctgttgatcccagggcttagatgcaggtggaaacactctgctggtataaaagcaggtgaggacttcattaactgcagttactgcagttactgagaactcataagacgaagctaaaatccctcttcggatccacagtcaaccgccctgaacacatcctgcaaaaagcccagagaaaggagcgccatggattactacagaaaatatgcagctatctttctggtcacattgtcggtgtttctgcatgttctccattccgctcctgatgtgcaggattgcccagaatgcacgctacaggaaaacccattcttctcccagccgggtgccccaatacttcagtgcatgggctgctgcttctctagagcatatcccactccactaaggtccaagaagacgatgttggtccaaaagaacgtcacctcagagtccacttgctgtgtagctaaatcatataacagggtcacagtaatggggggtttcaaagtggagaaccacacggcgtgccactgcagtacttgttattatcacaaatcttaaatgttttaccaagtgctgtcttgatgactgctgattttctggaatggaaaattaagttgtttagtgtttatggctttgtgagataaaactctccttttccttaccataccactttgacacgcttcaaggatatactgcagctttactgccttcctccttatcctacagtacaatcagcagtctagttcttttcatttggaatgaatacagcatttagcttgttccactgcaaataaagccttttaaatcatccaaaaaaaaaaaacaaaaaatgttggggggcggccgaaaatttaaacatttgggggcggccaagtagaaagggaagggccaagaacgggcaagggtgttcccaaaaccgggggggaaaaaggtggaggtaagaaaagggg

SEQ ID NO: 731407 - DNA, 717 bp, Homo sapiens
gcagttactgagaactcataagacgaagctaaaatccctcttcggatccacagtcaaccgccctgaacacatcctgcaaaaagcccagagaaaggagcgccatggattactacagaaaatatgcagctatctttctggtcacattgtcggtgtttctgcatgttctccattccgctcctgatgtgcaggattgcccagaatgcacgctacaggaaaacccattcttctcccagccgggtgccccaatacttcagtgcatgggctgctgcttctctagagcatatcccactccactaaggtccaagaagacgatgttggtccaaaagaacgtcacctcagagtccacttgctgtgtagctaaatcatataacagggtaagaacctcaagatccccagaagctttctaacagcccaatcagagaaatgttcatagagcccacccatggaatttaatgccaaaggtgtctaatgacccagcctctgtcgagcatttgtacaggtggggaatacatttctacccattaattaaaagagtcaattgtcttgtgggtatagactggatttattcagaatgaggagaataggggtagaggtgacaaggggcaggttgggagaaagtacagcttacttgtgctaaaaatatttcctaaaaaggagactgtgcaaatgtagtatgcatctacttatttcagcagaatgcaaacaattttatgtaat

SEQ ID NO: 731408 - DNA, 1202 bp, Homo sapiens
  misc_feature (1047)..(1049): n is a, c, g, or t
  misc_feature (1052)..(1052): n is a, c, g, or t
  misc_feature (1059)..(1059): n is a, c, g, or t
  misc_feature (1062)..(1062): n is a, c, g, or t
  misc_feature (1064)..(1065): n is a, c, g, or t
  misc_feature (1072)..(1073): n is a, c, g, or t
  misc_feature (1080)..(1080): n is a, c, g, or t
  misc_feature (1085)..(1085): n is a, c, g, or t
  misc_feature (1096)..(1096): n is a, c, g, or t
  misc_feature (1098)..(1098): n is a, c, g, or t
  misc_feature (1106)..(1106): n is a, c, g, or t
  misc_feature (1113)..(1113): n is a, c, g, or t
  misc_feature (1129)..(1130): n is a, c, g, or t
  misc_feature (1133)..(1133): n is a, c, g, or t
  misc_feature (1136)..(1136): n is a, c, g, or t
aaagtgtcagctttcaggatgttatgtgtatggctcaataaaattacgtacaaagtgacagcgtactctcttttcatgggctgaccttgtcgtcaccatcacctgaaaatggctccaaacaaaaatgacctaagggttgaaacaagataagatcaaattgacgtcatggtaaaaattgacgtcatggtaattacaccaagtacccttcaatcattggatggaatttcctgttgatcccagggcttagatgcaggtggaaacactctgctggtataaaagcaggtgaggacttcattaactgcagttactgcagttactgagaactcataagacgaagctaaaatccctcttcggatccacagtcaaccgccctgaacacatcctgcaaaaagcccagagaaaggagcgccatggattactacagaaaatatgcagctatctttctggtcacattgtcggtgtttctgcatgttctccattccgctcctgatgtgcaggattgcccagaatgcacgctacaggaaaacccattcttctcccagccgggtgccccaatacttcagtgcatgggctgctgcttctctagagcatatcccactccactaaggtccaagaagacgatgttggtccaaaagaacgtcacctcagagtccacttgctgtgtagctaaatcatataacagggtcacagtaatggggggtttcaaagtggagaaccacacggcgtgccactgcagtacttgttattatcacaaatcttaaatgttttaccaagtgctgtcttgatgactgctgattttctggaatggaaaattaagttgtttagtgtttatggctttgtgagataaaactctccttttccttaccataccactttgacacgcttcaaggatatactgcagctttactgccttcctccttatcctacagtacaatcagcagtctagttcttttcatttggaatgaatacagcatttagcttgttccactgcaaataaagccttttaaatcatcaatctatgaacaaaaaaacaaaaaaaaaattggnnngcnggcccanaantnnaacattnnggcggcnccagnatgacaggcangncacaaacnggacagnggtcccaaaaccgggnncgncanaccggggcttggtcaggtgacaatccgcgcggtatggcagccccatctcttcctccctcccgctcc

SEQ ID NO: 731409 - DNA, 623 bp, Homo sapiens
gcagttactgagaactcataagacgaagctaaaatccctcttcggatccacagtcaaccgccctgaacacatcctgcaaaaagcccagagaaagattgcccagaatgcacgctacaggaaaacccattcttctcccagccgggtgccccaatacttcagtgcatgggctgctgcttctctagagcatatcccactccactaaggtccaagaagacgatgttggtccaaaagaacgtcacctcagagtccacttgctgtgtagctaaatcatataacagggtcacagtaatggggggtttcaaagtggagaaccacacggcgtgccactgcagtacttgttattatcacaaatcttaaatgttttaccaagtgctgtcttgatgactgctgattttctggaatggaaaattaagttgtttagtgtttatggctttgtgagataaaactctccttttccttaccataccactttgacacgcttcaaggatatactgcagctttactgccttcctccttatcctacagtacaatcagcagtctagttcttttcatttggaatgaatacagcatttagcttgttccactgcaaataaagccttttaaatcatctcattcaatcactg

SEQ ID NO: 731410 - DNA, 1334 bp, Homo sapiens
gcagttactgagaactcataagacgaagctaaaatccctcttcggatccacagtcaaccgccctgaacacatcctgcaaaaagcccagagaaagattgcccagaatgcacgctacaggaaaacccattcttctcccagccgggtgccccaatacttcagtgcatgggctgctgcttctctagagcatatcccactccactaaggtccaagaagacgatgttggtccaaaagaacgtcacctcagagtccacttgctgtgtagctaaatcatataacagggtcacagtaatggggggtttcaaagtggagaaccacacggcgtgccactgcagtacttgttattatcacaaatcttaaatgttttaccaagtgctgtcttgatgactgctgattttctggaatggaaaattaagttgtttagtgtttatggctttgtgagataaaactctccttttccttaccataccactttgacacgcttcaaggatatactgcagctttactgccttcctccttatcctacagtacaatcagcagtctagttcttttcatttggaatgaatacagcatttagcttgttccactgcaaataaagccttttaaatcatcaaacaaaaacaacaaacaaacaaaaaaaaaaaaacaaaaacaaaaaaaacaaaaaaaaaaaaaaaaaaaaaaaaaatgggggggggggggccggcgcggccagaaagaaattaaacaccgggggggggggggggcccaagaagcaaaccagtgtcacaccatcgtttccccagaaaaacatcggggtgaaagcaaggcgggggggggtcttccccaccaaaaaaaaagcgcgcgcgggggaacacccccagagggtctttcaaacacaccacacgaggaggcccgggcgcacacgggcggggtcccaaaaccagggagcgacccccagagcgggcgccggctaataaaaaatagccacccgcaccgcaggggacaccatcagactcacctgccacagcatcattactatgcaccatcactacacaatcacagtccgggtgcacagcaagagccaccgacaagtacatcatcaacagcagcagacctaagcacaaagcgctacccacacaccacccacacgaacaacaaccaccagcaacccaaccacccaacccagcacgcacaagcaccgacaagccaggaacgcaccaccctagacacgcaaaaaccacaccctagcagacccacaccacgccccaaccccaaccaaccaccacacccccaacttcaccatcaccccacccacgtgccccacggacgaaaagcacaccccagaacctacgaaa

SEQ ID NO: 731411 - DNA, 629 bp, Homo sapiens
gcagttactgagaactcataagacgaagctaaaatccctcttcggatccacagtcaaccgccctgaacacatcctgcaaaaagcccagagaaagattgcccagaatgcacgctacaggaaaacccattcttctcccagccgggtgccccaatacttcagtgcatgggctgctgcttctctagagcatatcccactccactaaggtccaagaagacgatgttggtccaaaagaacgtcacctcagagtccacttgctgtgtagctaaatcatataacagggtcacagtaatggggggtttcaaagtggagaaccacacggcgtgccactgcagtacttgttattatcacaaatcttaaatgttttaccaagtgctgtcttgatgactgctgattttctggaatggaaaattaagttgtttagtgtttatggctttgtgagataaaactctccttttccttaccataccactttgacacgcttcaaggatatactgcagctttactgccttcctccttatcctacagtacaatcagcagtctagttcttttcatttggaatgaatacagcatttagcttgttccactgcaaataaagccttttaaatcatccaaaaaaaaaaaacaaaaaa

SEQ ID NO: 731412 - DNA, 609 bp, Homo sapiens
gcagttactgagaactcataagacgaagctaaaatccctcttcggatccacagtcaaccgccctgaacacatcctgcaaaaagcccagagaaagattgcccagaatgcacgctacaggaaaacccattcttctcccagccgggtgccccaatacttcagtgcatgggctgctgcttctctagagcatatcccactccactaaggtccaagaagacgatgttggtccaaaagaacgtcacctcagagtccacttgctgtgtagctaaatcatataacagggtcacagtaatggggggtttcaaagtggagaaccacacggcgtgccactgcagtacttgttattatcacaaatcttaaatgttttaccaagtgctgtcttgatgactgctgattttctggaatggaaaattaagttgtttagtgtttatggctttgtgagataaaactctccttttccttaccataccactttgacacgcttcaaggatatactgcagctttactgccttcctccttatcctacagtacaatcagcagtctagttcttttcatttggaatgaatacagcatttagcttgttccactgcaaataaagccttttaaatcatc

SEQ ID NO: 731413 - DNA, 1027 bp, Homo sapiens
aaagtgtcagctttcaggatgttatgtgtatggctcaataaaattacgtacaaagtgacagcgtactctcttttcatgggctgaccttgtcgtcaccatcacctgaaaatggctccaaacaaaaatgacctaagggttgaaacaagataagatcaaattgacgtcatggtaaaaattgacgtcatggtaattacaccaagtacccttcaatcattggatggaatttcctgttgatcccagggcttagatgcaggtggaaacactctgctggtataaaagcaggtgaggacttcattaactgcagttactgcagttactgagaactcataagacgaagctaaaatccctcttcggatccacagtcaaccgccctgaacacatcctgcaaaaagcccagagaaaggagcgccatggattactacagaaaatatgcagctatctttctggtcacattgtcggtgtttctgcatgttctccattccgctcctgatgtgcaggattgcccagaatgcacgctacaggaaaacccattcttctcccagccgggtgccccaatacttcagtgcatgggctgctgcttctctagagcatatcccactccactaaggtccaagaagacgatgttggtccaaaagaacgtcacctcagagtccacttgctgtgtagctaaatcatataacagggtcacagtaatggggggtttcaaagtggagaaccacacggcgtgccactgcagtacttgttattatcacaaatcttaaatgttttaccaagtgctgtcttgatgactgctgattttctggaatggaaaattaagttgtttagtgtttatggctttgtgagataaaactctccttttccttaccataccactttgacacgcttcaaggatatactgcagctttactgccttcctccttatcctacagtacaatcagcagtctagttcttttcatttggaatgaatacagcatttagcttgttccactgcaaataaagccttttaaatcatctcattcaatcactg

SEQ ID NO: 731414 - DNA, 2319 bp, Homo sapiens
  misc_feature (603)..(603): n is a, c, g, or t
  misc_feature (871)..(871): n is a, c, g, or t
gcagttactgagaactcataagacgaagctaaaatccctcttcggatccacagtcaaccgccctgaacacatcctgcaaaaagcccagagaaaggtaatatgaatgaaataattttgggggactttaattgaggagtaaaatatttgagaatatgaggaagattccaaagtctctgcatataccttaataagaactgagacaggcttttactcattctcttttcagcacttatgattgaattagaaggaagtctgtaaaatttggctgtgatcatagggtaagatgttatctaacagaagccagaaacccaatgtctcctgctgagatgcttgagtgcctgtcaggatctaaaaattttcctcaagaattactgtatgtcattggaaagacgttcttttgagtggcttccaggagccagacagagggcaagtagacattatgatattgttttattatccatttttaagtgatgtatagctatatcttcaagctggcccatgataaagtggttcacttgttcagctgaatgactatagcttctgattatcttttgaatagatgttctcatgcagacttgaatagtagcatggaatttcttgaangtcgttgttttcatttttcttctttaataaaatgctacaaaaatcaaagttggtagtatttctctagctattattcatgaatttgcaatgataagtcacttgcccaagtctaattgattagttccaatgagtttctggaaacttttttgcagctaaccttggttatcttagcattagcattaattggtggctgattgggaaatagacactagaaaataaaagaccttttttgtccctccttattagcgttgaagaataggctatgggnacgtgtgaagaactatgggctgacactatatgggtcccttaggaatgcagaagctccctttcatctctgtagatattttgtttcttaagctcttcaatctttttcccagtcaaaagtcagatattttgctttaggaaaatatcttttaaataattacttgacttaataccaattcaattattcataatattggtcaaccaaattgcatgtaatacattgctatattcttgaattatttaaaaaagacaagagtggtcatcatttataaaaggttcgtggtttttcatgttaatttcaactttggttttcttaagtttattattttttttgcagtaagagtcattgaaattttaagtgagtcatattccttaccatttcctgctgaaaagggtagtgtgtgagaaaaatgttagaaaagcaattaattatgttccagagcagattttcagttgcagtgtacatttctttttaatgtgagacccaaatttacatgaaaactcaaagtaagagctgggtaacagaaatggctaacttagaaggtaatgtacgtcttgcttaaaagcacatcaaagtaatctactttctcaaagagaaaatttacaggagtgaacttacatttcttttgagaacagcatggttcatagcaccaaacttcatttttacaggttgtgaatcctagagtagtttgctatcaacttctgatctttgcacattctggatttggcatataatgttacagcagtgccattgtaatgttgcacaaagtagtctagcaatttcttggttcaccaggcttagagataacattgtagaaatgatccagcatctttaacactctgtggtttaaggtggggcacttaggggtagaatcaataacaatgttagaaatcaaattagacaagataactgaaacagcatgatccatgtgtgactccaagttataaaggaggacatggattaatggtatacttctaggctataggggtagtacaagtggaaggacaccatcttagcatcagatcactttctgagcaactttggcaaatcttttaaattctctaatgtgtagttttttaatatatgacacaggtgtaaagaaaataaagcaagtgaatgtatgtgaaagccaatgctgactgggcacgggggctcacgcctgaaattctagcactttgggaggcagagccggggatatcacttgagcccaggagttgaagatcagcctgggcaacatagagaaaccctgtctctacaaacaaaacaaaacaaaaaaacaaacacaaaaaaccactcccaaattagccgggcttgctggcacactcctgttgtcccagttacccgggaggctaagatgggaggatcacctgagcttgggaagttgagactgtaatgagccgtgatagtggcactacactccagcctgatccacagagtgagaccatgtctca

SEQ ID NO: 731415 - DNA, 1366 bp, Homo sapiens
gcagttactgagaactcataagacgaagctaaaatccctcttcggatccacagtcaaccgccctgaacacatcctgcaaaaagcccagagaaagattgcccagaatgcacgctacaggaaaacccattcttctcccagccgggtgccccaatacttcagtgcatgggctgctgcttctctagagcatatcccactccactaaggtccaagaagacgatgttggtccaaaagaacgtcacctcagagtccacttgctgtgtagctaaatcatataacagggtcacagtaatggggggtttcaaagtggagaaccacacggcgtgccactgcagtacttgttattatcacaaatcttaaatgttttaccaagtgctgtcttgatgactgctgattttctggaatggaaaattaagttgtttagtgtttatggctttgtgagataaaactctccttttccttaccataccactttgacacgcttcaaggatatactgcagctttactgccttcctccttatcctacagtacaatcagcagtctagttcttttcatttggaatgaatacagcatttagcttgttccactgcaaataaagccttttaaatcatcgcaaaaaaaaaaaaaaaaaaaaaaaaaaaaaaaaacaaaaacaacaaacaaacaaaaaaaaaaaaacaaaaacaaaaaaaacaaaaaaaaaaaaaaaaaaaaaaaaaatgggggggggggggccggcgcggccagaaagaaattaaacaccgggggggggggggggcccaagaagcaaaccagtgtcacaccatcgtttccccagaaaaacatcggggtgaaagcaaggcgggggggggtcttccccaccaaaaaaaaagcgcgcgcgggggaacacccccagagggtctttcaaacacaccacacgaggaggcccgggcgcacacgggcggggtcccaaaaccagggagcgacccccagagcgggcgccggctaataaaaaatagccacccgcaccgcaggggacaccatcagactcacctgccacagcatcattactatgcaccatcactacacaatcacagtccgggtgcacagcaagagccaccgacaagtacatcatcaacagcagcagacctaagcacaaagcgctacccacacaccacccacacgaacaacaaccaccagcaacccaaccacccaacccagcacgcacaagcaccgacaagccaggaacgcaccaccctagacacgcaaaaaccacaccctagcagacccacaccacgccccaaccccaaccaaccaccacacccccaacttcaccatcaccccacccacgtgccccacggacgaaaagcacaccccagaacctacgaaa

SEQ ID NO: 731416 - DNA, 811 bp, Homo sapiens
gcagttactgagaactcataagacgaagctaaaatccctcttcggatccacagtcaaccgccctgaacacatcctgcaaaaagcccagagaaaggagcgccatggattactacagaaaatatgcagctatctttctggtcacattgtcggtgtttctgcatgttctccattccgctcctgatgtgcaggagacagggtttcaccatgttgcccaggctgctctcaaactcctgagctcaagcaatccacccactaaggcctcccaaagtgctaggattacagattgcccagaatgcacgctacaggaaaacccattcttctcccagccgggtgccccaatacttcagtgcatgggctgctgcttctctagagcatatcccactccactaaggtccaagaagacgatgttggtccaaaagaacgtcacctcagagtccacttgctgtgtagctaaatcatataacagggtcacagtaatggggggtttcaaagtggagaaccacacggcgtgccactgcagtacttgttattatcacaaatcttaaatgttttaccaagtgctgtcttgatgactgctgattttctggaatggaaaattaagttgtttagtgtttatggctttgtgagataaaactctccttttccttaccataccactttgacacgcttcaaggatatactgcagctttactgccttcctccttatcctacagtacaatcagcagtctagttcttttcatttggaatgaatacagcatttagcttgttccactgcaaataaagccttttaaatcatctcattcaatcactg

SEQ ID NO: 731417 - DNA, 1522 bp, Homo sapiens
gcagttactgagaactcataagacgaagctaaaatccctcttcggatccacagtcaaccgccctgaacacatcctgcaaaaagcccagagaaaggagcgccatggattactacagaaaatatgcagctatctttctggtcacattgtcggtgtttctgcatgttctccattccgctcctgatgtgcaggagacagggtttcaccatgttgcccaggctgctctcaaactcctgagctcaagcaatccacccactaaggcctcccaaagtgctaggattacagattgcccagaatgcacgctacaggaaaacccattcttctcccagccgggtgccccaatacttcagtgcatgggctgctgcttctctagagcatatcccactccactaaggtccaagaagacgatgttggtccaaaagaacgtcacctcagagtccacttgctgtgtagctaaatcatataacagggtcacagtaatggggggtttcaaagtggagaaccacacggcgtgccactgcagtacttgttattatcacaaatcttaaatgttttaccaagtgctgtcttgatgactgctgattttctggaatggaaaattaagttgtttagtgtttatggctttgtgagataaaactctccttttccttaccataccactttgacacgcttcaaggatatactgcagctttactgccttcctccttatcctacagtacaatcagcagtctagttcttttcatttggaatgaatacagcatttagcttgttccactgcaaataaagccttttaaatcatcaaacaaaaacaacaaacaaacaaaaaaaaaaaaacaaaaacaaaaaaaacaaaaaaaaaaaaaaaaaaaaaaaaaatgggggggggggggccggcgcggccagaaagaaattaaacaccgggggggggggggggcccaagaagcaaaccagtgtcacaccatcgtttccccagaaaaacatcggggtgaaagcaaggcgggggggggtcttccccaccaaaaaaaaagcgcgcgcgggggaacacccccagagggtctttcaaacacaccacacgaggaggcccgggcgcacacgggcggggtcccaaaaccagggagcgacccccagagcgggcgccggctaataaaaaatagccacccgcaccgcaggggacaccatcagactcacctgccacagcatcattactatgcaccatcactacacaatcacagtccgggtgcacagcaagagccaccgacaagtacatcatcaacagcagcagacctaagcacaaagcgctacccacacaccacccacacgaacaacaaccaccagcaacccaaccacccaacccagcacgcacaagcaccgacaagccaggaacgcaccaccctagacacgcaaaaaccacaccctagcagacccacaccacgccccaaccccaaccaaccaccacacccccaacttcaccatcaccccacccacgtgccccacggacgaaaagcacaccccagaacctacgaaa

SEQ ID NO: 731418 - DNA, 817 bp, Homo sapiens
gcagttactgagaactcataagacgaagctaaaatccctcttcggatccacagtcaaccgccctgaacacatcctgcaaaaagcccagagaaaggagcgccatggattactacagaaaatatgcagctatctttctggtcacattgtcggtgtttctgcatgttctccattccgctcctgatgtgcaggagacagggtttcaccatgttgcccaggctgctctcaaactcctgagctcaagcaatccacccactaaggcctcccaaagtgctaggattacagattgcccagaatgcacgctacaggaaaacccattcttctcccagccgggtgccccaatacttcagtgcatgggctgctgcttctctagagcatatcccactccactaaggtccaagaagacgatgttggtccaaaagaacgtcacctcagagtccacttgctgtgtagctaaatcatataacagggtcacagtaatggggggtttcaaagtggagaaccacacggcgtgccactgcagtacttgttattatcacaaatcttaaatgttttaccaagtgctgtcttgatgactgctgattttctggaatggaaaattaagttgtttagtgtttatggctttgtgagataaaactctccttttccttaccataccactttgacacgcttcaaggatatactgcagctttactgccttcctccttatcctacagtacaatcagcagtctagttcttttcatttggaatgaatacagcatttagcttgttccactgcaaataaagccttttaaatcatccaaaaaaaaaaaacaaaaaa

SEQ ID NO: 731419 - DNA, 1554 bp, Homo sapiens
gcagttactgagaactcataagacgaagctaaaatccctcttcggatccacagtcaaccgccctgaacacatcctgcaaaaagcccagagaaaggagcgccatggattactacagaaaatatgcagctatctttctggtcacattgtcggtgtttctgcatgttctccattccgctcctgatgtgcaggagacagggtttcaccatgttgcccaggctgctctcaaactcctgagctcaagcaatccacccactaaggcctcccaaagtgctaggattacagattgcccagaatgcacgctacaggaaaacccattcttctcccagccgggtgccccaatacttcagtgcatgggctgctgcttctctagagcatatcccactccactaaggtccaagaagacgatgttggtccaaaagaacgtcacctcagagtccacttgctgtgtagctaaatcatataacagggtcacagtaatggggggtttcaaagtggagaaccacacggcgtgccactgcagtacttgttattatcacaaatcttaaatgttttaccaagtgctgtcttgatgactgctgattttctggaatggaaaattaagttgtttagtgtttatggctttgtgagataaaactctccttttccttaccataccactttgacacgcttcaaggatatactgcagctttactgccttcctccttatcctacagtacaatcagcagtctagttcttttcatttggaatgaatacagcatttagcttgttccactgcaaataaagccttttaaatcatcgcaaaaaaaaaaaaaaaaaaaaaaaaaaaaaaaaacaaaaacaacaaacaaacaaaaaaaaaaaaacaaaaacaaaaaaaacaaaaaaaaaaaaaaaaaaaaaaaaaatgggggggggggggccggcgcggccagaaagaaattaaacaccgggggggggggggggcccaagaagcaaaccagtgtcacaccatcgtttccccagaaaaacatcggggtgaaagcaaggcgggggggggtcttccccaccaaaaaaaaagcgcgcgcgggggaacacccccagagggtctttcaaacacaccacacgaggaggcccgggcgcacacgggcggggtcccaaaaccagggagcgacccccagagcgggcgccggctaataaaaaatagccacccgcaccgcaggggacaccatcagactcacctgccacagcatcattactatgcaccatcactacacaatcacagtccgggtgcacagcaagagccaccgacaagtacatcatcaacagcagcagacctaagcacaaagcgctacccacacaccacccacacgaacaacaaccaccagcaacccaaccacccaacccagcacgcacaagcaccgacaagccaggaacgcaccaccctagacacgcaaaaaccacaccctagcagacccacaccacgccccaaccccaaccaaccaccacacccccaacttcaccatcaccccacccacgtgccccacggacgaaaagcacaccccagaacctacgaaa

SEQ ID NO: 731420 - DNA, 797 bp, Homo sapiens
gcagttactgagaactcataagacgaagctaaaatccctcttcggatccacagtcaaccgccctgaacacatcctgcaaaaagcccagagaaaggagcgccatggattactacagaaaatatgcagctatctttctggtcacattgtcggtgtttctgcatgttctccattccgctcctgatgtgcaggagacagggtttcaccatgttgcccaggctgctctcaaactcctgagctcaagcaatccacccactaaggcctcccaaagtgctaggattacagattgcccagaatgcacgctacaggaaaacccattcttctcccagccgggtgccccaatacttcagtgcatgggctgctgcttctctagagcatatcccactccactaaggtccaagaagacgatgttggtccaaaagaacgtcacctcagagtccacttgctgtgtagctaaatcatataacagggtcacagtaatggggggtttcaaagtggagaaccacacggcgtgccactgcagtacttgttattatcacaaatcttaaatgttttaccaagtgctgtcttgatgactgctgattttctggaatggaaaattaagttgtttagtgtttatggctttgtgagataaaactctccttttccttaccataccactttgacacgcttcaaggatatactgcagctttactgccttcctccttatcctacagtacaatcagcagtctagttcttttcatttggaatgaatacagcatttagcttgttccactgcaaataaagccttttaaatcatc

SEQ ID NO: 731421 - DNA, 1770 bp, Homo sapiens
aaagtgtcagctttcaggatgttatgtgtatggctcaataaaattacgtacaaagtgacagcgtactctcttttcatgggctgaccttgtcgtcaccatcacctgaaaatggctccaaacaaaaatgacctaagggttgaaacaagataagatcaaattgacgtcatggtaaaaattgacgtcatggtaattacaccaagtacccttcaatcattggatggaatttcctgttgatcccagggcttagatgcaggtggaaacactctgctggtataaaagcaggtgaggacttcattaactgcagttactgcagttactgagaactcataagacgaagctaaaatccctcttcggatccacagtcaaccgccctgaacacatcctgcaaaaagcccagagaaaggagcgccatggattactacagaaaatatgcagctatctttctggtcacattgtcggtgtttctgcatgttctccattccgctcctgatgtgcaggattgcccagaatgcacgctacaggaaaacccattcttctcccagccgggtgccccaatacttcagtgcatgggctgctgcttctctagagcatatcccactccactaaggtccaagaagacgatgttggtccaaaagaacgtcacctcagagtccacttgctgtgtagctaaatcatataacagggtcacagtaatggggggtttcaaagtggagaaccacacggcgtgccactgcagtacttgttattatcacaaatcttaaatgttttaccaagtgctgtcttgatgactgctgattttctggaatggaaaattaagttgtttagtgtttatggctttgtgagataaaactctccttttccttaccataccactttgacacgcttcaaggatatactgcagctttactgccttcctccttatcctacagtacaatcagcagtctagttcttttcatttggaatgaatacagcatttagcttgttccactgcaaataaagccttttaaatcatcgcaaaaaaaaaaaaaaaaaaaaaaaaaaaaaaaaacaaaaacaacaaacaaacaaaaaaaaaaaaacaaaaacaaaaaaaacaaaaaaaaaaaaaaaaaaaaaaaaaatgggggggggggggccggcgcggccagaaagaaattaaacaccgggggggggggggggcccaagaagcaaaccagtgtcacaccatcgtttccccagaaaaacatcggggtgaaagcaaggcgggggggggtcttccccaccaaaaaaaaagcgcgcgcgggggaacacccccagagggtctttcaaacacaccacacgaggaggcccgggcgcacacgggcggggtcccaaaaccagggagcgacccccagagcgggcgccggctaataaaaaatagccacccgcaccgcaggggacaccatcagactcacctgccacagcatcattactatgcaccatcactacacaatcacagtccgggtgcacagcaagagccaccgacaagtacatcatcaacagcagcagacctaagcacaaagcgctacccacacaccacccacacgaacaacaaccaccagcaacccaaccacccaacccagcacgcacaagcaccgacaagccaggaacgcaccaccctagacacgcaaaaaccacaccctagcagacccacaccacgccccaaccccaaccaaccaccacacccccaacttcaccatcaccccacccacgtgccccacggacgaaaagcacaccccagaacctacgaaa

SEQ ID NO: 731422 - DNA, 845 bp, Homo sapiens
aaagtgtcagctttcaggatgttatgtgtatggctcaataaaattacgtacaaagtgacagcgtactctcttttcatgggctgaccttgtcgtcaccatcacctgaaaatggctccaaacaaaaatgacctaagggttgaaacaagataagatcaaattgacgtcatggtaaaaattgacgtcatggtaattacaccaagtacccttcaatcattggatggaatttcctgttgatcccagggcttagatgcaggtggaaacactctgctggtataaaagcaggtgaggacttcattaactgcagttactgcagttactgagaactcataagacgaagctaaaatccctcttcggatccacagtcaaccgccctgaacacatcctgcaaaaagcccagagaaaggagcgccatggattactacagaaaatatgcagctatctttctggtcacattgtcggtgtttctgcatgttctccattccgctcctgatgtgcaggattgcccagaatgcacgctacaggaaaacccattcttctcccagccgggtgccccaatacttcagtgcatgggctgctgcttctctagagcatatcccactccactaaggtccaagaagacgatgttggtccaaaagaacgtcacctcagagtccacttgctgtgtagctaaatcatataacagggtcacagtaatggggggtttcaaagtggagaaccacacggcgtgccactgcagtacttgttattatcacaaatcttaaatgttttaccaagtgctgtcttgatgactgctgattttctggaatggaaaattaagttgtttagcaaaaaaaaaaaacaaaaaa

SEQ ID NO: 731423 - DNA, 552 bp, Homo sapiens
gcagttactgagaactcataagacgaagctaaaatccctcttcggatccacagtcaaccgccctgaacacatcctgcaaaaagcccagagaaagattgcccagaatgcacgctacaggaaaacccattatatcccactccactaaggtccaagaagacgatgttggtccaaaagaacgtcacctcagagtccacttgctgtgtagctaaatcatataacagggtcacagtaatggggggtttcaaagtggagaaccacacggcgtgccactgcagtacttgttattatcacaaatcttaaatgttttaccaagtgctgtcttgatgactgctgattttctggaatggaaaattaagttgtttagtgtttatggctttgtgagataaaactctccttttccttaccataccactttgacacgcttcaaggatatactgcagctttactgccttcctccttatcctacagtacaatcagcagtctagttcttttcatttggaatgaatacagcatttagcttgttccactgcaaataaagccttttaaatcatc

SEQ ID NO: 731424 - DNA, 1017 bp, Homo sapiens
gcagttactgagaactcataagacgaagctaaaatccctcttcggatccacagtcaaccgccctgaacacatcctgcaaaaagcccagagaaagtgttatataaatggaatcatatagtattcagcctgcattcagcacaattctcttgagatccattcaagctgctgtgtgtatcaatagtgtgttcatttttttgttgctggacagtattccatggtatggctataccatcatttgtatgaccattcaccttctgatggacatttgaaatgtttccaatttttggctactctaaacaaagtttctatgaatatttatatataagttttgtgtgaacatagtcttcatttctctgagataaatgcccaaaagtgcaactgttggggcatatggagcgccatggattactacagaaaatatgcagctatctttctggtcacattgtcggtgtttctgcatgttctccattccgctcctgatgtgcaggattgcccagaatgcacgctacaggaaaacccattcttctcccagccgggtgccccaatacttcagtgcatgggctgctgcttctctagagcatatcccactccactaaggtccaagaagacgatgttggtccaaaagaacgtcacctcagagtccacttgctgtgtagctaaatcatataacagggtcacagtaatggggggtttcaaagtggagaaccacacggcgtgccactgcagtacttgttattatcacaaatcttaaatgttttaccaagtgctgtcttgatgactgctgattttctggaatggaaaattaagttgtttagtgtttatggctttgtgagataaaactctccttttccttaccataccactttgacacgcttcaaggatatactgcagctttactgccttcctccttatcctacagtacaatcagcagtctagttcttttcatttggaatgaatacagcatttagcttgttccactgcaaataaagccttttaaatcatctcattcaatcactg

SEQ ID NO: 731425 - DNA, 1728 bp, Homo sapiens
gcagttactgagaactcataagacgaagctaaaatccctcttcggatccacagtcaaccgccctgaacacatcctgcaaaaagcccagagaaagtgttatataaatggaatcatatagtattcagcctgcattcagcacaattctcttgagatccattcaagctgctgtgtgtatcaatagtgtgttcatttttttgttgctggacagtattccatggtatggctataccatcatttgtatgaccattcaccttctgatggacatttgaaatgtttccaatttttggctactctaaacaaagtttctatgaatatttatatataagttttgtgtgaacatagtcttcatttctctgagataaatgcccaaaagtgcaactgttggggcatatggagcgccatggattactacagaaaatatgcagctatctttctggtcacattgtcggtgtttctgcatgttctccattccgctcctgatgtgcaggattgcccagaatgcacgctacaggaaaacccattcttctcccagccgggtgccccaatacttcagtgcatgggctgctgcttctctagagcatatcccactccactaaggtccaagaagacgatgttggtccaaaagaacgtcacctcagagtccacttgctgtgtagctaaatcatataacagggtcacagtaatggggggtttcaaagtggagaaccacacggcgtgccactgcagtacttgttattatcacaaatcttaaatgttttaccaagtgctgtcttgatgactgctgattttctggaatggaaaattaagttgtttagtgtttatggctttgtgagataaaactctccttttccttaccataccactttgacacgcttcaaggatatactgcagctttactgccttcctccttatcctacagtacaatcagcagtctagttcttttcatttggaatgaatacagcatttagcttgttccactgcaaataaagccttttaaatcatcaaacaaaaacaacaaacaaacaaaaaaaaaaaaacaaaaacaaaaaaaacaaaaaaaaaaaaaaaaaaaaaaaaaatgggggggggggggccggcgcggccagaaagaaattaaacaccgggggggggggggggcccaagaagcaaaccagtgtcacaccatcgtttccccagaaaaacatcggggtgaaagcaaggcgggggggggtcttccccaccaaaaaaaaagcgcgcgcgggggaacacccccagagggtctttcaaacacaccacacgaggaggcccgggcgcacacgggcggggtcccaaaaccagggagcgacccccagagcgggcgccggctaataaaaaatagccacccgcaccgcaggggacaccatcagactcacctgccacagcatcattactatgcaccatcactacacaatcacagtccgggtgcacagcaagagccaccgacaagtacatcatcaacagcagcagacctaagcacaaagcgctacccacacaccacccacacgaacaacaaccaccagcaacccaaccacccaacccagcacgcacaagcaccgacaagccaggaacgcaccaccctagacacgcaaaaaccacaccctagcagacccacaccacgccccaaccccaaccaaccaccacacccccaacttcaccatcaccccacccacgtgccccacggacgaaaagcacaccccagaacctacgaaa

SEQ ID NO: 731426 - DNA, 1023 bp, Homo sapiens
gcagttactgagaactcataagacgaagctaaaatccctcttcggatccacagtcaaccgccctgaacacatcctgcaaaaagcccagagaaagtgttatataaatggaatcatatagtattcagcctgcattcagcacaattctcttgagatccattcaagctgctgtgtgtatcaatagtgtgttcatttttttgttgctggacagtattccatggtatggctataccatcatttgtatgaccattcaccttctgatggacatttgaaatgtttccaatttttggctactctaaacaaagtttctatgaatatttatatataagttttgtgtgaacatagtcttcatttctctgagataaatgcccaaaagtgcaactgttggggcatatggagcgccatggattactacagaaaatatgcagctatctttctggtcacattgtcggtgtttctgcatgttctccattccgctcctgatgtgcaggattgcccagaatgcacgctacaggaaaacccattcttctcccagccgggtgccccaatacttcagtgcatgggctgctgcttctctagagcatatcccactccactaaggtccaagaagacgatgttggtccaaaagaacgtcacctcagagtccacttgctgtgtagctaaatcatataacagggtcacagtaatggggggtttcaaagtggagaaccacacggcgtgccactgcagtacttgttattatcacaaatcttaaatgttttaccaagtgctgtcttgatgactgctgattttctggaatggaaaattaagttgtttagtgtttatggctttgtgagataaaactctccttttccttaccataccactttgacacgcttcaaggatatactgcagctttactgccttcctccttatcctacagtacaatcagcagtctagttcttttcatttggaatgaatacagcatttagcttgttccactgcaaataaagccttttaaatcatccaaaaaaaaaaaacaaaaaa

SEQ ID NO: 731427 - DNA, 1760 bp, Homo sapiens
gcagttactgagaactcataagacgaagctaaaatccctcttcggatccacagtcaaccgccctgaacacatcctgcaaaaagcccagagaaagtgttatataaatggaatcatatagtattcagcctgcattcagcacaattctcttgagatccattcaagctgctgtgtgtatcaatagtgtgttcatttttttgttgctggacagtattccatggtatggctataccatcatttgtatgaccattcaccttctgatggacatttgaaatgtttccaatttttggctactctaaacaaagtttctatgaatatttatatataagttttgtgtgaacatagtcttcatttctctgagataaatgcccaaaagtgcaactgttggggcatatggagcgccatggattactacagaaaatatgcagctatctttctggtcacattgtcggtgtttctgcatgttctccattccgctcctgatgtgcaggattgcccagaatgcacgctacaggaaaacccattcttctcccagccgggtgccccaatacttcagtgcatgggctgctgcttctctagagcatatcccactccactaaggtccaagaagacgatgttggtccaaaagaacgtcacctcagagtccacttgctgtgtagctaaatcatataacagggtcacagtaatggggggtttcaaagtggagaaccacacggcgtgccactgcagtacttgttattatcacaaatcttaaatgttttaccaagtgctgtcttgatgactgctgattttctggaatggaaaattaagttgtttagtgtttatggctttgtgagataaaactctccttttccttaccataccactttgacacgcttcaaggatatactgcagctttactgccttcctccttatcctacagtacaatcagcagtctagttcttttcatttggaatgaatacagcatttagcttgttccactgcaaataaagccttttaaatcatcgcaaaaaaaaaaaaaaaaaaaaaaaaaaaaaaaaacaaaaacaacaaacaaacaaaaaaaaaaaaacaaaaacaaaaaaaacaaaaaaaaaaaaaaaaaaaaaaaaaatgggggggggggggccggcgcggccagaaagaaattaaacaccgggggggggggggggcccaagaagcaaaccagtgtcacaccatcgtttccccagaaaaacatcggggtgaaagcaaggcgggggggggtcttccccaccaaaaaaaaagcgcgcgcgggggaacacccccagagggtctttcaaacacaccacacgaggaggcccgggcgcacacgggcggggtcccaaaaccagggagcgacccccagagcgggcgccggctaataaaaaatagccacccgcaccgcaggggacaccatcagactcacctgccacagcatcattactatgcaccatcactacacaatcacagtccgggtgcacagcaagagccaccgacaagtacatcatcaacagcagcagacctaagcacaaagcgctacccacacaccacccacacgaacaacaaccaccagcaacccaaccacccaacccagcacgcacaagcaccgacaagccaggaacgcaccaccctagacacgcaaaaaccacaccctagcagacccacaccacgccccaaccccaaccaaccaccacacccccaacttcaccatcaccccacccacgtgccccacggacgaaaagcacaccccagaacctacgaaa

SEQ ID NO: 731428 - DNA, 1003 bp, Homo sapiens
gcagttactgagaactcataagacgaagctaaaatccctcttcggatccacagtcaaccgccctgaacacatcctgcaaaaagcccagagaaagtgttatataaatggaatcatatagtattcagcctgcattcagcacaattctcttgagatccattcaagctgctgtgtgtatcaatagtgtgttcatttttttgttgctggacagtattccatggtatggctataccatcatttgtatgaccattcaccttctgatggacatttgaaatgtttccaatttttggctactctaaacaaagtttctatgaatatttatatataagttttgtgtgaacatagtcttcatttctctgagataaatgcccaaaagtgcaactgttggggcatatggagcgccatggattactacagaaaatatgcagctatctttctggtcacattgtcggtgtttctgcatgttctccattccgctcctgatgtgcaggattgcccagaatgcacgctacaggaaaacccattcttctcccagccgggtgccccaatacttcagtgcatgggctgctgcttctctagagcatatcccactccactaaggtccaagaagacgatgttggtccaaaagaacgtcacctcagagtccacttgctgtgtagctaaatcatataacagggtcacagtaatggggggtttcaaagtggagaaccacacggcgtgccactgcagtacttgttattatcacaaatcttaaatgttttaccaagtgctgtcttgatgactgctgattttctggaatggaaaattaagttgtttagtgtttatggctttgtgagataaaactctccttttccttaccataccactttgacacgcttcaaggatatactgcagctttactgccttcctccttatcctacagtacaatcagcagtctagttcttttcatttggaatgaatacagcatttagcttgttccactgcaaataaagccttttaaatcatc

SEQ ID NO: 731429 - DNA, 1016 bp, Homo sapiens
gcagttactgagaactcataagacgaagctaaaatccctcttcggatccacagtcaaccgccctgaacacatcctgcaaaaagcccagagaaagtgttatataaatggaatcatatagtattcagcctgcattcagcacaattctcttgagatccattcaagctgctgtgtgtatcaatagtgtgttcatttttttgttgctggacagtattccatggtatggctataccatcatttgtatgaccattcaccttctgatggacatttgaaatgtttccaatttttggctactctaaacaaagtttctatgaatatttatatataagttttgtgtgaacatagtcttcatttctctgagataaatgcccaaaagtgcaactgttggggcatatggagcgccatggattactacagaaaatatgcagctatctttctggtcacattgtcggtgtttctgcatgttctccattccgctcctgatgtgcaggattgcccagaatgcacgctacaggaaaacccattcttctcccagccgggtgccccaatacttcagtgcatgggctgctgcttctctagagcatatcccactccactaaggtccaagaagacgatgttggtccaaaagaacgtcacctcagagtccacttgctgtgtagctaaatcatataacagggtaagaacctcaagatccccagaagctttctaacagcccaatcagagaaatgttcatagagcccacccatggaatttaatgccaaaggtgtctaatgacccagcctctgtcgagcatttgtacaggtggggaatacatttctacccattaattaaaagagtcaattgtcttgtgggtatagactggatttattcagaatgaggagaataggggtagaggtgacaaggggcaggttgggagaaagtacagcttacttgtgctaaaaatatttcctaaaaaggagactgtgcaaatgtagtatgcatctacttatttcagcagaatgcaaacaattttatgtaat

SEQ ID NO: 731430 - DNA, 1600 bp, Homo sapiens; identical to SEQ ID NO: 451814

SEQ ID NO: 731431 - DNA, 1620 bp, Homo sapiens; identical to SEQ ID NO: 451805

SEQ ID NO: 731432 - DNA, 1566 bp, Homo sapiens; identical to SEQ ID NO: 451806

SEQ ID NO: 731433 - DNA, 1499 bp, Homo sapiens
aactctatatagggagttcaactggtcacccagagctgtcctgtggcctctgcagctcagcatggctagggtactgggagcacccgttgcactggggttgtggagcctatgctggtctctggccattgccacccctcttcctccgactagtgcccatgggaatgttgctgaaggcgagaccaagccagacccagacgtgactgaacgctgctcagatggctggagctttgatgctaccaccctggatgacaatggaaccatgctgttttttaaaggggagtttgtgtggaagagtcacaaatgggaccgggagttaatctcagagagatggaagaatttccccagccctgtggatgctgcattccgtcaaggtcacaacagtgtctttctgatcaagggggacaaagtctgggtataccctcctgcatccccactggatgcagctgtggaatgtcaccgtggagaatgtcaagctgaaggcgtcctcttcttccaaggtgaccgcgagtggttctgggacttggctacgggaaccatgaaggagcgttcctggccagctgttgggaactgctcctctgccctgagatggctgggccgctactactgcttccagggtaaccaattcctgcgcttcgaccctgtcaggggagaggtgcctcccaggtacccgcgggatgtccgagactacttcatgccctgccctggcagaggccatggacacaggaatgggactggccatgggaacagtacccaccatggccctgagtatatgcgctgtagcccacatctagtcttgtctgcactgacgtctgacaaccatggtgccacctatgccttcagtgggacccactactggcgtctggacaccagccgggatggctggcatagctggcccattgctcatcagtggccccagggtccttcagcagtggatgctgccttttcctgggaagaaaaactctatctggtccagggcacccaggtatatgtcttcctgacaaagggaggctataccctagtaagcggttatccgaagcggctggagaaggaagtcgggacccctcatgggattatcctggactctgtggatgcggcctttatctgccctgggtcttctcggctccatatcatggcaggacggcggctgtggtggctggacctgaagtcaggagcccaagccacgtggacagagcttccttggccccatgagaaggtagacggatccatggtcccaatttgtactgctacagtgatgtggagaaactgaatgcagccaaggcccttccgcaaccccagaatgtgaccagtctcctgggctgcactcactgaggggccttctgacatgagtctggcctggccccacctcctagttcctcataataaagacagattgcttcttcgcttctcactgaggggccttctgacatgagtctggcctggccccacctccccagtttctcataataaagacagattgcttcttcacttgaatcaaggga

SEQ ID NO: 731434 - DNA, 1553 bp, Homo sapiens
aactctatatagggagttcaactggtcacccagagctgtcctgtggcctctgcagctcagcatggctagggtactgggagcacccgttgcactggggttgtggagcctatgctggtctctggccattgccacccctcttcctccgactagtgcccatgggaatgttgctgaaggcgagaccaagccagacccagacgtgactgaacgctgctcagatggctggagctttgatgctaccaccctggatgacaatggaaccatgctgttttttaaaggggagtttgtgtggaagagtcacaaatgggaccgggagttaatctcagagagatggaagaatttccccagccctgtggatgctgcattccgtcaaggtcacaacagtgtctttctgatcaagggggacaaagtctgggtataccctcctgaaaagaaggagaaaggatacccaaagttgctccaagatgaatttcctggaatcccatccccactggatgcagctgtggaatgtcaccgtggagaatgtcaagctgaaggcgtcctcttcttccaaggtgaccgcgagtggttctgggacttggctacgggaaccatgaaggagcgttcctggccagctgttgggaactgctcctctgccctgagatggctgggccgctactactgcttccagggtaaccaattcctgcgcttcgaccctgtcaggggagaggtgcctcccaggtacccgcgggatgtccgagactacttcatgccctgccctggcagaggccatggacacaggaatgggactggccatgggaacagtacccaccatggccctgagtatatgcgctgtagcccacatctagtcttgtctgcactgacgtctgacaaccatggtgccacctatgccttcagtgggacccactactggcgtctggacaccagccgggatggctggcatagctggcccattgctcatcagtggccccagggtccttcagcagtggatgctgccttttcctgggaagaaaaactctatctggtccagggcacccaggtatatgtcttcctgacaaagggaggctataccctagtaagcggttatccgaagcggctggagaaggaagtcgggacccctcatgggattatcctggactctgtggatgcggcctttatctgccctgggtcttctcggctccatatcatggcaggacggcggctgtggtggctggacctgaagtcaggagcccaagccacgtggacagagcttccttggccccatgagaaggtagacggatccatggtcccaatttgtactgctacagtgatgtggagaaactgaatgcagccaaggcccttccgcaaccccagaatgtgaccagtctcctgggctgcactcactgaggggccttctgacatgagtctggcctggccccacctcctagttcctcataataaagacagattgcttcttcgcttctcactgaggggccttctgacatgagtctggcctggccccacctccccagtttctcataataaagacagattgcttcttcacttgaatcaaggga

SEQ ID NO: 731435 - DNA, 1512 bp, Homo sapiens
aactctatatagggagttcaactggtcacccagagctgtcctgtggcctctgcagctcagcatggctagggtactgggagcacccgttgcactggggttgtggagcctatgctggtctctggccattgccacccctcttcctccgactagtgcccatgggaatgttgctgaaggcgagaccaagccagacccagacgtgactgaacgctgctcagatggctggagctttgatgctaccaccctggatgacaatggaaccatgctgttttttaaaggggagtttgtgtggaagagtcacaaatgggaccgggagttaatctcagagagatggaagaatttccccagccctgtggatgctgcattccgtcaaggtcacaacagtgtctttctgatcaagggggacaaagtctgggtataccctcctgcatccccactggatgcagctgtggaatgtcaccgtggagaatgtcaagctgaaggcgtcctcttcttccaaggtgaccgcgagtggttctgggacttggctacgggaaccatgaaggagcgttcctggccagctgttgggaactgctcctctgccctgagatggctgggccgctactactgcttccagggtaaccaattcctgcgcttcgaccctgtcaggggagaggtgcctcccaggtacccgcgggatgtccgagactacttcatgccctgccctggcagaggccatggacacaggaatgggactggccatgggaacagtacccaccatggccctgagtatatgcgctgtagcccacatctagtcttgtctgcactgacgtctgacaaccatggtgccacctatgccttcagtgggacccactactggcgtctggacaccagccgggatggctggcatagctggcccattgctcatcagtggccccagggtccttcagcagtggatgctgccttttcctgggaagactataccctagtaagcggttatccgaagcggctggagaaggaagtcgggacccctcatgggattatcctggactctgtggatgcggcctttatctgccctgggtcttctcggctccatatcatggcaggacggcggctgtggtggctggacctgaagtcaggagcccaagccacgtggacagagcttccttggccccatgagaaggtagacggagccttgtgtatggaaaagtcccttggccctaactcatgttccgccaatggtcccggcttgtacctcatccatggtcccaatttgtactgctacagtgatgtggagaaactgaatgcagccaaggcccttccgcaaccccagaatgtgaccagtctcctgggctgcactcactgaggggccttctgacatgagtctggcctggccccacctcctagttcctcataataaagacagattgcttcttcgcttctcactgaggggccttctgacatgagtctggcctggccccacctccccagtttctcataataaagacagattgcttcttcacttgaatcaaggga

SEQ ID NO: 731436 - DNA, 1445 bp, Homo sapiens
aactctatatagggagttcaactggtcacccagagctgtcctgtggcctctgcagctcagcatggctagggtactgggagcacccgttgcactggggttgtggagcctatgctggtctctggccattgccacccctcttcctccgactagtgcccatgggaatgttgctgaaggcgagaccaagccagacccagacgtgactgaacgctgctcagatggctggagctttgatgctaccaccctggatgacaatggaaccatgctgttttttaaaggggagtttgtgtggaagagtcacaaatgggaccgggagttaatctcagagagatggaagaatttccccagccctgtggatgctgcattccgtcaaggtcacaacagtgtctttctgatcaagggggacaaagtctgggtataccctcctgcatccccactggatgcagctgtggaatgtcaccgtggagaatgtcaagctgaaggcgtcctcttcttccaaggtgaccgcgagtggttctgggacttggctacgggaaccatgaaggagcgttcctggccagctgttgggaactgctcctctgccctgagatggctgggccgctactactgcttccagggtaaccaattcctgcgcttcgaccctgtcaggggagaggtgcctcccaggtacccgcgggatgtccgagactacttcatgccctgccctggcagaggccatggacacaggaatgggactggccatgggaacagtacccaccatggccctgagtatatgcgctgtagcccacatctagtcttgtctgcactgacgtctgacaaccatggtgccacctatgccttcagtgggacccactactggcgtctggacaccagccgggatggctggcatagctggcccattgctcatcagtggccccagggtccttcagcagtggatgctgccttttcctgggaagactataccctagtaagcggttatccgaagcggctggagaaggaagtcgggacccctcatgggattatcctggactctgtggatgcggcctttatctgccctgggtcttctcggctccatatcatggcaggacggcggctgtggtggctggacctgaagtcaggagcccaagccacgtggacagagcttccttggccccatgagaaggtagacggatccatggtcccaatttgtactgctacagtgatgtggagaaactgaatgcagccaaggcccttccgcaaccccagaatgtgaccagtctcctgggctgcactcactgaggggccttctgacatgagtctggcctggccccacctcctagttcctcataataaagacagattgcttcttcgcttctcactgaggggccttctgacatgagtctggcctggccccacctccccagtttctcataataaagacagattgcttcttcacttgaatcaaggga

SEQ ID NO: 731437 - DNA, 1566 bp, Homo sapiens
aactctatatagggagttcaactggtcacccagagctgtcctgtggcctctgcagctcagcatggctagggtactgggagcacccgttgcactggggttgtggagcctatgctggtctctggccattgccacccctcttcctccgactagtgcccatgggaatgttgctgaaggcgagaccaagccagacccagacgtgactgaacgctgctcagatggctggagctttgatgctaccaccctggatgacaatggaaccatgctgttttttaaaggggagtttgtgtggaagagtcacaaatgggaccgggagttaatctcagagagatggaagaatttccccagccctgtggatgctgcattccgtcaaggtcacaacagtgtctttctgatcaagggggacaaagtctgggtataccctcctgaaaagaaggagaaaggatacccaaagttgctccaagatgaatttcctggaatcccatccccactggatgcagctgtggaatgtcaccgtggagaatgtcaagctgaaggcgtcctcttcttccaaggtgaccgcgagtggttctgggacttggctacgggaaccatgaaggagcgttcctggccagctgttgggaactgctcctctgccctgagatggctgggccgctactactgcttccagggtaaccaattcctgcgcttcgaccctgtcaggggagaggtgcctcccaggtacccgcgggatgtccgagactacttcatgccctgccctggcagaggccatggacacaggaatgggactggccatgggaacagtacccaccatggccctgagtatatgcgctgtagcccacatctagtcttgtctgcactgacgtctgacaaccatggtgccacctatgccttcagtgggacccactactggcgtctggacaccagccgggatggctggcatagctggcccattgctcatcagtggccccagggtccttcagcagtggatgctgccttttcctgggaagactataccctagtaagcggttatccgaagcggctggagaaggaagtcgggacccctcatgggattatcctggactctgtggatgcggcctttatctgccctgggtcttctcggctccatatcatggcaggacggcggctgtggtggctggacctgaagtcaggagcccaagccacgtggacagagcttccttggccccatgagaaggtagacggagccttgtgtatggaaaagtcccttggccctaactcatgttccgccaatggtcccggcttgtacctcatccatggtcccaatttgtactgctacagtgatgtggagaaactgaatgcagccaaggcccttccgcaaccccagaatgtgaccagtctcctgggctgcactcactgaggggccttctgacatgagtctggcctggccccacctcctagttcctcataataaagacagattgcttcttcgcttctcactgaggggccttctgacatgagtctggcctggccccacctccccagtttctcataataaagacagattgcttcttcacttgaatcaaggga

SEQ ID NO: 731438 - DNA, 1499 bp, Homo sapiens
aactctatatagggagttcaactggtcacccagagctgtcctgtggcctctgcagctcagcatggctagggtactgggagcacccgttgcactggggttgtggagcctatgctggtctctggccattgccacccctcttcctccgactagtgcccatgggaatgttgctgaaggcgagaccaagccagacccagacgtgactgaacgctgctcagatggctggagctttgatgctaccaccctggatgacaatggaaccatgctgttttttaaaggggagtttgtgtggaagagtcacaaatgggaccgggagttaatctcagagagatggaagaatttccccagccctgtggatgctgcattccgtcaaggtcacaacagtgtctttctgatcaagggggacaaagtctgggtataccctcctgaaaagaaggagaaaggatacccaaagttgctccaagatgaatttcctggaatcccatccccactggatgcagctgtggaatgtcaccgtggagaatgtcaagctgaaggcgtcctcttcttccaaggtgaccgcgagtggttctgggacttggctacgggaaccatgaaggagcgttcctggccagctgttgggaactgctcctctgccctgagatggctgggccgctactactgcttccagggtaaccaattcctgcgcttcgaccctgtcaggggagaggtgcctcccaggtacccgcgggatgtccgagactacttcatgccctgccctggcagaggccatggacacaggaatgggactggccatgggaacagtacccaccatggccctgagtatatgcgctgtagcccacatctagtcttgtctgcactgacgtctgacaaccatggtgccacctatgccttcagtgggacccactactggcgtctggacaccagccgggatggctggcatagctggcccattgctcatcagtggccccagggtccttcagcagtggatgctgccttttcctgggaagactataccctagtaagcggttatccgaagcggctggagaaggaagtcgggacccctcatgggattatcctggactctgtggatgcggcctttatctgccctgggtcttctcggctccatatcatggcaggacggcggctgtggtggctggacctgaagtcaggagcccaagccacgtggacagagcttccttggccccatgagaaggtagacggatccatggtcccaatttgtactgctacagtgatgtggagaaactgaatgcagccaaggcccttccgcaaccccagaatgtgaccagtctcctgggctgcactcactgaggggccttctgacatgagtctggcctggccccacctcctagttcctcataataaagacagattgcttcttcgcttctcactgaggggccttctgacatgagtctggcctggccccacctccccagtttctcataataaagacagattgcttcttcacttgaatcaaggga

SEQ ID NO: 731439 - DNA, 1064 bp, Homo sapiens
gtgagaaagccctagcacttgagacctgtcagaattcatccactttccctgagcttgtggatctcacgtgtcctagctctcactttaactccgtgttgcgacaccttggcccttaatctagccccatttccattctggattttcccattgccctcatatggggaaacccacaccccactaaccccagccatctcttccaccttggacctcactctgacctctggcctccttctgtgttctcctcacccatttctctctccaggccatggacacaggaatgggactggccatgggaacagtacccaccatggccctgagtatatgcgctgtagcccacatctagtcttgtctgcactgacgtctgacaaccatggtgccacctatgccttcagtgggacccactactggcgtctggacaccagccgggatggctggcatagctggcccattgctcatcagtggccccagggtccttcagcagtggatgctgccttttcctgggaagactataccctagtaagcggttatccgaagcggctggagaaggaagtcgggacccctcatgggattatcctggactctgtggatgcggcctttatctgccctgggtcttctcggctccatatcatggcaggacggcggctgtggtggctggacctgaagtcaggagcccaagccacgtggacagagcttccttggccccatgagaaggtagacggagccttgtgtatggaaaagtcccttggccctaactcatgttccgccaatggtcccggcttgtacctcatccatggtcccaatttgtactgctacagtgatgtggagaaactgaatgcagccaaggcccttccgcaaccccagaatgtgaccagtctcctgggctgcactcactgaggggccttctgacatgagtctggcctggccccacctcctagttcctcataataaagacagattgcttcttcgcttctcactgaggggccttctgacatgagtctggcctggccccacctccccagtttctcataataaagacagattgcttcttcacttgaatcaaggga

SEQ ID NO: 731440 - DNA, 997 bp, Homo sapiens
gtgagaaagccctagcacttgagacctgtcagaattcatccactttccctgagcttgtggatctcacgtgtcctagctctcactttaactccgtgttgcgacaccttggcccttaatctagccccatttccattctggattttcccattgccctcatatggggaaacccacaccccactaaccccagccatctcttccaccttggacctcactctgacctctggcctccttctgtgttctcctcacccatttctctctccaggccatggacacaggaatgggactggccatgggaacagtacccaccatggccctgagtatatgcgctgtagcccacatctagtcttgtctgcactgacgtctgacaaccatggtgccacctatgccttcagtgggacccactactggcgtctggacaccagccgggatggctggcatagctggcccattgctcatcagtggccccagggtccttcagcagtggatgctgccttttcctgggaagactataccctagtaagcggttatccgaagcggctggagaaggaagtcgggacccctcatgggattatcctggactctgtggatgcggcctttatctgccctgggtcttctcggctccatatcatggcaggacggcggctgtggtggctggacctgaagtcaggagcccaagccacgtggacagagcttccttggccccatgagaaggtagacggatccatggtcccaatttgtactgctacagtgatgtggagaaactgaatgcagccaaggcccttccgcaaccccagaatgtgaccagtctcctgggctgcactcactgaggggccttctgacatgagtctggcctggccccacctcctagttcctcataataaagacagattgcttcttcgcttctcactgaggggccttctgacatgagtctggcctggccccacctccccagtttctcataataaagacagattgcttcttcacttgaatcaaggga

SEQ ID NO: 731441 - DNA, 1017 bp, Homo sapiens
aaatccttagggagtgcccgccaaccccatgatgttggccttacctggaaacttagccactgttttccacacttgcctttctttcaggcacctgctgattccagtttcagccagggcacagtgcccaacattgctgaccaagtcttgctctatttctccttctcacctggcctcttccatcttggcctctggatgcattctctccctctcatgactcatttctgcattcatcactagcctcttctctgcctgggcttctgccagcggccctagagcaacctatggtattccacggacccactactggcgtctggacaccagccgggatggctggcatagctggcccattgctcatcagtggccccagggtccttcagcagtggatgctgccttttcctgggaagaaaaactctatctggtccagggcacccaggtatatgtcttcctgacaaagggaggctataccctagtaagcggttatccgaagcggctggagaaggaagtcgggacccctcatgggattatcctggactctgtggatgcggcctttatctgccctgggtcttctcggctccatatcatggcaggacggcggctgtggtggctggacctgaagtcaggagcccaagccacgtggacagagcttccttggccccatgagaaggtagacggagccttgtgtatggaaaagtcccttggccctaactcatgttccgccaatggtcccggcttgtacctcatccatggtcccaatttgtactgctacagtgatgtggagaaactgaatgcagccaaggcccttccgcaaccccagaatgtgaccagtctcctgggctgcactcactgaggggccttctgacatgagtctggcctggccccacctcctagttcctcataataaagacagattgcttcttcgcttctcactgaggggccttctgacatgagtctggcctggccccacctccccagtttctcataataaagacagattgcttcttcacttgaatcaaggga

SEQ ID NO: 731442 - DNA, 950 bp, Homo sapiens
aaatccttagggagtgcccgccaaccccatgatgttggccttacctggaaacttagccactgttttccacacttgcctttctttcaggcacctgctgattccagtttcagccagggcacagtgcccaacattgctgaccaagtcttgctctatttctccttctcacctggcctcttccatcttggcctctggatgcattctctccctctcatgactcatttctgcattcatcactagcctcttctctgcctgggcttctgccagcggccctagagcaacctatggtattccacggacccactactggcgtctggacaccagccgggatggctggcatagctggcccattgctcatcagtggccccagggtccttcagcagtggatgctgccttttcctgggaagaaaaactctatctggtccagggcacccaggtatatgtcttcctgacaaagggaggctataccctagtaagcggttatccgaagcggctggagaaggaagtcgggacccctcatgggattatcctggactctgtggatgcggcctttatctgccctgggtcttctcggctccatatcatggcaggacggcggctgtggtggctggacctgaagtcaggagcccaagccacgtggacagagcttccttggccccatgagaaggtagacggatccatggtcccaatttgtactgctacagtgatgtggagaaactgaatgcagccaaggcccttccgcaaccccagaatgtgaccagtctcctgggctgcactcactgaggggccttctgacatgagtctggcctggccccacctcctagttcctcataataaagacagattgcttcttcgcttctcactgaggggccttctgacatgagtctggcctggccccacctccccagtttctcataataaagacagattgcttcttcacttgaatcaaggga

SEQ ID NO: 731443 - DNA, 867 bp, Homo sapiens
aatgaatgatatcagtcagagtagggaagggaaaagaggcttcaagaatgactcagctttcgtggactcagcaactgagtggctggtggttttgttttctaaaattgggaaagactagggagtgtgtgtgttggtggggggcagaaatcagtttgggcatattaggttttgggtgcctattggcaccccataagcatgtcaggtaggcagctgatttggagcctaaacctcaaaggagaggtcagtcagagctgacgagaacagattggaagtcatcagcatatagatggcatttaaagcccctggactaggtgagattaccaaggaagtgaaggtagagagagaagagaagaggcccaaagtaggggattccaatatttagatatcaggttgaagaaaagagtagtcaaaaaagataagaggaatactgggagagtcaggtgtcacagaagccaagttccaaaaaaagacatttaaaggagaaggaagtagtgagcagtccagtgctcctgagaggtagggtcagatgagaacagagaattgaccatgagatttcgcaaattggagaatactagcaacctggataagaacaatttcaatggttgagggaaacagaagtgtaattgaagaggattgaggaaaaaagacaaatgggagcctagataattccttaataagttgttgtgaaaagaggagaagaaaaacggggtgctagcccagctactccctcactcttccaccacctcatagggagagactggagaacacagccagagtgagaacattcagtagaagtggtgcttcctttttaagttctggacactgtatttcattatctataaccgcatctctgtacatggacacctg

SEQ ID NO: 731444 - DNA, 1379 bp, Homo sapiens; identical to SEQ ID NO: 451819

SEQ ID NO: 731445 - DNA, 1312 bp, Homo sapiens
agggcgtaacccggtctcaccaaatgcctgttgattgattggacaaaggtgaccgcgagtggttctgggacttggctacgggaaccatgaaggagcgttcctggccagctgttgggaactgctcctctgccctgagatggctgggccgctactactgcttccagggtaaccaattcctgcgcttcgaccctgtcaggggagaggtgcctcccaggtacccgcgggatgtccgagactacttcatgccctgccctggcagaggtgagaaagccctagcacttgagacctgtcagaattcatccactttccctgagcttgtggatctcacgtgtcctagctctcactttaactccgtgttgcgacaccttggcccttaatctagccccatttccattctggattttcccattgccctcatatggggaaacccacaccccactaaccccagccatctcttccaccttggacctcactctgacctctggcctccttctgtgttctcctcacccatttctctctccaggccatggacacaggaatgggactggccatgggaacagtacccaccatggccctgagtatatgcgctgtagcccacatctagtcttgtctgcactgacgtctgacaaccatggtgccacctatgccttcagtgggacccactactggcgtctggacaccagccgggatggctggcatagctggcccattgctcatcagtggccccagggtccttcagcagtggatgctgccttttcctgggaagaaaaactctatctggtccagggcacccaggtatatgtcttcctgacaaagggaggctataccctagtaagcggttatccgaagcggctggagaaggaagtcgggacccctcatgggattatcctggactctgtggatgcggcctttatctgccctgggtcttctcggctccatatcatggcaggacggcggctgtggtggctggacctgaagtcaggagcccaagccacgtggacagagcttccttggccccatgagaaggtagacggatccatggtcccaatttgtactgctacagtgatgtggagaaactgaatgcagccaaggcccttccgcaaccccagaatgtgaccagtctcctgggctgcactcactgaggggccttctgacatgagtctggcctggccccacctcctagttcctcataataaagacagattgcttcttcgcttctcactgaggggccttctgacatgagtctggcctggccccacctccccagtttctcataataaagacagattgcttcttcacttgaatcaaggga

SEQ ID NO: 731446 - DNA, 1284 bp, Homo sapiens
agggcgtaacccggtctcaccaaatgcctgttgattgattggacaaaggtgaccgcgagtggttctgggacttggctacgggaaccatgaaggagcgttcctggccagctgttgggaactgctcctctgccctgagatggctgggccgctactactgcttccagggtaaccaattcctgcgcttcgaccctgtcaggggagaggtgcctcccaggtacccgcgggatgtccgagactacttcatgccctgccctggcagaggtgagaaagccctagcacttgagacctgtcagaattcatccactttccctgagcttgtggatctcacgtgtcctagctctcactttaactccgtgttgcgacaccttggcccttaatctagccccatttccattctggattttcccattgccctcatatggggaaacccacaccccactaaccccagccatctcttccaccttggacctcactctgacctctggcctccttctgtgttctcctcacccatttctctctccaggccatggacacaggaatgggactggccatgggaacagtacccaccatggccctgagtatatgcgctgtagcccacatctagtcttgtctgcactgacgtctgacaaccatggtgccacctatgccttcagtgggacccactactggcgtctggacaccagccgggatggctggcatagctggcccattgctcatcagtggccccagggtccttcagcagtggatgctgccttttcctgggaagaaaaactctatctggtccagggcacccaggtatatgtcttcctgacaaagggaggctataccctagtaagcggttatccgaagcggctggagaaggaagtcgggacccctcatgggattatcctggactctgtggatgcggcctttatctgccctgggtcttctcggctccatatcatggcaggacggcggctgtggtggctggacctgaagtcaggagcccaagccacgtggacagagcttccttggccccatgagaaggtagacggatgatgtggagaaactgaatgcagccaaggcccttccgcaaccccagaatgtgaccagtctcctgggctgcactcactgaggggccttctgacatgagtctggcctggccccacctcctagttcctcataataaagacagattgcttcttcgcttctcactgaggggccttctgacatgagtctggcctggccccacctccccagtttctcataataaagacagattgcttcttcacttgaatcaaggga

SEQ ID NO: 731447 - DNA, 1455 bp, Homo sapiens
gtgacatgttgttccagaggttccggaatgtgtgttttcctgttggaaggaaacttcgcagagtagaaaagggatctgagacttttggactagtgcccatgggaatgttgctgaaggcgagaccaagccagacccagacgtgactgaacgctgctcagatggctggagctttgatgctaccaccctggatgacaatggaaccatgctgttttttaaaggggagtttgtgtggaagagtcacaaatgggaccgggagttaatctcagagagatggaagaatttccccagccctgtggatgctgcattccgtcaaggtcacaacagtgtctttctgatcaagggggacaaagtctgggtataccctcctgcatccccactggatgcagctgtggaatgtcaccgtggagaatgtcaagctgaaggcgtcctcttcttccaaggtgaccgcgagtggttctgggacttggctacgggaaccatgaaggagcgttcctggccagctgttgggaactgctcctctgccctgagatggctgggccgctactactgcttccagggtaaccaattcctgcgcttcgaccctgtcaggggagaggtgcctcccaggtacccgcgggatgtccgagactacttcatgccctgccctggcagaggccatggacacaggaatgggactggccatgggaacagtacccaccatggccctgagtatatgcgctgtagcccacatctagtcttgtctgcactgacgtctgacaaccatggtgccacctatgccttcagtgggacccactactggcgtctggacaccagccgggatggctggcatagctggcccattgctcatcagtggccccagggtccttcagcagtggatgctgccttttcctgggaagactataccctagtaagcggttatccgaagcggctggagaaggaagtcgggacccctcatgggattatcctggactctgtggatgcggcctttatctgccctgggtcttctcggctccatatcatggcaggacggcggctgtggtggctggacctgaagtcaggagcccaagccacgtggacagagcttccttggccccatgagaaggtagacggagccttgtgtatggaaaagtcccttggccctaactcatgttccgccaatggtcccggcttgtacctcatccatggtcccaatttgtactgctacagtgatgtggagaaactgaatgcagccaaggcccttccgcaaccccagaatgtgaccagtctcctgggctgcactcactgaggggccttctgacatgagtctggcctggccccacctcctagttcctcataataaagacagattgcttcttcgcttctcactgaggggccttctgacatgagtctggcctggccccacctccccagtttctcataataaagacagattgcttcttcacttgaatcaaggga

SEQ ID NO: 731448 - DNA, 1388 bp, Homo sapiens
gtgacatgttgttccagaggttccggaatgtgtgttttcctgttggaaggaaacttcgcagagtagaaaagggatctgagacttttggactagtgcccatgggaatgttgctgaaggcgagaccaagccagacccagacgtgactgaacgctgctcagatggctggagctttgatgctaccaccctggatgacaatggaaccatgctgttttttaaaggggagtttgtgtggaagagtcacaaatgggaccgggagttaatctcagagagatggaagaatttccccagccctgtggatgctgcattccgtcaaggtcacaacagtgtctttctgatcaagggggacaaagtctgggtataccctcctgcatccccactggatgcagctgtggaatgtcaccgtggagaatgtcaagctgaaggcgtcctcttcttccaaggtgaccgcgagtggttctgggacttggctacgggaaccatgaaggagcgttcctggccagctgttgggaactgctcctctgccctgagatggctgggccgctactactgcttccagggtaaccaattcctgcgcttcgaccctgtcaggggagaggtgcctcccaggtacccgcgggatgtccgagactacttcatgccctgccctggcagaggccatggacacaggaatgggactggccatgggaacagtacccaccatggccctgagtatatgcgctgtagcccacatctagtcttgtctgcactgacgtctgacaaccatggtgccacctatgccttcagtgggacccactactggcgtctggacaccagccgggatggctggcatagctggcccattgctcatcagtggccccagggtccttcagcagtggatgctgccttttcctgggaagactataccctagtaagcggttatccgaagcggctggagaaggaagtcgggacccctcatgggattatcctggactctgtggatgcggcctttatctgccctgggtcttctcggctccatatcatggcaggacggcggctgtggtggctggacctgaagtcaggagcccaagccacgtggacagagcttccttggccccatgagaaggtagacggatccatggtcccaatttgtactgctacagtgatgtggagaaactgaatgcagccaaggcccttccgcaaccccagaatgtgaccagtctcctgggctgcactcactgaggggccttctgacatgagtctggcctggccccacctcctagttcctcataataaagacagattgcttcttcgcttctcactgaggggccttctgacatgagtctggcctggccccacctccccagtttctcataataaagacagattgcttcttcacttgaatcaaggga

SEQ ID NO: 731449 - DNA, 1360 bp, Homo sapiens
gtgacatgttgttccagaggttccggaatgtgtgttttcctgttggaaggaaacttcgcagagtagaaaagggatctgagacttttggactagtgcccatgggaatgttgctgaaggcgagaccaagccagacccagacgtgactgaacgctgctcagatggctggagctttgatgctaccaccctggatgacaatggaaccatgctgttttttaaaggggagtttgtgtggaagagtcacaaatgggaccgggagttaatctcagagagatggaagaatttccccagccctgtggatgctgcattccgtcaaggtcacaacagtgtctttctgatcaagggggacaaagtctgggtataccctcctgcatccccactggatgcagctgtggaatgtcaccgtggagaatgtcaagctgaaggcgtcctcttcttccaaggtgaccgcgagtggttctgggacttggctacgggaaccatgaaggagcgttcctggccagctgttgggaactgctcctctgccctgagatggctgggccgctactactgcttccagggtaaccaattcctgcgcttcgaccctgtcaggggagaggtgcctcccaggtacccgcgggatgtccgagactacttcatgccctgccctggcagaggccatggacacaggaatgggactggccatgggaacagtacccaccatggccctgagtatatgcgctgtagcccacatctagtcttgtctgcactgacgtctgacaaccatggtgccacctatgccttcagtgggacccactactggcgtctggacaccagccgggatggctggcatagctggcccattgctcatcagtggccccagggtccttcagcagtggatgctgccttttcctgggaagactataccctagtaagcggttatccgaagcggctggagaaggaagtcgggacccctcatgggattatcctggactctgtggatgcggcctttatctgccctgggtcttctcggctccatatcatggcaggacggcggctgtggtggctggacctgaagtcaggagcccaagccacgtggacagagcttccttggccccatgagaaggtagacggatgatgtggagaaactgaatgcagccaaggcccttccgcaaccccagaatgtgaccagtctcctgggctgcactcactgaggggccttctgacatgagtctggcctggccccacctcctagttcctcataataaagacagattgcttcttcgcttctcactgaggggccttctgacatgagtctggcctggccccacctccccagtttctcataataaagacagattgcttcttcacttgaatcaaggga

SEQ ID NO: 731450 - DNA, 1509 bp, Homo sapiens; identical to SEQ ID NO: 451817

SEQ ID NO: 731451 - DNA, 1442 bp, Homo sapiens
gtgacatgttgttccagaggttccggaatgtgtgttttcctgttggaaggaaacttcgcagagtagaaaagggatctgagacttttggactagtgcccatgggaatgttgctgaaggcgagaccaagccagacccagacgtgactgaacgctgctcagatggctggagctttgatgctaccaccctggatgacaatggaaccatgctgttttttaaaggggagtttgtgtggaagagtcacaaatgggaccgggagttaatctcagagagatggaagaatttccccagccctgtggatgctgcattccgtcaaggtcacaacagtgtctttctgatcaagggggacaaagtctgggtataccctcctgcatccccactggatgcagctgtggaatgtcaccgtggagaatgtcaagctgaaggcgtcctcttcttccaaggtgaccgcgagtggttctgggacttggctacgggaaccatgaaggagcgttcctggccagctgttgggaactgctcctctgccctgagatggctgggccgctactactgcttccagggtaaccaattcctgcgcttcgaccctgtcaggggagaggtgcctcccaggtacccgcgggatgtccgagactacttcatgccctgccctggcagaggccatggacacaggaatgggactggccatgggaacagtacccaccatggccctgagtatatgcgctgtagcccacatctagtcttgtctgcactgacgtctgacaaccatggtgccacctatgccttcagtgggacccactactggcgtctggacaccagccgggatggctggcatagctggcccattgctcatcagtggccccagggtccttcagcagtggatgctgccttttcctgggaagaaaaactctatctggtccagggcacccaggtatatgtcttcctgacaaagggaggctataccctagtaagcggttatccgaagcggctggagaaggaagtcgggacccctcatgggattatcctggactctgtggatgcggcctttatctgccctgggtcttctcggctccatatcatggcaggacggcggctgtggtggctggacctgaagtcaggagcccaagccacgtggacagagcttccttggccccatgagaaggtagacggatccatggtcccaatttgtactgctacagtgatgtggagaaactgaatgcagccaaggcccttccgcaaccccagaatgtgaccagtctcctgggctgcactcactgaggggccttctgacatgagtctggcctggccccacctcctagttcctcataataaagacagattgcttcttcgcttctcactgaggggccttctgacatgagtctggcctggccccacctccccagtttctcataataaagacagattgcttcttcacttgaatcaaggga

SEQ ID NO: 731452 - DNA, 1414 bp, Homo sapiens
gtgacatgttgttccagaggttccggaatgtgtgttttcctgttggaaggaaacttcgcagagtagaaaagggatctgagacttttggactagtgcccatgggaatgttgctgaaggcgagaccaagccagacccagacgtgactgaacgctgctcagatggctggagctttgatgctaccaccctggatgacaatggaaccatgctgttttttaaaggggagtttgtgtggaagagtcacaaatgggaccgggagttaatctcagagagatggaagaatttccccagccctgtggatgctgcattccgtcaaggtcacaacagtgtctttctgatcaagggggacaaagtctgggtataccctcctgcatccccactggatgcagctgtggaatgtcaccgtggagaatgtcaagctgaaggcgtcctcttcttccaaggtgaccgcgagtggttctgggacttggctacgggaaccatgaaggagcgttcctggccagctgttgggaactgctcctctgccctgagatggctgggccgctactactgcttccagggtaaccaattcctgcgcttcgaccctgtcaggggagaggtgcctcccaggtacccgcgggatgtccgagactacttcatgccctgccctggcagaggccatggacacaggaatgggactggccatgggaacagtacccaccatggccctgagtatatgcgctgtagcccacatctagtcttgtctgcactgacgtctgacaaccatggtgccacctatgccttcagtgggacccactactggcgtctggacaccagccgggatggctggcatagctggcccattgctcatcagtggccccagggtccttcagcagtggatgctgccttttcctgggaagaaaaactctatctggtccagggcacccaggtatatgtcttcctgacaaagggaggctataccctagtaagcggttatccgaagcggctggagaaggaagtcgggacccctcatgggattatcctggactctgtggatgcggcctttatctgccctgggtcttctcggctccatatcatggcaggacggcggctgtggtggctggacctgaagtcaggagcccaagccacgtggacagagcttccttggccccatgagaaggtagacggatgatgtggagaaactgaatgcagccaaggcccttccgcaaccccagaatgtgaccagtctcctgggctgcactcactgaggggccttctgacatgagtctggcctggccccacctcctagttcctcataataaagacagattgcttcttcgcttctcactgaggggccttctgacatgagtctggcctggccccacctccccagtttctcataataaagacagattgcttcttcacttgaatcaaggga

SEQ ID NO: 731453 - DNA, 1499 bp, Homo sapiens
catggctagggtactgggagcacccgttgcactggggttgtggagcctatgctggtctctggccattgccacccctcttcctccgtgagtaaagctgggactagaagcgaaggattgagttctgggctagggactagtgcccatgggaatgttgctgaaggcgagaccaagccagacccagacgtgactgaacgctgctcagatggctggagctttgatgctaccaccctggatgacaatggaaccatgctgttttttaaaggggagtttgtgtggaagagtcacaaatgggaccgggagttaatctcagagagatggaagaatttccccagccctgtggatgctgcattccgtcaaggtcacaacagtgtctttctgatcaagggggacaaagtctgggtataccctcctgcatccccactggatgcagctgtggaatgtcaccgtggagaatgtcaagctgaaggcgtcctcttcttccaaggtgaccgcgagtggttctgggacttggctacgggaaccatgaaggagcgttcctggccagctgttgggaactgctcctctgccctgagatggctgggccgctactactgcttccagggtaaccaattcctgcgcttcgaccctgtcaggggagaggtgcctcccaggtacccgcgggatgtccgagactacttcatgccctgccctggcagaggccatggacacaggaatgggactggccatgggaacagtacccaccatggccctgagtatatgcgctgtagcccacatctagtcttgtctgcactgacgtctgacaaccatggtgccacctatgccttcagtgggacccactactggcgtctggacaccagccgggatggctggcatagctggcccattgctcatcagtggccccagggtccttcagcagtggatgctgccttttcctgggaagactataccctagtaagcggttatccgaagcggctggagaaggaagtcgggacccctcatgggattatcctggactctgtggatgcggcctttatctgccctgggtcttctcggctccatatcatggcaggacggcggctgtggtggctggacctgaagtcaggagcccaagccacgtggacagagcttccttggccccatgagaaggtagacggagccttgtgtatggaaaagtcccttggccctaactcatgttccgccaatggtcccggcttgtacctcatccatggtcccaatttgtactgctacagtgatgtggagaaactgaatgcagccaaggcccttccgcaaccccagaatgtgaccagtctcctgggctgcactcactgaggggccttctgacatgagtctggcctggccccacctcctagttcctcataataaagacagattgcttcttcgcttctcactgaggggccttctgacatgagtctggcctggccccacctccccagtttctcataataaagacagattgcttcttcacttgaatcaaggga

SEQ ID NO: 731454 - DNA, 1432 bp, Homo sapiens
catggctagggtactgggagcacccgttgcactggggttgtggagcctatgctggtctctggccattgccacccctcttcctccgtgagtaaagctgggactagaagcgaaggattgagttctgggctagggactagtgcccatgggaatgttgctgaaggcgagaccaagccagacccagacgtgactgaacgctgctcagatggctggagctttgatgctaccaccctggatgacaatggaaccatgctgttttttaaaggggagtttgtgtggaagagtcacaaatgggaccgggagttaatctcagagagatggaagaatttccccagccctgtggatgctgcattccgtcaaggtcacaacagtgtctttctgatcaagggggacaaagtctgggtataccctcctgcatccccactggatgcagctgtggaatgtcaccgtggagaatgtcaagctgaaggcgtcctcttcttccaaggtgaccgcgagtggttctgggacttggctacgggaaccatgaaggagcgttcctggccagctgttgggaactgctcctctgccctgagatggctgggccgctactactgcttccagggtaaccaattcctgcgcttcgaccctgtcaggggagaggtgcctcccaggtacccgcgggatgtccgagactacttcatgccctgccctggcagaggccatggacacaggaatgggactggccatgggaacagtacccaccatggccctgagtatatgcgctgtagcccacatctagtcttgtctgcactgacgtctgacaaccatggtgccacctatgccttcagtgggacccactactggcgtctggacaccagccgggatggctggcatagctggcccattgctcatcagtggccccagggtccttcagcagtggatgctgccttttcctgggaagactataccctagtaagcggttatccgaagcggctggagaaggaagtcgggacccctcatgggattatcctggactctgtggatgcggcctttatctgccctgggtcttctcggctccatatcatggcaggacggcggctgtggtggctggacctgaagtcaggagcccaagccacgtggacagagcttccttggccccatgagaaggtagacggatccatggtcccaatttgtactgctacagtgatgtggagaaactgaatgcagccaaggcccttccgcaaccccagaatgtgaccagtctcctgggctgcactcactgaggggccttctgacatgagtctggcctggccccacctcctagttcctcataataaagacagattgcttcttcgcttctcactgaggggccttctgacatgagtctggcctggccccacctccccagtttctcataataaagacagattgcttcttcacttgaatcaaggga

SEQ ID NO: 731455 - DNA, 1404 bp, Homo sapiens
catggctagggtactgggagcacccgttgcactggggttgtggagcctatgctggtctctggccattgccacccctcttcctccgtgagtaaagctgggactagaagcgaaggattgagttctgggctagggactagtgcccatgggaatgttgctgaaggcgagaccaagccagacccagacgtgactgaacgctgctcagatggctggagctttgatgctaccaccctggatgacaatggaaccatgctgttttttaaaggggagtttgtgtggaagagtcacaaatgggaccgggagttaatctcagagagatggaagaatttccccagccctgtggatgctgcattccgtcaaggtcacaacagtgtctttctgatcaagggggacaaagtctgggtataccctcctgcatccccactggatgcagctgtggaatgtcaccgtggagaatgtcaagctgaaggcgtcctcttcttccaaggtgaccgcgagtggttctgggacttggctacgggaaccatgaaggagcgttcctggccagctgttgggaactgctcctctgccctgagatggctgggccgctactactgcttccagggtaaccaattcctgcgcttcgaccctgtcaggggagaggtgcctcccaggtacccgcgggatgtccgagactacttcatgccctgccctggcagaggccatggacacaggaatgggactggccatgggaacagtacccaccatggccctgagtatatgcgctgtagcccacatctagtcttgtctgcactgacgtctgacaaccatggtgccacctatgccttcagtgggacccactactggcgtctggacaccagccgggatggctggcatagctggcccattgctcatcagtggccccagggtccttcagcagtggatgctgccttttcctgggaagactataccctagtaagcggttatccgaagcggctggagaaggaagtcgggacccctcatgggattatcctggactctgtggatgcggcctttatctgccctgggtcttctcggctccatatcatggcaggacggcggctgtggtggctggacctgaagtcaggagcccaagccacgtggacagagcttccttggccccatgagaaggtagacggatgatgtggagaaactgaatgcagccaaggcccttccgcaaccccagaatgtgaccagtctcctgggctgcactcactgaggggccttctgacatgagtctggcctggccccacctcctagttcctcataataaagacagattgcttcttcgcttctcactgaggggccttctgacatgagtctggcctggccccacctccccagtttctcataataaagacagattgcttcttcacttgaatcaaggga

SEQ ID NO: 731456 - DNA, 1553 bp, Homo sapiens
catggctagggtactgggagcacccgttgcactggggttgtggagcctatgctggtctctggccattgccacccctcttcctccgtgagtaaagctgggactagaagcgaaggattgagttctgggctagggactagtgcccatgggaatgttgctgaaggcgagaccaagccagacccagacgtgactgaacgctgctcagatggctggagctttgatgctaccaccctggatgacaatggaaccatgctgttttttaaaggggagtttgtgtggaagagtcacaaatgggaccgggagttaatctcagagagatggaagaatttccccagccctgtggatgctgcattccgtcaaggtcacaacagtgtctttctgatcaagggggacaaagtctgggtataccctcctgcatccccactggatgcagctgtggaatgtcaccgtggagaatgtcaagctgaaggcgtcctcttcttccaaggtgaccgcgagtggttctgggacttggctacgggaaccatgaaggagcgttcctggccagctgttgggaactgctcctctgccctgagatggctgggccgctactactgcttccagggtaaccaattcctgcgcttcgaccctgtcaggggagaggtgcctcccaggtacccgcgggatgtccgagactacttcatgccctgccctggcagaggccatggacacaggaatgggactggccatgggaacagtacccaccatggccctgagtatatgcgctgtagcccacatctagtcttgtctgcactgacgtctgacaaccatggtgccacctatgccttcagtgggacccactactggcgtctggacaccagccgggatggctggcatagctggcccattgctcatcagtggccccagggtccttcagcagtggatgctgccttttcctgggaagaaaaactctatctggtccagggcacccaggtatatgtcttcctgacaaagggaggctataccctagtaagcggttatccgaagcggctggagaaggaagtcgggacccctcatgggattatcctggactctgtggatgcggcctttatctgccctgggtcttctcggctccatatcatggcaggacggcggctgtggtggctggacctgaagtcaggagcccaagccacgtggacagagcttccttggccccatgagaaggtagacggagccttgtgtatggaaaagtcccttggccctaactcatgttccgccaatggtcccggcttgtacctcatccatggtcccaatttgtactgctacagtgatgtggagaaactgaatgcagccaaggcccttccgcaaccccagaatgtgaccagtctcctgggctgcactcactgaggggccttctgacatgagtctggcctggccccacctcctagttcctcataataaagacagattgcttcttcgcttctcactgaggggccttctgacatgagtctggcctggccccacctccccagtttctcataataaagacagattgcttcttcacttgaatcaaggga

SEQ ID NO: 731457 - DNA, 1486 bp, Homo sapiens
catggctagggtactgggagcacccgttgcactggggttgtggagcctatgctggtctctggccattgccacccctcttcctccgtgagtaaagctgggactagaagcgaaggattgagttctgggctagggactagtgcccatgggaatgttgctgaaggcgagaccaagccagacccagacgtgactgaacgctgctcagatggctggagctttgatgctaccaccctggatgacaatggaaccatgctgttttttaaaggggagtttgtgtggaagagtcacaaatgggaccgggagttaatctcagagagatggaagaatttccccagccctgtggatgctgcattccgtcaaggtcacaacagtgtctttctgatcaagggggacaaagtctgggtataccctcctgcatccccactggatgcagctgtggaatgtcaccgtggagaatgtcaagctgaaggcgtcctcttcttccaaggtgaccgcgagtggttctgggacttggctacgggaaccatgaaggagcgttcctggccagctgttgggaactgctcctctgccctgagatggctgggccgctactactgcttccagggtaaccaattcctgcgcttcgaccctgtcaggggagaggtgcctcccaggtacccgcgggatgtccgagactacttcatgccctgccctggcagaggccatggacacaggaatgggactggccatgggaacagtacccaccatggccctgagtatatgcgctgtagcccacatctagtcttgtctgcactgacgtctgacaaccatggtgccacctatgccttcagtgggacccactactggcgtctggacaccagccgggatggctggcatagctggcccattgctcatcagtggccccagggtccttcagcagtggatgctgccttttcctgggaagaaaaactctatctggtccagggcacccaggtatatgtcttcctgacaaagggaggctataccctagtaagcggttatccgaagcggctggagaaggaagtcgggacccctcatgggattatcctggactctgtggatgcggcctttatctgccctgggtcttctcggctccatatcatggcaggacggcggctgtggtggctggacctgaagtcaggagcccaagccacgtggacagagcttccttggccccatgagaaggtagacggatccatggtcccaatttgtactgctacagtgatgtggagaaactgaatgcagccaaggcccttccgcaaccccagaatgtgaccagtctcctgggctgcactcactgaggggccttctgacatgagtctggcctggccccacctcctagttcctcataataaagacagattgcttcttcgcttctcactgaggggccttctgacatgagtctggcctggccccacctccccagtttctcataataaagacagattgcttcttcacttgaatcaaggga

SEQ ID NO: 731458 - DNA, 1458 bp, Homo sapiens
catggctagggtactgggagcacccgttgcactggggttgtggagcctatgctggtctctggccattgccacccctcttcctccgtgagtaaagctgggactagaagcgaaggattgagttctgggctagggactagtgcccatgggaatgttgctgaaggcgagaccaagccagacccagacgtgactgaacgctgctcagatggctggagctttgatgctaccaccctggatgacaatggaaccatgctgttttttaaaggggagtttgtgtggaagagtcacaaatgggaccgggagttaatctcagagagatggaagaatttccccagccctgtggatgctgcattccgtcaaggtcacaacagtgtctttctgatcaagggggacaaagtctgggtataccctcctgcatccccactggatgcagctgtggaatgtcaccgtggagaatgtcaagctgaaggcgtcctcttcttccaaggtgaccgcgagtggttctgggacttggctacgggaaccatgaaggagcgttcctggccagctgttgggaactgctcctctgccctgagatggctgggccgctactactgcttccagggtaaccaattcctgcgcttcgaccctgtcaggggagaggtgcctcccaggtacccgcgggatgtccgagactacttcatgccctgccctggcagaggccatggacacaggaatgggactggccatgggaacagtacccaccatggccctgagtatatgcgctgtagcccacatctagtcttgtctgcactgacgtctgacaaccatggtgccacctatgccttcagtgggacccactactggcgtctggacaccagccgggatggctggcatagctggcccattgctcatcagtggccccagggtccttcagcagtggatgctgccttttcctgggaagaaaaactctatctggtccagggcacccaggtatatgtcttcctgacaaagggaggctataccctagtaagcggttatccgaagcggctggagaaggaagtcgggacccctcatgggattatcctggactctgtggatgcggcctttatctgccctgggtcttctcggctccatatcatggcaggacggcggctgtggtggctggacctgaagtcaggagcccaagccacgtggacagagcttccttggccccatgagaaggtagacggatgatgtggagaaactgaatgcagccaaggcccttccgcaaccccagaatgtgaccagtctcctgggctgcactcactgaggggccttctgacatgagtctggcctggccccacctcctagttcctcataataaagacagattgcttcttcgcttctcactgaggggccttctgacatgagtctggcctggccccacctccccagtttctcataataaagacagattgcttcttcacttgaatcaaggga

SEQ ID NO: 731459 - DNA, 1553 bp, Homo sapiens
catggctagggtactgggagcacccgttgcactggggttgtggagcctatgctggtctctggccattgccacccctcttcctccgtgagtaaagctgggactagaagcgaaggattgagttctgggctagggactagtgcccatgggaatgttgctgaaggcgagaccaagccagacccagacgtgactgaacgctgctcagatggctggagctttgatgctaccaccctggatgacaatggaaccatgctgttttttaaaggggagtttgtgtggaagagtcacaaatgggaccgggagttaatctcagagagatggaagaatttccccagccctgtggatgctgcattccgtcaaggtcacaacagtgtctttctgatcaagggggacaaagtctgggtataccctcctgaaaagaaggagaaaggatacccaaagttgctccaagatgaatttcctggaatcccatccccactggatgcagctgtggaatgtcaccgtggagaatgtcaagctgaaggcgtcctcttcttccaaggtgaccgcgagtggttctgggacttggctacgggaaccatgaaggagcgttcctggccagctgttgggaactgctcctctgccctgagatggctgggccgctactactgcttccagggtaaccaattcctgcgcttcgaccctgtcaggggagaggtgcctcccaggtacccgcgggatgtccgagactacttcatgccctgccctggcagaggccatggacacaggaatgggactggccatgggaacagtacccaccatggccctgagtatatgcgctgtagcccacatctagtcttgtctgcactgacgtctgacaaccatggtgccacctatgccttcagtgggacccactactggcgtctggacaccagccgggatggctggcatagctggcccattgctcatcagtggccccagggtccttcagcagtggatgctgccttttcctgggaagactataccctagtaagcggttatccgaagcggctggagaaggaagtcgggacccctcatgggattatcctggactctgtggatgcggcctttatctgccctgggtcttctcggctccatatcatggcaggacggcggctgtggtggctggacctgaagtcaggagcccaagccacgtggacagagcttccttggccccatgagaaggtagacggagccttgtgtatggaaaagtcccttggccctaactcatgttccgccaatggtcccggcttgtacctcatccatggtcccaatttgtactgctacagtgatgtggagaaactgaatgcagccaaggcccttccgcaaccccagaatgtgaccagtctcctgggctgcactcactgaggggccttctgacatgagtctggcctggccccacctcctagttcctcataataaagacagattgcttcttcgcttctcactgaggggccttctgacatgagtctggcctggccccacctccccagtttctcataataaagacagattgcttcttcacttgaatcaaggga

SEQ ID NO: 731460 - DNA, 1486 bp, Homo sapiens
catggctagggtactgggagcacccgttgcactggggttgtggagcctatgctggtctctggccattgccacccctcttcctccgtgagtaaagctgggactagaagcgaaggattgagttctgggctagggactagtgcccatgggaatgttgctgaaggcgagaccaagccagacccagacgtgactgaacgctgctcagatggctggagctttgatgctaccaccctggatgacaatggaaccatgctgttttttaaaggggagtttgtgtggaagagtcacaaatgggaccgggagttaatctcagagagatggaagaatttccccagccctgtggatgctgcattccgtcaaggtcacaacagtgtctttctgatcaagggggacaaagtctgggtataccctcctgaaaagaaggagaaaggatacccaaagttgctccaagatgaatttcctggaatcccatccccactggatgcagctgtggaatgtcaccgtggagaatgtcaagctgaaggcgtcctcttcttccaaggtgaccgcgagtggttctgggacttggctacgggaaccatgaaggagcgttcctggccagctgttgggaactgctcctctgccctgagatggctgggccgctactactgcttccagggtaaccaattcctgcgcttcgaccctgtcaggggagaggtgcctcccaggtacccgcgggatgtccgagactacttcatgccctgccctggcagaggccatggacacaggaatgggactggccatgggaacagtacccaccatggccctgagtatatgcgctgtagcccacatctagtcttgtctgcactgacgtctgacaaccatggtgccacctatgccttcagtgggacccactactggcgtctggacaccagccgggatggctggcatagctggcccattgctcatcagtggccccagggtccttcagcagtggatgctgccttttcctgggaagactataccctagtaagcggttatccgaagcggctggagaaggaagtcgggacccctcatgggattatcctggactctgtggatgcggcctttatctgccctgggtcttctcggctccatatcatggcaggacggcggctgtggtggctggacctgaagtcaggagcccaagccacgtggacagagcttccttggccccatgagaaggtagacggatccatggtcccaatttgtactgctacagtgatgtggagaaactgaatgcagccaaggcccttccgcaaccccagaatgtgaccagtctcctgggctgcactcactgaggggccttctgacatgagtctggcctggccccacctcctagttcctcataataaagacagattgcttcttcgcttctcactgaggggccttctgacatgagtctggcctggccccacctccccagtttctcataataaagacagattgcttcttcacttgaatcaaggga

SEQ ID NO: 731461 - DNA, 1458 bp, Homo sapiens
catggctagggtactgggagcacccgttgcactggggttgtggagcctatgctggtctctggccattgccacccctcttcctccgtgagtaaagctgggactagaagcgaaggattgagttctgggctagggactagtgcccatgggaatgttgctgaaggcgagaccaagccagacccagacgtgactgaacgctgctcagatggctggagctttgatgctaccaccctggatgacaatggaaccatgctgttttttaaaggggagtttgtgtggaagagtcacaaatgggaccgggagttaatctcagagagatggaagaatttccccagccctgtggatgctgcattccgtcaaggtcacaacagtgtctttctgatcaagggggacaaagtctgggtataccctcctgaaaagaaggagaaaggatacccaaagttgctccaagatgaatttcctggaatcccatccccactggatgcagctgtggaatgtcaccgtggagaatgtcaagctgaaggcgtcctcttcttccaaggtgaccgcgagtggttctgggacttggctacgggaaccatgaaggagcgttcctggccagctgttgggaactgctcctctgccctgagatggctgggccgctactactgcttccagggtaaccaattcctgcgcttcgaccctgtcaggggagaggtgcctcccaggtacccgcgggatgtccgagactacttcatgccctgccctggcagaggccatggacacaggaatgggactggccatgggaacagtacccaccatggccctgagtatatgcgctgtagcccacatctagtcttgtctgcactgacgtctgacaaccatggtgccacctatgccttcagtgggacccactactggcgtctggacaccagccgggatggctggcatagctggcccattgctcatcagtggccccagggtccttcagcagtggatgctgccttttcctgggaagactataccctagtaagcggttatccgaagcggctggagaaggaagtcgggacccctcatgggattatcctggactctgtggatgcggcctttatctgccctgggtcttctcggctccatatcatggcaggacggcggctgtggtggctggacctgaagtcaggagcccaagccacgtggacagagcttccttggccccatgagaaggtagacggatgatgtggagaaactgaatgcagccaaggcccttccgcaaccccagaatgtgaccagtctcctgggctgcactcactgaggggccttctgacatgagtctggcctggccccacctcctagttcctcataataaagacagattgcttcttcgcttctcactgaggggccttctgacatgagtctggcctggccccacctccccagtttctcataataaagacagattgcttcttcacttgaatcaaggga

SEQ ID NO: 731462 - DNA, 1607 bp, Homo sapiens
catggctagggtactgggagcacccgttgcactggggttgtggagcctatgctggtctctggccattgccacccctcttcctccgtgagtaaagctgggactagaagcgaaggattgagttctgggctagggactagtgcccatgggaatgttgctgaaggcgagaccaagccagacccagacgtgactgaacgctgctcagatggctggagctttgatgctaccaccctggatgacaatggaaccatgctgttttttaaaggggagtttgtgtggaagagtcacaaatgggaccgggagttaatctcagagagatggaagaatttccccagccctgtggatgctgcattccgtcaaggtcacaacagtgtctttctgatcaagggggacaaagtctgggtataccctcctgaaaagaaggagaaaggatacccaaagttgctccaagatgaatttcctggaatcccatccccactggatgcagctgtggaatgtcaccgtggagaatgtcaagctgaaggcgtcctcttcttccaaggtgaccgcgagtggttctgggacttggctacgggaaccatgaaggagcgttcctggccagctgttgggaactgctcctctgccctgagatggctgggccgctactactgcttccagggtaaccaattcctgcgcttcgaccctgtcaggggagaggtgcctcccaggtacccgcgggatgtccgagactacttcatgccctgccctggcagaggccatggacacaggaatgggactggccatgggaacagtacccaccatggccctgagtatatgcgctgtagcccacatctagtcttgtctgcactgacgtctgacaaccatggtgccacctatgccttcagtgggacccactactggcgtctggacaccagccgggatggctggcatagctggcccattgctcatcagtggccccagggtccttcagcagtggatgctgccttttcctgggaagaaaaactctatctggtccagggcacccaggtatatgtcttcctgacaaagggaggctataccctagtaagcggttatccgaagcggctggagaaggaagtcgggacccctcatgggattatcctggactctgtggatgcggcctttatctgccctgggtcttctcggctccatatcatggcaggacggcggctgtggtggctggacctgaagtcaggagcccaagccacgtggacagagcttccttggccccatgagaaggtagacggagccttgtgtatggaaaagtcccttggccctaactcatgttccgccaatggtcccggcttgtacctcatccatggtcccaatttgtactgctacagtgatgtggagaaactgaatgcagccaaggcccttccgcaaccccagaatgtgaccagtctcctgggctgcactcactgaggggccttctgacatgagtctggcctggccccacctcctagttcctcataataaagacagattgcttcttcgcttctcactgaggggccttctgacatgagtctggcctggccccacctccccagtttctcataataaagacagattgcttcttcacttgaatcaaggga

SEQ ID NO: 731463 - DNA, 1540 bp, Homo sapiens
catggctagggtactgggagcacccgttgcactggggttgtggagcctatgctggtctctggccattgccacccctcttcctccgtgagtaaagctgggactagaagcgaaggattgagttctgggctagggactagtgcccatgggaatgttgctgaaggcgagaccaagccagacccagacgtgactgaacgctgctcagatggctggagctttgatgctaccaccctggatgacaatggaaccatgctgttttttaaaggggagtttgtgtggaagagtcacaaatgggaccgggagttaatctcagagagatggaagaatttccccagccctgtggatgctgcattccgtcaaggtcacaacagtgtctttctgatcaagggggacaaagtctgggtataccctcctgaaaagaaggagaaaggatacccaaagttgctccaagatgaatttcctggaatcccatccccactggatgcagctgtggaatgtcaccgtggagaatgtcaagctgaaggcgtcctcttcttccaaggtgaccgcgagtggttctgggacttggctacgggaaccatgaaggagcgttcctggccagctgttgggaactgctcctctgccctgagatggctgggccgctactactgcttccagggtaaccaattcctgcgcttcgaccctgtcaggggagaggtgcctcccaggtacccgcgggatgtccgagactacttcatgccctgccctggcagaggccatggacacaggaatgggactggccatgggaacagtacccaccatggccctgagtatatgcgctgtagcccacatctagtcttgtctgcactgacgtctgacaaccatggtgccacctatgccttcagtgggacccactactggcgtctggacaccagccgggatggctggcatagctggcccattgctcatcagtggccccagggtccttcagcagtggatgctgccttttcctgggaagaaaaactctatctggtccagggcacccaggtatatgtcttcctgacaaagggaggctataccctagtaagcggttatccgaagcggctggagaaggaagtcgggacccctcatgggattatcctggactctgtggatgcggcctttatctgccctgggtcttctcggctccatatcatggcaggacggcggctgtggtggctggacctgaagtcaggagcccaagccacgtggacagagcttccttggccccatgagaaggtagacggatccatggtcccaatttgtactgctacagtgatgtggagaaactgaatgcagccaaggcccttccgcaaccccagaatgtgaccagtctcctgggctgcactcactgaggggccttctgacatgagtctggcctggccccacctcctagttcctcataataaagacagattgcttcttcgcttctcactgaggggccttctgacatgagtctggcctggccccacctccccagtttctcataataaagacagattgcttcttcacttgaatcaaggga

SEQ ID NO: 731464 - DNA, 1512 bp, Homo sapiens
catggctagggtactgggagcacccgttgcactggggttgtggagcctatgctggtctctggccattgccacccctcttcctccgtgagtaaagctgggactagaagcgaaggattgagttctgggctagggactagtgcccatgggaatgttgctgaaggcgagaccaagccagacccagacgtgactgaacgctgctcagatggctggagctttgatgctaccaccctggatgacaatggaaccatgctgttttttaaaggggagtttgtgtggaagagtcacaaatgggaccgggagttaatctcagagagatggaagaatttccccagccctgtggatgctgcattccgtcaaggtcacaacagtgtctttctgatcaagggggacaaagtctgggtataccctcctgaaaagaaggagaaaggatacccaaagttgctccaagatgaatttcctggaatcccatccccactggatgcagctgtggaatgtcaccgtggagaatgtcaagctgaaggcgtcctcttcttccaaggtgaccgcgagtggttctgggacttggctacgggaaccatgaaggagcgttcctggccagctgttgggaactgctcctctgccctgagatggctgggccgctactactgcttccagggtaaccaattcctgcgcttcgaccctgtcaggggagaggtgcctcccaggtacccgcgggatgtccgagactacttcatgccctgccctggcagaggccatggacacaggaatgggactggccatgggaacagtacccaccatggccctgagtatatgcgctgtagcccacatctagtcttgtctgcactgacgtctgacaaccatggtgccacctatgccttcagtgggacccactactggcgtctggacaccagccgggatggctggcatagctggcccattgctcatcagtggccccagggtccttcagcagtggatgctgccttttcctgggaagaaaaactctatctggtccagggcacccaggtatatgtcttcctgacaaagggaggctataccctagtaagcggttatccgaagcggctggagaaggaagtcgggacccctcatgggattatcctggactctgtggatgcggcctttatctgccctgggtcttctcggctccatatcatggcaggacggcggctgtggtggctggacctgaagtcaggagcccaagccacgtggacagagcttccttggccccatgagaaggtagacggatgatgtggagaaactgaatgcagccaaggcccttccgcaaccccagaatgtgaccagtctcctgggctgcactcactgaggggccttctgacatgagtctggcctggccccacctcctagttcctcataataaagacagattgcttcttcgcttctcactgaggggccttctgacatgagtctggcctggccccacctccccagtttctcataataaagacagattgcttcttcacttgaatcaaggga

SEQ ID NO: 731465 - DNA, 969 bp, Homo sapiens
gtgagaaagccctagcacttgagacctgtcagaattcatccactttccctgagcttgtggatctcacgtgtcctagctctcactttaactccgtgttgcgacaccttggcccttaatctagccccatttccattctggattttcccattgccctcatatggggaaacccacaccccactaaccccagccatctcttccaccttggacctcactctgacctctggcctccttctgtgttctcctcacccatttctctctccaggccatggacacaggaatgggactggccatgggaacagtacccaccatggccctgagtatatgcgctgtagcccacatctagtcttgtctgcactgacgtctgacaaccatggtgccacctatgccttcagtgggacccactactggcgtctggacaccagccgggatggctggcatagctggcccattgctcatcagtggccccagggtccttcagcagtggatgctgccttttcctgggaagactataccctagtaagcggttatccgaagcggctggagaaggaagtcgggacccctcatgggattatcctggactctgtggatgcggcctttatctgccctgggtcttctcggctccatatcatggcaggacggcggctgtggtggctggacctgaagtcaggagcccaagccacgtggacagagcttccttggccccatgagaaggtagacggatgatgtggagaaactgaatgcagccaaggcccttccgcaaccccagaatgtgaccagtctcctgggctgcactcactgaggggccttctgacatgagtctggcctggccccacctcctagttcctcataataaagacagattgcttcttcgcttctcactgaggggccttctgacatgagtctggcctggccccacctccccagtttctcataataaagacagattgcttcttcacttgaatcaaggga

SEQ ID NO: 731466 - DNA, 922 bp, Homo sapiens
aaatccttagggagtgcccgccaaccccatgatgttggccttacctggaaacttagccactgttttccacacttgcctttctttcaggcacctgctgattccagtttcagccagggcacagtgcccaacattgctgaccaagtcttgctctatttctccttctcacctggcctcttccatcttggcctctggatgcattctctccctctcatgactcatttctgcattcatcactagcctcttctctgcctgggcttctgccagcggccctagagcaacctatggtattccacggacccactactggcgtctggacaccagccgggatggctggcatagctggcccattgctcatcagtggccccagggtccttcagcagtggatgctgccttttcctgggaagaaaaactctatctggtccagggcacccaggtatatgtcttcctgacaaagggaggctataccctagtaagcggttatccgaagcggctggagaaggaagtcgggacccctcatgggattatcctggactctgtggatgcggcctttatctgccctgggtcttctcggctccatatcatggcaggacggcggctgtggtggctggacctgaagtcaggagcccaagccacgtggacagagcttccttggccccatgagaaggtagacggatgatgtggagaaactgaatgcagccaaggcccttccgcaaccccagaatgtgaccagtctcctgggctgcactcactgaggggccttctgacatgagtctggcctggccccacctcctagttcctcataataaagacagattgcttcttcgcttctcactgaggggccttctgacatgagtctggcctggccccacctccccagtttctcataataaagacagattgcttcttcacttgaatcaaggga

SEQ ID NO: 731467 - DNA, 1417 bp, Homo sapiens
aactctatatagggagttcaactggtcacccagagctgtcctgtggcctctgcagctcagcatggctagggtactgggagcacccgttgcactggggttgtggagcctatgctggtctctggccattgccacccctcttcctccgactagtgcccatgggaatgttgctgaaggcgagaccaagccagacccagacgtgactgaacgctgctcagatggctggagctttgatgctaccaccctggatgacaatggaaccatgctgttttttaaaggggagtttgtgtggaagagtcacaaatgggaccgggagttaatctcagagagatggaagaatttccccagccctgtggatgctgcattccgtcaaggtcacaacagtgtctttctgatcaagggggacaaagtctgggtataccctcctgcatccccactggatgcagctgtggaatgtcaccgtggagaatgtcaagctgaaggcgtcctcttcttccaaggtgaccgcgagtggttctgggacttggctacgggaaccatgaaggagcgttcctggccagctgttgggaactgctcctctgccctgagatggctgggccgctactactgcttccagggtaaccaattcctgcgcttcgaccctgtcaggggagaggtgcctcccaggtacccgcgggatgtccgagactacttcatgccctgccctggcagaggccatggacacaggaatgggactggccatgggaacagtacccaccatggccctgagtatatgcgctgtagcccacatctagtcttgtctgcactgacgtctgacaaccatggtgccacctatgccttcagtgggacccactactggcgtctggacaccagccgggatggctggcatagctggcccattgctcatcagtggccccagggtccttcagcagtggatgctgccttttcctgggaagactataccctagtaagcggttatccgaagcggctggagaaggaagtcgggacccctcatgggattatcctggactctgtggatgcggcctttatctgccctgggtcttctcggctccatatcatggcaggacggcggctgtggtggctggacctgaagtcaggagcccaagccacgtggacagagcttccttggccccatgagaaggtagacggatgatgtggagaaactgaatgcagccaaggcccttccgcaaccccagaatgtgaccagtctcctgggctgcactcactgaggggccttctgacatgagtctggcctggccccacctcctagttcctcataataaagacagattgcttcttcgcttctcactgaggggccttctgacatgagtctggcctggccccacctccccagtttctcataataaagacagattgcttcttcacttgaatcaaggga

SEQ ID NO: 731468 - DNA, 1471 bp, Homo sapiens
aactctatatagggagttcaactggtcacccagagctgtcctgtggcctctgcagctcagcatggctagggtactgggagcacccgttgcactggggttgtggagcctatgctggtctctggccattgccacccctcttcctccgactagtgcccatgggaatgttgctgaaggcgagaccaagccagacccagacgtgactgaacgctgctcagatggctggagctttgatgctaccaccctggatgacaatggaaccatgctgttttttaaaggggagtttgtgtggaagagtcacaaatgggaccgggagttaatctcagagagatggaagaatttccccagccctgtggatgctgcattccgtcaaggtcacaacagtgtctttctgatcaagggggacaaagtctgggtataccctcctgcatccccactggatgcagctgtggaatgtcaccgtggagaatgtcaagctgaaggcgtcctcttcttccaaggtgaccgcgagtggttctgggacttggctacgggaaccatgaaggagcgttcctggccagctgttgggaactgctcctctgccctgagatggctgggccgctactactgcttccagggtaaccaattcctgcgcttcgaccctgtcaggggagaggtgcctcccaggtacccgcgggatgtccgagactacttcatgccctgccctggcagaggccatggacacaggaatgggactggccatgggaacagtacccaccatggccctgagtatatgcgctgtagcccacatctagtcttgtctgcactgacgtctgacaaccatggtgccacctatgccttcagtgggacccactactggcgtctggacaccagccgggatggctggcatagctggcccattgctcatcagtggccccagggtccttcagcagtggatgctgccttttcctgggaagaaaaactctatctggtccagggcacccaggtatatgtcttcctgacaaagggaggctataccctagtaagcggttatccgaagcggctggagaaggaagtcgggacccctcatgggattatcctggactctgtggatgcggcctttatctgccctgggtcttctcggctccatatcatggcaggacggcggctgtggtggctggacctgaagtcaggagcccaagccacgtggacagagcttccttggccccatgagaaggtagacggatgatgtggagaaactgaatgcagccaaggcccttccgcaaccccagaatgtgaccagtctcctgggctgcactcactgaggggccttctgacatgagtctggcctggccccacctcctagttcctcataataaagacagattgcttcttcgcttctcactgaggggccttctgacatgagtctggcctggccccacctccccagtttctcataataaagacagattgcttcttcacttgaatcaaggga

SEQ ID NO: 731469 - DNA, 1471 bp, Homo sapiens
aactctatatagggagttcaactggtcacccagagctgtcctgtggcctctgcagctcagcatggctagggtactgggagcacccgttgcactggggttgtggagcctatgctggtctctggccattgccacccctcttcctccgactagtgcccatgggaatgttgctgaaggcgagaccaagccagacccagacgtgactgaacgctgctcagatggctggagctttgatgctaccaccctggatgacaatggaaccatgctgttttttaaaggggagtttgtgtggaagagtcacaaatgggaccgggagttaatctcagagagatggaagaatttccccagccctgtggatgctgcattccgtcaaggtcacaacagtgtctttctgatcaagggggacaaagtctgggtataccctcctgaaaagaaggagaaaggatacccaaagttgctccaagatgaatttcctggaatcccatccccactggatgcagctgtggaatgtcaccgtggagaatgtcaagctgaaggcgtcctcttcttccaaggtgaccgcgagtggttctgggacttggctacgggaaccatgaaggagcgttcctggccagctgttgggaactgctcctctgccctgagatggctgggccgctactactgcttccagggtaaccaattcctgcgcttcgaccctgtcaggggagaggtgcctcccaggtacccgcgggatgtccgagactacttcatgccctgccctggcagaggccatggacacaggaatgggactggccatgggaacagtacccaccatggccctgagtatatgcgctgtagcccacatctagtcttgtctgcactgacgtctgacaaccatggtgccacctatgccttcagtgggacccactactggcgtctggacaccagccgggatggctggcatagctggcccattgctcatcagtggccccagggtccttcagcagtggatgctgccttttcctgggaagactataccctagtaagcggttatccgaagcggctggagaaggaagtcgggacccctcatgggattatcctggactctgtggatgcggcctttatctgccctgggtcttctcggctccatatcatggcaggacggcggctgtggtggctggacctgaagtcaggagcccaagccacgtggacagagcttccttggccccatgagaaggtagacggatgatgtggagaaactgaatgcagccaaggcccttccgcaaccccagaatgtgaccagtctcctgggctgcactcactgaggggccttctgacatgagtctggcctggccccacctcctagttcctcataataaagacagattgcttcttcgcttctcactgaggggccttctgacatgagtctggcctggccccacctccccagtttctcataataaagacagattgcttcttcacttgaatcaaggga

SEQ ID NO: 731470 - DNA, 1525 bp, Homo sapiens
aactctatatagggagttcaactggtcacccagagctgtcctgtggcctctgcagctcagcatggctagggtactgggagcacccgttgcactggggttgtggagcctatgctggtctctggccattgccacccctcttcctccgactagtgcccatgggaatgttgctgaaggcgagaccaagccagacccagacgtgactgaacgctgctcagatggctggagctttgatgctaccaccctggatgacaatggaaccatgctgttttttaaaggggagtttgtgtggaagagtcacaaatgggaccgggagttaatctcagagagatggaagaatttccccagccctgtggatgctgcattccgtcaaggtcacaacagtgtctttctgatcaagggggacaaagtctgggtataccctcctgaaaagaaggagaaaggatacccaaagttgctccaagatgaatttcctggaatcccatccccactggatgcagctgtggaatgtcaccgtggagaatgtcaagctgaaggcgtcctcttcttccaaggtgaccgcgagtggttctgggacttggctacgggaaccatgaaggagcgttcctggccagctgttgggaactgctcctctgccctgagatggctgggccgctactactgcttccagggtaaccaattcctgcgcttcgaccctgtcaggggagaggtgcctcccaggtacccgcgggatgtccgagactacttcatgccctgccctggcagaggccatggacacaggaatgggactggccatgggaacagtacccaccatggccctgagtatatgcgctgtagcccacatctagtcttgtctgcactgacgtctgacaaccatggtgccacctatgccttcagtgggacccactactggcgtctggacaccagccgggatggctggcatagctggcccattgctcatcagtggccccagggtccttcagcagtggatgctgccttttcctgggaagaaaaactctatctggtccagggcacccaggtatatgtcttcctgacaaagggaggctataccctagtaagcggttatccgaagcggctggagaaggaagtcgggacccctcatgggattatcctggactctgtggatgcggcctttatctgccctgggtcttctcggctccatatcatggcaggacggcggctgtggtggctggacctgaagtcaggagcccaagccacgtggacagagcttccttggccccatgagaaggtagacggatgatgtggagaaactgaatgcagccaaggcccttccgcaaccccagaatgtgaccagtctcctgggctgcactcactgaggggccttctgacatgagtctggcctggccccacctcctagttcctcataataaagacagattgcttcttcgcttctcactgaggggccttctgacatgagtctggcctggccccacctccccagtttctcataataaagacagattgcttcttcacttgaatcaaggga

SEQ ID NO: 731471 - DNA, 332 bp, Homo sapiens
gtcagtccaggctggaatccaagaacctggagtagtggtgggttggtagtgatgccagtagtgatggtgatagtggtagtgatggtggtggtggagccactatgtggctttttaaggaagggaaatagagaagccacgtatggtctagaggtcacgtgagggaaggagaggaagtcattctggtgaaggcaactgtgtgtaattctgtgtgaatagtccctcattgttccccatgacccttaggacaaatctaccctctttagtcttacatacaagtctctccatggccaaatccctattggcccttcagctttgacttttattatactttt

SEQ ID NO: 731472 - DNA, 1332 bp, Homo sapiens; identical to SEQ ID NO: 451809

SEQ ID NO: 731473 - DNA, 537 bp, Homo sapiens
catggctagggtactgggagcacccgttgcactggggttgtggagcctatgctggtctctggccattgccacccctcttcctccgactagtgcccatgggaatgttgctgaaggcgagaccaagccagacccagacgtgactgaacgctgctcagatggctggagctttgatgctaccaccctggatgacaatgccttgtgtatggaaaagtcccttggccctaactcatgttccgccaatggtcccggcttgtacctcatccatggtcccaatttgtactgctacagtgatgtggagaaactgaatgcagccaaggcccttccgcaaccccagaatgtgaccagtctcctgggctgcactcactgaggggccttctgacatgagtctggcctggccccacctcctagttcctcataataaagacagattgcttcttcgcttctcactgaggggccttctgacatgagtctggcctggccccacctccccagtttctcataataaagacagattgcttcttcacttgaatcaaggga

SEQ ID NO: 731474 - DNA, 1771 bp, Homo sapiens; identical to SEQ ID NO: 63152
  misc_feature (939)..(939): n is a, c, g, or t
  misc_feature (1164)..(1165): n is a, c, g, or t
  misc_feature (1168)..(1168): n is a, c, g, or t

SEQ ID NO: 731475 - DNA, 925 bp, Homo sapiens; identical to SEQ ID NO: 63153

SEQ ID NO: 731476 - DNA, 2138 bp, Homo sapiens; identical to SEQ ID NO: 64347

SEQ ID NO: 731477 - DNA, 1028 bp, Homo sapiens; identical to SEQ ID NO: 454330

SEQ ID NO: 731478 - DNA, 614 bp, Homo sapiens; identical to SEQ ID NO: 454332
  misc_feature (537)..(537): n is a, c, g, or t
  misc_feature (610)..(610): n is a, c, g, or t

SEQ ID NO: 731479 - DNA, 676 bp, Homo sapiens
  misc_feature (5)..(5): n is a, c, g, or t
  misc_feature (11)..(11): n is a, c, g, or t
gtctnccattnatccatactctcagaaaatgttcagcgaattcgataaacggtatacccatggccgggggttcattaccaaggccatcaacagctgccacacttcttcccttgccacccccgaagacaaggagcaagcccaacagatgaatcaaaaagactttctgagcctgatagtcagcatattgcgatcctggaatgagcctctgtatcatctggtcacggaagtacgtggtatgcaagaagccccggaggctatcctatccaaagctgtagagattgaggagcaaaccaaacggcttctagagggcatggagctgatagtcagccaggttcatcctgaaaccaaagaaaatgagatctaccctgtctggtcgggacttccatccctgcagatggctgatgaagagtctcgcctttctgcttattataacctgctccactgcctacgcagggattcacataaaatcgacaattatctcaagctcctgaagtgccgaatcatccacaacaacaactgctaagcccacatccatttcatctatttctgagaaggtccttaatgatccgttccattgcaagcttcttttagttgtatctcttttgaatccatgcttgggtgtaacaggtctcctcttaaaaaataaaaactgactccttagagacatcaaaataaa

SEQ ID NO: 731480 - DNA, 586 bp, Homo sapiens; identical to SEQ ID NO: 454355

SEQ ID NO: 731481 - DNA, 773 bp, Homo sapiens; identical to SEQ ID NO: 454333

SEQ ID NO: 731482 - DNA, 790 bp, Homo sapiens; identical to SEQ ID NO: 454370
  misc_feature (713)..(713): n is a, c, g, or t
  misc_feature (786)..(786): n is a, c, g, or t

SEQ ID NO: 731483 - DNA, 852 bp, Homo sapiens; identical to SEQ ID NO: 454343

SEQ ID NO: 731484 - DNA, 1356 bp, Homo sapiens; identical to SEQ ID NO: 454334

SEQ ID NO: 731485 - DNA, 1118 bp, Homo sapiens
  misc_feature (1041)..(1041): n is a, c, g, or t
  misc_feature (1114)..(1114): n is a, c, g, or t
atccttattctatatctcttggtatttagtgtaaaaattttaaaatctttacctagcaatcttgaggaagaaacttgataactgataatacatgagattgttacctaagtgaaatataatcctatatattcaacaaactttagagaaataagataaattttaaagtaaatgacttctgtagttttatagatcctccaaaccaatctagtctcagatctcaccttcatcatttctctcatttccttttggcctaattaatcaaaatccttcctagaatgttcatttctggccagtatgtcttcctgaatatgaataagaaataaaataccatttgatgtttgaaattatgggggtaatctcaatgacggaaatagatgaccaggaaaagggaaacgaatgcctgattcattatattcatgaagatatcaaaggtttataaagccaatatctgggaaagagaaaaccgtgagacttccagatcttctctggtgaagtgtgtttcctgcaacgatcacgaacatgaacatcaaaggatcgccatggaaagggtccctcctgctgctgctggtgtcaaacctgctcctgtgccagagcgtggcccccttgcccatctgtcccggcggggctgcccgatgccaggtgacccttcgagacctgtttgaccgcgccgtcgtcctgtcccactacatccataacctctcctcagaaatgttcagcgaattcgataaacggtatacccatggccgggggttcattaccaaggccatcaacagctgccacacttcttcccttgccacccccgaagacaaggagcaagcccaacagatgaatcaaaaagactttctgagcctgatagtcagcatattgcgatcctggaatgagcctctgtatcatctggtcacggaagtacgtggtatgcaagaagccccggaggctatcctatccaaagctgtagagattgaggagcaaaccaaacggcttctagagggcatggagctgatagtcagccaggtcatctgaaccgtgagactacctgctggncggacttcatcctgagatggtgatggctcgctttggtatatactgtcaatgtaccaggatactaatgcatttntctg

SEQ ID NO: 731486 - DNA, 1229 bp, Homo sapiens
atccttattctatatctcttggtatttagtgtaaaaattttaaaatctttacctagcaatcttgaggaagaaacttgataactgataatacatgagattgttacctaagtgaaatataatcctatatattcaacaaactttagagaaataagataaattttaaagtaaatgacttctgtagttttatagatcctccaaaccaatctagtctcagatctcaccttcatcatttctctcatttccttttggcctaattaatcaaaatccttcctagaatgttcatttctggccagtatgtcttcctgaatatgaataagaaataaaataccatttgatgtttgaaattatgggggtaatctcaatgacggaaatagatgaccaggaaaagggaaacgaatgcctgattcattatattcatgaagatatcaaaggtttataaagccaatatctgggaaagagaaaaccgtgagacttccagatcttctctggtgaagtgtgtttcctgcaacgatcacgaacatgaacatcaaaggatcgccatggaaagggtccctcctgctgctgctggtgtcaaacctgctcctgtgccagagcgtggcccccttgcccatctgtcccggcggggctgcccgatgccaggtgacccttcgagacctgtttgaccgcgccgtcgtcctgtcccactacatccataacctctcctcagaaatgttcagcgaattcgataaacggtatacccatggccgggggttcattaccaaggccatcaacagctgccacacttcttcccttgccacccccgaagacaaggagcaagcccaacagatgaatcaaaaagactttctgagcctgatagtcagcatattgcgatcctggaatgagcctctgtatcatctggtcacggaagtacgtggtatgcaagaagccccggaggctatcctatccaaagctgtagagattgaggagcaaaccaaacggcttctagagggcatggagctgatagtcagccaggttcatcctgaaaccaaagaaaatgagatctaccctgtctggtcgggacttccatccctgcagatggctgatgaagagtctcgcctttctgcttattataacctgctccactgcctacgcagggattcacataaaatcgacaattatctcaagctgaatgcgaatctccaaaaaaatggtagccaatcattcacattcgaaagtctatatcgtcctga

SEQ ID NO: 731487 - DNA, 1275 bp, Homo sapiens
atccttattctatatctcttggtatttagtgtaaaaattttaaaatctttacctagcaatcttgaggaagaaacttgataactgataatacatgagattgttacctaagtgaaatataatcctatatattcaacaaactttagagaaataagataaattttaaagtaaatgacttctgtagttttatagatcctccaaaccaatctagtctcagatctcaccttcatcatttctctcatttccttttggcctaattaatcaaaatccttcctagaatgttcatttctggccagtatgtcttcctgaatatgaataagaaataaaataccatttgatgtttgaaattatgggggtaatctcaatgacggaaatagatgaccaggaaaagggaaacgaatgcctgattcattatattcatgaagatatcaaaggtttataaagccaatatctgggaaagagaaaaccgtgagacttccagatcttctctggtgaagtgtgtttcctgcaacgatcacgaacatgaacatcaaaggatcgccatggaaagggtccctcctgctgctgctggtgtcaaacctgctcctgtgccagagcgtggcccccttgcccatctgtcccggcggggctgcccgatgccaggtgacccttcgagacctgtttgaccgcgccgtcgtcctgtcccactacatccataacctctcctcagaaatgttcagcgaattcgataaacggtatacccatggccgggggttcattaccaaggccatcaacagctgccacacttcttcccttgccacccccgaagacaaggagcaagcccaacagatgaatcaaaaagactttctgagcctgatagtcagcatattgcgatcctggaatgagcctctgtatcatctggtcacggaagtacgtggtatgcaagaagccccggaggctatcctatccaaagctgtagagattgaggagcaaaccaaacggcttctagagggcatggagctgatagtcagccaggttcatcctgaaaccaaagaaaatgagatctaccctgtctggtcgggacttccatccctgcagatggctgatgaagagtctcgcctttctgcttattataacctgctccactgcctacgcagggattcacataaaatcgacaattatctcaagctgcccctggctaaccagggtccctttaacgcgcattttctaggccctgaatgcgaatctccaaaaaaatggtagccaatcattcacattcgaaagtctatatcgtcctga

SEQ ID NO: 731488 - DNA, 1254 bp, Homo sapiens
atccttattctatatctcttggtatttagtgtaaaaattttaaaatctttacctagcaatcttgaggaagaaacttgataactgataatacatgagattgttacctaagtgaaatataatcctatatattcaacaaactttagagaaataagataaattttaaagtaaatgacttctgtagttttatagatcctccaaaccaatctagtctcagatctcaccttcatcatttctctcatttccttttggcctaattaatcaaaatccttcctagaatgttcatttctggccagtatgtcttcctgaatatgaataagaaataaaataccatttgatgtttgaaattatgggggtaatctcaatgacggaaatagatgaccaggaaaagggaaacgaatgcctgattcattatattcatgaagatatcaaaggtttataaagccaatatctgggaaagagaaaaccgtgagacttccagatcttctctggtgaagtgtgtttcctgcaacgatcacgaacatgaacatcaaaggatcgccatggaaagggtccctcctgctgctgctggtgtcaaacctgctcctgtgccagagcgtggcccccttgcccatctgtcccggcggggctgcccgatgccaggtgacccttcgagacctgtttgaccgcgccgtcgtcctgtcccactacatccataacctctcctcagaaatgttcagcgaattcgataaacggtatacccatggccgggggttcattaccaaggccatcaacagctgccacacttcttcccttgccacccccgaagacaaggagcaagcccaacagatgaatcaaaaagactttctgagcctgatagtcagcatattgcgatcctggaatgagcctctgtatcatctggtcacggaagtacgtggtatgcaagaagccccggaggctatcctatccaaagctgtagagattgaggagcaaaccaaacggcttctagagggcatggagctgatagtcagccaggttcatcctgaaaccaaagaaaatgagatctaccctgtctggtcgggacttccatccctgcagatggctgatgaagagtctcgcctttctgcttattataacctgctccactgcctacgcagggattcacataaaatcgacaattatctcaagctctttaatcggcatttttcaagatctgaatgcgaatctccaaaaaaatggtagccaatcattcacattcgaaagtctatatcgtcctga

SEQ ID NO: 731489 - DNA, 901 bp, Homo sapiens
ctgacgtttctataaagtaggtcataagaaccttcattccagaagtaccctcaaagacagagacaccaagaagaatcggaacatacaggctttgatatcaaaggtttataaagccaatatctgggaaagagaaaaccgtgagacttccagatcttctctggtgaagtgtgtttcctgcaacgatcacgaacatgaacatcaaaggatcgccatggaaagggtccctcctgctgctgctggtgtcaaacctgctcctgtgccagagcgtggcccccttgcccatctgtcccggcggggctgcccgatgccaggtgacccttcgagacctgtttgaccgcgccgtcgtcctgtcccactacatccataacctctcctcagaaatgttcagcgaattcgataaacggtatacccatggccgggggttcattaccaaggccatcaacagctgccacacttcttcccttgccacccccgaagacaaggagcaagcccaacagatgaatcaaaaagactttctgagcctgatagtcagcatattgcgatcctggaatgagcctctgtatcatctggtcacggaagtacgtggtatgcaagaagccccggaggctatcctatccaaagctgtagagattgaggagcaaaccaaacggcttctagagggcatggagctgatagtcagccaggttcatcctgaaaccaaagaaaatgagatctaccctgtctggtcgggacttccatccctgcagatggctgatgaagagtctcgcctttctgcttattataacctgctccactgcctacgcagggattcacataaaatcgacaattatctcaagctgaatgcgaatctccaaaaaaatggtagccaatcattcacattcgaaagtctatatcgtcctga

SEQ ID NO: 731490 - DNA, 947 bp, Homo sapiens
ctgacgtttctataaagtaggtcataagaaccttcattccagaagtaccctcaaagacagagacaccaagaagaatcggaacatacaggctttgatatcaaaggtttataaagccaatatctgggaaagagaaaaccgtgagacttccagatcttctctggtgaagtgtgtttcctgcaacgatcacgaacatgaacatcaaaggatcgccatggaaagggtccctcctgctgctgctggtgtcaaacctgctcctgtgccagagcgtggcccccttgcccatctgtcccggcggggctgcccgatgccaggtgacccttcgagacctgtttgaccgcgccgtcgtcctgtcccactacatccataacctctcctcagaaatgttcagcgaattcgataaacggtatacccatggccgggggttcattaccaaggccatcaacagctgccacacttcttcccttgccacccccgaagacaaggagcaagcccaacagatgaatcaaaaagactttctgagcctgatagtcagcatattgcgatcctggaatgagcctctgtatcatctggtcacggaagtacgtggtatgcaagaagccccggaggctatcctatccaaagctgtagagattgaggagcaaaccaaacggcttctagagggcatggagctgatagtcagccaggttcatcctgaaaccaaagaaaatgagatctaccctgtctggtcgggacttccatccctgcagatggctgatgaagagtctcgcctttctgcttattataacctgctccactgcctacgcagggattcacataaaatcgacaattatctcaagctgcccctggctaaccagggtccctttaacgcgcattttctaggccctgaatgcgaatctccaaaaaaatggtagccaatcattcacattcgaaagtctatatcgtcctga

SEQ ID NO: 731491 - DNA, 926 bp, Homo sapiens
ctgacgtttctataaagtaggtcataagaaccttcattccagaagtaccctcaaagacagagacaccaagaagaatcggaacatacaggctttgatatcaaaggtttataaagccaatatctgggaaagagaaaaccgtgagacttccagatcttctctggtgaagtgtgtttcctgcaacgatcacgaacatgaacatcaaaggatcgccatggaaagggtccctcctgctgctgctggtgtcaaacctgctcctgtgccagagcgtggcccccttgcccatctgtcccggcggggctgcccgatgccaggtgacccttcgagacctgtttgaccgcgccgtcgtcctgtcccactacatccataacctctcctcagaaatgttcagcgaattcgataaacggtatacccatggccgggggttcattaccaaggccatcaacagctgccacacttcttcccttgccacccccgaagacaaggagcaagcccaacagatgaatcaaaaagactttctgagcctgatagtcagcatattgcgatcctggaatgagcctctgtatcatctggtcacggaagtacgtggtatgcaagaagccccggaggctatcctatccaaagctgtagagattgaggagcaaaccaaacggcttctagagggcatggagctgatagtcagccaggttcatcctgaaaccaaagaaaatgagatctaccctgtctggtcgggacttccatccctgcagatggctgatgaagagtctcgcctttctgcttattataacctgctccactgcctacgcagggattcacataaaatcgacaattatctcaagctctttaatcggcatttttcaagatctgaatgcgaatctccaaaaaaatggtagccaatcattcacattcgaaagtctatatcgtcctga

SEQ ID NO: 731492 - DNA, 1001 bp, Homo sapiens; identical to SEQ ID NO: 454369

SEQ ID NO: 731493 - DNA, 772 bp, Homo sapiens
tgtcaaacctgctcctgtgccagagcgtggcccccttgcccatctgtcccggcggggctgcccgatgccaggtgacccttccgccgtcgtcctgtcccactacatccataacctctcctcagaaatgttcagcgaattcgataaacggtatacccatggccgggggttcattaccaaggccatcaacagctgccacacttcttcccttgccacccccgaagacaaggagcaagcccaacagatgaatcaaaaagactttctgagcctgatagtcagcatattgcgatcctggaatgagcctctgtatcatctggtcacggaagtacgtggtatgcaagaagccccggaggctatcctatccaaagctgtagagattgaggagcaaaccaaacggcttctagagggcatggagctgatagtcagccaggttcatcctgaaaccaaagaaaatgagatctaccctgtctggtcgggacttccatccctgcagatggctgatgaagagtctcgcctttctgcttattataacctgctccactgcctacgcagggattcacataaaatcgacaattatctcaagctcctgaagtgccgaatcatccacaacaacaactgctaagcccacatccatttcatctatttctgagaaggtccttaatgatccgttccattgcaagcttcttttagttgtatctcttttgaatccatgcttgggtgtaacaggtctcctcttaaaaaataaaaactgactccttagagacatcaaaataaa

SEQ ID NO: 731494 - DNA, 3290 bp, Homo sapiens
  misc_feature (1540)..(1540): n is a, c, g, or t
  misc_feature (3281)..(3286): n is a, c, g, or t
  misc_feature (3288)..(3290): n is a, c, g, or t
gtcaatttcgggaggataaagcaaaaagaaaaaaatgctaatgtgagaacaagcatgccagcaagccatggtcaccccacacccaataaaacaggtaaacaggaaaacacaaaaagtacctgtgagtatgaatagtatatataaaatattttcaaagaaacaagttactcttatgtatcttcaatagaaaggaaaaactattatttattcagcttatgtataattatgttttctgttgctgattcagttacttttgggaaaggcagtacaagtaaagccactcaatatggctttgtgttggacattcgtagtttcttagaacagctaacgaaaatgtagcttttatgccctttgttttttaacataaagaatctgagattgaagaggtagtgtgttcaggattacagaatgataaatggtggaatctagactcaaatgtaaagcagtattatttccaaagccagctacttttgtgttcagctatattgtttttgaattttcagtgatttattggtaggctttttgttatctgggaattccttctattaaaattatattgtcaagtgttgaaatatgcaggttttaactagttgcattgacacagcttgattttgtgtcactctaaaactcaccccctgctcccccagggagcaaaaacaaataaaaaccacatataaacatagctttctaggaacagtagtttcagatactgcttcctaaattgttcaaatatcttagcttttcagttctgtttgttccaaggtggtcatatattgttatttttcaataatcagatttagttgttttgccatttttgtttagggagttactattaattgttttttaatattaagcatgataaacttcagatgtttctctttttaaagacctggttttcgtatattgagtggtttcacttttgttaccttgccccaaagtaattgaatcagcaacagaagaaagcatgacattttaattgtctacgtcaaattacataatctagtgaagtatgaagactcactgttaaattattaatgacttttgtttattaaaccaagcagtgaaagagatggtatagggacattcccctcatattttataagtcatactactggctaaatagtatcaggattgtttttagctctgcattgctaactgagtgatctgtctaaaacttaaattagactgtgtccctcctttgcttttaagtcttaaaaactgctgcttaccagtcaaagtctatattacttagtatggtatttaaagcttttaagttctagccccctgctgactaccctaacgtcattcctatatatttcaaagcctatcctaccgaagtttgtctgctggcaacactaactactatttttctgtatgtagagagattctacactttggtttatatattctattctgtcctatttgactgttttcccttaccaccagactatttggtctcctttttccccacatttgtaactttttatattctttttaagacgtgctcttgctcttttgctcagagttgagtgcagtcgtnaatcatagctcatcgtggccttgaactcctgggctcaagcaatcttcctgcctcagcctcccaagtgtagctggggctacagacgtacaccagcatgcctggctaattttatttttatttttatttttagagacagggtgttgttgtgttgcccaggctggtcttaaactcctggcctcaactcctgcctcagctgggattacaggtgtgagccactgggctgggtggctatcatgttttatctaaaattagaaactccttgaggcagggaccatttatctttgtatctttagtgttcagcacctagtagtaactcagcaaatgtttgttttctttctgacatatttgtcatatttgtatttgttgtatttagcatcagaaagccaaatatggtcattcaacgttaatttgactgattccttttgttattttagtccagaattgctaccaaagtgtttaggtttgacctttttgtgcccaggaagtctagtcgttttgatgataaatctaaattggttgaggtgtaatgaaaaagacaaccaggtgtctagaagtgactgtgacaattgcagatttatcttgtttgtgcatgctggtttttttttttttcagtgttcaaagcctgtattgcatcaggttttcaggtttagatttcctaaatttggaacacaaagttccctttttagaagaataggtattgagcccttgagcgtgggtagaaagatagagacagagtgatttgcaaaataatggaggatcatatttatatatgaattttcacttatttgaactttcagatatcagctcaaaagctttggtataagtaaagtatattaatgagactccttggatgaaagtaaccaaaaccagtaaaaataaggtaataaggatgtaatagtttcttatggacactcaacagctagaatgcagttagtctcagaaaagaattagaacaaataactggaaggccatcaggagtccaaaaccatcactcttttatattttatattttatttttctctcttcagatgagcattctctttctatgtccatatggtagaaggcggcagctccatagattatggcttcagatgttacagttccgctaaatgcagggacagacttgctatctttcagtcccacttacatatcctggggagagagcaaatgattgactggcttgagtcaggtgcccgttccctttccaatctgctccatctaggagggcagtgttacctggtaccaaaatagatgttagagggccacccctttcaaaagggagaatagctctcacaacagggcttctatgttgtgcaggttgcttattccacatgctgcttgccaagctgtatgcctataagggctgcagttttaaaatttgtacaaaggtgctttatggatttgtggtaaccttttctcagagaaaggaggagtcattgtgaattggggggctattccaagggggtctgctatgtcatttttgggggatatttattgtccatcttagtattgccagactcttagcattgaaatattagattgtctctcacccttgggccatggagttttattgcagcaaaaacaaaaatccatatgtatataagtgttttctcaataggtatattgacagtggacttactatgatgtggagctttgacatttgtggacctgctgcggtgtccttacactcattgagaaccattgatgttacgcaaatgctattaaactttgcatctaagannnnnnannn

SEQ ID NO: 731495 - DNA, 1583 bp, Homo sapiens; identical to SEQ ID NO: 62735
  misc_feature (14)..(14): n is a, c, g, or t
  misc_feature (16)..(16): n is a, c, g, or t
  misc_feature (23)..(23): n is a, c, g, or t
  misc_feature (30)..(30): n is a, c, g, or t

SEQ ID NO: 731496 - DNA, 1843 bp, Homo sapiens; identical to SEQ ID NO: 62738
  misc_feature (14)..(14): n is a, c, g, or t
  misc_feature (16)..(16): n is a, c, g, or t
  misc_feature (23)..(23): n is a, c, g, or t
  misc_feature (30)..(30): n is a, c, g, or t

SEQ ID NO: 731497 - DNA, 1411 bp, Homo sapiens; identical to SEQ ID NO: 62739
  misc_feature (14)..(14): n is a, c, g, or t
  misc_feature (16)..(16): n is a, c, g, or t
  misc_feature (23)..(23): n is a, c, g, or t
  misc_feature (30)..(30): n is a, c, g, or t

SEQ ID NO: 731498 - DNA, 847 bp, Homo sapiens
  misc_feature (14)..(14): n is a, c, g, or t
  misc_feature (16)..(16): n is a, c, g, or t
  misc_feature (23)..(23): n is a, c, g, or t
  misc_feature (30)..(30): n is a, c, g, or t
ccccgccacaaccnangctagtncgaggcngggtgtgtaatcggccgagggaagccctggggcgctgccgccgctttccttaaccacaaatcaggccggacaggagagggaggggtgggggacagtgggtgggcattcagactgccagcactttgctatctacagccggggctcccgagcggcagaaagttccggccactctctgccgcttgggttgggcgaagccaggaccgtgccgcgccaccgccaggatatggagctactgtcgccaccgctccgcgacgtagacctgacggcccccgacggctctctctgctcctttgccacaacggacgacttctatgacgacccgtgtttcgactccccggacctgcgcttcttcgaagacctggacccgcgcctgatgcacgtgggcgcgctcctgaaacccgaagagcactcgcacttccccgcggcggtgcacccggccccgggcgcacgtgaggacgagcatcggcgccgcctgagcaaagtaaatgaggcctttgagacactcaagcgctgcacgtcgagcaatccaaaccagcggttgcccaaggtggagatcctgcgcaacgccatccgctatatcgagggcctgcaggctctgctgcgcgaccaggacgccgcgccccctggcgccgcagccgccttctatgcgccgggcccgctgcccccgggccgcggcggcgagcactacagcggcgactccgacgcgtccagcccgcgctccaactgctccgacggcatgatggactacagcggcccccgagcggcgcccggcggcggaactgctacgaaggcgcctactacaacgaggcgcccagcg

SEQ ID NO: 731499 - DNA, 1151 bp, Homo sapiens
  misc_feature (14)..(14): n is a, c, g, or t
  misc_feature (16)..(16): n is a, c, g, or t
  misc_feature (23)..(23): n is a, c, g, or t
  misc_feature (30)..(30): n is a, c, g, or t
ccccgccacaaccnangctagtncgaggcngggtgtgtaatcggccgaggctctgctcctttgccacaacggacgacttctatgacgacccgtgtttcgactccccggacctgcgcttcttcgaagacctggacccgcgcctgatgcacgtgggcgcgctcctgaaacccgaagagcactcgcacttccccgcggcggtgcacccggccccgggcgcacgtgaggacgagcatgtgcgcgcgcccagcgggcaccaccaggcgggccgctgcctactgtgggcctgcaaggcgtgcaagcgcaagaccaccaacgccgaccgccgcaaggccgccaccatgcgcgagcggcgccgcctgagcaaagtaaatgaggcctttgagacactcaagcgctgcacgtcgagcaatccaaaccagcggttgcccaaggtggagatcctgcgcaacgccatccgctatatcgagggcctgcaggctctgctgcgcgaccaggacgccgcgccccctggcgccgcagccgccttctatgcgccgggcccgctgcccccgggccgcggcggcgagcactacagcggcgactccgacgcgtccagcccgcgctccaactgctccgacggcatgatggactacagcggcccccgagcggcgcccggcggcggaactgctacgaaggcgcctactacaacgaggcgcccagcgaacccaggcccgggaagagtgcggcggtgtcgagcctagactgcctgtccagcatcgtggagcgcatctccaccgagagccctgcggcgcccgccctcctgctggcggacgtgccttctgagtcgcctccgcgcaggcaagaggctgccgcccccagcgagggagagagcagcggcgaccccaacccagtgcactccggtcccaaatgtagcaggtgtaaccgtaacccacccccaacccgtttcccggttcaggaccactttttgtaatacttttgtaatctattcctgtaaataagagttgctttgccagagcaggagcccctggggctgtatttatctctgaggcatggtgtgtggtgctacagggaatttgtacgtttataccgcaggcgggcgagccgcgggcgctcgctcaggtgatcaaaataaaggcgctaatttataccgc

SEQ ID NO: 731500 - DNA, 2494 bp, Homo sapiens; identical to SEQ ID NO: 62734
  misc_feature (14)..(14): n is a, c, g, or t
  misc_feature (16)..(16): n is a, c, g, or t
  misc_feature (23)..(23): n is a, c, g, or t
  misc_feature (30)..(30): n is a, c, g, or t

SEQ ID NO: 731501 - DNA, 521 bp, Homo sapiens
tgttggcaggcctttcatcccatctacaatgggactataagatttattaattagtaaaacagcaatagttataacaaaataaaaaccaaaaaacacttaaaaatattcagagagttgcgtagaatattctagaatttgtctatatttttgaggttggtgttctagtttcctgatagctggacagccaactcattattgtattgaattgcattaaccattcaaattctctctgcagttacagaatttgttgggcggagatatcggagaacagtggggattttttaccaagttgcctatacagttgggctcctggtgctagctggggtggcttacgcacttcctcactggaggtggttgcagttcacagttgctctgcccaacttcttcttcttgctctattactggtaagtccatttggaataaaaaggaaataaatcaaagtattttattctgctaagaagtctgccttccttaatgcacactatctttctgattctgagattgctttcactctccagacc

SEQ ID NO: 731502 - DNA, 734 bp, Homo sapiens
accaaaggagctcaactgacttattttacctccccattctggagctttagagaattccaaaaccatagggtgatttgggaacaggtccaaagggcatggcctgggaccaacaaaatgaaaaaagcagcatttctacgatgaatatcaagcaatgtcctggcattcccgaagaccaagatgattgagaaaacttgcaatttgaacaaaatgttttaattgcagtcttcatttatcaagctgttgaaaaaccaagaaaaaataaagaaaagatgatttacctccaagttcagaaactagacattccattgaactaagaagagagaccgttgctgctgtcatgacctagctttgatggcagcaagaccaaaagtagaaatccctgcactcatcacaaagcccatacaactcaaccaaacttacccctgagccctatcaacctaggtctacagccagtggagtctattgtacactgtggaaaaatacccatgggaccagatcctgccaaattcttccagctcactttattctcagcattcctaggacattggacattggttttctggagggttttttttccatctttgtatttttttaaatttgattcttttctttgcaatgctatctaaccagaatacataggggaactgtgggctaggcaaacaaaatagaaaaaagtgtgaaaaacagtaaagttgggagaggagcatctattttcttaaagaaataaaacaccc

SEQ ID NO: 731503 - DNA, 2264 bp, Homo sapiens
gtgcacctttgaagtcagctggaccaaggaaaggccctgccctgaaggctggtcacttgcagaggtaaactcccctctttgacttctggccagggtttgtgctgagctggctgcagccgctctcagcctcgctccgggcacgtcgggcagcctcgggccctcctgcctgcaggatcatgcccaccaccgtggacgatgtcctggagcatggaggggagtttcactttttccagaagcaaatgtttttcctcttggctctgctctcggctaccttcgcgcccatctacgtgggcatcgtcttcctgggcttcacccctgaccaccgctgccggagccccggagtggccgagctgagtctgcgctgcggctggagtcctgcagaggaactgaactacacggtgccgggcccaggacctgcgggcgaagcctccccaagacagtgtaggcgctacgaggtggactggaaccagagcaccttcgactgcgtggaccccctggccagcctggacaccaacaggagccgcctgccactgggcccctgccgggacggctgggtgtacgagacgcctggctcgtccatcgtcaccgagtttaacctggtatgtgccaactcctggatgttggacctattccagtcatcagtgaatgtaggattctttattggctctatgagtatcggctacatagcagacaggtttggccgtaagctctgcctcctaactacagtcctcataaatgctgcagctggagttctcatggccatttccccaacctatacgtggatgttaatttttcgcttaatccaaggactggtcagcaaagcaggctggttaataggctacatcctgattacagaatttgttgggcggagatatcggagaacagtggggattttttaccaagttgcctatacagttgggctcctggtgctagctggggtggcttacgcacttcctcactggaggtggttgcagttcacagttgctctgcccaacttcttcttcttgctctattactggtgcatacctgagtctcccaggtggctgatctcccagaataagaatgctgaagccatgagaatcattaagcacatcgcaaagaaaaatggaaaatctctacccgcctcccttcagcgcctgagacttgaagaggaaactggcaagaaattgaacccttcatttcttgacttggtcagaactcctcagataaggaaacatactatgatattgatgtacaactggttcacgagctctgtgctctaccagggcctcatcatgcacatgggccttgcaggtgacaatatctacctggatttcttctactctgccctggttgaattcccagctgccttcatgatcatcctcaccatcgaccgcatcggacgccgttacccttgggctgcatcaaatatggttgcaggggcagcctgtctggcctcagtttttatacctggtgatctacaatggctaaaaattattatctcatgcttgggaagaatggggatcacaatggcctatgagatagtctgcctggtcaatgctgagctgtaccccacattcattaggaatcttggcgtccacatctgttcctcaatgtgtgacattggtggcatcatcacgccattcctggtctaccggctcactaacatctggcttgagctcccgctgatggttttcggcgtacttggcttggttgctggaggtctggtgctgttgcttccagaaactaaagggaaagctttgcctgagaccatcgaggaagccgaaaatatgcaaagaccaagaaaaaataaagaaaagatgatttacctccaagttcagaaactagacattccattgaactaagaagagagaccgttgctgctgtcatgacctagctttgatggcagcaagaccaaaagtagaaatccctgcactcatcacaaagcccatacaactcaaccaaacttacccctgagccctatcaacctaggtctacagccagtggagtctattgtacactgtggaaaaatacccatgggaccagatcctgccaaattcttccagctcactttattctcagcattcctaggacattggacattggttttctggagggttttttttccatctttgtatttttttaaatttgattcttttctttgcaatgctatctaaccagaatacataggggaactgtgggctaggcaaacaaaatagaaaaaagtgtgaaaaacagtaaagttgggagaggagcatctattttcttaaagaaataaaacaccc

SEQ ID NO: 731504 - DNA, 824 bp, Homo sapiens; identical to SEQ ID NO: 326839

SEQ ID NO: 731505 - DNA, 908 bp, Homo sapiens
gaacaggtccaaagggcatggcctgggaccaacaaaatgaaaaaagcagcatttctacgatgaatatcaagcaatgtcctggcattcccgaagaccaagatgattgagaaaacttgcaatttgaacaaaatgttttaattgcagtcttcatttatcaagctgttgaaaaaccaagaaaaaataaagaaaagatgatttacctccaagttcagaaactagacattccattgaactaagaagagagaccgttgctgctgtcatgacctagctttgatggcagcaagaccaaaagtagaaatccctgcactcatcacaaagcccatacaactcaaccaaacttacccctgagccctatcaacctaggtctacagccagtggagtctattgtacactgtggaaaaatacccatgggaccagatcctgccaaattcttccagctcactttattctcagcattcctaggacattggacattggttttctggagggttttttttccatctttgtatttttttaaatttgattcttttctttgcaatgctatctaaccagaatacataggggaactgtgggctaggcaaacaaaatagaaaaaagtgtgaaaaacagtaaagttgggagaggagcatctattttcttaaagaaataaaacacccaaaacaatataaagttgtccagaatgtatgtcaagaattttagataggcctttcagtaacacaggtgacgaaatttttaaaaatacattgattattatctaggttagacttaaagtgaatctcaaataaaagaatcaggaatacaacttaagtaatcatgaggtccttccatatttagattgggtaagcatgaatgtgtattttctacaaaagaccttgagaagagttcaataaaaaatgttagcattataa

SEQ ID NO: 731506 - DNA, 2159 bp, Homo sapiens; identical to SEQ ID NO: 326838

SEQ ID NO: 731507 - DNA, 662 bp, Homo sapiens
accaagaaaaaataaagaaaagatgatttacctccaagttcagaaactagacattccattgaactaagaagagagaccgttgctgctgtcatgacctagctttgatggcagcaagaccaaaagtagaaatccctgcactcatcacaaagcccatacaactcaaccaaacttacccctgagccctatcaacctaggtctacagccagtggagtctattgtacactgtggaaaaatacccatgggaccagatcctgccaaattcttccagctcactttattcttttctttgcaatgctatctaaccagaatacataggggaactgtgggctaggcaaacaaaatagaaaaaagtgtgaaaaacagtaaagttgggagaggagcatctattttcttaaagaaataaaacacccaaaacaatataaagttgtccagaatgtatgtcaagaattttagataggcctttcagtaacacaggtgacgaaatttttaaaaatacattgattattatctaggttagacttaaagtgaatctcaaataaaagaatcaggaatacaacttaagtaatcatgaggtccttccatatttagattgggtaagcatgaatgtgtattttctacaaaagaccttgagaagagttcaataaaaaatgttagcattataa

SEQ ID NO: 731508 - DNA, 2966 bp, Homo sapiens
  misc_feature (2)..(2): n is a, c, g, or t
  misc_feature (7)..(7): n is a, c, g, or t
  misc_feature (9)..(9): n is a, c, g, or t
  misc_feature (41)..(41): n is a, c, g, or t
tnacaantnttaatgaggcaatgttaaatatggacccaatntcagacaaatacatagaaaggagtaagggccaactctcatgcataaggtatcccatcctatagcaaatcagatatataggtacgcttgatgccacaaattttttaaaaaattgtccattttgttgcgtgtgcacctcttgccataaatttgagtcagcaccagcgacagctctgcagtcctcctatgtggtactgatcaggtggttgcagagcttcagctcacagcaacacaatgcagctgagcaggcaagcacagcccacagccagaaacagttccgactctacagaacaagacgacctttaagtttcccagagaaaatgagatgctgatgttgaagacgacaccacggtaagatgttatttaaatcagtaaaaggctgactttggaatctttttcctttttcttttaagaaaaagtcaacgttaggattaaatatatattcaatagcaagtgcatgcaccagaaatttgctgcagtgtcagttgagggatattttttatacattcagtcactctgtaaatatacatattgttttcctttaaaatgggcactgaaatatacagaaaaaaatcactttataaaatgtgaggtttataggtactgtgttggtctggatttttcaagtgctttttacaaagatatatttatcctaaaaacatacagataaaatttcgaagactgctttaatatctaaataaaatctaccctatatacacacattgaattacattactgcagagattaaaaaaaaaagacacgacagccatttttctcatctgagtaagaaagcatatcatcaaaaatagtaatagcctacaactgcaactatttatttgcaaagaatgctattttatcatattaaggctctagaaagataaataagaaagaatatggttagaaaaggggggagggagagagaaaataaaggagaaaatgcaggagagagtagggagagagtctctctctaccacatagcccaatgaaggattaagcattgactataaatgaagggagctttgttagtttaatcactggaacaattataaaaggactcgacaacaacgaggtttattgaaaattttgcctaatgctaactgacccatgcagatgcctaaactgtatttgcatattaaaagaagggtgtatctgtttgtttctaggctttgatggaatatcagatattgaaaatgtctctctgcctgttcatccttctgtttctcacacctggtattttatgcatttgtcctctccaatgtatatgcacagagaggcacaggcatgtggactgttcaggcagaaacttgtctacattaccatctggactgcaagagaatattatacatttaaacctgtcttataaccactttactgatctgcataaccagttaacccaatataccaatctgaggaccctggacatttcaaacaacaggcttgaaagcctgcctgctcacttacctcggtctctgtggaacatgtctgctgctaacaacaacattaaacttcttgacaaatctgatactgcttatcagtggaatcttaaatatctggatgtttctaagaacatgctggaaaaggttgtcctcattaaaaatacactaagaagtctcgaggttctcaacctcagtagtaacaaactttggacagttccaaccaacatgccctccaaactacatatcgtggacctgtctaataattctttgacacaaattcttccaggtacattaataaacctgacaaatctcacacatctttacctgcacaacaataagttcacattcattccagaccaatcttttgaccaactctttcagttgcaagagataaccctttacaataacaggtggtcatgtgaccacaaacaaaacattacttacttactgaagtggatgatggaaacaaaagcccatgtgatagggactccatgttctacccaaatatcatctttaaaggaacataacatgtatcccacaccttctggatttacctcaagcttattcactgtaagtgggatgcagacagtggacaccattaactctctgagtgtggtaactcaacccaaagtgaccaaaatacccaaacaatatcgaacaaaggaaacaacgtttggtgccactctaagcaaagacaccacctttactagcactgataaggattttgtgccctatccagaagatacatccacagagactatcaattcacatgaagcagcagctgcaactctaactattcatctccaagatggaatggtcacaaacacaagcctcactagctcaacaaaatcatccccaacacccatgaccctaagtatcactagtggcatgccaaataatttctctgaaatgcctcaacaaagcacaacccttaacttatggagggaagagacaaccacaaatgtaaagactccattaccttctgtggcaaatgcttggaaagtaaatgcttcatttctcttattgctcaatgttgtggtcatgctggctgtctgagggtctgcattttctgaaactaatgaaagcactcctccctgatgtacagttgggaaaatatgtccatatctaaccagtgattcgagctatatttaagtattcaagaaagccagtcttaacatttctaactctgatgtaaatgaagtaacttgtcttaaataaaagaaatgcacaatgtcttggtacttgctgctattttactgtcttaattaagtaaactaatgagtttcttttataaaaaaaatgaaatgttttaaggcttcaatttattgcacaaaatataaagcatctaaactttaatatgtattttatgtatgtttacactgtcaaacatctggaaaataaaaggtctatgctcataactgtgtcatttggctttccagtcataccaactttagcagaatcaaaatgacctcaccatttttgttctagggt

SEQ ID NO: 731509 - DNA, 810 bp, Homo sapiens
cgcaggtgcatgctgaggtgatctagaggatcccacggggattttgtgccctatccagaagatacatccacagagactatcaattcacatgaagcagcagctgcaactctaactattcatctccaagatggaatggtcacaaacacaagcctcactagctcaacaaaatcatccccaacacccatgaccctaagtatcactagtggcatgccaaataatttctctgaaatgcctcaacaaagcacaacccttaacttatggagggaagagacaaccacaaatgtaaagactccattaccttctgtggcaaatgcttggaaagtaaatgcttcatttctcttattgctcaatgttgtggtcatgctggctgtctgagggtctgcattttctgaaactaatgaaagcactcctccctgatgtacagttgggaaaatatgtccatatctaaccagtgattcgagctatatttaagtattcaagaaagccagtcttaacatttctaactctgatgtaaatgaagtaacttgtcttaaataaaagaaatgcacaatgtcttggtacttgctgctattttactgtcttaattaagtaaactaatgagtttcttttataaaaaaaatgaaatgttttaaggcttcaatttattgcacaaaatataaagcatctaaactttaatatgtattttatgtatgtttacactgtcaaacatctggaaaataaaaggtctatgctcataactgtgtcatttggctttccagtcataccaactttagcagaatcaaaatgacctcaccatttttgttctagggt

SEQ ID NO: 731510 - DNA, 1965 bp, Homo sapiens
atatataggtacgcttgatgccacaaattttttaaaaaattgtccattttgttgcgtgtgcacctcttgccataaatttgagtcagcaccagcgacagctctgcagtcctcctatgtggtactgatcaggtggttgcagagcttcagctcacagcaacacaatgcagctgagcaggcaagcacagcccacagccagaaacagttccgactctacagaacaagacgacctttaagtttcccagagaaaatgagatgctgatgttgaagacgacaccacggctttgatggaatatcagatattgaaaatgtctctctgcctgttcatccttctgtttctcacacctggtattttatgcatttgtcctctccaatgtatatgcacagagaggcacaggcatgtggactgttcaggcagaaacttgtctacattaccatctggactgcaagagaatattatacatttaaacctgtcttataaccactttactgatctgcataaccagttaacccaatataccaatctgaggaccctggacatttcaaacaacaggcttgaaagcctgcctgctcacttacctcggtctctgtggaacatgtctgctgctaacaacaacattaaacttcttgacaaatctgatactgcttatcagtggaatcttaaatatctggatgtttctaagaacatgctggaaaaggttgtcctcattaaaaatacactaagaagtctcgaggttctcaacctcagtagtaacaaactttggacagttccaaccaacatgccctccaaactacatatcgtggacctgtctaataattctttgacacaaattcttccaggtacattaataaacctgacaaatctcacacatctttacctgcacaacaataagttcacattcattccagaccaatcttttgaccaactctttcagttgcaagagataaccctttacaataacaggtggtcatgtgaccacaaacaaaacattacttacttactgaagtggatgatggaaacaaaagcccatgtgatagggactccatgttctacccaaatatcatctttaaaggaacataacatgtatcccacaccttctggatttacctcaagcttattcactgtaagtgggatgcagacagtggacaccattaactctctgagtgtggtaactcaacccaaagtgaccaaaatacccaaacaatatcgaacaaaggaaacaacgtttggtgccactctaagcaaagacaccacctttactagcactgataaggattttgtgccctatccagaagatacatccacagagactatcaattcacatgaagcagcagctgcaactctaactattcatctccaagatggaatggtcacaaacacaagcctcactagctcaacaaaatcatccccaacacccatgaccctaagtatcactagtggcatgccaaataatttctctgaaatgcctcaacaaagcacaacccttaacttatggagggaagagacaaccacaaatgtaaagactccattaccttctgtggcaaatgcttggaaagtaaatgcttcatttctcttattgctcaatgttgtggtcatgctggctgtctgagggtctgcattttctgaaactaatgaaagcactcctccctgatgtacagttgggaaaatatgtccatatctaaccagtgattcgagctatatttaagtattcaagaaagccagtcttaacatttctaactctgatgtaaatgaagtaacttgtcttaaataaaagaaatgcacaatgtcttggtacttgctgctattttactgtcttaattaagtaaactaatgagtttcttttataaaaaaaatgaaatgttttaaggcttcaatttattgcacaaaatataaagcatctaaactttaatatgtattttatgtatgtttacactgtcaaacatctggaaaataaaaggtctatgctc

SEQ ID NO: 731511 - DNA, 2042 bp, Homo sapiens
atatataggtacgcttgatgccacaaattttttaaaaaattgtccattttgttgcgtgtgcacctcttgccataaatttgagtcagcaccagcgacagctctgcagtcctcctatgtggtactgatcaggtggttgcagagcttcagctcacagcaacacaatgcagctgagcaggcaagcacagcccacagccagaaacagttccgactctacagaacaagacgacctttaagtttcccagagaaaatgagatgctgatgttgaagacgacaccacggctttgatggaatatcagatattgaaaatgtctctctgcctgttcatccttctgtttctcacacctggtattttatgcatttgtcctctccaatgtatatgcacagagaggcacaggcatgtggactgttcaggcagaaacttgtctacattaccatctggactgcaagagaatattatacatttaaacctgtcttataaccactttactgatctgcataaccagttaacccaatataccaatctgaggaccctggacatttcaaacaacaggcttgaaagcctgcctgctcacttacctcggtctctgtggaacatgtctgctgctaacaacaacattaaacttcttgacaaatctgatactgcttatcagtggaatcttaaatatctggatgtttctaagaacatgctggaaaaggttgtcctcattaaaaatacactaagaagtctcgaggttctcaacctcagtagtaacaaactttggacagttccaaccaacatgccctccaaactacatatcgtggacctgtctaataattctttgacacaaattcttccaggtacattaataaacctgacaaatctcacacatctttacctgcacaacaataagttcacattcattccagaccaatcttttgaccaactctttcagttgcaagagataaccctttacaataacaggtggtcatgtgaccacaaacaaaacattacttacttactgaagtggatgatggaaacaaaagcccatgtgatagggactccatgttctacccaaatatcatctttaaaggaacataacatgtatcccacaccttctggatttacctcaagcttattcactgtaagtgggatgcagacagtggacaccattaactctctgagtgtggtaactcaacccaaagtgaccaaaatacccaaacaatatcgaacaaaggaaacaacgtttggtgccactctaagcaaagacaccacctttactagcactgataaggattttgtgccctatccagaagatacatccacagagactatcaattcacatgaagcagcagctgcaactctaactattcatctccaagatggaatggtcacaaacacaagcctcactagctcaacaaaatcatccccaacacccatgaccctaagtatcactagtggcatgccaaataatttctctgaaatgcctcaacaaagcacaacccttaacttatggagggaagagacaaccacaaatgtaaagactccattaccttctgtggcaaatgcttggaaagtaaatgcttcatttctcttattgctcaatgttgtggtcatgctggctgtctgagggtctgcattttctgaaactaatgaaagcactcctccctgatgtacagttgggaaaatatgtccatatctaaccagtgattcgagctatatttaagtattcaagaaagccagtcttaacatttctaactctgatgtaaatgaagtaacttgtcttaaataaaagaaatgcacaatgtcttggtacttgctgctattttactgtcttaattaagtaaactaatgagtttcttttataaaaaaaatgaaatgttttaaggcttcaatttattgcacaaaatataaagcatctaaactttaatatgtattttatgtatgtttacactgtcaaacatctggaaaataaaaggtctatgctcataactgtgtcatttggctttccagtcataccaactttagcagaatcaaaatgacctcaccatttttgttctagggt

SEQ ID NO: 731512 - DNA, 1915 bp, Homo sapiens
atatataggtacgcttgatgccacaaattttttaaaaaattgtccattttgttgcgtgtgcacctcttgccataaatttgagtcagcaccagcgacagctctgcagtcctcctatgtggtactgatcaggtggttgcagagcttcagctcacagcaacacaatgcagctgagcaggcaagcacagcccacagccagaaacagttccgactctacagaacaagacgacctttaagtttcccagagaaaatgagatgctgatgttgaagacgacaccacggctttgatggaatatcagatattgaaaatgtctctctgcctgttcatccttctgtttctcacacctggtattttatgcatttgtcctctccaatgtatatgcacagagaggcacaggcatgtggactgttcaggcagaaacttgtctacattaccatctggactgcaagagaatattatacatttaaacctgtcttataaccactttactgatctgcataaccagttaacccaatataccaatctgaggaccctggacatttcaaacaacaggcttgaaagcctgcctgctcacttacctcggtctctgtggaacatgtctgctgctaacaacaacattaaacttcttgacaaatctgatactgcttatcagtggaatcttaaatatctggatgtttctaagaacatgctggaaaaggttgtcctcattaaaaatacactaagaagtctcgaggttctcaacctcagtagtaacaaactttggacagttccaaccaacatgccctccaaactacatatcgtggacctgtctaataattctttgacacaaattcttccaggtacattaataaacctgacaaatctcacacatctttacctgcacaacaataagttcacattcattccagaccaatcttttgaccaactctttcagttgcaagagataaccctttacaataacaggtggtcatgtgaccacaaacaaaacattacttacttactgaagtggatgatggaaacaaaagcccatgtgatagggactccatgttctacccaaatatcatctttaaaggaacataacatgtatcccacaccttctggatttacctcaagcttattcactgtaagtgggatgcagacagtggacaccattaactctctgagtgtggtaactcaacccaaagtgaccaaaatacccaaacaatatcgaacaaaggaaacaacgtttggtgccactctaagcaaagacaccacctttactagcactgataaggattttgtgccctatccagaagatacatccacagagactatcaattcacatgaagcagcagctgcaactctaactattcatctccaagatggaatggtcacaaacacaagcctcactagctcaacaaaatcatccccaacacccatgaccctaagtatcactagtggcatgccaaataatttctctgaaatgcctcaacaaagcacaacccttaacttatggagggaagagacaaccacaaatgtaaagactccattaccttctgtggcaaatgcttggaaagtaaatgcttcatttctcttattgctcaatgttgtggtcatgctggctgtctgagggtctgcattttctgaaactaatgaaagcactcctccctgatgtacagttgggaaaatatgtccatatctaaccagtgattcgagctatatttaagtattcaagaaagccagtcttaacatttctaactctgatgtaaatgaagtaacttgtcttaaataaaagaaatgcacaatgtcttggtacttgctgctattttactgtcttaattaagtaaactaatgagtttcttttataaaaaaaatgaaatgttttaaggcttcaatttattgcacagaatccccgtgggactcctctagactcactca

SEQ ID NO: 731513 - DNA, 683 bp, Homo sapiens
cgcaggtgcatgctgaggtgatctagaggatcccacggggattttgtgccctatccagaagatacatccacagagactatcaattcacatgaagcagcagctgcaactctaactattcatctccaagatggaatggtcacaaacacaagcctcactagctcaacaaaatcatccccaacacccatgaccctaagtatcactagtggcatgccaaataatttctctgaaatgcctcaacaaagcacaacccttaacttatggagggaagagacaaccacaaatgtaaagactccattaccttctgtggcaaatgcttggaaagtaaatgcttcatttctcttattgctcaatgttgtggtcatgctggctgtctgagggtctgcattttctgaaactaatgaaagcactcctccctgatgtacagttgggaaaatatgtccatatctaaccagtgattcgagctatatttaagtattcaagaaagccagtcttaacatttctaactctgatgtaaatgaagtaacttgtcttaaataaaagaaatgcacaatgtcttggtacttgctgctattttactgtcttaattaagtaaactaatgagtttcttttataaaaaaaatgaaatgttttaaggcttcaatttattgcacagaatccccgtgggactcctctagactcactca

SEQ ID NO: 731514 - DNA, 663 bp, Homo sapiens
  misc_feature (19)..(20): n is a, c, g, or t
  misc_feature (23)..(23): n is a, c, g, or t
  misc_feature (25)..(25): n is a, c, g, or t
  misc_feature (30)..(30): n is a, c, g, or t
ctagaggtgtccccagggnnatncngtgtncgtatcagaagatacatccacagagactatcaattcacatgaagcagcagctgcaactctaactattcatctccaagatggaatggtcacaaacacaagcctcactagctcaacaaaatcatccccaacacccatgaccctaagtatcactagtggcatgccaaataatttctctgaaatgcctcaacaaagcacaacccttaacttatggagggaagagacaaccacaaatgtaaagactccattaccttctgtggcaaatgcttggaaagtaaatgcttcatttctcttattgctcaatgttgtggtcatgctggctgtctgagggtctgcattttctgaaactaatgaaagcactcctccctgatgtacagttgggaaaatatgtccatatctaaccagtgattcgagctatatttaagtattcaagaaagccagtcttaacatttctaactctgatgtaaatgaagtaacttgtcttaaataaaagaaatgcacaatgtcttggtacttgctgctattttactgtcttaattaagtaaactaatgagtttcttttataaaaaaaatgaaatgttttaaggcttcaatttattgcacagaatccccgtgggactcctctagactcactca

SEQ ID NO: 731515 - DNA, 790 bp, Homo sapiens
  misc_feature (19)..(20): n is a, c, g, or t
  misc_feature (23)..(23): n is a, c, g, or t
  misc_feature (25)..(25): n is a, c, g, or t
  misc_feature (30)..(30): n is a, c, g, or t
ctagaggtgtccccagggnnatncngtgtncgtatcagaagatacatccacagagactatcaattcacatgaagcagcagctgcaactctaactattcatctccaagatggaatggtcacaaacacaagcctcactagctcaacaaaatcatccccaacacccatgaccctaagtatcactagtggcatgccaaataatttctctgaaatgcctcaacaaagcacaacccttaacttatggagggaagagacaaccacaaatgtaaagactccattaccttctgtggcaaatgcttggaaagtaaatgcttcatttctcttattgctcaatgttgtggtcatgctggctgtctgagggtctgcattttctgaaactaatgaaagcactcctccctgatgtacagttgggaaaatatgtccatatctaaccagtgattcgagctatatttaagtattcaagaaagccagtcttaacatttctaactctgatgtaaatgaagtaacttgtcttaaataaaagaaatgcacaatgtcttggtacttgctgctattttactgtcttaattaagtaaactaatgagtttcttttataaaaaaaatgaaatgttttaaggcttcaatttattgcacaaaatataaagcatctaaactttaatatgtattttatgtatgtttacactgtcaaacatctggaaaataaaaggtctatgctcataactgtgtcatttggctttccagtcataccaactttagcagaatcaaaatgacctcaccatttttgttctagggt

SEQ ID NO: 731516 - DNA, 1988 bp, Homo sapiens
atatataggtacgcttgatgccacaaattttttaaaaaattgtccattttgttgcgtgtgcacctcttgccataaatttgagtcagcaccagcgacagctctgcagtcctcctatgtggtactgatcaggtggttgcagagcttcagctcacagcaacacaatgcagctgagcaggcaagcacagcccacagccagaaacagttccgactctacagaacaagacgacctttaagtttcccagagaaaatgagatgctgatgttgaagacgacaccacggctttgatggaatatcagatattgaaaatgtctctctgcctgttcatccttctgtttctcacacctggtattttatgcatttgtcctctccaatgtatatgcacagagaggcacaggcatgtggactgttcaggcagaaacttgtctacattaccatctggactgcaagagaatattatacatttaaacctgtcttataaccactttactgatctgcataaccagttaacccaatataccaatctgaggaccctggacatttcaaacaacaggcttgaaagcctgcctgctcacttacctcggtctctgtggaacatgtctgctgctaacaacaacattaaacttcttgacaaatctgatactgcttatcagtggaatcttaaatatctggatgtttctaagaacatgctggaaaaggttgtcctcattaaagttccaaccaacatgccctccaaactacatatcgtggacctgtctaataattctttgacacaaattcttccaggtacattaataaacctgacaaatctcacacatctttacctgcacaacaataagttcacattcattccagaccaatcttttgaccaactctttcagttgcaagagataaccctttacaataacaggtggtcatgtgaccacaaacaaaacattacttacttactgaagtggatgatggaaacaaaagcccatgtgatagggactccatgttctacccaaatatcatctttaaaggaacataacatgtatcccacaccttctggatttacctcaagcttattcactgtaagtgggatgcagacagtggacaccattaactctctgagtgtggtaactcaacccaaagtgaccaaaatacccaaacaatatcgaacaaaggaaacaacgtttggtgccactctaagcaaagacaccacctttactagcactgataaggattttgtgccctatccagaagatacatccacagagactatcaattcacatgaagcagcagctgcaactctaactattcatctccaagatggaatggtcacaaacacaagcctcactagctcaacaaaatcatccccaacacccatgaccctaagtatcactagtggcatgccaaataatttctctgaaatgcctcaacaaagcacaacccttaacttatggagggaagagacaaccacaaatgtaaagactccattaccttctgtggcaaatgcttggaaagtaaatgcttcatttctcttattgctcaatgttgtggtcatgctggctgtctgagggtctgcattttctgaaactaatgaaagcactcctccctgatgtacagttgggaaaatatgtccatatctaaccagtgattcgagctatatttaagtattcaagaaagccagtcttaacatttctaactctgatgtaaatgaagtaacttgtcttaaataaaagaaatgcacaatgtcttggtacttgctgctattttactgtcttaattaagtaaactaatgagtttcttttataaaaaaaatgaaatgttttaaggcttcaatttattgcacaaaatataaagcatctaaactttaatatgtattttatgtatgtttacactgtcaaacatctggaaaataaaaggtctatgctcataactgtgtcatttggctttccagtcataccaactttagcagaatcaaaatgacctcaccatttttgttctagggt

SEQ ID NO: 731517 - DNA, 1861 bp, Homo sapiens
atatataggtacgcttgatgccacaaattttttaaaaaattgtccattttgttgcgtgtgcacctcttgccataaatttgagtcagcaccagcgacagctctgcagtcctcctatgtggtactgatcaggtggttgcagagcttcagctcacagcaacacaatgcagctgagcaggcaagcacagcccacagccagaaacagttccgactctacagaacaagacgacctttaagtttcccagagaaaatgagatgctgatgttgaagacgacaccacggctttgatggaatatcagatattgaaaatgtctctctgcctgttcatccttctgtttctcacacctggtattttatgcatttgtcctctccaatgtatatgcacagagaggcacaggcatgtggactgttcaggcagaaacttgtctacattaccatctggactgcaagagaatattatacatttaaacctgtcttataaccactttactgatctgcataaccagttaacccaatataccaatctgaggaccctggacatttcaaacaacaggcttgaaagcctgcctgctcacttacctcggtctctgtggaacatgtctgctgctaacaacaacattaaacttcttgacaaatctgatactgcttatcagtggaatcttaaatatctggatgtttctaagaacatgctggaaaaggttgtcctcattaaagttccaaccaacatgccctccaaactacatatcgtggacctgtctaataattctttgacacaaattcttccaggtacattaataaacctgacaaatctcacacatctttacctgcacaacaataagttcacattcattccagaccaatcttttgaccaactctttcagttgcaagagataaccctttacaataacaggtggtcatgtgaccacaaacaaaacattacttacttactgaagtggatgatggaaacaaaagcccatgtgatagggactccatgttctacccaaatatcatctttaaaggaacataacatgtatcccacaccttctggatttacctcaagcttattcactgtaagtgggatgcagacagtggacaccattaactctctgagtgtggtaactcaacccaaagtgaccaaaatacccaaacaatatcgaacaaaggaaacaacgtttggtgccactctaagcaaagacaccacctttactagcactgataaggattttgtgccctatccagaagatacatccacagagactatcaattcacatgaagcagcagctgcaactctaactattcatctccaagatggaatggtcacaaacacaagcctcactagctcaacaaaatcatccccaacacccatgaccctaagtatcactagtggcatgccaaataatttctctgaaatgcctcaacaaagcacaacccttaacttatggagggaagagacaaccacaaatgtaaagactccattaccttctgtggcaaatgcttggaaagtaaatgcttcatttctcttattgctcaatgttgtggtcatgctggctgtctgagggtctgcattttctgaaactaatgaaagcactcctccctgatgtacagttgggaaaatatgtccatatctaaccagtgattcgagctatatttaagtattcaagaaagccagtcttaacatttctaactctgatgtaaatgaagtaacttgtcttaaataaaagaaatgcacaatgtcttggtacttgctgctattttactgtcttaattaagtaaactaatgagtttcttttataaaaaaaatgaaatgttttaaggcttcaatttattgcacagaatccccgtgggactcctctagactcactca

SEQ ID NO: 731518 - DNA, 1456 bp, Homo sapiens; identical to SEQ ID NO: 72588
  misc_feature (542)..(542): n is a, c, g, or t

SEQ ID NO: 731519 - DNA, 2933 bp, Homo sapiens
cattggaatggcactcagggcaaaggcagaggtgtgcatggcagtgccctggctgtccctgcaaagggcacaggcactgggcacgagagccgcccgggtccccaggacagtgctgccctttgaagccatgccccagcgtccaggcaacaggtggctgaggctgctgcagatctggagggagcagggttatgaggacctgcacctggaagtacaccagaccttccaggaactggggcccattttcaggtacgacttgggaggagcaggcatggtgtgtgtgatgctgccggaggacgtggagaagctgcaacaggtggacagcctgcatccccacaggatgagcctggagccctgggtggcctacagacaacatcgtgggcacaaatgtggcgtgttcttgctgaatgggcctgaatggcgcttcaaccgattgcggctgaatccagaagtgctgtcgcccaacgctgtgcagaggttcctcccgatggtggatgcagtggccagggacttctcccaggccctgaagaagaaggtgctgcagaacgcccgggggagcctgaccctggacgtccagcccagcatcttccactacaccatagaagccagcaacttggctctttttggagagcggctgggcctggttggccacagccccagttctgccagcctgaacttcctccatgccctggaggtcatgttcaaatccaccgtccagctcatgttcatgcccaggagcctgtctcgctggaccagccccaaggtgtggaaggagcactttgaggcctgggactgcatcttccagtacggcgacaactgtatccagaaaatctatcaggaactggccttcagccgccctcaacagtacaccagcatcgtggcggagctcctgttgaatgcggaactgtcgccagatgccatcaaggccaactctatggaactcactgcagggagcgtggacacgacggtgtttcccttgctgatgacgctctttgagctggctcggaaccccaacgtgcagcaggccctgcgccaggagagcctggccgccgcagccagcatcagtgaacatccccagaaggcaaccaccgagctgcccttgctgcgtgcggccctcaaggagaccttgcggctctaccctgtgggtctgtttctggagcgagtggtgagctcagacttggtgcttcagaactaccacatcccagctgggacattggtgcgcgtgttcctctactctctgggtcgcaaccccgccttgttcccgaggcctgagcgctataacccccagcgctggctagacatcaggggctccggcaggaacttctaccacgtgccctttggctttggcatgcgccagtgccttgggcggcgcctggcagaggcagagatgctgctgctgctgcaccatgtgctgaaacacctccaggtggagacactaacccaagaggacataaagatggtctacagcttcatattgaggcccagcatgttccccctcctcaccttcagagccatcaactaatcacgtctctgcacccagggtcccagcctggccaccagcctccctttctgcctgaccccaggccacccctcttctctcccacatgcacagcttcctgagtcacccctctgtctaaccagccccagcacaaatggaactcccgagggcctctaggaccagggtttgccaggctaagcagcaatgccagggcacagctggggaagatcttgctgaccttgtccccagccccacctggccctttctccagcaagcactgtcctctgggcagtttgcccccatccctcccagtgctggctccaggctcctcgtgtggccatgcaagggtgctgtggttttgtcccttgccttcctgcctagtctcacatgtccctgttcctcttcccctggccagggcccctgcgcagactgtcagagtcattaagcgggatcccagcatctcagagtccagtcaagttccctcctgcagcctgccccctaggcagctcgagcatgccctgagctctctgaaagttgtcgccctggaatagggtcctgcagggtagaataaaaaggcccctgtggtcacttgtcctgacatccccattttcaagtgatacaactgagtctcgagggacgtgtgttccccagctgatcgtgtcagcctcatgccccaggcctcatctttcatggaccaggccttgttccaggagtgggcgttgggtcctctgcttcctgtgctgtcccctggggaaggtcccaaggatgctgtcaggagatggaagagtcatgtggggtgggaacctggggtgtggttccagaaatgtttttggcaacaggagagacaggattgggccaacaaggactcagacgagttttattgactcatttctctggttgatacggagccatgtcatgtgccacgacctggggtgggcacagggaggctgcagtttcctgcgtgaacctgccttgggcctcatctgctcctagcccagcagagagagttgacccctcctgaactggccactccccagtgctcctgtgcagggagaggaagcacccggtttgagagtgtacccagccagactgtctttatctccatggattttcatcagggcaaagatcacagcagccagctcctggtggctgatgaggatcagagcatttgttcccccatgaaaggggaaatccctatggcatcattccagtggtggtcagtagatccaggactcagggactcaggccagtcaccctgtgaccgcaggttgctttcccaccctgggcaatgcagtgcagcatgggaaaggaataagggggcaacaaggtgcacagacctcagagatggcttccttgtttatggggctctcacagatacccatccaactcctctagtcagcactagatcatgggatcctaaaataaaccttggaaaaat

SEQ ID NO: 731520 - DNA, 3383 bp, Homo sapiens
cattggaatggcactcagggcaaaggcagaggtgtgcatggcagtgccctggctgtccctgcaaagggcacaggcactgggcacgagagccgcccgggtccccaggacagtgctgccctttgaagccatgccccagcgtccaggcaacaggtggctgaggctgctgcagatctggagggagcagggttatgaggacctgcacctggaagtacaccagaccttccaggaactggggcccattttcaggtacgacttgggaggagcaggcatggtgtgtgtgatgctgccggaggacgtggagaagctgcaacaggtggacagcctgcatccccacaggatgagcctggagccctgggtggcctacagacaacatcgtgggcacaaatgtggcgtgttcttgctgaatgggcctgaatggcgcttcaaccgattgcggctgaatccagaagtgctgtcgcccaacgctgtgcagaggttcctcccgatggtggatgcagtggccagggacttctcccaggccctgaagaagaaggtgctgcagaacgcccgggggagcctgaccctggacgtccagcccagcatcttccactacaccatagaagccagcaacttggctctttttggagagcggctgggcctggttggccacagccccagttctgccagcctgaacttcctccatgccctggaggtcatgttcaaatccaccgtccagctcatgttcatgcccaggagcctgtctcgctggaccagccccaaggtgtggaaggagcactttgaggcctgggactgcatcttccagtacggcgacaactgtatccagaaaatctatcaggaactggccttcagccgccctcaacagtacaccagcatcgtggcggagctcctgttgaatgcggaactgtcgccagatgccatcaaggccaactctatggaactcactgcagggagcgtggacacgacggtgtttcccttgctgatgacgctctttgagctggctcggaaccccaacgtgcagcaggccctgcgccaggagagcctggccgccgcagccagcatcagtgaacatccccagaaggcaaccaccgagctgcccttgctgcgtgcggccctcaaggagaccttgcggctctaccctgtgggtctgtttctggagcgagtggtgagctcagacttggtgcttcagaactaccacatcccagctgggacattggtgcgcgtgttcctctactctctgggtcgcaaccccgccttgttcccgaggcctgagcgctataacccccagcgctggctagacatcaggggctccggcaggaacttctaccacgtgccctttggctttggcatgcgccagtgccttgggcggcgcctggcagaggcagagatgctgctgctgctgcaccatgtgctgaaacacctccaggtggagacactaacccaagaggacataaagatggtctacagcttcatattgaggcccagcatgttccccctcctcaccttcagagccatcaactaatcacgtctctgcacccagggtcccagcctggccaccagcctccctttctgcctgaccccaggccacccctcttctctcccacatgcacagcttcctgagtcacccctctgtctaaccagccccagcacaaatggaactcccgagggcctctaggaccagggtttgccaggctaagcagcaatgccagggcacagctggggaagatcttgctgaccttgtccccagccccacctggccctttctccagcaagcactgtcctctgggcagtttgcccccatccctcccagtgctggctccaggctcctcgtgtggccatgcaagggtgctgtggttttgtcccttgccttcctgcctagtctcacatgtccctgttcctcttcccctggccagggcccctgcgcagactgtcagagtcattaagcgggatcccagcatctcagagtccagtcaagttccctcctgcagcctgccccctaggcagctcgagcatgccctgagctctctgaaagttgtcgccctggaatagggtcctgcagggtagaataaaaaggcccctgtggtcacttgtcctgacatccccattttcaagtgatacaactgagtctcgagggacgtgtgttccccagctgatcgtgtcagcctcatgccccaggcctcatctttcatggaccaggccttgttccaggagtgggcgttgggtcctctgcttcctgtgctgtcccctggggaaggtcccaaggatgctgtcaggagatggaagagtcatgtggggtgggaacctggggtgtggttccagaaatgtttttggcaacaggagagacaggattgggccaacaaggactcagacgagttttattgactcatttctctggttgatacggagccatgtcatgtgccacgacctggggtgggcacagggaggctgcagtttcctgcgtgaacctgccttgggcctcatctgctcctagcccagcagagagagttgacccctcctgaactggccactccccagtgctcctgtgcagggagaggaagcacccggtttgagagtgtacccagccagactgtctttatctccatggattttcatcagggcaaagatcacagcagccagctcctggtggctgatgaggatcagagcatttgttcccccatgaaaggggaaatccctatggcatcattccagtggtggtcagtagatccaggacgccctgcaggactcagcctgtacagggagatgaagtgccccaggttgggagcacacctagctagagttatttgtgttaatctattcaggatgctctaagaaaacgccatagactgggttgctgacaaacatcagaattctatttctcatggttctgaaggcttagaaggctaagatcaaggtgtcagcaggttctgtgtctggtgaggacccacctcttgtttcatagataaaaccttcttgctgtgtcctcacatggtggaaaagggcaagacagctcacagagaccttttttataaggacgccagttccattcaagagggcactgcctgcattcccttcccccctcaaaggccctgccctgctattatcgtcaccttggtgactagatttcagcctatgaattctggaggcggacacaaaaattcagattaaactactctgcttctgtttctctaaaatctacatccttctcatatacaaaatacatgcatttctccccagtagccccaaatatcaactcattttagcatcaactactcaaggtacaatttatcctgagtccaactgttcttgctgcgaacctaggaaatcaaacatgttatgtgcttccaaaatacagtggttggagaggcataggataaacattcccattc

SEQ ID NO: 731521 - DNA, 3538 bp, Homo sapiens
cattggaatggcactcagggcaaaggcagaggtgtgcatggcagtgccctggctgtccctgcaaagggcacaggcactgggcacgagagccgcccgggtccccaggacagtgctgccctttgaagccatgccccagcgtccaggcaacaggtggctgaggctgctgcagatctggagggagcagggttatgaggacctgcacctggaagtacaccagaccttccaggaactggggcccattttcaggtacgacttgggaggagcaggcatggtgtgtgtgatgctgccggaggacgtggagaagctgcaacaggtggacagcctgcatccccacaggatgagcctggagccctgggtggcctacagacaacatcgtgggcacaaatgtggcgtgttcttgctgaatgggcctgaatggcgcttcaaccgattgcggctgaatccagaagtgctgtcgcccaacgctgtgcagaggttcctcccgatggtggatgcagtggccagggacttctcccaggccctgaagaagaaggtgctgcagaacgcccgggggagcctgaccctggacgtccagcccagcatcttccactacaccatagaagccagcaacttggctctttttggagagcggctgggcctggttggccacagccccagttctgccagcctgaacttcctccatgccctggaggtcatgttcaaatccaccgtccagctcatgttcatgcccaggagcctgtctcgctggaccagccccaaggtgtggaaggagcactttgaggcctgggactgcatcttccagtacggcgacaactgtatccagaaaatctatcaggaactggccttcagccgccctcaacagtacaccagcatcgtggcggagctcctgttgaatgcggaactgtcgccagatgccatcaaggccaactctatggaactcactgcagggagcgtggacacgacggtgtttcccttgctgatgacgctctttgagctggctcggaaccccaacgtgcagcaggccctgcgccaggagagcctggccgccgcagccagcatcagtgaacatccccagaaggcaaccaccgagctgcccttgctgcgtgcggccctcaaggagaccttgcggctctaccctgtgggtctgtttctggagcgagtggtgagctcagacttggtgcttcagaactaccacatcccagctgggacattggtgcgcgtgttcctctactctctgggtcgcaaccccgccttgttcccgaggcctgagcgctataacccccagcgctggctagacatcaggggctccggcaggaacttctaccacgtgccctttggctttggcatgcgccagtgccttgggcggcgcctggcagaggcagagatgctgctgctgctgcaccatgtgctgaaacacctccaggtggagacactaacccaagaggacataaagatggtctacagcttcatattgaggcccagcatgttccccctcctcaccttcagagccatcaactaatcacgtctctgcacccagggtcccagcctggccaccagcctccctttctgcctgaccccaggccacccctcttctctcccacatgcacagcttcctgagtcacccctctgtctaaccagccccagcacaaatggaactcccgagggcctctaggaccagggtttgccaggctaagcagcaatgccagggcacagctggggaagatcttgctgaccttgtccccagccccacctggccctttctccagcaagcactgtcctctgggcagtttgcccccatccctcccagtgctggctccaggctcctcgtgtggccatgcaagggtgctgtggttttgtcccttgccttcctgcctagtctcacatgtccctgttcctcttcccctggccagggcccctgcgcagactgtcagagtcattaagcgggatcccagcatctcagagtccagtcaagttccctcctgcagcctgccccctaggcagctcgagcatgccctgagctctctgaaagttgtcgccctggaatagggtcctgcagggtagaataaaaaggcccctgtggtcacttgtcctgacatccccattttcaagtgatacaactgagtctcgagggacgtgtgttccccagctgatcgtgtcagcctcatgccccaggcctcatctttcatggaccaggccttgttccaggagtgggcgttgggtcctctgcttcctgtgctgtcccctggggaaggtcccaaggatgctgtcaggagatggaagagtcatgtggggtgggaacctggggtgtggttccagaaatgtttttggcaacaggagagacaggattgggccaacaaggactcagacgagttttattgactcatttctctggttgatacggagccatgtcatgtgccacgacctggggtgggcacagggaggctgcagtttcctgcgtgaacctgccttgggcctcatctgctcctagcccagcagagagagttgacccctcctgaactggccactccccagtgctcctgtgcagggagaggaagcacccggtttgagagtgtacccagccagactgtctttatctccatggattttcatcagggcaaagatcacagcagccagctcctggtggctgatgaggatcagagcatttgttcccccatgaaaggggaaatccctatggcatcattccagtggtggtcagtagatccaggacgccctgcaggactcagcctgtacagggagatgaagtgccccaggttgggagcacacctagctagagttatttgtgttaatctattcaggatgctctaagaaaacgccatagactgggttgctgacaaacatcagaattctatttctcatggttctgaaggcttagaaggctaagatcaaggtgtcagcaggttctgtgtctggtgaggacccacctcttgtttcatagataaaaccttcttgctgtgtcctcacatggtggaaaagggcaagacagctcacagagaccttttttataaggacgccagttccattcaagagggcactgcctgcattcccttcccccctcaaaggccctgccctgctattatcgtcaccttggtgactagatttcagcctatgaattctggaggcggacacaaaaattcagattaaactactctgcttctgtttctctaaaatctacatccttctcatatacaaaatacatgcatttctccccagtagccccaaatatcaactcattttagcatcaactttaaaattgtagtccaaagtgtgatttaaatgttatctgagtcaaacatgggtaagactcaaggtacaatttatcctgagtccaactgttcttgctgcgaacctaggaaatcaaacatgttatgtgcttccaaaatacagtggttggagaggcataggataaacattcccattccagaaaggagaaacaggaaagaagaaaggagtaacaagtttcaagcaactccaaaattgaatgtgacaaacagtattaaaccttaagcctcaagaataa

SEQ ID NO: 731522 - DNA, 3484 bp, Homo sapiens
cattggaatggcactcagggcaaaggcagaggtgtgcatggcagtgccctggctgtccctgcaaagggcacaggcactgggcacgagagccgcccgggtccccaggacagtgctgccctttgaagccatgccccagcgtccaggcaacaggtggctgaggctgctgcagatctggagggagcagggttatgaggacctgcacctggaagtacaccagaccttccaggaactggggcccattttcaggtacgacttgggaggagcaggcatggtgtgtgtgatgctgccggaggacgtggagaagctgcaacaggtggacagcctgcatccccacaggatgagcctggagccctgggtggcctacagacaacatcgtgggcacaaatgtggcgtgttcttgctgaatgggcctgaatggcgcttcaaccgattgcggctgaatccagaagtgctgtcgcccaacgctgtgcagaggttcctcccgatggtggatgcagtggccagggacttctcccaggccctgaagaagaaggtgctgcagaacgcccgggggagcctgaccctggacgtccagcccagcatcttccactacaccatagaagccagcaacttggctctttttggagagcggctgggcctggttggccacagccccagttctgccagcctgaacttcctccatgccctggaggtcatgttcaaatccaccgtccagctcatgttcatgcccaggagcctgtctcgctggaccagccccaaggtgtggaaggagcactttgaggcctgggactgcatcttccagtacggcgacaactgtatccagaaaatctatcaggaactggccttcagccgccctcaacagtacaccagcatcgtggcggagctcctgttgaatgcggaactgtcgccagatgccatcaaggccaactctatggaactcactgcagggagcgtggacacgacggtgtttcccttgctgatgacgctctttgagctggctcggaaccccaacgtgcagcaggccctgcgccaggagagcctggccgccgcagccagcatcagtgaacatccccagaaggcaaccaccgagctgcccttgctgcgtgcggccctcaaggagaccttgcggctctaccctgtgggtctgtttctggagcgagtggtgagctcagacttggtgcttcagaactaccacatcccagctgggacattggtgcgcgtgttcctctactctctgggtcgcaaccccgccttgttcccgaggcctgagcgctataacccccagcgctggctagacatcaggggctccggcaggaacttctaccacgtgccctttggctttggcatgcgccagtgccttgggcggcgcctggcagaggcagagatgctgctgctgctgcaccatgtgctgaaacacctccaggtggagacactaacccaagaggacataaagatggtctacagcttcatattgaggcccagcatgttccccctcctcaccttcagagccatcaactaatcacgtctctgcacccagggtcccagcctggccaccagcctccctttctgcctgaccccaggccacccctcttctctcccacatgcacagcttcctgagtcacccctctgtctaaccagccccagcacaaatggaactcccgagggcctctaggaccagggtttgccaggctaagcagcaatgccagggcacagctggggaagatcttgctgaccttgtccccagccccacctggccctttctccagcaagcactgtcctctgggcagtttgcccccatccctcccagtgctggctccaggctcctcgtgtggccatgcaagggtgctgtggttttgtcccttgccttcctgcctagtctcacatgtccctgttcctcttcccctggccagggcccctgcgcagactgtcagagtcattaagcgggatcccagcatctcagagtccagtcaagttccctcctgcagcctgccccctaggcagctcgagcatgccctgagctctctgaaagttgtcgccctggaatagggtcctgcagggtagaatagagtctcgagggacgtgtgttccccagctgatcgtgtcagcctcatgccccaggcctcatctttcatggaccaggccttgttccaggagtgggcgttgggtcctctgcttcctgtgctgtcccctggggaaggtcccaaggatgctgtcaggagatggaagagtcatgtggggtgggaacctggggtgtggttccagaaatgtttttggcaacaggagagacaggattgggccaacaaggactcagacgagttttattgactcatttctctggttgatacggagccatgtcatgtgccacgacctggggtgggcacagggaggctgcagtttcctgcgtgaacctgccttgggcctcatctgctcctagcccagcagagagagttgacccctcctgaactggccactccccagtgctcctgtgcagggagaggaagcacccggtttgagagtgtacccagccagactgtctttatctccatggattttcatcagggcaaagatcacagcagccagctcctggtggctgatgaggatcagagcatttgttcccccatgaaaggggaaatccctatggcatcattccagtggtggtcagtagatccaggacgccctgcaggactcagcctgtacagggagatgaagtgccccaggttgggagcacacctagctagagttatttgtgttaatctattcaggatgctctaagaaaacgccatagactgggttgctgacaaacatcagaattctatttctcatggttctgaaggcttagaaggctaagatcaaggtgtcagcaggttctgtgtctggtgaggacccacctcttgtttcatagataaaaccttcttgctgtgtcctcacatggtggaaaagggcaagacagctcacagagaccttttttataaggacgccagttccattcaagagggcactgcctgcattcccttcccccctcaaaggccctgccctgctattatcgtcaccttggtgactagatttcagcctatgaattctggaggcggacacaaaaattcagattaaactactctgcttctgtttctctaaaatctacatccttctcatatacaaaatacatgcatttctccccagtagccccaaatatcaactcattttagcatcaactttaaaattgtagtccaaagtgtgatttaaatgttatctgagtcaaacatgggtaagactcaaggtacaatttatcctgagtccaactgttcttgctgcgaacctaggaaatcaaacatgttatgtgcttccaaaatacagtggttggagaggcataggataaacattcccattccagaaaggagaaacaggaaagaagaaaggagtaacaagtttcaagcaactccaaaattgaatgtgacaaacagtattaaaccttaagcctcaagaataa

SEQ ID NO: 731523 - DNA, 3329 bp, Homo sapiens
cattggaatggcactcagggcaaaggcagaggtgtgcatggcagtgccctggctgtccctgcaaagggcacaggcactgggcacgagagccgcccgggtccccaggacagtgctgccctttgaagccatgccccagcgtccaggcaacaggtggctgaggctgctgcagatctggagggagcagggttatgaggacctgcacctggaagtacaccagaccttccaggaactggggcccattttcaggtacgacttgggaggagcaggcatggtgtgtgtgatgctgccggaggacgtggagaagctgcaacaggtggacagcctgcatccccacaggatgagcctggagccctgggtggcctacagacaacatcgtgggcacaaatgtggcgtgttcttgctgaatgggcctgaatggcgcttcaaccgattgcggctgaatccagaagtgctgtcgcccaacgctgtgcagaggttcctcccgatggtggatgcagtggccagggacttctcccaggccctgaagaagaaggtgctgcagaacgcccgggggagcctgaccctggacgtccagcccagcatcttccactacaccatagaagccagcaacttggctctttttggagagcggctgggcctggttggccacagccccagttctgccagcctgaacttcctccatgccctggaggtcatgttcaaatccaccgtccagctcatgttcatgcccaggagcctgtctcgctggaccagccccaaggtgtggaaggagcactttgaggcctgggactgcatcttccagtacggcgacaactgtatccagaaaatctatcaggaactggccttcagccgccctcaacagtacaccagcatcgtggcggagctcctgttgaatgcggaactgtcgccagatgccatcaaggccaactctatggaactcactgcagggagcgtggacacgacggtgtttcccttgctgatgacgctctttgagctggctcggaaccccaacgtgcagcaggccctgcgccaggagagcctggccgccgcagccagcatcagtgaacatccccagaaggcaaccaccgagctgcccttgctgcgtgcggccctcaaggagaccttgcggctctaccctgtgggtctgtttctggagcgagtggtgagctcagacttggtgcttcagaactaccacatcccagctgggacattggtgcgcgtgttcctctactctctgggtcgcaaccccgccttgttcccgaggcctgagcgctataacccccagcgctggctagacatcaggggctccggcaggaacttctaccacgtgccctttggctttggcatgcgccagtgccttgggcggcgcctggcagaggcagagatgctgctgctgctgcaccatgtgctgaaacacctccaggtggagacactaacccaagaggacataaagatggtctacagcttcatattgaggcccagcatgttccccctcctcaccttcagagccatcaactaatcacgtctctgcacccagggtcccagcctggccaccagcctccctttctgcctgaccccaggccacccctcttctctcccacatgcacagcttcctgagtcacccctctgtctaaccagccccagcacaaatggaactcccgagggcctctaggaccagggtttgccaggctaagcagcaatgccagggcacagctggggaagatcttgctgaccttgtccccagccccacctggccctttctccagcaagcactgtcctctgggcagtttgcccccatccctcccagtgctggctccaggctcctcgtgtggccatgcaagggtgctgtggttttgtcccttgccttcctgcctagtctcacatgtccctgttcctcttcccctggccagggcccctgcgcagactgtcagagtcattaagcgggatcccagcatctcagagtccagtcaagttccctcctgcagcctgccccctaggcagctcgagcatgccctgagctctctgaaagttgtcgccctggaatagggtcctgcagggtagaatagagtctcgagggacgtgtgttccccagctgatcgtgtcagcctcatgccccaggcctcatctttcatggaccaggccttgttccaggagtgggcgttgggtcctctgcttcctgtgctgtcccctggggaaggtcccaaggatgctgtcaggagatggaagagtcatgtggggtgggaacctggggtgtggttccagaaatgtttttggcaacaggagagacaggattgggccaacaaggactcagacgagttttattgactcatttctctggttgatacggagccatgtcatgtgccacgacctggggtgggcacagggaggctgcagtttcctgcgtgaacctgccttgggcctcatctgctcctagcccagcagagagagttgacccctcctgaactggccactccccagtgctcctgtgcagggagaggaagcacccggtttgagagtgtacccagccagactgtctttatctccatggattttcatcagggcaaagatcacagcagccagctcctggtggctgatgaggatcagagcatttgttcccccatgaaaggggaaatccctatggcatcattccagtggtggtcagtagatccaggacgccctgcaggactcagcctgtacagggagatgaagtgccccaggttgggagcacacctagctagagttatttgtgttaatctattcaggatgctctaagaaaacgccatagactgggttgctgacaaacatcagaattctatttctcatggttctgaaggcttagaaggctaagatcaaggtgtcagcaggttctgtgtctggtgaggacccacctcttgtttcatagataaaaccttcttgctgtgtcctcacatggtggaaaagggcaagacagctcacagagaccttttttataaggacgccagttccattcaagagggcactgcctgcattcccttcccccctcaaaggccctgccctgctattatcgtcaccttggtgactagatttcagcctatgaattctggaggcggacacaaaaattcagattaaactactctgcttctgtttctctaaaatctacatccttctcatatacaaaatacatgcatttctccccagtagccccaaatatcaactcattttagcatcaactactcaaggtacaatttatcctgagtccaactgttcttgctgcgaacctaggaaatcaaacatgttatgtgcttccaaaatacagtggttggagaggcataggataaacattcccattc

SEQ ID NO: 731524 - DNA, 3485 bp, Homo sapiens
cattggaatggcactcagggcaaaggcagaggtgtgcatggcagtgccctggctgtccctgcaaagggcacaggcactgggcacgagagccgcccgggtccccaggacagtgctgccctttgaagccatgccccagcgtccaggcaacaggtggctgaggctgctgcagatctggagggagcagggttatgaggacctgcacctggaagtacaccagaccttccaggaactggggcccattttcaggtacgacttgggaggagcaggcatggtgtgtgtgatgctgccggaggacgtggagaagctgcaacaggtggacagcctgcatccccacaggatgagcctggagccctgggtggcctacagacaacatcgtgggcacaaatgtggcgtgttcttgctgaatgggcctgaatggcgcttcaaccgattgcggctgaatccagaagtgctgtcgcccaacgctgtgcagaggttcctcccgatggtggatgcagtggccagggacttctcccaggccctgaagaagaaggtgctgcagaacgcccgggggagcctgaccctggacgtccagcccagcatcttccactacaccatagaagccagcaacttggctctttttggagagcggctgggcctggttggccacagccccagttctgccagcctgaacttcctccatgccctggaggtcatgttcaaatccaccgtccagctcatgttcatgcccaggagcctgtctcgctggaccagccccaaggtgtggaaggagcactttgaggcctgggactgcatcttccagtacggcgacaactgtatccagaaaatctatcaggaactggccttcagccgccctcaacagtacaccagcatcgtggcggagctcctgttgaatgcggaactgtcgccagatgccatcaaggccaactctatggaactcactgcagggagcgtggacacgacggtgtttcccttgctgatgacgctctttgagctggctcggaaccccaacgtgcagcaggccctgcgccaggagagcctggccgccgcagccagcatcagtgaacatccccagaaggcaaccaccgagctgcccttgctgcgtgcggccctcaaggagaccttgcggctctaccctgtgggtctgtttctggagcgagtggtgagctcagacttggtgcttcagaactaccacatcccagctgggacattggtgcgcgtgttcctctactctctgggtcgcaaccccgccttgttcccgaggcctgagcgctataacccccagcgctggctagacatcaggggctccggcaggaacttctaccacgtgccctttggctttggcatgcgccagtgccttgggcggcgcctggcagaggcagagatgctgctgctgctgcaccatgtgctgaaacacctccaggtggagacactaacccaagaggacataaagatggtctacagcttcatattgaggcccagcatgttccccctcctcaccttcagagccatcaactaatcacgtctctgcacccagggtcccagcctggccaccagcctccctttctgcctgaccccaggccacccctcttctctcccacatgcacagcttcctgagtcacccctctgtctaaccagccccagcacaaatggaactcccgagggcctctaggaccagggtttgccaggctaagcagcaatgccagggcacagctggggaagatcttgctgaccttgtccccagccccacctggccctttctccagcaagcactgtcctctgggcagtttgcccccatccctcccagtgctggctccaggctcctcgtgtggccatgcaagggtgctgtggttttgtcccttgccttcctgcctagtctcacatgtccctgttcctcttcccctggccagggcccctgcgcagactgtcagagtcattaagcgggatcccagcatctcagagtccagtcaagttccctcctgcagcctgccccctaggcagctcgagcatgccctgagctctctgaaagttgtcgccctggaatagggtcctgcagggtagaataaaaaggcccctgtggtcacttgtcctgacatccccattttcaagtgatacaactgagtctcgagggacgtgtgttccccagctgatcgtgtcagcctcatgccccaggcctcatctttcatggaccaggccttgttccaggagtgggcgttgggtcctctgcttcctgtgctgtcccctggggaaggtcccaaggatgctgtcaggagatggaagagtcatgtggggtgggaacctggggtgtggttccagaaatgtttttggcaacaggagagacaggattgggccaacaaggactcagacgagttttattgactcatttctctggttgatacggagccatgtcatgtgccacgacctggggtgggcacagggaggctgcagtttcctgcgtgaacctgccttgggcctcatctgctcctagcccagcagagagagttgacccctcctgaactggccactccccagtgctcctgtgcagggagaggaagcacccggtttgagagtgtacccagccagactgtctttatctccatggattttcatcagggcaaagatcacagcagccagctcctggtggctgatgaggatcagagcatttgttcccccatgaaaggggaaatccctatggcatcattccagtggtggtcagtagatccaggacgccctgcaggactcagcctgtacagggagatgaagtgccccaggttgggagcacacctagctagagttatttgtgttaatctattcaggatgctctaagaaaacgccatagactgggttgctgacaaacatcagaattctatttctcatggttctgaaggcttagaaggctaagatcaaggtgtcagcaggttctgtgtctggtgaggacccacctcttgtttcatagataaaaccttcttgctgtgtcctcacatggtggaaaaggggcactgcctgcattcccttcccccctcaaaggccctgccctgctattatcgtcaccttggtgactagatttcagcctatgaattctggaggcggacacaaaaattcagattaaactactctgcttctgtttctctaaaatctacatccttctcatatacaaaatacatgcatttctccccagtagccccaaatatcaactcattttagcatcaactttaaaattgtagtccaaagtgtgatttaaatgttatctgagtcaaacatgggtaagactcaaggtacaatttatcctgagtccaactgttcttgctgcgaacctaggaaatcaaacatgttatgtgcttccaaaatacagtggttggagaggcataggataaacattcccattccagaaaggagaaacaggaaagaagaaaggagtaacaagtttcaagcaactccaaaattgaatgtgacaaacagtattaaaccttaagcctcaagaataa

SEQ ID NO: 731525 - DNA, 3431 bp, Homo sapiens
cattggaatggcactcagggcaaaggcagaggtgtgcatggcagtgccctggctgtccctgcaaagggcacaggcactgggcacgagagccgcccgggtccccaggacagtgctgccctttgaagccatgccccagcgtccaggcaacaggtggctgaggctgctgcagatctggagggagcagggttatgaggacctgcacctggaagtacaccagaccttccaggaactggggcccattttcaggtacgacttgggaggagcaggcatggtgtgtgtgatgctgccggaggacgtggagaagctgcaacaggtggacagcctgcatccccacaggatgagcctggagccctgggtggcctacagacaacatcgtgggcacaaatgtggcgtgttcttgctgaatgggcctgaatggcgcttcaaccgattgcggctgaatccagaagtgctgtcgcccaacgctgtgcagaggttcctcccgatggtggatgcagtggccagggacttctcccaggccctgaagaagaaggtgctgcagaacgcccgggggagcctgaccctggacgtccagcccagcatcttccactacaccatagaagccagcaacttggctctttttggagagcggctgggcctggttggccacagccccagttctgccagcctgaacttcctccatgccctggaggtcatgttcaaatccaccgtccagctcatgttcatgcccaggagcctgtctcgctggaccagccccaaggtgtggaaggagcactttgaggcctgggactgcatcttccagtacggcgacaactgtatccagaaaatctatcaggaactggccttcagccgccctcaacagtacaccagcatcgtggcggagctcctgttgaatgcggaactgtcgccagatgccatcaaggccaactctatggaactcactgcagggagcgtggacacgacggtgtttcccttgctgatgacgctctttgagctggctcggaaccccaacgtgcagcaggccctgcgccaggagagcctggccgccgcagccagcatcagtgaacatccccagaaggcaaccaccgagctgcccttgctgcgtgcggccctcaaggagaccttgcggctctaccctgtgggtctgtttctggagcgagtggtgagctcagacttggtgcttcagaactaccacatcccagctgggacattggtgcgcgtgttcctctactctctgggtcgcaaccccgccttgttcccgaggcctgagcgctataacccccagcgctggctagacatcaggggctccggcaggaacttctaccacgtgccctttggctttggcatgcgccagtgccttgggcggcgcctggcagaggcagagatgctgctgctgctgcaccatgtgctgaaacacctccaggtggagacactaacccaagaggacataaagatggtctacagcttcatattgaggcccagcatgttccccctcctcaccttcagagccatcaactaatcacgtctctgcacccagggtcccagcctggccaccagcctccctttctgcctgaccccaggccacccctcttctctcccacatgcacagcttcctgagtcacccctctgtctaaccagccccagcacaaatggaactcccgagggcctctaggaccagggtttgccaggctaagcagcaatgccagggcacagctggggaagatcttgctgaccttgtccccagccccacctggccctttctccagcaagcactgtcctctgggcagtttgcccccatccctcccagtgctggctccaggctcctcgtgtggccatgcaagggtgctgtggttttgtcccttgccttcctgcctagtctcacatgtccctgttcctcttcccctggccagggcccctgcgcagactgtcagagtcattaagcgggatcccagcatctcagagtccagtcaagttccctcctgcagcctgccccctaggcagctcgagcatgccctgagctctctgaaagttgtcgccctggaatagggtcctgcagggtagaatagagtctcgagggacgtgtgttccccagctgatcgtgtcagcctcatgccccaggcctcatctttcatggaccaggccttgttccaggagtgggcgttgggtcctctgcttcctgtgctgtcccctggggaaggtcccaaggatgctgtcaggagatggaagagtcatgtggggtgggaacctggggtgtggttccagaaatgtttttggcaacaggagagacaggattgggccaacaaggactcagacgagttttattgactcatttctctggttgatacggagccatgtcatgtgccacgacctggggtgggcacagggaggctgcagtttcctgcgtgaacctgccttgggcctcatctgctcctagcccagcagagagagttgacccctcctgaactggccactccccagtgctcctgtgcagggagaggaagcacccggtttgagagtgtacccagccagactgtctttatctccatggattttcatcagggcaaagatcacagcagccagctcctggtggctgatgaggatcagagcatttgttcccccatgaaaggggaaatccctatggcatcattccagtggtggtcagtagatccaggacgccctgcaggactcagcctgtacagggagatgaagtgccccaggttgggagcacacctagctagagttatttgtgttaatctattcaggatgctctaagaaaacgccatagactgggttgctgacaaacatcagaattctatttctcatggttctgaaggcttagaaggctaagatcaaggtgtcagcaggttctgtgtctggtgaggacccacctcttgtttcatagataaaaccttcttgctgtgtcctcacatggtggaaaaggggcactgcctgcattcccttcccccctcaaaggccctgccctgctattatcgtcaccttggtgactagatttcagcctatgaattctggaggcggacacaaaaattcagattaaactactctgcttctgtttctctaaaatctacatccttctcatatacaaaatacatgcatttctccccagtagccccaaatatcaactcattttagcatcaactttaaaattgtagtccaaagtgtgatttaaatgttatctgagtcaaacatgggtaagactcaaggtacaatttatcctgagtccaactgttcttgctgcgaacctaggaaatcaaacatgttatgtgcttccaaaatacagtggttggagaggcataggataaacattcccattccagaaaggagaaacaggaaagaagaaaggagtaacaagtttcaagcaactccaaaattgaatgtgacaaacagtattaaaccttaagcctcaagaataa

SEQ ID NO: 731526 - DNA, 3483 bp, Homo sapiens
cattggaatggcactcagggcaaaggcagaggtgtgcatggcagtgccctggctgtccctgcaaagggcacaggcactgggcacgagagccgcccgggtccccaggacagtgctgccctttgaagccatgccccagcgtccaggcaacaggtggctgaggctgctgcagatctggagggagcagggttatgaggacctgcacctggaagtacaccagaccttccaggaactggggcccattttcaggtacgacttgggaggagcaggcatggtgtgtgtgatgctgccggaggacgtggagaagctgcaacaggtggacagcctgcatccccacaggatgagcctggagccctgggtggcctacagacaacatcgtgggcacaaatgtggcgtgttcttgctgaatgggcctgaatggcgcttcaaccgattgcggctgaatccagaagtgctgtcgcccaacgctgtgcagaggttcctcccgatggtggatgcagtggccagggacttctcccaggccctgaagaagaaggtgctgcagaacgcccgggggagcctgaccctggacgtccagcccagcatcttccactacaccatagaagccagcaacttggctctttttggagagcggctgggcctggttggccacagccccagttctgccagcctgaacttcctccatgccctggaggtcatgttcaaatccaccgtccagctcatgttcatgcccaggagcctgtctcgctggaccagccccaaggtgtggaaggagcactttgaggcctgggactgcatcttccagtacggcgacaactgtatccagaaaatctatcaggaactggccttcagccgccctcaacagtacaccagcatcgtggcggagctcctgttgaatgcggaactgtcgccagatgccatcaaggccaactctatggaactcactgcagggagcgtggacacgacggtgtttcccttgctgatgacgctctttgagctggctcggaaccccaacgtgcagcaggccctgcgccaggagagcctggccgccgcagccagcatcagtgaacatccccagaaggcaaccaccgagctgcccttgctgcgtgcggccctcaaggagaccttgcggctctaccctgtgggtctgtttctggagcgagtggtgagctcagacttggtgcttcagaactaccacatcccagctgggacattggtgcgcgtgttcctctactctctgggtcgcaaccccgccttgttcccgaggcctgagcgctataacccccagcgctggctagacatcaggggctccggcaggaacttctaccacgtgccctttggctttggcatgcgccagtgccttgggcggcgcctggcagaggcagagatgctgctgctgctgcaccatgtgctgaaacacctccaggtggagacactaacccaagaggacataaagatggtctacagcttcatattgaggcccagcatgttccccctcctcaccttcagagccatcaactaatcacgtctctgcacccagggtcccagcctggccaccagcctccctttctgcctgaccccaggccacccctcttctctcccacatgcacagcttcctgagtcacccctctgtctaaccagccccagcacaaatggaactcccgagggcctctaggaccagggtttgccaggctaagcagcaatgccagggcacagctggggaagatcttgctgaccttgtccccagccccacctggccctttctccagcaagcactgtcctctgggcagtttgcccccatccctcccagtgctggctccaggctcctcgtgtggccatgcaagggtgctgtggttttgtcccttgccttcctgcctagtctcacatgtccctgttcctcttcccctggccagggcccctgcgcagactgtcagagtcattaagcgggatcccagcatctcagagtccagtcaagttccctcctgcagcctgccccctaggcagctcgagcatgccctgagctctctgaaagttgtcgccctggaatagggtcctgcagggtagaataaaaaggcccctgtggtcacttgtcctgacatccccattttcaagtgatacaactgagtctcgagggacgtgtgttccccagctgatcgtgtcagcctcatgccccaggcctcatctttcatggaccaggccttgttccaggagtgggcgttgggtcctctgcttcctgtgctgtcccctggggaaggtcccaaggatgctgtcaggagatggaagagtcatgtggggtgggaacctggggtgtggttccagaaatgtttttggcaacaggagagacaggattgggccaacaaggactcagacgagttttattgactcatttctctggttgatacggagccatgtcatgtgccacgacctggggtgggcacagggaggctgcagtttcctgcgtgaacctgccttgggcctcatctgctcctagcccagcagagagagttgacccctcctgaactggccactccccagtgctcctgtgcagggagaggaagcacccggtttgagagtgtacccagccagactgtctttatctccatggattttcatcagggcaaagatcacagcagccagctcctggtggctgatgaggatcagagcatttgttcccccatgaaaggggaaatccctatggcatcattccagtggtggtcagtagatccaggacgccctgcaggactcagcctgtacagggagatgaagtgccccaggttgggagcacacctagctagagttatttgtgttaatctattcaggatgctctaagaaaacgccatagactgggttgctgacaaacatcagaattctatttctcatggttctgaaggcttagaaggctaagatcaaggtgtcagcaggttctgtgtctggtgaggacccacctcttgtttcatagataaaaccttcttgctgtgtcctcacatggtggaaaagggcaagacagctcacagagaccttttttataaggacgccagttccattcaagagggcactgcctgcattcccttcccccctcaaaggccctgccctgctattatcgtcaccttggtgactagatttcagcctatgaattctggaggcggacacaaaaattcagattaaactactctgcttctgtttctctaaaatctacatccttctcatatacaattaaaattgtagtccaaagtgtgatttaaatgttatctgagtcaaacatgggtaagactcaaggtacaatttatcctgagtccaactgttcttgctgcgaacctaggaaatcaaacatgttatgtgcttccaaaatacagtggttggagaggcataggataaacattcccattccagaaaggagaaacaggaaagaagaaaggagtaacaagtttcaagcaactccaaaattgaatgtgacaaacagtattaaaccttaagcctcaagaataa

SEQ ID NO: 731527 - DNA, 1196 bp, Homo sapiens
cattggaatggcactcagggcaaaggcagaggtgtgcatggcagtgccctggctgtccctgcaaagggcacaggcactgggcacgagagccgcccgggtccccaggacagtgctgccctttgaagccatgccccagcgtccaggcaacaggtggctgaggctgctgcagatctggagggagcagggttatgaggacctgcacctggaagtacaccagaccttccaggaactggggcccattttcaggtacgacttgggaggagcaggcatggtgtgtgtgatgctgccggaggacgtggagaagctgcaacaggtggacagcctgcatccccacaggatgagcctggagccctgggtggcctacagacaacatcgtgggcacaaatgtggcgtgttcttgctgaatgggcctgaatggcgcttcaaccgattgcggctgaatccagaagtgctgtcgcccaacgctgtgcagaggttcctcccgatggtggatgcagtggccagggacttctcccaggccctgaagaagaaggtgctgcagaacgcccgggggagcctgaccctggacgtccagcccagcatcttccactacaccatagaagccagcaacttggctctttttggagagcggctgggcctggttggccacagccccagttctgccagcctgaacttcctccatgccctggaggtcatgttcaaatccaccgtccagctcatgttcatgcccaggagcctgtctcgctggaccagccccaaggtgtggaaggagcactttgaggcctgggactgcatcttccagtacggcgacaactgtatccagaaaatctatcaggaactggccttcagccgccctcaacagtacaccagcatcgtggcggagctcctgttgaatgcggaactgtcgccagatgccatcaaggccaactctatggaactcactgcagggagcgtggacacggtcaggccggcaaccagccccacccagagagggtgatgccaagcctgcctcccaggcactgcctgccaatgtcacacggcgcccacgtgtcccatccccaggctatgggccccacatttcttacttgggattgtgatgtgataaacacgtttgcaggttgccatggttggaatggggggttcctttctgtggaggactcagggaaaggggtttggatgggcattaggatttgaag

SEQ ID NO: 731528 - DNA, 3429 bp, Homo sapiens
cattggaatggcactcagggcaaaggcagaggtgtgcatggcagtgccctggctgtccctgcaaagggcacaggcactgggcacgagagccgcccgggtccccaggacagtgctgccctttgaagccatgccccagcgtccaggcaacaggtggctgaggctgctgcagatctggagggagcagggttatgaggacctgcacctggaagtacaccagaccttccaggaactggggcccattttcaggtacgacttgggaggagcaggcatggtgtgtgtgatgctgccggaggacgtggagaagctgcaacaggtggacagcctgcatccccacaggatgagcctggagccctgggtggcctacagacaacatcgtgggcacaaatgtggcgtgttcttgctgaatgggcctgaatggcgcttcaaccgattgcggctgaatccagaagtgctgtcgcccaacgctgtgcagaggttcctcccgatggtggatgcagtggccagggacttctcccaggccctgaagaagaaggtgctgcagaacgcccgggggagcctgaccctggacgtccagcccagcatcttccactacaccatagaagccagcaacttggctctttttggagagcggctgggcctggttggccacagccccagttctgccagcctgaacttcctccatgccctggaggtcatgttcaaatccaccgtccagctcatgttcatgcccaggagcctgtctcgctggaccagccccaaggtgtggaaggagcactttgaggcctgggactgcatcttccagtacggcgacaactgtatccagaaaatctatcaggaactggccttcagccgccctcaacagtacaccagcatcgtggcggagctcctgttgaatgcggaactgtcgccagatgccatcaaggccaactctatggaactcactgcagggagcgtggacacgacggtgtttcccttgctgatgacgctctttgagctggctcggaaccccaacgtgcagcaggccctgcgccaggagagcctggccgccgcagccagcatcagtgaacatccccagaaggcaaccaccgagctgcccttgctgcgtgcggccctcaaggagaccttgcggctctaccctgtgggtctgtttctggagcgagtggtgagctcagacttggtgcttcagaactaccacatcccagctgggacattggtgcgcgtgttcctctactctctgggtcgcaaccccgccttgttcccgaggcctgagcgctataacccccagcgctggctagacatcaggggctccggcaggaacttctaccacgtgccctttggctttggcatgcgccagtgccttgggcggcgcctggcagaggcagagatgctgctgctgctgcaccatgtgctgaaacacctccaggtggagacactaacccaagaggacataaagatggtctacagcttcatattgaggcccagcatgttccccctcctcaccttcagagccatcaactaatcacgtctctgcacccagggtcccagcctggccaccagcctccctttctgcctgaccccaggccacccctcttctctcccacatgcacagcttcctgagtcacccctctgtctaaccagccccagcacaaatggaactcccgagggcctctaggaccagggtttgccaggctaagcagcaatgccagggcacagctggggaagatcttgctgaccttgtccccagccccacctggccctttctccagcaagcactgtcctctgggcagtttgcccccatccctcccagtgctggctccaggctcctcgtgtggccatgcaagggtgctgtggttttgtcccttgccttcctgcctagtctcacatgtccctgttcctcttcccctggccagggcccctgcgcagactgtcagagtcattaagcgggatcccagcatctcagagtccagtcaagttccctcctgcagcctgccccctaggcagctcgagcatgccctgagctctctgaaagttgtcgccctggaatagggtcctgcagggtagaatagagtctcgagggacgtgtgttccccagctgatcgtgtcagcctcatgccccaggcctcatctttcatggaccaggccttgttccaggagtgggcgttgggtcctctgcttcctgtgctgtcccctggggaaggtcccaaggatgctgtcaggagatggaagagtcatgtggggtgggaacctggggtgtggttccagaaatgtttttggcaacaggagagacaggattgggccaacaaggactcagacgagttttattgactcatttctctggttgatacggagccatgtcatgtgccacgacctggggtgggcacagggaggctgcagtttcctgcgtgaacctgccttgggcctcatctgctcctagcccagcagagagagttgacccctcctgaactggccactccccagtgctcctgtgcagggagaggaagcacccggtttgagagtgtacccagccagactgtctttatctccatggattttcatcagggcaaagatcacagcagccagctcctggtggctgatgaggatcagagcatttgttcccccatgaaaggggaaatccctatggcatcattccagtggtggtcagtagatccaggacgccctgcaggactcagcctgtacagggagatgaagtgccccaggttgggagcacacctagctagagttatttgtgttaatctattcaggatgctctaagaaaacgccatagactgggttgctgacaaacatcagaattctatttctcatggttctgaaggcttagaaggctaagatcaaggtgtcagcaggttctgtgtctggtgaggacccacctcttgtttcatagataaaaccttcttgctgtgtcctcacatggtggaaaagggcaagacagctcacagagaccttttttataaggacgccagttccattcaagagggcactgcctgcattcccttcccccctcaaaggccctgccctgctattatcgtcaccttggtgactagatttcagcctatgaattctggaggcggacacaaaaattcagattaaactactctgcttctgtttctctaaaatctacatccttctcatatacaattaaaattgtagtccaaagtgtgatttaaatgttatctgagtcaaacatgggtaagactcaaggtacaatttatcctgagtccaactgttcttgctgcgaacctaggaaatcaaacatgttatgtgcttccaaaatacagtggttggagaggcataggataaacattcccattccagaaaggagaaacaggaaagaagaaaggagtaacaagtttcaagcaactccaaaattgaatgtgacaaacagtattaaaccttaagcctcaagaataa

SEQ ID NO: 731529 - DNA, 840 bp, Homo sapiens
atgttccccctcctcaccttcagagccatcaactaatcacgtctctgcacccagggtcccagcctggccaccagcctccctttctgcctgaccccaggccacccctcttctctcccacatgcacagcttcctgagtcacccctctgtctaaccagccccagcacaaatggaactcccgagggcctctaggaccagggtttgccaggctaagcagcaatgccagggcacagctggggaagatcttgctgaccttgtccccagccccacctggccctttctccagcaagcactgtcctctgggcagtttgcccccatccctcccagtgctggctccaggctcctcgtgtggccatgcaagggtgctgtggttttgtcccttgccttcctgccctgctattatcgtcaccttggtgactagatttcagcctatgaattctggaggcggacacaaaaattcagattaaactactctgcttctgtttctctaaaatctacatccttctcatatacaaaatacatgcatttctccccagtagccccaaatatcaactcattttagcatcaactttaaaattgtagtccaaagtgtgatttaaatgttatctgagtcaaacatgggtaagactcaaggtacaatttatcctgagtccaactgttcttgctgcgaacctaggaaatcaaacatgttatgtgcttccaaaatacagtggttggagaggcataggataaacattcccattccagaaaggagaaacaggaaagaagaaaggagtaacaagtttcaagcaactccaaaattgaatgtgacaaacagtattaaaccttaagcctcaagaataa

SEQ ID NO: 731530 - DNA, 3560 bp, Homo sapiens
  misc_feature (3537)..(3538): n is a, c, g, or t
  misc_feature (3541)..(3541): n is a, c, g, or t
  misc_feature (3549)..(3549): n is a, c, g, or t
  misc_feature (3554)..(3555): n is a, c, g, or t
cattggaatggcactcagggcaaaggcagaggtgtgcatggcagtgccctggctgtccctgcaaagggcacaggcactgggcacgagagccgcccgggtccccaggacagtgctgccctttgaagccatgccccagcgtccaggcaacaggtggctgaggctgctgcagatctggagggagcagggttatgaggacctgcacctggaagtacaccagaccttccaggaactggggcccattttcaggtacgacttgggaggagcaggcatggtgtgtgtgatgctgccggaggacgtggagaagctgcaacaggtggacagcctgcatccccacaggatgagcctggagccctgggtggcctacagacaacatcgtgggcacaaatgtggcgtgttcttgctgaatgggcctgaatggcgcttcaaccgattgcggctgaatccagaagtgctgtcgcccaacgctgtgcagaggttcctcccgatggtggatgcagtggccagggacttctcccaggccctgaagaagaaggtgctgcagaacgcccgggggagcctgaccctggacgtccagcccagcatcttccactacaccatagaagccagcaacttggctctttttggagagcggctgggcctggttggccacagccccagttctgccagcctgaacttcctccatgccctggaggtcatgttcaaatccaccgtccagctcatgttcatgcccaggagcctgtctcgctggaccagccccaaggtgtggaaggagcactttgaggcctgggactgcatcttccagtacggcgacaactgtatccagaaaatctatcaggaactggccttcagccgccctcaacagtacaccagcatcgtggcggagctcctgttgaatgcggaactgtcgccagatgccatcaaggccaactctatggaactcactgcagggagcgtggacacgacggtgtttcccttgctgatgacgctctttgagctggctcggaaccccaacgtgcagcaggccctgcgccaggagagcctggccgccgcagccagcatcagtgaacatccccagaaggcaaccaccgagctgcccttgctgcgtgcggccctcaaggagaccttgcggctctaccctgtgggtctgtttctggagcgagtggtgagctcagacttggtgcttcagaactaccacatcccagctgggacattggtgcgcgtgttcctctactctctgggtcgcaaccccgccttgttcccgaggcctgagcgctataacccccagcgctggctagacatcaggggctccggcaggaacttctaccacgtgccctttggctttggcatgcgccagtgccttgggcggcgcctggcagaggcagagatgctgctgctgctgcaccatgtgctgaaacacctccaggtggagacactaacccaagaggacataaagatggtctacagcttcatattgaggcccagcatgttccccctcctcaccttcagagccatcaactaatcacgtctctgcacccagggtcccagcctggccaccagcctccctttctgcctgaccccaggccacccctcttctctcccacatgcacagcttcctgagtcacccctctgtctaaccagccccagcacaaatggaactcccgagggcctctaggaccagggtttgccaggctaagcagcaatgccagggcacagctggggaagatcttgctgaccttgtccccagccccacctggccctttctccagcaagcactgtcctctgggcagtttgcccccatccctcccagtgctggctccaggctcctcgtgtggccatgcaagggtgctgtggttttgtcccttgccttcctgcctagtctcacatgtccctgttcctcttcccctggccagggcccctgcgcagactgtcagagtcattaagcgggatcccagcatctcagagtccagtcaagttccctcctgcagcctgccccctaggcagctcgagcatgccctgagctctctgaaagttgtcgccctggaatagggtcctgcagggtagaataaaaaggcccctgtggtcacttgtcctgacatccccattttcaagtgatacaactgagtctcgagggacgtgtgttccccagctgatcgtgtcagcctcatgccccaggcctcatctttcatggaccaggccttgttccaggagtgggcgttgggtcctctgcttcctgtgctgtcccctggggaaggtcccaaggatgctgtcaggagatggaagagtcatgtggggtgggaacctggggtgtggttccagaaatgtttttggcaacaggagagacaggattgggccaacaaggactcagacgagttttattgactcatttctctggttgatacggagccatgtcatgtgccacgacctggggtgggcacagggaggctgcagtttcctgcgtgaacctgccttgggcctcatctgctcctagcccagcagagagagttgacccctcctgaactggccactccccagtgctcctgtgcagggagaggaagcacccggtttgagagtgtacccagccagactgtctttatctccatggattttcatcagggcaaagatcacagcagccagctcctggtggctgatgaggatcagagcatttgttcccccatgaaaggggaaatccctatggcatcattccagtggtggtcagtagatccaggacgccctgcaggactcagcctgtacagggagatgaagtgccccaggttgggagcacacctagctagagttatttgtgttaatctattcaggatgctctaagaaaacgccatagactgggttgctgacaaacatcagaattctatttctcatggttctgaaggcttagaaggctaagatcaaggtgtcagcaggttctgtgtctggtgaggacccacctcttgtttcatagataaaaccttcttgctgtgtcctcacatggtggaaaaggggcactgcctgcattcccttcccccctcaaaggccctgccctgctattatcgtcaccttggtgactagatttcagcctatgaattctggaggcggacacaaaaattcagattaaactactctgcttctgtttctctaaaatctacatccttctcatatacaaaatacatgcatttctccccagtagccccaaatatcaactcattttagcatcaactttaaaattgtagtccaaagtgtgatttaaatgttatctgagtcaaacatgggtaagactcaaggtacaatttatcctgagtccaactgttcttgctgcgaacctaggaaatcaaacatgttatgtgcttccaaaatacagtggttggagaggcataggataaacattcccattccagaaaggagaaacaggaaagaagaaaggagtaacaagtttcaagcaactccaaaattgaatgtgacaaacagtattaaaccttaagcctcaagaataaaaaaaaaaaaaaaaaaaaaaaaaaaaaaaaaaaaaaaaaaaaaaaaaaaaannaanaaaaaaanaaaannaaaaa

SEQ ID NO: 731531 - DNA, 3613 bp, Homo sapiens
  misc_feature (3590)..(3591): n is a, c, g, or t
  misc_feature (3594)..(3594): n is a, c, g, or t
  misc_feature (3602)..(3602): n is a, c, g, or t
  misc_feature (3607)..(3608): n is a, c, g, or t
cattggaatggcactcagggcaaaggcagaggtgtgcatggcagtgccctggctgtccctgcaaagggcacaggcactgggcacgagagccgcccgggtccccaggacagtgctgccctttgaagccatgccccagcgtccaggcaacaggtggctgaggctgctgcagatctggagggagcagggttatgaggacctgcacctggaagtacaccagaccttccaggaactggggcccattttcaggtacgacttgggaggagcaggcatggtgtgtgtgatgctgccggaggacgtggagaagctgcaacaggtggacagcctgcatccccacaggatgagcctggagccctgggtggcctacagacaacatcgtgggcacaaatgtggcgtgttcttgctgaatgggcctgaatggcgcttcaaccgattgcggctgaatccagaagtgctgtcgcccaacgctgtgcagaggttcctcccgatggtggatgcagtggccagggacttctcccaggccctgaagaagaaggtgctgcagaacgcccgggggagcctgaccctggacgtccagcccagcatcttccactacaccatagaagccagcaacttggctctttttggagagcggctgggcctggttggccacagccccagttctgccagcctgaacttcctccatgccctggaggtcatgttcaaatccaccgtccagctcatgttcatgcccaggagcctgtctcgctggaccagccccaaggtgtggaaggagcactttgaggcctgggactgcatcttccagtacggcgacaactgtatccagaaaatctatcaggaactggccttcagccgccctcaacagtacaccagcatcgtggcggagctcctgttgaatgcggaactgtcgccagatgccatcaaggccaactctatggaactcactgcagggagcgtggacacgacggtgtttcccttgctgatgacgctctttgagctggctcggaaccccaacgtgcagcaggccctgcgccaggagagcctggccgccgcagccagcatcagtgaacatccccagaaggcaaccaccgagctgcccttgctgcgtgcggccctcaaggagaccttgcggctctaccctgtgggtctgtttctggagcgagtggtgagctcagacttggtgcttcagaactaccacatcccagctgggacattggtgcgcgtgttcctctactctctgggtcgcaaccccgccttgttcccgaggcctgagcgctataacccccagcgctggctagacatcaggggctccggcaggaacttctaccacgtgccctttggctttggcatgcgccagtgccttgggcggcgcctggcagaggcagagatgctgctgctgctgcaccatgtgctgaaacacctccaggtggagacactaacccaagaggacataaagatggtctacagcttcatattgaggcccagcatgttccccctcctcaccttcagagccatcaactaatcacgtctctgcacccagggtcccagcctggccaccagcctccctttctgcctgaccccaggccacccctcttctctcccacatgcacagcttcctgagtcacccctctgtctaaccagccccagcacaaatggaactcccgagggcctctaggaccagggtttgccaggctaagcagcaatgccagggcacagctggggaagatcttgctgaccttgtccccagccccacctggccctttctccagcaagcactgtcctctgggcagtttgcccccatccctcccagtgctggctccaggctcctcgtgtggccatgcaagggtgctgtggttttgtcccttgccttcctgcctagtctcacatgtccctgttcctcttcccctggccagggcccctgcgcagactgtcagagtcattaagcgggatcccagcatctcagagtccagtcaagttccctcctgcagcctgccccctaggcagctcgagcatgccctgagctctctgaaagttgtcgccctggaatagggtcctgcagggtagaataaaaaggcccctgtggtcacttgtcctgacatccccattttcaagtgatacaactgagtctcgagggacgtgtgttccccagctgatcgtgtcagcctcatgccccaggcctcatctttcatggaccaggccttgttccaggagtgggcgttgggtcctctgcttcctgtgctgtcccctggggaaggtcccaaggatgctgtcaggagatggaagagtcatgtggggtgggaacctggggtgtggttccagaaatgtttttggcaacaggagagacaggattgggccaacaaggactcagacgagttttattgactcatttctctggttgatacggagccatgtcatgtgccacgacctggggtgggcacagggaggctgcagtttcctgcgtgaacctgccttgggcctcatctgctcctagcccagcagagagagttgacccctcctgaactggccactccccagtgctcctgtgcagggagaggaagcacccggtttgagagtgtacccagccagactgtctttatctccatggattttcatcagggcaaagatcacagcagccagctcctggtggctgatgaggatcagagcatttgttcccccatgaaaggggaaatccctatggcatcattccagtggtggtcagtagatccaggacgccctgcaggactcagcctgtacagggagatgaagtgccccaggttgggagcacacctagctagagttatttgtgttaatctattcaggatgctctaagaaaacgccatagactgggttgctgacaaacatcagaattctatttctcatggttctgaaggcttagaaggctaagatcaaggtgtcagcaggttctgtgtctggtgaggacccacctcttgtttcatagataaaaccttcttgctgtgtcctcacatggtggaaaagggcaagacagctcacagagaccttttttataaggacgccagttccattcaagagggcactgcctgcattcccttcccccctcaaaggccctgccctgctattatcgtcaccttggtgactagatttcagcctatgaattctggaggcggacacaaaaattcagattaaactactctgcttctgtttctctaaaatctacatccttctcatatacaaaatacatgcatttctccccagtagccccaaatatcaactcattttagcatcaactttaaaattgtagtccaaagtgtgatttaaatgttatctgagtcaaacatgggtaagactcaaggtacaatttatcctgagtccaactgttcttgctgcgaacctaggaaatcaaacatgttatgtgcttccaaaatacagtggttggagaggcataggataaacattcccattccagaaaggagaaacaggaaagaagaaaggagtaacaagtttcaagcaactccaaaattgaatgtgacaaacagtattaaaccttaagcctcaagaataaaaaaaaaaaaaaaaaaaaaaaaaaaaaaaaaaaaaaaaaaaaaaaaaaaaannaanaaaaaaanaaaannaaaaa

SEQ ID NO: 731532 - DNA, 1470 bp, Homo sapiens
cattggaatggcactcagggcaaaggcagaggtgtgcatggcagtgccctggctgtccctgcaaagggcacaggcactgggcacgagagccgcccgggtccccaggacagtgctgccctttgaagccatgccccagcgtccaggcaacaggtggctgaggctgctgcagatctggagggagcagggttatgaggacctgcacctggaagtacaccagaccttccaggaactggggcccattttcaggtacgacttgggaggagcaggcatggtgtgtgtgatgctgccggaggacgtggagaagctgcaacaggtggacagcctgcatccccacaggatgagcctggagccctgggtggcctacagacaacatcgtgggcacaaatgtggcgtgttcttgctgaatgggcctgaatggcgcttcaaccgattgcggctgaatccagaagtgctgtcgcccaacgctgtgcagaggttcctcccgatggtggatgcagtggccagggacttctcccaggccctgaagaagaaggtgctgcagaacgcccgggggagcctgaccctggacgtccagcccagcatcttccactacaccatagaagccagcaacttggctctttttggagagcggctgggcctggttggccacagccccagttctgccagcctgaacttcctccatgccctggaggtcatgttcaaatccaccgtccagctcatgttcatgcccaggagcctgtctcgctggaccagccccaaggtgtggaaggagcactttgaggcctgggactgcatcttccagtacgaccagcatcgtggcggagctcctgttgaatgcggaactgtcgccagatgccatcaaggccaactctatggaactcactgcagggagcgtggacacggtcaggccggcaaccagccccacccagagagggtgatgccaagcctgcctcccaggcactgcctgccaatgtcacacggcgcccacgtgtcccatccccaggctatgggccccacatttcttacttgggattgtgatgtgataaacacgtttgcagacggtgtttcccttgctgatgacgctctttgagctggctcggaaccccaacgtgcagcaggccctgcgccaggagagcctggccgccgcagccagcatcagtgaacatccccagaaggcaaccaccgagctgcccttgctgcgtgcggccctcaaggagaccttgcggctctaccctgtgggtctgtttctggagcgagtggtgagctcagacttggtgcttcagaactaccacatcccagctgggaaatcaaacatgttatgtgcttccaaaatacagtggttggagaggcataggataaacattcccattccagaaaggagaaacaggaaagaagaaaggagtaacaagtttcaagcaactccaaaattgaatgtgacaaacagtattaaaccttaagcctcaagaataa

SEQ ID NO: 731533 - DNA, 3380 bp, Homo sapiens
cattggaatggcactcagggcaaaggcagaggtgtgcatggcagtgccctggctgtccctgcaaagggcacaggcactgggcacgagagccgcccgggtccccaggacagtgctgccctttgaagccatgccccagcgtccaggcaacaggtggctgaggctgctgcagatctggagggagcagggttatgaggacctgcacctggaagtacaccagaccttccaggaactggggcccattttcaggtacgacttgggaggagcaggcatggtgtgtgtgatgctgccggaggacgtggagaagctgcaacaggtggacagcctgcatccccacaggatgagcctggagccctgggtggcctacagacaacatcgtgggcacaaatgtggcgtgttcttgctgaatgggcctgaatggcgcttcaaccgattgcggctgaatccagaagtgctgtcgcccaacgctgtgcagaggttcctcccgatggtggatgcagtggccagggacttctcccaggccctgaagaagaaggtgctgcagaacgcccgggggagcctgaccctggacgtccagcccagcatcttccactacaccatagaagccagcaacttggctctttttggagagcggctgggcctggttggccacagccccagttctgccagcctgaacttcctccatgccctggaggtcatgttcaaatccaccgtccagctcatgttcatgcccaggagcctgtctcgctggaccagccccaaggtgtggaaggagcactttgaggcctgggactgcatcttccagtacgaccagcatcgtggcggagctcctgttgaatgcggaactgtcgccagatgccatcaaggccaactctatggaactcactgcagggagcgtggacacggtcaggccggcaaccagccccacccagagagggtgatgccaagcctgcctcccaggcactgcctgccaatgtcacacggcgcccacgtgtcccatccccaggctatgggccccacatttcttacttgggattgtgatgtgataaacacgtttgcagacggtgtttcccttgctgatgacgctctttgagctggctcggaaccccaacgtgcagcaggccctgcgccaggagagcctggccgccgcagccagcatcagtgaacatccccagaaggcaaccaccgagctgcccttgctgcgtgcggccctcaaggagaccttgcggctctaccctgtgggtctgtttctggagcgagtggtgagctcagacttggtgcttcagaactaccacatcccagctgggctgaaacacctccaggtggagacactaacccaagaggacataaagatggtctacagcttcatattgaggcccagcatgttccccctcctcaccttcagagccatcaactaatcacgtctctgcacccagggtcccagcctggccaccagcctccctttctgcctgaccccaggccacccctcttctctcccacatgcacagcttcctgagtcacccctctgtctaaccagccccagcacaaatggaactcccgagggcctctaggaccagggtttgccaggctaagcagcaatgccagggcacagctggggaagatcttgctgaccttgtccccagccccacctggccctttctccagcaagcactgtcctctgggcagtttgcccccatccctcccagtgctggctccaggctcctcgtgtggccatgcaagggtgctgtggttttgtcccttgccttcctgcctagtctcacatgtccctgttcctcttcccctggccagggcccctgcgcagactgtcagagtcattaagcgggatcccagcatctcagagtccagtcaagttccctcctgcagcctgccccctaggcagctcgagcatgccctgagctctctgaaagttgtcgccctggaatagggtcctgcagggtagaatagagtctcgagggacgtgtgttccccagctgatcgtgtcagcctcatgccccaggcctcatctttcatggaccaggccttgttccaggagtgggcgttgggtcctctgcttcctgtgctgtcccctggggaaggtcccaaggatgctgtcaggagatggaagagtcatgtggggtgggaacctggggtgtggttccagaaatgtttttggcaacaggagagacaggattgggccaacaaggactcagacgagttttattgactcatttctctggttgatacggagccatgtcatgtgccacgacctggggtgggcacagggaggctgcagtttcctgcgtgaacctgccttgggcctcatctgctcctagcccagcagagagagttgacccctcctgaactggccactccccagtgctcctgtgcagggagaggaagcacccggtttgagagtgtacccagccagactgtctttatctccatggattttcatcagggcaaagatcacagcagccagctcctggtggctgatgaggatcagagcatttgttcccccatgaaaggggaaatccctatggcatcattccagtggtggtcagtagatccaggacgccctgcaggactcagcctgtacagggagatgaagtgccccaggttgggagcacacctagctagagttatttgtgttaatctattcaggatgctctaagaaaacgccatagactgggttgctgacaaacatcagaattctatttctcatggttctgaaggcttagaaggctaagatcaaggtgtcagcaggttctgtgtctggtgaggacccacctcttgtttcatagataaaaccttcttgctgtgtcctcacatggtggaaaagggcaagacagctcacagagaccttttttataaggacgccagttccattcaagagggcactgcctgcattcccttcccccctcaaaggccctgccctgctattatcgtcaccttggtgactagatttcagcctatgaattctggaggcggacacaaaaattcagattaaactactctgcttctgtttctctaaaatctacatccttctcatatacaaaatacatgcatttctccccagtagccccaaatatcaactcattttagcatcaactttaaaattgtagtccaaagtgtgatttaaatgttatctgagtcaaacatgggtaagactcaaggtacaatttatcctgagtccaactgttcttgctgcgaacctaggaaatcaaacatgttatgtgcttccaaaatacagtggttggagaggcataggataaacattcccattccagaaaggagaaacaggaaagaagaaaggagtaacaagtttcaagcaactccaaaattgaatgtgacaaacagtattaaaccttaagcctcaagaataa

SEQ ID NO: 731534 - DNA, 3455 bp, Homo sapiens
  misc_feature (3432)..(3433): n is a, c, g, or t
  misc_feature (3436)..(3436): n is a, c, g, or t
  misc_feature (3444)..(3444): n is a, c, g, or t
  misc_feature (3449)..(3450): n is a, c, g, or t
cattggaatggcactcagggcaaaggcagaggtgtgcatggcagtgccctggctgtccctgcaaagggcacaggcactgggcacgagagccgcccgggtccccaggacagtgctgccctttgaagccatgccccagcgtccaggcaacaggtggctgaggctgctgcagatctggagggagcagggttatgaggacctgcacctggaagtacaccagaccttccaggaactggggcccattttcaggtacgacttgggaggagcaggcatggtgtgtgtgatgctgccggaggacgtggagaagctgcaacaggtggacagcctgcatccccacaggatgagcctggagccctgggtggcctacagacaacatcgtgggcacaaatgtggcgtgttcttgctgaatgggcctgaatggcgcttcaaccgattgcggctgaatccagaagtgctgtcgcccaacgctgtgcagaggttcctcccgatggtggatgcagtggccagggacttctcccaggccctgaagaagaaggtgctgcagaacgcccgggggagcctgaccctggacgtccagcccagcatcttccactacaccatagaagccagcaacttggctctttttggagagcggctgggcctggttggccacagccccagttctgccagcctgaacttcctccatgccctggaggtcatgttcaaatccaccgtccagctcatgttcatgcccaggagcctgtctcgctggaccagccccaaggtgtggaaggagcactttgaggcctgggactgcatcttccagtacgaccagcatcgtggcggagctcctgttgaatgcggaactgtcgccagatgccatcaaggccaactctatggaactcactgcagggagcgtggacacggtcaggccggcaaccagccccacccagagagggtgatgccaagcctgcctcccaggcactgcctgccaatgtcacacggcgcccacgtgtcccatccccaggctatgggccccacatttcttacttgggattgtgatgtgataaacacgtttgcagacggtgtttcccttgctgatgacgctctttgagctggctcggaaccccaacgtgcagcaggccctgcgccaggagagcctggccgccgcagccagcatcagtgaacatccccagaaggcaaccaccgagctgcccttgctgcgtgcggccctcaaggagaccttgcggctctaccctgtgggtctgtttctggagcgagtggtgagctcagacttggtgcttcagaactaccacatcccagctgggctgaaacacctccaggtggagacactaacccaagaggacataaagatggtctacagcttcatattgaggcccagcatgttccccctcctcaccttcagagccatcaactaatcacgtctctgcacccagggtcccagcctggccaccagcctccctttctgcctgaccccaggccacccctcttctctcccacatgcacagcttcctgagtcacccctctgtctaaccagccccagcacaaatggaactcccgagggcctctaggaccagggtttgccaggctaagcagcaatgccagggcacagctggggaagatcttgctgaccttgtccccagccccacctggccctttctccagcaagcactgtcctctgggcagtttgcccccatccctcccagtgctggctccaggctcctcgtgtggccatgcaagggtgctgtggttttgtcccttgccttcctgcctagtctcacatgtccctgttcctcttcccctggccagggcccctgcgcagactgtcagagtcattaagcgggatcccagcatctcagagtccagtcaagttccctcctgcagcctgccccctaggcagctcgagcatgccctgagctctctgaaagttgtcgccctggaatagggtcctgcagggtagaatagagtctcgagggacgtgtgttccccagctgatcgtgtcagcctcatgccccaggcctcatctttcatggaccaggccttgttccaggagtgggcgttgggtcctctgcttcctgtgctgtcccctggggaaggtcccaaggatgctgtcaggagatggaagagtcatgtggggtgggaacctggggtgtggttccagaaatgtttttggcaacaggagagacaggattgggccaacaaggactcagacgagttttattgactcatttctctggttgatacggagccatgtcatgtgccacgacctggggtgggcacagggaggctgcagtttcctgcgtgaacctgccttgggcctcatctgctcctagcccagcagagagagttgacccctcctgaactggccactccccagtgctcctgtgcagggagaggaagcacccggtttgagagtgtacccagccagactgtctttatctccatggattttcatcagggcaaagatcacagcagccagctcctggtggctgatgaggatcagagcatttgttcccccatgaaaggggaaatccctatggcatcattccagtggtggtcagtagatccaggacgccctgcaggactcagcctgtacagggagatgaagtgccccaggttgggagcacacctagctagagttatttgtgttaatctattcaggatgctctaagaaaacgccatagactgggttgctgacaaacatcagaattctatttctcatggttctgaaggcttagaaggctaagatcaaggtgtcagcaggttctgtgtctggtgaggacccacctcttgtttcatagataaaaccttcttgctgtgtcctcacatggtggaaaagggcaagacagctcacagagaccttttttataaggacgccagttccattcaagagggcactgcctgcattcccttcccccctcaaaggccctgccctgctattatcgtcaccttggtgactagatttcagcctatgaattctggaggcggacacaaaaattcagattaaactactctgcttctgtttctctaaaatctacatccttctcatatacaaaatacatgcatttctccccagtagccccaaatatcaactcattttagcatcaactttaaaattgtagtccaaagtgtgatttaaatgttatctgagtcaaacatgggtaagactcaaggtacaatttatcctgagtccaactgttcttgctgcgaacctaggaaatcaaacatgttatgtgcttccaaaatacagtggttggagaggcataggataaacattcccattccagaaaggagaaacaggaaagaagaaaggagtaacaagtttcaagcaactccaaaattgaatgtgacaaacagtattaaaccttaagcctcaagaataaaaaaaaaaaaaaaaaaaaaaaaaaaaaaaaaaaaaaaaaaaaaaaaaaaaannaanaaaaaaanaaaannaaaaa

SEQ ID NO: 731535 - DNA, 3225 bp, Homo sapiens
cattggaatggcactcagggcaaaggcagaggtgtgcatggcagtgccctggctgtccctgcaaagggcacaggcactgggcacgagagccgcccgggtccccaggacagtgctgccctttgaagccatgccccagcgtccaggcaacaggtggctgaggctgctgcagatctggagggagcagggttatgaggacctgcacctggaagtacaccagaccttccaggaactggggcccattttcaggtacgacttgggaggagcaggcatggtgtgtgtgatgctgccggaggacgtggagaagctgcaacaggtggacagcctgcatccccacaggatgagcctggagccctgggtggcctacagacaacatcgtgggcacaaatgtggcgtgttcttgctgaatgggcctgaatggcgcttcaaccgattgcggctgaatccagaagtgctgtcgcccaacgctgtgcagaggttcctcccgatggtggatgcagtggccagggacttctcccaggccctgaagaagaaggtgctgcagaacgcccgggggagcctgaccctggacgtccagcccagcatcttccactacaccatagaagccagcaacttggctctttttggagagcggctgggcctggttggccacagccccagttctgccagcctgaacttcctccatgccctggaggtcatgttcaaatccaccgtccagctcatgttcatgcccaggagcctgtctcgctggaccagccccaaggtgtggaaggagcactttgaggcctgggactgcatcttccagtacgaccagcatcgtggcggagctcctgttgaatgcggaactgtcgccagatgccatcaaggccaactctatggaactcactgcagggagcgtggacacggtcaggccggcaaccagccccacccagagagggtgatgccaagcctgcctcccaggcactgcctgccaatgtcacacggcgcccacgtgtcccatccccaggctatgggccccacatttcttacttgggattgtgatgtgataaacacgtttgcagacggtgtttcccttgctgatgacgctctttgagctggctcggaaccccaacgtgcagcaggccctgcgccaggagagcctggccgccgcagccagcatcagtgaacatccccagaaggcaaccaccgagctgcccttgctgcgtgcggccctcaaggagaccttgcggctctaccctgtgggtctgtttctggagcgagtggtgagctcagacttggtgcttcagaactaccacatcccagctgggctgaaacacctccaggtggagacactaacccaagaggacataaagatggtctacagcttcatattgaggcccagcatgttccccctcctcaccttcagagccatcaactaatcacgtctctgcacccagggtcccagcctggccaccagcctccctttctgcctgaccccaggccacccctcttctctcccacatgcacagcttcctgagtcacccctctgtctaaccagccccagcacaaatggaactcccgagggcctctaggaccagggtttgccaggctaagcagcaatgccagggcacagctggggaagatcttgctgaccttgtccccagccccacctggccctttctccagcaagcactgtcctctgggcagtttgcccccatccctcccagtgctggctccaggctcctcgtgtggccatgcaagggtgctgtggttttgtcccttgccttcctgcctagtctcacatgtccctgttcctcttcccctggccagggcccctgcgcagactgtcagagtcattaagcgggatcccagcatctcagagtccagtcaagttccctcctgcagcctgccccctaggcagctcgagcatgccctgagctctctgaaagttgtcgccctggaatagggtcctgcagggtagaatagagtctcgagggacgtgtgttccccagctgatcgtgtcagcctcatgccccaggcctcatctttcatggaccaggccttgttccaggagtgggcgttgggtcctctgcttcctgtgctgtcccctggggaaggtcccaaggatgctgtcaggagatggaagagtcatgtggggtgggaacctggggtgtggttccagaaatgtttttggcaacaggagagacaggattgggccaacaaggactcagacgagttttattgactcatttctctggttgatacggagccatgtcatgtgccacgacctggggtgggcacagggaggctgcagtttcctgcgtgaacctgccttgggcctcatctgctcctagcccagcagagagagttgacccctcctgaactggccactccccagtgctcctgtgcagggagaggaagcacccggtttgagagtgtacccagccagactgtctttatctccatggattttcatcagggcaaagatcacagcagccagctcctggtggctgatgaggatcagagcatttgttcccccatgaaaggggaaatccctatggcatcattccagtggtggtcagtagatccaggacgccctgcaggactcagcctgtacagggagatgaagtgccccaggttgggagcacacctagctagagttatttgtgttaatctattcaggatgctctaagaaaacgccatagactgggttgctgacaaacatcagaattctatttctcatggttctgaaggcttagaaggctaagatcaaggtgtcagcaggttctgtgtctggtgaggacccacctcttgtttcatagataaaaccttcttgctgtgtcctcacatggtggaaaagggcaagacagctcacagagaccttttttataaggacgccagttccattcaagagggcactgcctgcattcccttcccccctcaaaggccctgccctgctattatcgtcaccttggtgactagatttcagcctatgaattctggaggcggacacaaaaattcagattaaactactctgcttctgtttctctaaaatctacatccttctcatatacaaaatacatgcatttctccccagtagccccaaatatcaactcattttagcatcaactactcaaggtacaatttatcctgagtccaactgttcttgctgcgaacctaggaaatcaaacatgttatgtgcttccaaaatacagtggttggagaggcataggataaacattcccattc

SEQ ID NO: 731536 - DNA, 3327 bp, Homo sapiens
cattggaatggcactcagggcaaaggcagaggtgtgcatggcagtgccctggctgtccctgcaaagggcacaggcactgggcacgagagccgcccgggtccccaggacagtgctgccctttgaagccatgccccagcgtccaggcaacaggtggctgaggctgctgcagatctggagggagcagggttatgaggacctgcacctggaagtacaccagaccttccaggaactggggcccattttcaggtacgacttgggaggagcaggcatggtgtgtgtgatgctgccggaggacgtggagaagctgcaacaggtggacagcctgcatccccacaggatgagcctggagccctgggtggcctacagacaacatcgtgggcacaaatgtggcgtgttcttgctgaatgggcctgaatggcgcttcaaccgattgcggctgaatccagaagtgctgtcgcccaacgctgtgcagaggttcctcccgatggtggatgcagtggccagggacttctcccaggccctgaagaagaaggtgctgcagaacgcccgggggagcctgaccctggacgtccagcccagcatcttccactacaccatagaagccagcaacttggctctttttggagagcggctgggcctggttggccacagccccagttctgccagcctgaacttcctccatgccctggaggtcatgttcaaatccaccgtccagctcatgttcatgcccaggagcctgtctcgctggaccagccccaaggtgtggaaggagcactttgaggcctgggactgcatcttccagtacgaccagcatcgtggcggagctcctgttgaatgcggaactgtcgccagatgccatcaaggccaactctatggaactcactgcagggagcgtggacacggtcaggccggcaaccagccccacccagagagggtgatgccaagcctgcctcccaggcactgcctgccaatgtcacacggcgcccacgtgtcccatccccaggctatgggccccacatttcttacttgggattgtgatgtgataaacacgtttgcagacggtgtttcccttgctgatgacgctctttgagctggctcggaaccccaacgtgcagcaggccctgcgccaggagagcctggccgccgcagccagcatcagtgaacatccccagaaggcaaccaccgagctgcccttgctgcgtgcggccctcaaggagaccttgcggctctaccctgtgggtctgtttctggagcgagtggtgagctcagacttggtgcttcagaactaccacatcccagctgggctgaaacacctccaggtggagacactaacccaagaggacataaagatggtctacagcttcatattgaggcccagcatgttccccctcctcaccttcagagccatcaactaatcacgtctctgcacccagggtcccagcctggccaccagcctccctttctgcctgaccccaggccacccctcttctctcccacatgcacagcttcctgagtcacccctctgtctaaccagccccagcacaaatggaactcccgagggcctctaggaccagggtttgccaggctaagcagcaatgccagggcacagctggggaagatcttgctgaccttgtccccagccccacctggccctttctccagcaagcactgtcctctgggcagtttgcccccatccctcccagtgctggctccaggctcctcgtgtggccatgcaagggtgctgtggttttgtcccttgccttcctgcctagtctcacatgtccctgttcctcttcccctggccagggcccctgcgcagactgtcagagtcattaagcgggatcccagcatctcagagtccagtcaagttccctcctgcagcctgccccctaggcagctcgagcatgccctgagctctctgaaagttgtcgccctggaatagggtcctgcagggtagaatagagtctcgagggacgtgtgttccccagctgatcgtgtcagcctcatgccccaggcctcatctttcatggaccaggccttgttccaggagtgggcgttgggtcctctgcttcctgtgctgtcccctggggaaggtcccaaggatgctgtcaggagatggaagagtcatgtggggtgggaacctggggtgtggttccagaaatgtttttggcaacaggagagacaggattgggccaacaaggactcagacgagttttattgactcatttctctggttgatacggagccatgtcatgtgccacgacctggggtgggcacagggaggctgcagtttcctgcgtgaacctgccttgggcctcatctgctcctagcccagcagagagagttgacccctcctgaactggccactccccagtgctcctgtgcagggagaggaagcacccggtttgagagtgtacccagccagactgtctttatctccatggattttcatcagggcaaagatcacagcagccagctcctggtggctgatgaggatcagagcatttgttcccccatgaaaggggaaatccctatggcatcattccagtggtggtcagtagatccaggacgccctgcaggactcagcctgtacagggagatgaagtgccccaggttgggagcacacctagctagagttatttgtgttaatctattcaggatgctctaagaaaacgccatagactgggttgctgacaaacatcagaattctatttctcatggttctgaaggcttagaaggctaagatcaaggtgtcagcaggttctgtgtctggtgaggacccacctcttgtttcatagataaaaccttcttgctgtgtcctcacatggtggaaaaggggcactgcctgcattcccttcccccctcaaaggccctgccctgctattatcgtcaccttggtgactagatttcagcctatgaattctggaggcggacacaaaaattcagattaaactactctgcttctgtttctctaaaatctacatccttctcatatacaaaatacatgcatttctccccagtagccccaaatatcaactcattttagcatcaactttaaaattgtagtccaaagtgtgatttaaatgttatctgagtcaaacatgggtaagactcaaggtacaatttatcctgagtccaactgttcttgctgcgaacctaggaaatcaaacatgttatgtgcttccaaaatacagtggttggagaggcataggataaacattcccattccagaaaggagaaacaggaaagaagaaaggagtaacaagtttcaagcaactccaaaattgaatgtgacaaacagtattaaaccttaagcctcaagaataa

SEQ ID NO: 731537 - DNA, 3325 bp, Homo sapiens
cattggaatggcactcagggcaaaggcagaggtgtgcatggcagtgccctggctgtccctgcaaagggcacaggcactgggcacgagagccgcccgggtccccaggacagtgctgccctttgaagccatgccccagcgtccaggcaacaggtggctgaggctgctgcagatctggagggagcagggttatgaggacctgcacctggaagtacaccagaccttccaggaactggggcccattttcaggtacgacttgggaggagcaggcatggtgtgtgtgatgctgccggaggacgtggagaagctgcaacaggtggacagcctgcatccccacaggatgagcctggagccctgggtggcctacagacaacatcgtgggcacaaatgtggcgtgttcttgctgaatgggcctgaatggcgcttcaaccgattgcggctgaatccagaagtgctgtcgcccaacgctgtgcagaggttcctcccgatggtggatgcagtggccagggacttctcccaggccctgaagaagaaggtgctgcagaacgcccgggggagcctgaccctggacgtccagcccagcatcttccactacaccatagaagccagcaacttggctctttttggagagcggctgggcctggttggccacagccccagttctgccagcctgaacttcctccatgccctggaggtcatgttcaaatccaccgtccagctcatgttcatgcccaggagcctgtctcgctggaccagccccaaggtgtggaaggagcactttgaggcctgggactgcatcttccagtacgaccagcatcgtggcggagctcctgttgaatgcggaactgtcgccagatgccatcaaggccaactctatggaactcactgcagggagcgtggacacggtcaggccggcaaccagccccacccagagagggtgatgccaagcctgcctcccaggcactgcctgccaatgtcacacggcgcccacgtgtcccatccccaggctatgggccccacatttcttacttgggattgtgatgtgataaacacgtttgcagacggtgtttcccttgctgatgacgctctttgagctggctcggaaccccaacgtgcagcaggccctgcgccaggagagcctggccgccgcagccagcatcagtgaacatccccagaaggcaaccaccgagctgcccttgctgcgtgcggccctcaaggagaccttgcggctctaccctgtgggtctgtttctggagcgagtggtgagctcagacttggtgcttcagaactaccacatcccagctgggctgaaacacctccaggtggagacactaacccaagaggacataaagatggtctacagcttcatattgaggcccagcatgttccccctcctcaccttcagagccatcaactaatcacgtctctgcacccagggtcccagcctggccaccagcctccctttctgcctgaccccaggccacccctcttctctcccacatgcacagcttcctgagtcacccctctgtctaaccagccccagcacaaatggaactcccgagggcctctaggaccagggtttgccaggctaagcagcaatgccagggcacagctggggaagatcttgctgaccttgtccccagccccacctggccctttctccagcaagcactgtcctctgggcagtttgcccccatccctcccagtgctggctccaggctcctcgtgtggccatgcaagggtgctgtggttttgtcccttgccttcctgcctagtctcacatgtccctgttcctcttcccctggccagggcccctgcgcagactgtcagagtcattaagcgggatcccagcatctcagagtccagtcaagttccctcctgcagcctgccccctaggcagctcgagcatgccctgagctctctgaaagttgtcgccctggaatagggtcctgcagggtagaatagagtctcgagggacgtgtgttccccagctgatcgtgtcagcctcatgccccaggcctcatctttcatggaccaggccttgttccaggagtgggcgttgggtcctctgcttcctgtgctgtcccctggggaaggtcccaaggatgctgtcaggagatggaagagtcatgtggggtgggaacctggggtgtggttccagaaatgtttttggcaacaggagagacaggattgggccaacaaggactcagacgagttttattgactcatttctctggttgatacggagccatgtcatgtgccacgacctggggtgggcacagggaggctgcagtttcctgcgtgaacctgccttgggcctcatctgctcctagcccagcagagagagttgacccctcctgaactggccactccccagtgctcctgtgcagggagaggaagcacccggtttgagagtgtacccagccagactgtctttatctccatggattttcatcagggcaaagatcacagcagccagctcctggtggctgatgaggatcagagcatttgttcccccatgaaaggggaaatccctatggcatcattccagtggtggtcagtagatccaggacgccctgcaggactcagcctgtacagggagatgaagtgccccaggttgggagcacacctagctagagttatttgtgttaatctattcaggatgctctaagaaaacgccatagactgggttgctgacaaacatcagaattctatttctcatggttctgaaggcttagaaggctaagatcaaggtgtcagcaggttctgtgtctggtgaggacccacctcttgtttcatagataaaaccttcttgctgtgtcctcacatggtggaaaagggcaagacagctcacagagaccttttttataaggacgccagttccattcaagagggcactgcctgcattcccttcccccctcaaaggccctgccctgctattatcgtcaccttggtgactagatttcagcctatgaattctggaggcggacacaaaaattcagattaaactactctgcttctgtttctctaaaatctacatccttctcatatacaattaaaattgtagtccaaagtgtgatttaaatgttatctgagtcaaacatgggtaagactcaaggtacaatttatcctgagtccaactgttcttgctgcgaacctaggaaatcaaacatgttatgtgcttccaaaatacagtggttggagaggcataggataaacattcccattccagaaaggagaaacaggaaagaagaaaggagtaacaagtttcaagcaactccaaaattgaatgtgacaaacagtattaaaccttaagcctcaagaataa

SEQ ID NO: 731538 - DNA, 3402 bp, Homo sapiens
  misc_feature (3379)..(3380): n is a, c, g, or t
  misc_feature (3383)..(3383): n is a, c, g, or t
  misc_feature (3391)..(3391): n is a, c, g, or t
  misc_feature (3396)..(3397): n is a, c, g, or t
cattggaatggcactcagggcaaaggcagaggtgtgcatggcagtgccctggctgtccctgcaaagggcacaggcactgggcacgagagccgcccgggtccccaggacagtgctgccctttgaagccatgccccagcgtccaggcaacaggtggctgaggctgctgcagatctggagggagcagggttatgaggacctgcacctggaagtacaccagaccttccaggaactggggcccattttcaggtacgacttgggaggagcaggcatggtgtgtgtgatgctgccggaggacgtggagaagctgcaacaggtggacagcctgcatccccacaggatgagcctggagccctgggtggcctacagacaacatcgtgggcacaaatgtggcgtgttcttgctgaatgggcctgaatggcgcttcaaccgattgcggctgaatccagaagtgctgtcgcccaacgctgtgcagaggttcctcccgatggtggatgcagtggccagggacttctcccaggccctgaagaagaaggtgctgcagaacgcccgggggagcctgaccctggacgtccagcccagcatcttccactacaccatagaagccagcaacttggctctttttggagagcggctgggcctggttggccacagccccagttctgccagcctgaacttcctccatgccctggaggtcatgttcaaatccaccgtccagctcatgttcatgcccaggagcctgtctcgctggaccagccccaaggtgtggaaggagcactttgaggcctgggactgcatcttccagtacgaccagcatcgtggcggagctcctgttgaatgcggaactgtcgccagatgccatcaaggccaactctatggaactcactgcagggagcgtggacacggtcaggccggcaaccagccccacccagagagggtgatgccaagcctgcctcccaggcactgcctgccaatgtcacacggcgcccacgtgtcccatccccaggctatgggccccacatttcttacttgggattgtgatgtgataaacacgtttgcagacggtgtttcccttgctgatgacgctctttgagctggctcggaaccccaacgtgcagcaggccctgcgccaggagagcctggccgccgcagccagcatcagtgaacatccccagaaggcaaccaccgagctgcccttgctgcgtgcggccctcaaggagaccttgcggctctaccctgtgggtctgtttctggagcgagtggtgagctcagacttggtgcttcagaactaccacatcccagctgggctgaaacacctccaggtggagacactaacccaagaggacataaagatggtctacagcttcatattgaggcccagcatgttccccctcctcaccttcagagccatcaactaatcacgtctctgcacccagggtcccagcctggccaccagcctccctttctgcctgaccccaggccacccctcttctctcccacatgcacagcttcctgagtcacccctctgtctaaccagccccagcacaaatggaactcccgagggcctctaggaccagggtttgccaggctaagcagcaatgccagggcacagctggggaagatcttgctgaccttgtccccagccccacctggccctttctccagcaagcactgtcctctgggcagtttgcccccatccctcccagtgctggctccaggctcctcgtgtggccatgcaagggtgctgtggttttgtcccttgccttcctgcctagtctcacatgtccctgttcctcttcccctggccagggcccctgcgcagactgtcagagtcattaagcgggatcccagcatctcagagtccagtcaagttccctcctgcagcctgccccctaggcagctcgagcatgccctgagctctctgaaagttgtcgccctggaatagggtcctgcagggtagaatagagtctcgagggacgtgtgttccccagctgatcgtgtcagcctcatgccccaggcctcatctttcatggaccaggccttgttccaggagtgggcgttgggtcctctgcttcctgtgctgtcccctggggaaggtcccaaggatgctgtcaggagatggaagagtcatgtggggtgggaacctggggtgtggttccagaaatgtttttggcaacaggagagacaggattgggccaacaaggactcagacgagttttattgactcatttctctggttgatacggagccatgtcatgtgccacgacctggggtgggcacagggaggctgcagtttcctgcgtgaacctgccttgggcctcatctgctcctagcccagcagagagagttgacccctcctgaactggccactccccagtgctcctgtgcagggagaggaagcacccggtttgagagtgtacccagccagactgtctttatctccatggattttcatcagggcaaagatcacagcagccagctcctggtggctgatgaggatcagagcatttgttcccccatgaaaggggaaatccctatggcatcattccagtggtggtcagtagatccaggacgccctgcaggactcagcctgtacagggagatgaagtgccccaggttgggagcacacctagctagagttatttgtgttaatctattcaggatgctctaagaaaacgccatagactgggttgctgacaaacatcagaattctatttctcatggttctgaaggcttagaaggctaagatcaaggtgtcagcaggttctgtgtctggtgaggacccacctcttgtttcatagataaaaccttcttgctgtgtcctcacatggtggaaaaggggcactgcctgcattcccttcccccctcaaaggccctgccctgctattatcgtcaccttggtgactagatttcagcctatgaattctggaggcggacacaaaaattcagattaaactactctgcttctgtttctctaaaatctacatccttctcatatacaaaatacatgcatttctccccagtagccccaaatatcaactcattttagcatcaactttaaaattgtagtccaaagtgtgatttaaatgttatctgagtcaaacatgggtaagactcaaggtacaatttatcctgagtccaactgttcttgctgcgaacctaggaaatcaaacatgttatgtgcttccaaaatacagtggttggagaggcataggataaacattcccattccagaaaggagaaacaggaaagaagaaaggagtaacaagtttcaagcaactccaaaattgaatgtgacaaacagtattaaaccttaagcctcaagaataaaaaaaaaaaaaaaaaaaaaaaaaaaaaaaaaaaaaaaaaaaaaaaaaaaaannaanaaaaaaanaaaannaaaaa

SEQ ID NO: 731539 - DNA, 3279 bp, Homo sapiens
cattggaatggcactcagggcaaaggcagaggtgtgcatggcagtgccctggctgtccctgcaaagggcacaggcactgggcacgagagccgcccgggtccccaggacagtgctgccctttgaagccatgccccagcgtccaggcaacaggtggctgaggctgctgcagatctggagggagcagggttatgaggacctgcacctggaagtacaccagaccttccaggaactggggcccattttcaggtacgacttgggaggagcaggcatggtgtgtgtgatgctgccggaggacgtggagaagctgcaacaggtggacagcctgcatccccacaggatgagcctggagccctgggtggcctacagacaacatcgtgggcacaaatgtggcgtgttcttgctgaatgggcctgaatggcgcttcaaccgattgcggctgaatccagaagtgctgtcgcccaacgctgtgcagaggttcctcccgatggtggatgcagtggccagggacttctcccaggccctgaagaagaaggtgctgcagaacgcccgggggagcctgaccctggacgtccagcccagcatcttccactacaccatagaagccagcaacttggctctttttggagagcggctgggcctggttggccacagccccagttctgccagcctgaacttcctccatgccctggaggtcatgttcaaatccaccgtccagctcatgttcatgcccaggagcctgtctcgctggaccagccccaaggtgtggaaggagcactttgaggcctgggactgcatcttccagtacgaccagcatcgtggcggagctcctgttgaatgcggaactgtcgccagatgccatcaaggccaactctatggaactcactgcagggagcgtggacacggtcaggccggcaaccagccccacccagagagggtgatgccaagcctgcctcccaggcactgcctgccaatgtcacacggcgcccacgtgtcccatccccaggctatgggccccacatttcttacttgggattgtgatgtgataaacacgtttgcagacggtgtttcccttgctgatgacgctctttgagctggctcggaaccccaacgtgcagcaggccctgcgccaggagagcctggccgccgcagccagcatcagtgaacatccccagaaggcaaccaccgagctgcccttgctgcgtgcggccctcaaggagaccttgcggctctaccctgtgggtctgtttctggagcgagtggtgagctcagacttggtgcttcagaactaccacatcccagctgggctgaaacacctccaggtggagacactaacccaagaggacataaagatggtctacagcttcatattgaggcccagcatgttccccctcctcaccttcagagccatcaactaatcacgtctctgcacccagggtcccagcctggccaccagcctccctttctgcctgaccccaggccacccctcttctctcccacatgcacagcttcctgagtcacccctctgtctaaccagccccagcacaaatggaactcccgagggcctctaggaccagggtttgccaggctaagcagcaatgccagggcacagctggggaagatcttgctgaccttgtccccagccccacctggccctttctccagcaagcactgtcctctgggcagtttgcccccatccctcccagtgctggctccaggctcctcgtgtggccatgcaagggtgctgtggttttgtcccttgccttcctgcctagtctcacatgtccctgttcctcttcccctggccagggcccctgcgcagactgtcagagtcattaagcgggatcccagcatctcagagtccagtcaagttccctcctgcagcctgccccctaggcagctcgagcatgccctgagctctctgaaagttgtcgccctggaatagggtcctgcagggtagaataaaaaggcccctgtggtcacttgtcctgacatccccattttcaagtgatacaactgagtctcgagggacgtgtgttccccagctgatcgtgtcagcctcatgccccaggcctcatctttcatggaccaggccttgttccaggagtgggcgttgggtcctctgcttcctgtgctgtcccctggggaaggtcccaaggatgctgtcaggagatggaagagtcatgtggggtgggaacctggggtgtggttccagaaatgtttttggcaacaggagagacaggattgggccaacaaggactcagacgagttttattgactcatttctctggttgatacggagccatgtcatgtgccacgacctggggtgggcacagggaggctgcagtttcctgcgtgaacctgccttgggcctcatctgctcctagcccagcagagagagttgacccctcctgaactggccactccccagtgctcctgtgcagggagaggaagcacccggtttgagagtgtacccagccagactgtctttatctccatggattttcatcagggcaaagatcacagcagccagctcctggtggctgatgaggatcagagcatttgttcccccatgaaaggggaaatccctatggcatcattccagtggtggtcagtagatccaggacgccctgcaggactcagcctgtacagggagatgaagtgccccaggttgggagcacacctagctagagttatttgtgttaatctattcaggatgctctaagaaaacgccatagactgggttgctgacaaacatcagaattctatttctcatggttctgaaggcttagaaggctaagatcaaggtgtcagcaggttctgtgtctggtgaggacccacctcttgtttcatagataaaaccttcttgctgtgtcctcacatggtggaaaagggcaagacagctcacagagaccttttttataaggacgccagttccattcaagagggcactgcctgcattcccttcccccctcaaaggccctgccctgctattatcgtcaccttggtgactagatttcagcctatgaattctggaggcggacacaaaaattcagattaaactactctgcttctgtttctctaaaatctacatccttctcatatacaaaatacatgcatttctccccagtagccccaaatatcaactcattttagcatcaactactcaaggtacaatttatcctgagtccaactgttcttgctgcgaacctaggaaatcaaacatgttatgtgcttccaaaatacagtggttggagaggcataggataaacattcccattc

SEQ ID NO: 731540 - DNA, 3379 bp, Homo sapiens
cattggaatggcactcagggcaaaggcagaggtgtgcatggcagtgccctggctgtccctgcaaagggcacaggcactgggcacgagagccgcccgggtccccaggacagtgctgccctttgaagccatgccccagcgtccaggcaacaggtggctgaggctgctgcagatctggagggagcagggttatgaggacctgcacctggaagtacaccagaccttccaggaactggggcccattttcaggtacgacttgggaggagcaggcatggtgtgtgtgatgctgccggaggacgtggagaagctgcaacaggtggacagcctgcatccccacaggatgagcctggagccctgggtggcctacagacaacatcgtgggcacaaatgtggcgtgttcttgctgaatgggcctgaatggcgcttcaaccgattgcggctgaatccagaagtgctgtcgcccaacgctgtgcagaggttcctcccgatggtggatgcagtggccagggacttctcccaggccctgaagaagaaggtgctgcagaacgcccgggggagcctgaccctggacgtccagcccagcatcttccactacaccatagaagccagcaacttggctctttttggagagcggctgggcctggttggccacagccccagttctgccagcctgaacttcctccatgccctggaggtcatgttcaaatccaccgtccagctcatgttcatgcccaggagcctgtctcgctggaccagccccaaggtgtggaaggagcactttgaggcctgggactgcatcttccagtacgaccagcatcgtggcggagctcctgttgaatgcggaactgtcgccagatgccatcaaggccaactctatggaactcactgcagggagcgtggacacggtcaggccggcaaccagccccacccagagagggtgatgccaagcctgcctcccaggcactgcctgccaatgtcacacggcgcccacgtgtcccatccccaggctatgggccccacatttcttacttgggattgtgatgtgataaacacgtttgcagacggtgtttcccttgctgatgacgctctttgagctggctcggaaccccaacgtgcagcaggccctgcgccaggagagcctggccgccgcagccagcatcagtgaacatccccagaaggcaaccaccgagctgcccttgctgcgtgcggccctcaaggagaccttgcggctctaccctgtgggtctgtttctggagcgagtggtgagctcagacttggtgcttcagaactaccacatcccagctgggctgaaacacctccaggtggagacactaacccaagaggacataaagatggtctacagcttcatattgaggcccagcatgttccccctcctcaccttcagagccatcaactaatcacgtctctgcacccagggtcccagcctggccaccagcctccctttctgcctgaccccaggccacccctcttctctcccacatgcacagcttcctgagtcacccctctgtctaaccagccccagcacaaatggaactcccgagggcctctaggaccagggtttgccaggctaagcagcaatgccagggcacagctggggaagatcttgctgaccttgtccccagccccacctggccctttctccagcaagcactgtcctctgggcagtttgcccccatccctcccagtgctggctccaggctcctcgtgtggccatgcaagggtgctgtggttttgtcccttgccttcctgcctagtctcacatgtccctgttcctcttcccctggccagggcccctgcgcagactgtcagagtcattaagcgggatcccagcatctcagagtccagtcaagttccctcctgcagcctgccccctaggcagctcgagcatgccctgagctctctgaaagttgtcgccctggaatagggtcctgcagggtagaataaaaaggcccctgtggtcacttgtcctgacatccccattttcaagtgatacaactgagtctcgagggacgtgtgttccccagctgatcgtgtcagcctcatgccccaggcctcatctttcatggaccaggccttgttccaggagtgggcgttgggtcctctgcttcctgtgctgtcccctggggaaggtcccaaggatgctgtcaggagatggaagagtcatgtggggtgggaacctggggtgtggttccagaaatgtttttggcaacaggagagacaggattgggccaacaaggactcagacgagttttattgactcatttctctggttgatacggagccatgtcatgtgccacgacctggggtgggcacagggaggctgcagtttcctgcgtgaacctgccttgggcctcatctgctcctagcccagcagagagagttgacccctcctgaactggccactccccagtgctcctgtgcagggagaggaagcacccggtttgagagtgtacccagccagactgtctttatctccatggattttcatcagggcaaagatcacagcagccagctcctggtggctgatgaggatcagagcatttgttcccccatgaaaggggaaatccctatggcatcattccagtggtggtcagtagatccaggacgccctgcaggactcagcctgtacagggagatgaagtgccccaggttgggagcacacctagctagagttatttgtgttaatctattcaggatgctctaagaaaacgccatagactgggttgctgacaaacatcagaattctatttctcatggttctgaaggcttagaaggctaagatcaaggtgtcagcaggttctgtgtctggtgaggacccacctcttgtttcatagataaaaccttcttgctgtgtcctcacatggtggaaaagggcaagacagctcacagagaccttttttataaggacgccagttccattcaagagggcactgcctgcattcccttcccccctcaaaggccctgccctgctattatcgtcaccttggtgactagatttcagcctatgaattctggaggcggacacaaaaattcagattaaactactctgcttctgtttctctaaaatctacatccttctcatatacaattaaaattgtagtccaaagtgtgatttaaatgttatctgagtcaaacatgggtaagactcaaggtacaatttatcctgagtccaactgttcttgctgcgaacctaggaaatcaaacatgttatgtgcttccaaaatacagtggttggagaggcataggataaacattcccattccagaaaggagaaacaggaaagaagaaaggagtaacaagtttcaagcaactccaaaattgaatgtgacaaacagtattaaaccttaagcctcaagaataa

SEQ ID NO: 731541 - DNA, 3381 bp, Homo sapiens
cattggaatggcactcagggcaaaggcagaggtgtgcatggcagtgccctggctgtccctgcaaagggcacaggcactgggcacgagagccgcccgggtccccaggacagtgctgccctttgaagccatgccccagcgtccaggcaacaggtggctgaggctgctgcagatctggagggagcagggttatgaggacctgcacctggaagtacaccagaccttccaggaactggggcccattttcaggtacgacttgggaggagcaggcatggtgtgtgtgatgctgccggaggacgtggagaagctgcaacaggtggacagcctgcatccccacaggatgagcctggagccctgggtggcctacagacaacatcgtgggcacaaatgtggcgtgttcttgctgaatgggcctgaatggcgcttcaaccgattgcggctgaatccagaagtgctgtcgcccaacgctgtgcagaggttcctcccgatggtggatgcagtggccagggacttctcccaggccctgaagaagaaggtgctgcagaacgcccgggggagcctgaccctggacgtccagcccagcatcttccactacaccatagaagccagcaacttggctctttttggagagcggctgggcctggttggccacagccccagttctgccagcctgaacttcctccatgccctggaggtcatgttcaaatccaccgtccagctcatgttcatgcccaggagcctgtctcgctggaccagccccaaggtgtggaaggagcactttgaggcctgggactgcatcttccagtacgaccagcatcgtggcggagctcctgttgaatgcggaactgtcgccagatgccatcaaggccaactctatggaactcactgcagggagcgtggacacggtcaggccggcaaccagccccacccagagagggtgatgccaagcctgcctcccaggcactgcctgccaatgtcacacggcgcccacgtgtcccatccccaggctatgggccccacatttcttacttgggattgtgatgtgataaacacgtttgcagacggtgtttcccttgctgatgacgctctttgagctggctcggaaccccaacgtgcagcaggccctgcgccaggagagcctggccgccgcagccagcatcagtgaacatccccagaaggcaaccaccgagctgcccttgctgcgtgcggccctcaaggagaccttgcggctctaccctgtgggtctgtttctggagcgagtggtgagctcagacttggtgcttcagaactaccacatcccagctgggctgaaacacctccaggtggagacactaacccaagaggacataaagatggtctacagcttcatattgaggcccagcatgttccccctcctcaccttcagagccatcaactaatcacgtctctgcacccagggtcccagcctggccaccagcctccctttctgcctgaccccaggccacccctcttctctcccacatgcacagcttcctgagtcacccctctgtctaaccagccccagcacaaatggaactcccgagggcctctaggaccagggtttgccaggctaagcagcaatgccagggcacagctggggaagatcttgctgaccttgtccccagccccacctggccctttctccagcaagcactgtcctctgggcagtttgcccccatccctcccagtgctggctccaggctcctcgtgtggccatgcaagggtgctgtggttttgtcccttgccttcctgcctagtctcacatgtccctgttcctcttcccctggccagggcccctgcgcagactgtcagagtcattaagcgggatcccagcatctcagagtccagtcaagttccctcctgcagcctgccccctaggcagctcgagcatgccctgagctctctgaaagttgtcgccctggaatagggtcctgcagggtagaataaaaaggcccctgtggtcacttgtcctgacatccccattttcaagtgatacaactgagtctcgagggacgtgtgttccccagctgatcgtgtcagcctcatgccccaggcctcatctttcatggaccaggccttgttccaggagtgggcgttgggtcctctgcttcctgtgctgtcccctggggaaggtcccaaggatgctgtcaggagatggaagagtcatgtggggtgggaacctggggtgtggttccagaaatgtttttggcaacaggagagacaggattgggccaacaaggactcagacgagttttattgactcatttctctggttgatacggagccatgtcatgtgccacgacctggggtgggcacagggaggctgcagtttcctgcgtgaacctgccttgggcctcatctgctcctagcccagcagagagagttgacccctcctgaactggccactccccagtgctcctgtgcagggagaggaagcacccggtttgagagtgtacccagccagactgtctttatctccatggattttcatcagggcaaagatcacagcagccagctcctggtggctgatgaggatcagagcatttgttcccccatgaaaggggaaatccctatggcatcattccagtggtggtcagtagatccaggacgccctgcaggactcagcctgtacagggagatgaagtgccccaggttgggagcacacctagctagagttatttgtgttaatctattcaggatgctctaagaaaacgccatagactgggttgctgacaaacatcagaattctatttctcatggttctgaaggcttagaaggctaagatcaaggtgtcagcaggttctgtgtctggtgaggacccacctcttgtttcatagataaaaccttcttgctgtgtcctcacatggtggaaaaggggcactgcctgcattcccttcccccctcaaaggccctgccctgctattatcgtcaccttggtgactagatttcagcctatgaattctggaggcggacacaaaaattcagattaaactactctgcttctgtttctctaaaatctacatccttctcatatacaaaatacatgcatttctccccagtagccccaaatatcaactcattttagcatcaactttaaaattgtagtccaaagtgtgatttaaatgttatctgagtcaaacatgggtaagactcaaggtacaatttatcctgagtccaactgttcttgctgcgaacctaggaaatcaaacatgttatgtgcttccaaaatacagtggttggagaggcataggataaacattcccattccagaaaggagaaacaggaaagaagaaaggagtaacaagtttcaagcaactccaaaattgaatgtgacaaacagtattaaaccttaagcctcaagaataa

SEQ ID NO: 731542 - DNA, 3456 bp, Homo sapiens
  misc_feature (3433)..(3434): n is a, c, g, or t
  misc_feature (3437)..(3437): n is a, c, g, or t
  misc_feature (3445)..(3445): n is a, c, g, or t
  misc_feature (3450)..(3451): n is a, c, g, or t
cattggaatggcactcagggcaaaggcagaggtgtgcatggcagtgccctggctgtccctgcaaagggcacaggcactgggcacgagagccgcccgggtccccaggacagtgctgccctttgaagccatgccccagcgtccaggcaacaggtggctgaggctgctgcagatctggagggagcagggttatgaggacctgcacctggaagtacaccagaccttccaggaactggggcccattttcaggtacgacttgggaggagcaggcatggtgtgtgtgatgctgccggaggacgtggagaagctgcaacaggtggacagcctgcatccccacaggatgagcctggagccctgggtggcctacagacaacatcgtgggcacaaatgtggcgtgttcttgctgaatgggcctgaatggcgcttcaaccgattgcggctgaatccagaagtgctgtcgcccaacgctgtgcagaggttcctcccgatggtggatgcagtggccagggacttctcccaggccctgaagaagaaggtgctgcagaacgcccgggggagcctgaccctggacgtccagcccagcatcttccactacaccatagaagccagcaacttggctctttttggagagcggctgggcctggttggccacagccccagttctgccagcctgaacttcctccatgccctggaggtcatgttcaaatccaccgtccagctcatgttcatgcccaggagcctgtctcgctggaccagccccaaggtgtggaaggagcactttgaggcctgggactgcatcttccagtacgaccagcatcgtggcggagctcctgttgaatgcggaactgtcgccagatgccatcaaggccaactctatggaactcactgcagggagcgtggacacggtcaggccggcaaccagccccacccagagagggtgatgccaagcctgcctcccaggcactgcctgccaatgtcacacggcgcccacgtgtcccatccccaggctatgggccccacatttcttacttgggattgtgatgtgataaacacgtttgcagacggtgtttcccttgctgatgacgctctttgagctggctcggaaccccaacgtgcagcaggccctgcgccaggagagcctggccgccgcagccagcatcagtgaacatccccagaaggcaaccaccgagctgcccttgctgcgtgcggccctcaaggagaccttgcggctctaccctgtgggtctgtttctggagcgagtggtgagctcagacttggtgcttcagaactaccacatcccagctgggctgaaacacctccaggtggagacactaacccaagaggacataaagatggtctacagcttcatattgaggcccagcatgttccccctcctcaccttcagagccatcaactaatcacgtctctgcacccagggtcccagcctggccaccagcctccctttctgcctgaccccaggccacccctcttctctcccacatgcacagcttcctgagtcacccctctgtctaaccagccccagcacaaatggaactcccgagggcctctaggaccagggtttgccaggctaagcagcaatgccagggcacagctggggaagatcttgctgaccttgtccccagccccacctggccctttctccagcaagcactgtcctctgggcagtttgcccccatccctcccagtgctggctccaggctcctcgtgtggccatgcaagggtgctgtggttttgtcccttgccttcctgcctagtctcacatgtccctgttcctcttcccctggccagggcccctgcgcagactgtcagagtcattaagcgggatcccagcatctcagagtccagtcaagttccctcctgcagcctgccccctaggcagctcgagcatgccctgagctctctgaaagttgtcgccctggaatagggtcctgcagggtagaataaaaaggcccctgtggtcacttgtcctgacatccccattttcaagtgatacaactgagtctcgagggacgtgtgttccccagctgatcgtgtcagcctcatgccccaggcctcatctttcatggaccaggccttgttccaggagtgggcgttgggtcctctgcttcctgtgctgtcccctggggaaggtcccaaggatgctgtcaggagatggaagagtcatgtggggtgggaacctggggtgtggttccagaaatgtttttggcaacaggagagacaggattgggccaacaaggactcagacgagttttattgactcatttctctggttgatacggagccatgtcatgtgccacgacctggggtgggcacagggaggctgcagtttcctgcgtgaacctgccttgggcctcatctgctcctagcccagcagagagagttgacccctcctgaactggccactccccagtgctcctgtgcagggagaggaagcacccggtttgagagtgtacccagccagactgtctttatctccatggattttcatcagggcaaagatcacagcagccagctcctggtggctgatgaggatcagagcatttgttcccccatgaaaggggaaatccctatggcatcattccagtggtggtcagtagatccaggacgccctgcaggactcagcctgtacagggagatgaagtgccccaggttgggagcacacctagctagagttatttgtgttaatctattcaggatgctctaagaaaacgccatagactgggttgctgacaaacatcagaattctatttctcatggttctgaaggcttagaaggctaagatcaaggtgtcagcaggttctgtgtctggtgaggacccacctcttgtttcatagataaaaccttcttgctgtgtcctcacatggtggaaaaggggcactgcctgcattcccttcccccctcaaaggccctgccctgctattatcgtcaccttggtgactagatttcagcctatgaattctggaggcggacacaaaaattcagattaaactactctgcttctgtttctctaaaatctacatccttctcatatacaaaatacatgcatttctccccagtagccccaaatatcaactcattttagcatcaactttaaaattgtagtccaaagtgtgatttaaatgttatctgagtcaaacatgggtaagactcaaggtacaatttatcctgagtccaactgttcttgctgcgaacctaggaaatcaaacatgttatgtgcttccaaaatacagtggttggagaggcataggataaacattcccattccagaaaggagaaacaggaaagaagaaaggagtaacaagtttcaagcaactccaaaattgaatgtgacaaacagtattaaaccttaagcctcaagaataaaaaaaaaaaaaaaaaaaaaaaaaaaaaaaaaaaaaaaaaaaaaaaaaaaaannaanaaaaaaanaaaannaaaaa

SEQ ID NO: 731543 - DNA, 3434 bp, Homo sapiens
cattggaatggcactcagggcaaaggcagaggtgtgcatggcagtgccctggctgtccctgcaaagggcacaggcactgggcacgagagccgcccgggtccccaggacagtgctgccctttgaagccatgccccagcgtccaggcaacaggtggctgaggctgctgcagatctggagggagcagggttatgaggacctgcacctggaagtacaccagaccttccaggaactggggcccattttcaggtacgacttgggaggagcaggcatggtgtgtgtgatgctgccggaggacgtggagaagctgcaacaggtggacagcctgcatccccacaggatgagcctggagccctgggtggcctacagacaacatcgtgggcacaaatgtggcgtgttcttgctgaatgggcctgaatggcgcttcaaccgattgcggctgaatccagaagtgctgtcgcccaacgctgtgcagaggttcctcccgatggtggatgcagtggccagggacttctcccaggccctgaagaagaaggtgctgcagaacgcccgggggagcctgaccctggacgtccagcccagcatcttccactacaccatagaagccagcaacttggctctttttggagagcggctgggcctggttggccacagccccagttctgccagcctgaacttcctccatgccctggaggtcatgttcaaatccaccgtccagctcatgttcatgcccaggagcctgtctcgctggaccagccccaaggtgtggaaggagcactttgaggcctgggactgcatcttccagtacgaccagcatcgtggcggagctcctgttgaatgcggaactgtcgccagatgccatcaaggccaactctatggaactcactgcagggagcgtggacacggtcaggccggcaaccagccccacccagagagggtgatgccaagcctgcctcccaggcactgcctgccaatgtcacacggcgcccacgtgtcccatccccaggctatgggccccacatttcttacttgggattgtgatgtgataaacacgtttgcagacggtgtttcccttgctgatgacgctctttgagctggctcggaaccccaacgtgcagcaggccctgcgccaggagagcctggccgccgcagccagcatcagtgaacatccccagaaggcaaccaccgagctgcccttgctgcgtgcggccctcaaggagaccttgcggctctaccctgtgggtctgtttctggagcgagtggtgagctcagacttggtgcttcagaactaccacatcccagctgggctgaaacacctccaggtggagacactaacccaagaggacataaagatggtctacagcttcatattgaggcccagcatgttccccctcctcaccttcagagccatcaactaatcacgtctctgcacccagggtcccagcctggccaccagcctccctttctgcctgaccccaggccacccctcttctctcccacatgcacagcttcctgagtcacccctctgtctaaccagccccagcacaaatggaactcccgagggcctctaggaccagggtttgccaggctaagcagcaatgccagggcacagctggggaagatcttgctgaccttgtccccagccccacctggccctttctccagcaagcactgtcctctgggcagtttgcccccatccctcccagtgctggctccaggctcctcgtgtggccatgcaagggtgctgtggttttgtcccttgccttcctgcctagtctcacatgtccctgttcctcttcccctggccagggcccctgcgcagactgtcagagtcattaagcgggatcccagcatctcagagtccagtcaagttccctcctgcagcctgccccctaggcagctcgagcatgccctgagctctctgaaagttgtcgccctggaatagggtcctgcagggtagaataaaaaggcccctgtggtcacttgtcctgacatccccattttcaagtgatacaactgagtctcgagggacgtgtgttccccagctgatcgtgtcagcctcatgccccaggcctcatctttcatggaccaggccttgttccaggagtgggcgttgggtcctctgcttcctgtgctgtcccctggggaaggtcccaaggatgctgtcaggagatggaagagtcatgtggggtgggaacctggggtgtggttccagaaatgtttttggcaacaggagagacaggattgggccaacaaggactcagacgagttttattgactcatttctctggttgatacggagccatgtcatgtgccacgacctggggtgggcacagggaggctgcagtttcctgcgtgaacctgccttgggcctcatctgctcctagcccagcagagagagttgacccctcctgaactggccactccccagtgctcctgtgcagggagaggaagcacccggtttgagagtgtacccagccagactgtctttatctccatggattttcatcagggcaaagatcacagcagccagctcctggtggctgatgaggatcagagcatttgttcccccatgaaaggggaaatccctatggcatcattccagtggtggtcagtagatccaggacgccctgcaggactcagcctgtacagggagatgaagtgccccaggttgggagcacacctagctagagttatttgtgttaatctattcaggatgctctaagaaaacgccatagactgggttgctgacaaacatcagaattctatttctcatggttctgaaggcttagaaggctaagatcaaggtgtcagcaggttctgtgtctggtgaggacccacctcttgtttcatagataaaaccttcttgctgtgtcctcacatggtggaaaagggcaagacagctcacagagaccttttttataaggacgccagttccattcaagagggcactgcctgcattcccttcccccctcaaaggccctgccctgctattatcgtcaccttggtgactagatttcagcctatgaattctggaggcggacacaaaaattcagattaaactactctgcttctgtttctctaaaatctacatccttctcatatacaaaatacatgcatttctccccagtagccccaaatatcaactcattttagcatcaactttaaaattgtagtccaaagtgtgatttaaatgttatctgagtcaaacatgggtaagactcaaggtacaatttatcctgagtccaactgttcttgctgcgaacctaggaaatcaaacatgttatgtgcttccaaaatacagtggttggagaggcataggataaacattcccattccagaaaggagaaacaggaaagaagaaaggagtaacaagtttcaagcaactccaaaattgaatgtgacaaacagtattaaaccttaagcctcaagaataa

SEQ ID NO: 731544 - DNA, 3509 bp, Homo sapiens
  misc_feature (3486)..(3487): n is a, c, g, or t
  misc_feature (3490)..(3490): n is a, c, g, or t
  misc_feature (3498)..(3498): n is a, c, g, or t
  misc_feature (3503)..(3504): n is a, c, g, or t
cattggaatggcactcagggcaaaggcagaggtgtgcatggcagtgccctggctgtccctgcaaagggcacaggcactgggcacgagagccgcccgggtccccaggacagtgctgccctttgaagccatgccccagcgtccaggcaacaggtggctgaggctgctgcagatctggagggagcagggttatgaggacctgcacctggaagtacaccagaccttccaggaactggggcccattttcaggtacgacttgggaggagcaggcatggtgtgtgtgatgctgccggaggacgtggagaagctgcaacaggtggacagcctgcatccccacaggatgagcctggagccctgggtggcctacagacaacatcgtgggcacaaatgtggcgtgttcttgctgaatgggcctgaatggcgcttcaaccgattgcggctgaatccagaagtgctgtcgcccaacgctgtgcagaggttcctcccgatggtggatgcagtggccagggacttctcccaggccctgaagaagaaggtgctgcagaacgcccgggggagcctgaccctggacgtccagcccagcatcttccactacaccatagaagccagcaacttggctctttttggagagcggctgggcctggttggccacagccccagttctgccagcctgaacttcctccatgccctggaggtcatgttcaaatccaccgtccagctcatgttcatgcccaggagcctgtctcgctggaccagccccaaggtgtggaaggagcactttgaggcctgggactgcatcttccagtacgaccagcatcgtggcggagctcctgttgaatgcggaactgtcgccagatgccatcaaggccaactctatggaactcactgcagggagcgtggacacggtcaggccggcaaccagccccacccagagagggtgatgccaagcctgcctcccaggcactgcctgccaatgtcacacggcgcccacgtgtcccatccccaggctatgggccccacatttcttacttgggattgtgatgtgataaacacgtttgcagacggtgtttcccttgctgatgacgctctttgagctggctcggaaccccaacgtgcagcaggccctgcgccaggagagcctggccgccgcagccagcatcagtgaacatccccagaaggcaaccaccgagctgcccttgctgcgtgcggccctcaaggagaccttgcggctctaccctgtgggtctgtttctggagcgagtggtgagctcagacttggtgcttcagaactaccacatcccagctgggctgaaacacctccaggtggagacactaacccaagaggacataaagatggtctacagcttcatattgaggcccagcatgttccccctcctcaccttcagagccatcaactaatcacgtctctgcacccagggtcccagcctggccaccagcctccctttctgcctgaccccaggccacccctcttctctcccacatgcacagcttcctgagtcacccctctgtctaaccagccccagcacaaatggaactcccgagggcctctaggaccagggtttgccaggctaagcagcaatgccagggcacagctggggaagatcttgctgaccttgtccccagccccacctggccctttctccagcaagcactgtcctctgggcagtttgcccccatccctcccagtgctggctccaggctcctcgtgtggccatgcaagggtgctgtggttttgtcccttgccttcctgcctagtctcacatgtccctgttcctcttcccctggccagggcccctgcgcagactgtcagagtcattaagcgggatcccagcatctcagagtccagtcaagttccctcctgcagcctgccccctaggcagctcgagcatgccctgagctctctgaaagttgtcgccctggaatagggtcctgcagggtagaataaaaaggcccctgtggtcacttgtcctgacatccccattttcaagtgatacaactgagtctcgagggacgtgtgttccccagctgatcgtgtcagcctcatgccccaggcctcatctttcatggaccaggccttgttccaggagtgggcgttgggtcctctgcttcctgtgctgtcccctggggaaggtcccaaggatgctgtcaggagatggaagagtcatgtggggtgggaacctggggtgtggttccagaaatgtttttggcaacaggagagacaggattgggccaacaaggactcagacgagttttattgactcatttctctggttgatacggagccatgtcatgtgccacgacctggggtgggcacagggaggctgcagtttcctgcgtgaacctgccttgggcctcatctgctcctagcccagcagagagagttgacccctcctgaactggccactccccagtgctcctgtgcagggagaggaagcacccggtttgagagtgtacccagccagactgtctttatctccatggattttcatcagggcaaagatcacagcagccagctcctggtggctgatgaggatcagagcatttgttcccccatgaaaggggaaatccctatggcatcattccagtggtggtcagtagatccaggacgccctgcaggactcagcctgtacagggagatgaagtgccccaggttgggagcacacctagctagagttatttgtgttaatctattcaggatgctctaagaaaacgccatagactgggttgctgacaaacatcagaattctatttctcatggttctgaaggcttagaaggctaagatcaaggtgtcagcaggttctgtgtctggtgaggacccacctcttgtttcatagataaaaccttcttgctgtgtcctcacatggtggaaaagggcaagacagctcacagagaccttttttataaggacgccagttccattcaagagggcactgcctgcattcccttcccccctcaaaggccctgccctgctattatcgtcaccttggtgactagatttcagcctatgaattctggaggcggacacaaaaattcagattaaactactctgcttctgtttctctaaaatctacatccttctcatatacaaaatacatgcatttctccccagtagccccaaatatcaactcattttagcatcaactttaaaattgtagtccaaagtgtgatttaaatgttatctgagtcaaacatgggtaagactcaaggtacaatttatcctgagtccaactgttcttgctgcgaacctaggaaatcaaacatgttatgtgcttccaaaatacagtggttggagaggcataggataaacattcccattccagaaaggagaaacaggaaagaagaaaggagtaacaagtttcaagcaactccaaaattgaatgtgacaaacagtattaaaccttaagcctcaagaataaaaaaaaaaaaaaaaaaaaaaaaaaaaaaaaaaaaaaaaaaaaaaaaaaaaannaanaaaaaaanaaaannaaaaa

SEQ ID NO: 731545 - DNA, 2325 bp, Homo sapiens
  misc_feature (2302)..(2303): n is a, c, g, or t
  misc_feature (2306)..(2306): n is a, c, g, or t
  misc_feature (2314)..(2314): n is a, c, g, or t
  misc_feature (2319)..(2320): n is a, c, g, or t
cattggaatggcactcagggcaaaggcagaggtgtgcatggcagtgccctggctgtccctgcaaagggcacaggcactgggcacgagagccgcccgggtccccaggacagtgctgccctttgaagccatgccccagcgtccaggcaacaggtggctgaggctgctgcagatctggagggagcagggttatgaggacctgcacctggaagtacaccagaccttccaggaactggggcccattttcaggtacgacttgggaggagcaggcatggtgtgtgtgatgctgccggaggacgtggagaagctgcaacaggtggacagcctgcatccccacaggatgagcctggagccctgggtggcctacagacaacatcgtgggcacaaatgtggcgtgttcttgctgaatgggcctgaatggcgcttcaaccgattgcggctgaatccagaagtgctgtcgcccaacgctgtgcagaggttcctcccgatggtggatgcagtggccagggacttctcccaggccctgaagaagaaggtgctgcagaacgcccgggggagcctgaccctggacgtccagcccagcatcttccactacaccatagaagccagcaacttggctctttttggagagcggctgggcctggttggccacagccccagttctgccagcctgaacttcctccatgccctggaggtcatgttcaaatccaccgtccagctcatgttcatgcccaggagcctgtctcgctggaccagccccaaggtgtggaaggagcactttgaggcctgggactgcatcttccagtacgaccagcatcgtggcggagctcctgttgaatgcggaactgtcgccagatgccatcaaggccaactctatggaactcactgcagggagcgtggacacggtcaggccggcaaccagccccacccagagagggtgatgccaagcctgcctcccaggcactgcctgccaatgtcacacggcgcccacgtgtcccatccccaggctatgggccccacatttcttacttgggattgtgatgtgataaacacgtttgcagacggtgtttcccttgctgatgacgctctttgagctggctcggaaccccaacgtgcagcaggccctgcgccaggagagcctggccgccgcagccagcatcagtgaacatccccagaaggcaaccaccgagctgcccttgctgcgtgcggccctcaaggagaccttgcggctctaccctgtgggtctgtttctggagcgagtggtgagctcagacttggtgcttcagaactaccacatcccagctgggctgaaacacctccaggtggagacactaacccaagaggacataaagatggtctacagcttcatattgaggcccagcatgttccccctcctcaccttcagagccatcaactaatcacgtctctgcacccagggtcccagcctggccaccagcctccctttctgcctgaccccaggccacccctcttctctcccacatgcacagcttcctgagtcacccctctgtctaaccagccccagcacaaatggaactcccgagggcctctaggaccagggtttgccaggctaagcagcaatgccagggcacagctggggaagatcttgctgaccttgtccccagccccacctggccctttctccagcaagcactgtcctctgggcagtttgcccccatccctcccagtgctggctccaggctcctcgtgtggccatgcaagggtgctgtggttttgtcccttgccttcctgcctagtctcacatgtccctgttcctcttcccctggccagggcccctgcgcagactgtcagagtcattaagcgggatcccagcatctcagagtccagtcaagttccctcctgcagcctgccccctaggcagctcgagcatgccctgagctctctgaaagttgtcgccctggaatagggtcctgcagggtagaataaaaaggcccctgtggtcacttgtcctgacatccccattttcaagtgatacaactgagtctcgagggacgtgtgttccccagctgatcgtgtcagcctcatgccccaggcctcatctttcatggaccaggccttgttccaggagtgggcgttgggtcctctgcttcctgtgctgtcccctggggaaggtcccaaggatgctgtcaggagatggaagagtcatgtggggtgggaacctggggtgtggttccagaaatgtttttggcaacaggagagacaggattgggccaaaaaaaaaaaaaaaaaaaaaaaaaaaaaaaaaaaaaaaaaaaaaaaaaaaaannaanaaaaaaanaaaannaaaaa

SEQ ID NO: 731546 - DNA, 3559 bp, Homo sapiens
  misc_feature (3536)..(3537): n is a, c, g, or t
  misc_feature (3540)..(3540): n is a, c, g, or t
  misc_feature (3548)..(3548): n is a, c, g, or t
  misc_feature (3553)..(3554): n is a, c, g, or t
cattggaatggcactcagggcaaaggcagaggtgtgcatggcagtgccctggctgtccctgcaaagggcacaggcactgggcacgagagccgcccgggtccccaggacagtgctgccctttgaagccatgccccagcgtccaggcaacaggtggctgaggctgctgcagatctggagggagcagggttatgaggacctgcacctggaagtacaccagaccttccaggaactggggcccattttcaggtacgacttgggaggagcaggcatggtgtgtgtgatgctgccggaggacgtggagaagctgcaacaggtggacagcctgcatccccacaggatgagcctggagccctgggtggcctacagacaacatcgtgggcacaaatgtggcgtgttcttgctgaatgggcctgaatggcgcttcaaccgattgcggctgaatccagaagtgctgtcgcccaacgctgtgcagaggttcctcccgatggtggatgcagtggccagggacttctcccaggccctgaagaagaaggtgctgcagaacgcccgggggagcctgaccctggacgtccagcccagcatcttccactacaccatagaagccagcaacttggctctttttggagagcggctgggcctggttggccacagccccagttctgccagcctgaacttcctccatgccctggaggtcatgttcaaatccaccgtccagctcatgttcatgcccaggagcctgtctcgctggaccagccccaaggtgtggaaggagcactttgaggcctgggactgcatcttccagtacggcgacaactgtatccagaaaatctatcaggaactggccttcagccgccctcaacagtacaccagcatcgtggcggagctcctgttgaatgcggaactgtcgccagatgccatcaaggccaactctatggaactcactgcagggagcgtggacacgacggtgtttcccttgctgatgacgctctttgagctggctcggaaccccaacgtgcagcaggccctgcgccaggagagcctggccgccgcagccagcatcagtgaacatccccagaaggcaaccaccgagctgcccttgctgcgtgcggccctcaaggagaccttgcggctctaccctgtgggtctgtttctggagcgagtggtgagctcagacttggtgcttcagaactaccacatcccagctgggacattggtgcgcgtgttcctctactctctgggtcgcaaccccgccttgttcccgaggcctgagcgctataacccccagcgctggctagacatcaggggctccggcaggaacttctaccacgtgccctttggctttggcatgcgccagtgccttgggcggcgcctggcagaggcagagatgctgctgctgctgcaccatgtgctgaaacacctccaggtggagacactaacccaagaggacataaagatggtctacagcttcatattgaggcccagcatgttccccctcctcaccttcagagccatcaactaatcacgtctctgcacccagggtcccagcctggccaccagcctccctttctgcctgaccccaggccacccctcttctctcccacatgcacagcttcctgagtcacccctctgtctaaccagccccagcacaaatggaactcccgagggcctctaggaccagggtttgccaggctaagcagcaatgccagggcacagctggggaagatcttgctgaccttgtccccagccccacctggccctttctccagcaagcactgtcctctgggcagtttgcccccatccctcccagtgctggctccaggctcctcgtgtggccatgcaagggtgctgtggttttgtcccttgccttcctgcctagtctcacatgtccctgttcctcttcccctggccagggcccctgcgcagactgtcagagtcattaagcgggatcccagcatctcagagtccagtcaagttccctcctgcagcctgccccctaggcagctcgagcatgccctgagctctctgaaagttgtcgccctggaatagggtcctgcagggtagaatagagtctcgagggacgtgtgttccccagctgatcgtgtcagcctcatgccccaggcctcatctttcatggaccaggccttgttccaggagtgggcgttgggtcctctgcttcctgtgctgtcccctggggaaggtcccaaggatgctgtcaggagatggaagagtcatgtggggtgggaacctggggtgtggttccagaaatgtttttggcaacaggagagacaggattgggccaacaaggactcagacgagttttattgactcatttctctggttgatacggagccatgtcatgtgccacgacctggggtgggcacagggaggctgcagtttcctgcgtgaacctgccttgggcctcatctgctcctagcccagcagagagagttgacccctcctgaactggccactccccagtgctcctgtgcagggagaggaagcacccggtttgagagtgtacccagccagactgtctttatctccatggattttcatcagggcaaagatcacagcagccagctcctggtggctgatgaggatcagagcatttgttcccccatgaaaggggaaatccctatggcatcattccagtggtggtcagtagatccaggacgccctgcaggactcagcctgtacagggagatgaagtgccccaggttgggagcacacctagctagagttatttgtgttaatctattcaggatgctctaagaaaacgccatagactgggttgctgacaaacatcagaattctatttctcatggttctgaaggcttagaaggctaagatcaaggtgtcagcaggttctgtgtctggtgaggacccacctcttgtttcatagataaaaccttcttgctgtgtcctcacatggtggaaaagggcaagacagctcacagagaccttttttataaggacgccagttccattcaagagggcactgcctgcattcccttcccccctcaaaggccctgccctgctattatcgtcaccttggtgactagatttcagcctatgaattctggaggcggacacaaaaattcagattaaactactctgcttctgtttctctaaaatctacatccttctcatatacaaaatacatgcatttctccccagtagccccaaatatcaactcattttagcatcaactttaaaattgtagtccaaagtgtgatttaaatgttatctgagtcaaacatgggtaagactcaaggtacaatttatcctgagtccaactgttcttgctgcgaacctaggaaatcaaacatgttatgtgcttccaaaatacagtggttggagaggcataggataaacattcccattccagaaaggagaaacaggaaagaagaaaggagtaacaagtttcaagcaactccaaaattgaatgtgacaaacagtattaaaccttaagcctcaagaataaaaaaaaaaaaaaaaaaaaaaaaaaaaaaaaaaaaaaaaaaaaaaaaaaaaannaanaaaaaaanaaaannaaaaa

SEQ ID NO: 731547 - DNA, 3506 bp, Homo sapiens
  misc_feature (3483)..(3484): n is a, c, g, or t
  misc_feature (3487)..(3487): n is a, c, g, or t
  misc_feature (3495)..(3495): n is a, c, g, or t
  misc_feature (3500)..(3501): n is a, c, g, or t
cattggaatggcactcagggcaaaggcagaggtgtgcatggcagtgccctggctgtccctgcaaagggcacaggcactgggcacgagagccgcccgggtccccaggacagtgctgccctttgaagccatgccccagcgtccaggcaacaggtggctgaggctgctgcagatctggagggagcagggttatgaggacctgcacctggaagtacaccagaccttccaggaactggggcccattttcaggtacgacttgggaggagcaggcatggtgtgtgtgatgctgccggaggacgtggagaagctgcaacaggtggacagcctgcatccccacaggatgagcctggagccctgggtggcctacagacaacatcgtgggcacaaatgtggcgtgttcttgctgaatgggcctgaatggcgcttcaaccgattgcggctgaatccagaagtgctgtcgcccaacgctgtgcagaggttcctcccgatggtggatgcagtggccagggacttctcccaggccctgaagaagaaggtgctgcagaacgcccgggggagcctgaccctggacgtccagcccagcatcttccactacaccatagaagccagcaacttggctctttttggagagcggctgggcctggttggccacagccccagttctgccagcctgaacttcctccatgccctggaggtcatgttcaaatccaccgtccagctcatgttcatgcccaggagcctgtctcgctggaccagccccaaggtgtggaaggagcactttgaggcctgggactgcatcttccagtacggcgacaactgtatccagaaaatctatcaggaactggccttcagccgccctcaacagtacaccagcatcgtggcggagctcctgttgaatgcggaactgtcgccagatgccatcaaggccaactctatggaactcactgcagggagcgtggacacgacggtgtttcccttgctgatgacgctctttgagctggctcggaaccccaacgtgcagcaggccctgcgccaggagagcctggccgccgcagccagcatcagtgaacatccccagaaggcaaccaccgagctgcccttgctgcgtgcggccctcaaggagaccttgcggctctaccctgtgggtctgtttctggagcgagtggtgagctcagacttggtgcttcagaactaccacatcccagctgggacattggtgcgcgtgttcctctactctctgggtcgcaaccccgccttgttcccgaggcctgagcgctataacccccagcgctggctagacatcaggggctccggcaggaacttctaccacgtgccctttggctttggcatgcgccagtgccttgggcggcgcctggcagaggcagagatgctgctgctgctgcaccatgtgctgaaacacctccaggtggagacactaacccaagaggacataaagatggtctacagcttcatattgaggcccagcatgttccccctcctcaccttcagagccatcaactaatcacgtctctgcacccagggtcccagcctggccaccagcctccctttctgcctgaccccaggccacccctcttctctcccacatgcacagcttcctgagtcacccctctgtctaaccagccccagcacaaatggaactcccgagggcctctaggaccagggtttgccaggctaagcagcaatgccagggcacagctggggaagatcttgctgaccttgtccccagccccacctggccctttctccagcaagcactgtcctctgggcagtttgcccccatccctcccagtgctggctccaggctcctcgtgtggccatgcaagggtgctgtggttttgtcccttgccttcctgcctagtctcacatgtccctgttcctcttcccctggccagggcccctgcgcagactgtcagagtcattaagcgggatcccagcatctcagagtccagtcaagttccctcctgcagcctgccccctaggcagctcgagcatgccctgagctctctgaaagttgtcgccctggaatagggtcctgcagggtagaatagagtctcgagggacgtgtgttccccagctgatcgtgtcagcctcatgccccaggcctcatctttcatggaccaggccttgttccaggagtgggcgttgggtcctctgcttcctgtgctgtcccctggggaaggtcccaaggatgctgtcaggagatggaagagtcatgtggggtgggaacctggggtgtggttccagaaatgtttttggcaacaggagagacaggattgggccaacaaggactcagacgagttttattgactcatttctctggttgatacggagccatgtcatgtgccacgacctggggtgggcacagggaggctgcagtttcctgcgtgaacctgccttgggcctcatctgctcctagcccagcagagagagttgacccctcctgaactggccactccccagtgctcctgtgcagggagaggaagcacccggtttgagagtgtacccagccagactgtctttatctccatggattttcatcagggcaaagatcacagcagccagctcctggtggctgatgaggatcagagcatttgttcccccatgaaaggggaaatccctatggcatcattccagtggtggtcagtagatccaggacgccctgcaggactcagcctgtacagggagatgaagtgccccaggttgggagcacacctagctagagttatttgtgttaatctattcaggatgctctaagaaaacgccatagactgggttgctgacaaacatcagaattctatttctcatggttctgaaggcttagaaggctaagatcaaggtgtcagcaggttctgtgtctggtgaggacccacctcttgtttcatagataaaaccttcttgctgtgtcctcacatggtggaaaaggggcactgcctgcattcccttcccccctcaaaggccctgccctgctattatcgtcaccttggtgactagatttcagcctatgaattctggaggcggacacaaaaattcagattaaactactctgcttctgtttctctaaaatctacatccttctcatatacaaaatacatgcatttctccccagtagccccaaatatcaactcattttagcatcaactttaaaattgtagtccaaagtgtgatttaaatgttatctgagtcaaacatgggtaagactcaaggtacaatttatcctgagtccaactgttcttgctgcgaacctaggaaatcaaacatgttatgtgcttccaaaatacagtggttggagaggcataggataaacattcccattccagaaaggagaaacaggaaagaagaaaggagtaacaagtttcaagcaactccaaaattgaatgtgacaaacagtattaaaccttaagcctcaagaataaaaaaaaaaaaaaaaaaaaaaaaaaaaaaaaaaaaaaaaaaaaaaaaaaaaannaanaaaaaaanaaaannaaaaa

SEQ ID NO: 731548 - DNA, 2429 bp, Homo sapiens
  misc_feature (2406)..(2407): n is a, c, g, or t
  misc_feature (2410)..(2410): n is a, c, g, or t
  misc_feature (2418)..(2418): n is a, c, g, or t
  misc_feature (2423)..(2424): n is a, c, g, or t
cattggaatggcactcagggcaaaggcagaggtgtgcatggcagtgccctggctgtccctgcaaagggcacaggcactgggcacgagagccgcccgggtccccaggacagtgctgccctttgaagccatgccccagcgtccaggcaacaggtggctgaggctgctgcagatctggagggagcagggttatgaggacctgcacctggaagtacaccagaccttccaggaactggggcccattttcaggtacgacttgggaggagcaggcatggtgtgtgtgatgctgccggaggacgtggagaagctgcaacaggtggacagcctgcatccccacaggatgagcctggagccctgggtggcctacagacaacatcgtgggcacaaatgtggcgtgttcttgctgaatgggcctgaatggcgcttcaaccgattgcggctgaatccagaagtgctgtcgcccaacgctgtgcagaggttcctcccgatggtggatgcagtggccagggacttctcccaggccctgaagaagaaggtgctgcagaacgcccgggggagcctgaccctggacgtccagcccagcatcttccactacaccatagaagccagcaacttggctctttttggagagcggctgggcctggttggccacagccccagttctgccagcctgaacttcctccatgccctggaggtcatgttcaaatccaccgtccagctcatgttcatgcccaggagcctgtctcgctggaccagccccaaggtgtggaaggagcactttgaggcctgggactgcatcttccagtacggcgacaactgtatccagaaaatctatcaggaactggccttcagccgccctcaacagtacaccagcatcgtggcggagctcctgttgaatgcggaactgtcgccagatgccatcaaggccaactctatggaactcactgcagggagcgtggacacgacggtgtttcccttgctgatgacgctctttgagctggctcggaaccccaacgtgcagcaggccctgcgccaggagagcctggccgccgcagccagcatcagtgaacatccccagaaggcaaccaccgagctgcccttgctgcgtgcggccctcaaggagaccttgcggctctaccctgtgggtctgtttctggagcgagtggtgagctcagacttggtgcttcagaactaccacatcccagctgggacattggtgcgcgtgttcctctactctctgggtcgcaaccccgccttgttcccgaggcctgagcgctataacccccagcgctggctagacatcaggggctccggcaggaacttctaccacgtgccctttggctttggcatgcgccagtgccttgggcggcgcctggcagaggcagagatgctgctgctgctgcaccatgtgctgaaacacctccaggtggagacactaacccaagaggacataaagatggtctacagcttcatattgaggcccagcatgttccccctcctcaccttcagagccatcaactaatcacgtctctgcacccagggtcccagcctggccaccagcctccctttctgcctgaccccaggccacccctcttctctcccacatgcacagcttcctgagtcacccctctgtctaaccagccccagcacaaatggaactcccgagggcctctaggaccagggtttgccaggctaagcagcaatgccagggcacagctggggaagatcttgctgaccttgtccccagccccacctggccctttctccagcaagcactgtcctctgggcagtttgcccccatccctcccagtgctggctccaggctcctcgtgtggccatgcaagggtgctgtggttttgtcccttgccttcctgcctagtctcacatgtccctgttcctcttcccctggccagggcccctgcgcagactgtcagagtcattaagcgggatcccagcatctcagagtccagtcaagttccctcctgcagcctgccccctaggcagctcgagcatgccctgagctctctgaaagttgtcgccctggaatagggtcctgcagggtagaataaaaaggcccctgtggtcacttgtcctgacatccccattttcaagtgatacaactgagtctcgagggacgtgtgttccccagctgatcgtgtcagcctcatgccccaggcctcatctttcatggaccaggccttgttccaggagtgggcgttgggtcctctgcttcctgtgctgtcccctggggaaggtcccaaggatgctgtcaggagatggaagagtcatgtggggtgggaacctggggtgtggttccagaaatgtttttggcaacaggagagacaggattgggccaaaaaaaaaaaaaaaaaaaaaaaaaaaaaaaaaaaaaaaaaaaaaaaaaaaaannaanaaaaaaanaaaannaaaaa

SEQ ID NO: 731549 - DNA, 8400 bp, Homo sapiens
ctgtccaggttgagtgagggtgtccaggatgaggaatgagggtgtccagggtgaggagtgagggagtccagggtgaggagtgagggagtccagggtgaggattgagggtgtcagggtgagtgagagtgtccagggtgaggagtgagggtatccagggtgagtgagggtgtccagggtgaggagtgagggtatccagggtgagtgagggtgtccagggtgagtgagggtgtcagggtgagtgaacgtgtccagggtgtgtgagggtgtccagggtgcagagtgaggtgtccagggtgaggagtgacggtgtctggggtgagtgagggtgtccagggtgaggagtgagggtgtcagggtgagtgagggtgtccagggttgagtgcacatgtgtggtgaggaggtgtttgcagtgcttcaggcgcagcaactctttcatctagtttaaaattgtgctctgaggttagattttagtagaacaaaggccttacaaagaatgtgaaaacattgtgcttccctgcttacaggcaattaaaaaggagaatcaagctgagggtgcctggtgtggggtggggtggagaagaccacagagactattgtgtgttttattcaacagtgtcctgggctgctttctccagaaatgtccctgacacatggatgtaagtgtggctagtttactgggagatgatcccagtgatgcaggacacgcgagccctaagattgaagcatagcccgggagggttcttagctttgcccaggaaggaactcaaggcaagccagtggtgttagcaacttttattgaagcggccggctgtgcacagcagcagcagaggcgctgctccttgcaaagcagggctgccctacaggctgtgcgcccacagtagcagctcagaggcagttctgcagtggtatttgtatccacttttaattatatgcaaatgaaggggcagtttatgcagacatttccagggtgagggtggtaacttctgggtgctgccagagccatcgtgaactgacttgacacaggtcggtgtgtcctatggaaactagcatctgccctggacctattttagctagtgctcagtttggtctgagtgcctgagccccacttccagagttgagtcccacctcctacctcattcccccttcagagattagatactcctccttaatcttaagggggcctcgagaagggcggagtcctgcttttccgtaactacttcctgctgagtttatggcacgtaggccctgcctggcactggaggacgtaaaaatttctggatacctgatctaaggagcccagaggcaggacgatttcattctccgtgtcagtggacaggatgggctggaagccttgtgccagcattgtctctggaactgtggtaatctagaatacacaaactttactaagaggttaaagaagcaaggaccaaacatttgtaacaagacagttgtcaaaggtcctagaagaggtgaaaaacaggtgagacttgggaaggcacttttgatggttgaccagatatagttggggcagtgccctggttatatctatgtaactaggtagcttgctcatagatcttttgaatgttaacctcaacctgtccagagttaatatatgtgcagcaggttttattaataactgcacaagaccccaccttgttcagctagtaaataatccaatgctagtctgttatcaacaactacattttccagagtctggggaactcttgaattctctttaatgcctgatctccgttggtggctaaggattctaggatttgagccaagttctttagcgttaactcatggtaggcaaagcaccccagggtgctgctagtcctattgccaccctgattcctgccagaaataagtaagcaagcaacaggacaatgaactccatgttgcccagatcccactgagagtgaacgtgcagtcatgcccataaccgacacacatcccagtccatgtgggtcagtccttcatcaccctccctgccttctgacaacagcagactccagccattccattatcattcacagcccaacccaagcagtcagtggctgaagaaagagaatcaggtatactctatgtccacatataccttcctgccacagggcttcaccaactggcaggattccccccagcccccaactcctcctcatcccttgttcccaggcgggtcaattggagagtgagcagagatagatggcttgcagaagggtatgcaagatggggagactccaccagaccttagggagagaatggcatctttctccaccttttaagagagacagagcctccctgaggtctcaaagatttttcagggcaacacaagaaacgtttccaagcctcagctgcaggtgttcacctttccactctggggtgtgaggagatggtaagctgaggacaagtgtgttccagatgcaggccaactctgttctccaacagtttgaaccaacttggccttggggttccaagggtaggatgaagggtgtcacggcaggacggggcctggcgtgaggcaacagcaagcagagcgaggacacaacagtggcagcagtgtacagacacaggacgtcagcttcaaacgatgcaacagcagggatatcttgggcacggctctgattcgagccactcccaactctcttgcctccaggatggaggcactgtacatgcaacagtccagagaaagattctagccagtccaagcccaggcacatccagagaaggtgggagctcttcgggttgactccaccgaggaaaacaggcatttgggtatttcagattcccgctccacaataaggcaacttttaaaaaaatattatttccaaaaacaaaacaaaaattccagggggagggaattcagcggatcagtcttaagaggagcttttttttggagcgagaaatcatataaaataaaatgaaataaaacaaggaggaaggcaaccagctgttagggggaaaataaggcagataaaggagcggggagagaaattaattgccaaccaggaggagttgggctgtatttttcaaaggtggggagagtggagcacacaccttgaggaggaaagcgagaaagaaaagaaaaaagcaagtgaaggggggctcgcccaagaagggtgaagaagcgaagaaagtcgaggcgccgaggctcccaaagctggcagctccgggtggcggtgcaggggcgaaggggggggcggggggaacgtcggacatgcggctctggagttgggtgctgcacctggggctgctgagcgccgcgctgggctgcgggctggccgagcgtccccgccgggcccggagagacccgcgggccggccgacccccgcgccccgccgccggcccggccacctgcgccacccgcggcccgcggccgccgcgcctcgccgccgccgccgccgccgccgggcgtgcctgggaagccgtgcgcgtcccccggcggcggcagcagcgggaggcgaggggcgccaccgaggagccgagcccgccgagccgggcgctctatttcagcgggcgaggcgagcagctgcgagtcctccgggccgacctcgagctgccccgggacgcgttcacgctgcaagtgtggctgcgagcggaggggggccagaggtctccggcagtgatcacagggctgtatgacaaatgttcttatatctcacgtgaccgaggatgggtcgtgggcattcacaccatcagtgaccaagacaacaaagacccacgctactttttctccttgaagacagaccgagcccggcaagtgaccaccatcaatgcccaccgcagctacctcccaggccagtgggtatacctagctgccacctatgatgggcagttcatgaagctctatgtgaatggtgcccaggtggccacctctggggaacaagtgggtggcatattcagcccactgacccagaagtgcaaagtgctcatgttagggggcagtgccctgaatcacaactaccggggctacatcgagcacttcagtctgtggaaggtggccaggactcagcgggagatactgtctgacatggaaacccatggcgcccacactgctctacctcagctcctcctccaggagaactgggacaatgtgaagcatgcctggtcccccatgaaggatggcagcagccccaaagtggaattcagcaatgcccacggctttctgctggacacgagtctggagcctcctctgtgcggacagacattgtgtgacaacacagaggtcattgccagctacaatcagctctcaagtttccgccagcccaaggtggtgcgctaccgcgtggtcaacctctatgaagatgatcataagaacccgacggtgacgcgcgagcaggtggacttccagcaccatcagctggctgaggccttcaagcaatacaacatctcctgggagctggacgtgctggaggtgagcaactcctcccttcgccgccgcctcatcctggccaactgtgacatcagcaagattggggatgagaactgtgaccccgagtgcaaccacacgctgacgggccacgacggcggggattgccgccacctgcgccaccctgccttcgtgaagaagcagcacaacggggtgtgtgacatggactgcaactatgaacggttcaactttgatggtggagagtgctgtgaccctgaaatcaccaatgtcactcagacttgctttgaccccgactctccacacagagcctacttggatgttaatgagctgaagaacattcttaaattggatggatcaacacatctcaatattttctttgcaaaatcctcagaggaggagttggcaggagtagcaacttggccatgggacaaggaggccctgatgcacttaggtggcattgtcttgaacccatctttctatggcatgcctgggcacacccacaccatgatccatgagattggtcacagcctgggcctctatcacgtcttccgaggcatctcagaaatccagtcctgcagtgacccctgcatggagacagagccctccttcgagactggagacctctgcaatgataccaacccagcccctaaacacaagtcctgtggtgacccagggccaggaaatgacacctgtggctttcatagcttcttcaacactccttacaacaacttcatgagctatgcagatgacgactgtacggactccttcacgcccaatcaagtcgccagaatgcactgttacctggacctggtctaccagggctggcagccctccaggaaaccagcgcctgttgccctcgccccccaagttctgggccacacaacggactctgtgacactggagtggttcccacctatagatggccatttctttgaaagagaattgggatcagcatgtcatctttgcctggaagggagaatcctggtgcagtatgcttccaacgcttcctccccaatgccctgcagcccatcaggacactggagccctcgtgaagcagaaggtcatcctgatgttgaacagccctgtaagtccagtgtccgcacctggagcccaaattcagctgtcaacccacacacggttcctccagcctgccctgagcctcaaggctgctacctcgagctggagttcctctaccccttggtccctgagtctctgaccatttgggtgacctttgtctccactgactgggactctagtggagctgtcaatgacatcaaactgttggctgtcagtgggaagaacatctccctgggtcctcagaatgtcttctgtgatgtcccactgaccatcagactctgggacgtgggcgaggaggtgtatggcatccaaatctacacgctggatgagcacctggagatcgatgctgccatgttgacctccactgcagacaccccactctgtctacagtgtaagcccctgaagtataaggtggtccgggaccctcctctccagatggatgtggcctccatcctacatctcaataggaaattcgtagacatggatctaaatcttggcagtgtgtaccagtattgggtcataactatttcaggaactgaagagagtgagccatcacctgctgtcacatacatccatggacgtgggtactgtggcgatggcattatacaaaaagaccaaggtgaacaatgcgacgacatgaataagatcaatggtgatggctgctcccttttctgccgacaagaagtctccttcaattgtattgatgaacccagccggtgctatttccatgatggtgatggggtatgtgaggagtttgaacaaaaaaccagcattaaggactgtggtgtctacacgccccagggattcctggatcagtgggcatccaatgcttcagtatctcatcaagaccagcaatgcccaggctgggtcatcatcggacagccagcagcatcccaggtgtgtcgaaccaaggtgatagatctcagtgaaggcatttcccagcatgcctggtacccttgcaccatcagctacccatattcccagctggctcagaccactttttggctccgggcgtatttttctcaaccaatggttgccgcagctgtcattgtccacctggtgacggatgggacatattatggggaccaaaagcaggagaccatcagcgtgcagctgcttgataccaaagatcagagccacgatctaggcctccatgtcctgagctgcaggaacaatcccctgattatccctgtggtccatgacctcagccagcccttctaccacagccaggcggtacgtgtgagcttcagttcgcccctggtcgccatctcgggggtggccctccgttccttcgacaactttgaccccgtcaccctgagcagctgccagagaggggagacctacagccctgccgagcagagctgcgtgcacttcgcatgtgagaaaactgactgtccagagctggctgtggagaatgcttctctcaattgctccagcagcgaccgctaccacggtgcccagtgtactgtgagctgccggacaggctacgtgctccagatacggcgggatgatgagctgatcaagagccagacgggacccagcgtcacagtgacctgtacagagggcaagtggaataagcaggtggcctgtgagccagtcgactgcagcatcccagatcaccatcaagtctatgctgcctccttctcctgccctgagggcaccacctttggcagtcaatgttccttccagtgccgtcaccctgcacaattgaaaggcaacaacagcctcctgacctgcatggaggatgggctgtggtccttcccagaggccctgtgtgagctcatgtgcctcgctccaccccctgtgcccaatgcagacctccagaccgcccggtgccgagagaataagcacaaggtgggctccttctgcaaatacaaatgcaagcctggataccatgtgcctggatcctctcggaagtcaaagaaacgggccttcaagactcagtgtacccaggatggcagctggcaggagggagcttgtgttcctgtgacctgtgacccacctccaccaaaattccatgggctctaccagtgtactaatggcttccagttcaacagtgagtgtaggatcaagtgtgaagacagtgatgcctcccagggacttgggagcaatgtcattcattgccggaaagatggcacctggaacggctccttccatgtctgccaggagatgcaaggccagtgctcggttccaaacgagctcaacagcaacctcaaactgcagtgccctgatggctatgccatagggtcggagtgtgccacctcgtgcctggaccacaacagcgagtccatcatcctgccaatgaacgtgaccgtgcgtgacatcccccactggctgaaccccacacgggtagagagagttgtctgcactgctggtctcaagtggtatcctcaccctgctctgattcactgtgtcaaaggctgtgagcccttcatgggagacaattattgtgatgccatcaacaaccgagccttttgcaactatgacggtggggattgctgcacctccacagtgaagaccaaaaaggtcaccccattccctatgtcctgtgacctacaaggtgactgtgcttgtcgggacccccaggcccaagaacacagccggaaagacctccggggatacagccatggctaaggaaggacaagaagttgtcaaagaattcccaacgccaggacccacatccctttggtattgatttcacagtcagctgctcaacggaatggcctctccacaccagggatccttagcacccaaccggtctgcctttaattttacccaggaaggactcacattggggcgaatgaaccaagtttcgccatgctggatgatgaaatggattcccatcccaaagtctgagatggattgcatatacagtgtgcagtcccagagcctcctaaaattctagccatttgtcacacaaccacagcaaaaaaaaa

SEQ ID NO: 731550 - DNA, 1715 bp, Homo sapiens; identical to SEQ ID NO: 69241
  misc_feature (1508)..(1508): n is a, c, g, or t
  misc_feature (1517)..(1517): n is a, c, g, or t
  misc_feature (1526)..(1526): n is a, c, g, or t
  misc_feature (1531)..(1531): n is a, c, g, or t
  misc_feature (1534)..(1534): n is a, c, g, or t
  misc_feature (1537)..(1538): n is a, c, g, or t
  misc_feature (1542)..(1543): n is a, c, g, or t
  misc_feature (1546)..(1546): n is a, c, g, or t
  misc_feature (1562)..(1562): n is a, c, g, or t

SEQ ID NO: 731551 - DNA, 1690 bp, Homo sapiens
acaggacccaggtgctgggggagaacagacctcgggagcagccaggagtcctcggtcctgggagggtttaaaagccagggggccgtctcgacctcagtctgaccttccctcccggcagcagcatgcgggggttgctggtgttgagtgtcctgttgggggctgtctttggcaaggaggactttgtggggcatcaggtgctccgaatctctgtagccgatgaggcccaggtacagaaggtgaaggagctggaggacctggagcacctgcagctggacttctggcggggccctgcccaccctggctcccccatcgacgtccgagtgcccttccccagcatccaggcggtcaagatctttctggagtcccacggcatcagctatgagaccatgatcgaggacgtgcagtcgctgctggacgaggagcaggagcagatgttcgccttccggtcccgggcgcgctccaccgacacttttaactacgccacctaccacaccctggaggagatctatgacttcctggacctgctggtggcggagaacccgcaccttgtcagcaagatccagattggcaacacctatgaagggcgtcccatttacgtgctgaagttcagcacggggggcagtaagcgtccagccatctggatcgacacgggcatccattcccgggagtgggtcacccaggccagtggggtctggtttgcaaagaagatcactcaagactacgggcaggatgcagctttcaccgccattctcgacaccttggacatcttcctggagatcgtcaccaaccctgatggctttgccttcacgcacagcacgaatcgcatgtggcgcaagactcggtcccacacagcaggctccctctgtattggcgtggaccccaacaggaactgggacgctggctttgggttgtccggagccagcagtaacccctgctcggagacttaccacggcaagtttgccaattccgaagtggaggtcaagtccattgtagactttgtgaaggaccatgggaacatcaaggccttcatctccatccacagctactcccagctcctcatgtatccctatggctacaaaacagaaccagtccctgaccaggatgagctggatcagctttccaaggctgctgtgacagccctggcctctctctacgggaccaagttcaactatggcagcatcatcaaggcaatttatcaagccagtggaagcactattgactggacctacagccagggcatcaagtactccttcaccttcgagctccgggacactgggcgctatggcttcctgctgccagcctcccagatcatccccacagccaaggagacgtggctggcgcttctgaccatcatggagcacaccctgaatcacccctactgagctgaccctttgacacccttcttgtcctcctctctggccccatccaggcaaccaaataaagtttgagtgtaccaggaacagaatcctggggcttgcaaaaaaaaaaaaaaaaaaaaaaaaaaaaatggttgggggggcccgggccccggaaaaagttttaaacctccttttggggccgcccgcccccttggttttggactggccacgcggcccacgaagccgggtctgcacggggtgggtctccccaaaaacgcccgggggcccgcgcttggcacacccggggccgcggctcggttcacgggccggct

SEQ ID NO: 731552 - DNA, 377 bp, Homo sapiens; identical to SEQ ID NO: 69242

SEQ ID NO: 731553 - DNA, 1262 bp, Homo sapiens
ctcagagccttcctgatgtatatatgcaggtagtgagaattgaatcggccctttgagacagtaatataataaaactctgatttggggagcagcggttctccttatttttctactctcttgtgggaatgagttgccaagcttttacttcggctgatacctttatacctctgaattctgacgcctctgcaactctgcctctgataatgcatcacagtgctgccgagtgtctaccagtctccaaccatgccaccaatgtgatgtctacagcaacaggacttcattattctgttccttcctgtcattatggaaaccagccatcaacctatggagtgatggcaggtagtttaaccccttgtctttataaatttcctgaccacaccttgagtcatggatttcctcctatacaccagcctcttctggcagaggaccccacagctgctgatttcaagcaggaactcaggcggaaaagtaaattggtggaagagccaatagacatggattctccagaaatcagagaacttgaaaagtttgccaatgaatttaaagtgagacgaattaaattaggatacacccagacaaatgttggggaggccctggcagctgtgcatggctctgaattcagtcaaacaacaatctgccgatttgaaaatctgcagctcagctttaaaaatgcatgcaaactgaaagcaatattatccaaatggctggaggaagctgagcaagtaggagctttgtacaatgaaaaagtgggagcaaatgaaaggaaaagaaaacgaagaacaactataagcattgctgctaaagatgctctggagagacactttggagaacagaataaaccttcttctcaagagatcatgaggatggctgaagaactgaatctggagaaagaagtagtaagagtttggttttgcaaccggaggcagagagaaaaacgggtgaaaacaagtctgaatcagagtttattttctatttctaaggaacatcttgagtgcagataagatttttctattgtataatagcctttttctcccgtttcattcctttctcttcctcaacaaaaacagaaattacttggttgacttaaaatcattttatatcaatagcttttacagaagctttacttttccacttttttttaaaaaaaagaaaccaacaatttaaattatattgatgttatttacttaaaataattattctcagaagccacattatctattttaagccaaatatattaacagtaataaaatgatctctctgtc

SEQ ID NO: 731554 - DNA, 1493 bp, Homo sapiens; identical to SEQ ID NO: 417481

SEQ ID NO: 731555 - DNA, 85 bp, Homo sapiens
  misc_feature (5)..(5): n is a, c, g, or t
tctanagtcccatctattttgtctttgatccaaactcctaaatgtttgtgcacacatttctcggtgacaacgttgggaaacacag

SEQ ID NO: 731556 - DNA, 465 bp, Homo sapiens
agccctccaggacaggctgcatcagaagaggccatcaagcagatcactgtccttctgccatggccctgtggatgcgcctcctgcccctgctggcgctgctggccctctggggacctgacccagccgcagcctttgtgaaccaacacctgtgcggctcacacctggtggaagctctctacctagtgtgcggggaacgaggcttcttctacacacccaagacccgccgggaggcagaggacctgcaggtggggcaggtggagctgggcgggggccctggtgcaggcagcctgcagcccttggccctggaggggtccctgcagaagcgtggcattgtggaacaatgctgtaccagcatctgctccctctaccagctggagaactactgcaactagacgcagcccgcaggcagccccccacccgccgcctcctgcaccgagagagatggaataaagcccttgaaccagc

SEQ ID NO: 731557 - DNA, 320 bp, Homo sapiens
ctggcgggcaggcgggcactgtgtctccctgactgtgtcctcctgtgtccctctgcctcgccgctgttccggaacctgctctgcgcggcacgtcctggcagtggggcaggtggagctgggcgggggccctggtgcaggcagcctgcagcccttggccctggaggggtccctgcagaagcgtggcattgtggaacaatgctgtaccagcatctgctccctctaccagctggagaactactgcaactagacgcagcccgcaggcagccccccacccgccgcctcctgcaccgagagagatggaataaagcccttgaaccagc

SEQ ID NO: 731558 - DNA, 1582 bp, Homo sapiens; identical to SEQ ID NO: 418011
  misc_feature (8)..(8): n is a, c, g, or t
  misc_feature (11)..(11): n is a, c, g, or t

SEQ ID NO: 731559 - DNA, 295 bp, Homo sapiens
tttcctgactacttgccctgttcagtgatgttgcagccagctccacaagattcagggaagtcctgtggggttgactttgaggtcaaagcattcgccacagacagcaccgatgccgaagaggacaaaatccccaagaagagctccgtgcgattactgatccgcaaagtacagcatgccccacttgagatgggtccccagccccgagctgaggcggcctggcagttcttcatgtctgacaagcccctgcaccttgcggtctctctcaacaaagaggtaaccacctaccatcgctact

SEQ ID NO: 731560 - DNA, 261 bp, Homo sapiens
ctcaggaggaggctgtggtctctgactcttgagccagtttgtctcattaactccatagaacattctagaaattcagcaattcagaataggctgagttgcttgaagaaatatcctcctgttgctgccagcccaccctgagatttcacaagcactgttctgcttctcagaaaaagtgccaccaaacagcactttgaccaagacgctgacgctgctgcccttgctggctaacaatcgagaaaggagaggcattgccctggatgg

SEQ ID NO: 731561 - DNA, 916 bp, Homo sapiens
  misc_feature (8)..(8): n is a, c, g, or t
  misc_feature (11)..(11): n is a, c, g, or t
gggatctngcnagatcccctacaaattccccacatacgtaggccaggagcctcagcggtgccccttcaggctcatctggcaagacggtaccagcttgctcagaacaggggctggctattcatcatctcagagcatagagaccctctccttgccacccggcccttcccacctggttggtgacaaatcacaaggattgtcttacctttctccaaccctctaacacctgaccaacaccccaaggtggtagaagttgccagggacagataacatggcagccagcgggaagaccagcaagtccgaaccgaaccatgttatcttcaagaagatctcccgggacaaatcggtgaccatctacctggggaacagagactacatagaccatgtcagccaagtccagcctgtggatggtgtcgtgttggttgatcctgatcttgtgaagggaaagaaagtgtatgtcactctgacctgcgccttccgctatggccaagaggacattgacgtgatcggcttgaccttccgcagggacctgtacttctcccgggtccaggtgtatcctcctgtgggggccgcgagcacccccacaaaactgcaagagagcctgcttaaaaagctggggagcaacacgtacccctttctcctgacgtttcctgactacttgccctgttcagtgatgttgcagccagctccacaagattcagggaagtcctgtggggttgactttgaggtcaaagcattcgccacagacagcaccgatgccgaagaggacaaaatccccaagaagagctccgtgcgattactgatccgcaaagtacagcatgccccacttgagatgggtccccagccccgagctgaggcggcctggcagttcttcatgtctgacaagcccctgcaccttgcggtctctctcaacaaagag

SEQ ID NO: 731562 - DNA, 464 bp, Homo sapiens; identical to SEQ ID NO: 418017

SEQ ID NO: 731563 - DNA, 1584 bp, Homo sapiens
  misc_feature (394)..(394): n is a, c, g, or t
cggggcagctctgaggaacaaggtggaagctcagagcgctggtctccaccctggtgcccctgggctggtgctggcagtgggagccgtggctgtggatgagagacatagacgagagagtgagatggcctggtttgccctctacctcctgagccttctctgggctacagctgggactagtacccagacccagagttcatgctccgttccctcagcacaggagcccttggtcaatggaatacaagtactcatggagaactcggtgacttcatcagcctacccaaaccccagcatcctgattgccatgaatctggccggagcctacaacttgaaggcccagaagctcctgacttaccagctcatgtccagcgacaacaacgatctaaccattgggcanctcggcctcaccatcatggccctcacctcctcctgccgagaccctggggataaagtatccattctacaaagacaaatggagaactgggcaccttccagccccaacgctgaagcatcagccttctatgggcccagtctagcgatcttggcactgtgccagaagaactctgaggcgaccttgccgatagccgtccgctttgccaagaccctgctggccaactcctctcccttcaatgtagacacaggagcaatggcaaccttggctctgacctgtatgtacaacaagatccctgtaggttcagaggaaggttacagatccctgtttggtcaggtactaaaggatattgtggagaaaatcagcatgaagatcaaagataatggcatcattggagacatctacagtactggcctcgccatgcaggctctctctgtaacacctgagccatctaaaaaggaatggaactgcaagaagactacggatatgatactcaatgagattaagcaggggaaattccacaaccccatgtccattgctcaaatcctcccttccctgaaaggcaagacatacctagatgtgccccaggtcacttgtagtcctgatcatgaggtacaaccaactctacccagcaaccctggccctggccccacctctgcatctaacatcactgtcatatacaccataaataaccagctgaggggggttgagctgctcttcaacgagaccatcaatgttagtgtgaaaagtgggtcagtgttacttgttgtcctagaggaagcacagcgcaaaaatcctatgttcaaatttgaaaccacaatgacatcttggggccttgtcgtctcttctatcaacaatatcgcggaaaatgttaatcacaagacatactggcagtttcttagtggtgtaacacctttgaatgaaggggttgctgactacatacccttcaaccacgagcacatcacagccaatttcacacagtactaacgaagaggtgggttcagcttctatcaaacatctccaaaggatgggtgaaattttttccacttcattttaaatctatgcaaaaaagcgaatgcctgtgatgctaccatattcctggtaaaaacatggagaaccactatgtagaataaaaatgcaaagttcactggagtctcaacatctatgactcatgaaaataaaattttcatcttctc

SEQ ID NO: 731564 - DNA, 989 bp, Homo sapiens
  misc_feature (31)..(31): n is a, c, g, or t
tagaggatccccatgcgcgacgcttccatcnatgtagacacaggagcaatggcaaccttggctctgacctgtatgtacaacaagatccctgtaggttcagaggaaggttacagatccctgtttggtcaggtactaaaggatattgtggagaaaatcagcatgaagatcaaagataatggcatcattggagacatctacagtactggcctcgccatgcaggctctctctgtaacacctgagccatctaaaaaggaatggaactgcaagaagactacggatatgatactcaatgagattaagcaggggaaattccacaaccccatgtccattgctcaaatcctcccttccctgaaaggcaagacatacctagatgtgccccaggtcacttgtagtcctgatcatgaggtacaaccaactctacccagcaaccctggccctggccccacctctgcatctaacatcactgtcatatacaccataaataaccagctgaggggggttgagctgctcttcaacgagaccatcaatgttagtgtgaaaagtgggtcagtgttacttgttgtcctagaggaagcacagcgcaaaaatcctatgttcaaatttgaaaccacaatgacatcttggggccttgtcgtctcttctatcaacaatatcgcggaaaatgttaatcacaagacatactggcagtttcttagtggtgtaacacctttgaatgaaggggttgctgactacatacccttcaaccacgagcacatcacagccaatttcacacagtactaacgaagaggtgggttcagcttctatcaaacatctccaaaggatgggtgaaattttttccacttcattttaaatctatgcaaaaaagcgaatgcctgtgatgctaccatattcctggtaaaaacatggagaaccactatgtagaataaaaatgcaaagttcactggagtctcaacatctatgactcatgaaaataaaattttcatcttctc

SEQ ID NO: 731565 - DNA, 2775 bp, Homo sapiens; identical to SEQ ID NO: 81519

SEQ ID NO: 731566 - DNA, 1964 bp, Homo sapiens; identical to SEQ ID NO: 81284
  misc_feature (494)..(494): n is a, c, g, or t

SEQ ID NO: 731567 - DNA, 712 bp, Homo sapiens
ggttggtcacatcagaaaaggagagtgctgctcacattctgaacaggaagggtggcggaaacttgctgggcatcattgtagggggtgcccaggaggccctggatgccaggcctggatccttcacgctgttactgcggaaccgaaagggcttcgtcaggctcgccctgacacacggggcacccctggtgccaatcttctccttcggggagaatgacctatttgaccagattcccaactcttctggctcctggttacgctatatccagaatcggttgcagaagatcatgggcatctccctcccactctttcatggccgtggtgtcttccagtaacagctttggtttaataccctaccgccggcccatcaccactgtgggtaagtccaggaccaggctgggagggaggaggccaaagggacagggcaggttgtgtgctgcaaggggacatggagatgagccagatttattcctgccctaatggggctcacattctagactgggaaacatacacatacaagcagatagaatagaagacagtctgggataggaactatagcagaggtgccaacagcaatagttgtgactaattgctgagcacctgctgtgtgccaggcactacactagctgccctacatgaagcaactcagcttatcctaacaatcttcatggcaggatttttttttaagagttttgctcttgtcgctcagcctgga

SEQ ID NO: 731568 - DNA, 1819 bp, Homo sapiens
ctacaaggaggcaggcaagacagcaaggcatagagacaacatagagctaagtaaagccagtggaaatgaagagtcttccaatcctactgttgctgtgcgtggcagtttgctcagcctatccattggatggagctgcaaggggtgaggacaccagcatgaaccttgttcagaaatatctagaaaactactacgacctcaaaaaagatgtgaaacagtttgttaggagaaaggacagtggtcctgttgttaaaaaaatccgagaaatgcagaagttccttggattggaggtgacggggaagctggactccgacactctggaggtgatgcgcaagcccaggtgtggagttcctgatgttggtcacttcagaacctttcctggcatcccgaagtggaggaaaacccaccttacatacaggattgtgaattatacaccagatttgccaaaagatgctgttgattctgctgttgagaaagctctgaaagtctgggaagaggtgactccactcacattctccaggctgtatgaaggagaggctgatataatgatctcttttgcagttagagaacatggagacttttacccttttgatggacctggaaatgttttggcccatgcctatgcccctgggccagggattaatggagatgcccactttgatgatgatgaacaatggacaaaggatacaacagggaccaatttatttctcgttgctgctcatgaaattggccactccctgggtctctttcactcagccaacactgaagctttgatgtacccactctatcactcactcacagacctgactcggttccgcctgtctcaagatgatataaatggcattcagtccctctatggacctccccctgactcccctgagacccccctggtacccacggaacctgtccctccagaacctgggacgccagccaactgtgatcctgctttgtcctttgatgctgtcagcactctgaggggagaaatcctgatctttaaagacaggcacttttggcgcaaatccctcaggaagcttgaacctgaattgcatttgatctcttcattttggccatctcttccttcaggcgtggatgccgcatatgaagttactagcaaggacctcgttttcatttttaaaggaaatcaattctgggctatcagaggaaatgaggtacgagctggatacccaagaggcatccacaccctaggtttccctccaaccgtgaggaaaatcgatgcagccatttctgataaggaaaagaacaaaacatatttctttgtagaggacaaatactggagatttgatgagaagagaaattccatggagccaggctttcccaagcaaatagctgaagactttccagggattgactcaaagattgatgctgtttttgaagaatttgggttcttttatttctttactggatcttcacagttggagtttgacccaaatgcaaagaaagtgacacacactttgaagagtaacagctggcttaattgttgaaagagatatgtagaaggcacaatatgggcactttaaatgaagctaataattcttcacctaagtctctgtgaattgaaatgttcgttttctcctgcctgtgctgtgactcgagtcacactcaagggaacttgagcgtgaatctgtatcttgccggtcatttttatgttattacagggcattcaaatgggctgctgcttagcttgcaccttgtcacatagagtgatctttcccaagagaaggggaagcactcgtgtgcaacagacaagtgactgtatctgtgtagactatttgcttatttaataaagacgatttgtcagtta

SEQ ID NO: 731569 - DNA, 1430 bp, Homo sapiens
ctacaaggaggcaggcaagacagcaaggcatagagacaacatagagctaagtaaagccagtggaaatgaagagtcttccaatcctactgttgctgtgcgtggcagtttgctcagcctatccattggatggagctgcaaggggtgaggacaccagcatgaaccttgttcagaaatatctagaaaactactacgacctcaaaaaagatgtgaaacagtttgttaggagaaaggacagtggtcctgttgttaaaaaaatccgagaaatgcagaagttccttggattggaggtgacggggaagctggactccgacactctggaggtgatgcgcaagcccaggtgtggagttcctgatgttggtcacttcagaacctttcctggcatcccgaagtggaggaaaacccaccttacatacaggattgtgaattatacaccagatttgccaaaagatgctgttgattctgctgttgagaaagctctgaaagtctgggaagaggtgactccactcacattctccaggctgtatgaaggagaggctgatataatgatctcttttgcagttagagaacatggagacttttacccttttgatggacctggaaatgttttggcccatgcctatgcccctgggccagggattaatggagatgcccactttgatgatgatgaacaatggacaaaggatacaacagggaccaatttatttctcgttgctgctcatgaaattggccactccctgggtctctttcactcagccaacactgaagctttgatgtacccactctatcactcactcacagacctgactcggttccgcctgtctcaagatgatataaatggcattcagtccctctatggacctccccctgactcccctgagacccccctggtacccacggaacctgtccctccagaacctgggacgccagccaactgtgatcctgctttgtcctttgatgctgtcagcactctgaggggagaaatcctgatctttaaagacaggcacttttggcgcaaatccctcaggaagcttgaacctgaattgcatttgatctcttcattttggccatctcttccttcaggcgtggatgccgcatatgaagttactagcaaggacctcgttttcatttttaaaggaaatcaattctgggctatcagaggaaatgaggtacgagctggatacccaagaggcatccacaccctaggtttccctccaaccgtgaggaaaatcgatgcagccatttctgataaggaaaagaacaaaacatatttctttgtagaggacaaatactggagatttgatgagaagagaaattccatggagccaggctttcccaagcaaatagctgaagactttccagggattgactcaaagattgatgctgtttttgaagaatttgacagagctggcaccgagtgctgtctccattct

SEQ ID NO: 731570 - DNA, 463 bp, Homo sapiens
aagaacaaaacatatttctttgtagaggacaaatactggaggtgagatgcaagagaaatgactttgtatggagcctaattagggaaattagtttcttttactaaggaaatcccccaccccaaccttaggcctgcttctctcttagtaggaaggatgggacttcagacaactgtgggaaagttcttactttaaaacagcagcaccttaggctctcctgctttcagtcccaagtgcagttggctggtgcttcccttggtgctgtcaccccacctgcctggagccccctcttctctcctcaacctattcaaatcttgcccatccttcaagtcctggctcaagtctcatcacctccatgcagctttccctcgtggactttagacccattgggaaaatgttctgagaacccagaccgcaatttagcgttcccttcccattgtcttttagtttggctcactgtctcact

SEQ ID NO: 731571 - DNA, 538 bp, Homo sapiens; identical to SEQ ID NO: 458306

SEQ ID NO: 731572 - DNA, 852 bp, Homo sapiens
  misc_feature (772)..(772): n is a, c, g, or t
  misc_feature (783)..(783): n is a, c, g, or t
  misc_feature (800)..(800): n is a, c, g, or t
gctagagcaggccaggtcatctttgggtggtggagtgcaaaggaggcgacctgcaacagaggagtcccggtcaccagcaaccatgacggaccagcaggctgaggccaggtcctacctcagcgaagagatgatcgctgagttcaaggctgcctttgacatgtttgatgctgatggtggtggggacatcagcgtcaaggagttgggcacggtgatgaggatgctgggccagacacccaccaaggaggagctggacgccatcatcgaggaggtggatgaggacggcagcggcaccatcgacttcgaggagttcttggtcatgatggtgcgccagatgaaagaggacgcgaaagggaagagcgaggaggagctggccgagtgcttccgcatcttcgacaggaatgcagacggctacatcgacccggaggagctggctgagattttcagggcctccggggagcacgtgacggacgaggagatcgaatctctgatgaaagacggcgacaagaacaacgacggccgcattgacttcgacgagttcctgaagatgatggagggcgtgcagtaaggagtggacagtcgcctctaccaagatcgcgtgtccctagggtgtgggagactccgccctgccgggtccccaccagggaggcgcgaccccttgtgggtctttgtctggaaggaataaaagcaaatgttccaaaaaaaaaaaaaaaaaaaaaactttgggggcgcggcccgaaaaattttaaacattctgtggggcgggcccaggaangacatggccanggccaagaaccggcganagggggtcccaaaaaaccgggcacgtggaacccaaggtcggctggttaagcc

SEQ ID NO: 731573 - DNA, 699 bp, Homo sapiens; identical to SEQ ID NO: 325648

SEQ ID NO: 731574 - DNA, 1086 bp, Homo sapiens
  misc_feature (127)..(127): n is a, c, g, or t
  misc_feature (133)..(133): n is a, c, g, or t
  misc_feature (135)..(135): n is a, c, g, or t
  misc_feature (138)..(138): n is a, c, g, or t
  misc_feature (140)..(140): n is a, c, g, or t
  misc_feature (144)..(144): n is a, c, g, or t
  misc_feature (146)..(146): n is a, c, g, or t
  misc_feature (161)..(162): n is a, c, g, or t
  misc_feature (1006)..(1006): n is a, c, g, or t
  misc_feature (1017)..(1017): n is a, c, g, or t
  misc_feature (1034)..(1034): n is a, c, g, or t
gcatgccctgtgaccaggcagggatgggctatgtcgctgttggggaccacgagggatggccagtgaggaggggtcagaggctgtgaggggaggactgaggctgggtgtggtgtcctgggatggaagnggagancnaancngatnanagacggcgacaagannaacgacggccgcattgacttcgacgagttcctgaagatgatggagggcgtgcagtaaggagtggacagtcgcctctaccaagatcgcgtgtccctagggtggtggagtgcaaaggaggcgacctgcaacagaggagtcccggtcaccagcaaccatgacggaccagcaggctgaggccaggtcctacctcagcgaagagatgatcgctgagttcaaggctgcctttgacatgtttgatgctgatggtggtggggacatcagcgtcaaggagttgggcacggtgatgaggatgctgggccagacacccaccaaggaggagctggacgccatcatcgaggaggtggatgaggacggcagcggcaccatcgacttcgaggagttcttggtcatgatggtgcgccagatgaaagaggacgcgaaagggaagagcgaggaggagctggccgagtgcttccgcatcttcgacaggaatgcagacggctacatcgacccggaggagctggctgagattttcagggcctccggggagcacgtgacggacgaggagatcgaatctctgatgaaagacggcgacaagaacaacgacggccgcattgacttcgacgagttcctgaagatgatggagggcgtgcagtaaggagtggacagtcgcctctaccaagatcgcgtgtccctagggtgtgggagactccgccctgccgggtccccaccagggaggcgcgaccccttgtgggtctttgtctggaaggaataaaagcaaatgttccaaaaaaaaaaaaaaaaaaaaaactttgggggcgcggcccgaaaaattttaaacattctgtggggcgggcccaggaangacatggccanggccaagaaccggcganagggggtcccaaaaaaccgggcacgtggaacccaaggtcggctggttaagcc

SEQ ID NO: 731575 - DNA, 933 bp, Homo sapiens; identical to SEQ ID NO: 325647
  misc_feature (127)..(127): n is a, c, g, or t
  misc_feature (133)..(133): n is a, c, g, or t
  misc_feature (135)..(135): n is a, c, g, or t
  misc_feature (138)..(138): n is a, c, g, or t
  misc_feature (140)..(140): n is a, c, g, or t
  misc_feature (144)..(144): n is a, c, g, or t
  misc_feature (146)..(146): n is a, c, g, or t
  misc_feature (161)..(162): n is a, c, g, or t

SEQ ID NO: 731576 - DNA, 353 bp, Homo sapiens; identical to SEQ ID NO: 325646
  misc_feature (127)..(127): n is a, c, g, or t
  misc_feature (133)..(133): n is a, c, g, or t
  misc_feature (135)..(135): n is a, c, g, or t
  misc_feature (138)..(138): n is a, c, g, or t
  misc_feature (140)..(140): n is a, c, g, or t
  misc_feature (144)..(144): n is a, c, g, or t
  misc_feature (146)..(146): n is a, c, g, or t
  misc_feature (161)..(162): n is a, c, g, or t

SEQ ID NO: 731577 - DNA, 933 bp, Homo sapiens
  misc_feature (853)..(853): n is a, c, g, or t
  misc_feature (864)..(864): n is a, c, g, or t
  misc_feature (881)..(881): n is a, c, g, or t
gggcccttggctccaggagggacttgggaagcctgggtcggcctgagggagtcccaggcctgccgcagagtcatcccagtccggccagtgttcacaggcttgcacaatctgatttgaacctcacacatgggaagtaggcaaacagggaaactgaggaccagagaggacggaccagcaggctgaggccaggtcctacctcagcgaagagatgatcgctgagttcaaggctgcctttgacatgtttgatgctgatggtggtggggacatcagcgtcaaggagttgggcacggtgatgaggatgctgggccagacacccaccaaggaggagctggacgccatcatcgaggaggtggatgaggacggcagcggcaccatcgacttcgaggagttcttggtcatgatggtgcgccagatgaaagaggacgcgaaagggaagagcgaggaggagctggccgagtgcttccgcatcttcgacaggaatgcagacggctacatcgacccggaggagctggctgagattttcagggcctccggggagcacgtgacggacgaggagatcgaatctctgatgaaagacggcgacaagaacaacgacggccgcattgacttcgacgagttcctgaagatgatggagggcgtgcagtaaggagtggacagtcgcctctaccaagatcgcgtgtccctagggtgtgggagactccgccctgccgggtccccaccagggaggcgcgaccccttgtgggtctttgtctggaaggaataaaagcaaatgttccaaaaaaaaaaaaaaaaaaaaaactttgggggcgcggcccgaaaaattttaaacattctgtggggcgggcccaggaangacatggccanggccaagaaccggcganagggggtcccaaaaaaccgggcacgtggaacccaaggtcggctggttaagcc

SEQ ID NO: 731578 - DNA, 780 bp, Homo sapiens; identical to SEQ ID NO: 325649

SEQ ID NO: 731579 - DNA, 825 bp, Homo sapiens; identical to SEQ ID NO: 390032

SEQ ID NO: 731580 - DNA, 859 bp, Homo sapiens; identical to SEQ ID NO: 390033

SEQ ID NO: 731581 - DNA, 712 bp, Homo sapiens
aagtcaagggccggctggcaaccccagcaagctgtcctgtgagccgccagcatggatgacatctacaaggctgcggtagagcagctgacagaagagcagaaaaatgagttcaaggcagccttcgacatcttcgtgctgggcgctgaggatggctgcatcagcaccaaggagctgggcaaggtgatgaggatgctgggccagaaccccacccctgaggagctgcaggagatgatcgatgaggtggacgaggacggcagcggcacggtggactttgatgagttcctggtcatgatggttcggtgcatgaaggacgacagcaaagggaaatctgaggaggagctgtctgacctcttccgcatgtttgacaaaaatgctgatggctacatcgacctggatgagctgaagataatgctgcaggctacaggcgagaccatcacggaggacgacatcgaggagctcatgaaggacggagacaagaacaacgacggccgcatcgactatgatgagttcctggagttcatgaagggtgtggagtagatgctgaccttcacccagagctgcctatgcccagcctccaactccagctgagtcctggggttggggagggggtcggggtcccaggacctgagcctggccatgtcctcaaccccaaatcccccgactccctccccagatctgtcctgggggatgcaaataaagcctgctctcccaa

SEQ ID NO: 731582 - DNA, 428 bp, Homo sapiens
cagtggccaccctggtcaggttaccgtgggtggcttgcctgcctccacactggttttattatcccaacttgagggacagctgtccttcgggccacccagcttgagtttcatcaggggccgaaagggcattgagtggtcactgactattgttactgagggtcaccttggtcctgaagggggtgcccacctgtcaccctggccctgagcccagtcgcagtgaggccagctgggtcacgtcagggctttgggggcagggagggaggactgagacctccactctgtggcctggaaatagcctgcctcctccagctccagccttctcacctgtggaatgggttggtttcctcagcagcagctatacctgagtctgagccttgagattccctttcctttctaggtagagcagctgacagaagagcagaaaaatg

SEQ ID NO: 731583 - DNA, 302 bp, Homo sapiens
aagtcaagggccggctggcaaccccagcaagctgtcctgtgagccgccagcatggatgacatctacaaggctgcggtagagcagctgacagaagagcagaaaaatgagttcaaggcagccttcgacatcttcgtgctgggcgctgaggatggctgcatcagcctccaactccagctgagtcctggggttggggagggggtcggggtcccaggacctgagcctggccatgtcctcaaccccaaatcccccgactccctccccagatctgtcctgggggatgcaaataaagcctgctctcccaa

SEQ ID NO: 731584 - DNA, 618 bp, Homo sapiens
aagtcaagggccggctggcaaccccagcaagctgtcctgtgagccgccagcatggatgacatctacaaggctgcggtagagcagctgacagaagagcagaaaaatgagttcaaggcagccttcgacatcttcgtgctgggcgctgaggatggctgcatcagcaccaaggagctgggcaaggtgatgaggatgctgggccagaaccccacccctgaggagctgcaggagatgatcgatgaggtggacgaggacggcagcggcacggtggactttgatgagttcctggtcatgatggttcggtgcatgaaggacgacagcaaagggaaatctgaggaggagctgtctgacctcttccgcatgtttgacaaaaatgctgatggctacatcgacctggatgagctgaagataatgctgcaggctacaggcgagaccatcacggaggacgacatcgaggagctcatgaaggacggagacaagaacaacgacggccgcatcgactatgatgagttcctggagttcatgaagggtgtggagtagatgctgaccttcacccagagctgcctatgcccagctccccagatctgtcctgggggatgcaaataaagcctgctctcccaa

SEQ ID NO: 731585 - DNA, 1797 bp, Homo sapiens
tgttgcatacagatgagttggcagccggtctgagctggcccacagactcataaaatcaacagggcctcgggtaccctcacccagcatatccaaactcttgcatcaaaggtgcagggacttgctcacatcgagaatctggttgctttcttggagaccaagaaaatgagtttttgtttctacatttactccagcaatccatgaggactttataggaattttgcaccattctgaatggatacatttggatttctcaacatttgttcagcttcctaatgactgttgtgacaattgctctataccagtgaatgccaactgtttatctctgctctgaacagatcagggtgttgacagaaagtatgttcaaacatcttcggaaatgggtcgtcactcgcttttttgggcattctcggcaaagagcaaggctagtctccaaagatggaaggtgcaacatagaatttggcaatgtggaggcacagtcaaggtttatattctttgtggacatctggacaacggtacttgacctcaagtggagatacaaaatgaccattttcatcacagccttcttggggagttggtttttctttggtctcctgtggtatgcagtagcgtacattcacaaagacctcccggaattccatccttctgccaatcacactccctgtgtggagaatattaatggcttgacctcagcttttctgttttctctggagactcaagtgaccattggatatggattcaggtgtgtgacagaacagtgtgccactgccatttttctgcttatctttcagtctatacttggagttataatcaattctttcatgtgtggggccatcttagccaagatctccaggcccaaaaaacgtgccaagaccattacgttcagcaagaacgcagtgatcagcaaacggggagggaagctttgcctcctaatccgagtggctaatctcaggaagagccttcttattggcagtcacatttatggaaagcttctgaagaccacagtcactcctgaaggagagaccattattttggaccagatcaatatcaactttgtagttgacgctgggaatgaaaatttattcttcatctccccattgacaatttaccatgtcattgatcacaacagccctttcttccacatggcagcggagacccttctccagcaggactttgaattagtggtgtttttagatggcacagtggagtccaccagtgctacctgccaagtccggacatcctatgtcccagaggaggtgctttggggctaccgttttgctcccatagtatccaagacaaaggaagggaaataccgagtggatttccataactttagcaagacagtggaagtggagacccctcactgtgccatgtgcctttataatgagaaagatgttagagccaggatgaagagaggctatgacaaccccaacttcatcttgtcagaagtcaatgaaacagatgacaccaaaatgtaacagtggcttttcaacgggagtaaagcaaagtctctaaagctcctagtacctagaagcattatgaagcagtcaacaatttaggggtacgaaagtaggatgagagccttcaaagtctaccagcacaaagacccctgagccccgcaattgtgatcccacaagacatgcatctccacaaggctactgtattagaacgtgcaatgcatttatatgaaactggtgtatggaagacataggtgctctcttgaaatcttaaatatgattatttgagctcatataaggtggattggagcagataaaattatcaaaagtttcatgaacaggc

SEQ ID NO: 731586 - DNA, 1664 bp, Homo sapiens
tgttgcatacagatgagttggcagccggtctgagctggcccacagactcataaaatcaacagggcctcgggtaccctcacccagcatatccaaactcttgcatcaaaggtgcagggacttgctcacatcgagaatctggttgctttcttggagaccaagaaaatgagtttttgtttctacatttactccagcaatccatgagatcagggtgttgacagaaagtatgttcaaacatcttcggaaatgggtcgtcactcgcttttttgggcattctcggcaaagagcaaggctagtctccaaagatggaaggtgcaacatagaatttggcaatgtggaggcacagtcaaggtttatattctttgtggacatctggacaacggtacttgacctcaagtggagatacaaaatgaccattttcatcacagccttcttggggagttggtttttctttggtctcctgtggtatgcagtagcgtacattcacaaagacctcccggaattccatccttctgccaatcacactccctgtgtggagaatattaatggcttgacctcagcttttctgttttctctggagactcaagtgaccattggatatggattcaggtgtgtgacagaacagtgtgccactgccatttttctgcttatctttcagtctatacttggagttataatcaattctttcatgtgtggggccatcttagccaagatctccaggcccaaaaaacgtgccaagaccattacgttcagcaagaacgcagtgatcagcaaacggggagggaagctttgcctcctaatccgagtggctaatctcaggaagagccttcttattggcagtcacatttatggaaagcttctgaagaccacagtcactcctgaaggagagaccattattttggaccagatcaatatcaactttgtagttgacgctgggaatgaaaatttattcttcatctccccattgacaatttaccatgtcattgatcacaacagccctttcttccacatggcagcggagacccttctccagcaggactttgaattagtggtgtttttagatggcacagtggagtccaccagtgctacctgccaagtccggacatcctatgtcccagaggaggtgctttggggctaccgttttgctcccatagtatccaagacaaaggaagggaaataccgagtggatttccataactttagcaagacagtggaagtggagacccctcactgtgccatgtgcctttataatgagaaagatgttagagccaggatgaagagaggctatgacaaccccaacttcatcttgtcagaagtcaatgaaacagatgacaccaaaatgtaacagtggcttttcaacgggagtaaagcaaagtctctaaagctcctagtacctagaagcattatgaagcagtcaacaatttaggggtacgaaagtaggatgagagccttcaaagtctaccagcacaaagacccctgagccccgcaattgtgatcccacaagacatgcatctccacaaggctactgtattagaacgtgcaatgcatttatatgaaactggtgtatggaagacataggtgctctcttgaaatcttaaatatgattatttgagctcatataaggtggattggagcagataaaattatcaaaagtttcatgaacaggc

SEQ ID NO: 731587 - DNA, 2543 bp, Homo sapiens
tgttgcatacagatgagttggcagccggtctgagctggcccacagactcataaaatcaacagggcctcgggtaccctcacccagcatatccaaactcttgcatcaaaggtgcagggacttgctcacatcgagaatctggttgctttcttggagaccaagaaaatgagtttttgtttctacatttactccagcaatccatgaggactttataggaattttgcaccattctgaatggatacatttggatttctcaacatttgttcagcttcctaatgactgttgtgacaattgctctataccagtgaatgccaactgtttatctctgctctgaacagatcagggtgttgacagaaagtatgttcaaacatcttcggaaatgggtcgtcactcgcttttttgggcattctcggcaaagagcaaggctagtctccaaagatggaaggtgcaacatagaatttggcaatgtggaggcacagtcaaggtttatattctttgtggacatctggacaacggtacttgacctcaagtggagatacaaaatgaccattttcatcacagccttcttggggagttggtttttctttggtctcctgtggtatgcagtagcgtacattcacaaagacctcccggaattccatccttctgccaatcacactccctgtgtggagaatattaatggcttgacctcagcttttctgttttctctggagactcaagtgaccattggatatggattcaggtgtgtgacagaacagtgtgccactgccatttttctgcttatctttcagtctatacttggagttataatcaattctttcatgtgtggggccatcttagccaagatctccaggcccaaaaaacgtgccaagaccattacgttcagcaagaacgcagtgatcagcaaacggggagggaagctttgcctcctaatccgagtggctaatctcaggaagagccttcttattggcagtcacatttatggaaagcttctgaagaccacagtcactcctgaaggagagaccattattttggaccagatcaatatcaactttgtagttgacgctgggaatgaaaatttattcttcatctccccattgacaatttaccatgtcattgatcacaacagccctttcttccacatggcagcggagacccttctccagcaggactttgaattagtggtgtttttagatggcacagtggagtccaccagtgctacctgccaagtccggacatcctatgtcccagaggaggtgctttggggctaccgttttgctcccatagtatccaagacaaaggaagggaaataccgagtggatttccataactttagcaagacagtggaagtggagacccctcactgtgccatgtgcctttataatgagaaagatgttagagccaggatgaagagaggctatgacaaccccaacttcatcttgtcagaagtcaatgaaacagatgacaccaaaatgtaacagtggcttttcaacgggagtaaagcaaagtctctaaagctcctagtacctagaagcattatgaagcagtcaacaatttaggggtacgaaagtaggatgagagccttcaaagtctaccagcacaaagacccctgagccccgcaattgtgatcccacaagacatgcatctccacaaggctactgtattagaacgtgcaatgcatttatatgaaactggtgtatggaagacataggtgctctcttgaaatcttaaatatgattatttgagctcatataaggtggattggagcagataaaattatcaaaagtttcatgaacaggccaaacaaaatattttttaaagtttccttaaagaagttatgaactttagaaaggatcaggggacaataataatctcattttgattctactgataagaatgactccacttttaatgtggacttttactcatggaaaaattgtctcctaatttggggagatgaaccaaccaatcaatgacaagaaaacgcttacacaaagaacaatttgaggctctaagcttctcatgtggtacgtttagacagaggctaaatctgcacactagaatcttgatgataccttcctgcaagacagaatgctttagttaaaagtggtgatgatatttctttcaatctgtattggatggcttaaagggctataaatctgtttataaagagcatttcctgctcttcgaagacagcaatgaggagttggaaggtgcaaagtcagtagagaagggaatgtatcattaatgcacctgagaagaaacagtttcatgtgttcctccacctagagtttgtactggaatgctatttctaaagaagaagtgggaaagagagaggaatgggatggagccccacagtcagaatgttactatgtctttctttccctgacagcccatcttcctaaaagggaccagcttatggaaggctcgaccttgaggggaaagttttactgtgaaagtcttcttcagatccccacctgcatcattccgaatgtgtcctggaaaaaaactggtactcaaagctgcttaggaatcaaaatgttttc

SEQ ID NO: 731588 - DNA, 2227 bp, Homo sapiens
gaggcactaaagaaaaagtggcagtaatgtaatccgcttgttttgccaagccactaaaaataccttggtaaatattagctaatgtgcagccctttgcttgctattaagatttactgatttcaatagaaaggaacctaaaaactgagcatattatataacccagacaccagggacaatctctaatcacctaagagttcataaaatacatattggctctgtctgtggttagattaaatgccattatctaaaaaaagtaggatctgtgcaataataggtctgccatgtgaatgacagttttggttagtggatgaatttatcctgtatcattgcattctctaagaataatccctctcactctgaacaaataaatcaatagcattggctaacccagtgcatgtaaaaaacaccttcagtaaatgccaggttttcccgaataataaagacttccaacaataaagacttcttttaagtctgtttcttacataactgttgtatggagagattaacatggtatcttgtttcttcctggtgtgatcttacttttgtcttgtaaatatgtacttatgtctgtatgttcacctgtatctttgtgaacccttggaaaactcagtatttcagtgggtttcagagaataggccgggagattgatgataagtaagtgtttccggccagttgttattaggcacaacttttaggagaaacaagtgagcgatagagcgtggccaaggagaggaaggcaatgctggaacccaatccacgcctgctgcccagagaccttagctgatggcttgtcatgtcttagcatgttggtattcaagccatgtgatgttggaaagaaaaaatacctattcagcttggggcttggtctgagaacaaccaattgccttggtttaaatcacacgactccactatcaaattaagtgtttccaagtttacacaaattagcgtcagtccactgactgtcgcctacaataaattaggctgagtctaaaagaaatcagtctgcatagaaagaccaacaaccagcaccacttccttgctttttccagccatgaatgcttccagtcggaatgtgtttgacacgttgatcagggtgttgacagaaagtatgttcaaacatcttcggaaatgggtcgtcactcgcttttttgggcattctcggcaaagagcaaggctagtctccaaagatggaaggtgcaacatagaatttggcaatgtggaggcacagtcaaggtttatattctttgtggacatctggacaacggtacttgacctcaagtggagatacaaaatgaccattttcatcacagccttcttggggagttggtttttctttggtctcctgtggtatgcagtagcgtacattcacaaagacctcccggaattccatccttctgccaatcacactccctgtgtggagaatattaatggcttgacctcagcttttctgttttctctggagactcaagtgaccattggatatggattcaggtgtgtgacagaacagtgtgccactgccatttttctgcttatctttcagtctatacttggagttataatcaattctttcatgtgtggggccatcttagccaagatctccaggcccaaaaaacgtgccaagaccattacgttcagcaagaacgcagtgatcagcaaacggggagggaagctttgcctcctaatccgagtggctaatctcaggaagagccttcttattggcagtcacatttatggaaagcttctgaagaccacagtcactcctgaaggagagaccattattttggaccagatcaatatcaactttgtagttgacgctgggaatgaaaatttattcttcatctccccattgacaatttaccatgtcattgatcacaacagccctttcttccacatggcagcggagacccttctccagcaggactttgaattagtggtgtttttagatggcacagtggagtccaccagtgctacctgccaagtccggacatcctatgtcccagaggaggtgctttggggctaccgttttgctcccatagtatccaagacaaaggaagggaaataccgagtggatttccataactttagcaagacagtggaagtggagacccctcactgtgccatgtgcctttataatgagaaagatgttagagccaggatgaagagaggctatgacaaccccaacttcatcttgtcagaagtcaatgaaacagatgacaccaaaatgtaa

SEQ ID NO: 731589 - DNA, 867 bp, Homo sapiens
tgttgcatacagatgagttggcagccggtctgagctggcccacagactcataaaatcaacagggcctcgggtaccctcacccagcatatccaaactcttgcatcaaaggtgcagggacttgctcacatcgagaatctggttgctttcttggagaccaagaaaatgagtttttgtttctacatttactccagcaatccatgaggtttcttctctactgtgccttcatccccatcctgggccctgacaaagacagtgtgacaagttctgagccccacaggtggaatcccaaaccaagcagctcttgctggtcaccccaagatctacttatacatgaagttttgaaaatcatctcctgaacctcttctgacagagatcagggtgttgacagaaagtatgttcaaacatcttcggaaatgggtcgtcactcgcttttttgggcattctcggcaaagagcaaggctagtctccaaagatggaaggtgcaacatagaatttggcaatgtggaggcacagtcaaggtttatattctttgtggacatctggacaacggtacttgacctcaagtggagatacaaaatgaccattttcatcacagccttcttggggagttggtttttctttggtctcctgtggtatgcagtagcgtacattcacaaagacctcccggaattccatccttctgccaatcacactccctgtgtggagaatattaatggcttgacctcagcttttctgttttctctggagactcaagtgaccattggatatggattcaggtgtgtgacagaacagtgtgccactgccatttttctgcttatctttcagtctatacttggagttataatcaattctttcatgtgtggggcc

SEQ ID NO: 731590 - DNA, 1000 bp, Homo sapiens
tgttgcatacagatgagttggcagccggtctgagctggcccacagactcataaaatcaacagggcctcgggtaccctcacccagcatatccaaactcttgcatcaaaggtgcagggacttgctcacatcgagaatctggttgctttcttggagaccaagaaaatgagtttttgtttctacatttactccagcaatccatgaggactttataggaattttgcaccattctgaatggatacatttggatttctcaacatttgttcagcttcctaatgactgttgtgacaattgctctataccagtgaatgccaactgtttatctctgctctgaacaggtttcttctctactgtgccttcatccccatcctgggccctgacaaagacagtgtgacaagttctgagccccacaggtggaatcccaaaccaagcagctcttgctggtcaccccaagatctacttatacatgaagttttgaaaatcatctcctgaacctcttctgacagagatcagggtgttgacagaaagtatgttcaaacatcttcggaaatgggtcgtcactcgcttttttgggcattctcggcaaagagcaaggctagtctccaaagatggaaggtgcaacatagaatttggcaatgtggaggcacagtcaaggtttatattctttgtggacatctggacaacggtacttgacctcaagtggagatacaaaatgaccattttcatcacagccttcttggggagttggtttttctttggtctcctgtggtatgcagtagcgtacattcacaaagacctcccggaattccatccttctgccaatcacactccctgtgtggagaatattaatggcttgacctcagcttttctgttttctctggagactcaagtgaccattggatatggattcaggtgtgtgacagaacagtgtgccactgccatttttctgcttatctttcagtctatacttggagttataatcaattctttcatgtgtggggcc

SEQ ID NO: 731591 - DNA, 3346 bp, Homo sapiens
gaggcactaaagaaaaagtggcagtaatgtaatccgcttgttttgccaagccactaaaaataccttggtaaatattagctaatgtgcagccctttgcttgctattaagatttactgatttcaatagaaaggaacctaaaaactgagcatattatataacccagacaccagggacaatctctaatcacctaagagttcataaaatacatattggctctgtctgtggttagattaaatgccattatctaaaaaaagtaggatctgtgcaataataggtctgccatgtgaatgacagttttggttagtggatgaatttatcctgtatcattgcattctctaagaataatccctctcactctgaacaaataaatcaatagcattggctaacccagtgcatgtaaaaaacaccttcagtaaatgccaggttttcccgaataataaagacttccaacaataaagacttcttttaagtctgtttcttacataactgttgtatggagagattaacatggtatcttgtttcttcctggtgtgatcttacttttgtcttgtaaatatgtacttatgtctgtatgttcacctgtatctttgtgaacccttggaaaactcagtatttcagtgggtttcagagaataggccgggagattgatgataagtaagtgtttccggccagttgttattaggcacaacttttaggagaaacaagtgagcgatagagcgtggccaaggagaggaaggcaatgctggaacccaatccacgcctgctgcccagagaccttagctgatggcttgtcatgtcttagcatgttggtattcaagccatgtgatgttggaaagaaaaaatacctattcagcttggggcttggtctgagaacaaccaattgccttggtttaaatcacacgactccactatcaaattaagtgtttccaagtttacacaaattagcgtcagtccactgactgtcgcctacaataaattaggctgagtctaaaagaaatcagtctgcatagaaagaccaacaaccagcaccacttccttgctttttccagccatgaatgcttccagtcggaatgtgtttgacacgttgatcagggtgttgacagaaagtatgttcaaacatcttcggaaatgggtcgtcactcgcttttttgggcattctcggcaaagagcaaggctagtctccaaagatggaaggtgcaacatagaatttggcaatgtggaggcacagtcaaggtttatattctttgtggacatctggacaacggtacttgacctcaagtggagatacaaaatgaccattttcatcacagccttcttggggagttggtttttctttggtctcctgtggtatgcagtagcgtacattcacaaagacctcccggaattccatccttctgccaatcacactccctgtgtggagaatattaatggcttgacctcagcttttctgttttctctggagactcaagtgaccattggatatggattcaggtgtgtgacagaacagtgtgccactgccatttttctgcttatctttcagtctatacttggagttataatcaattctttcatgtgtggggccatcttagccaagatctccaggcccaaaaaacgtgccaagaccattacgttcagcaagaacgcagtgatcagcaaacggggagggaagctttgcctcctaatccgagtggctaatctcaggaagagccttcttattggcagtcacatttatggaaagcttctgaagaccacagtcactcctgaaggagagaccattattttggaccagatcaatatcaactttgtagttgacgctgggaatgaaaatttattcttcatctccccattgacaatttaccatgtcattgatcacaacagccctttcttccacatggcagcggagacccttctccagcaggactttgaattagtggtgtttttagatggcacagtggagtccaccagtgctacctgccaagtccggacatcctatgtcccagaggaggtgctttggggctaccgttttgctcccatagtatccaagacaaaggaagggaaataccgagtggatttccataactttagcaagacagtggaagtggagacccctcactgtgccatgtgcctttataatgagaaagatgttagagccaggatgaagagaggctatgacaaccccaacttcatcttgtcagaagtcaatgaaacagatgacaccaaaatgtaacagtggcttttcaacgggagtaaagcaaagtctctaaagctcctagtacctagaagcattatgaagcagtcaacaatttaggggtacgaaagtaggatgagagccttcaaagtctaccagcacaaagacccctgagccccgcaattgtgatcccacaagacatgcatctccacaaggctactgtattagaacgtgcaatgcatttatatgaaactggtgtatggaagacataggtgctctcttgaaatcttaaatatgattatttgagctcatataaggtggattggagcagataaaattatcaaaagtttcatgaacaggccaaacaaaatattttttaaagtttccttaaagaagttatgaactttagaaaggatcaggggacaataataatctcattttgattctactgataagaatgactccacttttaatgtggacttttactcatggaaaaattgtctcctaatttggggagatgaaccaaccaatcaatgacaagaaaacgcttacacaaagaacaatttgaggctctaagcttctcatgtggtacgtttagacagaggctaaatctgcacactagaatcttgatgataccttcctgcaagacagaatgctttagttaaaagtggtgatgatatttctttcaatctgtattggatggcttaaagggctataaatctgtttataaagagcatttcctgctcttcgaagacagcaatgaggagttggaaggtgcaaagtcagtagagaagggaatgtatcattaatgcacctgagaagaaacagtttcatgtgttcctccacctagagtttgtactggaatgctatttctaaagaagaagtgggaaagagagaggaatgggatggagccccacagtcagaatgttactatgtctttctttccctgacagcccatcttcctaaaagggaccagcttatggaaggctcgaccttgaggggaaagttttactgtgaaagtcttcttcagatccccacctgcatcattccgaatgtgtcctggaaaaaaactggtactcaaagctgcttaggaatcaaaatgttttcagtgtgttgattaatatagtaaatttctgaaactgtgaaaaaaaaaaagat

SEQ ID NO: 731592 - DNA, 751 bp, Homo sapiens; identical to SEQ ID NO: 384346
  misc_feature (46)..(48): n is a, c, g, or t

SEQ ID NO: 731593 - DNA, 1630 bp, Homo sapiens
  misc_feature (46)..(48): n is a, c, g, or t
ccgtcagaaatctaaacccgtgactatcatgggactcaaaaccagnnnaaaaaataagtcaaagacgattaagagccagagaagcagtcttcatacacgcggccagccagcagacagaggactctcattaaggaaggtgtcctgtgccctgaccctacaagatgccaagagaagatgctcacttcatctatggttaccccaagaaggggcacggccactcttacaccacggctgaagaggccgctgggatcggcatcctgacagtgatcctgggagtcttactgctcatcggctgttggtattgtagaagacgaaatggatacagagccttgatggataaaagtcttcatgttggcactcaatgtgccttaacaagaagatgcccacaagaagggtttgatcatcgggacagcaaagtgtctcttcaagagaaaaactgtgaacctgtggttcccaatgctccacctgcttatgagaaactctctgcagaacagtcaccaccaccttattcaccttaagagccagcgagacacctgagacatgctgaaattatttctctcacacttttgcttgaatttaatacagacatctaatgttctcctttggaatggtgtaggaaaaatgcaagccatctctaataataagtcagtgttaaaattttagtaggtccgctagcagtactaatcatgtgaggaaatgatgagaaatattaaattgggaaaactccatcaataaatgttgcaatgcatgatactatctgtgccagaggtaatgttagtaaatccatggtgttattttctgagagacagaattcaagtgggtattctggggccatccaatttctctttacttgaaatttggctaataacaaactagtcaggttttcgaaccttgaccgacatgaactgtacacagaattgttccagtactatggagtgctcacaaaggatacttttacaggttaagacaaagggttgactggcctatttatctgatcaagaacatgtcagcaatgtctctttgtgctctaaaattctattatactacaataatatattgtaaagatcctatagctctttttttttgagatggagtttcgcttttgttgcccaggctggagtgcaatggcgcgatcttggctcaccataacctccgcctcccaggttcaagcaattctcctgccttagcctcctgagtagctgggattacaggcgtgcgccactatgcctgactaattttgtagttttagtagagacggggtttctccatgttggtcaggctggtctcaaactcctgacctcaggtgatctgcccgcctcagcctcccaaagtgctggaattacaggcgtgagccaccacgcctggctggatcctatatcttaggtaagacatataacgcagtctaattacatttcacttcaaggctcaatgctattctaactaatgacaagtattttctactaaaccagaaattggtagaaggatttaaataagtaaaagctactatgtactgccttagtgctgatgcctgtgtactgccttaaatgtacctatggcaatttagctctcttgggttcccaaatccctctcacaagaatgtgcagaagaaatcataaaggatcagagattc

SEQ ID NO: 731594 - DNA, 909 bp, Homo sapiens
  misc_feature (46)..(48): n is a, c, g, or t
ccgtcagaaatctaaacccgtgactatcatgggactcaaaaccagnnnaaaaaataagtcaaagacgattaagagccagagaagcagtcttcatacacgcggccagccagcagacagaggactctcattaaggaaggtgtcctgtgccctgaccctacaagatgccaagagaagatgctcacttcatctatggttaccccaagaaggggcacggccactcttacaccacggctgaagaggccgctgggatcggcatcctgacagtgatcctgggagtcttactgctcatcggctgttggtattgtagaagacgaaatggatacagagccttgatggataaaagtcttcatgttggcactcaatgtgccttaacaagaagatgcccacaagaagggtttgatcatcgggacagcaaagtgtctcttcaagagaaaaactgtgaacctgtggttcccaatgctccacctgcttatgagaaactctctgcagaacagtcaccaccaccttattcaccttaagagccagcgagacacctgagacatgctgaaattatttctctcacacttttgcttgaatttaatacagacatctaatgttctcctttggaatggtgtaggaaaaatgcaagccatctctaataataagtcagtgttaaaattttagtaggtccgctagcagtactaatcatgtgaggaaatgatgagaaatattaaattgggaaaactccatcaataaatgttgcaatgcagcacaaaaaaaacgaaaaaaaaatctttgggccgccggcccggaaagttttaaccatttttgggggcggccccagtaaaaacgggcacggtccaaaccgcggaggggttccaaaaaccgggacgggtgaaaccccggcggctggtccaggccctcacccgg

SEQ ID NO: 731595 - DNA, 645 bp, Homo sapiens; identical to SEQ ID NO: 384344
  misc_feature (46)..(48): n is a, c, g, or t

SEQ ID NO: 731596 - DNA, 2222 bp, Homo sapiens
gtaagagcgttgccttctcgccataatcatagtcctcttctcccagaataggatttgggaaattctggctaagtcctctgcctaccctcattgccccgctgatgtgtgacatcaacagaatttctccgcaacgtttgtcagtctccaacctcagagggctcacaaagcctcctcctgaatcctctctcagtcctccaacactaccaagaagaaaagcaattattcaggatggcatcttgctggggagaagcagcctccctgaggtagatgtgttctcctgtcacttaaagaaccacttctcctggtctgagtagtaagaggcgcatttgctgttgctgcaccatttgccaaggctctgagtttgaggtgtcctgtgccctgaccctacaagatgccaagagaagatgctcacttcatctatggttaccccaagaaggggcacggccactcttacaccacggctgaagaggccgctgggatcggcatcctgacagtgatcctgggagtcttactgctcatcggctgttggtattgtagaagacgaaatggatacagagccttgatggataaaagtcttcatgttggcactcaatgtgccttaacaagaagatgcccacaagaagggtttgatcatcgggacagcaaagtgtctcttcaagagaaaaactgtgaacctgtggttcccaatgctccacctgcttatgagaaactctctgcagaacagtcaccaccaccttattcaccttaagagccagcgagacacctgagacatgctgaaattatttctctcacacttttgcttgaatttaatacagacatctaatgttctcctttggaatggtgtaggaaaaatgcaagccatctctaataataagtcagtgttaaaattttagtaggtccgctagcagtactaatcatgtgaggaaatgatgagaaatattaaattgggaaaactccatcaataaatgttgcaatgcatgatactatctgtgccagaggtaatgttagtaaatccatggtgttattttctgagagacagaattcaagtgggtattctggggccatccaatttctctttacttgaaatttggctaataacaaactagtcaggttttcgaaccttgaccgacatgaactgtacacagaattgttccagtactatggagtgctcacaaaggatacttttacaggttaagacaaagggttgactggcctatttatctgatcaagaacatgtcagcaatgtctctttgtgctctaaaattctattatactacaataatatattgtaaagatcctatagctctttttttttgagatggagtttcgcttttgttgcccaggctggagtgcaatggcgcgatcttggctcaccataacctccgcctcccaggttcaagcaattctcctgccttagcctcctgagtagctgggattacaggcgtgcgccactatgcctgactaattttgtagttttagtagagacggggtttctccatgttggtcaggctggtctcaaactcctgacctcaggtgatctgcccgcctcagcctcccaaagtgctggaattacaggcgtgagccaccacgcctggctggatcctatatcttaggtaagacatataacgcagtctaattacatttcacttcaaggctcaatgctattctaactaatgacaagtattttctactaaaccagaaattggtagaaggatttaaataagtaaaagctactatgtactgccttagtgctgatgcctgtgtactgccttaaatgtacctatggcaatttagctctcttgggttcccaaatccctctcacaagaatgtgcagaagaaatcataaaggatcagagattctggaatggtgtcattatttgcatagcaacattgcaatttgttttcctttggctacatcaacgtatcacctacactattatttatctaatatttctctttcaggcagctcatttaaactttttttggctttaattcctattgccatcctgagtggaaaaccagtatcattttccatagtagaggataactataacaacgaagataatgaaagtaatttttttaacctaagaaaatactaatggtcacagaaggctatgaacctgagacctgctctctttgtcaaacagagattaacaaggatcagagaaaagttaaaggctgtctttgacataactggaaggcttacaagagttttaaagaaa

SEQ ID NO: 731597 - DNA, 1860 bp, Homo sapiens
gtaagagcgttgccttctcgccataatcatagtcctcttctcccagaataggatttgggaaattctggctaagtcctctgcctaccctcattgccccgctgatgtgtgacatcaacagaatttctccgcaacgtttgtcagtctccaacctcagagggctcacaaagcctcctcctgaatcctctctcagtcctccaacactaccaagaagaaaagcaattattcaggatggcatcttgctggggagaagcagcctccctgaggtagatgtgttctcctgtcacttaaagaaccacttctcctggtctgagtagtaagaggcgcatttgctgttgctgcaccatttgccaaggctctgagtttgaggtgtcctgtgccctgaccctacaagatgccaagagaagatgctcacttcatctatggttaccccaagaaggggcacggccactcttacaccacggctgaagaggccgctgggatcggcatcctgacagtgatcctgggagtcttactgctcatcggctgttggtattgtagaagacgaaatggatacagagccttgatggataaaagtcttcatgttggcactcaatgtgccttaacaagaagatgcccacaagaagggtttgatcatcgggacagcaaagtgtctcttcaagagaaaaactgtgaacctgtggttcccaatgctccacctgcttatgagaaactctctgcagaacagtcaccaccaccttattcaccttaagagccagcgagacacctgagacatgctgaaattatttctctcacacttttgcttgaatttaatacagacatctaatgttctcctttggaatggtgtaggaaaaatgcaagccatctctaataataagtcagtgttaaaattttagtaggtccgctagcagtactaatcatgtgaggaaatgatgagaaatattaaattgggaaaactccatcaataaatgttgcaatgcatgatactatctgtgccagaggtaatgttagtaaatccatggtgttattttctgagagacagaattcaagtgggtattctggggccatccaatttctctttacttgaaatttggctaataacaaactagtcaggttttcgaaccttgaccgacatgaactgtacacagaattgttccagtactatggagtgctcacaaaggatacttttacaggttaagacaaagggttgactggcctatttatctgatcaagaacatgtcagcaatgtctctttgtgctctaaaattctattatactacaataatatattgtaaagatcctatagctctttttttttgagatggagtttcgcttttgttgcccaggctggagtgcaatggcgcgatcttggctcaccataacctccgcctcccaggttcaagcaattctcctgccttagcctcctgagtagctgggattacaggcgtgcgccactatgcctgactaattttgtagttttagtagagacggggtttctccatgttggtcaggctggtctcaaactcctgacctcaggtgatctgcccgcctcagcctcccaaagtgctggaattacaggcgtgagccaccacgcctggctggatcctatatcttaggtaagacatataacgcagtctaattacatttcacttcaaggctcaatgctattctaactaatgacaagtattttctactaaaccagaaattggtagaaggatttaaataagtaaaagctactatgtactgccttagtgctgatgcctgtgtactgccttaaatgtacctatggcaatttagctctcttgggttcccaaatccctctcacaagaatgtgcagaagaaatcataaaggatcagagattc

SEQ ID NO: 731598 - DNA, 1992 bp, Homo sapiens
  misc_feature (46)..(48): n is a, c, g, or t
ccgtcagaaatctaaacccgtgactatcatgggactcaaaaccagnnnaaaaaataagtcaaagacgattaagagccagagaagcagtcttcatacacgcggccagccagcagacagaggactctcattaaggaaggtgtcctgtgccctgaccctacaagatgccaagagaagatgctcacttcatctatggttaccccaagaaggggcacggccactcttacaccacggctgaagaggccgctgggatcggcatcctgacagtgatcctgggagtcttactgctcatcggctgttggtattgtagaagacgaaatggatacagagccttgatggataaaagtcttcatgttggcactcaatgtgccttaacaagaagatgcccacaagaagggtttgatcatcgggacagcaaagtgtctcttcaagagaaaaactgtgaacctgtggttcccaatgctccacctgcttatgagaaactctctgcagaacagtcaccaccaccttattcaccttaagagccagcgagacacctgagacatgctgaaattatttctctcacacttttgcttgaatttaatacagacatctaatgttctcctttggaatggtgtaggaaaaatgcaagccatctctaataataagtcagtgttaaaattttagtaggtccgctagcagtactaatcatgtgaggaaatgatgagaaatattaaattgggaaaactccatcaataaatgttgcaatgcatgatactatctgtgccagaggtaatgttagtaaatccatggtgttattttctgagagacagaattcaagtgggtattctggggccatccaatttctctttacttgaaatttggctaataacaaactagtcaggttttcgaaccttgaccgacatgaactgtacacagaattgttccagtactatggagtgctcacaaaggatacttttacaggttaagacaaagggttgactggcctatttatctgatcaagaacatgtcagcaatgtctctttgtgctctaaaattctattatactacaataatatattgtaaagatcctatagctctttttttttgagatggagtttcgcttttgttgcccaggctggagtgcaatggcgcgatcttggctcaccataacctccgcctcccaggttcaagcaattctcctgccttagcctcctgagtagctgggattacaggcgtgcgccactatgcctgactaattttgtagttttagtagagacggggtttctccatgttggtcaggctggtctcaaactcctgacctcaggtgatctgcccgcctcagcctcccaaagtgctggaattacaggcgtgagccaccacgcctggctggatcctatatcttaggtaagacatataacgcagtctaattacatttcacttcaaggctcaatgctattctaactaatgacaagtattttctactaaaccagaaattggtagaaggatttaaataagtaaaagctactatgtactgccttagtgctgatgcctgtgtactgccttaaatgtacctatggcaatttagctctcttgggttcccaaatccctctcacaagaatgtgcagaagaaatcataaaggatcagagattctggaatggtgtcattatttgcatagcaacattgcaatttgttttcctttggctacatcaacgtatcacctacactattatttatctaatatttctctttcaggcagctcatttaaactttttttggctttaattcctattgccatcctgagtggaaaaccagtatcattttccatagtagaggataactataacaacgaagataatgaaagtaatttttttaacctaagaaaatactaatggtcacagaaggctatgaacctgagacctgctctctttgtcaaacagagattaacaaggatcagagaaaagttaaaggctgtctttgacataactggaaggcttacaagagttttaaagaaa

SEQ ID NO: 731599 - DNA, 1478 bp, Homo sapiens; identical to SEQ ID NO: 637764
  misc_feature (132)..(132): n is a, c, g, or t
  misc_feature (846)..(846): n is a, c, g, or t
  misc_feature (866)..(866): n is a, c, g, or t
  misc_feature (870)..(870): n is a, c, g, or t
  misc_feature (885)..(885): n is a, c, g, or t
  misc_feature (888)..(888): n is a, c, g, or t
  misc_feature (915)..(915): n is a, c, g, or t

SEQ ID NO: 731600 - DNA, 6029 bp, Homo sapiens
  misc_feature (195)..(195): n is a, c, g, or t
  misc_feature (586)..(586): n is a, c, g, or t
  misc_feature (816)..(816): n is a, c, g, or t
  misc_feature (1099)..(1099): n is a, c, g, or t
  misc_feature (1327)..(1327): n is a, c, g, or t
  misc_feature (2495)..(2495): n is a, c, g, or t
  misc_feature (2499)..(2499): n is a, c, g, or t
  misc_feature (2560)..(2560): n is a, c, g, or t
  misc_feature (2651)..(2651): n is a, c, g, or t
  misc_feature (2828)..(2828): n is a, c, g, or t
  misc_feature (2844)..(2844): n is a, c, g, or t
  misc_feature (2955)..(2955): n is a, c, g, or t
  misc_feature (2978)..(2978): n is a, c, g, or t
  misc_feature (5341)..(5341): n is a, c, g, or t
ctcagaggctgctgagggacagggcactcttccccgccgtccacacaatgagtgttggccggaggaagctggccctgctctgggccctggctctcgctctggcctgcacccggcatacagccatgcccaggatggctcctccgaatccagctacaagcaccaccctgccctctctcctatcgcccgggggcccancggggtcccgctccgtggggcgactgtcttcccatctctgaggaccatccctgtggtacgagcctccaacccggcgcacaacgggcgggtgtgcagcacctggggcagcttccactacaagaccttcgacggcgacgtcttccgcttccccggcctctgcaactacgtgttctccgagcactgcggtgccgcctacgaggattttaacatccagctacgccgcagccaggagtcagcggcccccacgctgagcagggtcctcatgaaggtggatggcgtggtcatccagctgaccaagggctccgtcctggtcaacggccacccggtcctgctgcccttcagccagtctggggtcctcattcagcagagcagcagctacaccaaggtggangccaggctgggccttgtcctcatgtggaaccacgatgacagcctgctgctggagctggacaccaaatacgccaacaagacctgtgggctctgtggggacttcaacgggatgcccgtggtcagcgagctcctctcccacaacaccaagctgacacccatggaattcgggaacctgcagaagatggacgaccccacggagcagtgtcaggaccctgtccctgaacccccgangaactgctccactggctttggcatctgtgaggagctcctgcacggccagctgttctctggctgcgtggccctggtggacgtcggcagctacctggaggcttgcaggcaagacctctgcttctgtgaagacaccgacctgctcagctgcgtctgccacacccttgccgagtactcccggcagtgcacccatgcaggggggttgccccaggactggcggggccctgacttctgcccccagaagtgccccaacaacatgcagtaccacgagtgccgctccccctgngcagacacctgctccaaccaggagcactcccgggcctgtgaggaccactgtgtggccggctgcttctgccctgaggggacggtgcttgacgacatcggccagaccggctgtgtccctgtgtcaaagtgtgcctgcgtctacaacggggctgcctatgccccaggggccacctactccacagactgcaccaactgcacctgctccggaggccggtggagctgccaggangttccatgcccgggtacctgctctgtgcttggaggtgcccacttctcaacgtttgacgggaagcaatacacggtgcacggcgactgcagctatgtgctgaccaagccctgtgacagcagtgccttcactgtactggctgagctgcgcaggtgcgggctgacggacagcgagacctgcctgaagagcgtgacactgagcctggatggggcgcagacggtggtggtgatcaaggccagtggggaagtgttcctgaaccagatctacacccagctgcccatctctgcagccaacgtcaccatcttcagaccctcaaccttcttcatcatcgcccagaccagcctgggcctgcagctgaacctgcagctggtgcccaccatgcagctgttcatgcagctggcgcccaagctccgtgggcagacctgcggtctctgtgggaacttcaacagcatccaggccgatgacttccggaccctcagtggggtggtggaggccaccgctgcggccttcttcaacaccttcaagacccaggccgcctgccccaacatcaggaacagcttcgaggacccctgctctctgagcgtggagaatgagaagtatgctcagcactggtgctcgcagctgaccgatgccgacggccccttcggccggtgccatgctgccgtgaagccgggaacctactactcgaactgcatgtttgacacctgcaactgtgagcggagcgaggactgcctgtgcgccgcgctgtcctcctacgtgcacgcctgtgccgccaagggcgtgcagctcggcggctggagggacggcgtctgcacgaagcctatgaccacttgccccaagtcaatgacgtaccactaccatgtcagcacctgccagcccacctgccgctccctgagcgagggggacatcacctgcagtgttggcttcatccccgtggatggctgcatctgtcccaagggcaccttcctggacgacacgggcaagtgtgtgcaggccagcaactgtccctgctaccacagaggctccatgatccccaatggggagtcggtgcacgacagcggggctatctgcacctgcacacatgggaagctgagctgcatcggaggccaagcccccgccccagtgtgtgctgcgcccatggtgttctttgactgccgaaatgccacgcccngggncacaggggctggctgtcagaagagctgccacacactggacatgacctgttacagcccccantgtgtgcctggctgcgtgtgccccgacgggctggtggcggacggcgagggcggctgcatcactgcggaggactgcccctgcgtgcacaatnaggccagctaccgggccggccagaccatccgggtgggctgcaacacctgcacctgtgacagcaggatgtggcggtgcacagatgacccctgcctggccacctgcgccgtgtacggggacggccactacctcaccttcgacggacagagctacagcttcaacggagactgcgagtacncgctggtgcagaaccnctgtggcgggaaagacagcacccaggactcctttcgtgttgtcaccgagaacgtcccctgcggcaccacagggaccacctgctccaaggccatcaagattttcctgggggncttcgagctgaagctaagccatnggaaggtggaggtgatcgggacggacgagagccaggaggtgccatacaccatccggcagatgggcatctacctggtggtggacaccgacattggcctggtgctgctgtgggacaagaagaccagcatcttcatcaacctcagccccgagttcaagggcagggtctgcggcctgtgtgggaacttcgacgacatcgccgttaatgactttgccacgcggagccggtctgtggtgggggacgtgctggagtttgggaacagctggaagctctccccctcctgcccagatgccctggcgcccaaggacccctgcacggccaaccccttccgcaagtcctgggcccagaagcagtgcagcatcctccacggccccaccttcgccgcctgccacgcacacgtggagccggccaggtactacgaggcctgcgtgaacgacgcgtgcgcctgcgactccgggggtgactgcgagtgcttctgcacggctgtggcccgctacgcccaggcctgccatgaagtaggcacctgtgtgtgtctgcggaccccaagcatctgccctctgttctgcgactactacaaccccgaaggccagtgcgagtggcactaccagccctgcggggtgccctgcctgcgcacctgccggaacccccgtggagactgcctgcgggacgtccggggcctggaaggctgctaccccaagtgcccaccagaggctcccatctttgatgaggacaagatgcagtgtgtggccacctgcccaaccccgcctctgccaccacggtgccacgtccatgggaagtcctaccggccaggtgcagtggtgccctcggacaagaactgccagtcctgcctttgtacggagcgcggcgtggagtgcacctacaaagctgaggcctgtgtctgcacctacaatggacagcgcttccacccaggggacgtcatctaccacacgacggatggcacgggtggctgcatctccgcccgctgcggggccaacggcaccattgagaggagggtctacccctgcagccccaccacccctgtccccccaaccaccttctccttctccacacccccgcttgtcgtgagctccacgcacacccccagcaatggcccaagcagcgcgcacacaggccctccgagcagcgcctggcccaccacagcaggcacttctcccaggacgaggctgcccacagcctctgcctcgctgccgccggtctgtggggaaaagtgcctgtggtcgccatggatggatgtcagccgccctggacggggcacggacagcggtgacttcgacacactggagaacctccgcgcccatgggtaccgggtgtgcgaatcacccaggtcggtggagtgccgagccgaggacgcccccggagtgccgctccgagccctggggcagcgtgtgcagtgcagcccggatgtggggctgacctgtcgtaacagggagcaggcatcggggctctgctacaactaccagatcagggtccagtgctgcacgcccctagcctgctccacctctagcagtccagcccagaccactcctccaactacctccaagaccactgaaacccgggcctcaggctcctcagctcccagcagcacacctggcaccgtgtctctctctacagccaggacgacacctgccccaggtaccgctacctctgtcaaaaaaactttctcaactcccagccctccgccagtgccggcaacatcaacatcatccatgtcgaccacggccccggggacctctgtggtctccagcaagcccacccccacggagcccagcacatcctcctgcctgcaggagctttgcacctggaccgagtggatcgatggcagctaccctgctcctggaataaatggtggagattttgacacatttcaaaatttgagagacgaaggatacacattctgtgaaagtcctcgaagcgtgcagtgccgggcagagagcttccccaacacgccgctggcagacctggggcaggacgtcatctgcagccacacagaggggctgatttgcctgaacaagaaccagctcccacccatctgctacaactatgagatccgcatccagtgttgcgagacggtgaacgtgtgcagagacatcaccagactgccaaagaccgtcgcaacgacacggccgactccacatccaaccggagctcagacccagaccaccttcaccacacacatgccctcggcctccacagagcaacccacggcaacctccaggggtgggcccacagcaaccagcgtcacacagggcacccacaccacaccagtcaccagaaactgtcatccccggtgcacctggacaaagtggttcgacgtggacttcccgtcccccggaccccatggtggngacaaggaaacctacaacaacatcatcaggagtggggaaaaaatctgccgccgtactgaggagatcaccaggctccagtgccgagccgagagccacccggaggtgagcatcgaacacctgggccaggtggtgcagtgcagccgggaagagggcctggtgtgccggaaccaggaccagcagggacccttcaagatgtgcctcaactacgaggtgcgtgtgctctgctgcgagacccccaaaggctgccccgtgacctccacacctgtgacagctcctagcacccctagtgggagagccaccagcccaactcagagcacctcctcttggcagaaatccaggacaaccactttggtgacaaccagcacaacctccactccacagaccagcacaacctctgcccctacaaccagcacaatccctgcttctacacccagcacaacctctgcccctacaaccagcacaacctctgctcctacaaccagcatatcctctgcccctacaagcagcacaacctcggctcctacaagcagcacaatctctgctcgtacaaccagcataatctctgcccctacaaccagcacaacctctttccctacaaccagcacaacctctgctactacaaccagcacaacctctgcccctacaagcagcacaacctccactccacagaccagcaaaacctcagctg

SEQ ID NO: 731601 - DNA, 9415 bp, Homo sapiens
  misc_feature (195)..(195): n is a, c, g, or t
  misc_feature (586)..(586): n is a, c, g, or t
  misc_feature (816)..(816): n is a, c, g, or t
  misc_feature (1099)..(1099): n is a, c, g, or t
  misc_feature (1327)..(1327): n is a, c, g, or t
  misc_feature (2495)..(2495): n is a, c, g, or t
  misc_feature (2499)..(2499): n is a, c, g, or t
  misc_feature (2560)..(2560): n is a, c, g, or t
  misc_feature (2651)..(2651): n is a, c, g, or t
  misc_feature (2828)..(2828): n is a, c, g, or t
  misc_feature (2844)..(2844): n is a, c, g, or t
  misc_feature (2955)..(2955): n is a, c, g, or t
  misc_feature (2978)..(2978): n is a, c, g, or t
  misc_feature (5341)..(5341): n is a, c, g, or t
  misc_feature (5765)..(5765): n is a, c, g, or t
  misc_feature (5785)..(5785): n is a, c, g, or t
  misc_feature (5789)..(5789): n is a, c, g, or t
  misc_feature (5804)..(5804): n is a, c, g, or t
  misc_feature (5807)..(5807): n is a, c, g, or t
  misc_feature (5834)..(5834): n is a, c, g, or t
ctcagaggctgctgagggacagggcactcttccccgccgtccacacaatgagtgttggccggaggaagctggccctgctctgggccctggctctcgctctggcctgcacccggcatacagccatgcccaggatggctcctccgaatccagctacaagcaccaccctgccctctctcctatcgcccgggggcccancggggtcccgctccgtggggcgactgtcttcccatctctgaggaccatccctgtggtacgagcctccaacccggcgcacaacgggcgggtgtgcagcacctggggcagcttccactacaagaccttcgacggcgacgtcttccgcttccccggcctctgcaactacgtgttctccgagcactgcggtgccgcctacgaggattttaacatccagctacgccgcagccaggagtcagcggcccccacgctgagcagggtcctcatgaaggtggatggcgtggtcatccagctgaccaagggctccgtcctggtcaacggccacccggtcctgctgcccttcagccagtctggggtcctcattcagcagagcagcagctacaccaaggtggangccaggctgggccttgtcctcatgtggaaccacgatgacagcctgctgctggagctggacaccaaatacgccaacaagacctgtgggctctgtggggacttcaacgggatgcccgtggtcagcgagctcctctcccacaacaccaagctgacacccatggaattcgggaacctgcagaagatggacgaccccacggagcagtgtcaggaccctgtccctgaacccccgangaactgctccactggctttggcatctgtgaggagctcctgcacggccagctgttctctggctgcgtggccctggtggacgtcggcagctacctggaggcttgcaggcaagacctctgcttctgtgaagacaccgacctgctcagctgcgtctgccacacccttgccgagtactcccggcagtgcacccatgcaggggggttgccccaggactggcggggccctgacttctgcccccagaagtgccccaacaacatgcagtaccacgagtgccgctccccctgngcagacacctgctccaaccaggagcactcccgggcctgtgaggaccactgtgtggccggctgcttctgccctgaggggacggtgcttgacgacatcggccagaccggctgtgtccctgtgtcaaagtgtgcctgcgtctacaacggggctgcctatgccccaggggccacctactccacagactgcaccaactgcacctgctccggaggccggtggagctgccaggangttccatgcccgggtacctgctctgtgcttggaggtgcccacttctcaacgtttgacgggaagcaatacacggtgcacggcgactgcagctatgtgctgaccaagccctgtgacagcagtgccttcactgtactggctgagctgcgcaggtgcgggctgacggacagcgagacctgcctgaagagcgtgacactgagcctggatggggcgcagacggtggtggtgatcaaggccagtggggaagtgttcctgaaccagatctacacccagctgcccatctctgcagccaacgtcaccatcttcagaccctcaaccttcttcatcatcgcccagaccagcctgggcctgcagctgaacctgcagctggtgcccaccatgcagctgttcatgcagctggcgcccaagctccgtgggcagacctgcggtctctgtgggaacttcaacagcatccaggccgatgacttccggaccctcagtggggtggtggaggccaccgctgcggccttcttcaacaccttcaagacccaggccgcctgccccaacatcaggaacagcttcgaggacccctgctctctgagcgtggagaatgagaagtatgctcagcactggtgctcgcagctgaccgatgccgacggccccttcggccggtgccatgctgccgtgaagccgggaacctactactcgaactgcatgtttgacacctgcaactgtgagcggagcgaggactgcctgtgcgccgcgctgtcctcctacgtgcacgcctgtgccgccaagggcgtgcagctcggcggctggagggacggcgtctgcacgaagcctatgaccacttgccccaagtcaatgacgtaccactaccatgtcagcacctgccagcccacctgccgctccctgagcgagggggacatcacctgcagtgttggcttcatccccgtggatggctgcatctgtcccaagggcaccttcctggacgacacgggcaagtgtgtgcaggccagcaactgtccctgctaccacagaggctccatgatccccaatggggagtcggtgcacgacagcggggctatctgcacctgcacacatgggaagctgagctgcatcggaggccaagcccccgccccagtgtgtgctgcgcccatggtgttctttgactgccgaaatgccacgcccngggncacaggggctggctgtcagaagagctgccacacactggacatgacctgttacagcccccantgtgtgcctggctgcgtgtgccccgacgggctggtggcggacggcgagggcggctgcatcactgcggaggactgcccctgcgtgcacaatnaggccagctaccgggccggccagaccatccgggtgggctgcaacacctgcacctgtgacagcaggatgtggcggtgcacagatgacccctgcctggccacctgcgccgtgtacggggacggccactacctcaccttcgacggacagagctacagcttcaacggagactgcgagtacncgctggtgcagaaccnctgtggcgggaaagacagcacccaggactcctttcgtgttgtcaccgagaacgtcccctgcggcaccacagggaccacctgctccaaggccatcaagattttcctgggggncttcgagctgaagctaagccatnggaaggtggaggtgatcgggacggacgagagccaggaggtgccatacaccatccggcagatgggcatctacctggtggtggacaccgacattggcctggtgctgctgtgggacaagaagaccagcatcttcatcaacctcagccccgagttcaagggcagggtctgcggcctgtgtgggaacttcgacgacatcgccgttaatgactttgccacgcggagccggtctgtggtgggggacgtgctggagtttgggaacagctggaagctctccccctcctgcccagatgccctggcgcccaaggacccctgcacggccaaccccttccgcaagtcctgggcccagaagcagtgcagcatcctccacggccccaccttcgccgcctgccacgcacacgtggagccggccaggtactacgaggcctgcgtgaacgacgcgtgcgcctgcgactccgggggtgactgcgagtgcttctgcacggctgtggcccgctacgcccaggcctgccatgaagtaggcacctgtgtgtgtctgcggaccccaagcatctgccctctgttctgcgactactacaaccccgaaggccagtgcgagtggcactaccagccctgcggggtgccctgcctgcgcacctgccggaacccccgtggagactgcctgcgggacgtccggggcctggaaggctgctaccccaagtgcccaccagaggctcccatctttgatgaggacaagatgcagtgtgtggccacctgcccaaccccgcctctgccaccacggtgccacgtccatgggaagtcctaccggccaggtgcagtggtgccctcggacaagaactgccagtcctgcctttgtacggagcgcggcgtggagtgcacctacaaagctgaggcctgtgtctgcacctacaatggacagcgcttccacccaggggacgtcatctaccacacgacggatggcacgggtggctgcatctccgcccgctgcggggccaacggcaccattgagaggagggtctacccctgcagccccaccacccctgtccccccaaccaccttctccttctccacacccccgcttgtcgtgagctccacgcacacccccagcaatggcccaagcagcgcgcacacaggccctccgagcagcgcctggcccaccacagcaggcacttctcccaggacgaggctgcccacagcctctgcctcgctgccgccggtctgtggggaaaagtgcctgtggtcgccatggatggatgtcagccgccctggacggggcacggacagcggtgacttcgacacactggagaacctccgcgcccatgggtaccgggtgtgcgaatcacccaggtcggtggagtgccgagccgaggacgcccccggagtgccgctccgagccctggggcagcgtgtgcagtgcagcccggatgtggggctgacctgtcgtaacagggagcaggcatcggggctctgctacaactaccagatcagggtccagtgctgcacgcccctagcctgctccacctctagcagtccagcccagaccactcctccaactacctccaagaccactgaaacccgggcctcaggctcctcagctcccagcagcacacctggcaccgtgtctctctctacagccaggacgacacctgccccaggtaccgctacctctgtcaaaaaaactttctcaactcccagccctccgccagtgccggcaacatcaacatcatccatgtcgaccacggccccggggacctctgtggtctccagcaagcccacccccacggagcccagcacatcctcctgcctgcaggagctttgcacctggaccgagtggatcgatggcagctaccctgctcctggaataaatggtggagattttgacacatttcaaaatttgagagacgaaggatacacattctgtgaaagtcctcgaagcgtgcagtgccgggcagagagcttccccaacacgccgctggcagacctggggcaggacgtcatctgcagccacacagaggggctgatttgcctgaacaagaaccagctcccacccatctgctacaactatgagatccgcatccagtgttgcgagacggtgaacgtgtgcagagacatcaccagactgccaaagaccgtcgcaacgacacggccgactccacatccaaccggagctcagacccagaccaccttcaccacacacatgccctcggcctccacagagcaacccacggcaacctccaggggtgggcccacagcaaccagcgtcacacagggcacccacaccacaccagtcaccagaaactgtcatccccggtgcacctggacaaagtggttcgacgtggacttcccgtcccccggaccccatggtggngacaaggaaacctacaacaacatcatcaggagtggggaaaaaatctgccgccgtactgaggagatcaccaggctccagtgccgagccgagagccacccggaggtgagcatcgaacacctgggccaggtggtgcagtgcagccgggaagagggcctggtgtgccggaaccaggaccagcagggacccttcaagatgtgcctcaactacgaggtgcgtgtgctctgctgcgagacccccaaaggctgccccgtgacctccacacctgtgacagctcctagcacccctagtgggagagccaccagcccaactcagagcacctcctcttggcagaaatccaggacaaccactttggtgacaaccagcacaacctccactccacagaccagcacaacctctgctcctacaaccagcacaacctctggtnctggaactactcccagcccngttnccaccaccagcacanccnctgtttcaaagaccagcacaagccatntttctgtatccaagacaacccactcccaaccagtcaccagtgactgtcatcctctgtgcgcctggacaaagtggttcgacgtggacttcccatcccctggaccccacggcggggacaaggaaacctacaacaacatcatcaggagtggggaaaaaatctgccgccgacctgaggagatcaccaggctccagtgccgagccgagagccacccggaggtgaacattgaacacctgggtcaggtggtgcagtgcagccgtgaagagggcctggtgtgccggaaccaggaccagcagggacccttcaagatgtgcctcaactacgaggtgcgcgtgctctgctgcgagacccccagaggctgcccggtgacctctgtgaccccatatgggacttctcctaccaatgctctgtatccttccctgtctacttccatggtatccgcctccgtggcatccacctctgtggcatccagctctgtggcatccagctctgtggcttactccacccaaacctgcttctgcaacgtggctgaccggctctaccctgcaggatccaccatataccgccacagagacctcgctggccattgctattatgccctgtgtagccaggactgccaagtggtcagaggggttgacagtgactgtccgtccaccacgctgcctcctgccccagccacgtccccttcaatatccacctccgagcccgtcactgagctgggatgcccaaatgcggttccccccagaaagaaaggtgagacctgggccacacccaactgctccgaggccacctgtgagggcaacaacgtcatctccctgagcccgcgcacgtgcccgagggtggagaagcccacttgtgccaacggctacccggctgtgaaggtggctgaccaagatggctgctgccatcactaccagtgccagtgtgtgtgcagcggctggggtgacccccactacatcaccttcgacggcacctactacaccttcctggacaactgcacgtacgtgctggtgcagcagattgtgcccgtgtatggccacttccgcgtgctcgtcgacaactacttctgcggtgcggaggacgggctctcctgcccgaggtccatcatcctggagtaccaccaggaccgcgtggtgctgacccgcaagccagtccacggggtgatgacaaacgagatcatcttcaacaacaaggtggtcagccccggcttccggaaaaacggcatcgtggtctcgcgcatcggcgtcaagatgtacgcgaccatcccggagctgggagtccaggtcatgttctccggcctcatcttctccgtggaggtgcccttcagcaagtttgccaacaacaccgagggccagtgcggcacttgcaccaacgacaggaaggatgagtgccgcacgcctagggggacggtggtcgcttcctgctccgagatgtccggcctctggaacgtgagcatccctgaccagccagcctgccaccggcctcacccgacgcccaccacggtcgggcccaccacagttgggtctaccacggtcgggcccaccacagttgggtctaccaccgtcgggcccaccacaccgcctgctccgtgcctgccatcacccatctgccacctgattctgagcaaggtctttgagccgtgccacactgtgatccccccactgctgttctatgagggctgcgtctttgaccggtgccacatgacggacctggatgtggtgtgctccagcctggagctgtacgcggcactctgcgcgtcccacgacatctgcatcgattggagaggccggaccggccacatgtgcccattcacctgcccagccgacaaggtgtaccagccctgcggcccgagcaacccctcctactgctacgggaatgacagcgccagcctcggggctctccgggaggccggccccatcaccgaaggctgcttctgtccggagggcatgaccctcttcagcaccagtgcccaagtctgcgtgcccacgggctgccccaggtgtctggggccccacggagagccggtgaaggtgggccacaccgtcggcatggactgccaggagtgcacgtgtgaggcggccacgtggacgctgacctgccgacccaagctctgcccgctgccccctgcctgccccctgcccggcttcgtgcctgtgcctgcagccccacaggccggccagtgctgcccccagtacagctgcgcctgcaacaccagccgctgccccgcgcccgtgggctgtcctgagggcgcccgcgcgatcccgacctaccaggagggggcctgctgcccagtccaaaactgcagctggacagtgtgcagcatcaacgggaccctgtaccagcccggcgccgtggtctcctcgagcctgtgcgaaacctgcaggtgtgagctgccgggtggccccccatcggacgcgtttgtggtcagctgtgagacccagatctgcaacacacactgccctgtgggcttcgagtaccaggagcagagcgggcagtgctgtggcacctgtgtgcaggtcgcctgtgtcaccaacaccagcaagagccccgcccacctcttctaccctggcgagacctggtcagacgcagggaaccactgtgtgacccaccagtgtgagaagcaccaggatgggctcgtggtggtcaccacgaagaaggcgtgccccccgctcagctgttctctggacgaggcccgcatgagcaaggacggctgctgccgcttctgcccgctgcccccgcccccgtaccagaaccagtcgacctgtgctgtgtaccataggagcctgatcatccagcagcagggctgcagctcctcggagcccgtgcgcctggcttactgccgggggaactgtggggacagctcttccatgtactcgctcgagggcaacacggtggagcacaggtgccagtgctgccaggagctgcggacctcgctgaggaatgtgaccctgcactgcaccgacggctccagccgggccttcagctacaccgaggtggaagagtgcggctgcatgggccggcggtgccctgcgccgggcgacacccagcactcgaaggaggcggaacccgagcccagccaggaggcagagagtgggagctgggagagaggcgtcccagtgtcccccatgcactgaccagcactgccgccctcctgacctccaaggagaacctcccatatgtcctctgagctcggcttccaaggccagtggaacttgtgcccctgtccaggcggctgcagctttgaacacactgtccacgcccgctttcttgtggagggtgtgggctatgggtcacctgctgcctggaggaggggcccttacccaccccgcctgcagccacctctcaggaccagccccggggctggccgagctcctctggccatgcatccagcctgctgttctggggacgtgagcatcacctgagggtctcaggaatgacgcttggacatggtgatcagctgcctggtggctgcaggaggaagaacctcactcctacctcagccctcagcctgcgctcccctcctcagtacacggccaatctgttgcataaatacacttgagcattttgcaaaaaaaccccaaaaa

SEQ ID NO: 731602 - DNA, 1266 bp, Homo sapiens
tgtgaccccatatgggacttctcctaccaatgctctgtatccttccctgtctacttccatggtatccgcctccgtggcatccacctctgtggcatccagctctgtggcatccagctctgtggcttactccacccaaacctgcttctgcaacgtggctgaccggctctaccctgcaggatccaccatataccgccacagagacctcgctggccattgctattatgccctgtgtagccaggactgccaagtggtcagaggggttgacagtgactgtccgtccaccacgctgcctcctgccccagccacgtccccttcaatatccacctccgagcccgtcactgagctgggatgcccaaatgcggttccccccagaaagaaaggtgagacctgggccacacccaactgctccgaggccacctgtgagggcaacaacgtcatctccctgagcccgcgcacgtgcccgagggtggagaagcccacttgtgccaacggctacccggctgtgaaggtggctgaccaagatggctgctgccatcactaccagtgccagtgtgtgtgcagcggctggggtgacccccactacatcaccttcgacggcacctactacaccttcctggacaactgcacgtacgtgctggtgcagcagattgtgcccgtgtatggccacttccgcgtgctcgtcgacaactacttctgcggtgcggaggacgggctctcctgcccgaggtccatcatcctggagtaccaccaggaccgcgtggtgctgacccgcaagccagtccacggggtgatgacaaacgagatcatcttcaacaacaaggtggtcagccccggcttccggaaaaacggcatcgtggtctcgcgcatcggcgtcaagatgtacgcgaccatcccggagctgggagtccaggtcatgttctccggcctcatcttctccgtggaggtgcccttcagcaagtttgccaacaacaccgagggccagtgcggcacttgcaccaacgacaggaaggatgagtgccgcacgcctagggggacggtggtcgcttcctgctccgagatgtccggcctctggaacgtgagcatccctgaccagccagcctgccaccggcctcacccgacgcccaccacggtcgggcccaccacagttgggtctaccacggtcgggcccaccacagttgggtctaccaccgtcgggcccaccacagttggctctaccaccgtcgggcccaccacaccgcctgctccgtgcctgccagctgctcagca

SEQ ID NO: 731603 - DNA, 5828 bp, Homo sapiens; identical to SEQ ID NO: 637780
  misc_feature (195)..(195): n is a, c, g, or t
  misc_feature (586)..(586): n is a, c, g, or t
  misc_feature (816)..(816): n is a, c, g, or t
  misc_feature (1099)..(1099): n is a, c, g, or t
  misc_feature (1327)..(1327): n is a, c, g, or t
  misc_feature (2495)..(2495): n is a, c, g, or t
  misc_feature (2499)..(2499): n is a, c, g, or t
  misc_feature (2560)..(2560): n is a, c, g, or t
  misc_feature (2651)..(2651): n is a, c, g, or t
  misc_feature (2828)..(2828): n is a, c, g, or t
  misc_feature (2844)..(2844): n is a, c, g, or t
  misc_feature (2955)..(2955): n is a, c, g, or t
  misc_feature (2978)..(2978): n is a, c, g, or t
  misc_feature (5341)..(5341): n is a, c, g, or t

SEQ ID NO: 731604 - DNA, 5858 bp, Homo sapiens; identical to SEQ ID NO: 637781
  misc_feature (195)..(195): n is a, c, g, or t
  misc_feature (586)..(586): n is a, c, g, or t
  misc_feature (816)..(816): n is a, c, g, or t
  misc_feature (1099)..(1099): n is a, c, g, or t
  misc_feature (1327)..(1327): n is a, c, g, or t
  misc_feature (2495)..(2495): n is a, c, g, or t
  misc_feature (2499)..(2499): n is a, c, g, or t
  misc_feature (2560)..(2560): n is a, c, g, or t
  misc_feature (2651)..(2651): n is a, c, g, or t
  misc_feature (2828)..(2828): n is a, c, g, or t
  misc_feature (2844)..(2844): n is a, c, g, or t
  misc_feature (2955)..(2955): n is a, c, g, or t
  misc_feature (2978)..(2978): n is a, c, g, or t
  misc_feature (5341)..(5341): n is a, c, g, or t

SEQ ID NO: 731605 - DNA, 6178 bp, Homo sapiens; identical to SEQ ID NO: 637778
  misc_feature (195)..(195): n is a, c, g, or t
  misc_feature (586)..(586): n is a, c, g, or t
  misc_feature (816)..(816): n is a, c, g, or t
  misc_feature (1099)..(1099): n is a, c, g, or t
  misc_feature (1327)..(1327): n is a, c, g, or t
  misc_feature (2495)..(2495): n is a, c, g, or t
  misc_feature (2499)..(2499): n is a, c, g, or t
  misc_feature (2560)..(2560): n is a, c, g, or t
  misc_feature (2651)..(2651): n is a, c, g, or t
  misc_feature (2828)..(2828): n is a, c, g, or t
  misc_feature (2844)..(2844): n is a, c, g, or t
  misc_feature (2955)..(2955): n is a, c, g, or t
  misc_feature (2978)..(2978): n is a, c, g, or t
  misc_feature (5341)..(5341): n is a, c, g, or t

SEQ ID NO: 731606 - DNA, 6397 bp, Homo sapiens
  misc_feature (195)..(195): n is a, c, g, or t
  misc_feature (586)..(586): n is a, c, g, or t
  misc_feature (816)..(816): n is a, c, g, or t
  misc_feature (1099)..(1099): n is a, c, g, or t
  misc_feature (1327)..(1327): n is a, c, g, or t
  misc_feature (2495)..(2495): n is a, c, g, or t
  misc_feature (2499)..(2499): n is a, c, g, or t
  misc_feature (2560)..(2560): n is a, c, g, or t
  misc_feature (2651)..(2651): n is a, c, g, or t
  misc_feature (2828)..(2828): n is a, c, g, or t
  misc_feature (2844)..(2844): n is a, c, g, or t
  misc_feature (2955)..(2955): n is a, c, g, or t
  misc_feature (2978)..(2978): n is a, c, g, or t
  misc_feature (5341)..(5341): n is a, c, g, or t
  misc_feature (5765)..(5765): n is a, c, g, or t
  misc_feature (5785)..(5785): n is a, c, g, or t
  misc_feature (5789)..(5789): n is a, c, g, or t
  misc_feature (5804)..(5804): n is a, c, g, or t
  misc_feature (5807)..(5807): n is a, c, g, or t
  misc_feature (5834)..(5834): n is a, c, g, or t
ctcagaggctgctgagggacagggcactcttccccgccgtccacacaatgagtgttggccggaggaagctggccctgctctgggccctggctctcgctctggcctgcacccggcatacagccatgcccaggatggctcctccgaatccagctacaagcaccaccctgccctctctcctatcgcccgggggcccancggggtcccgctccgtggggcgactgtcttcccatctctgaggaccatccctgtggtacgagcctccaacccggcgcacaacgggcgggtgtgcagcacctggggcagcttccactacaagaccttcgacggcgacgtcttccgcttccccggcctctgcaactacgtgttctccgagcactgcggtgccgcctacgaggattttaacatccagctacgccgcagccaggagtcagcggcccccacgctgagcagggtcctcatgaaggtggatggcgtggtcatccagctgaccaagggctccgtcctggtcaacggccacccggtcctgctgcccttcagccagtctggggtcctcattcagcagagcagcagctacaccaaggtggangccaggctgggccttgtcctcatgtggaaccacgatgacagcctgctgctggagctggacaccaaatacgccaacaagacctgtgggctctgtggggacttcaacgggatgcccgtggtcagcgagctcctctcccacaacaccaagctgacacccatggaattcgggaacctgcagaagatggacgaccccacggagcagtgtcaggaccctgtccctgaacccccgangaactgctccactggctttggcatctgtgaggagctcctgcacggccagctgttctctggctgcgtggccctggtggacgtcggcagctacctggaggcttgcaggcaagacctctgcttctgtgaagacaccgacctgctcagctgcgtctgccacacccttgccgagtactcccggcagtgcacccatgcaggggggttgccccaggactggcggggccctgacttctgcccccagaagtgccccaacaacatgcagtaccacgagtgccgctccccctgngcagacacctgctccaaccaggagcactcccgggcctgtgaggaccactgtgtggccggctgcttctgccctgaggggacggtgcttgacgacatcggccagaccggctgtgtccctgtgtcaaagtgtgcctgcgtctacaacggggctgcctatgccccaggggccacctactccacagactgcaccaactgcacctgctccggaggccggtggagctgccaggangttccatgcccgggtacctgctctgtgcttggaggtgcccacttctcaacgtttgacgggaagcaatacacggtgcacggcgactgcagctatgtgctgaccaagccctgtgacagcagtgccttcactgtactggctgagctgcgcaggtgcgggctgacggacagcgagacctgcctgaagagcgtgacactgagcctggatggggcgcagacggtggtggtgatcaaggccagtggggaagtgttcctgaaccagatctacacccagctgcccatctctgcagccaacgtcaccatcttcagaccctcaaccttcttcatcatcgcccagaccagcctgggcctgcagctgaacctgcagctggtgcccaccatgcagctgttcatgcagctggcgcccaagctccgtgggcagacctgcggtctctgtgggaacttcaacagcatccaggccgatgacttccggaccctcagtggggtggtggaggccaccgctgcggccttcttcaacaccttcaagacccaggccgcctgccccaacatcaggaacagcttcgaggacccctgctctctgagcgtggagaatgagaagtatgctcagcactggtgctcgcagctgaccgatgccgacggccccttcggccggtgccatgctgccgtgaagccgggaacctactactcgaactgcatgtttgacacctgcaactgtgagcggagcgaggactgcctgtgcgccgcgctgtcctcctacgtgcacgcctgtgccgccaagggcgtgcagctcggcggctggagggacggcgtctgcacgaagcctatgaccacttgccccaagtcaatgacgtaccactaccatgtcagcacctgccagcccacctgccgctccctgagcgagggggacatcacctgcagtgttggcttcatccccgtggatggctgcatctgtcccaagggcaccttcctggacgacacgggcaagtgtgtgcaggccagcaactgtccctgctaccacagaggctccatgatccccaatggggagtcggtgcacgacagcggggctatctgcacctgcacacatgggaagctgagctgcatcggaggccaagcccccgccccagtgtgtgctgcgcccatggtgttctttgactgccgaaatgccacgcccngggncacaggggctggctgtcagaagagctgccacacactggacatgacctgttacagcccccantgtgtgcctggctgcgtgtgccccgacgggctggtggcggacggcgagggcggctgcatcactgcggaggactgcccctgcgtgcacaatnaggccagctaccgggccggccagaccatccgggtgggctgcaacacctgcacctgtgacagcaggatgtggcggtgcacagatgacccctgcctggccacctgcgccgtgtacggggacggccactacctcaccttcgacggacagagctacagcttcaacggagactgcgagtacncgctggtgcagaaccnctgtggcgggaaagacagcacccaggactcctttcgtgttgtcaccgagaacgtcccctgcggcaccacagggaccacctgctccaaggccatcaagattttcctgggggncttcgagctgaagctaagccatnggaaggtggaggtgatcgggacggacgagagccaggaggtgccatacaccatccggcagatgggcatctacctggtggtggacaccgacattggcctggtgctgctgtgggacaagaagaccagcatcttcatcaacctcagccccgagttcaagggcagggtctgcggcctgtgtgggaacttcgacgacatcgccgttaatgactttgccacgcggagccggtctgtggtgggggacgtgctggagtttgggaacagctggaagctctccccctcctgcccagatgccctggcgcccaaggacccctgcacggccaaccccttccgcaagtcctgggcccagaagcagtgcagcatcctccacggccccaccttcgccgcctgccacgcacacgtggagccggccaggtactacgaggcctgcgtgaacgacgcgtgcgcctgcgactccgggggtgactgcgagtgcttctgcacggctgtggcccgctacgcccaggcctgccatgaagtaggcacctgtgtgtgtctgcggaccccaagcatctgccctctgttctgcgactactacaaccccgaaggccagtgcgagtggcactaccagccctgcggggtgccctgcctgcgcacctgccggaacccccgtggagactgcctgcgggacgtccggggcctggaaggctgctaccccaagtgcccaccagaggctcccatctttgatgaggacaagatgcagtgtgtggccacctgcccaaccccgcctctgccaccacggtgccacgtccatgggaagtcctaccggccaggtgcagtggtgccctcggacaagaactgccagtcctgcctttgtacggagcgcggcgtggagtgcacctacaaagctgaggcctgtgtctgcacctacaatggacagcgcttccacccaggggacgtcatctaccacacgacggatggcacgggtggctgcatctccgcccgctgcggggccaacggcaccattgagaggagggtctacccctgcagccccaccacccctgtccccccaaccaccttctccttctccacacccccgcttgtcgtgagctccacgcacacccccagcaatggcccaagcagcgcgcacacaggccctccgagcagcgcctggcccaccacagcaggcacttctcccaggacgaggctgcccacagcctctgcctcgctgccgccggtctgtggggaaaagtgcctgtggtcgccatggatggatgtcagccgccctggacggggcacggacagcggtgacttcgacacactggagaacctccgcgcccatgggtaccgggtgtgcgaatcacccaggtcggtggagtgccgagccgaggacgcccccggagtgccgctccgagccctggggcagcgtgtgcagtgcagcccggatgtggggctgacctgtcgtaacagggagcaggcatcggggctctgctacaactaccagatcagggtccagtgctgcacgcccctagcctgctccacctctagcagtccagcccagaccactcctccaactacctccaagaccactgaaacccgggcctcaggctcctcagctcccagcagcacacctggcaccgtgtctctctctacagccaggacgacacctgccccaggtaccgctacctctgtcaaaaaaactttctcaactcccagccctccgccagtgccggcaacatcaacatcatccatgtcgaccacggccccggggacctctgtggtctccagcaagcccacccccacggagcccagcacatcctcctgcctgcaggagctttgcacctggaccgagtggatcgatggcagctaccctgctcctggaataaatggtggagattttgacacatttcaaaatttgagagacgaaggatacacattctgtgaaagtcctcgaagcgtgcagtgccgggcagagagcttccccaacacgccgctggcagacctggggcaggacgtcatctgcagccacacagaggggctgatttgcctgaacaagaaccagctcccacccatctgctacaactatgagatccgcatccagtgttgcgagacggtgaacgtgtgcagagacatcaccagactgccaaagaccgtcgcaacgacacggccgactccacatccaaccggagctcagacccagaccaccttcaccacacacatgccctcggcctccacagagcaacccacggcaacctccaggggtgggcccacagcaaccagcgtcacacagggcacccacaccacaccagtcaccagaaactgtcatccccggtgcacctggacaaagtggttcgacgtggacttcccgtcccccggaccccatggtggngacaaggaaacctacaacaacatcatcaggagtggggaaaaaatctgccgccgtactgaggagatcaccaggctccagtgccgagccgagagccacccggaggtgagcatcgaacacctgggccaggtggtgcagtgcagccgggaagagggcctggtgtgccggaaccaggaccagcagggacccttcaagatgtgcctcaactacgaggtgcgtgtgctctgctgcgagacccccaaaggctgccccgtgacctccacacctgtgacagctcctagcacccctagtgggagagccaccagcccaactcagagcacctcctcttggcagaaatccaggacaaccactttggtgacaaccagcacaacctccactccacagaccagcacaacctctgctcctacaaccagcacaacctctggtnctggaactactcccagcccngttnccaccaccagcacanccnctgtttcaaagaccagcacaagccatntttctgtatccaagacaacccactcccaaccagtcaccagtgactgtcatcctctgtgcgcctggacaaagtggttcgacgtggacttcccatcccctggaccccacggcggggacaaggaaacctacaacaacatcatcaggagtggggaaaaaatctgccgccgacctgaggagatcaccaggctccagtgccgagccgagagccacccggaggtgaacattgaacacctgggtcaggtggtgcagtgcagccgtgaagagggcctggtgtgccggaaccaggaccagcagggacccttcaagatgtgcctcaactacgaggtgcgcgtgctctgctgcgagacccccagaggctgcccggtgacctccacatctgtgacagctcctagcacccctagtgggagagccaccagcccaactcagagcacctcctcttggcagaaatccaggacaaccactttggtgacaagcagcataacctccactacacagaccagcacaacctctgcccctacaagtagcacaacccagcttcaatacccagcacatccgactggcccg

SEQ ID NO: 731607 - DNA, 2306 bp, Homo sapiens
ggtgatgacaaacgagatcatcttcaacaacaaggtggtcagccccggcttccggaaaaacggcatcgtggtctcgcgcatcggcgtcaagatgtacgcgaccatcccggagctgggagtccaggtcatgttctccggcctcatcttctccgtggaggtgcccttcagcaagtttgccaacaacaccgagggccagtgcggcacttgcaccaacgacaggaaggatgagtgccgcacgcctagggggacggtggtcgcttcctgctccgagatgtccggcctctggaacgtgagcatccctgaccagccagcctgccaccggcctcacccgacgcccaccacggtcgggcccaccacagttgggtctaccacggtcgggcccaccacagttgggtctaccaccgtcgggcccaccacaccgcctgctccgtgcctgccatcacccatctgccacctgattctgagcaaggtctttgagccgtgccacactgtgatccccccactgctgttctatgagggctgcgtctttgaccggtgccacatgacggacctggatgtggtgtgctccagcctggagctgtacgcggcactctgcgcgtcccacgacatctgcatcgattggagaggccggaccggccacatgtgcccattcacctgcccagccgacaaggtgtaccagccctgcggcccgagcaacccctcctactgctacgggaatgacagcgccagcctcggggctctccgggaggccggccccatcaccgaaggctgcttctgtccggagggcatgaccctcttcagcaccagtgcccaagtctgcgtgcccacgggctgccccaggtgtctggggccccacggagagccggtgaaggtgggccacaccgtcggcatggactgccaggagtgcacgtgtgaggcggccacgtggacgctgacctgccgacccaagctctgcccgctgccccctgcctgccccctgcccggcttcgtgcctgtgcctgcagccccacaggccggccagtgctgcccccagtacagctgcgcctgcaacaccagccgctgccccgcgcccgtgggctgtcctgagggcgcccgcgcgatcccgacctaccaggagggggcctgctgcccagtccaaaactgcagctggacagtgtgcagcatcaacgggaccctgtaccagcccggcgccgtggtctcctcgagcctgtgcgaaacctgcaggtgtgagctgccgggtggccccccatcggacgcgtttgtggtcagctgtgagacccagatctgcaacacacactgccctgtgggcttcgagtaccaggagcagagcgggcagtgctgtggcacctgtgtgcaggtcgcctgtgtcaccaacaccagcaagagccccgcccacctcttctaccctggcgagacctggtcagacgcagggaaccactgtgtgacccaccagtgtgagaagcaccaggatgggctcgtggtggtcaccacgaagaaggcgtgccccccgctcagctgttctctggacgaggcccgcatgagcaaggacggctgctgccgcttctgcccgctgcccccgcccccgtaccagaaccagtcgacctgtgctgtgtaccataggagcctgatcatccagcagcagggctgcagctcctcggagcccgtgcgcctggcttactgccgggggaactgtggggacagctcttccatgtactcgctcgagggcaacacggtggagcacaggtgccagtgctgccaggagctgcggacctcgctgaggaatgtgaccctgcactgcaccgacggctccagccgggccttcagctacaccgaggtggaagagtgcggctgcatgggccggcggtgccctgcgccgggcgacacccagcactcgaaggaggcggaacccgagcccagccaggaggcagagagtgggagctgggagagaggcgtcccagtgtcccccatgcactgaccagcactgccgccctcctgacctccaaggagaacctcccatatgtcctctgagctcggcttccaaggccagtggaacttgtgcccctctcaggaccagccccggggctggccgagctcctctggccatgcatccagcctgctgttctggggacgtgagcatcacctgagggtctcaggaatgacgcttggacatggtgatcagctgcctggtggctgcaggaggaagaacctcactcctacctcagccctcagcctgcgctcccctcctcagtacacggccaatctgttgcataaatacacttgagcattttgcaaaaaaaccccaaaaa

SEQ ID NO: 731608 - DNA, 3364 bp, Homo sapiens
agggagtgttcccgggggagatactccagtcgtagcaagagtctcgaccactgaatggaagaaaaggacttttaaccaccattttgtgacttacagaaaggaatttgaataaagaaaactatgatacttcaggcccatcttcactccctgtgtcttcttatgctttatttggcaactggatatggccaagaggggaagtttagtggacccctgaaacccatgacattttctatttatgaaggccaagaaccgagtcaaattatattccagtttaaggccaatcctcctgctgtgacttttgaactaactggggagacagacaacatatttgtgatagaacgggagggacttctgtattacaacagagccttggacagggaaacaagatctactcacaatctccaggttgcagccctggacgctaatggaattatagtggagggtccagtccctatcaccatagaagtgaaggacatcaacgacaatcgacccacgtttctccagtcaaagtacgaaggctcagtaaggcagaactctcgcccaggaaagcccttcttgtatgtcaatgccacagacctggatgatccggccactcccaatggccagctttattaccagattgtcatccagcttcccatgatcaacaatgtcatgtactttcagatcaacaacaaaacgggagccatctctcttacccgagagggatctcaggaattgaatcctgctaagaatccttcctataatctggtgatctcagtgaaggacatgggaggccagagtgagaattccttcagtgataccacatctgtggatatcatagtgacagagaatatttggaaagcaccaaaacctgtggagatggtggaaaactcaactgatcctcaccccatcaaaatcactcaggtgcggtggaatgatcccggtgcacaatattccttagttgacaaagagaagctgccaagattcccattttcaattgaccaggaaggagatatttacgtgactcagcccttggaccgagaagaaaaggatgcatatgttttttatgcagttgcaaaggatgagtacggaaaaccactttcatatccgctggaaattcatgtaaaagttaaagatattaatgataatccacctacatgtccgtcaccagtaaccgtatttgaggtccaggagaatgaacgactgggtaacagtatcgggacccttactgcacatgacagggatgaagaaaatactgccaacagttttctaaactacaggattgtggagcaaactcccaaacttcccatggatggactcttcctaatccaaacctatgctggaatgttacagttagctaaacagtccttgaagaagcaagatactcctcagtacaacttaacgatagaggtgtctgacaaagatttcaagaccctttgttttgtgcaaatcaacgttattgatatcaatgatcagatccccatctttgaaaaatcagattatggaaacctgactcttgctgaagacacaaacattgggtccaccatcttaaccatccaggccactgatgctgatgagccatttactgggagttctaaaattctgtatcatatcataaagggagacagtgagggacgcctgggggttgacacagatccccataccaacaccggatatgtcataattaaaaagcctcttgattttgaaacagcagctgtttccaacattgtgttcaaagcagaaaatcctgagcctctagtgtttggtgtgaagtacaatgcaagttcttttgccaagttcacgcttattgtgacagatgtgaatgaagcacctcaattttcccaacacgtattccaagcgaaagtcagtgaggatgtagctataggcactaaagtgggcaatgtgactgccaaggatccagaaggtctggacataagctattcactgaggggagacacaagaggttggcttaaaattgaccacgtgactggtgagatctttagtgtggctccattggacagagaagccggaagtccatatcgggtacaagtggtggccacagaagtaggggggtcttccttgagctctgtgtcagagttccacctgatccttatggatgtgaatgacaaccctcccaggctagccaaggactacacgggcttgttcttctgccatcccctcagtgcacctggaagtctcattttcgaggctactgatgatgatcagcacttatttcggggtccccattttacattttccctcggcagtggaagcttacaaaacgactgggaagtttccaaaatcaatggtactcatgcccgactgtctaccaggcacacagactttgaggagagggagtatgtcgtcttgatccgcatcaatgatgggggtcggccacccttggaaggcattgtttctttaccagttacattctgcagttgtgtggaaggaagttgtttccggccagcaggtcaccagactgggatacccactgtgggcatggcagttggtatactgctgaccacccttctggtgattggtataattttagcagttgtgtttatccgcataaagaaggataaaggcaaagataatgttgaaagtgctcaagcatctgaagtcaaacctctgagaagctgaatttgaaaaggaatgtttgaatttatatagcaagtgctatttcagcaacaaccatctcatcctattacttttcatctaacgtgcattataattttttaaacagatattccctcttgtcctttaatatttgctaaatatttcttttttgaggtggagtcttgctctgtcgcccaggctggagtacagtggtgtgatcccagctcactgcaacctccgcctcctgggttcacatgattctcctgcctcagcttcctaagtagctgggtttacaggcacccaccaccatgcccagctaatttttgtatttttaatagagacggggtttcgccatttggccaggctggtcttgaactcctgacgtcaagtgatctgcctgccttggtctcccaatacaggcatgaaccactgcacccacctacttagatatttcatgtgctatagacattagagagatttttcatttttccatgacatttttcctctctgcaaatggcttagctacttgtgtttttcccttttggggcaagacagactcattaaatattctgtacattttttctttatcaaggagatatatcagtgttgtctcatagaactgcctggattccatttatgttttttctgattccatcctgtgtccccttcatccttgactcctttggtatttcactgaatttcaaacatttgtcagagaagaaaaaagtgaggactcaggaaaaataaataaataaaagaacagcctttt

SEQ ID NO: 731609 - DNA, 3682 bp, Homo sapiens
agggagtgttcccgggggagatactccagtcgtagcaagagtctcgaccactgaatggaagaaaaggacttttaaccaccattttgtgacttacagaaaggaatttgaataaagaaaactatgatacttcaggcccatcttcactccctgtgtcttcttatgctttatttggcaactggatatggccaagaggggaagtttagtggacccctgaaacccatgacattttctatttatgaaggccaagaaccgagtcaaattatattccagtttaaggccaatcctcctgctgtgacttttgaactaactggggagacagacaacatatttgtgatagaacgggagggacttctgtattacaacagagccttggacagggaaacaagatctactcacaatctccaggttgcagccctggacgctaatggaattatagtggagggtccagtccctatcaccatagaagtgaaggacatcaacgacaatcgacccacgtttctccagtcaaagtacgaaggctcagtaaggcagaactctcgcccaggaaagcccttcttgtatgtcaatgccacagacctggatgatccggccactcccaatggccagctttattaccagattgtcatccagcttcccatgatcaacaatgtcatgtactttcagatcaacaacaaaacgggagccatctctcttacccgagagggatctcaggaattgaatcctgctaagaatccttcctataatctggtgatctcagtgaaggacatgggaggccagagtgagaattccttcagtgataccacatctgtggatatcatagtgacagagaatatttggaaagcaccaaaacctgtggagatggtggaaaactcaactgatcctcaccccatcaaaatcactcaggtgcggtggaatgatcccggtgcacaatattccttagttgacaaagagaagctgccaagattcccattttcaattgaccaggaaggagatatttacgtgactcagcccttggaccgagaagaaaaggatgcatatgttttttatgcagttgcaaaggatgagtacggaaaaccactttcatatccgctggaaattcatgtaaaagttaaagatattaatgataatccacctacatgtccgtcaccagtaaccgtatttgaggtccaggagaatgaacgactgggtaacagtatcgggacccttactgcacatgacagggatgaagaaaatactgccaacagttttctaaactacaggattgtggagcaaactcccaaacttcccatggatggactcttcctaatccaaacctatgctggaatgttacagttagctaaacagtccttgaagaagcaagatactcctcagtacaacttaacgatagaggtgtctgacaaagatttcaagaccctttgttttgtgcaaatcaacgttattgatatcaatgatcagatccccatctttgaaaaatcagattatggaaacctgactcttgctgaagacacaaacattgggtccaccatcttaaccatccaggccactgatgctgatgagccatttactgggagttctaaaattctgtatcatatcataaagggagacagtgagggacgcctgggggttgacacagatccccataccaacaccggatatgtcataattaaaaagcctcttgattttgaaacagcagctgtttccaacattgtgttcaaagcagaaaatcctgagcctctagtgtttggtgtgaagtacaatgcaagttcttttgccaagttcacgcttattgtgacagatgtgaatgaagcacctcaattttcccaacacgtattccaagcgaaagtcagtgaggatgtagctataggcactaaagtgggcaatgtgactgccaaggatccagaaggtctggacataagctattcactgaggggagacacaagaggttggcttaaaattgaccacgtgactggtgagatctttagtgtggctccattggacagagaagccggaagtccatatcgggtacaagtggtggccacagaagtaggggggtcttccttgagctctgtgtcagagttccacctgatccttatggatgtgaatgacaaccctcccaggctagccaaggactacacgggcttgttcttctgccatcccctcagtgcacctggaagtctcattttcgaggctactgatgatgatcagcacttatttcggggtccccattttacattttccctcggcagtggaagcttacaaaacgactgggaagtttccaaaatcaatggtactcatgcccgactgtctaccaggcacacagactttgaggagagggagtatgtcgtcttgatccgcatcaatgatgggggtcggccacccttggaaggcattgtttctttaccagttacattctgcagttgtgtggaaggaagttgtttccggccagcaggtcaccagactgggatacccactgtgggcatggcagttggtatactgctgaccacccttctggtgattggtataattttagcagttgtgtttatccgcataaagaaggataaaggcaaagataatgttgaaagtgctcaagcatctgaagtcaaacctctgagaagctgaatttgaaaaggaatgtttgaatttatatagcaagtgctatttcagcaacaaccatctcatcctattacttttcatctaacgtgcattataattttttaaacagatattccctcttgtcctttaatatttgctaaatatttcttttttgaggtggagtcttgctctgtcgcccaggctggagtacagtggtgtgatcccagctcactgcaacctccgcctcctgggttcacatgattctcctgcctcagcttcctaagtagctgggtttacaggcacccaccaccatgcccagctaatttttgtatttttaatagagacggggtttcgccatttggccaggctggtcttgaactcctgacgtcaagtgatctgcctgccttggtctcccaatacaggcatgaaccactgcacccacctacttagatatttcatgtgctatagacattagagagatttttcatttttccatgacatttttcctctctgcaaatggcttagctacttgtgtttttcccttttggggcaagacagactcattaaatattctgtacattttttctttatcaaggagatatatcagtgttgtctcatagaactgcctggattccatttatgttttttctgattccatcctgtgtccccttcatccttgactcctttggtatttcactgaatttcaaacatttgtcagagaagaaaaaagtgaggactcaggaaaaataaataaataaaagaacagccttttcccttagtattaacagaaatgtttctgtgtcattaaccatctttaatcaatgtgacatgttgctctttggctgaaattcttcaacttggaaatgacacagacccacagaaggtgttcaaacacaacctactctgcaaaccttggtaaaggaaccagtcagctggccagatttcctcactacctgccatgcatacatgctgcgcatgttttcttcattcgtatgttagtaaagttttggttattatatatttaacatgtggaagaaaacaagacatgaaaagagtggtgacaaatcaagaataaacactggttgtagtc

SEQ ID NO: 731610 - DNA, 3821 bp, Homo sapiens; identical to SEQ ID NO: 322471

SEQ ID NO: 731611 - DNA, 471 bp, Homo sapiens
  misc_feature (387)..(387): n is a, c, g, or t
  misc_feature (402)..(402): n is a, c, g, or t
  misc_feature (408)..(408): n is a, c, g, or t
ggcccgaccacctacctccccgccgctccagagggggctcgcagagctgaggacgcgcgcagcgctgctcaaggtctctctctctcagcaccctcgccggccggcgtctgacgcgggtgccagggtctccgggcacctttcagtgtccattccctcagccagccaggactccgcaacccagcagttgccgctgcggccacagcccgaggggacctgcggacaggacgccggcaggaggaggggtgcgcagcgcccgcgcagagcgtctccctcgctacgcagcgagacccgggcctcccggccccaggagcccccagctgcctcgccaggtgtgtgggactgaagttcttggagaagggagtccaactcttcaaggtgaactatgancactctactctgggntttcgngactctgagggtcatcactgcagctgtcactggagaaacttcggaccatgacaactctgtgag

SEQ ID NO: 731612 - DNA, 1467 bp, Homo sapiens
agccagagacagctgggccactggcagtgagggagagtgaggatggcagagaccagtgccctgcccactggcttcggggagctcgaggtgctggctgtggggatggtgctactggtggaagctctctccggtctcagcctcaataccctgaccatcttctctttctgcaagaccccggagctgcggactccctgccacctactggtgctgagcttggctcttgcggacagtgggatcagcctgaatgccctcgttgcagccacatccagccttctccggcgctggccctacggctcggacggctgccaggctcacggcttccagggctttgtgacagcgttggccagcatctgcagcagtgcagccatcgcatgggggcgttatcaccactactgcacccgtagccagctggcctggaactcagccgtctctctggtgctcttcgtgtggctgtcttctgccttctgggcagctctgccccttctgggttggggtcactacgactatgagccactggggacatgctgcaccctggactactccaagggggacagaaacttcaccagcttcctcttcaccatgtccttcttcaacttcgccatgcccctcttcatcacgatcacttcctacagtctcatggagcagaaactggggaagagtggccatctccaggtaaacaccactctgccagcaaggacgctgctgctcggctggggcccctatgccatcctgtatctatacgcagtcatcgcagacgtgacttccatctcccccaaactgcagatggtgcccgccctcattgccaaaatggtgcccacgatcaatgccatcaactatgccctgggcaatgagatggtctgcaggggaatctggcagtgcctctcaccgcagaagagggagaaggaccgaaccaagtgagcctgccaccctggagtgagccccaggccaggaggctgttccaggagtcctgcccagcagcctcggtggccaagcccagacactcacccaccttccccagtggccccgtggatcctggtcctaggctggacacaggattcagaaagacaccaggctgcacagaaagagccagatggacctgagtgtcggtcacagccccctacactcaaggctgagaggcctcaggaaagtcattcctttttaaaaataataataaatgtaagggggtacagtgcagttttgttacatggatagattgcctagtggtgaagtctgggcttttagtgtaaccatcaccctaataatatacgttgtacccattaagttatttctcatccctcaccccctcccaccttgtcacccttctgagtctccaatgtctattattccacactccatgtccacgtgtacacattatttagctcccacttacaagtgagaacatgtggtatttgactttctgtttttgagttatttcacttaaaataatgacctccagtttcatccatg

SEQ ID NO: 731613 - DNA, 884 bp, Homo sapiens
agccagagacagctgggccactggcagtgagggagagtgaggatggcagagaccagtgccctgcccactggcttcggggagctcgaggtgctggctgtggggatggtgctactggtggaagaccccggagctgcggactccctgccacctactggtgctgagcttggctcttgcggacagtgggatcagcctgaatgccctcgttgcagccacatccagccttctccggcgctggccctacggctcggacggctgccaggctcacggcttccagggctttgtgacagcgttggccagcatctgcagcagtgcagccatcgcatgggggcgttatcaccactactgcacccgccaaaatgctgccatcggtctcatcattttgagtggcgataggttagccctcttgtccacttggcctcagagcacttctcccactccttacatcccagcccctgcccctaatgctcccttggaccatcttatacacacacacacacacacacacacacacacacacacacacacacaccaccttctcagatagcaacaggcttctctgcctcaatatagaacagttaatccctgtgccagaggccttagatcaaagccctttctatactgagagcatggcagagcagtgtgaaggcaggcaaaggggaatgaggaggtctgaattcatctactccatccctgggtggttgtaggcatgtcaccttggccatctgtttctaaagctgaaagtctgaggcagcacaatggtccaggtagatattaattattgtgcccacagagaattgtttgaacctggaaggcagaggttgcagtgagctgagatggcaccactgcactccagcctgggcaacagaatgagactccgcctcaat

SEQ ID NO: 731614 - DNA, 1353 bp, Homo sapiens
agccagagacagctgggccactggcagtgagggagagtgaggatggcagagaccagtgccctgcccactggcttcggggagctcgaggtgctggctgtggggatggtgctactggtggaagctctctccggtctcagcctcaataccctgaccatcttctctttctgcaagaccccggagctgcggactccctgccacctactggtgctgagcttggctcttgcggacagtgggatcagcctgaatgccctcgttgcagccacatccagccttctccggcgctggccctacggctcggacggctgccaggctcacggcttccagggctttgtgacagcgttggccagcatctgcagcagtgcagccatcgcatgggggcgttatcaccactactgcacccgtagccagctggcctggaactcagccgtctctctggtgctcttcgtgtggctgtcttctgccttctgggcagctctgccccttctgggttggggtcactacgactatgagccactggggacatgctgcaccctggactactccaagggggacagaaacttcaccagcttcctcttcaccatgtccttcttcaacttcgccatgcccctcttcatcacgatcacttcctacagtctcatggagcagaaactggggaagagtggccatctccaggtgcccgccctcattgccaaaatggtgcccacgatcaatgccatcaactatgccctgggcaatgagatggtctgcaggggaatctggcagtgcctctcaccgcagaagagggagaaggaccgaaccaagtgagcctgccaccctggagtgagccccaggccaggaggctgttccaggagtcctgcccagcagcctcggtggccaagcccagacactcacccaccttccccagtggccccgtggatcctggtcctaggctggacacaggattcagaaagacaccaggctgcacagaaagagccagatggacctgagtgtcggtcacagccccctacactcaaggctgagaggcctcaggaaagtcattcctttttaaaaataataataaatgtaagggggtacagtgcagttttgttacatggatagattgcctagtggtgaagtctgggcttttagtgtaaccatcaccctaataatatacgttgtacccattaagttatttctcatccctcaccccctcccaccttgtcacccttctgagtctccaatgtctattattccacactccatgtccacgtgtacacattatttagctcccacttacaagtgagaacatgtggtatttgactttctgtttttgagttatttcacttaaaataatgacctccagtttcatccatg

SEQ ID NO: 731615 - DNA, 870 bp, Homo sapiens
agccagagacagctgggccactggcagtgagggagagtgaggatggcagagaccagtgccctgcccactggcttcggggagctcgaggtgctggctgtggggatggtgctactggtggaagctctctccggtctcagcctcaataccctgaccatcttctctttctgcaagaccccggagctgcggactccctgccacctactggtgctgagcttggctcttgcggacagtgggatcagcctgaatgccctcgttgcagccacatccagccttctccggcgctggccctacggctcggacggctgccaggctcacggcttccagggctttgtgacagcgttggccagcatctgcagcagtgcagccatcgcatgggggcgttatcaccactactgcacccgtagccagctggcctggaactcagccgtctctctggtgctcttcgtgtggctgtcttctgccttctgggcagctctgccccttctgggttggggtcactacgactatgagccactggggacatgctgcaccctggactactccaagggggacagaaacttcaccagcttcctcttcaccatgtccttcttcaacttcgccatgcccctcttcatcacgatcacttcctacagtctcatggagcagaaactggggaagagtggccatctccaggtaaacaccactctgccagcaaggacgctgctgctcggctggggcccctatgccatcctgtatctatacgcagtcatcgcagacgtgacttccatctcccccaaactgcagatggtacagatacttctagtacctaaaactagacccctctccatctttgttctctgtctcatctcatctcactttctggatttatga

SEQ ID NO: 731616 - DNA, 1477 bp, Homo sapiens
cgagccccaagcttaccacctgcacccggagagctgtgtcaccatgtgggtcccggttgtcttcctcaccctgtccgtgacgtggattggtgctgcacccctcatcctgtctcggattgtgggaggctgggagtgcgagaagcattcccaaccctggcaggtgcttgtggcctctcgtggcagggcagtctgcggcggtgttctggtgcacccccagtgggtcctcacagctgcccactgcatcaggaacaaaagcgtgatcttgctgggtcggcacagcctgtttcatcctgaagacacaggccaggtatttcaggtcagccacagcttcccacacccgctctacgatatgagcctcctgaagaatcgattcctcaggccaggtgatgactccagccacgacctcatgctgctccgcctgtcagagcctgccgagctcacggatgctgtgaaggtcatggacctgcccacccaggagccagcactggggaccacctgctacgcctcaggctggggcagcattgaaccagaggagttcttgaccccaaagaaacttcagtgtgtggacctccatgttatttccaatgacgtgtgtgcgcaagttcaccctcagaaggtgaccaagttcatgctgtgtgctggacgctggacagggggcaaaagcacctgctcgggtgattctgggggcccacttgtctgtaatggtgtgcttcaaggtatcacgtcatggggcagtgaaccatgtgccctgcccgaaaggccttccctgtacaccaaggtggtgcattaccggaagtggatcaaggacaccatcgtggccaacccctgagcacccctatcaactccctattgtagtaaacttggaaccttggaaatgaccaggccaagactcaagcctccccagttctactgacctttgtccttaggtgtgaggtccagggttgctaggaaaagaaatcagcagacacaggtgtagaccagagtgtttcttaaatggtgtaattttgtcctctctgtgtcctggggaatactggccatgcctggagacatatcactcaatttctctgaggacacagataggatggggtgtctgtgttatttgtggggtacagagatgaaagaggggtgggatccacactgagagagtggagagtgacatgtgctggacactgtccatgaagcactgagcagaagctggaggcacaacgcaccagacactcacagcaaggatggagctgaaaacataacccactctgtcctggaggcactgggaagcctagagaaggctgtgagccaaggagggagggtcttcctttggcatgggatggggatgaagtaaggagagggactggaccccctggaagctgattcactatggggggaggtgtattgaagtcctccagacaaccctcagatttgatgatttcctagtagaactcacagaaataaagagctgttatactgtgaattattctgg

SEQ ID NO: 731617 - DNA, 533 bp, Homo sapiens
ccggagagctgtgtcaccatgtgggtcccggttgtcttcctcaccctgtccgtgacgtggattggtgctgcacccctcatcctgtctcggattgtgggaggctgggagtgcgagaagcattcccaaccctggcaggtgcttgtggcctctcgtggcagggcagtctgcggcggtgttctggtgcacccccagtgggtcctcacagctgcccactgcatcaggaagtgagtaggggcctggggtctggggagcaggtgtctgtgtcccagaggaataacagctgggcattttccccaggataacctctaaggccagccttgggactgggggagagagggaaagttctggttcaggtcacatggggaggcagggttggggctggaccaccctccccatggctgcctgggtctccatctgtgttcctctatgtctctttgtgtcgctttcattatgtctcttggtaactggcttcggttgtgtctctccgtgtgactattttgttctctctctccctctcttctctgtcttcggtc

SEQ ID NO: 731618 - DNA, 1619 bp, Homo sapiens
cgagccccaagcttaccacctgcacccggagagctgtgtcaccatgtgggtcccggttgtcttcctcaccctgtccgtgacgtggattggtgctgcacccctcatcctgtctcggattgtgggaggctgggagtgcgagaagcattcccaaccctggcaggtgcttgtggcctctcgtggcagggcagtctgcggcggtgttctggtgcacccccagtgggtcctcacagctgcccactgcatcaggaacaaaagcgtgatcttgctgggtcggcacagcctgtttcatcctgaagacacaggccaggtatttcaggtcagccacagcttcccacacccgctctacgatatgagcctcctgaagaatcgattcctcaggccaggtgatgactccagccacgacctcatgctgctccgcctgtcagagcctgccgagctcacggatgctgtgaaggtcatggacctgcccacccaggagccagcactggggaccacctgctacgcctcaggctggggcagcattgaaccagaggagtgtacgcctgggccagatggtgcagccgggagcccagatgcctgggtctgagggaggaggggacaggactcctgggtctgagggaggagggccaaggaaccaggtggggtccagcccacaacagtgtttttgcctggcccgtatcttgaccccaaagaaacttcagtgtgtggacctccatgttatttccaatgacgtgtgtgcgcaagttcaccctcagaaggtgaccaagttcatgctgtgtgctggacgctggacagggggcaaaagcacctgctcgggtgattctgggggcccacttgtctgtaatggtgtgcttcaaggtatcacgtcatggggcagtgaaccatgtgccctgcccgaaaggccttccctgtacaccaaggtggtgcattaccggaagtggatcaaggacaccatcgtggccaacccctgagcacccctatcaactccctattgtagtaaacttggaaccttggaaatgaccaggccaagactcaagcctccccagttctactgacctttgtccttaggtgtgaggtccagggttgctaggaaaagaaatcagcagacacaggtgtagaccagagtgtttcttaaatggtgtaattttgtcctctctgtgtcctggggaatactggccatgcctggagacatatcactcaatttctctgaggacacagataggatggggtgtctgtgttatttgtggggtacagagatgaaagaggggtgggatccacactgagagagtggagagtgacatgtgctggacactgtccatgaagcactgagcagaagctggaggcacaacgcaccagacactcacagcaaggatggagctgaaaacataacccactctgtcctggaggcactgggaagcctagagaaggctgtgagccaaggagggagggtcttcctttggcatgggatggggatgaagtaaggagagggactggaccccctggaagctgattcactatggggggaggtgtattgaagtcctccagacaaccctcagatttgatgatttcctagtagaactcacagaaataaagagctgttatactgtgaattattctgg

SEQ ID NO: 731619 - DNA, 2700 bp, Homo sapiens
ccggagagctgtgtcaccatgtgggtcccggttgtcttcctcaccctgtccgtgacgtggattggtgagaggggccatggttggggggatgcaggagagggagccagccctgactgtcaagctgaggctctttcccccccaacccagcaccccagcccagacagggagctgggctcttttctgtctctcccagccccactccaagcccatacccccagcccctccatattgcaacagtcctcactcccacaccaggtccccgctccctcccacttaccccagaactttctccccattgcccagccaactccctgctcccagctgctttactaaaggggaagttcctgggcatctccgtgtttctctttgtggggctcaaaacctccaaggacctctctcaatgccattggttccttggaccgtatcactggtccacctcctgagcccctcaatcctatcacagtctactgacttttcccattcagctgtgagtgtccaaccctatcccagagaccttgatgcttggcctcccaatcttgccctaggatacccagatgccaaccagacacctccttcttcctagccaggctatctggcctgagacaacaaatgggtccctcagtctggcaatgggactctgagaactcctcattccctgactcttagccccagactcttcattcagtggcccacattttccttaggaaaaacatgagcatccccagccacaactgccagctctctgattccccaaatctgcatccttttcaaaacctaaaaacaaaaagaaaaacaaataaaacaaaaccaactcagaccagaactgttttctcaacctgggacttcctaaactttccaaaaccttcctcttccagcaactgaacctcgccataaggcacttatccctggttcctagcaccccttatcccctcagaatccacaaacttttgtacaccaaagttttccctttctcaccaagtccaagaccccaaatcaccacaaaggacccaatccccagactcaagatatggtctgggcgctgtcttgtgtctcctaccctgatccctgggttcaactctgctcccagagcatgaagcctctccaccagcaccagccaccaacctgcaaacctagggaagattgacagaattcccagcctttcccagctccccctgcccatgtcccaggactcccagccttggttctctgcccccgtgtcttttcaaacccacatcctaaatccatctcctatccgagtcccccagttcctcctgtcaaccctgattcccctgatctagcaccccctctgcaggtgctgcacccctcatcctgtctcggattgtgggaggctgggagtgcgagaagcattcccaaccctggcaggtgcttgtggcctctcgtggcagggcagtctgcggcggtgttctggtgcacccccagtgggtcctcacagctgcccactgcatcaggaacaaaagcgtgatcttgctgggtcggcacagcctgtttcatcctgaagacacaggccaggtatttcaggtcagccacagcttcccacacccgctctacgatatgagcctcctgaagaatcgattcctcaggccaggtgatgactccagccacgacctcatgctgctccgcctgtcagagcctgccgagctcacggatgctgtgaaggtcatggacctgcccacccaggagccagcactggggaccacctgctacgcctcaggctggggcagcattgaaccagaggagttcttgaccccaaagaaacttcagtgtgtggacctccatgttatttccaatgacgtgtgtgcgcaagttcaccctcagaaggtgaccaagttcatgctgtgtgctggacgctggacagggggcaaaagcacctgctcgggtgattctgggggcccacttgtctgtaatggtgtgcttcaaggtatcacgtcatggggcagtgaaccatgtgccctgcccgaaaggccttccctgtacaccaaggtggtgcattaccggaagtggatcaaggacaccatcgtggccaacccctgagcacccctatcaactccctattgtagtaaacttggaaccttggaaatgaccaggccaagactcaagcctccccagttctactgacctttgtccttaggtgtgaggtccagggttgctaggaaaagaaatcagcagacacaggtgtagaccagagtgtttcttaaatggtgtaattttgtcctctctgtgtcctggggaatactggccatgcctggagacatatcactcaatttctctgaggacacagataggatggggtgtctgtgttatttgtggggtacagagatgaaagaggggtgggatccacactgagagagtggagagtgacatgtgctggacactgtccatgaagcactgagcagaagctggaggcacaacgcaccagacactcacagcaaggatggagctgaaaacataacccactctgtcctggaggcactgggaagcctagagaaggctgtgagccaaggagggagggtcttcctttggcatgggatggggatgaagtaaggagagggactggaccccctggaagctgattcactatggggggaggtgtattgaagtcctccagacaaccctcagatttgatgatttcctagtagaactcacagaaataaagagctgttatactgtgaattattctgg

SEQ ID NO: 731620 - DNA, 923 bp, Homo sapiens
gtctctctcccttttctctcccacactctatcatcccccggattcctctctacttggttctcattcttcctttgacttcctgcttccctttctcattcatctgtttctcactttctgcctggttttgttcttctctctctctttctctggcccatgtctgtttctctatgtttctgtcttttctttctcatcctgtgtattttcggctcaccttgtttgtcactgttctcccctctgccctttcattctctctgtccttttaccctcttcctttttcccttggtttctctcagtttctgtatctgcccttcaccctctcacactgctgtttcccaactcgttgtctgtatttttggcctgaactgtgtcttccccaaccctgtgtttttctcactgtttctttttctcttttggagcctcctccttgctcctctgtcccttctctctttccttatcatcctcgctcctcattcctgcgtctgcttcctccccagcaaaagcgtgatcttgctgggtcggcacagcctgtttcatcctgaagacacaggccaggtatttcaggtcagccacagcttcccacacccgctctacgatatgagcctcctgaagaatcgattcctcaggccaggtgatgactccagccacgacctcatgctgctccgcctgtcagagcctgccgagctcacggatgctgtgaaggtcatggacctgcccacccaggagccagcactggggaccacctgctacgcctcaggctggggcagcattgaaccagaggagtgtacgcctgggccagatggtgcagccgggagcccagatgcctgggtctgagggaggaggggacaggactcctgggtctgagggaggagggccaaggaaccaggtggggtccagcccacaacagtgtttttgcctggcccgta

SEQ ID NO: 731621 - DNA, 1722 bp, Homo sapiens
gtctctctcccttttctctcccacactctatcatcccccggattcctctctacttggttctcattcttcctttgacttcctgcttccctttctcattcatctgtttctcactttctgcctggttttgttcttctctctctctttctctggcccatgtctgtttctctatgtttctgtcttttctttctcatcctgtgtattttcggctcaccttgtttgtcactgttctcccctctgccctttcattctctctgtccttttaccctcttcctttttcccttggtttctctcagtttctgtatctgcccttcaccctctcacactgctgtttcccaactcgttgtctgtatttttggcctgaactgtgtcttccccaaccctgtgtttttctcactgtttctttttctcttttggagcctcctccttgctcctctgtcccttctctctttccttatcatcctcgctcctcattcctgcgtctgcttcctccccagcaaaagcgtgatcttgctgggtcggcacagcctgtttcatcctgaagacacaggccaggtatttcaggtcagccacagcttcccacacccgctctacgatatgagcctcctgaagaatcgattcctcaggccaggtgatgactccagccacgacctcatgctgctccgcctgtcagagcctgccgagctcacggatgctgtgaaggtcatggacctgcccacccaggagccagcactggggaccacctgctacgcctcaggctggggcagcattgaaccagaggagttcttgaccccaaagaaacttcagtgtgtggacctccatgttatttccaatgacgtgtgtgcgcaagttcaccctcagaaggtgaccaagttcatgctgtgtgctggacgctggacagggggcaaaagcacctgctcgggtgattctgggggcccacttgtctgtaatggtgtgcttcaaggtatcacgtcatggggcagtgaaccatgtgccctgcccgaaaggccttccctgtacaccaaggtggtgcattaccggaagtggatcaaggacaccatcgtggccaacccctgagcacccctatcaactccctattgtagtaaacttggaaccttggaaatgaccaggccaagactcaagcctccccagttctactgacctttgtccttaggtgtgaggtccagggttgctaggaaaagaaatcagcagacacaggtgtagaccagagtgtttcttaaatggtgtaattttgtcctctctgtgtcctggggaatactggccatgcctggagacatatcactcaatttctctgaggacacagataggatggggtgtctgtgttatttgtggggtacagagatgaaagaggggtgggatccacactgagagagtggagagtgacatgtgctggacactgtccatgaagcactgagcagaagctggaggcacaacgcaccagacactcacagcaaggatggagctgaaaacataacccactctgtcctggaggcactgggaagcctagagaaggctgtgagccaaggagggagggtcttcctttggcatgggatggggatgaagtaaggagagggactggaccccctggaagctgattcactatggggggaggtgtattgaagtcctccagacaaccctcagatttgatgatttcctagtagaactcacagaaataaagagctgttatactgtgaattattctgg

SEQ ID NO: 731622 - DNA, 646 bp, Homo sapiens
ccggagagctgtgtcaccatgtgggtcccggttgtcttcctcaccctgtccgtgacgtggattggtgctgcacccctcatcctgtctcggattgtgggaggctgggagtgcgagaagcattcccaaccctggcaggtgcttgtggcctctcgtggcagggcagtctgcggcggtgttctggtgcacccccagtgggtcctcacagctgcccactgcatcaggaacaaaagcgtgatcttgctgggtcggcacagcctgtttcatcctgaagacacaggccaggtatttcaggtcagccacagcttcccacacccgctctacgatatgagcctcctgaagaatcgataagcaaggactgtgggaggtgggctttgtagtaacaagagggcagggtgaactctgattcccatgggggaatgtgatggtcctgttacaaatttttcaagctggcagggaataaaacccattacggtgaggacctgtggagggcggctgccccaactgataaaggaaatagccaggtgggggcctttcccattgtaggggggacatatctggcaatagaagcctttgagaccctttagggtacaagtactgaggcagcaaataaaatgaaatcttatttttcaactttatactgcatggg

SEQ ID NO: 731623 - DNA, 1350 bp, Homo sapiens
cgagccccaagcttaccacctgcacccggagagctgtgtcaccatgtgggtcccggttgtcttcctcaccctgtccgtgacgtggattggtgctgcacccctcatcctgtctcggattgtgggaggctgggagtgcgagaagcattcccaaccctggcaggtgcttgtggcctctcgtggcagggcagtctgcggcggtgttctggtgcacccccagtgggtcctcacagctgcccactgcatcaggaacaaaagcgtgatcttgctgggtcggcacagcctgtttcatcctgaagacacaggccaggtatttcaggtcagccacagcttcccacacccgctctacgatatgagcctcctgaagaatcgattcctcaggccaggtgatgactccagccacgacctcatgtcttgaccccaaagaaacttcagtgtgtggacctccatgttatttccaatgacgtgtgtgcgcaagttcaccctcagaaggtgaccaagttcatgctgtgtgctggacgctggacagggggcaaaagcacctgctcgggtgattctgggggcccacttgtctgtaatggtgtgcttcaaggtatcacgtcatggggcagtgaaccatgtgccctgcccgaaaggccttccctgtacaccaaggtggtgcattaccggaagtggatcaaggacaccatcgtggccaacccctgagcacccctatcaactccctattgtagtaaacttggaaccttggaaatgaccaggccaagactcaagcctccccagttctactgacctttgtccttaggtgtgaggtccagggttgctaggaaaagaaatcagcagacacaggtgtagaccagagtgtttcttaaatggtgtaattttgtcctctctgtgtcctggggaatactggccatgcctggagacatatcactcaatttctctgaggacacagataggatggggtgtctgtgttatttgtggggtacagagatgaaagaggggtgggatccacactgagagagtggagagtgacatgtgctggacactgtccatgaagcactgagcagaagctggaggcacaacgcaccagacactcacagcaaggatggagctgaaaacataacccactctgtcctggaggcactgggaagcctagagaaggctgtgagccaaggagggagggtcttcctttggcatgggatggggatgaagtaaggagagggactggaccccctggaagctgattcactatggggggaggtgtattgaagtcctccagacaaccctcagatttgatgatttcctagtagaactcacagaaataaagagctgttatactgtgaattattctgg

SEQ ID NO: 731624 - DNA, 466 bp, Homo sapiens
gtgctgcacccctcatcctgtctcggattgtgggaggctgggagtgcgagaagcattcccaaccctggcaggtgcttgtggcctctcgtggcagggcagtctgcggcggtgttctggtgcacccccagtgggtcctcacagctgcccactgcatcaggaacaaaagcgtgatcttgctgggtcggcacagcctgtttcatcctgaagacacaggccaggtatttcaggtcagccacagcttcccacacccgctctactgggaagcctagagaaggctgtgagccaaggagggagggtcttcctttggcatgggatggggatgaagtaaggagagggactggaccccctggaagctgattcactatggggggaggtgtattgaagtcctccagacaaccctcagatttgatgatttcctagtagaactcacagaaataaagagctgttatactgtgaattattctgg

SEQ ID NO: 731625 - DNA, 1383 bp, Homo sapiens
cgagccccaagcttaccacctgcacccggagagctgtgtcaccatgtgggtcccggttgtcttcctcaccctgtccgtgacgtggattgggcagtctgcggcggtgttctggtgcacccccagtgggtcctcacagctgcccactgcatcaggaacaaaagcgtgatcttgctgggtcggcacagcctgtttcatcctgaagacacaggccaggtatttcaggtcagccacagcttcccacacccgctctacgatatgagcctcctgaagaatcgattcctcaggccaggtgatgactccagccacgacctcatgctgctccgcctgtcagagcctgccgagctcacggatgctgtgaaggtcatggacctgcccacccaggagccagcactggggaccacctgctacgcctcaggctggggcagcattgaaccagaggagttcttgaccccaaagaaacttcagtgtgtggacctccatgttatttccaatgacgtgtgtgcgcaagttcaccctcagaaggtgaccaagttcatgctgtgtgctggacgctggacagggggcaaaagcacctgctcgggtgattctgggggcccacttgtctgtaatggtgtgcttcaaggtatcacgtcatggggcagtgaaccatgtgccctgcccgaaaggccttccctgtacaccaaggtggtgcattaccggaagtggatcaaggacaccatcgtggccaacccctgagcacccctatcaactccctattgtagtaaacttggaaccttggaaatgaccaggccaagactcaagcctccccagttctactgacctttgtccttaggtgtgaggtccagggttgctaggaaaagaaatcagcagacacaggtgtagaccagagtgtttcttaaatggtgtaattttgtcctctctgtgtcctggggaatactggccatgcctggagacatatcactcaatttctctgaggacacagataggatggggtgtctgtgttatttgtggggtacagagatgaaagaggggtgggatccacactgagagagtggagagtgacatgtgctggacactgtccatgaagcactgagcagaagctggaggcacaacgcaccagacactcacagcaaggatggagctgaaaacataacccactctgtcctggaggcactgggaagcctagagaaggctgtgagccaaggagggagggtcttcctttggcatgggatggggatgaagtaaggagagggactggaccccctggaagctgattcactatggggggaggtgtattgaagtcctccagacaaccctcagatttgatgatttcctagtagaactcacagaaataaagagctgttatactgtgaattattctgg

SEQ ID NO: 731626 - DNA, 1355 bp, Homo sapiens
cgagccccaagcttaccacctgcacccggagagctgtgtcaccatgtgggtcccggttgtcttcctcaccctgtccgtgacgtggattggtgctgcacccctcatcctgtctcggattgtgggaggctgggagtgcgagaagcattcccaaccctggcaggtgcttgtggcctctcgtggcagggcagtctgcggcggtgttctggtgcacccccagtgggtcctcacagctgcccactgcatcaggaatcctcaggccaggtgatgactccagccacgacctcatgctgctccgcctgtcagagcctgccgagctcacggatgctgtgaaggtcatggacctgcccacccaggagccagcactggggaccacctgctacgcctcaggctggggcagcattgaaccagaggagttcttgaccccaaagaaacttcagtgtgtggacctccatgttatttccaatgacgtgtgtgcgcaagttcaccctcagaaggtgaccaagttcatgctgtgtgctggacgctggacagggggcaaaagcacctgctcgggtgattctgggggcccacttgtctgtaatggtgtgcttcaaggtatcacgtcatggggcagtgaaccatgtgccctgcccgaaaggccttccctgtacaccaaggtggtgcattaccggaagtggatcaaggacaccatcgtggccaacccctgagcacccctatcaactccctattgtagtaaacttggaaccttggaaatgaccaggccaagactcaagcctccccagttctactgacctttgtccttaggtgtgaggtccagggttgctaggaaaagaaatcagcagacacaggtgtagaccagagtgtttcttaaatggtgtaattttgtcctctctgtgtcctggggaatactggccatgcctggagacatatcactcaatttctctgaggacacagataggatggggtgtctgtgttatttgtggggtacagagatgaaagaggggtgggatccacactgagagagtggagagtgacatgtgctggacactgtccatgaagcactgagcagaagctggaggcacaacgcaccagacactcacagcaaggatggagctgaaaacataacccactctgtcctggaggcactgggaagcctagagaaggctgtgagccaaggagggagggtcttcctttggcatgggatggggatgaagtaaggagagggactggaccccctggaagctgattcactatggggggaggtgtattgaagtcctccagacaaccctcagatttgatgatttcctagtagaactcacagaaataaagagctgttatactgtgaattattctgg

SEQ ID NO: 731627 - DNA, 1919 bp, Homo sapiens
  misc_feature (914)..(914): n is a, c, g, or t
cgagccccaagcttaccacctgcacccggagagctgtgtcaccatgtgggtcccggttgtcttcctcaccctgtccgtgacgtggattggtgctgcacccctcatcctgtctcggattgtgggaggctgggagtgcgagaagcattcccaaccctggcaggtgcttgtggcctctcgtggcagggcagtctgcggcggtgttctggtgcacccccagtgggtcctcacagctgcccactgcatcaggaacaaaagcgtgatcttgctgggtcggcacagcctgtttcatcctgaagacacaggccaggtatttcaggtcagccacagcttcccacacccgctctacgatatgagcctcctgaagaatcgattcctcaggccaggtgatgactccagccacgacctcatgctgctccgcctgtcagagcctgccgagctcacggatgctgtgaaggtcatggacctgcccacccaggagccagcactggggaccacctgctacgcctcaggctggggcagcattgaaccagaggagttcttgaccccaaagaaacttcagtgtgtggacctccatgttatttccaatgacgtgtgtgcgcaagttcaccctcagaaggtgaccaagttcatgctgtgtgctggacgctggacagggggcaaaagcacctgctcgtgggtcattctgatcaccgaactgaccatgccagccctgccgatggtcctccatggctccctagtgccctggagaggaggtgtctagtcagagagtagtcctggaaggtggcctctgtgaggagccacggggacagcatcctgcagatggtcctggcccttgtcccaccgacctgtctacaaggactgtcctcgtggaccctcccctctgcacaggagctggaccctgaagtcccttcccnaccggccaggactggagcccctacccctctgttggaatccctgcccaccttcttctggaagtcggctctggagacatttctctcttcttccaaagctgggaactgctatctgttatctgcctgtccaggtctgaaagataggattgcccaggcagaaactgggactgacctatctcactctctccctgcttttacccttagggtgattctgggggcccacttgtctgtaatggtgtgcttcaaggtatcacgtcatggggcagtgaaccatgtgccctgcccgaaaggccttccctgtacaccaaggtggtgcattaccggaagtggatcaaggacaccatcgtggccaacccctgagcacccctatcaactccctattgtagtaaacttggaaccttggaaatgaccaggccaagactcaagcctccccagttctactgacctttgtccttaggtgtgaggtccagggttgctaggaaaagaaatcagcagacacaggtgtagaccagagtgtttcttaaatggtgtaattttgtcctctctgtgtcctggggaatactggccatgcctggagacatatcactcaatttctctgaggacacagataggatggggtgtctgtgttatttgtggggtacagagatgaaagaggggtgggatccacactgagagagtggagagtgacatgtgctggacactgtccatgaagcactgagcagaagctggaggcacaacgcaccagacactcacagcaaggatggagctgaaaacataacccactctgtcctggaggcactgggaagcctagagaaggctgtgagccaaggagggagggtcttcctttggcatgggatggggatgaagtaaggagagggactggaccccctggaagctgattcactatggggggaggtgtattgaagtcctccagacaaccctcagatttgatgatttcctagtagaactcacagaaataaagagctgttatactgtgaattattctgg

SEQ ID NO: 731628 - DNA, 1595 bp, Homo sapiens
gtctctctcccttttctctcccacactctatcatcccccggattcctctctacttggttctcattcttcctttgacttcctgcttccctttctcattcatctgtttctcactttctgcctggttttgttcttctctctctctttctctggcccatgtctgtttctctatgtttctgtcttttctttctcatcctgtgtattttcggctcaccttgtttgtcactgttctcccctctgccctttcattctctctgtccttttaccctcttcctttttcccttggtttctctcagtttctgtatctgcccttcaccctctcacactgctgtttcccaactcgttgtctgtatttttggcctgaactgtgtcttccccaaccctgtgtttttctcactgtttctttttctcttttggagcctcctccttgctcctctgtcccttctctctttccttatcatcctcgctcctcattcctgcgtctgcttcctccccagcaaaagcgtgatcttgctgggtcggcacagcctgtttcatcctgaagacacaggccaggtatttcaggtcagccacagcttcccacacccgctctacgatatgagcctcctgaagaatcgattcctcaggccaggtgatgactccagccacgacctcatgtcttgaccccaaagaaacttcagtgtgtggacctccatgttatttccaatgacgtgtgtgcgcaagttcaccctcagaaggtgaccaagttcatgctgtgtgctggacgctggacagggggcaaaagcacctgctcgggtgattctgggggcccacttgtctgtaatggtgtgcttcaaggtatcacgtcatggggcagtgaaccatgtgccctgcccgaaaggccttccctgtacaccaaggtggtgcattaccggaagtggatcaaggacaccatcgtggccaacccctgagcacccctatcaactccctattgtagtaaacttggaaccttggaaatgaccaggccaagactcaagcctccccagttctactgacctttgtccttaggtgtgaggtccagggttgctaggaaaagaaatcagcagacacaggtgtagaccagagtgtttcttaaatggtgtaattttgtcctctctgtgtcctggggaatactggccatgcctggagacatatcactcaatttctctgaggacacagataggatggggtgtctgtgttatttgtggggtacagagatgaaagaggggtgggatccacactgagagagtggagagtgacatgtgctggacactgtccatgaagcactgagcagaagctggaggcacaacgcaccagacactcacagcaaggatggagctgaaaacataacccactctgtcctggaggcactgggaagcctagagaaggctgtgagccaaggagggagggtcttcctttggcatgggatggggatgaagtaaggagagggactggaccccctggaagctgattcactatggggggaggtgtattgaagtcctccagacaaccctcagatttgatgatttcctagtagaactcacagaaataaagagctgttatactgtgaattattctgg

SEQ ID NO: 731629 - DNA, 1268 bp, Homo sapiens
tgactctctgaggctcattttgcagttgttgaaattgtccccgcagttttcaatcatgtctgaaccaatcagagtccttgtgactggagcagctggtcaaattgcatattcactgctgtacagtattggaaatggatctgtctttggtaaagatcagcctataattcttgtgctgttggatatcacccccatgatgggtgtcctggacggtgtcctaatggaactgcaagactgtgcccttcccctcctgaaagatgtcatcgcaacagataaagaagacgttgccttcaaagacctggatgtggccattcttgtgggctccatgccaagaagggaaggcatggagagaaaagatttactgaaagcaaatgtgaaaatcttcaaatcccagggtgcagccttagataaatacgccaagaagtcagttaaggttattgttgtgggtaatccagccaataccaactgcctgactgcttccaagtcagctccatccatccccaaggagaacttcagttgcttgactcgtttggatcacaaccgagctaaagctcaaattgctcttaaacttggtgtgactgctaatgatgtaaagaatgtcattatctggggaaaccattcctcgactcagtatccagatgtcaaccatgccaaggtgaaattgcaaggaaaggaagttggtgtttatgaagctctgaaagatgacagctggctcaagggagaatttgtcacgactgtgcagcagcgtggcgctgctgtcatcaaggctcgaaaactatccagtgccatgtctgctgcaaaagccatctgtgaccacgtcagggacatctggtttggaaccccagagggagagtttgtgtccatgggtgttatctctgatggcaactcctatggtgttcctgatgatctgctctactcattccctgttgtaatcaagaataagacctggaagtttgttgaaggtctccctattaatgatttctcacgtgagaagatggatcttactgcaaaggaactgacagaagaaaaagaaagtgcttttgaatttctttcctctgcctgactagacaatgatgttactaaatgcttcaaagctgaagaatctaaatgtcgtctttgactcaagtaccaaataataataatgctatacttaaattacttgtgaaaaacaacacattttaaagattacgtgcttcttggtacaggtttgtgaatgacagtttatcgtcatgctgttagtgtgcattctaaataaatatatattcaaatga

SEQ ID NO: 731630 - DNA, 3200 bp, Homo sapiens
  misc_feature (2034)..(2034): n is a, c, g, or t
  misc_feature (2146)..(2146): n is a, c, g, or t
  misc_feature (2577)..(2577): n is a, c, g, or t
  misc_feature (2618)..(2618): n is a, c, g, or t
  misc_feature (2965)..(2965): n is a, c, g, or t
agcggagtcggcctgcgctcctcagcctggcggttctacctccgagggttcgcccgcccttggttttccttacaccttagcctttggctcctttgaccactcgaagccccacagcgtgttccagcggacttcaccagcagacccagaagtggtgggtgaaacactgcctctgttcctccttgagcctgtcgggagctgctgcctgccaccaccatgtctgctgcaaatcctgagactccaaactcaaccatctccagagaggccagcacccagtcttcatcagctgcagctagccaaggctgggtgttaccagaaggcaaaatcgtgccaaacactgtttttgttggtggaattgatgctaggatggatgaaactgagattggaagctgctttggtagatacggttcagtgaaagaagtgaagataatcacgaatcgaactggtgtgtccaaaggctatggatttgtttcgtttgttaatgacgtggatgtccagaagatagtaggatcacagatacatttccatggtaaaaagctgaagctgggccctgcaatcaggaaacaaaagttatgtgctcgtcatgtgcagccacgtcctttggtagttaatcctcctcctccaccacagtttcagaacgtctggcggaatccaaacactgaaacctacctgcagccccaaatcacgccgaatcctgtaactcagcacgttcaggcttattctgcttatccacattcaccaggtcaggtcatcactggatgtcagttgcttgtatataattatcaggaatatcctacttatcccgattcagcatttcaggtcaccactggatatcagttgcctgtatataattatcagccatttcctgcttatccaagttcaccatttcaggtcactgctggatatcagttgcctgtatataattatcaggcatttcctgcttatccaagttcaccatttcaggtcaccactggatatcagttgcctgtatataattatcaggcatttcctgcttatccaagttcaccatttcaggtcaccactggatatcagttgcctgtatataattatcaggcatttcctgcttatccaagttcaccatttcaggtcaccactggatatcagttgcctgtatataattatcaggcatttcctgcttatccaaattcagcagttcaggtcaccactggatatcagttccatgtatacaattaccagatgccaccgcagtgccctgttggggagcaaaggagaaatctgtggaccgaagcatacaaatggtggtatcttgtctgtttaatccagagaagagactgataaattccgttgttactcaagatgactgcttcaagggtaaaagagtgcatcgctttagaagaagtttggcagtatttaaatctgttggatcctctcagctatctagtttcatgggaagttgctggttttgaatattaagctaaaagttttccactattacagaaattctgaattttggtaaatcacactgaaactttctgtataacttgtattattagactctctagttttatcttaacactgaaactgttcttcattagatgtttatttagaacctggttctgtgtttaatatatagtttaaagtaacaaataatcgagactgaaagaatgttaagatttatctgcaaggatttttaaaaaattgaaacttgcattttaagtgtttaaaagcaaatactgactttcaaaaaagtttttaaaacctgatttgaaagctaacaattttgatagtctgaacacaagcatttcacttctccaagaagtacctgtgaacagtacaatatttcagtattgagctttgcatttatgatttatctagaaatttacctcaaaagcagaatttttaaaactgcatttttaatcagtggaactcaatgtatagttagctttattgaagtcttatccaaacccagtaaaacagattctaagcaaacagtccaatcagtgagtcataatgtttattcaaagtattttatcttttatctagaatccacatatntatgtccaatttgattgggatagtagttaggataactaaaattctgggcctaattttttaaagaatccaagacaaactaaactttactgggtatataaccttctcaatgagntaccattcttttttataaaaaaaattgttccttgaaatgctaaacttaatggctgtatgtgaaatttgcaaaatactggtattaaagaacgctgcagcttttttatgtcactcaaaggttaatcggagtatctgaaaggaattgtttttataaaaacattgaagtattagttacttgctataaatagatttttatttttgttttttagcctgttatatttccttctgtaaaataaaatatgtccagaagaggcatgttgtttctagattaggtagtgtcctcattttatattgtgaccacacagctagagcaccagagcccttttgctatactcacagtcttgttttcccagcctcttttactagtctttcaggaggtttgctcttagaactggtgatgtaaagaatggaagtagctgtatgagcagttcnaaggccaagccgtggaatggtagcaatgggatataataccnttctaagggaaacatttgtatcagtatcatttgatctgccatggacatgtgtttaaagtggctttctggcccttctttcaatggcttcttccctaaaacgtggagactctaagttaatgtcgttactatgggccatattactaatgcccactggggtctatgatttctcaaaattttcattcggaatccgaaggatacagtctttaaactttagaattcccaagaaggctttattacacctcagaaattgaaagcaccatgactttgtccattaaaaaattatccatagtttttttagtgcttttaacattccgacatacatcattctgtgattaaatctccagatntctgtaaatgatacctacattctaaagagttaattctaattattccgatatgaccttaaggaaaagtaaaggaataaatttttgtctttgttgaagtatttaatagagtaaggtaaagaagatattaagtccctttcaaaatggaaaattaattctaaactgagaaaaatgttcctactacctattgctgatactgtctttgcataaatgaataaaaataaactttttttcttca

SEQ ID NO: 731631 - DNA, 3776 bp, Homo sapiens
  misc_feature (2610)..(2610): n is a, c, g, or t
  misc_feature (2722)..(2722): n is a, c, g, or t
  misc_feature (3153)..(3153): n is a, c, g, or t
  misc_feature (3194)..(3194): n is a, c, g, or t
  misc_feature (3541)..(3541): n is a, c, g, or t
agcggagtcggcctgcgctcctcagcctggcggttctacctccgagggttcgcccgcccttggttttccttacaccttagcctttggctcctttgaccactcgaagccccacagcgtgttccagcggacttcaccagcagacccagaagtggtgggtgaaacactgcctctgttcctccttgagcctgtcgggagctgctgcctgccaccaccatgtctgctgcaaatcctgagactccaaactcaaccatctccagagaggccagcacccagtcttcatcagctgcagctagccaaggctgggtgttaccagaaggcaaaatcgtgccaaacactgtttttgttggtggaattgatgctaggatggatgaaactgagattggaagctgctttggtagatacggttcagtgaaagaagtgaagataatcacgaatcgaactggtgtgtccaaaggctatggatttgtttcgtttgttaatgacgtggatgtccagaagatagtaggatcacagatacatttccatggtaaaaagctgaagctgggccctgcaatcaggaaacaaaagttatgtgctcgtcatgtgcagccacgtcctttggtagttaatcctcctcctccaccacagtttcagaacgtctggcggaatccaaacactgaaacctacctgcagccccaaatcacgccgaatcctgtaactcagcacgttcaggcttattctgcttatccacattcaccaggtcaggtcatcactggatgtcagttgcttgtatataattatcaggaatatcctacttatcccgattcagcatttcaggtcaccactggatatcagttgcctgtatataattatcagccatttcctgcttatccaagatcaccatttcaggtcactgctggatatcagttgcctgtatataattatcaggcatttcctgcttatccaaattcaccatttcaagtcgccactggatatcagttccctgtatacaattatcagccatttcctgcttatccaagttcaccatttcaggtcactgctggatatcagttgcctgtatataattatcaggcatttcctgcttatccaaattcaccatttcaagtcgccactggatatcagttccctgtatacaattatcaggcatttcctgcttatccaaattcaccagttcaggtcaccactggatatcagttgcctgtatacaattatcaggcatttcctgcttatccaaattcaccagttcaggtcaccactggatatcagttgcctgtatacaattatcaggcatttcctgcttatccaagttcaccatttcaggtcaccactggatatcagttgcctgtatataattatcaggcatttcctgcttatccaagttcaccatttcaggtcaccactggatatcagttgcctgtatataattatcaggcatttcctgcttatccaagttcaccatttcaggtcaccactggatatcagttgcctgtatataattatcaggcatttcctgcttatccaagttcaccatttcaggtcaccactggatatcagttgcctgtatataattatcaggcatttcctgcttatccaagttcaccatttcaggtcaccactggatatcagttgcctgtatataattatcaggcatttcctgcttatccaagttcaccatttcaggtcaccactggatatcagttgcctgtatataattatcaggcatttcctgcttatccaaattcagcagttcaggtcaccactggatatcagttccatgtatacaattaccagatgccaccgcagtgccctgttggggagcaaaggagaaatctgtggaccgaagcatacaaatggtggtatcttgtctgtttaatccagagaagagactgataaattccgttgttactcaagatgactgcttcaagggtaaaagagtgcatcgctttagaagaagtttggcagtatttaaatctgttggatcctctcagctatctagtttcatgggaagttgctggttttgaatattaagctaaaagttttccactattacagaaattctgaattttggtaaatcacactgaaactttctgtataacttgtattattagactctctagttttatcttaacactgaaactgttcttcattagatgtttatttagaacctggttctgtgtttaatatatagtttaaagtaacaaataatcgagactgaaagaatgttaagatttatctgcaaggatttttaaaaaattgaaacttgcattttaagtgtttaaaagcaaatactgactttcaaaaaagtttttaaaacctgatttgaaagctaacaattttgatagtctgaacacaagcatttcacttctccaagaagtacctgtgaacagtacaatatttcagtattgagctttgcatttatgatttatctagaaatttacctcaaaagcagaatttttaaaactgcatttttaatcagtggaactcaatgtatagttagctttattgaagtcttatccaaacccagtaaaacagattctaagcaaacagtccaatcagtgagtcataatgtttattcaaagtattttatcttttatctagaatccacatatntatgtccaatttgattgggatagtagttaggataactaaaattctgggcctaattttttaaagaatccaagacaaactaaactttactgggtatataaccttctcaatgagntaccattcttttttataaaaaaaattgttccttgaaatgctaaacttaatggctgtatgtgaaatttgcaaaatactggtattaaagaacgctgcagcttttttatgtcactcaaaggttaatcggagtatctgaaaggaattgtttttataaaaacattgaagtattagttacttgctataaatagatttttatttttgttttttagcctgttatatttccttctgtaaaataaaatatgtccagaagaggcatgttgtttctagattaggtagtgtcctcattttatattgtgaccacacagctagagcaccagagcccttttgctatactcacagtcttgttttcccagcctcttttactagtctttcaggaggtttgctcttagaactggtgatgtaaagaatggaagtagctgtatgagcagttcnaaggccaagccgtggaatggtagcaatgggatataataccnttctaagggaaacatttgtatcagtatcatttgatctgccatggacatgtgtttaaagtggctttctggcccttctttcaatggcttcttccctaaaacgtggagactctaagttaatgtcgttactatgggccatattactaatgcccactggggtctatgatttctcaaaattttcattcggaatccgaaggatacagtctttaaactttagaattcccaagaaggctttattacacctcagaaattgaaagcaccatgactttgtccattaaaaaattatccatagtttttttagtgcttttaacattccgacatacatcattctgtgattaaatctccagatntctgtaaatgatacctacattctaaagagttaattctaattattccgatatgaccttaaggaaaagtaaaggaataaatttttgtctttgttgaagtatttaatagagtaaggtaaagaagatattaagtccctttcaaaatggaaaattaattctaaactgagaaaaatgttcctactacctattgctgatactgtctttgcataaatgaataaaaataaactttttttcttca

SEQ ID NO: 731632 - DNA, 3560 bp, Homo sapiens
  misc_feature (2394)..(2394): n is a, c, g, or t
  misc_feature (2506)..(2506): n is a, c, g, or t
  misc_feature (2937)..(2937): n is a, c, g, or t
  misc_feature (2978)..(2978): n is a, c, g, or t
  misc_feature (3325)..(3325): n is a, c, g, or t
agcggagtcggcctgcgctcctcagcctggcggttctacctccgagggttcgcccgcccttggttttccttacaccttagcctttggctcctttgaccactcgaagccccacagcgtgttccagcggacttcaccagcagacccagaagtggtgggtgaaacactgcctctgttcctccttgagcctgtcgggagctgctgcctgccaccaccatgtctgctgcaaatcctgagactccaaactcaaccatctccagagaggccagcacccagtcttcatcagctgcagctagccaaggctgggtgttaccagaaggcaaaatcgtgccaaacactgtttttgttggtggaattgatgctaggatggatgaaactgagattggaagctgctttggtagatacggttcagtgaaagaagtgaagataatcacgaatcgaactggtgtgtccaaaggctatggatttgtttcgtttgttaatgacgtggatgtccagaagatagtaggatcacagatacatttccatggtaaaaagctgaagctgggccctgcaatcaggaaacaaaagttatgtgctcgtcatgtgcagccacgtcctttggtagttaatcctcctcctccaccacagtttcagaacgtctggcggaatccaaacactgaaacctacctgcagccccaaatcacgccgaatcctgtaactcagcacgttcaggcttattctgcttatccacattcaccaggtcaggtcatcactggatgtcagttgcttgtatataattatcaggaatatcctacttatcccgattcagcatttcaggtcaccactggatatcagttgcctgtatataattatcagccatttcctgcttatccaagatcaccatttcaggtcactgctggatatcagttgcctgtatataattatcaggcatttcctgcttatccaaattcaccatttcaagtcgccactggatatcagttccctgtatacaattatcagccatttcctgcttatccaagttcaccatttcaggtcactgctggatatcagttgcctgtatataattatcaggcatttcctgcttatccaaattcaccatttcaagtcgccactggatatcagttccctgtatacaattatcaggcatttcctgcttatccaaattcaccagttcaggtcaccactggatatcagttgcctgtatacaattatcaggcatttcctgcttatccaaattcaccatttcaagtcgccactggatatcagttccctgtatacaattatcaggcatttcctgcttatccaaattcaccagttcaggtcaccactggatatcagttgcctgtatacaattatcaggcatttcctgcttatccaaattcaccatttcaagtcgccactggatatcagttccctgtatacaattatcaggcatttcctgcttatccaaattcaccagttcaggtcaccactggatatcagttgcctgtatacaattatcaggcatttcctgcttatccaaattcagcagttcaggtcaccactggatatcagttccatgtatacaattaccagatgccaccgcagtgccctgttggggagcaaaggagaaatctgtggaccgaagcatacaaatggtggtatcttgtctgtttaatccagagaagagactgataaattccgttgttactcaagatgactgcttcaagggtaaaagagtgcatcgctttagaagaagtttggcagtatttaaatctgttggatcctctcagctatctagtttcatgggaagttgctggttttgaatattaagctaaaagttttccactattacagaaattctgaattttggtaaatcacactgaaactttctgtataacttgtattattagactctctagttttatcttaacactgaaactgttcttcattagatgtttatttagaacctggttctgtgtttaatatatagtttaaagtaacaaataatcgagactgaaagaatgttaagatttatctgcaaggatttttaaaaaattgaaacttgcattttaagtgtttaaaagcaaatactgactttcaaaaaagtttttaaaacctgatttgaaagctaacaattttgatagtctgaacacaagcatttcacttctccaagaagtacctgtgaacagtacaatatttcagtattgagctttgcatttatgatttatctagaaatttacctcaaaagcagaatttttaaaactgcatttttaatcagtggaactcaatgtatagttagctttattgaagtcttatccaaacccagtaaaacagattctaagcaaacagtccaatcagtgagtcataatgtttattcaaagtattttatcttttatctagaatccacatatntatgtccaatttgattgggatagtagttaggataactaaaattctgggcctaattttttaaagaatccaagacaaactaaactttactgggtatataaccttctcaatgagntaccattcttttttataaaaaaaattgttccttgaaatgctaaacttaatggctgtatgtgaaatttgcaaaatactggtattaaagaacgctgcagcttttttatgtcactcaaaggttaatcggagtatctgaaaggaattgtttttataaaaacattgaagtattagttacttgctataaatagatttttatttttgttttttagcctgttatatttccttctgtaaaataaaatatgtccagaagaggcatgttgtttctagattaggtagtgtcctcattttatattgtgaccacacagctagagcaccagagcccttttgctatactcacagtcttgttttcccagcctcttttactagtctttcaggaggtttgctcttagaactggtgatgtaaagaatggaagtagctgtatgagcagttcnaaggccaagccgtggaatggtagcaatgggatataataccnttctaagggaaacatttgtatcagtatcatttgatctgccatggacatgtgtttaaagtggctttctggcccttctttcaatggcttcttccctaaaacgtggagactctaagttaatgtcgttactatgggccatattactaatgcccactggggtctatgatttctcaaaattttcattcggaatccgaaggatacagtctttaaactttagaattcccaagaaggctttattacacctcagaaattgaaagcaccatgactttgtccattaaaaaattatccatagtttttttagtgcttttaacattccgacatacatcattctgtgattaaatctccagatntctgtaaatgatacctacattctaaagagttaattctaattattccgatatgaccttaaggaaaagtaaaggaataaatttttgtctttgttgaagtatttaatagagtaaggtaaagaagatattaagtccctttcaaaatggaaaattaattctaaactgagaaaaatgttcctactacctattgctgatactgtctttgcataaatgaataaaaataaactttttttcttca

SEQ ID NO: 731633 - DNA, 1988 bp, Homo sapiens; identical to SEQ ID NO: 47708

SEQ ID NO: 731634 - DNA, 823 bp, Homo sapiens; identical to SEQ ID NO: 89374

SEQ ID NO: 731635 - DNA, 2995 bp, Homo sapiens; identical to SEQ ID NO: 89382

SEQ ID NO: 731636 - DNA, 684 bp, Homo sapiens
gaccgactgtgtggaagcaccaggcatcagagatagagtcttccctggcattgcaggagagaatctgaagggatgatggatgcatcaaaaggtgagtgggtgaaatctccatggagccccacatgccccttcagccagctggccctaaactgctctcttgcctctgccgggtgcctggggccattgccctctcaccctgacttgtggccctggtgctgcttgctttctgtctcatccctttttagaaaacccacaaacttttcatttaggcataatttcagatttacaaaaagattgcaagaataaaaagaagaatttccatatatcctttatccagattccctaaattattactgcatttgctttatccttctcgatcagtggacagatagatgatatagacagatagatagacaaatatatattttttgaactcttgagagtaagttgcagatattacattattaaatatttggtgtgtatttcctaaagacaaggacattctcttacgtaaccaatacaattatgaagaccaggacatgaacaccatttcaatactgttatccaacccacagattttatgcagattcatcaactgtcccaataatgtcatttatagcagaagaaatcctggttaggcttgattccgtgttgtgcctcttcggtcccctttgtctggaatag

SEQ ID NO: 731637 - DNA, 227 bp, Homo sapiens; identical to SEQ ID NO: 89377

SEQ ID NO: 731638 - DNA, 2486 bp, Homo sapiens
tgctgagagcgttgggcatcccagcacgcagtgtgacaggcttcgattcagctcacgacacagaaaggaacctcacggtggacacctatgtgaatgagaatggcgagaaaatcaccagtatgacccacgactctgtctggaatttccatgtgtggacggatgcctggatgaagcgaccggatctgcccaagggctacgacggctggcaggctgtggacgcaacgccgcaggagcgaagccagggtgtcttctgctgtgggccatcaccactgaccgccatccgcaaaggtgacatctttattgtctatgacaccagattcgtcttctcagaagtgaatggtgacaggctcatctggttggtgaagatggtgaatgggcaggaggagttacacgtaatttcaatggagaccacaagcatcgggaaaaacatcagcaccaaggcagtgggccaagacaggcggagagatatcacctatgagtacaagtatccagaaggctcctctgaggagaggcaggtcatggatcatgccttcctccttctcagttctgagagggagcacagacgacctgtaaaagagaactttcttcacatgtcggtacaatcagatgatgtgctgctgggaaactctgttaatttcaccgtgattcttaaaaggaagaccgctgccctacagaatgtcaacatcttgggctcctttgaactacagttgtacactggcaagaagatggcaaaactgtgtgacctcaataagacctcgcagatccaaggtcaagtatcagaagtgactctgaccttggactccaagacctacatcaacagcctggctatattagatgatgagccagttatcagaggtttcatcattgcggaaattgtggagtctaaggaaatcatggcctctgaagtattcacgtctttccagtaccctgagttctctatagagttgcctaacacaggcagaattggccagctacttgtctgcaattgtatcttcaagaataccctggccatccctttgactgacgtcaagttctctttggaaagcctgggcatctcctcactacagacctctgaccatgggacggtgcagcctggtgagaccatccaatcccaaataaaatgcaccccaataaaaactggacccaagaaatttatcgtcaagttaagttccaaacaagtgaaagagattaatgctcagaagattgttctcatcaccaagtagccttgtctgatgctgtggagccttagttgagatttcagcatttcctaccttgtgcttagctttcagattatggatgattaaatttgatgacttatatgagggcagattcaagagccagcaggtcaaaaaggccaacacaaccataagcagccagacccacaaggccaggtcctgtgctatcacagggtcacctcttttacagttagaaacaccagccgaggccacagaatcccatccctttcctgagtcatggcctcaaaaatcagggccaccattgtctcaattcaaatccatagatttcgaagccacagagtctctccctggagcagcagactatgggcagcccagtgctgccacctgctgacgacccttgagaagctgccatatcttcaggccatgggttcaccagccctgaaggcacctgtcaactggagtgctctctcagcactgggatgggcctgatagaagtgcattctcctcctattgcctccattctcctctctctatccctgaaatccaggaagtccctctcctggtgctccaagcagtttgaagcccaatctgcaaggacatttctcaagggccatgtggttttgcagacaaccctgtcctcaggcctgaactcaccatagagacccatgtcagcaaacggtgaccagcaaatcctcttcccttattctaaagctgccccttgggagactccagggagaaggcattgcttcctccctggtgtgaactctttctttggtattccatccactatcctggcaactcaaggctgcttctgttaactgaagcctgctccttcttgttctgccctccagagatttgctcaaatgatcaataagctttaaattaaactctacttcaagaaaactctgtggtccctgagtccttttttctttatgccaataagcttcttaaatgtgctggcggtttatgcagtcacttggggagccatggaatcctttgatctccccaggcaaggtgctctgaggagttggcttctttattgtctgttcagtacatccaacccctctctcaaaggctgtcaccccaactggatacacaccctggcaaaggcacgtagcttgaatgagggttattttgtgtctaattcacaggagagtcatgggtgggatacctgtcatcctctgcctttccagctgtccaagtgaaaaaaacctcaatcctggtcacccttgcccaagttgcccacatccctggcatacagtaggtgttcaataaatgtttattgaagga

SEQ ID NO: 731639 - DNA, 555 bp, Homo sapiens
agctgcaagttctccacattgacttcttgaatcaggacaacgccgtttctcaccacacatgggagttccaaacgagcagtcctgtgttccggcgaggacaggtgtttcacctgcggctggtgctgaaccagcccctacaatcctaccaccaactgaaactggaattcagcacagggccgaatcctagcatcgccaaacacaccctggtggtgctcgacccgaggacgccctcagaccactacaactggcaggcaacccttcaaaatgagtctggcaaagaggtgagcacccactgggctggcgggtgggctggctggcttctggcggaatgctcctaatgtgagcagcccctatccccttcctcacctgtcagctggtaacatggtttaaagccatccacagcacagcatgatagaggggccatggctccaaatgtctgtttccccactcagcctcctccaagcacacagtatcgctgtggccaaacctcctacatgtcacccttcccctttccatttcaaagggaacaatgttcactggaggacatgagcggag

SEQ ID NO: 731640 - DNA, 795 bp, Homo sapiens
gaccgactgtgtggaagcaccaggcatcagagatagagtcttccctggcattgcaggagagaatctgaagggatgatggatgcatcaaaagagctgcaagttctccacattgacttcttgaatcaggacaacgccgtttctcaccacacatgggagttccaaacgagcagtcctgtgttccggcgaggacaggtgtttcacctgcggctggtgctgaaccagcccctacaatcctaccaccaactgaaactggaattcagcacagcacagtggctgtcaccagttcccccaatgccatcctgggcaagtaccaactaaacgtgaaaactggaaaccacatccttaagtctgaagaaaacatcctataccttctcttcaacccatggtgtaaagaggacatggttttcatgcctgatgaggacgagcgcaaagagtacatcctcaatgacacgggctgccattacgtgggggctgccagaagtatcaaatgcaaaccctggaactttggtcagtttgagaaaaatgtcctggactgctgcatttccctgctgactgagagctccctcaagcccacagataggagggaccccgtgctggtgtgcagggccatgtgtgctatgatgagctttgagaaaggccagggcgtgctcattgggaattggactggggactacgaaggtggcacagccccatacaagtggacaggcagtgccccgatcctgcagcagtactacaacacgaagcaggctgtgtgctttggccagtgctgggtgtttgctgggatcctgactacag

SEQ ID NO: 731641 - DNA, 634 bp, Homo sapiens
gaccgactgtgtggaagcaccaggcatcagagatagagtcttccctggcattgcaggagagaatctgaagggatgatggatgcatcaaaagagttgaggtctcactttgttgcccaggctgcgtgttgtggctattcacagctgcaatcatagctcactgcagcctcaaactcctgggctcaagtgattctcccacctcagtctcccgagtaaccgggattacagctgcaagttctccacattgacttcttgaatcaggacaacgccgtttctcaccacacatgggagttccaaacgagcagtcctgtgttccggcgaggacaggtgtttcacctgcggctggtgctgaaccagcccctacaatcctaccaccaactgaaactggaattcagcacagggccgaatcctagcatcgccaaacacaccctggtggtgctcgacccgaggacgccctcagaccactacaactggcaggcaacccttcaaaatgagtctggcaaagaggtcacagtggctgtcaccagttcccccaatgccatcctgggcaagtaccaactaaacgtgaaaactggaaaccacatccttaagtctgaagaaaacatcctataccttctcttcaacccatggtgtaaag

SEQ ID NO: 731642 - DNA, 2089 bp, Homo sapiens
tgctgagagcgttgggcatcccagcacgcagtgtgacaggcttcgattcagctcacgacacagaaaggaacctcacggtggacacctatgtgaatgagaatggcgagaaaatcaccagtatgacccacgactctgtctggaatttccatgtgtggacggatgcctggatgaagcgaccggatctgcccaagggctacgacggctggcaggctgtggacgcaacgccgcaggagcgaagccagggtgtcttctgctgtgggccatcaccactgaccgccatccgcaaaggtgacatctttattgtctatgacaccagattcgtcttctcagaagtgaatggtgacaggctcatctggttggtgaagatggtgaatgggcaggaggagttacacgtaatttcaatggagaccacaagcatcgggaaaaacatcagcaccaaggcagtgggccaagacaggcggagagatatcacctatgagtacaagtatccagaaggctcctctgaggagaggcaggtcatggatcatgccttcctccttctcagttctgagagggagcacagacgacctgtaaaagagaactttcttcacatgtcggtacaatcagatgatgtgctgctgggaaactctgttaatttcaccgtgattcttaaaaggaagaccgctgccctacagaatgtcaacatcttgggctcctttgaactacagttgtacactggcaagaagatggcaaaactgtgtgacctcaataagacctcgcagatccaaggtcaagtatcagaagtgactctgaccttggactccaagacctacatcaacagcctggctatattagatgatgagccagttatcagaggtttcatcattgcggaaattgtggagtctaaggaaatcatggcctctgaagtattcacgtctttccagtaccctgagttctctatagagttgcctaacacaggcagaattggccagctacttgtctgcaattgtatcttcaagaataccctggccatccctttgactgacgtcaagttctctttggaaagcctgggcatctcctcactacagacctctgaccatgggacggtgcagcctggtgagaccatccaatcccaaataaaatgcaccccaataaaaactggacccaagaaatttatcgtcaagttaagttccaaacaagtgaaagagattaatgctcagaagattgttctcatcaccaagtagccttgtctgatgctgtggagccttagttgagatttcagcatttcctaccttgtgcttagctttcagattatggatgattaaatttgatgacttatatgagggcagattcaagagccagcaggtcaaaaaggccaacacaaccataagcagccagacccacaaggccaggtcctgtgctatcacagggtcacctcttttacagttagaaacaccagccgaggccacagaatcccatccctttcctgagtcatggcctcaaaaatcagggccaccattgtctcaattcaaatccatagatttcgaagccacagaaaggcattgcttcctccctggtgtgaactctttctttggtattccatccactatcctggcaactcaaggctgcttctgttaactgaagcctgctccttcttgttctgccctccagagatttgctcaaatgatcaataagctttaaattaaactctacttcaagaaaactctgtggtccctgagtccttttttctttatgccaataagcttcttaaatgtgctggcggtttatgcagtcacttggggagccatggaatcctttgatctccccaggcaaggtgctctgaggagttggcttctttattgtctgttcagtacatccaacccctctctcaaaggctgtcaccccaactggatacacaccctggcaaaggcacgtagcttgaatgagggttattttgtgtctaattcacaggagagtcatgggtgggatacctgtcatcctctgcctttccagctgtccaagtgaaaaaaacctcaatcctggtcacccttgcccaagttgcccacatccctggcatacagtaggtgttcaataaatgtttattgaagga

SEQ ID NO: 731643 - DNA, 2754 bp, Homo sapiens; identical to SEQ ID NO: 85386

SEQ ID NO: 731644 - DNA, 2856 bp, Homo sapiens; identical to SEQ ID NO: 85388

SEQ ID NO: 731645 - DNA, 2862 bp, Homo sapiens; identical to SEQ ID NO: 85387

SEQ ID NO: 731646 - DNA, 482 bp, Homo sapiens; identical to SEQ ID NO: 728790

SEQ ID NO: 731647 - DNA, 585 bp, Homo sapiens
  misc_feature (3)..(4): n is a, c, g, or t
  misc_feature (6)..(6): n is a, c, g, or t
  misc_feature (15)..(15): n is a, c, g, or t
  misc_feature (129)..(129): n is a, c, g, or t
tcnntntttgccagnaatgttggaagtggacatttcattggcctggcagggtcaggtgctgctacgggcatttctgtatcagcttatgaacttaatggcttgttttctgtgctgatgttggcctggatnttcctacccatctacattgctgtcaggtcaccacgatgccagaatacctacggaagcgcttcggtggcatcagaatccccatcatcctggctgtactctacctatttatctacatcttcaccaagatctcggtagacatgtatgcaggtgccatcttcatccagcagtctttgcacctggatctgtacctggccatagttgggctactggccatcactgctgtatacacggttgctggtggcctggctgctgtgatctacacggatgccctgcagacgctgatcatgcttataggagcgctcaccttgatgggctacagtttcgccgcggttggtgggatggaaggactgaaggagaagtacttcttggccctggctagcaaccggagtgagaacagcagctgcgggctgccccgggaagatgccttccatattttccgagatccgctgacatctg

SEQ ID NO: 731648 - DNA, 438 bp, Homo sapiens
  misc_feature (412)..(412): n is a, c, g, or t
aaaaatgagtctcggagacctgtgttaactcttgtggtcgtctttgaacccagatctgcctgctgtcatggtcttgttttaatcactgctgaggaggggagggggcacaactggatgaagtgatgacatgatgtttaggagacacagaactaggaagcatcgcaaaggccttctttttccactctcctcttccttccagaatccattccccatgttaaaaaaggaaatttgaaggccagcacaggtgaaccactcagcgagtaagagactacaccagaggtggagttcaggccaggctgcctcagggcgcagagggaaatccaaatgggtaccttgttgtgagctgggggccaagtcctgactgtgttttcttgagcagggcttgttttctgtgctgatgttggcctggatnttcctacccatctacattgctgtcag

SEQ ID NO: 731649 - DNA, 929 bp, Homo sapiens; identical to SEQ ID NO: 387322

SEQ ID NO: 731650 - DNA, 3530 bp, Homo sapiens
  misc_feature (825)..(825): n is a, c, g, or t
  misc_feature (841)..(847): n is a, c, g, or t
  misc_feature (859)..(859): n is a, c, g, or t
  misc_feature (870)..(870): n is a, c, g, or t
  misc_feature (873)..(873): n is a, c, g, or t
  misc_feature (875)..(875): n is a, c, g, or t
  misc_feature (895)..(895): n is a, c, g, or t
  misc_feature (901)..(901): n is a, c, g, or t
  misc_feature (904)..(904): n is a, c, g, or t
ctttgaagaacatcctgaagattatatcggagacaatatatcaagaatctatttattgaatcatctagaacaaaagccaggagctccctaatggaagcacattagtgtttattttgatgaagaaatatatagattttttaaaacaaccacaaagtagatagctcagtaaaaaatcaattttggaagatgtcactgaacaactcttccaatgtatttctggattcagtgcccagtaataccaatcgctttcaagttagtgtcataaatgagaaccatgagagcagtgcagctgcagatgacaatactgacccaccacattatgaagaaacctcttttggggatgaagctcagaaaagactcagaatcagctttaggcctgggaatcaggagtgctatgacaatttcctccaaagtggagaaactgctaaaacagatgccagttttcacgcttatgattctcacacaaacacatactatctacaaacttttggccacaacaccatggatgccgttcccaagatagagtactatcgtaacaccggcagcatcagtgggcccaaggtcaaccgacccagcctgcttgagattcacgagcaactcgcaaagaatgtggcagtcaccccaagttcagctgacagagttgctaacggtgatgggatacctggagatgaacaagctgaaaataaggaagatgatcaagctggtgttgtgaagtttggatgggtgaaaggtgtgctggtaagatgcatgctgaacatctggggagtcatgctcttcattcgcctctcctggattgttggagaagctggaattggtcttggagtnatcatcattggcctannnnnnntagtaacgacantcacaggtatntcnangtctgctatttgccacgaanggagtngtnagaggaggtggggcctactatcttatttccagaagtttagggcccgagttcggtgggtcaataggcctgatctttgcttttgctaatgcagtggctgttgctatgtatgtggtgggattcgctgaaactgtagtagatcttcttaaggagagtgattcgatgatggtggatccaaccaatgacatccggattataggctccatcacagtggtgattcttctaggaatttcagtagctggaatggaatgggaggcaaaggcccaagtcattcttctggtcattcttctaattgctattgcaaacttcttcattggaactgtcattccatccaacaatgagaaaaagtccagaggtttctttaattaccaagcatcaatatttgcagaaaactttgggccacgcttcacaaagggtgaaggcttcttctctgtctttgccatttttttcccagcagctactgggattcttgctggtgccaatatctcaggagatttggaggatccccaagatgccatccccagaggaaccatgctggccattttcatcaccactgttgcctacttaggggttgcaatttgtgtaggggcctgtgtggtccgagatgccaccgggaacatgaatgacaccatcatttctgggatgaactgcaatggttcagcagcatgtgggttgggctatgacttctcaagatgtcgacatgaaccatgtcagtacgggctgatgaacaatttccaggtcatgagcatggtatcagggttcggccccctcatcactgcgggaatcttttctgcaacactctcctccgccctggcctcccttgtcagcgcacccaaagtgttccaggctctgtgcaaggacaacatctacaaagccctgcagttttttgcaaagggatatgggaaaaacaatgaacccctgagaggatatattctcacttttcttatagccatggcatttattcttattgcggaactgaacaccattgctcccatcatctccaactttttcctggcctcatatgcacttattaatttctcctgcttccatgcctcttatgccaaatctccaggatggagacctgcgtatggaatttacaacatgtgggtatctctttttggagctgttttgtgctgtgcagtcatgtttgtcatcaactggtgggcagctgtcatcacctatgtcattgaattcttcctttacgtctatgtgacttgtaagaagccagatgtgaactggggctcctccacacaggctctttcctacgtgagtgctttagacaatgctctggaattaaccacagtggaagaccacgtaaaaaacttcaggccccagtgcattgtcttaacagggggacccatgacaagacctgctctcctggacataactcacgcctttaccaagaacagtggcctttgcatctgctgtgaagtctttgtgggaccgcgcaaactgtgtgttaaggagatgaacagtggcatggcgaaaaaacaggcctggcttataaagaacaaaatcaaggctttttatgctgcagtggcggcagactgtttcagggatggtgtccgaagtcttcttcaggcctcaggcttaggaagaatgaaaccaaacactctggtgattggatataagaaaaactggaggaaagctcccttgacagagattgagaactacgtgggaatcatacatgatgcatttgattttgagattggcgtggttatagtcagaatcagccaaggatttgacatctctcaggttcttcaggtgcaagaggaattagagagattagaacaggagagactagcattggaagcgactatcaaagataatgagtgtgaagaggaaagtggaggcatccgaggcttgtttaaaaaagctggcaagttgaacattactaagacaacgcctaaaaaagatggcagcattaacacaagccagtcgatgcatgtgggagagttcaaccagaaactggtggaagccagcactcaatttaaaaagaaacaagaaaaaggcacaattgatgtttggtggttgtttgatgatggagggttaacacttcttatcccctatatcttaactctcagaaaaaaatggaaagactgtaaattaagaatctatgtgggagggaagatcaaccgcattgaagaagaaaaaattgcaatggcttcccttctgagcaaatttaggataaaatttgcagacatccatatcatcggtgacatcaacattaggccaaacaaagagagctggaaagtctttgaagagatgattgaaccatatcgtctccatgaaagctgcaaagatttaacaactgctgagaaattaaaaagagaaactccgtggaaaattacagatgcagaactggaagcagtcaaggaaaagagttaccgccaagttcgactgaatgaactcttacaggagcactccagagctgctaatctcattgtcctgagccttcccgtggcaagaaagggatccatatcggatttgttgtatatggcttggttggaaatcctcacaaagaacctcccacctgtcttactagttagaggaaatcacaaaaatgtcttgacattttactcttaaaacatgaaagattggaatacattttaacttaatgtaatgcata

SEQ ID NO: 731651 - DNA, 1618 bp, Homo sapiens
aatggcttcccttctgagcaaatttaggataaaatttgcagacatccatatcatcggtgacatcaacattaggccaaacaaagagagctggaaagtctttgaagagatgattgaaccatatcgtctccatgaaagctgcaaagatttaacaactgctgagaaattaaaaagagaaactccgtggaaaattacagatgcagaactggaagcagtcaaggaaaagagttaccgccaagttcgactgaatgaactcttacaggagcactccagagctgctaatctcattgtcctgagccttcccgtggcaagaaagggatccatatcggatttgttgtatatggcttggttggaaatcctcacaaagaacctcccacctgtcttactagttagaggaaatcacaaaaatgtcttgacattttactcttaaaacatgaaagattggaatacattttaacttaatgtaatgcataattaagaaacatgttccagtactttatgttgtaaatctgatctatggatatgcaaacctctggagatgatcctaccagattctacatacattgcataatttttatcagttaatgcgagcttttttttctcttctcagcttaaggggttgtcaaagccaatgttatccctagaaaaacatttttgtcactgctgttgataaacaagaaaatcaaggaaactcatgttggcttatgctcatggaaaccaccaatgtgattgtaaacttctccagacaaacttaaccttttgtttcttaattttttgttctgagtgtttgcttctcagccctggtataggtctcagccccacagcaggatctcaataaatgcttattgacaggctggcatagtaaccacaggtggttatcaaaggaaaagaccaataggctggggaacataattatgcttggcccctcagaggcttatactccaaagcagatttaaaaatcagtaactcaaaactttaagaagtagttgagtctacaaaatattcaaagcagttacctaaataaggttatttaatgtaacagattatatacttaaagtgatctgagcaatcattgataacatatggcttaaatttgctgctgcctgaaaagtatattaactagattagaagacaccatatactccaataaaatgaaatatattctattctcaatatataaactttaattgtactccctatcaaatattttgaaatttccatcacggcattactttgcatatttttttctaattaaatggttagtacagatgaaatctttatagatgactacttgaaaactaagtgctacaaattttcaaaccattattaagaaatatatcctgaatcatatatttagttactttctatagtgattgtatggatttaaaagaataattaaaatgtgaagttgaaaaacttgtaaaatttggaatatacagatactgatttttttcatttttgttagtatacctataatacataatcacattgacaaaccaatgaaaatattgtttttctgatgaatggcttgatttttctccttgacatgttttgactgttcattctaactgaaaacatatatgggaaaatatgaacctgaaataaaagcactcaaattcaa

SEQ ID NO: 731652 - DNA, 928 bp, Homo sapiens
ggtcttggtgtgattatcatcggcttagccgtgacagtgactggtatcactggtttatccacctctgctattgccacaaatggatgtgtcagaggaggtggggcctactatcttatttccagaagtttagggcccgagttcggtgggtcaataggcctgatctttgcttttgctaatgcagtggctgttgctatgtatgtggtgggattcgctgaaactgtagtagatcttcttaaggagagtgattcgatgatggtggatccaaccaatgacatccggattataggctccatcacagtggtgattcttctaggaatttcagtagctggaatggaatgggaggcaaaggcccaagtcattcttctggtcattcttctaattgctattgcaaacttcttcattggaactgtcattccatccaacaatgagaaaaagtccagaggtttctttaattaccaagcatcaatatttgcagaaaactttgggccacgcttcacaaagggtgaaggcttcttctctgtctttgccatttttttcccagcagctactgggattcttgctggtgccaatatctcaggagatttggaggtacgttgtttgctctgctttgcagtcctgggagtggtggtacacttggtgggtagcacaaggagctagagaggttagatgtgaccatattaccctacagattcaaactgtaggtttctgcaagatttcctgatgatttaaaagttctctcttttaatgccaaatttggatttatattccagataattcttccaaaagtcttattcagtgatatcagaagaacagggtagtgtgatagtgtgtcatatttccccaaaataaatgtagttcagtgaaaaaaataccagaaccaccctttctcttttaaacccaaatgaataggaatattttcctgtaaaag

SEQ ID NO: 731653 - DNA, 519 bp, Homo sapiens; identical to SEQ ID NO: 387319

SEQ ID NO: 731654 - DNA, 654 bp, Homo sapiens; identical to SEQ ID NO: 387320

SEQ ID NO: 731655 - DNA, 721 bp, Homo sapiens; identical to SEQ ID NO: 387321

SEQ ID NO: 731656 - DNA, 870 bp, Homo sapiens; identical to SEQ ID NO: 87955

SEQ ID NO: 731657 - DNA, 1101 bp, Homo sapiens; identical to SEQ ID NO: 87956

SEQ ID NO: 731658 - DNA, 2664 bp, Homo sapiens; identical to SEQ ID NO: 88007

SEQ ID NO: 731659 - DNA, 388 bp, Homo sapiens; identical to SEQ ID NO: 89609

SEQ ID NO: 731660 - DNA, 2732 bp, Homo sapiens
ctggctgtgctgttcatctcctagatgaatgggatggtctacattcatccatttggatttggccaaagacaccaacacccctttctccctctacataagctgcactgcatggttgctgctggatgtgttgtgttcctggcttccctctggatgctgacagaaacaaggctggaaggtctgggacatggagaacgacccctcgagacgaagagagtccatctctctcacacctgtggccaagggtctggagaacatgggggctgatttcttggaaagcctggaggaaggccagctccctaggagtgacttgagccccgcagagatcaggagcagctggagcgaggcggcgccgaagcccttctccagatggaggaacctgcagccagccctgagagccagaagcttctgcagggagcacatgcagctgtttcgatggatcggcacaggcctgctctgcactgggctctctgccttcctgctggtggcctgcctcctggatttccagagggccctggctctgtttgtcctcacctgtgtggtcctcaccttcctgggccaccgcctgctgaaacggcttctggggccaaagctgaggaggtttctcaagcctcagggccatccccgcctgctgctctggtttaagaggggtctagctcttgctgctttcctgggcctggtcctgtggctgtctctggacacctcccagcggcctgagcaactggtgtccttcgcaggaatctgcgtgttcatcgctctcctctttgcctgctcaaagcatcattgcgcagtgtcctggagggccgtgtcttggggacttggactgcagtttgtacttggactcctcgtcatcagaacagaaccaggattcattgcgttcgagtggctgggcgagcagatccggatcttcctgagctacacgaaggctggctccagcttcgtgtttggggaggcgctggtcaaggatgtctttgcctttcaggttctgcccatcattgtctttttcagctgtgtcatatccgttctctaccacgtgggcctcatgcagtgggtgatcctgaagattgcctggctgatgcaagtcaccatgggcaccacagccactgagaccctgagtgtggctggaaacatctttgtgagccagaccgaggctccattactgatccggccctacttggcagacatgacactctctgaagtccacgttgtcatgaccggaggttacgccaccattgctggcagcctgctgggtgcctacatctcctttgggatcgatgccacctcgttgattgcagcctctgtgatggctgccccttgtgccttggccctctccaagctggtctacccggaggtggaggagtccaagtttaggagggaggaaggagtgaaactgacctatggagatgctcagaacctcatagaagcagccagcactggggccgccatctccgtgaaggtggtcgccaacatcgctgccaacctgattgcgttcctggctgtgctggactttatcaatgctgccctctcctggctgggagacatggtggacatccaggggctcagcttccagctcatctgctcctacatcctgcggcctgtagccttcttgatgggtgtggcgtgggaggactgcccagtggtagctgagctgctggggatcaagctgtttctgaacgagtttgtggcctatcaagacctctccaagtacaagcaacgccgcctggcaggggccgaggagtgggtcggcgacaggaagcagtggatctccgtcagagctgaagtcctcacgacgtttgccctctgtggatttgccaatttcagctccattgggatcatgctgggaggcttgacctccatggtcccccaacggaagagcgacttctcccagatagtgctccgggcgctcttcacgggagcctgtgtgtccctggtgaacgcctgtatggcagggatcctctacatgcccaggggggctgaagttgactgcatgtccctcttgaacacgaccctcagcagcagtagctttgagatttaccagtgctgccgtgaggccttccagagcgtcaatccagagttcagcccagaggccctggacaactgctgtcggttttacaaccacacgatctgtgcacagtgaggacagaacatgcttgtgcttctgcgcttctgagggctgttctcccccgggaaccatctgtccccaccttccctttcccagagccctcttcagggaagccacaggacttagacccagctcaatcccacaattgggaaggggtcatggagtgagtgtgcagagagtgagtgaggacataaggaaggacatgtcccactccatcccccttcctgctcccccatttcctaactcccccagtgtgaattctcagggtcacttctgcctcctcccgtttcccctccacatccaaacagcaccctggtcctctctatcccccctctcctggggtccctcacatgccccttcccttctgttgtgggctgcacaccaaagcctcctcccctccccacttcctaggcactaggatctctctgtggcttcccctgctgggtggtgtcacctctttctctgctttcagagaaacccttcccgcctttcctcagagtgcttcccaaactgaggtcccatggcacactgtcctgggaggcgttcagagggttccatgatggactaggtttggaaccactgggttaaataaacttagagagggctgtttaga

SEQ ID NO: 731661 - DNA, 436 bp, Homo sapiens
ctcatctgctcctacatcctgcggcctgtagccttcttgatgggtgtggcgtgggaggactgcccagtggtagctgagctgctggggatcaagctgtttctgaacgagtttgtggcctatcaagacctctccaagtacaagcaacgccgcctggcaggggccgaggagtgggtcggcgacaggaagcagtggatctccagacgaggtcttgctatgttgaccaggctggtcttgaactcctggccttaaatgatcctactgccttggcttcccaaagtgctgggattacaggatattcaaaagtacacctgccgagtcccagccctgaggagtgttttcgtgcttcattgttaagtatcttggaggctctcagctggaaataaatgctcttcatttattaaagaagcatccttatatttttaagagtctttgaaaa

SEQ ID NO: 731662 - DNA, 307 bp, Homo sapiens
ctgcactgcatggttgctgctggatgtgttgtgttcctggcttccctctggatgctgacagaaacaagggtgagagaaaaggacagtaggagaggagggaaggcgggactgaagaaaggaggggaagggggtagcacagggcaaagtggaaaagcaggtagcgtcctttttttcttcactagggcttggtgaagaccccttcgaggacagctccaggcccatccctgtggtggccacccatggagacagtagtgctgctcagaggcatttagtttttgtttcttttctgtttttgaggtagagtctc

SEQ ID NO: 731663 - DNA, 854 bp, Homo sapiens
ggctctctgccttcctgctggtggcctgcctcctggatttccagagggccctggctctgtttgtcctcacctgtgtggtcctcaccttcctgggccaccgcctgctgaaacggcttctggggccaaagctgaggaggtttctcaagcctcagggccatccccgcctgctgctctggtttaagagggatcccaggccatggagcaaggagggcccgaatcagtacctccctcagatcacctggacagtgtgagacaaaaagccgcagggaccatccctggagggggattcagcaggctcgatcggggtccaggtgctggtatttttcattagcctccaggggattctgatgtagccagcagcgtccttggacaacagtttgagatctgctgcttttcaaactggattccttggagcgctggaaatctcagcgatgtcacagggcaggagagggaggttgtggagggaaaattcagacttcccgcccagcccaccatttcaccaggcagctctaaatttatgtgttttataagccaaggttcacacaaaaaagaaaattcgctgggggaaaaaaacagtttctatggcttaaaaaaaagtctgaagaccaccagtctatttcaatactctattttgttgatgaagaagctggtgaccaaagatacccaaagactaagtcagggggatgcaggggtacaggggtgcctctcactttcccaaagtgagatccacataccacagcaaaatgatttgagccagcctgtggatgaacacatttaaaattttatttataaatacatttactgttacatttgacttctctttattaaatacatttgtgatttatttttgcaat

SEQ ID NO: 731664 - DNA, 599 bp, Homo sapiens; identical to SEQ ID NO: 89612

SEQ ID NO: 731665 - DNA, 2438 bp, Homo sapiens; identical to SEQ ID NO: 457556

SEQ ID NO: 731666 - DNA, 428 bp, Homo sapiens
attatcgggaccattccactgatgcctaatccggggccatcgagccaagcagcaagcggcactcagggcttgcaagtgcagccaatcaccccccagctcctcacaaacgcccagggccagatcatcgccacagtcattgggaaccagatcctgcccgtgatcaacacccagggcatcacgctgtcacccatcaagcccggccagcagatcctcaaacggcagcgggtgaggtggatggggttaatctggaggagatccgagaatttgccaaagcttttaaaatccggcgcctgtcccttggcctgacccagactcaggtgggacaggctctcagtgctacagagggccccgcgtacagccagtcggccatctgcagacacaccatcctgagaagccactttttcctaccacaggagcccaagagaaca

SEQ ID NO: 731667 - DNA, 4091 bp, Homo sapiens; identical to SEQ ID NO: 320591

SEQ ID NO: 731668 - DNA, 4145 bp, Homo sapiens; identical to SEQ ID NO: 320577

SEQ ID NO: 731669 - DNA, 563 bp, Homo sapiens
atcagtcgtggtgactgccctggttgcactgtaagtatggggggacgtctccacgaaaaaaaactaactttctgccttgtgctctgcaggtccctccttctcccaccttccccaagtagctgctcctgacccccccacacaccttggcaaacgacaccagtggccgatagcaactggtgttttaaaaatactaatttggagccccatttgagacctacaacgggagagtctgcatcagattcggcctcagattctacagcatctgactacattcccagtaggttgtgacagttggaagtgtcatgtacaacatgcggcgattaagtctttcacccaccttttcaatgggatttcatctgttagttactgtgagtctcttattttcccatgtggaccatgtaattgctgagacagaaatggaaggagaaggaaatgaaactggtgaatgtactggatcatattactgtaagaaaggggtgattttgcccatttgggaaccccaagacccttcttttggggacaaaattgctagagctactgtgtattttgtggccatggtctac

SEQ ID NO: 731670 - DNA, 558 bp, Homo sapiens
gctggtaaatttagagaaggcatcatactgggatcttttttcacatccagcccatgcggactgagcagccaaagcttgacagaggtccctccttctcccaccttccccaagtagctgctcctgacccccccacacaccttggcaaacgacaccagtggccgatagcaactggtgttttaaaaatactaatttggagccccatttgagacctacaacgggagagtctgcatcagattcggcctcagattctacagcatctgactacattcccagtaggttgtgacagttggaagtgtcatgtacaacatgcggcgattaagtctttcacccaccttttcaatgggatttcatctgttagttactgtgagtctcttattttcccatgtggaccatgtaattgctgagacagaaatggaaggagaaggaaatgaaactggtgaatgtactggatcatattactgtaagaaaggggtgattttgcccatttgggaaccccaagacccttcttttggggacaaaattgctagagctactgtgtattttgtggccatggtctac

SEQ ID NO: 731671 - DNA, 369 bp, Homo sapiens
gctggtaaatttagagaaggcatcatactgggatcttttttcacatccagcccatgcggactgagcagccaaagcttgacagagtaggttgtgacagttggaagtgtcatgtacaacatgcggcgattaagtctttcacccaccttttcaatgggatttcatctgttagttactgtgagtctcttattttcccatgtggaccatgtaattgctgagacagaaatggaaggagaaggaaatgaaactggtgaatgtactggatcatattactgtaagaaaggggtgattttgcccatttgggaaccccaagacccttcttttggggacaaaattgctagagctactgtgtattttgtggccatggtctac

SEQ ID NO: 731672 - DNA, 1977 bp, Homo sapiens
gatagcagtgtaggtggttagcggcacctcggataaggtcctcctaggtcaaagggatgctaatgactagccaatgctctaggaagacattgagaccagccaacttcttgccttgataactactgaagagacattgggtggctggattttgaaagcagacttctggttataggtgatgcaacttgaaaaacaatcctgaaacatgaaacaagaataataatatttaaatgtaacttaatcattatacctctttatccatcaaagtgaattcattccattccctttcatctgtgctcatactttgcatcagatattgggtaaaccaaagtgtgtaggaagaaataaatgttttcatagtcattactctttacaatgggagtgctaaaattcaagcacatctttttcagaagctttgttaaatcaagtggagtatcccagatagttttcaccttccttctgattccatgttgcttgactctgaatttcagagcacctcctgttattccaaatgtgcctttcctctgggcctggaatgccccaagtgaattttgtcttggaaaatttgatgagccactagatatgagcctcttctctttcataggaagcccccgaataaacgccaccgggcaaggagttacaatattttatgttgatagacttggctactatccttacatagattcaatcacaggagtaactgtgaatggaggaatcccccagaagatttccttacaagaccatctggacaaagctaagaaagacattacattttatatgccagtagacaatttgggaatggctgttattgactgggaagaatggagacccacttgggcaagaaactggaaacctaaagatgtttacaagaataggtctattgaattggttcagcaacaaaatgtacaacttagtctcacagaggccactgagaaagcaaaacaagaatttgaaaaggcagggaaggatttcctggtagagactataaaattgggaaaattacttcggccaaatcacttgtggggttattatctttttccggattgttacaaccatcactataagaaacccggttacaatggaagttgcttcaatgtagaaataaaaagaaatgatgatctcagctggttgtggaatgaaagcactgctctttacccatccatttatttgaacactcagcagtctcctgtagctgctacactctatgtgcgcaatcgagttcgggaagccatcagagtttccaaaatacctgatgcaaaaagtccacttccggtttttgcatatacccgcatagtttttactgatcaagttttgaaattcctttctcaagatgaacttgtgtatacatttggcgaaactgttgctctgggtgcttctggaattgtaatatggggaaccctcagtataatgcgaagtatgaaatcttgcttgctcctagacaattacatggagactatactgaatccttacataatcaacgtcacactagcagccaaaatgtgtagccaagtgctttgccaggagcaaggagtgtgtataaggaaaaactggaattcaagtgactatcttcacctcaacccagataattttgctattcaacttgagaaaggtggaaagttcacagtacgtggaaaaccgacacttgaagacctggagcaattttctgaaaaattttattgcagctgttatagcaccttgagttgtaaggagaaagctgatgtaaaagacactgatgctgttgatgtgtgtattgctgatggtgtctgtatagatgcttttctaaaacctcccatggagacagaagaacctcaaattttctacaatgcttcaccctccacactatctgccacaatgttcattgttagtattttgtttcttatcatttcttctgtagcgagtttgtaattgcgcaggttagctgaaatgaacaatatgtccatcttaaagtgtgctttttcgactaattaaatctttgaaaag

SEQ ID NO: 731673 - DNA, 2748 bp, Homo sapiens
  misc_feature (1914)..(1914): n is a, c, g, or t
  misc_feature (2032)..(2033): n is a, c, g, or t
  misc_feature (2703)..(2703): n is a, c, g, or t
gatagcagtgtaggtggttagcggcacctcggataaggtcctcctaggtcaaagggatgctaatgactagccaatgctctaggaagacattgagaccagccaacttcttgccttgataactactgaagagacattgggtggctggattttgaaagcagacttctggttataggtgatgcaacttgaaaaacaatcctgaaacatgaaacaagaataataatatttaaatgtaacttaatcattatacctctttatccatcaaagtgaattcattccattccctttcatctgtgctcatactttgcatcagatattgggtaaaccaaagtgtgtaggaagaaataaatgttttcatagtcattactctttacaatgggagtgctaaaattcaagcacatctttttcagaagctttgttaaatcaagtggagtatcccagatagttttcaccttccttctgattccatgttgcttgactctgaatttcagagcacctcctgttattccaaatgtgcctttcctctgggcctggaatgccccaagtgaattttgtcttggaaaatttgatgagccactagatatgagcctcttctctttcataggaagcccccgaataaacgccaccgggcaaggagttacaatattttatgttgatagacttggctactatccttacatagattcaatcacaggagtaactgtgaatggaggaatcccccagaagatttccttacaagaccatctggacaaagctaagaaagacattacattttatatgccagtagacaatttgggaatggctgttattgactgggaagaatggagacccacttgggcaagaaactggaaacctaaagatgtttacaagaataggtctattgaattggttcagcaacaaaatgtacaacttagtctcacagaggccactgagaaagcaaaacaagaatttgaaaaggcagggaaggatttcctggtagagactataaaattgggaaaattacttcggccaaatcacttgtggggttattatctttttccggattgttacaaccatcactataagaaacccggttacaatggaagttgcttcaatgtagaaataaaaagaaatgatgatctcagctggttgtggaatgaaagcactgctctttacccatccatttatttgaacactcagcagtctcctgtagctgctacactctatgtgcgcaatcgagttcgggaagccatcagagtttccaaaatacctgatgcaaaaagtccacttccggtttttgcatatacccgcatagtttttactgatcaagttttgaaattcctttctcaagatgaacttgtgtatacatttggcgaaactgttgctctgggtgcttctggaattgtaatatggggaaccctcagtataatgcgaagtatgaaatcttgcttgctcctagacaattacatggagactatactgaatccttacataatcaacgtcacactagcagccaaaatgtgtagccaagtgctttgccaggagcaaggagtgtgtataaggaaaaactggaattcaagtgactatcttcacctcaacccagataattttgctattcaacttgagaaaggtggaaagttcacagtacgtggaaaaccgacacttgaagacctggagcaattttctgaaaaattttattgcagctgttatagcaccttgagttgtaaggagaaagctgatgtaaaagacactgatgctgttgatgtgtgtattgctgatggtgtctgtatagatgcttttctaaaacctcccatggagacagaagaacctcaaattttctacaatgcttcaccctccacactatctgccacaatgttcattgatctttgtgacctgtatcttgtgccaacctcctatctcatcctgtgactaagaatncttaacctcctgggagggcagctcaggaggtgtcagcctcattttacccagccctattcaagatggagtcactctggttccaatgcttctgacagcagtagagataacacagtattcnngcaagagaacagagctcctgatcacctgtgtgcgtcctttgagtggatggcagctgcatctctgcattacagctagttagaatgatgagtccttgctatgcctcaagcactgtttcgagtgtttgatgtctattatctcacttcatcctcaccaggaccccatccgagccttaatttcagttgacagtaactattggatccccaggaatatgtttgcatatttggggagaaaatactattggaggggaacagaaatgctactaagggtctcactgtgtcacccaggctggagtccatcaaagctcactgcagccttaaccttctgtgctcaagggatcctcccacttaagcctcctgagtagctggaactacaggcatatgccaccgagcctggctaatctttgatttttttgtacagattgtgtctccttatgttgctcaggctggactcaaacttctggtctcaagcgatctttccatcttagcttcccaaattgttggaattatggacatgagccagtgtgcttggcctgatttttttttttttttaatgagaaaaacgttccttaagaaaagtttcattgtaagacgaggacttgctatgttgccagtttggtcttgaactcggtctcaagtgattctcctgccttgggttcccaaagcgttgggncggcagatgtcagccaccgcgcctgccttattcttataaactcaa

SEQ ID NO: 731674 - DNA, 1389 bp, Homo sapiens
ctagtttctaaggatcatgtctgcgagccaggattcccgatccagagacaatggccccgatgggatggagcccgaaggcgtcatcgagagtaactggaatgagattgttgacagctttgatgacatgaacctctcggagtcccttctccgtggcatctacgcctatggttttgagaagccctctgccatccagcagcgagccattctaccttgtatcaagggttatgatgtgattgctcaagcccaatctgggactgggaaaacggccacatttgccatatcgattctgcagcagattgaattagatctaaaagccacccaggccttggtcctagcacccactcgagaattggctcagcagatacagaaggtggtcatggcactaggagactacatgggcgcctcctgtcacgcctgtatcgggggcaccaacgtgcgtgctgaggtgcagaaactgcagatggaagctccccacatcatcgtgggtacccctggccgtgtgtttgatatgcttaaccggagatacctgtcccccaaatacatcaagatgtttgtactggatgaagctgacgaaatgttaagccgtggattcaaggaccagatctatgacatattccaaaagctcaacagcaacacccaggtagttttgctgtcagccacaatgccttctgatgtgcttgaggtgaccaagaagttcatgagggaccccattcggattcttgtcaagaaggaagagttgaccctggagggtatccgccagttctacatcaacgtggaacgagaggagtggaagctggacacactatgtgacttgtatgaaaccctgaccatcacccaggcagtcatcttcatcaacacccggaggaaggtggactggctcaccgagaagatgcatgctcgagatttcactgtatccgccatgcatggagatatggaccaaaaggaacgagacgtgattatgagggagtttcgttctggctctagcagagttttgattaccactgacctgctggccagaggcattgatgtgcagcaggtttctttagtcatcaactatgaccttcccaccaacagggaaaactatatccacagaatcggtcgaggtggacggtttggccgtaaaggtgtggctattaacatggtgacagaagaagacaagaggactcttcgagacattgagaccttctacaacacctccattgaggaaatgcccctcaatgttgctgacctcatctgaggggctgtcctgccacccagccccagccagggctcaatctctgggggctgaggagcagcaggaggggggagggaagggagccaagggatggacatcttgtcattttttttctttgaataaatgtcactttttgaggcaaaagaaggaaccgt

SEQ ID NO: 731675 - DNA, 1575 bp, Homo sapiens
ggcacgaggctcacttatccaggttggtacgggggcaacagtagccacattggctgatgcttcagaattgccaaccacggtcaccgttgcccaagtgaattattctgccgtggctgatggagaggtggaacaaaattgggccacgttacagggaggtgagatgaccatccagacgacgcaagcatcagaggccacccaggcggtggcatcgttggcagaggccgcagtggcagcttctcaggagatgcagcagggagctacagtcactatggcgcttaacagcgaagctgccgcccatgctgtcgccaccctggctgaggccaccttacaaggtgggggacagatcgtcttgtctggggaaaccgcagcagccgtcggagcacttactggagtccaagatgctaatggttatgatgtgattgctcaagcccaatctgggactgggaaaacggccacatttgccatatcgattctgcagcagattgaattagatctaaaagccacccaggccttggtcctagcacccactcgagaattggctcagcagatacagaaggtggtcatggcactaggagactacatgggcgcctcctgtcacgcctgtatcgggggcaccaacgtgcgtgctgaggtgcagaaactgcagatggaagctccccacatcatcgtgggtacccctggccgtgtgtttgatatgcttaaccggagatacctgtcccccaaatacatcaagatgtttgtactggatgaagctgacgaaatgttaagccgtggattcaaggaccagatctatgacatattccaaaagctcaacagcaacacccaggtagttttgctgtcagccacaatgccttctgatgtgcttgaggtgaccaagaagttcatgagggaccccattcggattcttgtcaagaaggaagagttgaccctggagggtatccgccagttctacatcaacgtggaacgagaggagtggaagctggacacactatgtgacttgtatgaaaccctgaccatcacccaggcagtcatcttcatcaacacccggaggaaggtggactggctcaccgagaagatgcatgctcgagatttcactgtatccgccatgcatggagatatggaccaaaaggaacgagacgtgattatgagggagtttcgttctggctctagcagagttttgattaccactgacctgctggccagaggcattgatgtgcagcaggtttctttagtcatcaactatgaccttcccaccaacagggaaaactatatccacagaatcggtcgaggtggacggtttggccgtaaaggtgtggctattaacatggtgacagaagaagacaagaggactcttcgagacattgagaccttctacaacacctccattgaggaaatgcccctcaatgttgctgacctcatctgaggggctgtcctgccacccagccccagccagggctcaatctctgggggctgaggagcagcaggaggggggagggaagggagccaagggatggacatcttgtcattttttttctttgaataaatgtcactttttgaggcaaaagaaggaaccgt

SEQ ID NO: 731676 - DNA, 1309 bp, Homo sapiens
ctagtttctaaggatcatgtctgcgagccaggattcccgatccagagacaatggccccgatgggatggagcccgaaggcgtcatcgagagtaactggaatgagattgttgacagctttgatgacatgaacctctcggagtcccttctccgtggcatctacgcctatggttttgagaagccctctgccatccagcagcgagccattctaccttgtatcaagggttatgatgtgattgctcaagcccaatctgggactgggaaaacggccacatttgccatatcgattctgcagcagattgaattagatctaaaagccacccaggccttggtcctagcacccactcgagaattggctcagcagatacagaaggtggtcatggcactaggagactacatgggcgcctcctgtcacgcctgtatcgggggcaccaacgtgcgtgctgaggtgcagaaactgcagatggaagctccccacatcatcgtgggtacccctggccgtgtgtttgatatgcttaaccggagatacctgtcccccaaatacatcaagatgtttgtactggatgaagctgacgaaatgttaagccgtggattcaaggaccagatctatgacatattccaaaagctcaacagcaacacccaggtagttttgctgtcagccacaatgccttctgatgtgcttgaggtgaccaagaagttcatgagggaccccattcggattcttgtcaagaaggaagagttgaccctggagggtatccgccagttctacatcaacgtggaacgagaggagtggaagctggacacactatgtgacttgtatgaaaccctgaccatcacccaggcagtcatcttcatcaacacccggaggaaggtggactggctcaccgagaagatgcatgctcgagatttcactgtatccgccatgcatggagatatggaccaaaaggaacgagacgtgattatgagggagtttcgttctggctctagcagagttttgattaccactgacctgctgaatcggtcgaggtggacggtttggccgtaaaggtgtggctattaacatggtgacagaagaagacaagaggactcttcgagacattgagaccttctacaacacctccattgaggaaatgcccctcaatgttgctgacctcatctgaggggctgtcctgccacccagccccagccagggctcaatctctgggggctgaggagcagcaggaggggggagggaagggagccaagggatggacatcttgtcattttttttctttgaataaatgtcactttttgaggcaaaagaaggaaccgt

SEQ ID NO: 731677 - DNA, 2292 bp, Homo sapiens
gagtacctcggagctgcgacctccagttcacaataccacctgcctcacacccgggctcatcttttcatcccacacccaccacccccctctccgttcacggtgtcccgggaggctgcgacctgcgtagatgatttagcagactgcccctgcccatgctcctgctcctgctcctcctcctcctcttccccgctctctccctctcgcctcctcttccagtccaggcgcccagactcggcgaacgcagccccttgccaccagcggtgcctcgggctgcccggcgcgccgcctcccaggttctgtctcgccgcaccccggcgggcactggcgcgggcaaggacgctggcggggagaacgccctgggctcaacgtactccagaatcgaatgttgagagaagcagtgctctgatccagctcaggagaaaaaggagcgggttccgagtgagacttctggagccagctggacgtgccggtttgcccagtgcggcgcggctgcacgcaccgtccacaagagtctcagtcgcccaggctggagtgcagcagcacagtctcacctcattgcaacctccgcctcccgggttcgcgggttctccgcctcagcttcctagtagctgggattgcaggcactcaccaccatgcccggctaattttttgaatttttagtggagacgggatttcaccatgttggccatgctggtcttgaacccccgacctcggatgattcgcccgcctcggcctcccaaagtgctggaattacaggcgaaccttcactcagaagaaatgctgtggcccttccctttaccaacagaaaatggaacacaagagaccacatagctgaacaaattatagcctccttacaagtgagaaaccttcgaggctacatagttttcagccaaaggaaaataaccaacagcttctccacagtgtagactgaaacaagggaaacatgaacatcacaaactgtaccacagaggccagcatggctataagacccaagaccatcactgagaagatgctcatttgcatgactctggtggtcatcaccaccctcaccacgttgctgaacttggctgtgatcatggctattggcaccaccaagaagctccaccagcctgccaactacctaatctgttctctggccgtgacggacctcctggtggcagtgctcgtcatgcccctgagcatcatctacattgtcatggatcgctggaagcttgggtacttcctctgtgaggtgtggctgagtgtggacatgacctgctgcacctgctccatcctccacctctgtgtcattgccctggacaggtactgggccatcaccaatgctattgaatacgccaggaagaggacggccaagagggccgcgctgatgatccttaccgtctggaccatctccattttcatctccatgccccctctgttctggagaagccaccgccgcctaagccctccccctagtcagtgcaccatccagcacgaccatgttatctacaccatttactccacgctgggtgcgttttatatccccttgactttgatactgattctctattaccggatttaccacgcggccaagagcctttaccagaaaaggggatcaagtcggcacttaagcaacagaagcacagatagccagaattcttttgcaagttgtaaacttacacagactttctgtgtgtctgacttctccacctcagaccctaccacagagtttgaaaagttccatgcctccatcaggatcccccccttcgacaatgatctagatcacccaggagaacgtcagcagatctctagcaccagggaacggaaggcagcacgcatcctggggctgattctgggtgcattcattttatcctggctgccatttttcatcaaagagttgattgtgggtctgagcatctacaccgtgtcctcggaagtggccgactttctgacgtggctcggttatgtgaattctctgatcaaccctctgctctatacgagttttaatgaagactttaagctggcttttaaaaagctcattagatgccgagagcatacttagactgtaaaaagctaaaaggcacgactttttccagagcctcatgagtggatgggggtaaggggtgcaacttattaattcttgaacatacttggttcaggagagtttgtaagtatgtgtggtcttgtttccttgtttgtttgtttgttttgttctgttttgtttgaggattgttatttggcgtgctgttttctacctctggtcttatctgtgatacataatttcaaataaacattatcatacaaaaacagaaa

SEQ ID NO: 731678 - DNA, 1035 bp, Homo sapiens
gagtacctcggagctgcgacctccagttcacaataccacctgcctcacacccgggctcatcttttcatcccacacccaccacccccctctccgttcacggtgtcccgggaggctgcgacctgcgtagatgatttagcagactgcccctgcccatgctcctgctcctgctcctcctcctcctcttccccgctctctccctctcgcctcctcttccagtccaggcgcccagactcggcgaacgcagccccttgccaccagcggtgcctcgggctgcccggcgcgccgcctcccaggttctgtctcgccgcaccccggcgggcactggcgcgggcaaggacgctggcggggagaacgccctgggctcaacgtactccagaatcgaatgttgagagaagcagtgctctgatccagctcaggagaaaaaggagcgggttccgagtgagacttctggagccagctggacgtgccggtttgcccagtgcggcgcggctgcacgcaccgtccacaaggtctttttctgatcccagaaagactaactaaaagtctggaacctttaaaagtctgataagaaatatttaccatctaatctctctgaagcctgctacttggaggattcatctgcataataagaaccctggtctccacaaccccttatcttcattcagacattcctttctatattgattccagttctttagataataacttaacactttcaaccaattgccaatcagaaaatctttaaatccacctataactggaagctgccctgccaccatcactgctttgagttgttctgcctttctggaccaaaccaatgtacaccttatatgtatcaattgatgtctgcttgtaacttctgaccccctaaaatgtataagaccaagctgtaacccaaccatctgcgtacatgttctccgaccctcctgaagctgtgtcattggcatgcccttattcttgacaaaataaacttctaaattgattgagaaaaaaaatttaaaaaaataaaaacctgattttcttggtcagagctgg

SEQ ID NO: 731679 - DNA, 2043 bp, Homo sapiens
gagtacctcggagctgcgacctccagttcacaataccacctgcctcacacccgggctcatcttttcatcccacacccaccacccccctctccgttcacggtgtcccgggaggctgcgacctgcgtagatgatttagcagactgcccctgcccatgctcctgctcctgctcctcctcctcctcttccccgctctctccctctcgcctcctcttccagtccaggcgcccagactcggcgaacgcagccccttgccaccagcggtgcctcgggctgcccggcgcgccgcctcccaggttctgtctcgccgcaccccggcgggcactggcgcgggcaaggacgctggcggggagaacgccctgggctcaacgtactccagaatcgaatgttgagagaagcagtgctctgatccagctcaggagaaaaaggagcgggttccgagtgagacttctggagccagctggacgtgccggtttgcccagtgcggcgcggctgcacgcaccgtccacaaggaaccttcactcagaagaaatgctgtggcccttccctttaccaacagaaaatggaacacaagagaccacatagctgaacaaattatagcctccttacaagtgagaaaccttcgaggctacatagttttcagccaaaggaaaataaccaacagcttctccacagtgtagactgaaacaagggaaacatgaacatcacaaactgtaccacagaggccagcatggctataagacccaagaccatcactgagaagatgctcatttgcatgactctggtggtcatcaccaccctcaccacgttgctgaacttggctgtgatcatggctattggcaccaccaagaagctccaccagcctgccaactacctaatctgttctctggccgtgacggacctcctggtggcagtgctcgtcatgcccctgagcatcatctacattgtcatggatcgctggaagcttgggtacttcctctgtgaggtgtggctgagtgtggacatgacctgctgcacctgctccatcctccacctctgtgtcattgccctggacaggtactgggccatcaccaatgctattgaatacgccaggaagaggacggccaagagggccgcgctgatgatccttaccgtctggaccatctccattttcatctccatgccccctctgttctggagaagccaccgccgcctaagccctccccctagtcagtgcaccatccagcacgaccatgttatctacaccatttactccacgctgggtgcgttttatatccccttgactttgatactgattctctattaccggatttaccacgcggccaagagcctttaccagaaaaggggatcaagtcggcacttaagcaacagaagcacagatagccagaattcttttgcaagttgtaaacttacacagactttctgtgtgtctgacttctccacctcagaccctaccacagagtttgaaaagttccatgcctccatcaggatcccccccttcgacaatgatctagatcacccaggagaacgtcagcagatctctagcaccagggaacggaaggcagcacgcatcctggggctgattctgggtgcattcattttatcctggctgccatttttcatcaaagagttgattgtgggtctgagcatctacaccgtgtcctcggaagtggccgactttctgacgtggctcggttatgtgaattctctgatcaaccctctgctctatacgagttttaatgaagactttaagctggcttttaaaaagctcattagatgccgagagcatacttagactgtaaaaagctaaaaggcacgactttttccagagcctcatgagtggatgggggtaaggggtgcaacttattaattcttgaacatacttggttcaggagagtttgtaagtatgtgtggtcttgtttccttgtttgtttgtttgttttgttctgttttgtttgaggattgttatttggcgtgctgttttctacctctggtcttatctgtgatacataatttcaaataaacattatcatacaaaaacagaaa

SEQ ID NO: 731680 - DNA, 2104 bp, Homo sapiens
gagtacctcggagctgcgacctccagttcacaataccacctgcctcacacccgggctcatcttttcatcccacacccaccacccccctctccgttcacggtgtcccgggaggctgcgacctgcgtagatgatttagcagactgcccctgcccatgctcctgctcctgctcctcctcctcctcttccccgctctctccctctcgcctcctcttccagtccaggcgcccagactcggcgaacgcagccccttgccaccagcggtgcctcgggctgcccggcgcgccgcctcccaggttctgtctcgccgcaccccggcgggcactggcgcgggcaaggacgctggcggggagaacgccctgggctcaacgtactccagaatcgaatgttgagagaagcagtgctctgatccagctcaggagaaaaaggagcgggttccgagtgagacttctggagccagctggacgtgccggtttgcccagtgcggcgcggctgcacgcaccgtccacaaggtgaggggcgcacaccttccgggacgaccttggcttcccttcttacccccacccactccaggaaccttcactcagaagaaatgctgtggcccttccctttaccaacagaaaatggaacacaagagaccacatagctgaacaaattatagcctccttacaagtgagaaaccttcgaggctacatagttttcagccaaaggaaaataaccaacagcttctccacagtgtagactgaaacaagggaaacatgaacatcacaaactgtaccacagaggccagcatggctataagacccaagaccatcactgagaagatgctcatttgcatgactctggtggtcatcaccaccctcaccacgttgctgaacttggctgtgatcatggctattggcaccaccaagaagctccaccagcctgccaactacctaatctgttctctggccgtgacggacctcctggtggcagtgctcgtcatgcccctgagcatcatctacattgtcatggatcgctggaagcttgggtacttcctctgtgaggtgtggctgagtgtggacatgacctgctgcacctgctccatcctccacctctgtgtcattgccctggacaggtactgggccatcaccaatgctattgaatacgccaggaagaggacggccaagagggccgcgctgatgatccttaccgtctggaccatctccattttcatctccatgccccctctgttctggagaagccaccgccgcctaagccctccccctagtcagtgcaccatccagcacgaccatgttatctacaccatttactccacgctgggtgcgttttatatccccttgactttgatactgattctctattaccggatttaccacgcggccaagagcctttaccagaaaaggggatcaagtcggcacttaagcaacagaagcacagatagccagaattcttttgcaagttgtaaacttacacagactttctgtgtgtctgacttctccacctcagaccctaccacagagtttgaaaagttccatgcctccatcaggatcccccccttcgacaatgatctagatcacccaggagaacgtcagcagatctctagcaccagggaacggaaggcagcacgcatcctggggctgattctgggtgcattcattttatcctggctgccatttttcatcaaagagttgattgtgggtctgagcatctacaccgtgtcctcggaagtggccgactttctgacgtggctcggttatgtgaattctctgatcaaccctctgctctatacgagttttaatgaagactttaagctggcttttaaaaagctcattagatgccgagagcatacttagactgtaaaaagctaaaaggcacgactttttccagagcctcatgagtggatgggggtaaggggtgcaacttattaattcttgaacatacttggttcaggagagtttgtaagtatgtgtggtcttgtttccttgtttgtttgtttgttttgttctgttttgtttgaggattgttatttggcgtgctgttttctacctctggtcttatctgtgatacataatttcaaataaacattatcatacaaaaacagaaa

SEQ ID NO: 731681 - DNA, 2395 bp, Homo sapiens
  misc_feature (27)..(27): n is a, c, g, or t
  misc_feature (29)..(29): n is a, c, g, or t
  misc_feature (262)..(262): n is a, c, g, or t
aaagcttgctagattaactattgatananaagcttaaataggtagtaaaccactaaatatgcaaggaagtgattatcagggttgtgaaggagaagaacaggtaagttaaatgggcattctgaggagtagaaatttcctttacttcataattatttgttaattcatctttatatgtttaatgggcttttctctattattttatatttttcaataaaagaaaaaagaatttaaaaaatcttggagctcactgggagcaatgggnttgcagctgaagtccaatagtacaaatgatgtggtaagaggccggcagggctgtgaattacagcaacaaaggagaaaaggaagtgattggagaattaagcaacatgaatggtattattcaaagacagctcattataggacacggaactccctgggtaggagtttgaagctttcttaactcagaaagaaacttccaacacagtttcccaaagaaaaatgggcaccaagggcaaagttattaaatgcaaagcagccatcgcctgggaagcaggcaagcccctttgcattgaagaggttgaagtagctccccccaaggctcatgaagttcgcattcagatcattgctacctccctgtgccatactgatgccactgttatcgattctaaatttgagggcctagctttcccagtgatcgttggccatgaggctgcaggtattgtggaaagtattgggccaggagtgaccaacgtcaaaccaggtgacaaagtaattccactttatgcacctctatgtagaaaatgcaagttttgtctgagtccactcacaaatttgtgtgggaaaatcagtaatctcaaaagtcctgctagtgatcaacaactaatggaagacaaaaccagcaggtttacctgcaaaggaaaaccagtttaccatttctttggaaccagtacattctctcagtacactgtggtgtcagatatcaatcttgccaaaatagatgatgatgcaaatttagagagagtttgtctgcttggatgtgggttttcaactggctatggggctgcaatcaacaatgccaaggtcacccctggttcgacttgtgctgtctttggcctaggaggtgtgggtctttctgctgtaatgggttgtaaagcagcaggagcttccagaatcataggtattgacatcaacagtgagaagtttgtgaaggctaaagccctgggagccactgactgcctcaatcctagagacttacataaacctatccaggaagttatcattgaattgaccaagggaggtgtggattttgcccttgactgtgcaggtggatctgaaaccatgaaagcagccctggactgtacaaccgcaggctggggatcatgtactttcattggagtagctgctggtagcaaaggattgactgtttttccagaggagctaataatcggccgtactataaatggaacattctttggtggttggaaaagtgtagattctatcccaaagctggtcactgactataagaataagaaattcaatctggatgcactggtgacccataccctgccttttgacaaaatcagtgaggcatttgacctaatgaaccaaggaaaaagcatccgaacaatcctcatcttttgaagatgccaggagcaattcggaatactatctgattgaatgtgaacctgcctggttaatttattacctgatttgatgaaccaaggaaagccatgcgtttaaacaaatatttacatttaatatgggaacataaaagagctttaaatattatagactttgtacctgttatatatatgaatattccctatgttaaataataataataactagtgtttatgaatagaatcatatcatctttagaaattgtttaaaattagttctgggaagttgaaagtggggaatgaagagataataaataaaactagattggccatatgtttataatttttttagattgggtaatgaatacatggagtttcattatacttttctctccacttttgtctatgttgaaaattttctgggagctaaatgatgagaacacatggacacatgatggggaacaacacacactagggcctgttgagggcagggagtcggcagagagagagcatcaggaagaatagctaatggatgctgggcttcatacctgggtgatgagatgatctgtgcagcaaagcaccatggtacatgtttacctatgtaacaaacctgcacatcctgcacatgtaccctggaacttaataaaagttggaaatttttaaaaagaatgaataagacctggtatttgatagcacaacagggagactatagtcaacagcaatttaattgtatattttaatatgactaaaagagtataatggattgtttgtaacacaaataaatgcttgaggggatg

SEQ ID NO: 731682 - DNA, 2576 bp, Homo sapiens; identical to SEQ ID NO: 330233
  misc_feature (27)..(27): n is a, c, g, or t
  misc_feature (29)..(29): n is a, c, g, or t
  misc_feature (262)..(262): n is a, c, g, or t
  misc_feature (2570)..(2571): n is a, c, g, or t

SEQ ID NO: 731683 - DNA, 646 bp, Homo sapiens
  misc_feature (27)..(27): n is a, c, g, or t
  misc_feature (29)..(29): n is a, c, g, or t
  misc_feature (262)..(262): n is a, c, g, or t
aaagcttgctagattaactattgatananaagcttaaataggtagtaaaccactaaatatgcaaggaagtgattatcagggttgtgaaggagaagaacaggtaagttaaatgggcattctgaggagtagaaatttcctttacttcataattatttgttaattcatctttatatgtttaatgggcttttctctattattttatatttttcaataaaagaaaaaagaatttaaaaaatcttggagctcactgggagcaatgggnttgcagctgaagtccaatagtacaaatgatgtggtaagaggccggcagggctgtgaattacagcaacaaaggagaaaaggaagtgattggagaattaagcaacatgaatggtattattcaaagacagctcattataggacacggaactccctgggtaggagtttgaagctttcttaactcagaaagaaacttccaacacagtttcccaaagaacaggcaagcccctttgcattgaagaggttgaagtagctccccccaaggctcatgaagttcgcattcagatcattgctacctccctgtgccatactgatgccactgttatcgattctaaatttgagggcctagctttcccagtgatcgttggccatgaggctgcaggtattg

SEQ ID NO: 731684 - DNA, 2056 bp, Homo sapiens; identical to SEQ ID NO: 330240
  misc_feature (2050)..(2051): n is a, c, g, or t

SEQ ID NO: 731685 - DNA, 2006 bp, Homo sapiens
  misc_feature (2000)..(2001): n is a, c, g, or t
tctccctcttccttttctttctctctttcgttattaaatgcaaagcagccatcgcctgggaagcaggcaagcccctttgcattgaagaggttgaagtagctccccccaaggctcatgaagttcgcattcagatcattgctacctccctgtgccatactgatgccactgttatcgattctaaatttgagggcctagctttcccagtgatcgttggccatgaggctgcaggtattgtggaaagtattgggccaggagtgaccaacgtcaaaccaggtgacaaagtaattccactttatgcacctctatgtagaaaatgcaagttttgtctgagtccactcacaaatttgtgtgggaaaatcagtaatctcaaaagtcctgctagtgatcaacaactaatggaagacaaaaccagcaggtttacctgcaaaggaaaaccagtttaccatttctttggaaccagtacattctctcagtacactgtggtgtcagatatcaatcttgcctcaactggctatggggctgcaatcaacaatgccaaggtcacccctggttcgacttgtgctgtctttggcctaggaggtgtgggtctttctgctgtaatgggttgtaaagcagcaggagcttccagaatcataggtattgacatcaacagtgagaagtttgtgaaggctaaagccctgggagccactgactgcctcaatcctagagacttacataaacctatccaggaagttatcattgaattgaccaagggaggtgtggattttgcccttgactgtgcaggtggatctgaaaccatgaaagcagccctggactgtacaaccgcaggctggggatcatgtactttcattggagtagctgctggtagcaaaggattgactgtttttccagaggagctaataatcggccgtactataaatggaacattctttggtggttggaaaagtgtagattctatcccaaagctggtcactgactataagaataagaaattcaatctggatgcactggtgacccataccctgccttttgacaaaatcagtgaggcatttgacctaatgaaccaaggaaaaagtatctgattgaatgtgaacctgcctggttaatttattacctgatttgatgaaccaaggaaagccatgcgtttaaacaaatatttacatttaatatgggaacataaaagagctttaaatattatagactttgtacctgttatatatatgaatattccctatgttaaataataataataactagtgtttatgaatagaatcatatcatctttagaaattgtttaaaattagttctgggaagttgaaagtggggaatgaagagataataaataaaactagattggccatatgtttataatttttttagattgggtaatgaatacatggagtttcattatacttttctctccacttttgtctatgttgaaaattttctgggagctaaatgatgagaacacatggacacatgatggggaacaacacacactagggcctgttgagggcagggagtcggcagagagagagcatcaggaagaatagctaatggatgctgggcttcatacctgggtgatgagatgatctgtgcagcaaagcaccatggtacatgtttacctatgtaacaaacctgcacatcctgcacatgtaccctggaacttaataaaagttggaaatttttaaaaagaatgaataagacctggtatttgatagcacaacagggagactatagtcaacagcaatttaattgtatattttaatatgactaaaagagtataatggattgtttgtaacacaaataaatgcttgaggggatggacaccccatattacatgatgtgattattacacattgcatgcctatatcaaaacatctcatgtaccccataaatatatacacctaatacccacaaaacttaaaatataaaatgttttaaataaaaataaagaaaagatttccacaataaaaagatttttactggaaaaaatcacnntattt

SEQ ID NO: 731686 - DNA, 2522 bp, Homo sapiens; identical to SEQ ID NO: 330235
  misc_feature (27)..(27): n is a, c, g, or t
  misc_feature (29)..(29): n is a, c, g, or t
  misc_feature (262)..(262): n is a, c, g, or t
  misc_feature (2516)..(2517): n is a, c, g, or t

SEQ ID NO: 731687 - DNA, 2472 bp, Homo sapiens; identical to SEQ ID NO: 330236
  misc_feature (27)..(27): n is a, c, g, or t
  misc_feature (29)..(29): n is a, c, g, or t
  misc_feature (262)..(262): n is a, c, g, or t
  misc_feature (2466)..(2467): n is a, c, g, or t

SEQ ID NO: 731688 - DNA, 2526 bp, Homo sapiens; identical to SEQ ID NO: 330238
  misc_feature (27)..(27): n is a, c, g, or t
  misc_feature (29)..(29): n is a, c, g, or t
  misc_feature (262)..(262): n is a, c, g, or t
  misc_feature (2520)..(2521): n is a, c, g, or t

SEQ ID NO: 731689 - DNA, 1277 bp, Homo sapiens; identical to SEQ ID NO: 330245
  misc_feature (46)..(46): n is a, c, g, or t
  misc_feature (1271)..(1272): n is a, c, g, or t

SEQ ID NO: 731690 - DNA, 1043 bp, Homo sapiens
  misc_feature (46)..(46): n is a, c, g, or t
gtagggcgggaatggggggggggggggctggtaggtagtgggtcgntctggcaggtggatctgaaaccatgaaagcagccctggactgtacaaccgcaggctggggatcatgtactttcattggagtagctgctggtagcaaaggattgactgtttttccagaggagctaataatcggccgtactataaatggaacattctttggtggttggaaaagtgtagattctatcccaaagctggtcactgactataagaataagaaattcaatctggatgcactggtgacccataccctgccttttgacaaaatcagtgaggcatttgacctaatgaaccaaggaaaaagtatctgattgaatgtgaacctgcctggttaatttattacctgatttgatgaaccaaggaaagccatgcgtttaaacaaatatttacatttaatatgggaacataaaagagctttaaatattatagactttgtacctgttatatatatgaatattccctatgttaaataataataataactagtgtttatgaatagaatcatatcatctttagaaattgtttaaaattagttctgggaagttgaaagtggggaatgaagagataataaataaaactagattggccatatgtttataatttttttagattgggtaatgaatacatggagtttcattatacttttctctccacttttgtctatgttgaaaattttctgggagctaaatgatgagaacacatggacacatgatggggaacaacacacactagggcctgttgagggcagggagtcggcagagagagagcatcaggaagaatagctaatggatgctgggcttcatacctgggtgatgagatgatctgtgcagcaaagcaccatggtacatgtttacctatgtaacaaacctgcacatcctgcacatgtaccctggaacttaataaaaggagactatagtcaacagcaatttaattgtatattttaatatgactaaaagagtataatggattgtttgtaacacaaataaatgcttgaggggatg

SEQ ID NO: 731691 - DNA, 1822 bp, Homo sapiens
tctccctcttccttttctttctctctttcgttattaaatgcaaagcagccatcgcctgggaagcaggcaagcccctttgcattgaagaggttgaagtagctccccccaaggctcatgaagttcgcattcagatcattgctacctccctgtgccatactgatgccactgttatcgattctaaatttgagggcctagctttcccagtgatcgttggccatgaggctgcaggtattgtggaaagtattgggccaggagtgaccaacgtcaaaccaggtgacaaagtaattccactttatgcacctctatgtagaaaatgcaagttttgtctgagtccactcacaaatttgtgtgggaaaatcagtaatctcaaaagtcctgctagtgatcaacaactaatggaagacaaaaccagcaggtttacctgcaaaggaaaaccagtttaccatttctttggaaccagtacattctctcagtacactgtggtgtcagatatcaatcttgcctcaactggctatggggctgcaatcaacaatgccaaggtcacccctggttcgacttgtgctgtctttggcctaggaggtgtgggtctttctgctgtaatgggttgtaaagcagcaggagcttccagaatcataggtattgacatcaacagtgagaagtttgtgaaggctaaagccctgggagccactgactgcctcaatcctagagacttacataaacctatccaggaagttatcattgaattgaccaagggaggtgtggattttgcccttgactgtgcaggtggatctgaaaccatgaaagcagccctggactgtacaaccgcaggctggggatcatgtactttcattggagtagctgctggtagcaaaggattgactgtttttccagaggagctaataatcggccgtactataaatggaacattctttggtggttggaaaagtgtagattctatcccaaagctggtcactgactataagaataagaaattcaatctggatgcactggtgacccataccctgccttttgacaaaatcagtgaggcatttgacctaatgaaccaaggaaaaagcatccgaacaatcctcatcttttgaagatgccaggagcaattcggaatactatctgattgaatgtgaacctgcctggttaatttattacctgatttgatgaaccaaggaaagccatgcgtttaaacaaatatttacatttaatatgggaacataaaagagctttaaatattatagactttgtacctgttatatatatgaatattccctatgttaaataataataataactagtgtttatgaatagaatcatatcatctttagaaattgtttaaaattagttctgggaagttgaaagtggggaatgaagagataataaataaaactagattggccatatgtttataatttttttagattgggtaatgaatacatggagtttcattatacttttctctccacttttgtctatgttgaaaattttctgggagctaaatgatgagaacacatggacacatgatggggaacaacacacactagggcctgttgagggcagggagtcggcagagagagagcatcaggaagaatagctaatggatgctgggcttcatacctgggtgatgagatgatctgtgcagcaaagcaccatggtacatgtttacctatgtaacaaacctgcacatcctgcacatgtaccctggaacttaataaaaggagactatagtcaacagcaatttaattgtatattttaatatgactaaaagagtataatggattgtttgtaacacaaataaatgcttgaggggatg

SEQ ID NO: 731692 - DNA, 1772 bp, Homo sapiens
tctccctcttccttttctttctctctttcgttattaaatgcaaagcagccatcgcctgggaagcaggcaagcccctttgcattgaagaggttgaagtagctccccccaaggctcatgaagttcgcattcagatcattgctacctccctgtgccatactgatgccactgttatcgattctaaatttgagggcctagctttcccagtgatcgttggccatgaggctgcaggtattgtggaaagtattgggccaggagtgaccaacgtcaaaccaggtgacaaagtaattccactttatgcacctctatgtagaaaatgcaagttttgtctgagtccactcacaaatttgtgtgggaaaatcagtaatctcaaaagtcctgctagtgatcaacaactaatggaagacaaaaccagcaggtttacctgcaaaggaaaaccagtttaccatttctttggaaccagtacattctctcagtacactgtggtgtcagatatcaatcttgcctcaactggctatggggctgcaatcaacaatgccaaggtcacccctggttcgacttgtgctgtctttggcctaggaggtgtgggtctttctgctgtaatgggttgtaaagcagcaggagcttccagaatcataggtattgacatcaacagtgagaagtttgtgaaggctaaagccctgggagccactgactgcctcaatcctagagacttacataaacctatccaggaagttatcattgaattgaccaagggaggtgtggattttgcccttgactgtgcaggtggatctgaaaccatgaaagcagccctggactgtacaaccgcaggctggggatcatgtactttcattggagtagctgctggtagcaaaggattgactgtttttccagaggagctaataatcggccgtactataaatggaacattctttggtggttggaaaagtgtagattctatcccaaagctggtcactgactataagaataagaaattcaatctggatgcactggtgacccataccctgccttttgacaaaatcagtgaggcatttgacctaatgaaccaaggaaaaagtatctgattgaatgtgaacctgcctggttaatttattacctgatttgatgaaccaaggaaagccatgcgtttaaacaaatatttacatttaatatgggaacataaaagagctttaaatattatagactttgtacctgttatatatatgaatattccctatgttaaataataataataactagtgtttatgaatagaatcatatcatctttagaaattgtttaaaattagttctgggaagttgaaagtggggaatgaagagataataaataaaactagattggccatatgtttataatttttttagattgggtaatgaatacatggagtttcattatacttttctctccacttttgtctatgttgaaaattttctgggagctaaatgatgagaacacatggacacatgatggggaacaacacacactagggcctgttgagggcagggagtcggcagagagagagcatcaggaagaatagctaatggatgctgggcttcatacctgggtgatgagatgatctgtgcagcaaagcaccatggtacatgtttacctatgtaacaaacctgcacatcctgcacatgtaccctggaacttaataaaaggagactatagtcaacagcaatttaattgtatattttaatatgactaaaagagtataatggattgtttgtaacacaaataaatgcttgaggggatg

SEQ ID NO: 731693 - DNA, 2002 bp, Homo sapiens
  misc_feature (1996)..(1997): n is a, c, g, or t
tctccctcttccttttctttctctctttcgttattaaatgcaaagcagccatcgcctgggaagcaggcaagcccctttgcattgaagaggttgaagtagctccccccaaggctcatgaagttcgcattcagatcattgctacctccctgtgccatactgatgccactgttatcgattctaaatttgagggcctagctttcccagtgatcgttggccatgaggctgcaggtattgtggaaagtattgggccaggagtgaccaacgtcaaaccaggtgacaaagtaattccactttatgcacctctatgtagaaaatgcaagttttgtctgagtccactcacaaatttgtgtgggaaaatcagtaatctcaaaagtcctgctagtgatcaacaactaatggaagacaaaaccagcaggtttacctgcaaaggaaaaccagtttaccatttctttggaaccagtacattctctcagtacactgtggtgtcagatatcaatcttgcctcaactggctatggggctgcaatcaacaatgccaaggtcacccctggttcgacttgtgctgtctttggcctaggaggtgtgggtctttctgctgtaatgggttgtaaagcagcaggagcttccagaatcataggtattgacatcaacagtgagaagtttgtgaaggctaaagccctgggagccactgactgcctcaatcctagagacttacataaacctatccaggaagttatcattgaattgaccaagggaggtgtggattttgcccttgactgtgcaggtggatctgaaaccatgaaagcagccctggactgtacaaccgcaggctggggatcatgtactttcattggagtagctgctggtagcaaaggattgactgtttttccagaggagctaataatcggccgtactataaatggaacattctttggtggttggaaaagtgtagattctatcccaaagctggtcactgactataagaataagaaattcaatctggatgcactggtgacccataccctgccttttgacaaaatcagtgaggcatttgacctaatgaaccaaggaaaaagcatccgaacaatcctcatcttttgaagatgccaggagcaattcggaatactatctgattgaatgtgaacctgcctggttaatttattacctgatttgatgaaccaaggaaagccatgcgtttaaacaaatatttacatttaatatgggaacattatgttaaataataataataactagtgtttatgaatagaatcatatcatctttagaaattgtttaaaattagttctgggaagttgaaagtggggaatgaagagataataaataaaactagattggccatatgtttataatttttttagattgggtaatgaatacatggagtttcattatacttttctctccacttttgtctatgttgaaaattttctgggagctaaatgatgagaacacatggacacatgatggggaacaacacacactagggcctgttgagggcagggagtcggcagagagagagcatcaggaagaatagctaatggatgctgggcttcatacctgggtgatgagatgatctgtgcagcaaagcaccatggtacatgtttacctatgtaacaaacctgcacatcctgcacatgtaccctggaacttaataaaagttggaaatttttaaaaagaatgaataagacctggtatttgatagcacaacagggagactatagtcaacagcaatttaattgtatattttaatatgactaaaagagtataatggattgtttgtaacacaaataaatgcttgaggggatggacaccccatattacatgatgtgattattacacattgcatgcctatatcaaaacatctcatgtaccccataaatatatacacctaatacccacaaaacttaaaatataaaatgttttaaataaaaataaagaaaagatttccacaataaaaagatttttactggaaaaaatcacnntattt

SEQ ID NO: 731694 - DNA, 2140 bp, Homo sapiens
  misc_feature (27)..(27): n is a, c, g, or t
  misc_feature (29)..(29): n is a, c, g, or t
  misc_feature (262)..(262): n is a, c, g, or t
  misc_feature (2134)..(2135): n is a, c, g, or t
aaagcttgctagattaactattgatananaagcttaaataggtagtaaaccactaaatatgcaaggaagtgattatcagggttgtgaaggagaagaacaggtaagttaaatgggcattctgaggagtagaaatttcctttacttcataattatttgttaattcatctttatatgtttaatgggcttttctctattattttatatttttcaataaaagaaaaaagaatttaaaaaatcttggagctcactgggagcaatgggnttgcagctgaagtccaatagtacaaatgatgtggtaagaggccggcagggctgtgaattacagcaacaaaggagaaaaggaagtgattggagaattaagcaacatgaatggtattattcaaagacagctcattataggacacggaactccctgggtaggagtttgaagctttcttaactcagaaagaaacttccaacacagtttcccaaagaaaaatgggcaccaagggcaaagttattaaatgcaaagcagccatcgcctgggaagcaggcaagcccctttgcattgaagaggttgaagtagctccccccaaggctcatgaagttcgcattcagatcattgctacctccctgtgccatactgatgccactgttatcgattctaaatttgagggcctagctttcccagtgatcgttggccatgaggctgcaggtattgtggaaagtattgggccaggagtgaccaacgtcaaaccaggtgacaaagtaattccactttatgcacctctatgtagaaaatgcaagttttgtctgagtccactcacaaatttgtgtgggaaaatcagtaatctcaaaagtcctgctagtgatcaacaactaatggaagacaaaaccagcaggttaaagcagccctggactgtacaaccgcaggctggggatcatgtactttcattggagtagctgctggtagcaaaggattgactgtttttccagaggagctaataatcggccgtactataaatggaacattctttggtggttggaaaagtgtagattctatcccaaagctggtcactgactataagaataagaaattcaatctggatgcactggtgacccataccctgccttttgacaaaatcagtgaggcatttgacctaatgaaccaaggaaaaagcatccgaacaatcctcatcttttgaagatgccaggagcaattcggaatactatctgattgaatgtgaacctgcctggttaatttattacctgatttgatgaaccaaggaaagccatgcgtttaaacaaatatttacatttaatatgggaacataaaagagctttaaatattatagactttgtacctgttatatatatgaatattccctatgttaaataataataataactagtgtttatgaatagaatcatatcatctttagaaattgtttaaaattagttctgggaagttgaaagtggggaatgaagagataataaataaaactagattggccatatgtttataatttttttagattgggtaatgaatacatggagtttcattatacttttctctccacttttgtctatgttgaaaattttctgggagctaaatgatgagaacacatggacacatgatggggaacaacacacactagggcctgttgagggcagggagtcggcagagagagagcatcaggaagaatagctaatggatgctgggcttcatacctgggtgatgagatgatctgtgcagcaaagcaccatggtacatgtttacctatgtaacaaacctgcacatcctgcacatgtaccctggaacttaataaaagttggaaatttttaaaaagaatgaataagacctggtatttgatagcacaacagggagactatagtcaacagcaatttaattgtatattttaatatgactaaaagagtataatggattgtttgtaacacaaataaatgcttgaggggatggacaccccatattacatgatgtgattattacacattgcatgcctatatcaaaacatctcatgtaccccataaatatatacacctaatacccacaaaacttaaaatataaaatgttttaaataaaaataaagaaaagatttccacaataaaaagatttttactggaaaaaatcacnntattt

SEQ ID NO: 731695 - DNA, 1906 bp, Homo sapiens
  misc_feature (27)..(27): n is a, c, g, or t
  misc_feature (29)..(29): n is a, c, g, or t
  misc_feature (262)..(262): n is a, c, g, or t
aaagcttgctagattaactattgatananaagcttaaataggtagtaaaccactaaatatgcaaggaagtgattatcagggttgtgaaggagaagaacaggtaagttaaatgggcattctgaggagtagaaatttcctttacttcataattatttgttaattcatctttatatgtttaatgggcttttctctattattttatatttttcaataaaagaaaaaagaatttaaaaaatcttggagctcactgggagcaatgggnttgcagctgaagtccaatagtacaaatgatgtggtaagaggccggcagggctgtgaattacagcaacaaaggagaaaaggaagtgattggagaattaagcaacatgaatggtattattcaaagacagctcattataggacacggaactccctgggtaggagtttgaagctttcttaactcagaaagaaacttccaacacagtttcccaaagaaaaatgggcaccaagggcaaagttattaaatgcaaagcagccatcgcctgggaagcaggcaagcccctttgcattgaagaggttgaagtagctccccccaaggctcatgaagttcgcattcagatcattgctacctccctgtgccatactgatgccactgttatcgattctaaatttgagggcctagctttcccagtgatcgttggccatgaggctgcaggtattgtggaaagtattgggccaggagtgaccaacgtcaaaccaggtgacaaagtaattccactttatgcacctctatgtagaaaatgcaagttttgtctgagtccactcacaaatttgtgtgggaaaatcagtaatctcaaaagtcctgctagtgatcaacaactaatggaagacaaaaccagcaggttaaagcagccctggactgtacaaccgcaggctggggatcatgtactttcattggagtagctgctggtagcaaaggattgactgtttttccagaggagctaataatcggccgtactataaatggaacattctttggtggttggaaaagtgtagattctatcccaaagctggtcactgactataagaataagaaattcaatctggatgcactggtgacccataccctgccttttgacaaaatcagtgaggcatttgacctaatgaaccaaggaaaaagcatccgaacaatcctcatcttttgaagatgccaggagcaattcggaatactatctgattgaatgtgaacctgcctggttaatttattacctgatttgatgaaccaaggaaagccatgcgtttaaacaaatatttacatttaatatgggaacataaaagagctttaaatattatagactttgtacctgttatatatatgaatattccctatgttaaataataataataactagtgtttatgaatagaatcatatcatctttagaaattgtttaaaattagttctgggaagttgaaagtggggaatgaagagataataaataaaactagattggccatatgtttataatttttttagattgggtaatgaatacatggagtttcattatacttttctctccacttttgtctatgttgaaaattttctgggagctaaatgatgagaacacatggacacatgatggggaacaacacacactagggcctgttgagggcagggagtcggcagagagagagcatcaggaagaatagctaatggatgctgggcttcatacctgggtgatgagatgatctgtgcagcaaagcaccatggtacatgtttacctatgtaacaaacctgcacatcctgcacatgtaccctggaacttaataaaaggagactatagtcaacagcaatttaattgtatattttaatatgactaaaagagtataatggattgtttgtaacacaaataaatgcttgaggggatg

SEQ ID NO: 731696 - DNA, 2086 bp, Homo sapiens
  misc_feature (27)..(27): n is a, c, g, or t
  misc_feature (29)..(29): n is a, c, g, or t
  misc_feature (262)..(262): n is a, c, g, or t
  misc_feature (2080)..(2081): n is a, c, g, or t
aaagcttgctagattaactattgatananaagcttaaataggtagtaaaccactaaatatgcaaggaagtgattatcagggttgtgaaggagaagaacaggtaagttaaatgggcattctgaggagtagaaatttcctttacttcataattatttgttaattcatctttatatgtttaatgggcttttctctattattttatatttttcaataaaagaaaaaagaatttaaaaaatcttggagctcactgggagcaatgggnttgcagctgaagtccaatagtacaaatgatgtggtaagaggccggcagggctgtgaattacagcaacaaaggagaaaaggaagtgattggagaattaagcaacatgaatggtattattcaaagacagctcattataggacacggaactccctgggtaggagtttgaagctttcttaactcagaaagaaacttccaacacagtttcccaaagaaaaatgggcaccaagggcaaagttattaaatgcaaagcagccatcgcctgggaagcaggcaagcccctttgcattgaagaggttgaagtagctccccccaaggctcatgaagttcgcattcagatcattgctacctccctgtgccatactgatgccactgttatcgattctaaatttgagggcctagctttcccagtgatcgttggccatgaggctgcaggtattgtggaaagtattgggccaggagtgaccaacgtcaaaccaggtgacaaagtaattccactttatgcacctctatgtagaaaatgcaagttttgtctgagtccactcacaaatttgtgtgggaaaatcagtaatctcaaaagtcctgctagtgatcaacaactaatggaagacaaaaccagcaggttaaagcagccctggactgtacaaccgcaggctggggatcatgtactttcattggagtagctgctggtagcaaaggattgactgtttttccagaggagctaataatcggccgtactataaatggaacattctttggtggttggaaaagtgtagattctatcccaaagctggtcactgactataagaataagaaattcaatctggatgcactggtgacccataccctgccttttgacaaaatcagtgaggcatttgacctaatgaaccaaggaaaaagcatccgaacaatcctcatcttttgaagatgccaggagcaattcggaatactatctgattgaatgtgaacctgcctggttaatttattacctgatttgatgaaccaaggaaagccatgcgtttaaacaaatatttacatttaatatgggaacattatgttaaataataataataactagtgtttatgaatagaatcatatcatctttagaaattgtttaaaattagttctgggaagttgaaagtggggaatgaagagataataaataaaactagattggccatatgtttataatttttttagattgggtaatgaatacatggagtttcattatacttttctctccacttttgtctatgttgaaaattttctgggagctaaatgatgagaacacatggacacatgatggggaacaacacacactagggcctgttgagggcagggagtcggcagagagagagcatcaggaagaatagctaatggatgctgggcttcatacctgggtgatgagatgatctgtgcagcaaagcaccatggtacatgtttacctatgtaacaaacctgcacatcctgcacatgtaccctggaacttaataaaagttggaaatttttaaaaagaatgaataagacctggtatttgatagcacaacagggagactatagtcaacagcaatttaattgtatattttaatatgactaaaagagtataatggattgtttgtaacacaaataaatgcttgaggggatggacaccccatattacatgatgtgattattacacattgcatgcctatatcaaaacatctcatgtaccccataaatatatacacctaatacccacaaaacttaaaatataaaatgttttaaataaaaataaagaaaagatttccacaataaaaagatttttactggaaaaaatcacnntattt

SEQ ID NO: 731697 - DNA, 2288 bp, Homo sapiens
  misc_feature (27)..(27): n is a, c, g, or t
  misc_feature (29)..(29): n is a, c, g, or t
  misc_feature (262)..(262): n is a, c, g, or t
aaagcttgctagattaactattgatananaagcttaaataggtagtaaaccactaaatatgcaaggaagtgattatcagggttgtgaaggagaagaacaggtaagttaaatgggcattctgaggagtagaaatttcctttacttcataattatttgttaattcatctttatatgtttaatgggcttttctctattattttatatttttcaataaaagaaaaaagaatttaaaaaatcttggagctcactgggagcaatgggnttgcagctgaagtccaatagtacaaatgatgtggtaagaggccggcagggctgtgaattacagcaacaaaggagaaaaggaagtgattggagaattaagcaacatgaatggtattattcaaagacagctcattataggacacggaactccctgggtaggagtttgaagctttcttaactcagaaagaaacttccaacacagtttcccaaagaaaaatgggcaccaagggcaaagttattaaatgcaaagcagccatcgcctgggaagcaggcaagcccctttgcattgaagaggttgaagtagctccccccaaggctcatgaagttcgcattcagatcattgctacctccctgtgccatactgatgccactgttatcgattctaaatttgagggcctagctttcccagtgatcgttggccatgaggctgcaggtattgtggaaagtattgggccaggagtgaccaacgtcaaaccaggtgacaaagtaattccactttatgcacctctatgtagaaaatgcaagttttgtctgagtccactcacaaatttgtgtgggaaaatcagtaatctcaaaagtcctgctagtgatcaacaactaatggaagacaaaaccagcaggtttacctgcaaaggaaaaccagtttaccatttctttggaaccagtacattctctcagtacactgtggtgtcagatatcaatcttgcctcaactggctatggggctgcaatcaacaatgccaaggtcacccctggttcgacttgtgctgtctttggcctaggaggtgtgggtctttctgctgtaatgggttgtaaagcagcaggagcttccagaatcataggtattgacatcaacagtgagaagtttgtgaaggctaaagccctgggagccactgactgcctcaatcctagagacttacataaacctatccaggaagttatcattgaattgaccaagggaggtgtggattttgcccttgactgtgcaggtggatctgaaaccatgaaagcagccctggactgtacaaccgcaggctggggatcatgtactttcattggagtagctgctggtagcaaaggattgactgtttttccagaggagctaataatcggccgtactataaatggaacattctttggtggttggaaaagtgtagattctatcccaaagctggtcactgactataagaataagaaattcaatctggatgcactggtgacccataccctgccttttgacaaaatcagtgaggcatttgacctaatgaaccaaggaaaaagcatccgaacaatcctcatcttttgaagatgccaggagcaattcggaatactatctgattgaatgtgaacctgcctggttaatttattacctgatttgatgaaccaaggaaagccatgcgtttaaacaaatatttacatttaatatgggaacataaaagagctttaaatattatagactttgtacctgttatatatatgaatattccctatgttaaataataataataactagtgtttatgaatagaatcatatcatctttagaaattgtttaaaattagttctgggaagttgaaagtggggaatgaagagataataaataaaactagattggccatatgtttataatttttttagattgggtaatgaatacatggagtttcattatacttttctctccacttttgtctatgttgaaaattttctgggagctaaatgatgagaacacatggacacatgatggggaacaacacacactagggcctgttgagggcagggagtcggcagagagagagcatcaggaagaatagctaatggatgctgggcttcatacctgggtgatgagatgatctgtgcagcaaagcaccatggtacatgtttacctatgtaacaaacctgcacatcctgcacatgtaccctggaacttaataaaaggagactatagtcaacagcaatttaattgtatattttaatatgactaaaagagtataatggattgtttgtaacacaaataaatgcttgaggggatg

SEQ ID NO: 731698 - DNA, 2468 bp, Homo sapiens; identical to SEQ ID NO: 330237
  misc_feature (27)..(27): n is a, c, g, or t
  misc_feature (29)..(29): n is a, c, g, or t
  misc_feature (262)..(262): n is a, c, g, or t
  misc_feature (2462)..(2463): n is a, c, g, or t

SEQ ID NO: 731699 - DNA, 2238 bp, Homo sapiens
  misc_feature (27)..(27): n is a, c, g, or t
  misc_feature (29)..(29): n is a, c, g, or t
  misc_feature (262)..(262): n is a, c, g, or t
aaagcttgctagattaactattgatananaagcttaaataggtagtaaaccactaaatatgcaaggaagtgattatcagggttgtgaaggagaagaacaggtaagttaaatgggcattctgaggagtagaaatttcctttacttcataattatttgttaattcatctttatatgtttaatgggcttttctctattattttatatttttcaataaaagaaaaaagaatttaaaaaatcttggagctcactgggagcaatgggnttgcagctgaagtccaatagtacaaatgatgtggtaagaggccggcagggctgtgaattacagcaacaaaggagaaaaggaagtgattggagaattaagcaacatgaatggtattattcaaagacagctcattataggacacggaactccctgggtaggagtttgaagctttcttaactcagaaagaaacttccaacacagtttcccaaagaaaaatgggcaccaagggcaaagttattaaatgcaaagcagccatcgcctgggaagcaggcaagcccctttgcattgaagaggttgaagtagctccccccaaggctcatgaagttcgcattcagatcattgctacctccctgtgccatactgatgccactgttatcgattctaaatttgagggcctagctttcccagtgatcgttggccatgaggctgcaggtattgtggaaagtattgggccaggagtgaccaacgtcaaaccaggtgacaaagtaattccactttatgcacctctatgtagaaaatgcaagttttgtctgagtccactcacaaatttgtgtgggaaaatcagtaatctcaaaagtcctgctagtgatcaacaactaatggaagacaaaaccagcaggtttacctgcaaaggaaaaccagtttaccatttctttggaaccagtacattctctcagtacactgtggtgtcagatatcaatcttgcctcaactggctatggggctgcaatcaacaatgccaaggtcacccctggttcgacttgtgctgtctttggcctaggaggtgtgggtctttctgctgtaatgggttgtaaagcagcaggagcttccagaatcataggtattgacatcaacagtgagaagtttgtgaaggctaaagccctgggagccactgactgcctcaatcctagagacttacataaacctatccaggaagttatcattgaattgaccaagggaggtgtggattttgcccttgactgtgcaggtggatctgaaaccatgaaagcagccctggactgtacaaccgcaggctggggatcatgtactttcattggagtagctgctggtagcaaaggattgactgtttttccagaggagctaataatcggccgtactataaatggaacattctttggtggttggaaaagtgtagattctatcccaaagctggtcactgactataagaataagaaattcaatctggatgcactggtgacccataccctgccttttgacaaaatcagtgaggcatttgacctaatgaaccaaggaaaaagtatctgattgaatgtgaacctgcctggttaatttattacctgatttgatgaaccaaggaaagccatgcgtttaaacaaatatttacatttaatatgggaacataaaagagctttaaatattatagactttgtacctgttatatatatgaatattccctatgttaaataataataataactagtgtttatgaatagaatcatatcatctttagaaattgtttaaaattagttctgggaagttgaaagtggggaatgaagagataataaataaaactagattggccatatgtttataatttttttagattgggtaatgaatacatggagtttcattatacttttctctccacttttgtctatgttgaaaattttctgggagctaaatgatgagaacacatggacacatgatggggaacaacacacactagggcctgttgagggcagggagtcggcagagagagagcatcaggaagaatagctaatggatgctgggcttcatacctgggtgatgagatgatctgtgcagcaaagcaccatggtacatgtttacctatgtaacaaacctgcacatcctgcacatgtaccctggaacttaataaaaggagactatagtcaacagcaatttaattgtatattttaatatgactaaaagagtataatggattgtttgtaacacaaataaatgcttgaggggatg

SEQ ID NO: 731700 - DNA, 2235 bp, Homo sapiens
  misc_feature (27)..(27): n is a, c, g, or t
  misc_feature (29)..(29): n is a, c, g, or t
  misc_feature (262)..(262): n is a, c, g, or t
aaagcttgctagattaactattgatananaagcttaaataggtagtaaaccactaaatatgcaaggaagtgattatcagggttgtgaaggagaagaacaggtaagttaaatgggcattctgaggagtagaaatttcctttacttcataattatttgttaattcatctttatatgtttaatgggcttttctctattattttatatttttcaataaaagaaaaaagaatttaaaaaatcttggagctcactgggagcaatgggnttgcagctgaagtccaatagtacaaatgatgtggtaagaggccggcagggctgtgaattacagcaacaaaggagaaaaggaagtgattggagaattaagcaacatgaatggtattattcaaagacagctcattataggacacggaactccctgggtaggagtttgaagctttcttaactcagaaagaaacttccaacacagtttcccaaagaaaaatgggcaccaagggcaaagttattaaatgcaaagcagccatcgcctgggaagcaggcaagcccctttgcattgaagaggttgaagtagctccccccaaggctcatgaagttcgcattcagatcattgctacctccctgtgccatactgatgccactgttatcgattctaaatttgagggcctagctttcccagtgatcgttggccatgaggctgcaggtattgtggaaagtattgggccaggagtgaccaacgtcaaaccaggtgacaaagtaattccactttatgcacctctatgtagaaaatgcaagttttgtctgagtccactcacaaatttgtgtgggaaaatcagtacctgcaaaggaaaaccagtttaccatttctttggaaccagtacattctctcagtacactgtggtgtcagatatcaatcttgccaaaatagatgatgatgcaaatttagagagagtttgtctgcttggatgtgggttttcaactggctatggggctgcaatcaacaatgccaaggtcacccctggttcgacttgtgctgtctttggcctaggaggtgtgggtctttctgctgtaatgggttgtaaagcagcaggagcttccagaatcataggtattgacatcaacagtgagaagtttgtgaaggctaaagccctgggagccactgactgcctcaatcctagagacttacataaacctatccaggaagttatcattgaattgaccaagggaggtgtggattttgcccttgactgtgcaggtggatctgaaaccatgaaagcagccctggactgtacaaccgcaggctggggatcatgtactttcattggagtagctgctggtagcaaaggattgactgtttttccagaggagctaataatcggccgtactataaatggaacattctttggtggttggaaaagtgtagattctatcccaaagctggtcactgactataagaataagaaattcaatctggatgcactggtgacccataccctgccttttgacaaaatcagtgaggcatttgacctaatgaaccaaggaaaaagtatctgattgaatgtgaacctgcctggttaatttattacctgatttgatgaaccaaggaaagccatgcgtttaaacaaatatttacatttaatatgggaacataaaagagctttaaatattatagactttgtacctgttatatatatgaatattccctatgttaaataataataataactagtgtttatgaatagaatcatatcatctttagaaattgtttaaaattagttctgggaagttgaaagtggggaatgaagagataataaataaaactagattggccatatgtttataatttttttagattgggtaatgaatacatggagtttcattatacttttctctccacttttgtctatgttgaaaattttctgggagctaaatgatgagaacacatggacacatgatggggaacaacacacactagggcctgttgagggcagggagtcggcagagagagagcatcaggaagaatagctaatggatgctgggcttcatacctgggtgatgagatgatctgtgcagcaaagcaccatggtacatgtttacctatgtaacaaacctgcacatcctgcacatgtaccctggaacttaataaaaggagactatagtcaacagcaatttaattgtatattttaatatgactaaaagagtataatggattgtttgtaacacaaataaatgcttgaggggatg

SEQ ID NO: 731701 - DNA, 2469 bp, Homo sapiens
  misc_feature (27)..(27): n is a, c, g, or t
  misc_feature (29)..(29): n is a, c, g, or t
  misc_feature (262)..(262): n is a, c, g, or t
  misc_feature (2463)..(2464): n is a, c, g, or t
aaagcttgctagattaactattgatananaagcttaaataggtagtaaaccactaaatatgcaaggaagtgattatcagggttgtgaaggagaagaacaggtaagttaaatgggcattctgaggagtagaaatttcctttacttcataattatttgttaattcatctttatatgtttaatgggcttttctctattattttatatttttcaataaaagaaaaaagaatttaaaaaatcttggagctcactgggagcaatgggnttgcagctgaagtccaatagtacaaatgatgtggtaagaggccggcagggctgtgaattacagcaacaaaggagaaaaggaagtgattggagaattaagcaacatgaatggtattattcaaagacagctcattataggacacggaactccctgggtaggagtttgaagctttcttaactcagaaagaaacttccaacacagtttcccaaagaaaaatgggcaccaagggcaaagttattaaatgcaaagcagccatcgcctgggaagcaggcaagcccctttgcattgaagaggttgaagtagctccccccaaggctcatgaagttcgcattcagatcattgctacctccctgtgccatactgatgccactgttatcgattctaaatttgagggcctagctttcccagtgatcgttggccatgaggctgcaggtattgtggaaagtattgggccaggagtgaccaacgtcaaaccaggtgacaaagtaattccactttatgcacctctatgtagaaaatgcaagttttgtctgagtccactcacaaatttgtgtgggaaaatcagtacctgcaaaggaaaaccagtttaccatttctttggaaccagtacattctctcagtacactgtggtgtcagatatcaatcttgccaaaatagatgatgatgcaaatttagagagagtttgtctgcttggatgtgggttttcaactggctatggggctgcaatcaacaatgccaaggtcacccctggttcgacttgtgctgtctttggcctaggaggtgtgggtctttctgctgtaatgggttgtaaagcagcaggagcttccagaatcataggtattgacatcaacagtgagaagtttgtgaaggctaaagccctgggagccactgactgcctcaatcctagagacttacataaacctatccaggaagttatcattgaattgaccaagggaggtgtggattttgcccttgactgtgcaggtggatctgaaaccatgaaagcagccctggactgtacaaccgcaggctggggatcatgtactttcattggagtagctgctggtagcaaaggattgactgtttttccagaggagctaataatcggccgtactataaatggaacattctttggtggttggaaaagtgtagattctatcccaaagctggtcactgactataagaataagaaattcaatctggatgcactggtgacccataccctgccttttgacaaaatcagtgaggcatttgacctaatgaaccaaggaaaaagtatctgattgaatgtgaacctgcctggttaatttattacctgatttgatgaaccaaggaaagccatgcgtttaaacaaatatttacatttaatatgggaacataaaagagctttaaatattatagactttgtacctgttatatatatgaatattccctatgttaaataataataataactagtgtttatgaatagaatcatatcatctttagaaattgtttaaaattagttctgggaagttgaaagtggggaatgaagagataataaataaaactagattggccatatgtttataatttttttagattgggtaatgaatacatggagtttcattatacttttctctccacttttgtctatgttgaaaattttctgggagctaaatgatgagaacacatggacacatgatggggaacaacacacactagggcctgttgagggcagggagtcggcagagagagagcatcaggaagaatagctaatggatgctgggcttcatacctgggtgatgagatgatctgtgcagcaaagcaccatggtacatgtttacctatgtaacaaacctgcacatcctgcacatgtaccctggaacttaataaaagttggaaatttttaaaaagaatgaataagacctggtatttgatagcacaacagggagactatagtcaacagcaatttaattgtatattttaatatgactaaaagagtataatggattgtttgtaacacaaataaatgcttgaggggatggacaccccatattacatgatgtgattattacacattgcatgcctatatcaaaacatctcatgtaccccataaatatatacacctaatacccacaaaacttaaaatataaaatgttttaaataaaaataaagaaaagatttccacaataaaaagatttttactggaaaaaatcacnntattt

SEQ ID NO: 731702 - DNA, 2519 bp, Homo sapiens
  misc_feature (27)..(27): n is a, c, g, or t
  misc_feature (29)..(29): n is a, c, g, or t
  misc_feature (262)..(262): n is a, c, g, or t
  misc_feature (2513)..(2514): n is a, c, g, or t
aaagcttgctagattaactattgatananaagcttaaataggtagtaaaccactaaatatgcaaggaagtgattatcagggttgtgaaggagaagaacaggtaagttaaatgggcattctgaggagtagaaatttcctttacttcataattatttgttaattcatctttatatgtttaatgggcttttctctattattttatatttttcaataaaagaaaaaagaatttaaaaaatcttggagctcactgggagcaatgggnttgcagctgaagtccaatagtacaaatgatgtggtaagaggccggcagggctgtgaattacagcaacaaaggagaaaaggaagtgattggagaattaagcaacatgaatggtattattcaaagacagctcattataggacacggaactccctgggtaggagtttgaagctttcttaactcagaaagaaacttccaacacagtttcccaaagaaaaatgggcaccaagggcaaagttattaaatgcaaagcagccatcgcctgggaagcaggcaagcccctttgcattgaagaggttgaagtagctccccccaaggctcatgaagttcgcattcagatcattgctacctccctgtgccatactgatgccactgttatcgattctaaatttgagggcctagctttcccagtgatcgttggccatgaggctgcaggtattgtggaaagtattgggccaggagtgaccaacgtcaaaccaggtgacaaagtaattccactttatgcacctctatgtagaaaatgcaagttttgtctgagtccactcacaaatttgtgtgggaaaatcagtacctgcaaaggaaaaccagtttaccatttctttggaaccagtacattctctcagtacactgtggtgtcagatatcaatcttgccaaaatagatgatgatgcaaatttagagagagtttgtctgcttggatgtgggttttcaactggctatggggctgcaatcaacaatgccaaggtcacccctggttcgacttgtgctgtctttggcctaggaggtgtgggtctttctgctgtaatgggttgtaaagcagcaggagcttccagaatcataggtattgacatcaacagtgagaagtttgtgaaggctaaagccctgggagccactgactgcctcaatcctagagacttacataaacctatccaggaagttatcattgaattgaccaagggaggtgtggattttgcccttgactgtgcaggtggatctgaaaccatgaaagcagccctggactgtacaaccgcaggctggggatcatgtactttcattggagtagctgctggtagcaaaggattgactgtttttccagaggagctaataatcggccgtactataaatggaacattctttggtggttggaaaagtgtagattctatcccaaagctggtcactgactataagaataagaaattcaatctggatgcactggtgacccataccctgccttttgacaaaatcagtgaggcatttgacctaatgaaccaaggaaaaagcatccgaacaatcctcatcttttgaagatgccaggagcaattcggaatactatctgattgaatgtgaacctgcctggttaatttattacctgatttgatgaaccaaggaaagccatgcgtttaaacaaatatttacatttaatatgggaacataaaagagctttaaatattatagactttgtacctgttatatatatgaatattccctatgttaaataataataataactagtgtttatgaatagaatcatatcatctttagaaattgtttaaaattagttctgggaagttgaaagtggggaatgaagagataataaataaaactagattggccatatgtttataatttttttagattgggtaatgaatacatggagtttcattatacttttctctccacttttgtctatgttgaaaattttctgggagctaaatgatgagaacacatggacacatgatggggaacaacacacactagggcctgttgagggcagggagtcggcagagagagagcatcaggaagaatagctaatggatgctgggcttcatacctgggtgatgagatgatctgtgcagcaaagcaccatggtacatgtttacctatgtaacaaacctgcacatcctgcacatgtaccctggaacttaataaaagttggaaatttttaaaaagaatgaataagacctggtatttgatagcacaacagggagactatagtcaacagcaatttaattgtatattttaatatgactaaaagagtataatggattgtttgtaacacaaataaatgcttgaggggatggacaccccatattacatgatgtgattattacacattgcatgcctatatcaaaacatctcatgtaccccataaatatatacacctaatacccacaaaacttaaaatataaaatgttttaaataaaaataaagaaaagatttccacaataaaaagatttttactggaaaaaatcacnntattt

SEQ ID NO: 731703 - DNA, 2285 bp, Homo sapiens
  misc_feature (27)..(27): n is a, c, g, or t
  misc_feature (29)..(29): n is a, c, g, or t
  misc_feature (262)..(262): n is a, c, g, or t
aaagcttgctagattaactattgatananaagcttaaataggtagtaaaccactaaatatgcaaggaagtgattatcagggttgtgaaggagaagaacaggtaagttaaatgggcattctgaggagtagaaatttcctttacttcataattatttgttaattcatctttatatgtttaatgggcttttctctattattttatatttttcaataaaagaaaaaagaatttaaaaaatcttggagctcactgggagcaatgggnttgcagctgaagtccaatagtacaaatgatgtggtaagaggccggcagggctgtgaattacagcaacaaaggagaaaaggaagtgattggagaattaagcaacatgaatggtattattcaaagacagctcattataggacacggaactccctgggtaggagtttgaagctttcttaactcagaaagaaacttccaacacagtttcccaaagaaaaatgggcaccaagggcaaagttattaaatgcaaagcagccatcgcctgggaagcaggcaagcccctttgcattgaagaggttgaagtagctccccccaaggctcatgaagttcgcattcagatcattgctacctccctgtgccatactgatgccactgttatcgattctaaatttgagggcctagctttcccagtgatcgttggccatgaggctgcaggtattgtggaaagtattgggccaggagtgaccaacgtcaaaccaggtgacaaagtaattccactttatgcacctctatgtagaaaatgcaagttttgtctgagtccactcacaaatttgtgtgggaaaatcagtacctgcaaaggaaaaccagtttaccatttctttggaaccagtacattctctcagtacactgtggtgtcagatatcaatcttgccaaaatagatgatgatgcaaatttagagagagtttgtctgcttggatgtgggttttcaactggctatggggctgcaatcaacaatgccaaggtcacccctggttcgacttgtgctgtctttggcctaggaggtgtgggtctttctgctgtaatgggttgtaaagcagcaggagcttccagaatcataggtattgacatcaacagtgagaagtttgtgaaggctaaagccctgggagccactgactgcctcaatcctagagacttacataaacctatccaggaagttatcattgaattgaccaagggaggtgtggattttgcccttgactgtgcaggtggatctgaaaccatgaaagcagccctggactgtacaaccgcaggctggggatcatgtactttcattggagtagctgctggtagcaaaggattgactgtttttccagaggagctaataatcggccgtactataaatggaacattctttggtggttggaaaagtgtagattctatcccaaagctggtcactgactataagaataagaaattcaatctggatgcactggtgacccataccctgccttttgacaaaatcagtgaggcatttgacctaatgaaccaaggaaaaagcatccgaacaatcctcatcttttgaagatgccaggagcaattcggaatactatctgattgaatgtgaacctgcctggttaatttattacctgatttgatgaaccaaggaaagccatgcgtttaaacaaatatttacatttaatatgggaacataaaagagctttaaatattatagactttgtacctgttatatatatgaatattccctatgttaaataataataataactagtgtttatgaatagaatcatatcatctttagaaattgtttaaaattagttctgggaagttgaaagtggggaatgaagagataataaataaaactagattggccatatgtttataatttttttagattgggtaatgaatacatggagtttcattatacttttctctccacttttgtctatgttgaaaattttctgggagctaaatgatgagaacacatggacacatgatggggaacaacacacactagggcctgttgagggcagggagtcggcagagagagagcatcaggaagaatagctaatggatgctgggcttcatacctgggtgatgagatgatctgtgcagcaaagcaccatggtacatgtttacctatgtaacaaacctgcacatcctgcacatgtaccctggaacttaataaaaggagactatagtcaacagcaatttaattgtatattttaatatgactaaaagagtataatggattgtttgtaacacaaataaatgcttgaggggatg

SEQ ID NO: 731704 - DNA, 2465 bp, Homo sapiens
  misc_feature (27)..(27): n is a, c, g, or t
  misc_feature (29)..(29): n is a, c, g, or t
  misc_feature (262)..(262): n is a, c, g, or t
  misc_feature (2459)..(2460): n is a, c, g, or t
aaagcttgctagattaactattgatananaagcttaaataggtagtaaaccactaaatatgcaaggaagtgattatcagggttgtgaaggagaagaacaggtaagttaaatgggcattctgaggagtagaaatttcctttacttcataattatttgttaattcatctttatatgtttaatgggcttttctctattattttatatttttcaataaaagaaaaaagaatttaaaaaatcttggagctcactgggagcaatgggnttgcagctgaagtccaatagtacaaatgatgtggtaagaggccggcagggctgtgaattacagcaacaaaggagaaaaggaagtgattggagaattaagcaacatgaatggtattattcaaagacagctcattataggacacggaactccctgggtaggagtttgaagctttcttaactcagaaagaaacttccaacacagtttcccaaagaaaaatgggcaccaagggcaaagttattaaatgcaaagcagccatcgcctgggaagcaggcaagcccctttgcattgaagaggttgaagtagctccccccaaggctcatgaagttcgcattcagatcattgctacctccctgtgccatactgatgccactgttatcgattctaaatttgagggcctagctttcccagtgatcgttggccatgaggctgcaggtattgtggaaagtattgggccaggagtgaccaacgtcaaaccaggtgacaaagtaattccactttatgcacctctatgtagaaaatgcaagttttgtctgagtccactcacaaatttgtgtgggaaaatcagtacctgcaaaggaaaaccagtttaccatttctttggaaccagtacattctctcagtacactgtggtgtcagatatcaatcttgccaaaatagatgatgatgcaaatttagagagagtttgtctgcttggatgtgggttttcaactggctatggggctgcaatcaacaatgccaaggtcacccctggttcgacttgtgctgtctttggcctaggaggtgtgggtctttctgctgtaatgggttgtaaagcagcaggagcttccagaatcataggtattgacatcaacagtgagaagtttgtgaaggctaaagccctgggagccactgactgcctcaatcctagagacttacataaacctatccaggaagttatcattgaattgaccaagggaggtgtggattttgcccttgactgtgcaggtggatctgaaaccatgaaagcagccctggactgtacaaccgcaggctggggatcatgtactttcattggagtagctgctggtagcaaaggattgactgtttttccagaggagctaataatcggccgtactataaatggaacattctttggtggttggaaaagtgtagattctatcccaaagctggtcactgactataagaataagaaattcaatctggatgcactggtgacccataccctgccttttgacaaaatcagtgaggcatttgacctaatgaaccaaggaaaaagcatccgaacaatcctcatcttttgaagatgccaggagcaattcggaatactatctgattgaatgtgaacctgcctggttaatttattacctgatttgatgaaccaaggaaagccatgcgtttaaacaaatatttacatttaatatgggaacattatgttaaataataataataactagtgtttatgaatagaatcatatcatctttagaaattgtttaaaattagttctgggaagttgaaagtggggaatgaagagataataaataaaactagattggccatatgtttataatttttttagattgggtaatgaatacatggagtttcattatacttttctctccacttttgtctatgttgaaaattttctgggagctaaatgatgagaacacatggacacatgatggggaacaacacacactagggcctgttgagggcagggagtcggcagagagagagcatcaggaagaatagctaatggatgctgggcttcatacctgggtgatgagatgatctgtgcagcaaagcaccatggtacatgtttacctatgtaacaaacctgcacatcctgcacatgtaccctggaacttaataaaagttggaaatttttaaaaagaatgaataagacctggtatttgatagcacaacagggagactatagtcaacagcaatttaattgtatattttaatatgactaaaagagtataatggattgtttgtaacacaaataaatgcttgaggggatggacaccccatattacatgatgtgattattacacattgcatgcctatatcaaaacatctcatgtaccccataaatatatacacctaatacccacaaaacttaaaatataaaatgttttaaataaaaataaagaaaagatttccacaataaaaagatttttactggaaaaaatcacnntattt

SEQ ID NO: 731705 - DNA, 2510 bp, Homo sapiens
  misc_feature (27)..(27): n is a, c, g, or t
  misc_feature (29)..(29): n is a, c, g, or t
  misc_feature (262)..(262): n is a, c, g, or t
  misc_feature (2504)..(2505): n is a, c, g, or t
aaagcttgctagattaactattgatananaagcttaaataggtagtaaaccactaaatatgcaaggaagtgattatcagggttgtgaaggagaagaacaggtaagttaaatgggcattctgaggagtagaaatttcctttacttcataattatttgttaattcatctttatatgtttaatgggcttttctctattattttatatttttcaataaaagaaaaaagaatttaaaaaatcttggagctcactgggagcaatgggnttgcagctgaagtccaatagtacaaatgatgtggtaagaggccggcagggctgtgaattacagcaacaaaggagaaaaggaagtgattggagaattaagcaacatgaatggtattattcaaagacagctcattataggacacggaactccctgggtaggagtttgaagctttcttaactcagaaagaaacttccaacacagtttcccaaagaaaaatgggcaccaagggcaaagttattaaatgcaaagcagccatcgcctgggaagcaggcaagcccctttgcattgaagaggttgaagtagctccccccaaggctcatgaagttcgcattcagatcattgctacctccctgtgccatactgatgccactgttatcgattctaaatttgagggcctagctttcccagtgatcgttggccatgaggctgcaggtattgtggaaagtattgggccaggagtgaccaacgtcaaaccaggtgacaaagtaattccactttatgcacctctatgtagaaaatgcaagttttgtctgagtccactcacaaatttgtgtgggaaaatcagtaatctcaaaagtcctgctagtgatcaacaactaatggaagacaaaaccagcaggttgtcagatatcaatcttgccaaaatagatgatgatgcaaatttagagagagtttgtctgcttggatgtgggttttcaactggctatggggctgcaatcaacaatgccaaggtcacccctggttcgacttgtgctgtctttggcctaggaggtgtgggtctttctgctgtaatgggttgtaaagcagcaggagcttccagaatcataggtattgacatcaacagtgagaagtttgtgaaggctaaagccctgggagccactgactgcctcaatcctagagacttacataaacctatccaggaagttatcattgaattgaccaagggaggtgtggattttgcccttgactgtgcaggtggatctgaaaccatgaaagcagccctggactgtacaaccgcaggctggggatcatgtactttcattggagtagctgctggtagcaaaggattgactgtttttccagaggagctaataatcggccgtactataaatggaacattctttggtggttggaaaagtgtagattctatcccaaagctggtcactgactataagaataagaaattcaatctggatgcactggtgacccataccctgccttttgacaaaatcagtgaggcatttgacctaatgaaccaaggaaaaagcatccgaacaatcctcatcttttgaagatgccaggagcaattcggaatactatctgattgaatgtgaacctgcctggttaatttattacctgatttgatgaaccaaggaaagccatgcgtttaaacaaatatttacatttaatatgggaacataaaagagctttaaatattatagactttgtacctgttatatatatgaatattccctatgttaaataataataataactagtgtttatgaatagaatcatatcatctttagaaattgtttaaaattagttctgggaagttgaaagtggggaatgaagagataataaataaaactagattggccatatgtttataatttttttagattgggtaatgaatacatggagtttcattatacttttctctccacttttgtctatgttgaaaattttctgggagctaaatgatgagaacacatggacacatgatggggaacaacacacactagggcctgttgagggcagggagtcggcagagagagagcatcaggaagaatagctaatggatgctgggcttcatacctgggtgatgagatgatctgtgcagcaaagcaccatggtacatgtttacctatgtaacaaacctgcacatcctgcacatgtaccctggaacttaataaaagttggaaatttttaaaaagaatgaataagacctggtatttgatagcacaacagggagactatagtcaacagcaatttaattgtatattttaatatgactaaaagagtataatggattgtttgtaacacaaataaatgcttgaggggatggacaccccatattacatgatgtgattattacacattgcatgcctatatcaaaacatctcatgtaccccataaatatatacacctaatacccacaaaacttaaaatataaaatgttttaaataaaaataaagaaaagatttccacaataaaaagatttttactggaaaaaatcacnntattt

SEQ ID NO: 731706 - DNA, 2276 bp, Homo sapiens
  misc_feature (27)..(27): n is a, c, g, or t
  misc_feature (29)..(29): n is a, c, g, or t
  misc_feature (262)..(262): n is a, c, g, or t
aaagcttgctagattaactattgatananaagcttaaataggtagtaaaccactaaatatgcaaggaagtgattatcagggttgtgaaggagaagaacaggtaagttaaatgggcattctgaggagtagaaatttcctttacttcataattatttgttaattcatctttatatgtttaatgggcttttctctattattttatatttttcaataaaagaaaaaagaatttaaaaaatcttggagctcactgggagcaatgggnttgcagctgaagtccaatagtacaaatgatgtggtaagaggccggcagggctgtgaattacagcaacaaaggagaaaaggaagtgattggagaattaagcaacatgaatggtattattcaaagacagctcattataggacacggaactccctgggtaggagtttgaagctttcttaactcagaaagaaacttccaacacagtttcccaaagaaaaatgggcaccaagggcaaagttattaaatgcaaagcagccatcgcctgggaagcaggcaagcccctttgcattgaagaggttgaagtagctccccccaaggctcatgaagttcgcattcagatcattgctacctccctgtgccatactgatgccactgttatcgattctaaatttgagggcctagctttcccagtgatcgttggccatgaggctgcaggtattgtggaaagtattgggccaggagtgaccaacgtcaaaccaggtgacaaagtaattccactttatgcacctctatgtagaaaatgcaagttttgtctgagtccactcacaaatttgtgtgggaaaatcagtaatctcaaaagtcctgctagtgatcaacaactaatggaagacaaaaccagcaggttgtcagatatcaatcttgccaaaatagatgatgatgcaaatttagagagagtttgtctgcttggatgtgggttttcaactggctatggggctgcaatcaacaatgccaaggtcacccctggttcgacttgtgctgtctttggcctaggaggtgtgggtctttctgctgtaatgggttgtaaagcagcaggagcttccagaatcataggtattgacatcaacagtgagaagtttgtgaaggctaaagccctgggagccactgactgcctcaatcctagagacttacataaacctatccaggaagttatcattgaattgaccaagggaggtgtggattttgcccttgactgtgcaggtggatctgaaaccatgaaagcagccctggactgtacaaccgcaggctggggatcatgtactttcattggagtagctgctggtagcaaaggattgactgtttttccagaggagctaataatcggccgtactataaatggaacattctttggtggttggaaaagtgtagattctatcccaaagctggtcactgactataagaataagaaattcaatctggatgcactggtgacccataccctgccttttgacaaaatcagtgaggcatttgacctaatgaaccaaggaaaaagcatccgaacaatcctcatcttttgaagatgccaggagcaattcggaatactatctgattgaatgtgaacctgcctggttaatttattacctgatttgatgaaccaaggaaagccatgcgtttaaacaaatatttacatttaatatgggaacataaaagagctttaaatattatagactttgtacctgttatatatatgaatattccctatgttaaataataataataactagtgtttatgaatagaatcatatcatctttagaaattgtttaaaattagttctgggaagttgaaagtggggaatgaagagataataaataaaactagattggccatatgtttataatttttttagattgggtaatgaatacatggagtttcattatacttttctctccacttttgtctatgttgaaaattttctgggagctaaatgatgagaacacatggacacatgatggggaacaacacacactagggcctgttgagggcagggagtcggcagagagagagcatcaggaagaatagctaatggatgctgggcttcatacctgggtgatgagatgatctgtgcagcaaagcaccatggtacatgtttacctatgtaacaaacctgcacatcctgcacatgtaccctggaacttaataaaaggagactatagtcaacagcaatttaattgtatattttaatatgactaaaagagtataatggattgtttgtaacacaaataaatgcttgaggggatg

SEQ ID NO: 731707 - DNA, 2226 bp, Homo sapiens
  misc_feature (27)..(27): n is a, c, g, or t
  misc_feature (29)..(29): n is a, c, g, or t
  misc_feature (262)..(262): n is a, c, g, or t
aaagcttgctagattaactattgatananaagcttaaataggtagtaaaccactaaatatgcaaggaagtgattatcagggttgtgaaggagaagaacaggtaagttaaatgggcattctgaggagtagaaatttcctttacttcataattatttgttaattcatctttatatgtttaatgggcttttctctattattttatatttttcaataaaagaaaaaagaatttaaaaaatcttggagctcactgggagcaatgggnttgcagctgaagtccaatagtacaaatgatgtggtaagaggccggcagggctgtgaattacagcaacaaaggagaaaaggaagtgattggagaattaagcaacatgaatggtattattcaaagacagctcattataggacacggaactccctgggtaggagtttgaagctttcttaactcagaaagaaacttccaacacagtttcccaaagaaaaatgggcaccaagggcaaagttattaaatgcaaagcagccatcgcctgggaagcaggcaagcccctttgcattgaagaggttgaagtagctccccccaaggctcatgaagttcgcattcagatcattgctacctccctgtgccatactgatgccactgttatcgattctaaatttgagggcctagctttcccagtgatcgttggccatgaggctgcaggtattgtggaaagtattgggccaggagtgaccaacgtcaaaccaggtgacaaagtaattccactttatgcacctctatgtagaaaatgcaagttttgtctgagtccactcacaaatttgtgtgggaaaatcagtaatctcaaaagtcctgctagtgatcaacaactaatggaagacaaaaccagcaggttgtcagatatcaatcttgccaaaatagatgatgatgcaaatttagagagagtttgtctgcttggatgtgggttttcaactggctatggggctgcaatcaacaatgccaaggtcacccctggttcgacttgtgctgtctttggcctaggaggtgtgggtctttctgctgtaatgggttgtaaagcagcaggagcttccagaatcataggtattgacatcaacagtgagaagtttgtgaaggctaaagccctgggagccactgactgcctcaatcctagagacttacataaacctatccaggaagttatcattgaattgaccaagggaggtgtggattttgcccttgactgtgcaggtggatctgaaaccatgaaagcagccctggactgtacaaccgcaggctggggatcatgtactttcattggagtagctgctggtagcaaaggattgactgtttttccagaggagctaataatcggccgtactataaatggaacattctttggtggttggaaaagtgtagattctatcccaaagctggtcactgactataagaataagaaattcaatctggatgcactggtgacccataccctgccttttgacaaaatcagtgaggcatttgacctaatgaaccaaggaaaaagtatctgattgaatgtgaacctgcctggttaatttattacctgatttgatgaaccaaggaaagccatgcgtttaaacaaatatttacatttaatatgggaacataaaagagctttaaatattatagactttgtacctgttatatatatgaatattccctatgttaaataataataataactagtgtttatgaatagaatcatatcatctttagaaattgtttaaaattagttctgggaagttgaaagtggggaatgaagagataataaataaaactagattggccatatgtttataatttttttagattgggtaatgaatacatggagtttcattatacttttctctccacttttgtctatgttgaaaattttctgggagctaaatgatgagaacacatggacacatgatggggaacaacacacactagggcctgttgagggcagggagtcggcagagagagagcatcaggaagaatagctaatggatgctgggcttcatacctgggtgatgagatgatctgtgcagcaaagcaccatggtacatgtttacctatgtaacaaacctgcacatcctgcacatgtaccctggaacttaataaaaggagactatagtcaacagcaatttaattgtatattttaatatgactaaaagagtataatggattgtttgtaacacaaataaatgcttgaggggatg

SEQ ID NO: 731708 - DNA, 2460 bp, Homo sapiens
  misc_feature (27)..(27): n is a, c, g, or t
  misc_feature (29)..(29): n is a, c, g, or t
  misc_feature (262)..(262): n is a, c, g, or t
  misc_feature (2454)..(2455): n is a, c, g, or t
aaagcttgctagattaactattgatananaagcttaaataggtagtaaaccactaaatatgcaaggaagtgattatcagggttgtgaaggagaagaacaggtaagttaaatgggcattctgaggagtagaaatttcctttacttcataattatttgttaattcatctttatatgtttaatgggcttttctctattattttatatttttcaataaaagaaaaaagaatttaaaaaatcttggagctcactgggagcaatgggnttgcagctgaagtccaatagtacaaatgatgtggtaagaggccggcagggctgtgaattacagcaacaaaggagaaaaggaagtgattggagaattaagcaacatgaatggtattattcaaagacagctcattataggacacggaactccctgggtaggagtttgaagctttcttaactcagaaagaaacttccaacacagtttcccaaagaaaaatgggcaccaagggcaaagttattaaatgcaaagcagccatcgcctgggaagcaggcaagcccctttgcattgaagaggttgaagtagctccccccaaggctcatgaagttcgcattcagatcattgctacctccctgtgccatactgatgccactgttatcgattctaaatttgagggcctagctttcccagtgatcgttggccatgaggctgcaggtattgtggaaagtattgggccaggagtgaccaacgtcaaaccaggtgacaaagtaattccactttatgcacctctatgtagaaaatgcaagttttgtctgagtccactcacaaatttgtgtgggaaaatcagtaatctcaaaagtcctgctagtgatcaacaactaatggaagacaaaaccagcaggttgtcagatatcaatcttgccaaaatagatgatgatgcaaatttagagagagtttgtctgcttggatgtgggttttcaactggctatggggctgcaatcaacaatgccaaggtcacccctggttcgacttgtgctgtctttggcctaggaggtgtgggtctttctgctgtaatgggttgtaaagcagcaggagcttccagaatcataggtattgacatcaacagtgagaagtttgtgaaggctaaagccctgggagccactgactgcctcaatcctagagacttacataaacctatccaggaagttatcattgaattgaccaagggaggtgtggattttgcccttgactgtgcaggtggatctgaaaccatgaaagcagccctggactgtacaaccgcaggctggggatcatgtactttcattggagtagctgctggtagcaaaggattgactgtttttccagaggagctaataatcggccgtactataaatggaacattctttggtggttggaaaagtgtagattctatcccaaagctggtcactgactataagaataagaaattcaatctggatgcactggtgacccataccctgccttttgacaaaatcagtgaggcatttgacctaatgaaccaaggaaaaagtatctgattgaatgtgaacctgcctggttaatttattacctgatttgatgaaccaaggaaagccatgcgtttaaacaaatatttacatttaatatgggaacataaaagagctttaaatattatagactttgtacctgttatatatatgaatattccctatgttaaataataataataactagtgtttatgaatagaatcatatcatctttagaaattgtttaaaattagttctgggaagttgaaagtggggaatgaagagataataaataaaactagattggccatatgtttataatttttttagattgggtaatgaatacatggagtttcattatacttttctctccacttttgtctatgttgaaaattttctgggagctaaatgatgagaacacatggacacatgatggggaacaacacacactagggcctgttgagggcagggagtcggcagagagagagcatcaggaagaatagctaatggatgctgggcttcatacctgggtgatgagatgatctgtgcagcaaagcaccatggtacatgtttacctatgtaacaaacctgcacatcctgcacatgtaccctggaacttaataaaagttggaaatttttaaaaagaatgaataagacctggtatttgatagcacaacagggagactatagtcaacagcaatttaattgtatattttaatatgactaaaagagtataatggattgtttgtaacacaaataaatgcttgaggggatggacaccccatattacatgatgtgattattacacattgcatgcctatatcaaaacatctcatgtaccccataaatatatacacctaatacccacaaaacttaaaatataaaatgttttaaataaaaataaagaaaagatttccacaataaaaagatttttactggaaaaaatcacnntattt

SEQ ID NO: 731709 - DNA, 2456 bp, Homo sapiens
  misc_feature (27)..(27): n is a, c, g, or t
  misc_feature (29)..(29): n is a, c, g, or t
  misc_feature (262)..(262): n is a, c, g, or t
  misc_feature (2450)..(2451): n is a, c, g, or t
aaagcttgctagattaactattgatananaagcttaaataggtagtaaaccactaaatatgcaaggaagtgattatcagggttgtgaaggagaagaacaggtaagttaaatgggcattctgaggagtagaaatttcctttacttcataattatttgttaattcatctttatatgtttaatgggcttttctctattattttatatttttcaataaaagaaaaaagaatttaaaaaatcttggagctcactgggagcaatgggnttgcagctgaagtccaatagtacaaatgatgtggtaagaggccggcagggctgtgaattacagcaacaaaggagaaaaggaagtgattggagaattaagcaacatgaatggtattattcaaagacagctcattataggacacggaactccctgggtaggagtttgaagctttcttaactcagaaagaaacttccaacacagtttcccaaagaaaaatgggcaccaagggcaaagttattaaatgcaaagcagccatcgcctgggaagcaggcaagcccctttgcattgaagaggttgaagtagctccccccaaggctcatgaagttcgcattcagatcattgctacctccctgtgccatactgatgccactgttatcgattctaaatttgagggcctagctttcccagtgatcgttggccatgaggctgcaggtattgtggaaagtattgggccaggagtgaccaacgtcaaaccaggtgacaaagtaattccactttatgcacctctatgtagaaaatgcaagttttgtctgagtccactcacaaatttgtgtgggaaaatcagtaatctcaaaagtcctgctagtgatcaacaactaatggaagacaaaaccagcaggttgtcagatatcaatcttgccaaaatagatgatgatgcaaatttagagagagtttgtctgcttggatgtgggttttcaactggctatggggctgcaatcaacaatgccaaggtcacccctggttcgacttgtgctgtctttggcctaggaggtgtgggtctttctgctgtaatgggttgtaaagcagcaggagcttccagaatcataggtattgacatcaacagtgagaagtttgtgaaggctaaagccctgggagccactgactgcctcaatcctagagacttacataaacctatccaggaagttatcattgaattgaccaagggaggtgtggattttgcccttgactgtgcaggtggatctgaaaccatgaaagcagccctggactgtacaaccgcaggctggggatcatgtactttcattggagtagctgctggtagcaaaggattgactgtttttccagaggagctaataatcggccgtactataaatggaacattctttggtggttggaaaagtgtagattctatcccaaagctggtcactgactataagaataagaaattcaatctggatgcactggtgacccataccctgccttttgacaaaatcagtgaggcatttgacctaatgaaccaaggaaaaagcatccgaacaatcctcatcttttgaagatgccaggagcaattcggaatactatctgattgaatgtgaacctgcctggttaatttattacctgatttgatgaaccaaggaaagccatgcgtttaaacaaatatttacatttaatatgggaacattatgttaaataataataataactagtgtttatgaatagaatcatatcatctttagaaattgtttaaaattagttctgggaagttgaaagtggggaatgaagagataataaataaaactagattggccatatgtttataatttttttagattgggtaatgaatacatggagtttcattatacttttctctccacttttgtctatgttgaaaattttctgggagctaaatgatgagaacacatggacacatgatggggaacaacacacactagggcctgttgagggcagggagtcggcagagagagagcatcaggaagaatagctaatggatgctgggcttcatacctgggtgatgagatgatctgtgcagcaaagcaccatggtacatgtttacctatgtaacaaacctgcacatcctgcacatgtaccctggaacttaataaaagttggaaatttttaaaaagaatgaataagacctggtatttgatagcacaacagggagactatagtcaacagcaatttaattgtatattttaatatgactaaaagagtataatggattgtttgtaacacaaataaatgcttgaggggatggacaccccatattacatgatgtgattattacacattgcatgcctatatcaaaacatctcatgtaccccataaatatatacacctaatacccacaaaacttaaaatataaaatgttttaaataaaaataaagaaaagatttccacaataaaaagatttttactggaaaaaatcacnntattt

SEQ ID NO: 731710 - DNA, 2342 bp, Homo sapiens
  misc_feature (27)..(27): n is a, c, g, or t
  misc_feature (29)..(29): n is a, c, g, or t
  misc_feature (262)..(262): n is a, c, g, or t
aaagcttgctagattaactattgatananaagcttaaataggtagtaaaccactaaatatgcaaggaagtgattatcagggttgtgaaggagaagaacaggtaagttaaatgggcattctgaggagtagaaatttcctttacttcataattatttgttaattcatctttatatgtttaatgggcttttctctattattttatatttttcaataaaagaaaaaagaatttaaaaaatcttggagctcactgggagcaatgggnttgcagctgaagtccaatagtacaaatgatgtggtaagaggccggcagggctgtgaattacagcaacaaaggagaaaaggaagtgattggagaattaagcaacatgaatggtattattcaaagacagctcattataggacacggaactccctgggtaggagtttgaagctttcttaactcagaaagaaacttccaacacagtttcccaaagaaaaatgggcaccaagggcaaagttattaaatgcaaagcagccatcgcctgggaagcaggcaagcccctttgcattgaagaggttgaagtagctccccccaaggctcatgaagttcgcattcagatcattgctacctccctgtgccatactgatgccactgttatcgattctaaatttgagggcctagctttcccagtgatcgttggccatgaggctgcaggtattgtggaaagtattgggccaggagtgaccaacgtcaaaccaggtgacaaagtaattccactttatgcacctctatgtagaaaatgcaagttttgtctgagtccactcacaaatttgtgtgggaaaatcagtaatctcaaaagtcctgctagtgatcaacaactaatggaagacaaaaccagcaggtttacctgcaaaggaaaaccagtttaccatttctttggaaccagtacattctctcagtacactgtggtgtcagatatcaatcttgccaaaatagatgatgatgcaaatttagagagagtttgtctgcttggatgtgggttttcaactggctatggggctgcaatcaacaatgccaaggtcacccctggttcgacttgtgctgtctttggcctaggaggtgtgggtctttctgctgtaatgggttgtaaagcagcaggagcttccagaatcataggtattgacatcaacagtgagaagtttgtgaaggctaaagccctgggagccactgactgcctcaatcctagagacttacataaacctatccaggaagttatcattgaattgaccaagggaggtgtggattttgcccttgactgtgcaggtggatctgaaaccatgaaagcagccctggactgtacaaccgcaggctggggatcatgtactttcattggagtagctgctggtagcaaaggattgactgtttttccagaggagctaataatcggccgtactataaatggaacattctttggtggttggaaaagtgtagattctatcccaaagctggtcactgactataagaataagaaattcaatctggatgcactggtgacccataccctgccttttgacaaaatcagtgaggcatttgacctaatgaaccaaggaaaaagcatccgaacaatcctcatcttttgaagatgccaggagcaattcggaatactatctgattgaatgtgaacctgcctggttaatttattacctgatttgatgaaccaaggaaagccatgcgtttaaacaaatatttacatttaatatgggaacataaaagagctttaaatattatagactttgtacctgttatatatatgaatattccctatgttaaataataataataactagtgtttatgaatagaatcatatcatctttagaaattgtttaaaattagttctgggaagttgaaagtggggaatgaagagataataaataaaactagattggccatatgtttataatttttttagattgggtaatgaatacatggagtttcattatacttttctctccacttttgtctatgttgaaaattttctgggagctaaatgatgagaacacatggacacatgatggggaacaacacacactagggcctgttgagggcagggagtcggcagagagagagcatcaggaagaatagctaatggatgctgggcttcatacctgggtgatgagatgatctgtgcagcaaagcaccatggtacatgtttacctatgtaacaaacctgcacatcctgcacatgtaccctggaacttaataaaaggagactatagtcaacagcaatttaattgtatattttaatatgactaaaagagtataatggattgtttgtaacacaaataaatgcttgaggggatg

SEQ ID NO: 731711 - DNA, 2522 bp, Homo sapiens
  misc_feature (27)..(27): n is a, c, g, or t
  misc_feature (29)..(29): n is a, c, g, or t
  misc_feature (262)..(262): n is a, c, g, or t
  misc_feature (2516)..(2517): n is a, c, g, or t
aaagcttgctagattaactattgatananaagcttaaataggtagtaaaccactaaatatgcaaggaagtgattatcagggttgtgaaggagaagaacaggtaagttaaatgggcattctgaggagtagaaatttcctttacttcataattatttgttaattcatctttatatgtttaatgggcttttctctattattttatatttttcaataaaagaaaaaagaatttaaaaaatcttggagctcactgggagcaatgggnttgcagctgaagtccaatagtacaaatgatgtggtaagaggccggcagggctgtgaattacagcaacaaaggagaaaaggaagtgattggagaattaagcaacatgaatggtattattcaaagacagctcattataggacacggaactccctgggtaggagtttgaagctttcttaactcagaaagaaacttccaacacagtttcccaaagaaaaatgggcaccaagggcaaagttattaaatgcaaagcagccatcgcctgggaagcaggcaagcccctttgcattgaagaggttgaagtagctccccccaaggctcatgaagttcgcattcagatcattgctacctccctgtgccatactgatgccactgttatcgattctaaatttgagggcctagctttcccagtgatcgttggccatgaggctgcaggtattgtggaaagtattgggccaggagtgaccaacgtcaaaccaggtgacaaagtaattccactttatgcacctctatgtagaaaatgcaagttttgtctgagtccactcacaaatttgtgtgggaaaatcagtaatctcaaaagtcctgctagtgatcaacaactaatggaagacaaaaccagcaggtttacctgcaaaggaaaaccagtttaccatttctttggaaccagtacattctctcagtacactgtggtgtcagatatcaatcttgccaaaatagatgatgatgcaaatttagagagagtttgtctgcttggatgtgggttttcaactggctatggggctgcaatcaacaatgccaaggtcacccctggttcgacttgtgctgtctttggcctaggaggtgtgggtctttctgctgtaatgggttgtaaagcagcaggagcttccagaatcataggtattgacatcaacagtgagaagtttgtgaaggctaaagccctgggagccactgactgcctcaatcctagagacttacataaacctatccaggaagttatcattgaattgaccaagggaggtgtggattttgcccttgactgtgcaggtggatctgaaaccatgaaagcagccctggactgtacaaccgcaggctggggatcatgtactttcattggagtagctgctggtagcaaaggattgactgtttttccagaggagctaataatcggccgtactataaatggaacattctttggtggttggaaaagtgtagattctatcccaaagctggtcactgactataagaataagaaattcaatctggatgcactggtgacccataccctgccttttgacaaaatcagtgaggcatttgacctaatgaaccaaggaaaaagcatccgaacaatcctcatcttttgaagatgccaggagcaattcggaatactatctgattgaatgtgaacctgcctggttaatttattacctgatttgatgaaccaaggaaagccatgcgtttaaacaaatatttacatttaatatgggaacattatgttaaataataataataactagtgtttatgaatagaatcatatcatctttagaaattgtttaaaattagttctgggaagttgaaagtggggaatgaagagataataaataaaactagattggccatatgtttataatttttttagattgggtaatgaatacatggagtttcattatacttttctctccacttttgtctatgttgaaaattttctgggagctaaatgatgagaacacatggacacatgatggggaacaacacacactagggcctgttgagggcagggagtcggcagagagagagcatcaggaagaatagctaatggatgctgggcttcatacctgggtgatgagatgatctgtgcagcaaagcaccatggtacatgtttacctatgtaacaaacctgcacatcctgcacatgtaccctggaacttaataaaagttggaaatttttaaaaagaatgaataagacctggtatttgatagcacaacagggagactatagtcaacagcaatttaattgtatattttaatatgactaaaagagtataatggattgtttgtaacacaaataaatgcttgaggggatggacaccccatattacatgatgtgattattacacattgcatgcctatatcaaaacatctcatgtaccccataaatatatacacctaatacccacaaaacttaaaatataaaatgttttaaataaaaataaagaaaagatttccacaataaaaagatttttactggaaaaaatcacnntattt

SEQ ID NO: 731712 - DNA, 2292 bp, Homo sapiens
  misc_feature (27)..(27): n is a, c, g, or t
  misc_feature (29)..(29): n is a, c, g, or t
  misc_feature (262)..(262): n is a, c, g, or t
aaagcttgctagattaactattgatananaagcttaaataggtagtaaaccactaaatatgcaaggaagtgattatcagggttgtgaaggagaagaacaggtaagttaaatgggcattctgaggagtagaaatttcctttacttcataattatttgttaattcatctttatatgtttaatgggcttttctctattattttatatttttcaataaaagaaaaaagaatttaaaaaatcttggagctcactgggagcaatgggnttgcagctgaagtccaatagtacaaatgatgtggtaagaggccggcagggctgtgaattacagcaacaaaggagaaaaggaagtgattggagaattaagcaacatgaatggtattattcaaagacagctcattataggacacggaactccctgggtaggagtttgaagctttcttaactcagaaagaaacttccaacacagtttcccaaagaaaaatgggcaccaagggcaaagttattaaatgcaaagcagccatcgcctgggaagcaggcaagcccctttgcattgaagaggttgaagtagctccccccaaggctcatgaagttcgcattcagatcattgctacctccctgtgccatactgatgccactgttatcgattctaaatttgagggcctagctttcccagtgatcgttggccatgaggctgcaggtattgtggaaagtattgggccaggagtgaccaacgtcaaaccaggtgacaaagtaattccactttatgcacctctatgtagaaaatgcaagttttgtctgagtccactcacaaatttgtgtgggaaaatcagtaatctcaaaagtcctgctagtgatcaacaactaatggaagacaaaaccagcaggtttacctgcaaaggaaaaccagtttaccatttctttggaaccagtacattctctcagtacactgtggtgtcagatatcaatcttgccaaaatagatgatgatgcaaatttagagagagtttgtctgcttggatgtgggttttcaactggctatggggctgcaatcaacaatgccaaggtcacccctggttcgacttgtgctgtctttggcctaggaggtgtgggtctttctgctgtaatgggttgtaaagcagcaggagcttccagaatcataggtattgacatcaacagtgagaagtttgtgaaggctaaagccctgggagccactgactgcctcaatcctagagacttacataaacctatccaggaagttatcattgaattgaccaagggaggtgtggattttgcccttgactgtgcaggtggatctgaaaccatgaaagcagccctggactgtacaaccgcaggctggggatcatgtactttcattggagtagctgctggtagcaaaggattgactgtttttccagaggagctaataatcggccgtactataaatggaacattctttggtggttggaaaagtgtagattctatcccaaagctggtcactgactataagaataagaaattcaatctggatgcactggtgacccataccctgccttttgacaaaatcagtgaggcatttgacctaatgaaccaaggaaaaagtatctgattgaatgtgaacctgcctggttaatttattacctgatttgatgaaccaaggaaagccatgcgtttaaacaaatatttacatttaatatgggaacataaaagagctttaaatattatagactttgtacctgttatatatatgaatattccctatgttaaataataataataactagtgtttatgaatagaatcatatcatctttagaaattgtttaaaattagttctgggaagttgaaagtggggaatgaagagataataaataaaactagattggccatatgtttataatttttttagattgggtaatgaatacatggagtttcattatacttttctctccacttttgtctatgttgaaaattttctgggagctaaatgatgagaacacatggacacatgatggggaacaacacacactagggcctgttgagggcagggagtcggcagagagagagcatcaggaagaatagctaatggatgctgggcttcatacctgggtgatgagatgatctgtgcagcaaagcaccatggtacatgtttacctatgtaacaaacctgcacatcctgcacatgtaccctggaacttaataaaaggagactatagtcaacagcaatttaattgtatattttaatatgactaaaagagtataatggattgtttgtaacacaaataaatgcttgaggggatg

SEQ ID NO: 731713 - DNA, 2189 bp, Homo sapiens; identical to SEQ ID NO: 330243
  misc_feature (2183)..(2184): n is a, c, g, or t

SEQ ID NO: 731714 - DNA, 1955 bp, Homo sapiens
gatagtttcatggtgtgaggacccagactacttcttggggaagaaacctgaggaaatatccccactgacatgaactccccaatttgcaaacgtgtcagtcacaacatatcagaaggaagttcaataaaaagaaaatacaagcattattttttaagctacaccatgtaaacttagtatataagccctgcaatgtattatacaacttcaatatccccataaggaatactcctcaagttaggagatagaggttgaagtggggtttgagcctcacacccttctattcatatcctcgaacacaaaccttttctcctagaattctcaattatggaatacattcataaggaatgctaagtggcagccaggtggctggtaatcagcctaggggtagacaccagagtgaggcctcctgctccttctctggcccactgagaataccacctgactgcccacacagatggaaaggtggcaatgaggaaggcagaagttgggcctcatcaggtgtgtccaccatatgggcacaggaagcacaagagagggcaggcccttctaccacccaactgcaaagaagcaaggaagtggggggaaggggatgggatacaatgactgactagcctgttgaggtgtagtgatcctgccccagagtgaggaaaggacacagagattctccttccacaggtaggggtgtcttccagtcctgggtgaagtaatgtttgagataaggactgctctgtcgttgaggcttatccccctctttgtgtctacatgtggagttacccagaaataagaacatctgggttcttaaaaagtagcatcccaacacaccaactttgatgcccactccctccttcgatgctcaactttgccctcagctataggagatccgagaacagtgactattccaagactaaaacctgactccctccttggtacattctaattctcctcaacagcaccactgagtaacaaggacgctgcctaaggtaagtaagggtcctcaattccccccaagtttactagcacatgcataaaatattattaacaccatgaatggaagaggatgacgggataaaagaaattaggcttaataaagtgaatgtctataaaggaagaccagatcctgaaatgaaaaggcaaaacttatttgtgagctttggttaaatttatcatgaaaattacacttattaatgttttattgttattaacagcatcatccgaacaatcctcatcttttgaagatgccaggagcaattcggaatactatctgattgaatgtgaacctgcctggttaatttattacctgatttgatgaaccaaggaaagccatgcgtttaaacaaatatttacatttaatatgggaacataaaagagctttaaatattatagactttgtacctgttatatatatgaatattccctatgttaaataataataataactagtgtttatgaatagaatcatatcatctttagaaattgtttaaaattagttctgggaagttgaaagtggggaatgaagagataataaataaaactagattggccatatgtttataatttttttagattgggtaatgaatacatggagtttcattatacttttctctccacttttgtctatgttgaaaattttctgggagctaaatgatgagaacacatggacacatgatggggaacaacacacactagggcctgttgagggcagggagtcggcagagagagagcatcaggaagaatagctaatggatgctgggcttcatacctgggtgatgagatgatctgtgcagcaaagcaccatggtacatgtttacctatgtaacaaacctgcacatcctgcacatgtaccctggaacttaataaaaggagactatagtcaacagcaatttaattgtatattttaatatgactaaaagagtataatggattgtttgtaacacaaataaatgcttgaggggatg

SEQ ID NO: 731715 - DNA, 384 bp, Homo sapiens
attttgatttagtggatttgaggcagggctttcatctctaacaaattcccaagtgatgtgaataaatgcttgtccgaggaccacacttcgagttgcagagatgtaaaacacatctattctccagcaattatctgactcaggttattaaatgcaaagcagccatcgcctgggaagcaggcaagcccctttgcattgaagaggttgaagtagctccccccaaggctcatgaagttcgcattcagtaatctcaaaagtcctgctagtgatcaacaactaatggaagacaaaaccagcaggtttacctgcaaaggaaaaccagtttaccatttctttggaaccagtacattctctcagtacactgtggtgtcagatatcaatcttgcc

SEQ ID NO: 731716 - DNA, 2662 bp, Homo sapiens; identical to SEQ ID NO: 330241
  misc_feature (27)..(27): n is a, c, g, or t
  misc_feature (29)..(29): n is a, c, g, or t
  misc_feature (262)..(262): n is a, c, g, or t
  misc_feature (2656)..(2657): n is a, c, g, or t

SEQ ID NO: 731717 - DNA, 2428 bp, Homo sapiens
  misc_feature (27)..(27): n is a, c, g, or t
  misc_feature (29)..(29): n is a, c, g, or t
  misc_feature (262)..(262): n is a, c, g, or t
aaagcttgctagattaactattgatananaagcttaaataggtagtaaaccactaaatatgcaaggaagtgattatcagggttgtgaaggagaagaacaggtaagttaaatgggcattctgaggagtagaaatttcctttacttcataattatttgttaattcatctttatatgtttaatgggcttttctctattattttatatttttcaataaaagaaaaaagaatttaaaaaatcttggagctcactgggagcaatgggnttgcagctgaagtccaatagtacaaatgatgtggtaagaggccggcagggctgtgaattacagcaacaaaggagaaaaggaagtgattggagaattaagcaacatgaatggtattattcaaagacagctcattataggacacggaactccctgggtaggagtttgaagctttcttaactcagaaagaaacttccaacacagtttcccaaagaaaaatgggcaccaagggcaaaattttgatttagtggatttgaggcagggctttcatctctaacaaattcccaagtgatgtgaataaatgcttgtccgaggaccacacttcgagttgcagagatgtaaaacacatctattctccagcaattatctgactcaggttattaaatgcaaagcagccatcgcctgggaagcaggcaagcccctttgcattgaagaggttgaagtagctccccccaaggctcatgaagttcgcattcagatcattgctacctccctgtgccatactgatgccactgttatcgattctaaatttgagggcctagctttcccagtgatcgttggccatgaggctgcaggtattgtggaaagtattgggccaggagtgaccaacgtcaaaccaggtgacaaagtaattccactttatgcacctctatgtagaaaatgcaagttttgtctgagtccactcacaaatttgtgtgggaaaatcagtaatctcaaaagtcctgctagtgatcaacaactaatggaagacaaaaccagcaggtttacctgcaaaggaaaaccagtttaccatttctttggaaccagtacattctctcagtacactgtggtgtcagatatcaatcttgcctcaactggctatggggctgcaatcaacaatgccaaggtcacccctggttcgacttgtgctgtctttggcctaggaggtgtgggtctttctgctgtaatgggttgtaaagcagcaggagcttccagaatcataggtattgacatcaacagtgagaagtttgtgaaggctaaagccctgggagccactgactgcctcaatcctagagacttacataaacctatccaggaagttatcattgaattgaccaagggaggtgtggattttgcccttgactgtgcaggtggatctgaaaccatgaaagcagccctggactgtacaaccgcaggctggggatcatgtactttcattggagtagctgctggtagcaaaggattgactgtttttccagaggagctaataatcggccgtactataaatggaacattctttggtggttggaaaagtgtagattctatcccaaagctggtcactgactataagaataagaaattcaatctggatgcactggtgacccataccctgccttttgacaaaatcagtgaggcatttgacctaatgaaccaaggaaaaagcatccgaacaatcctcatcttttgaagatgccaggagcaattcggaatactatctgattgaatgtgaacctgcctggttaatttattacctgatttgatgaaccaaggaaagccatgcgtttaaacaaatatttacatttaatatgggaacataaaagagctttaaatattatagactttgtacctgttatatatatgaatattccctatgttaaataataataataactagtgtttatgaatagaatcatatcatctttagaaattgtttaaaattagttctgggaagttgaaagtggggaatgaagagataataaataaaactagattggccatatgtttataatttttttagattgggtaatgaatacatggagtttcattatacttttctctccacttttgtctatgttgaaaattttctgggagctaaatgatgagaacacatggacacatgatggggaacaacacacactagggcctgttgagggcagggagtcggcagagagagagcatcaggaagaatagctaatggatgctgggcttcatacctgggtgatgagatgatctgtgcagcaaagcaccatggtacatgtttacctatgtaacaaacctgcacatcctgcacatgtaccctggaacttaataaaaggagactatagtcaacagcaatttaattgtatattttaatatgactaaaagagtataatggattgtttgtaacacaaataaatgcttgaggggatg

SEQ ID NO: 731718 - DNA, 2608 bp, Homo sapiens
  misc_feature (27)..(27): n is a, c, g, or t
  misc_feature (29)..(29): n is a, c, g, or t
  misc_feature (262)..(262): n is a, c, g, or t
  misc_feature (2602)..(2603): n is a, c, g, or t
aaagcttgctagattaactattgatananaagcttaaataggtagtaaaccactaaatatgcaaggaagtgattatcagggttgtgaaggagaagaacaggtaagttaaatgggcattctgaggagtagaaatttcctttacttcataattatttgttaattcatctttatatgtttaatgggcttttctctattattttatatttttcaataaaagaaaaaagaatttaaaaaatcttggagctcactgggagcaatgggnttgcagctgaagtccaatagtacaaatgatgtggtaagaggccggcagggctgtgaattacagcaacaaaggagaaaaggaagtgattggagaattaagcaacatgaatggtattattcaaagacagctcattataggacacggaactccctgggtaggagtttgaagctttcttaactcagaaagaaacttccaacacagtttcccaaagaaaaatgggcaccaagggcaaaattttgatttagtggatttgaggcagggctttcatctctaacaaattcccaagtgatgtgaataaatgcttgtccgaggaccacacttcgagttgcagagatgtaaaacacatctattctccagcaattatctgactcaggttattaaatgcaaagcagccatcgcctgggaagcaggcaagcccctttgcattgaagaggttgaagtagctccccccaaggctcatgaagttcgcattcagatcattgctacctccctgtgccatactgatgccactgttatcgattctaaatttgagggcctagctttcccagtgatcgttggccatgaggctgcaggtattgtggaaagtattgggccaggagtgaccaacgtcaaaccaggtgacaaagtaattccactttatgcacctctatgtagaaaatgcaagttttgtctgagtccactcacaaatttgtgtgggaaaatcagtaatctcaaaagtcctgctagtgatcaacaactaatggaagacaaaaccagcaggtttacctgcaaaggaaaaccagtttaccatttctttggaaccagtacattctctcagtacactgtggtgtcagatatcaatcttgcctcaactggctatggggctgcaatcaacaatgccaaggtcacccctggttcgacttgtgctgtctttggcctaggaggtgtgggtctttctgctgtaatgggttgtaaagcagcaggagcttccagaatcataggtattgacatcaacagtgagaagtttgtgaaggctaaagccctgggagccactgactgcctcaatcctagagacttacataaacctatccaggaagttatcattgaattgaccaagggaggtgtggattttgcccttgactgtgcaggtggatctgaaaccatgaaagcagccctggactgtacaaccgcaggctggggatcatgtactttcattggagtagctgctggtagcaaaggattgactgtttttccagaggagctaataatcggccgtactataaatggaacattctttggtggttggaaaagtgtagattctatcccaaagctggtcactgactataagaataagaaattcaatctggatgcactggtgacccataccctgccttttgacaaaatcagtgaggcatttgacctaatgaaccaaggaaaaagcatccgaacaatcctcatcttttgaagatgccaggagcaattcggaatactatctgattgaatgtgaacctgcctggttaatttattacctgatttgatgaaccaaggaaagccatgcgtttaaacaaatatttacatttaatatgggaacattatgttaaataataataataactagtgtttatgaatagaatcatatcatctttagaaattgtttaaaattagttctgggaagttgaaagtggggaatgaagagataataaataaaactagattggccatatgtttataatttttttagattgggtaatgaatacatggagtttcattatacttttctctccacttttgtctatgttgaaaattttctgggagctaaatgatgagaacacatggacacatgatggggaacaacacacactagggcctgttgagggcagggagtcggcagagagagagcatcaggaagaatagctaatggatgctgggcttcatacctgggtgatgagatgatctgtgcagcaaagcaccatggtacatgtttacctatgtaacaaacctgcacatcctgcacatgtaccctggaacttaataaaagttggaaatttttaaaaagaatgaataagacctggtatttgatagcacaacagggagactatagtcaacagcaatttaattgtatattttaatatgactaaaagagtataatggattgtttgtaacacaaataaatgcttgaggggatggacaccccatattacatgatgtgattattacacattgcatgcctatatcaaaacatctcatgtaccccataaatatatacacctaatacccacaaaacttaaaatataaaatgttttaaataaaaataaagaaaagatttccacaataaaaagatttttactggaaaaaatcacnntattt

SEQ ID NO: 731719 - DNA, 2378 bp, Homo sapiens
  misc_feature (27)..(27): n is a, c, g, or t
  misc_feature (29)..(29): n is a, c, g, or t
  misc_feature (262)..(262): n is a, c, g, or t
aaagcttgctagattaactattgatananaagcttaaataggtagtaaaccactaaatatgcaaggaagtgattatcagggttgtgaaggagaagaacaggtaagttaaatgggcattctgaggagtagaaatttcctttacttcataattatttgttaattcatctttatatgtttaatgggcttttctctattattttatatttttcaataaaagaaaaaagaatttaaaaaatcttggagctcactgggagcaatgggnttgcagctgaagtccaatagtacaaatgatgtggtaagaggccggcagggctgtgaattacagcaacaaaggagaaaaggaagtgattggagaattaagcaacatgaatggtattattcaaagacagctcattataggacacggaactccctgggtaggagtttgaagctttcttaactcagaaagaaacttccaacacagtttcccaaagaaaaatgggcaccaagggcaaaattttgatttagtggatttgaggcagggctttcatctctaacaaattcccaagtgatgtgaataaatgcttgtccgaggaccacacttcgagttgcagagatgtaaaacacatctattctccagcaattatctgactcaggttattaaatgcaaagcagccatcgcctgggaagcaggcaagcccctttgcattgaagaggttgaagtagctccccccaaggctcatgaagttcgcattcagatcattgctacctccctgtgccatactgatgccactgttatcgattctaaatttgagggcctagctttcccagtgatcgttggccatgaggctgcaggtattgtggaaagtattgggccaggagtgaccaacgtcaaaccaggtgacaaagtaattccactttatgcacctctatgtagaaaatgcaagttttgtctgagtccactcacaaatttgtgtgggaaaatcagtaatctcaaaagtcctgctagtgatcaacaactaatggaagacaaaaccagcaggtttacctgcaaaggaaaaccagtttaccatttctttggaaccagtacattctctcagtacactgtggtgtcagatatcaatcttgcctcaactggctatggggctgcaatcaacaatgccaaggtcacccctggttcgacttgtgctgtctttggcctaggaggtgtgggtctttctgctgtaatgggttgtaaagcagcaggagcttccagaatcataggtattgacatcaacagtgagaagtttgtgaaggctaaagccctgggagccactgactgcctcaatcctagagacttacataaacctatccaggaagttatcattgaattgaccaagggaggtgtggattttgcccttgactgtgcaggtggatctgaaaccatgaaagcagccctggactgtacaaccgcaggctggggatcatgtactttcattggagtagctgctggtagcaaaggattgactgtttttccagaggagctaataatcggccgtactataaatggaacattctttggtggttggaaaagtgtagattctatcccaaagctggtcactgactataagaataagaaattcaatctggatgcactggtgacccataccctgccttttgacaaaatcagtgaggcatttgacctaatgaaccaaggaaaaagtatctgattgaatgtgaacctgcctggttaatttattacctgatttgatgaaccaaggaaagccatgcgtttaaacaaatatttacatttaatatgggaacataaaagagctttaaatattatagactttgtacctgttatatatatgaatattccctatgttaaataataataataactagtgtttatgaatagaatcatatcatctttagaaattgtttaaaattagttctgggaagttgaaagtggggaatgaagagataataaataaaactagattggccatatgtttataatttttttagattgggtaatgaatacatggagtttcattatacttttctctccacttttgtctatgttgaaaattttctgggagctaaatgatgagaacacatggacacatgatggggaacaacacacactagggcctgttgagggcagggagtcggcagagagagagcatcaggaagaatagctaatggatgctgggcttcatacctgggtgatgagatgatctgtgcagcaaagcaccatggtacatgtttacctatgtaacaaacctgcacatcctgcacatgtaccctggaacttaataaaaggagactatagtcaacagcaatttaattgtatattttaatatgactaaaagagtataatggattgtttgtaacacaaataaatgcttgaggggatg

SEQ ID NO: 731720 - DNA, 2612 bp, Homo sapiens
  misc_feature (27)..(27): n is a, c, g, or t
  misc_feature (29)..(29): n is a, c, g, or t
  misc_feature (262)..(262): n is a, c, g, or t
  misc_feature (2606)..(2607): n is a, c, g, or t
aaagcttgctagattaactattgatananaagcttaaataggtagtaaaccactaaatatgcaaggaagtgattatcagggttgtgaaggagaagaacaggtaagttaaatgggcattctgaggagtagaaatttcctttacttcataattatttgttaattcatctttatatgtttaatgggcttttctctattattttatatttttcaataaaagaaaaaagaatttaaaaaatcttggagctcactgggagcaatgggnttgcagctgaagtccaatagtacaaatgatgtggtaagaggccggcagggctgtgaattacagcaacaaaggagaaaaggaagtgattggagaattaagcaacatgaatggtattattcaaagacagctcattataggacacggaactccctgggtaggagtttgaagctttcttaactcagaaagaaacttccaacacagtttcccaaagaaaaatgggcaccaagggcaaaattttgatttagtggatttgaggcagggctttcatctctaacaaattcccaagtgatgtgaataaatgcttgtccgaggaccacacttcgagttgcagagatgtaaaacacatctattctccagcaattatctgactcaggttattaaatgcaaagcagccatcgcctgggaagcaggcaagcccctttgcattgaagaggttgaagtagctccccccaaggctcatgaagttcgcattcagatcattgctacctccctgtgccatactgatgccactgttatcgattctaaatttgagggcctagctttcccagtgatcgttggccatgaggctgcaggtattgtggaaagtattgggccaggagtgaccaacgtcaaaccaggtgacaaagtaattccactttatgcacctctatgtagaaaatgcaagttttgtctgagtccactcacaaatttgtgtgggaaaatcagtaatctcaaaagtcctgctagtgatcaacaactaatggaagacaaaaccagcaggtttacctgcaaaggaaaaccagtttaccatttctttggaaccagtacattctctcagtacactgtggtgtcagatatcaatcttgcctcaactggctatggggctgcaatcaacaatgccaaggtcacccctggttcgacttgtgctgtctttggcctaggaggtgtgggtctttctgctgtaatgggttgtaaagcagcaggagcttccagaatcataggtattgacatcaacagtgagaagtttgtgaaggctaaagccctgggagccactgactgcctcaatcctagagacttacataaacctatccaggaagttatcattgaattgaccaagggaggtgtggattttgcccttgactgtgcaggtggatctgaaaccatgaaagcagccctggactgtacaaccgcaggctggggatcatgtactttcattggagtagctgctggtagcaaaggattgactgtttttccagaggagctaataatcggccgtactataaatggaacattctttggtggttggaaaagtgtagattctatcccaaagctggtcactgactataagaataagaaattcaatctggatgcactggtgacccataccctgccttttgacaaaatcagtgaggcatttgacctaatgaaccaaggaaaaagtatctgattgaatgtgaacctgcctggttaatttattacctgatttgatgaaccaaggaaagccatgcgtttaaacaaatatttacatttaatatgggaacataaaagagctttaaatattatagactttgtacctgttatatatatgaatattccctatgttaaataataataataactagtgtttatgaatagaatcatatcatctttagaaattgtttaaaattagttctgggaagttgaaagtggggaatgaagagataataaataaaactagattggccatatgtttataatttttttagattgggtaatgaatacatggagtttcattatacttttctctccacttttgtctatgttgaaaattttctgggagctaaatgatgagaacacatggacacatgatggggaacaacacacactagggcctgttgagggcagggagtcggcagagagagagcatcaggaagaatagctaatggatgctgggcttcatacctgggtgatgagatgatctgtgcagcaaagcaccatggtacatgtttacctatgtaacaaacctgcacatcctgcacatgtaccctggaacttaataaaagttggaaatttttaaaaagaatgaataagacctggtatttgatagcacaacagggagactatagtcaacagcaatttaattgtatattttaatatgactaaaagagtataatggattgtttgtaacacaaataaatgcttgaggggatggacaccccatattacatgatgtgattattacacattgcatgcctatatcaaaacatctcatgtaccccataaatatatacacctaatacccacaaaacttaaaatataaaatgttttaaataaaaataaagaaaagatttccacaataaaaagatttttactggaaaaaatcacnntattt

SEQ ID NO: 731721 - DNA, 2716 bp, Homo sapiens
  misc_feature (27)..(27): n is a, c, g, or t
  misc_feature (29)..(29): n is a, c, g, or t
  misc_feature (262)..(262): n is a, c, g, or t
  misc_feature (2710)..(2711): n is a, c, g, or t
aaagcttgctagattaactattgatananaagcttaaataggtagtaaaccactaaatatgcaaggaagtgattatcagggttgtgaaggagaagaacaggtaagttaaatgggcattctgaggagtagaaatttcctttacttcataattatttgttaattcatctttatatgtttaatgggcttttctctattattttatatttttcaataaaagaaaaaagaatttaaaaaatcttggagctcactgggagcaatgggnttgcagctgaagtccaatagtacaaatgatgtggtaagaggccggcagggctgtgaattacagcaacaaaggagaaaaggaagtgattggagaattaagcaacatgaatggtattattcaaagacagctcattataggacacggaactccctgggtaggagtttgaagctttcttaactcagaaagaaacttccaacacagtttcccaaagaaaaatgggcaccaagggcaaaattttgatttagtggatttgaggcagggctttcatctctaacaaattcccaagtgatgtgaataaatgcttgtccgaggaccacacttcgagttgcagagatgtaaaacacatctattctccagcaattatctgactcaggttattaaatgcaaagcagccatcgcctgggaagcaggcaagcccctttgcattgaagaggttgaagtagctccccccaaggctcatgaagttcgcattcagatcattgctacctccctgtgccatactgatgccactgttatcgattctaaatttgagggcctagctttcccagtgatcgttggccatgaggctgcaggtattgtggaaagtattgggccaggagtgaccaacgtcaaaccaggtgacaaagtaattccactttatgcacctctatgtagaaaatgcaagttttgtctgagtccactcacaaatttgtgtgggaaaatcagtaatctcaaaagtcctgctagtgatcaacaactaatggaagacaaaaccagcaggtttacctgcaaaggaaaaccagtttaccatttctttggaaccagtacattctctcagtacactgtggtgtcagatatcaatcttgccaaaatagatgatgatgcaaatttagagagagtttgtctgcttggatgtgggttttcaactggctatggggctgcaatcaacaatgccaaggtcacccctggttcgacttgtgctgtctttggcctaggaggtgtgggtctttctgctgtaatgggttgtaaagcagcaggagcttccagaatcataggtattgacatcaacagtgagaagtttgtgaaggctaaagccctgggagccactgactgcctcaatcctagagacttacataaacctatccaggaagttatcattgaattgaccaagggaggtgtggattttgcccttgactgtgcaggtggatctgaaaccatgaaagcagccctggactgtacaaccgcaggctggggatcatgtactttcattggagtagctgctggtagcaaaggattgactgtttttccagaggagctaataatcggccgtactataaatggaacattctttggtggttggaaaagtgtagattctatcccaaagctggtcactgactataagaataagaaattcaatctggatgcactggtgacccataccctgccttttgacaaaatcagtgaggcatttgacctaatgaaccaaggaaaaagcatccgaacaatcctcatcttttgaagatgccaggagcaattcggaatactatctgattgaatgtgaacctgcctggttaatttattacctgatttgatgaaccaaggaaagccatgcgtttaaacaaatatttacatttaatatgggaacataaaagagctttaaatattatagactttgtacctgttatatatatgaatattccctatgttaaataataataataactagtgtttatgaatagaatcatatcatctttagaaattgtttaaaattagttctgggaagttgaaagtggggaatgaagagataataaataaaactagattggccatatgtttataatttttttagattgggtaatgaatacatggagtttcattatacttttctctccacttttgtctatgttgaaaattttctgggagctaaatgatgagaacacatggacacatgatggggaacaacacacactagggcctgttgagggcagggagtcggcagagagagagcatcaggaagaatagctaatggatgctgggcttcatacctgggtgatgagatgatctgtgcagcaaagcaccatggtacatgtttacctatgtaacaaacctgcacatcctgcacatgtaccctggaacttaataaaagttggaaatttttaaaaagaatgaataagacctggtatttgatagcacaacagggagactatagtcaacagcaatttaattgtatattttaatatgactaaaagagtataatggattgtttgtaacacaaataaatgcttgaggggatggacaccccatattacatgatgtgattattacacattgcatgcctatatcaaaacatctcatgtaccccataaatatatacacctaatacccacaaaacttaaaatataaaatgttttaaataaaaataaagaaaagatttccacaataaaaagatttttactggaaaaaatcacnntattt

SEQ ID NO: 731722 - DNA, 2482 bp, Homo sapiens
  misc_feature (27)..(27): n is a, c, g, or t
  misc_feature (29)..(29): n is a, c, g, or t
  misc_feature (262)..(262): n is a, c, g, or t
aaagcttgctagattaactattgatananaagcttaaataggtagtaaaccactaaatatgcaaggaagtgattatcagggttgtgaaggagaagaacaggtaagttaaatgggcattctgaggagtagaaatttcctttacttcataattatttgttaattcatctttatatgtttaatgggcttttctctattattttatatttttcaataaaagaaaaaagaatttaaaaaatcttggagctcactgggagcaatgggnttgcagctgaagtccaatagtacaaatgatgtggtaagaggccggcagggctgtgaattacagcaacaaaggagaaaaggaagtgattggagaattaagcaacatgaatggtattattcaaagacagctcattataggacacggaactccctgggtaggagtttgaagctttcttaactcagaaagaaacttccaacacagtttcccaaagaaaaatgggcaccaagggcaaaattttgatttagtggatttgaggcagggctttcatctctaacaaattcccaagtgatgtgaataaatgcttgtccgaggaccacacttcgagttgcagagatgtaaaacacatctattctccagcaattatctgactcaggttattaaatgcaaagcagccatcgcctgggaagcaggcaagcccctttgcattgaagaggttgaagtagctccccccaaggctcatgaagttcgcattcagatcattgctacctccctgtgccatactgatgccactgttatcgattctaaatttgagggcctagctttcccagtgatcgttggccatgaggctgcaggtattgtggaaagtattgggccaggagtgaccaacgtcaaaccaggtgacaaagtaattccactttatgcacctctatgtagaaaatgcaagttttgtctgagtccactcacaaatttgtgtgggaaaatcagtaatctcaaaagtcctgctagtgatcaacaactaatggaagacaaaaccagcaggtttacctgcaaaggaaaaccagtttaccatttctttggaaccagtacattctctcagtacactgtggtgtcagatatcaatcttgccaaaatagatgatgatgcaaatttagagagagtttgtctgcttggatgtgggttttcaactggctatggggctgcaatcaacaatgccaaggtcacccctggttcgacttgtgctgtctttggcctaggaggtgtgggtctttctgctgtaatgggttgtaaagcagcaggagcttccagaatcataggtattgacatcaacagtgagaagtttgtgaaggctaaagccctgggagccactgactgcctcaatcctagagacttacataaacctatccaggaagttatcattgaattgaccaagggaggtgtggattttgcccttgactgtgcaggtggatctgaaaccatgaaagcagccctggactgtacaaccgcaggctggggatcatgtactttcattggagtagctgctggtagcaaaggattgactgtttttccagaggagctaataatcggccgtactataaatggaacattctttggtggttggaaaagtgtagattctatcccaaagctggtcactgactataagaataagaaattcaatctggatgcactggtgacccataccctgccttttgacaaaatcagtgaggcatttgacctaatgaaccaaggaaaaagcatccgaacaatcctcatcttttgaagatgccaggagcaattcggaatactatctgattgaatgtgaacctgcctggttaatttattacctgatttgatgaaccaaggaaagccatgcgtttaaacaaatatttacatttaatatgggaacataaaagagctttaaatattatagactttgtacctgttatatatatgaatattccctatgttaaataataataataactagtgtttatgaatagaatcatatcatctttagaaattgtttaaaattagttctgggaagttgaaagtggggaatgaagagataataaataaaactagattggccatatgtttataatttttttagattgggtaatgaatacatggagtttcattatacttttctctccacttttgtctatgttgaaaattttctgggagctaaatgatgagaacacatggacacatgatggggaacaacacacactagggcctgttgagggcagggagtcggcagagagagagcatcaggaagaatagctaatggatgctgggcttcatacctgggtgatgagatgatctgtgcagcaaagcaccatggtacatgtttacctatgtaacaaacctgcacatcctgcacatgtaccctggaacttaataaaaggagactatagtcaacagcaatttaattgtatattttaatatgactaaaagagtataatggattgtttgtaacacaaataaatgcttgaggggatg

SEQ ID NO: 731723 - DNA, 2662 bp, Homo sapiens
  misc_feature (27)..(27): n is a, c, g, or t
  misc_feature (29)..(29): n is a, c, g, or t
  misc_feature (262)..(262): n is a, c, g, or t
  misc_feature (2656)..(2657): n is a, c, g, or t
aaagcttgctagattaactattgatananaagcttaaataggtagtaaaccactaaatatgcaaggaagtgattatcagggttgtgaaggagaagaacaggtaagttaaatgggcattctgaggagtagaaatttcctttacttcataattatttgttaattcatctttatatgtttaatgggcttttctctattattttatatttttcaataaaagaaaaaagaatttaaaaaatcttggagctcactgggagcaatgggnttgcagctgaagtccaatagtacaaatgatgtggtaagaggccggcagggctgtgaattacagcaacaaaggagaaaaggaagtgattggagaattaagcaacatgaatggtattattcaaagacagctcattataggacacggaactccctgggtaggagtttgaagctttcttaactcagaaagaaacttccaacacagtttcccaaagaaaaatgggcaccaagggcaaaattttgatttagtggatttgaggcagggctttcatctctaacaaattcccaagtgatgtgaataaatgcttgtccgaggaccacacttcgagttgcagagatgtaaaacacatctattctccagcaattatctgactcaggttattaaatgcaaagcagccatcgcctgggaagcaggcaagcccctttgcattgaagaggttgaagtagctccccccaaggctcatgaagttcgcattcagatcattgctacctccctgtgccatactgatgccactgttatcgattctaaatttgagggcctagctttcccagtgatcgttggccatgaggctgcaggtattgtggaaagtattgggccaggagtgaccaacgtcaaaccaggtgacaaagtaattccactttatgcacctctatgtagaaaatgcaagttttgtctgagtccactcacaaatttgtgtgggaaaatcagtaatctcaaaagtcctgctagtgatcaacaactaatggaagacaaaaccagcaggtttacctgcaaaggaaaaccagtttaccatttctttggaaccagtacattctctcagtacactgtggtgtcagatatcaatcttgccaaaatagatgatgatgcaaatttagagagagtttgtctgcttggatgtgggttttcaactggctatggggctgcaatcaacaatgccaaggtcacccctggttcgacttgtgctgtctttggcctaggaggtgtgggtctttctgctgtaatgggttgtaaagcagcaggagcttccagaatcataggtattgacatcaacagtgagaagtttgtgaaggctaaagccctgggagccactgactgcctcaatcctagagacttacataaacctatccaggaagttatcattgaattgaccaagggaggtgtggattttgcccttgactgtgcaggtggatctgaaaccatgaaagcagccctggactgtacaaccgcaggctggggatcatgtactttcattggagtagctgctggtagcaaaggattgactgtttttccagaggagctaataatcggccgtactataaatggaacattctttggtggttggaaaagtgtagattctatcccaaagctggtcactgactataagaataagaaattcaatctggatgcactggtgacccataccctgccttttgacaaaatcagtgaggcatttgacctaatgaaccaaggaaaaagcatccgaacaatcctcatcttttgaagatgccaggagcaattcggaatactatctgattgaatgtgaacctgcctggttaatttattacctgatttgatgaaccaaggaaagccatgcgtttaaacaaatatttacatttaatatgggaacattatgttaaataataataataactagtgtttatgaatagaatcatatcatctttagaaattgtttaaaattagttctgggaagttgaaagtggggaatgaagagataataaataaaactagattggccatatgtttataatttttttagattgggtaatgaatacatggagtttcattatacttttctctccacttttgtctatgttgaaaattttctgggagctaaatgatgagaacacatggacacatgatggggaacaacacacactagggcctgttgagggcagggagtcggcagagagagagcatcaggaagaatagctaatggatgctgggcttcatacctgggtgatgagatgatctgtgcagcaaagcaccatggtacatgtttacctatgtaacaaacctgcacatcctgcacatgtaccctggaacttaataaaagttggaaatttttaaaaagaatgaataagacctggtatttgatagcacaacagggagactatagtcaacagcaatttaattgtatattttaatatgactaaaagagtataatggattgtttgtaacacaaataaatgcttgaggggatggacaccccatattacatgatgtgattattacacattgcatgcctatatcaaaacatctcatgtaccccataaatatatacacctaatacccacaaaacttaaaatataaaatgttttaaataaaaataaagaaaagatttccacaataaaaagatttttactggaaaaaatcacnntattt

SEQ ID NO: 731724 - DNA, 2432 bp, Homo sapiens
  misc_feature (27)..(27): n is a, c, g, or t
  misc_feature (29)..(29): n is a, c, g, or t
  misc_feature (262)..(262): n is a, c, g, or t
aaagcttgctagattaactattgatananaagcttaaataggtagtaaaccactaaatatgcaaggaagtgattatcagggttgtgaaggagaagaacaggtaagttaaatgggcattctgaggagtagaaatttcctttacttcataattatttgttaattcatctttatatgtttaatgggcttttctctattattttatatttttcaataaaagaaaaaagaatttaaaaaatcttggagctcactgggagcaatgggnttgcagctgaagtccaatagtacaaatgatgtggtaagaggccggcagggctgtgaattacagcaacaaaggagaaaaggaagtgattggagaattaagcaacatgaatggtattattcaaagacagctcattataggacacggaactccctgggtaggagtttgaagctttcttaactcagaaagaaacttccaacacagtttcccaaagaaaaatgggcaccaagggcaaaattttgatttagtggatttgaggcagggctttcatctctaacaaattcccaagtgatgtgaataaatgcttgtccgaggaccacacttcgagttgcagagatgtaaaacacatctattctccagcaattatctgactcaggttattaaatgcaaagcagccatcgcctgggaagcaggcaagcccctttgcattgaagaggttgaagtagctccccccaaggctcatgaagttcgcattcagatcattgctacctccctgtgccatactgatgccactgttatcgattctaaatttgagggcctagctttcccagtgatcgttggccatgaggctgcaggtattgtggaaagtattgggccaggagtgaccaacgtcaaaccaggtgacaaagtaattccactttatgcacctctatgtagaaaatgcaagttttgtctgagtccactcacaaatttgtgtgggaaaatcagtaatctcaaaagtcctgctagtgatcaacaactaatggaagacaaaaccagcaggtttacctgcaaaggaaaaccagtttaccatttctttggaaccagtacattctctcagtacactgtggtgtcagatatcaatcttgccaaaatagatgatgatgcaaatttagagagagtttgtctgcttggatgtgggttttcaactggctatggggctgcaatcaacaatgccaaggtcacccctggttcgacttgtgctgtctttggcctaggaggtgtgggtctttctgctgtaatgggttgtaaagcagcaggagcttccagaatcataggtattgacatcaacagtgagaagtttgtgaaggctaaagccctgggagccactgactgcctcaatcctagagacttacataaacctatccaggaagttatcattgaattgaccaagggaggtgtggattttgcccttgactgtgcaggtggatctgaaaccatgaaagcagccctggactgtacaaccgcaggctggggatcatgtactttcattggagtagctgctggtagcaaaggattgactgtttttccagaggagctaataatcggccgtactataaatggaacattctttggtggttggaaaagtgtagattctatcccaaagctggtcactgactataagaataagaaattcaatctggatgcactggtgacccataccctgccttttgacaaaatcagtgaggcatttgacctaatgaaccaaggaaaaagtatctgattgaatgtgaacctgcctggttaatttattacctgatttgatgaaccaaggaaagccatgcgtttaaacaaatatttacatttaatatgggaacataaaagagctttaaatattatagactttgtacctgttatatatatgaatattccctatgttaaataataataataactagtgtttatgaatagaatcatatcatctttagaaattgtttaaaattagttctgggaagttgaaagtggggaatgaagagataataaataaaactagattggccatatgtttataatttttttagattgggtaatgaatacatggagtttcattatacttttctctccacttttgtctatgttgaaaattttctgggagctaaatgatgagaacacatggacacatgatggggaacaacacacactagggcctgttgagggcagggagtcggcagagagagagcatcaggaagaatagctaatggatgctgggcttcatacctgggtgatgagatgatctgtgcagcaaagcaccatggtacatgtttacctatgtaacaaacctgcacatcctgcacatgtaccctggaacttaataaaaggagactatagtcaacagcaatttaattgtatattttaatatgactaaaagagtataatggattgtttgtaacacaaataaatgcttgaggggatg

SEQ ID NO: 731725 - DNA, 2666 bp, Homo sapiens
  misc_feature (27)..(27): n is a, c, g, or t
  misc_feature (29)..(29): n is a, c, g, or t
  misc_feature (262)..(262): n is a, c, g, or t
  misc_feature (2660)..(2661): n is a, c, g, or t
aaagcttgctagattaactattgatananaagcttaaataggtagtaaaccactaaatatgcaaggaagtgattatcagggttgtgaaggagaagaacaggtaagttaaatgggcattctgaggagtagaaatttcctttacttcataattatttgttaattcatctttatatgtttaatgggcttttctctattattttatatttttcaataaaagaaaaaagaatttaaaaaatcttggagctcactgggagcaatgggnttgcagctgaagtccaatagtacaaatgatgtggtaagaggccggcagggctgtgaattacagcaacaaaggagaaaaggaagtgattggagaattaagcaacatgaatggtattattcaaagacagctcattataggacacggaactccctgggtaggagtttgaagctttcttaactcagaaagaaacttccaacacagtttcccaaagaaaaatgggcaccaagggcaaaattttgatttagtggatttgaggcagggctttcatctctaacaaattcccaagtgatgtgaataaatgcttgtccgaggaccacacttcgagttgcagagatgtaaaacacatctattctccagcaattatctgactcaggttattaaatgcaaagcagccatcgcctgggaagcaggcaagcccctttgcattgaagaggttgaagtagctccccccaaggctcatgaagttcgcattcagatcattgctacctccctgtgccatactgatgccactgttatcgattctaaatttgagggcctagctttcccagtgatcgttggccatgaggctgcaggtattgtggaaagtattgggccaggagtgaccaacgtcaaaccaggtgacaaagtaattccactttatgcacctctatgtagaaaatgcaagttttgtctgagtccactcacaaatttgtgtgggaaaatcagtaatctcaaaagtcctgctagtgatcaacaactaatggaagacaaaaccagcaggtttacctgcaaaggaaaaccagtttaccatttctttggaaccagtacattctctcagtacactgtggtgtcagatatcaatcttgccaaaatagatgatgatgcaaatttagagagagtttgtctgcttggatgtgggttttcaactggctatggggctgcaatcaacaatgccaaggtcacccctggttcgacttgtgctgtctttggcctaggaggtgtgggtctttctgctgtaatgggttgtaaagcagcaggagcttccagaatcataggtattgacatcaacagtgagaagtttgtgaaggctaaagccctgggagccactgactgcctcaatcctagagacttacataaacctatccaggaagttatcattgaattgaccaagggaggtgtggattttgcccttgactgtgcaggtggatctgaaaccatgaaagcagccctggactgtacaaccgcaggctggggatcatgtactttcattggagtagctgctggtagcaaaggattgactgtttttccagaggagctaataatcggccgtactataaatggaacattctttggtggttggaaaagtgtagattctatcccaaagctggtcactgactataagaataagaaattcaatctggatgcactggtgacccataccctgccttttgacaaaatcagtgaggcatttgacctaatgaaccaaggaaaaagtatctgattgaatgtgaacctgcctggttaatttattacctgatttgatgaaccaaggaaagccatgcgtttaaacaaatatttacatttaatatgggaacataaaagagctttaaatattatagactttgtacctgttatatatatgaatattccctatgttaaataataataataactagtgtttatgaatagaatcatatcatctttagaaattgtttaaaattagttctgggaagttgaaagtggggaatgaagagataataaataaaactagattggccatatgtttataatttttttagattgggtaatgaatacatggagtttcattatacttttctctccacttttgtctatgttgaaaattttctgggagctaaatgatgagaacacatggacacatgatggggaacaacacacactagggcctgttgagggcagggagtcggcagagagagagcatcaggaagaatagctaatggatgctgggcttcatacctgggtgatgagatgatctgtgcagcaaagcaccatggtacatgtttacctatgtaacaaacctgcacatcctgcacatgtaccctggaacttaataaaagttggaaatttttaaaaagaatgaataagacctggtatttgatagcacaacagggagactatagtcaacagcaatttaattgtatattttaatatgactaaaagagtataatggattgtttgtaacacaaataaatgcttgaggggatggacaccccatattacatgatgtgattattacacattgcatgcctatatcaaaacatctcatgtaccccataaatatatacacctaatacccacaaaacttaaaatataaaatgttttaaataaaaataaagaaaagatttccacaataaaaagatttttactggaaaaaatcacnntattt

SEQ ID NO: 731726 - DNA, 2346 bp, Homo sapiens
  misc_feature (27)..(27): n is a, c, g, or t
  misc_feature (29)..(29): n is a, c, g, or t
  misc_feature (262)..(262): n is a, c, g, or t
aaagcttgctagattaactattgatananaagcttaaataggtagtaaaccactaaatatgcaaggaagtgattatcagggttgtgaaggagaagaacaggtaagttaaatgggcattctgaggagtagaaatttcctttacttcataattatttgttaattcatctttatatgtttaatgggcttttctctattattttatatttttcaataaaagaaaaaagaatttaaaaaatcttggagctcactgggagcaatgggnttgcagctgaagtccaatagtacaaatgatgtggtaagaggccggcagggctgtgaattacagcaacaaaggagaaaaggaagtgattggagaattaagcaacatgaatggtattattcaaagacagctcattataggacacggaactccctgggtaggagtttgaagctttcttaactcagaaagaaacttccaacacagtttcccaaagaaaaatgggcaccaagggcaaaattttgatttagtggatttgaggcagggctttcatctctaacaaattcccaagtgatgtgaataaatgcttgtccgaggaccacacttcgagttgcagagatgtaaaacacatctattctccagcaattatctgactcaggttattaaatgcaaagcagccatcgcctgggaagcaggcaagcccctttgcattgaagaggttgaagtagctccccccaaggctcatgaagttcgcattcagatcattgctacctccctgtgccatactgatgccactgttatcgattctaaatttgagggcctagctttcccagtgatcgttggccatgaggctgcaggtattgtggaaagtattgggccaggagtgaccaacgtcaaaccaggtgacaaagtaattccactttatgcacctctatgtagaaaatgcaagttttgtctgagtccactcacaaatttgtgtgggaaaatcagtaatctcaaaagtcctgctagtgatcaacaactaatggaagacaaaaccagcaggtttacctgcaaaggaaaaccagtttaccatttctttggaaccagtacattctctcagtacactgtggtgtcagatatcaatcttgccaaaatagatgatgatgcaaatttagagagagtttgtctgcttggatgtgggttttcaactggctatggggctgcaatcaacaatgccaaggtcacccctggttcgacttgtgctgtctttggcctaggaggtgtgggtctttctgctgtaatgggttgtaaagcagcaggagcttccagaatcataggtattgacatcaacagtgagaagtttgtgaaggctaaagccctgggagccactgactgcctcaatcctagagacttacataaacctatccaggaagttatcattgaattgaccaagggaggtgtggattttgcccttgactgtgcaggtggatctgaaaccatggttggaaaagtgtagattctatcccaaagctggtcactgactataagaataagaaattcaatctggatgcactggtgacccataccctgccttttgacaaaatcagtgaggcatttgacctaatgaaccaaggaaaaagcatccgaacaatcctcatcttttgaagatgccaggagcaattcggaatactatctgattgaatgtgaacctgcctggttaatttattacctgatttgatgaaccaaggaaagccatgcgtttaaacaaatatttacatttaatatgggaacataaaagagctttaaatattatagactttgtacctgttatatatatgaatattccctatgttaaataataataataactagtgtttatgaatagaatcatatcatctttagaaattgtttaaaattagttctgggaagttgaaagtggggaatgaagagataataaataaaactagattggccatatgtttataatttttttagattgggtaatgaatacatggagtttcattatacttttctctccacttttgtctatgttgaaaattttctgggagctaaatgatgagaacacatggacacatgatggggaacaacacacactagggcctgttgagggcagggagtcggcagagagagagcatcaggaagaatagctaatggatgctgggcttcatacctgggtgatgagatgatctgtgcagcaaagcaccatggtacatgtttacctatgtaacaaacctgcacatcctgcacatgtaccctggaacttaataaaaggagactatagtcaacagcaatttaattgtatattttaatatgactaaaagagtataatggattgtttgtaacacaaataaatgcttgaggggatg

SEQ ID NO: 731727 - DNA, 2580 bp, Homo sapiens
  misc_feature (27)..(27): n is a, c, g, or t
  misc_feature (29)..(29): n is a, c, g, or t
  misc_feature (262)..(262): n is a, c, g, or t
  misc_feature (2574)..(2575): n is a, c, g, or t
aaagcttgctagattaactattgatananaagcttaaataggtagtaaaccactaaatatgcaaggaagtgattatcagggttgtgaaggagaagaacaggtaagttaaatgggcattctgaggagtagaaatttcctttacttcataattatttgttaattcatctttatatgtttaatgggcttttctctattattttatatttttcaataaaagaaaaaagaatttaaaaaatcttggagctcactgggagcaatgggnttgcagctgaagtccaatagtacaaatgatgtggtaagaggccggcagggctgtgaattacagcaacaaaggagaaaaggaagtgattggagaattaagcaacatgaatggtattattcaaagacagctcattataggacacggaactccctgggtaggagtttgaagctttcttaactcagaaagaaacttccaacacagtttcccaaagaaaaatgggcaccaagggcaaaattttgatttagtggatttgaggcagggctttcatctctaacaaattcccaagtgatgtgaataaatgcttgtccgaggaccacacttcgagttgcagagatgtaaaacacatctattctccagcaattatctgactcaggttattaaatgcaaagcagccatcgcctgggaagcaggcaagcccctttgcattgaagaggttgaagtagctccccccaaggctcatgaagttcgcattcagatcattgctacctccctgtgccatactgatgccactgttatcgattctaaatttgagggcctagctttcccagtgatcgttggccatgaggctgcaggtattgtggaaagtattgggccaggagtgaccaacgtcaaaccaggtgacaaagtaattccactttatgcacctctatgtagaaaatgcaagttttgtctgagtccactcacaaatttgtgtgggaaaatcagtaatctcaaaagtcctgctagtgatcaacaactaatggaagacaaaaccagcaggtttacctgcaaaggaaaaccagtttaccatttctttggaaccagtacattctctcagtacactgtggtgtcagatatcaatcttgccaaaatagatgatgatgcaaatttagagagagtttgtctgcttggatgtgggttttcaactggctatggggctgcaatcaacaatgccaaggtcacccctggttcgacttgtgctgtctttggcctaggaggtgtgggtctttctgctgtaatgggttgtaaagcagcaggagcttccagaatcataggtattgacatcaacagtgagaagtttgtgaaggctaaagccctgggagccactgactgcctcaatcctagagacttacataaacctatccaggaagttatcattgaattgaccaagggaggtgtggattttgcccttgactgtgcaggtggatctgaaaccatggttggaaaagtgtagattctatcccaaagctggtcactgactataagaataagaaattcaatctggatgcactggtgacccataccctgccttttgacaaaatcagtgaggcatttgacctaatgaaccaaggaaaaagcatccgaacaatcctcatcttttgaagatgccaggagcaattcggaatactatctgattgaatgtgaacctgcctggttaatttattacctgatttgatgaaccaaggaaagccatgcgtttaaacaaatatttacatttaatatgggaacataaaagagctttaaatattatagactttgtacctgttatatatatgaatattccctatgttaaataataataataactagtgtttatgaatagaatcatatcatctttagaaattgtttaaaattagttctgggaagttgaaagtggggaatgaagagataataaataaaactagattggccatatgtttataatttttttagattgggtaatgaatacatggagtttcattatacttttctctccacttttgtctatgttgaaaattttctgggagctaaatgatgagaacacatggacacatgatggggaacaacacacactagggcctgttgagggcagggagtcggcagagagagagcatcaggaagaatagctaatggatgctgggcttcatacctgggtgatgagatgatctgtgcagcaaagcaccatggtacatgtttacctatgtaacaaacctgcacatcctgcacatgtaccctggaacttaataaaagttggaaatttttaaaaagaatgaataagacctggtatttgatagcacaacagggagactatagtcaacagcaatttaattgtatattttaatatgactaaaagagtataatggattgtttgtaacacaaataaatgcttgaggggatggacaccccatattacatgatgtgattattacacattgcatgcctatatcaaaacatctcatgtaccccataaatatatacacctaatacccacaaaacttaaaatataaaatgttttaaataaaaataaagaaaagatttccacaataaaaagatttttactggaaaaaatcacnntattt

SEQ ID NO: 731728 - DNA, 2366 bp, Homo sapiens
  misc_feature (27)..(27): n is a, c, g, or t
  misc_feature (29)..(29): n is a, c, g, or t
  misc_feature (262)..(262): n is a, c, g, or t
aaagcttgctagattaactattgatananaagcttaaataggtagtaaaccactaaatatgcaaggaagtgattatcagggttgtgaaggagaagaacaggtaagttaaatgggcattctgaggagtagaaatttcctttacttcataattatttgttaattcatctttatatgtttaatgggcttttctctattattttatatttttcaataaaagaaaaaagaatttaaaaaatcttggagctcactgggagcaatgggnttgcagctgaagtccaatagtacaaatgatgtggtaagaggccggcagggctgtgaattacagcaacaaaggagaaaaggaagtgattggagaattaagcaacatgaatggtattattcaaagacagctcattataggacacggaactccctgggtaggagtttgaagctttcttaactcagaaagaaacttccaacacagtttcccaaagaaaaatgggcaccaagggcaaaattttgatttagtggatttgaggcagggctttcatctctaacaaattcccaagtgatgtgaataaatgcttgtccgaggaccacacttcgagttgcagagatgtaaaacacatctattctccagcaattatctgactcaggttattaaatgcaaagcagccatcgcctgggaagcaggcaagcccctttgcattgaagaggttgaagtagctccccccaaggctcatgaagttcgcattcagatcattgctacctccctgtgccatactgatgccactgttatcgattctaaatttgagggcctagctttcccagtgatcgttggccatgaggctgcaggtattgtggaaagtattgggccaggagtgaccaacgtcaaaccaggtgacaaagtaattccactttatgcacctctatgtagaaaatgcaagttttgtctgagtccactcacaaatttgtgtgggaaaatcagtaatctcaaaagtcctgctagtgatcaacaactaatggaagacaaaaccagcaggttgtcagatatcaatcttgccaaaatagatgatgatgcaaatttagagagagtttgtctgcttggatgtgggttttcaactggctatggggctgcaatcaacaatgccaaggtcacccctggttcgacttgtgctgtctttggcctaggaggtgtgggtctttctgctgtaatgggttgtaaagcagcaggagcttccagaatcataggtattgacatcaacagtgagaagtttgtgaaggctaaagccctgggagccactgactgcctcaatcctagagacttacataaacctatccaggaagttatcattgaattgaccaagggaggtgtggattttgcccttgactgtgcaggtggatctgaaaccatgaaagcagccctggactgtacaaccgcaggctggggatcatgtactttcattggagtagctgctggtagcaaaggattgactgtttttccagaggagctaataatcggccgtactataaatggaacattctttggtggttggaaaagtgtagattctatcccaaagctggtcactgactataagaataagaaattcaatctggatgcactggtgacccataccctgccttttgacaaaatcagtgaggcatttgacctaatgaaccaaggaaaaagtatctgattgaatgtgaacctgcctggttaatttattacctgatttgatgaaccaaggaaagccatgcgtttaaacaaatatttacatttaatatgggaacataaaagagctttaaatattatagactttgtacctgttatatatatgaatattccctatgttaaataataataataactagtgtttatgaatagaatcatatcatctttagaaattgtttaaaattagttctgggaagttgaaagtggggaatgaagagataataaataaaactagattggccatatgtttataatttttttagattgggtaatgaatacatggagtttcattatacttttctctccacttttgtctatgttgaaaattttctgggagctaaatgatgagaacacatggacacatgatggggaacaacacacactagggcctgttgagggcagggagtcggcagagagagagcatcaggaagaatagctaatggatgctgggcttcatacctgggtgatgagatgatctgtgcagcaaagcaccatggtacatgtttacctatgtaacaaacctgcacatcctgcacatgtaccctggaacttaataaaaggagactatagtcaacagcaatttaattgtatattttaatatgactaaaagagtataatggattgtttgtaacacaaataaatgcttgaggggatg

SEQ ID NO: 731729 - DNA, 2600 bp, Homo sapiens
  misc_feature (27)..(27): n is a, c, g, or t
  misc_feature (29)..(29): n is a, c, g, or t
  misc_feature (262)..(262): n is a, c, g, or t
  misc_feature (2594)..(2595): n is a, c, g, or t
aaagcttgctagattaactattgatananaagcttaaataggtagtaaaccactaaatatgcaaggaagtgattatcagggttgtgaaggagaagaacaggtaagttaaatgggcattctgaggagtagaaatttcctttacttcataattatttgttaattcatctttatatgtttaatgggcttttctctattattttatatttttcaataaaagaaaaaagaatttaaaaaatcttggagctcactgggagcaatgggnttgcagctgaagtccaatagtacaaatgatgtggtaagaggccggcagggctgtgaattacagcaacaaaggagaaaaggaagtgattggagaattaagcaacatgaatggtattattcaaagacagctcattataggacacggaactccctgggtaggagtttgaagctttcttaactcagaaagaaacttccaacacagtttcccaaagaaaaatgggcaccaagggcaaaattttgatttagtggatttgaggcagggctttcatctctaacaaattcccaagtgatgtgaataaatgcttgtccgaggaccacacttcgagttgcagagatgtaaaacacatctattctccagcaattatctgactcaggttattaaatgcaaagcagccatcgcctgggaagcaggcaagcccctttgcattgaagaggttgaagtagctccccccaaggctcatgaagttcgcattcagatcattgctacctccctgtgccatactgatgccactgttatcgattctaaatttgagggcctagctttcccagtgatcgttggccatgaggctgcaggtattgtggaaagtattgggccaggagtgaccaacgtcaaaccaggtgacaaagtaattccactttatgcacctctatgtagaaaatgcaagttttgtctgagtccactcacaaatttgtgtgggaaaatcagtaatctcaaaagtcctgctagtgatcaacaactaatggaagacaaaaccagcaggttgtcagatatcaatcttgccaaaatagatgatgatgcaaatttagagagagtttgtctgcttggatgtgggttttcaactggctatggggctgcaatcaacaatgccaaggtcacccctggttcgacttgtgctgtctttggcctaggaggtgtgggtctttctgctgtaatgggttgtaaagcagcaggagcttccagaatcataggtattgacatcaacagtgagaagtttgtgaaggctaaagccctgggagccactgactgcctcaatcctagagacttacataaacctatccaggaagttatcattgaattgaccaagggaggtgtggattttgcccttgactgtgcaggtggatctgaaaccatgaaagcagccctggactgtacaaccgcaggctggggatcatgtactttcattggagtagctgctggtagcaaaggattgactgtttttccagaggagctaataatcggccgtactataaatggaacattctttggtggttggaaaagtgtagattctatcccaaagctggtcactgactataagaataagaaattcaatctggatgcactggtgacccataccctgccttttgacaaaatcagtgaggcatttgacctaatgaaccaaggaaaaagtatctgattgaatgtgaacctgcctggttaatttattacctgatttgatgaaccaaggaaagccatgcgtttaaacaaatatttacatttaatatgggaacataaaagagctttaaatattatagactttgtacctgttatatatatgaatattccctatgttaaataataataataactagtgtttatgaatagaatcatatcatctttagaaattgtttaaaattagttctgggaagttgaaagtggggaatgaagagataataaataaaactagattggccatatgtttataatttttttagattgggtaatgaatacatggagtttcattatacttttctctccacttttgtctatgttgaaaattttctgggagctaaatgatgagaacacatggacacatgatggggaacaacacacactagggcctgttgagggcagggagtcggcagagagagagcatcaggaagaatagctaatggatgctgggcttcatacctgggtgatgagatgatctgtgcagcaaagcaccatggtacatgtttacctatgtaacaaacctgcacatcctgcacatgtaccctggaacttaataaaagttggaaatttttaaaaagaatgaataagacctggtatttgatagcacaacagggagactatagtcaacagcaatttaattgtatattttaatatgactaaaagagtataatggattgtttgtaacacaaataaatgcttgaggggatggacaccccatattacatgatgtgattattacacattgcatgcctatatcaaaacatctcatgtaccccataaatatatacacctaatacccacaaaacttaaaatataaaatgttttaaataaaaataaagaaaagatttccacaataaaaagatttttactggaaaaaatcacnntattt

SEQ ID NO: 731730 - DNA, 2099 bp, Homo sapiens
  misc_feature (27)..(27): n is a, c, g, or t
  misc_feature (29)..(29): n is a, c, g, or t
  misc_feature (262)..(262): n is a, c, g, or t
  misc_feature (2093)..(2094): n is a, c, g, or t
aaagcttgctagattaactattgatananaagcttaaataggtagtaaaccactaaatatgcaaggaagtgattatcagggttgtgaaggagaagaacaggtaagttaaatgggcattctgaggagtagaaatttcctttacttcataattatttgttaattcatctttatatgtttaatgggcttttctctattattttatatttttcaataaaagaaaaaagaatttaaaaaatcttggagctcactgggagcaatgggnttgcagctgaagtccaatagtacaaatgatgtggtaagaggccggcagggctgtgaattacagcaacaaaggagaaaaggaagtgattggagaattaagcaacatgaatggtattattcaaagacagctcattataggacacggaactccctgggtaggagtttgaagctttcttaactcagaaagaaacttccaacacagtttcccaaagaaaaatgggcaccaagggcaaagttattaaatgcaaagcagccatcgcctgggaagcaggcaagcccctttgcattgaagaggttgaagtagctccccccaaggctcatgaagttcgcattcagatcattgctacctccctgtgccatactgatgccactgttatcgattctaaatttgagggcctagctttcccagtgatcgttggccatgaggctgcaggtattgtggaaagtattgggccaggagtgaccaacgtcaaaccaggtgacaaagtaattccactttatgcacctctatgtagaaaatgcaagttttgtctgagtccactcacaaatttgtgtgggaaaatcagtaatctcaaaagtcctgctagtgatcaacaactaatggaagacaaaaccagcaggttaaagcagccctggactgtacaaccgcaggctggggatcatgtactttcattggagtagctgctggtagcaaaggattgactgtttttccagaggagctaataatcggccgtactataaatggaacattctttggtggttggaaaagtgtagattctatcccaaagctggtcactgactataagaataagaaattcaatctggatgcactggtgacccataccctgccttttgacaaaatcagtgaggcatttgacctaatgaaccaaggaaaaagcatccgaacaatcctcatcttttgaagatgccaggagcaattcggaatactatctgattgaatgtgaacctgcctggttaatttattacctgatttgatgaaccaaggaaagccatgcgtttaaacaaatatttacatttaatatgggaacataaaagagctttaaatattatagactttgtacctgttatatatatgaatattccctatgttaaataataataataactagtgtttatgaatagaatcatatcatctttagaaattagataataaataaaactagattggccatatgtttataatttttttagattgggtaatgaatacatggagtttcattatacttttctctccacttttgtctatgttgaaaattttctgggagctaaatgatgagaacacatggacacatgatggggaacaacacacactagggcctgttgagggcagggagtcggcagagagagagcatcaggaagaatagctaatggatgctgggcttcatacctgggtgatgagatgatctgtgcagcaaagcaccatggtacatgtttacctatgtaacaaacctgcacatcctgcacatgtaccctggaacttaataaaagttggaaatttttaaaaagaatgaataagacctggtatttgatagcacaacagggagactatagtcaacagcaatttaattgtatattttaatatgactaaaagagtataatggattgtttgtaacacaaataaatgcttgaggggatggacaccccatattacatgatgtgattattacacattgcatgcctatatcaaaacatctcatgtaccccataaatatatacacctaatacccacaaaacttaaaatataaaatgttttaaataaaaataaagaaaagatttccacaataaaaagatttttactggaaaaaatcacnntattt

SEQ ID NO: 731731 - DNA, 2149 bp, Homo sapiens
  misc_feature (27)..(27): n is a, c, g, or t
  misc_feature (29)..(29): n is a, c, g, or t
  misc_feature (262)..(262): n is a, c, g, or t
aaagcttgctagattaactattgatananaagcttaaataggtagtaaaccactaaatatgcaaggaagtgattatcagggttgtgaaggagaagaacaggtaagttaaatgggcattctgaggagtagaaatttcctttacttcataattatttgttaattcatctttatatgtttaatgggcttttctctattattttatatttttcaataaaagaaaaaagaatttaaaaaatcttggagctcactgggagcaatgggnttgcagctgaagtccaatagtacaaatgatgtggtaagaggccggcagggctgtgaattacagcaacaaaggagaaaaggaagtgattggagaattaagcaacatgaatggtattattcaaagacagctcattataggacacggaactccctgggtaggagtttgaagctttcttaactcagaaagaaacttccaacacagtttcccaaagaaaaatgggcaccaagggcaaagttattaaatgcaaagcagccatcgcctgggaagcaggcaagcccctttgcattgaagaggttgaagtagctccccccaaggctcatgaagttcgcattcagatcattgctacctccctgtgccatactgatgccactgttatcgattctaaatttgagggcctagctttcccagtgatcgttggccatgaggctgcaggtattgtggaaagtattgggccaggagtgaccaacgtcaaaccaggtgacaaagtaattccactttatgcacctctatgtagaaaatgcaagttttgtctgagtccactcacaaatttgtgtgggaaaatcagtacctgcaaaggaaaaccagtttaccatttctttggaaccagtacattctctcagtacactgtggtgtcagatatcaatcttgccaaaatagatgatgatgcaaatttagagagagtttgtctgcttggatgtgggttttcaactggctatggggctgcaatcaacaatgccaaggtcacccctggttcgacttgtgctgtctttggcctaggaggtgtgggtctttctgctgtaatgggttgtaaagcagcaggagcttccagaatcataggtattgacatcaacagtgagaagtttgtgaaggctaaagccctgggagccactgactgcctcaatcctagagacttacataaacctatccaggaagttatcattgaattgaccaagggaggtgtggattttgcccttgactgtgcaggtggatctgaaaccatggttggaaaagtgtagattctatcccaaagctggtcactgactataagaataagaaattcaatctggatgcactggtgacccataccctgccttttgacaaaatcagtgaggcatttgacctaatgaaccaaggaaaaagcatccgaacaatcctcatcttttgaagatgccaggagcaattcggaatactatctgattgaatgtgaacctgcctggttaatttattacctgatttgatgaaccaaggaaagccatgcgtttaaacaaatatttacatttaatatgggaacataaaagagctttaaatattatagactttgtacctgttatatatatgaatattccctatgttaaataataataataactagtgtttatgaatagaatcatatcatctttagaaattgtttaaaattagttctgggaagttgaaagtggggaatgaagagataataaataaaactagattggccatatgtttataatttttttagattgggtaatgaatacatggagtttcattatacttttctctccacttttgtctatgttgaaaattttctgggagctaaatgatgagaacacatggacacatgatggggaacaacacacactagggcctgttgagggcagggagtcggcagagagagagcatcaggaagaatagctaatggatgctgggcttcatacctgggtgatgagatgatctgtgcagcaaagcaccatggtacatgtttacctatgtaacaaacctgcacatcctgcacatgtaccctggaacttaataaaaggagactatagtcaacagcaatttaattgtatattttaatatgactaaaagagtataatggattgtttgtaacacaaataaatgcttgaggggatg

SEQ ID NO: 731732 - DNA, 2383 bp, Homo sapiens
  misc_feature (27)..(27): n is a, c, g, or t
  misc_feature (29)..(29): n is a, c, g, or t
  misc_feature (262)..(262): n is a, c, g, or t
  misc_feature (2377)..(2378): n is a, c, g, or t
aaagcttgctagattaactattgatananaagcttaaataggtagtaaaccactaaatatgcaaggaagtgattatcagggttgtgaaggagaagaacaggtaagttaaatgggcattctgaggagtagaaatttcctttacttcataattatttgttaattcatctttatatgtttaatgggcttttctctattattttatatttttcaataaaagaaaaaagaatttaaaaaatcttggagctcactgggagcaatgggnttgcagctgaagtccaatagtacaaatgatgtggtaagaggccggcagggctgtgaattacagcaacaaaggagaaaaggaagtgattggagaattaagcaacatgaatggtattattcaaagacagctcattataggacacggaactccctgggtaggagtttgaagctttcttaactcagaaagaaacttccaacacagtttcccaaagaaaaatgggcaccaagggcaaagttattaaatgcaaagcagccatcgcctgggaagcaggcaagcccctttgcattgaagaggttgaagtagctccccccaaggctcatgaagttcgcattcagatcattgctacctccctgtgccatactgatgccactgttatcgattctaaatttgagggcctagctttcccagtgatcgttggccatgaggctgcaggtattgtggaaagtattgggccaggagtgaccaacgtcaaaccaggtgacaaagtaattccactttatgcacctctatgtagaaaatgcaagttttgtctgagtccactcacaaatttgtgtgggaaaatcagtacctgcaaaggaaaaccagtttaccatttctttggaaccagtacattctctcagtacactgtggtgtcagatatcaatcttgccaaaatagatgatgatgcaaatttagagagagtttgtctgcttggatgtgggttttcaactggctatggggctgcaatcaacaatgccaaggtcacccctggttcgacttgtgctgtctttggcctaggaggtgtgggtctttctgctgtaatgggttgtaaagcagcaggagcttccagaatcataggtattgacatcaacagtgagaagtttgtgaaggctaaagccctgggagccactgactgcctcaatcctagagacttacataaacctatccaggaagttatcattgaattgaccaagggaggtgtggattttgcccttgactgtgcaggtggatctgaaaccatggttggaaaagtgtagattctatcccaaagctggtcactgactataagaataagaaattcaatctggatgcactggtgacccataccctgccttttgacaaaatcagtgaggcatttgacctaatgaaccaaggaaaaagcatccgaacaatcctcatcttttgaagatgccaggagcaattcggaatactatctgattgaatgtgaacctgcctggttaatttattacctgatttgatgaaccaaggaaagccatgcgtttaaacaaatatttacatttaatatgggaacataaaagagctttaaatattatagactttgtacctgttatatatatgaatattccctatgttaaataataataataactagtgtttatgaatagaatcatatcatctttagaaattgtttaaaattagttctgggaagttgaaagtggggaatgaagagataataaataaaactagattggccatatgtttataatttttttagattgggtaatgaatacatggagtttcattatacttttctctccacttttgtctatgttgaaaattttctgggagctaaatgatgagaacacatggacacatgatggggaacaacacacactagggcctgttgagggcagggagtcggcagagagagagcatcaggaagaatagctaatggatgctgggcttcatacctgggtgatgagatgatctgtgcagcaaagcaccatggtacatgtttacctatgtaacaaacctgcacatcctgcacatgtaccctggaacttaataaaagttggaaatttttaaaaagaatgaataagacctggtatttgatagcacaacagggagactatagtcaacagcaatttaattgtatattttaatatgactaaaagagtataatggattgtttgtaacacaaataaatgcttgaggggatggacaccccatattacatgatgtgattattacacattgcatgcctatatcaaaacatctcatgtaccccataaatatatacacctaatacccacaaaacttaaaatataaaatgttttaaataaaaataaagaaaagatttccacaataaaaagatttttactggaaaaaatcacnntattt

SEQ ID NO: 731733 - DNA, 2140 bp, Homo sapiens
  misc_feature (27)..(27): n is a, c, g, or t
  misc_feature (29)..(29): n is a, c, g, or t
  misc_feature (262)..(262): n is a, c, g, or t
aaagcttgctagattaactattgatananaagcttaaataggtagtaaaccactaaatatgcaaggaagtgattatcagggttgtgaaggagaagaacaggtaagttaaatgggcattctgaggagtagaaatttcctttacttcataattatttgttaattcatctttatatgtttaatgggcttttctctattattttatatttttcaataaaagaaaaaagaatttaaaaaatcttggagctcactgggagcaatgggnttgcagctgaagtccaatagtacaaatgatgtggtaagaggccggcagggctgtgaattacagcaacaaaggagaaaaggaagtgattggagaattaagcaacatgaatggtattattcaaagacagctcattataggacacggaactccctgggtaggagtttgaagctttcttaactcagaaagaaacttccaacacagtttcccaaagaaaaatgggcaccaagggcaaagttattaaatgcaaagcagccatcgcctgggaagcaggcaagcccctttgcattgaagaggttgaagtagctccccccaaggctcatgaagttcgcattcagatcattgctacctccctgtgccatactgatgccactgttatcgattctaaatttgagggcctagctttcccagtgatcgttggccatgaggctgcaggtattgtggaaagtattgggccaggagtgaccaacgtcaaaccaggtgacaaagtaattccactttatgcacctctatgtagaaaatgcaagttttgtctgagtccactcacaaatttgtgtgggaaaatcagtaatctcaaaagtcctgctagtgatcaacaactaatggaagacaaaaccagcaggttgtcagatatcaatcttgccaaaatagatgatgatgcaaatttagagagagtttgtctgcttggatgtgggttttcaactggctatggggctgcaatcaacaatgccaaggtcacccctggttcgacttgtgctgtctttggcctaggaggtgtgggtctttctgctgtaatgggttgtaaagcagcaggagcttccagaatcataggtattgacatcaacagtgagaagtttgtgaaggctaaagccctgggagccactgactgcctcaatcctagagacttacataaacctatccaggaagttatcattgaattgaccaagggaggtgtggattttgcccttgactgtgcaggtggatctgaaaccatggttggaaaagtgtagattctatcccaaagctggtcactgactataagaataagaaattcaatctggatgcactggtgacccataccctgccttttgacaaaatcagtgaggcatttgacctaatgaaccaaggaaaaagcatccgaacaatcctcatcttttgaagatgccaggagcaattcggaatactatctgattgaatgtgaacctgcctggttaatttattacctgatttgatgaaccaaggaaagccatgcgtttaaacaaatatttacatttaatatgggaacataaaagagctttaaatattatagactttgtacctgttatatatatgaatattccctatgttaaataataataataactagtgtttatgaatagaatcatatcatctttagaaattgtttaaaattagttctgggaagttgaaagtggggaatgaagagataataaataaaactagattggccatatgtttataatttttttagattgggtaatgaatacatggagtttcattatacttttctctccacttttgtctatgttgaaaattttctgggagctaaatgatgagaacacatggacacatgatggggaacaacacacactagggcctgttgagggcagggagtcggcagagagagagcatcaggaagaatagctaatggatgctgggcttcatacctgggtgatgagatgatctgtgcagcaaagcaccatggtacatgtttacctatgtaacaaacctgcacatcctgcacatgtaccctggaacttaataaaaggagactatagtcaacagcaatttaattgtatattttaatatgactaaaagagtataatggattgtttgtaacacaaataaatgcttgaggggatg

SEQ ID NO: 731734 - DNA, 2374 bp, Homo sapiens
  misc_feature (27)..(27): n is a, c, g, or t
  misc_feature (29)..(29): n is a, c, g, or t
  misc_feature (262)..(262): n is a, c, g, or t
  misc_feature (2368)..(2369): n is a, c, g, or t
aaagcttgctagattaactattgatananaagcttaaataggtagtaaaccactaaatatgcaaggaagtgattatcagggttgtgaaggagaagaacaggtaagttaaatgggcattctgaggagtagaaatttcctttacttcataattatttgttaattcatctttatatgtttaatgggcttttctctattattttatatttttcaataaaagaaaaaagaatttaaaaaatcttggagctcactgggagcaatgggnttgcagctgaagtccaatagtacaaatgatgtggtaagaggccggcagggctgtgaattacagcaacaaaggagaaaaggaagtgattggagaattaagcaacatgaatggtattattcaaagacagctcattataggacacggaactccctgggtaggagtttgaagctttcttaactcagaaagaaacttccaacacagtttcccaaagaaaaatgggcaccaagggcaaagttattaaatgcaaagcagccatcgcctgggaagcaggcaagcccctttgcattgaagaggttgaagtagctccccccaaggctcatgaagttcgcattcagatcattgctacctccctgtgccatactgatgccactgttatcgattctaaatttgagggcctagctttcccagtgatcgttggccatgaggctgcaggtattgtggaaagtattgggccaggagtgaccaacgtcaaaccaggtgacaaagtaattccactttatgcacctctatgtagaaaatgcaagttttgtctgagtccactcacaaatttgtgtgggaaaatcagtaatctcaaaagtcctgctagtgatcaacaactaatggaagacaaaaccagcaggttgtcagatatcaatcttgccaaaatagatgatgatgcaaatttagagagagtttgtctgcttggatgtgggttttcaactggctatggggctgcaatcaacaatgccaaggtcacccctggttcgacttgtgctgtctttggcctaggaggtgtgggtctttctgctgtaatgggttgtaaagcagcaggagcttccagaatcataggtattgacatcaacagtgagaagtttgtgaaggctaaagccctgggagccactgactgcctcaatcctagagacttacataaacctatccaggaagttatcattgaattgaccaagggaggtgtggattttgcccttgactgtgcaggtggatctgaaaccatggttggaaaagtgtagattctatcccaaagctggtcactgactataagaataagaaattcaatctggatgcactggtgacccataccctgccttttgacaaaatcagtgaggcatttgacctaatgaaccaaggaaaaagcatccgaacaatcctcatcttttgaagatgccaggagcaattcggaatactatctgattgaatgtgaacctgcctggttaatttattacctgatttgatgaaccaaggaaagccatgcgtttaaacaaatatttacatttaatatgggaacataaaagagctttaaatattatagactttgtacctgttatatatatgaatattccctatgttaaataataataataactagtgtttatgaatagaatcatatcatctttagaaattgtttaaaattagttctgggaagttgaaagtggggaatgaagagataataaataaaactagattggccatatgtttataatttttttagattgggtaatgaatacatggagtttcattatacttttctctccacttttgtctatgttgaaaattttctgggagctaaatgatgagaacacatggacacatgatggggaacaacacacactagggcctgttgagggcagggagtcggcagagagagagcatcaggaagaatagctaatggatgctgggcttcatacctgggtgatgagatgatctgtgcagcaaagcaccatggtacatgtttacctatgtaacaaacctgcacatcctgcacatgtaccctggaacttaataaaagttggaaatttttaaaaagaatgaataagacctggtatttgatagcacaacagggagactatagtcaacagcaatttaattgtatattttaatatgactaaaagagtataatggattgtttgtaacacaaataaatgcttgaggggatggacaccccatattacatgatgtgattattacacattgcatgcctatatcaaaacatctcatgtaccccataaatatatacacctaatacccacaaaacttaaaatataaaatgttttaaataaaaataaagaaaagatttccacaataaaaagatttttactggaaaaaatcacnntattt

SEQ ID NO: 731735 - DNA, 2206 bp, Homo sapiens
  misc_feature (27)..(27): n is a, c, g, or t
  misc_feature (29)..(29): n is a, c, g, or t
  misc_feature (262)..(262): n is a, c, g, or t
aaagcttgctagattaactattgatananaagcttaaataggtagtaaaccactaaatatgcaaggaagtgattatcagggttgtgaaggagaagaacaggtaagttaaatgggcattctgaggagtagaaatttcctttacttcataattatttgttaattcatctttatatgtttaatgggcttttctctattattttatatttttcaataaaagaaaaaagaatttaaaaaatcttggagctcactgggagcaatgggnttgcagctgaagtccaatagtacaaatgatgtggtaagaggccggcagggctgtgaattacagcaacaaaggagaaaaggaagtgattggagaattaagcaacatgaatggtattattcaaagacagctcattataggacacggaactccctgggtaggagtttgaagctttcttaactcagaaagaaacttccaacacagtttcccaaagaaaaatgggcaccaagggcaaagttattaaatgcaaagcagccatcgcctgggaagcaggcaagcccctttgcattgaagaggttgaagtagctccccccaaggctcatgaagttcgcattcagatcattgctacctccctgtgccatactgatgccactgttatcgattctaaatttgagggcctagctttcccagtgatcgttggccatgaggctgcaggtattgtggaaagtattgggccaggagtgaccaacgtcaaaccaggtgacaaagtaattccactttatgcacctctatgtagaaaatgcaagttttgtctgagtccactcacaaatttgtgtgggaaaatcagtaatctcaaaagtcctgctagtgatcaacaactaatggaagacaaaaccagcaggtttacctgcaaaggaaaaccagtttaccatttctttggaaccagtacattctctcagtacactgtggtgtcagatatcaatcttgccaaaatagatgatgatgcaaatttagagagagtttgtctgcttggatgtgggttttcaactggctatggggctgcaatcaacaatgccaaggtcacccctggttcgacttgtgctgtctttggcctaggaggtgtgggtctttctgctgtaatgggttgtaaagcagcaggagcttccagaatcataggtattgacatcaacagtgagaagtttgtgaaggctaaagccctgggagccactgactgcctcaatcctagagacttacataaacctatccaggaagttatcattgaattgaccaagggaggtgtggattttgcccttgactgtgcaggtggatctgaaaccatggttggaaaagtgtagattctatcccaaagctggtcactgactataagaataagaaattcaatctggatgcactggtgacccataccctgccttttgacaaaatcagtgaggcatttgacctaatgaaccaaggaaaaagcatccgaacaatcctcatcttttgaagatgccaggagcaattcggaatactatctgattgaatgtgaacctgcctggttaatttattacctgatttgatgaaccaaggaaagccatgcgtttaaacaaatatttacatttaatatgggaacataaaagagctttaaatattatagactttgtacctgttatatatatgaatattccctatgttaaataataataataactagtgtttatgaatagaatcatatcatctttagaaattgtttaaaattagttctgggaagttgaaagtggggaatgaagagataataaataaaactagattggccatatgtttataatttttttagattgggtaatgaatacatggagtttcattatacttttctctccacttttgtctatgttgaaaattttctgggagctaaatgatgagaacacatggacacatgatggggaacaacacacactagggcctgttgagggcagggagtcggcagagagagagcatcaggaagaatagctaatggatgctgggcttcatacctgggtgatgagatgatctgtgcagcaaagcaccatggtacatgtttacctatgtaacaaacctgcacatcctgcacatgtaccctggaacttaataaaaggagactatagtcaacagcaatttaattgtatattttaatatgactaaaagagtataatggattgtttgtaacacaaataaatgcttgaggggatg

SEQ ID NO: 731736 - DNA, 2440 bp, Homo sapiens; identical to SEQ ID NO: 330239
  misc_feature (27)..(27): n is a, c, g, or t
  misc_feature (29)..(29): n is a, c, g, or t
  misc_feature (262)..(262): n is a, c, g, or t
  misc_feature (2434)..(2435): n is a, c, g, or t

SEQ ID NO: 731737 - DNA, 1856 bp, Homo sapiens
  misc_feature (27)..(27): n is a, c, g, or t
  misc_feature (29)..(29): n is a, c, g, or t
  misc_feature (262)..(262): n is a, c, g, or t
aaagcttgctagattaactattgatananaagcttaaataggtagtaaaccactaaatatgcaaggaagtgattatcagggttgtgaaggagaagaacaggtaagttaaatgggcattctgaggagtagaaatttcctttacttcataattatttgttaattcatctttatatgtttaatgggcttttctctattattttatatttttcaataaaagaaaaaagaatttaaaaaatcttggagctcactgggagcaatgggnttgcagctgaagtccaatagtacaaatgatgtggtaagaggccggcagggctgtgaattacagcaacaaaggagaaaaggaagtgattggagaattaagcaacatgaatggtattattcaaagacagctcattataggacacggaactccctgggtaggagtttgaagctttcttaactcagaaagaaacttccaacacagtttcccaaagaaaaatgggcaccaagggcaaagttattaaatgcaaagcagccatcgcctgggaagcaggcaagcccctttgcattgaagaggttgaagtagctccccccaaggctcatgaagttcgcattcagatcattgctacctccctgtgccatactgatgccactgttatcgattctaaatttgagggcctagctttcccagtgatcgttggccatgaggctgcaggtattgtggaaagtattgggccaggagtgaccaacgtcaaaccaggtgacaaagtaattccactttatgcacctctatgtagaaaatgcaagttttgtctgagtccactcacaaatttgtgtgggaaaatcagtaatctcaaaagtcctgctagtgatcaacaactaatggaagacaaaaccagcaggttaaagcagccctggactgtacaaccgcaggctggggatcatgtactttcattggagtagctgctggtagcaaaggattgactgtttttccagaggagctaataatcggccgtactataaatggaacattctttggtggttggaaaagtgtagattctatcccaaagctggtcactgactataagaataagaaattcaatctggatgcactggtgacccataccctgccttttgacaaaatcagtgaggcatttgacctaatgaaccaaggaaaaagtatctgattgaatgtgaacctgcctggttaatttattacctgatttgatgaaccaaggaaagccatgcgtttaaacaaatatttacatttaatatgggaacataaaagagctttaaatattatagactttgtacctgttatatatatgaatattccctatgttaaataataataataactagtgtttatgaatagaatcatatcatctttagaaattgtttaaaattagttctgggaagttgaaagtggggaatgaagagataataaataaaactagattggccatatgtttataatttttttagattgggtaatgaatacatggagtttcattatacttttctctccacttttgtctatgttgaaaattttctgggagctaaatgatgagaacacatggacacatgatggggaacaacacacactagggcctgttgagggcagggagtcggcagagagagagcatcaggaagaatagctaatggatgctgggcttcatacctgggtgatgagatgatctgtgcagcaaagcaccatggtacatgtttacctatgtaacaaacctgcacatcctgcacatgtaccctggaacttaataaaaggagactatagtcaacagcaatttaattgtatattttaatatgactaaaagagtataatggattgtttgtaacacaaataaatgcttgaggggatg

SEQ ID NO: 731738 - DNA, 2090 bp, Homo sapiens
  misc_feature (27)..(27): n is a, c, g, or t
  misc_feature (29)..(29): n is a, c, g, or t
  misc_feature (262)..(262): n is a, c, g, or t
  misc_feature (2084)..(2085): n is a, c, g, or t
aaagcttgctagattaactattgatananaagcttaaataggtagtaaaccactaaatatgcaaggaagtgattatcagggttgtgaaggagaagaacaggtaagttaaatgggcattctgaggagtagaaatttcctttacttcataattatttgttaattcatctttatatgtttaatgggcttttctctattattttatatttttcaataaaagaaaaaagaatttaaaaaatcttggagctcactgggagcaatgggnttgcagctgaagtccaatagtacaaatgatgtggtaagaggccggcagggctgtgaattacagcaacaaaggagaaaaggaagtgattggagaattaagcaacatgaatggtattattcaaagacagctcattataggacacggaactccctgggtaggagtttgaagctttcttaactcagaaagaaacttccaacacagtttcccaaagaaaaatgggcaccaagggcaaagttattaaatgcaaagcagccatcgcctgggaagcaggcaagcccctttgcattgaagaggttgaagtagctccccccaaggctcatgaagttcgcattcagatcattgctacctccctgtgccatactgatgccactgttatcgattctaaatttgagggcctagctttcccagtgatcgttggccatgaggctgcaggtattgtggaaagtattgggccaggagtgaccaacgtcaaaccaggtgacaaagtaattccactttatgcacctctatgtagaaaatgcaagttttgtctgagtccactcacaaatttgtgtgggaaaatcagtaatctcaaaagtcctgctagtgatcaacaactaatggaagacaaaaccagcaggttaaagcagccctggactgtacaaccgcaggctggggatcatgtactttcattggagtagctgctggtagcaaaggattgactgtttttccagaggagctaataatcggccgtactataaatggaacattctttggtggttggaaaagtgtagattctatcccaaagctggtcactgactataagaataagaaattcaatctggatgcactggtgacccataccctgccttttgacaaaatcagtgaggcatttgacctaatgaaccaaggaaaaagtatctgattgaatgtgaacctgcctggttaatttattacctgatttgatgaaccaaggaaagccatgcgtttaaacaaatatttacatttaatatgggaacataaaagagctttaaatattatagactttgtacctgttatatatatgaatattccctatgttaaataataataataactagtgtttatgaatagaatcatatcatctttagaaattgtttaaaattagttctgggaagttgaaagtggggaatgaagagataataaataaaactagattggccatatgtttataatttttttagattgggtaatgaatacatggagtttcattatacttttctctccacttttgtctatgttgaaaattttctgggagctaaatgatgagaacacatggacacatgatggggaacaacacacactagggcctgttgagggcagggagtcggcagagagagagcatcaggaagaatagctaatggatgctgggcttcatacctgggtgatgagatgatctgtgcagcaaagcaccatggtacatgtttacctatgtaacaaacctgcacatcctgcacatgtaccctggaacttaataaaagttggaaatttttaaaaagaatgaataagacctggtatttgatagcacaacagggagactatagtcaacagcaatttaattgtatattttaatatgactaaaagagtataatggattgtttgtaacacaaataaatgcttgaggggatggacaccccatattacatgatgtgattattacacattgcatgcctatatcaaaacatctcatgtaccccataaatatatacacctaatacccacaaaacttaaaatataaaatgttttaaataaaaataaagaaaagatttccacaataaaaagatttttactggaaaaaatcacnntattt

SEQ ID NO: 731739 - DNA, 2243 bp, Homo sapiens; identical to SEQ ID NO: 330242
  misc_feature (2237)..(2238): n is a, c, g, or t

SEQ ID NO: 731740 - DNA, 2009 bp, Homo sapiens
gatagtttcatggtgtgaggacccagactacttcttggggaagaaacctgaggaaatatccccactgacatgaactccccaatttgcaaacgtgtcagtcacaacatatcagaaggaagttcaataaaaagaaaatacaagcattattttttaagctacaccatgtaaacttagtatataagccctgcaatgtattatacaacttcaatatccccataaggaatactcctcaagttaggagatagaggttgaagtggggtttgagcctcacacccttctattcatatcctcgaacacaaaccttttctcctagaattctcaattatggaatacattcataaggaatgctaagtggcagccaggtggctggtaatcagcctaggggtagacaccagagtgaggcctcctgctccttctctggcccactgagaataccacctgactgcccacacagatggaaaggtggcaatgaggaaggcagaagttgggcctcatcaggtgtgtccaccatatgggcacaggaagcacaagagagggcaggcccttctaccacccaactgcaaagaagcaaggaagtggggggaaggggatgggatacaatgactgactagcctgttgaggtgtagtgatcctgccccagagtgaggaaaggacacagagattctccttccacaggtaggggtgtcttccagtcctgggtgaagaaaacatttatgcatagcaccctgctcatagcaggggttccacagttccagcagtaatgtttgagataaggactgctctgtcgttgaggcttatccccctctttgtgtctacatgtggagttacccagaaataagaacatctgggttcttaaaaagtagcatcccaacacaccaactttgatgcccactccctccttcgatgctcaactttgccctcagctataggagatccgagaacagtgactattccaagactaaaacctgactccctccttggtacattctaattctcctcaacagcaccactgagtaacaaggacgctgcctaaggtaagtaagggtcctcaattccccccaagtttactagcacatgcataaaatattattaacaccatgaatggaagaggatgacgggataaaagaaattaggcttaataaagtgaatgtctataaaggaagaccagatcctgaaatgaaaaggcaaaacttatttgtgagctttggttaaatttatcatgaaaattacacttattaatgttttattgttattaacagcatcatccgaacaatcctcatcttttgaagatgccaggagcaattcggaatactatctgattgaatgtgaacctgcctggttaatttattacctgatttgatgaaccaaggaaagccatgcgtttaaacaaatatttacatttaatatgggaacataaaagagctttaaatattatagactttgtacctgttatatatatgaatattccctatgttaaataataataataactagtgtttatgaatagaatcatatcatctttagaaattgtttaaaattagttctgggaagttgaaagtggggaatgaagagataataaataaaactagattggccatatgtttataatttttttagattgggtaatgaatacatggagtttcattatacttttctctccacttttgtctatgttgaaaattttctgggagctaaatgatgagaacacatggacacatgatggggaacaacacacactagggcctgttgagggcagggagtcggcagagagagagcatcaggaagaatagctaatggatgctgggcttcatacctgggtgatgagatgatctgtgcagcaaagcaccatggtacatgtttacctatgtaacaaacctgcacatcctgcacatgtaccctggaacttaataaaaggagactatagtcaacagcaatttaattgtatattttaatatgactaaaagagtataatggattgtttgtaacacaaataaatgcttgaggggatg

SEQ ID NO: 731741 - DNA, 1969 bp, Homo sapiens
gatagtttcatggtgtgaggacccagactacttcttggggaagaaacctgaggaaatatccccactgacatgaactccccaatttgcaaacgtgtcagtcacaacatatcagaaggaagttcaataaaaagaaaatacaagcattattttttaagctacaccatgtaaacttagtatataagccctgcaatgtattatacaacttcaatatccccataaggaatactcctcaagttaggagatagaggttgaagtggggtttgagcctcacacccttctattcatatcctcgaacacaaaccttttctcctagaattctcaattatggaatacattcataaggaatgctaagtggcagccaggtggctggtaatcagcctaggggtagacaccagagtgaggcctcctgctccttctctggcccactgagaataccacctgactgcccacacagatggaaaggtggcaatgaggaaggcagaagttgggcctcatcaggtgtgtccaccatatgggcacaggaagcacaagagagggcaggcccttctaccacccaactgcaaagaagcaaggaagtggggggaaggggatgggatacaatgactgactagcctgttgaggtgtagtgatcctgccccagagtgaggaaaggacacagagattctccttccacaggtaggggtgtcttccagtcctgggtgaagaaaacatttatgcatagcaccctgctcatagcaggggttccacagttccagcagtaatgtttgagataaggactgctctgtcgttgaggcttatccccctctttgtgtctacatgtggagttacccagaaataagaacatctgggttcttaaaaagtagcatcccaacacaccaactttgatgcccactccctccttcgatgctcaactttgccctcagctataggagatccgagaacagtgactattccaagactaaaacctgactccctccttggtacattctaattctcctcaacagcaccactgagtaacaaggacgctgcctaaggtaagtaagggtcctcaattccccccaagtttactagcacatgcataaaatattattaacaccatgaatggaagaggatgacgggataaaagaaattaggcttaataaagtgaatgtctataaaggaagaccagatcctgaaatgaaaaggcaaaacttatttgtgagctttggttaaatttatcatgcatccgaacaatcctcatcttttgaagatgccaggagcaattcggaatactatctgattgaatgtgaacctgcctggttaatttattacctgatttgatgaaccaaggaaagccatgcgtttaaacaaatatttacatttaatatgggaacataaaagagctttaaatattatagactttgtacctgttatatatatgaatattccctatgttaaataataataataactagtgtttatgaatagaatcatatcatctttagaaattgtttaaaattagttctgggaagttgaaagtggggaatgaagagataataaataaaactagattggccatatgtttataatttttttagattgggtaatgaatacatggagtttcattatacttttctctccacttttgtctatgttgaaaattttctgggagctaaatgatgagaacacatggacacatgatggggaacaacacacactagggcctgttgagggcagggagtcggcagagagagagcatcaggaagaatagctaatggatgctgggcttcatacctgggtgatgagatgatctgtgcagcaaagcaccatggtacatgtttacctatgtaacaaacctgcacatcctgcacatgtaccctggaacttaataaaaggagactatagtcaacagcaatttaattgtatattttaatatgactaaaagagtataatggattgtttgtaacacaaataaatgcttgaggggatg

SEQ ID NO: 731742 - DNA, 2203 bp, Homo sapiens; identical to SEQ ID NO: 330244
  misc_feature (2197)..(2198): n is a, c, g, or t

SEQ ID NO: 731743 - DNA, 2650 bp, Homo sapiens
  misc_feature (27)..(27): n is a, c, g, or t
  misc_feature (29)..(29): n is a, c, g, or t
  misc_feature (262)..(262): n is a, c, g, or t
  misc_feature (2644)..(2645): n is a, c, g, or t
aaagcttgctagattaactattgatananaagcttaaataggtagtaaaccactaaatatgcaaggaagtgattatcagggttgtgaaggagaagaacaggtaagttaaatgggcattctgaggagtagaaatttcctttacttcataattatttgttaattcatctttatatgtttaatgggcttttctctattattttatatttttcaataaaagaaaaaagaatttaaaaaatcttggagctcactgggagcaatgggnttgcagctgaagtccaatagtacaaatgatgtggtaagaggccggcagggctgtgaattacagcaacaaaggagaaaaggaagtgattggagaattaagcaacatgaatggtattattcaaagacagctcattataggacacggaactccctgggtaggagtttgaagctttcttaactcagaaagaaacttccaacacagtttcccaaagaaaaatgggcaccaagggcaaaattttgatttagtggatttgaggcagggctttcatctctaacaaattcccaagtgatgtgaataaatgcttgtccgaggaccacacttcgagttgcagagatgtaaaacacatctattctccagcaattatctgactcaggttattaaatgcaaagcagccatcgcctgggaagcaggcaagcccctttgcattgaagaggttgaagtagctccccccaaggctcatgaagttcgcattcagatcattgctacctccctgtgccatactgatgccactgttatcgattctaaatttgagggcctagctttcccagtgatcgttggccatgaggctgcaggtattgtggaaagtattgggccaggagtgaccaacgtcaaaccaggtgacaaagtaattccactttatgcacctctatgtagaaaatgcaagttttgtctgagtccactcacaaatttgtgtgggaaaatcagtaatctcaaaagtcctgctagtgatcaacaactaatggaagacaaaaccagcaggttgtcagatatcaatcttgccaaaatagatgatgatgcaaatttagagagagtttgtctgcttggatgtgggttttcaactggctatggggctgcaatcaacaatgccaaggtcacccctggttcgacttgtgctgtctttggcctaggaggtgtgggtctttctgctgtaatgggttgtaaagcagcaggagcttccagaatcataggtattgacatcaacagtgagaagtttgtgaaggctaaagccctgggagccactgactgcctcaatcctagagacttacataaacctatccaggaagttatcattgaattgaccaagggaggtgtggattttgcccttgactgtgcaggtggatctgaaaccatgaaagcagccctggactgtacaaccgcaggctggggatcatgtactttcattggagtagctgctggtagcaaaggattgactgtttttccagaggagctaataatcggccgtactataaatggaacattctttggtggttggaaaagtgtagattctatcccaaagctggtcactgactataagaataagaaattcaatctggatgcactggtgacccataccctgccttttgacaaaatcagtgaggcatttgacctaatgaaccaaggaaaaagcatccgaacaatcctcatcttttgaagatgccaggagcaattcggaatactatctgattgaatgtgaacctgcctggttaatttattacctgatttgatgaaccaaggaaagccatgcgtttaaacaaatatttacatttaatatgggaacataaaagagctttaaatattatagactttgtacctgttatatatatgaatattccctatgttaaataataataataactagtgtttatgaatagaatcatatcatctttagaaattgtttaaaattagttctgggaagttgaaagtggggaatgaagagataataaataaaactagattggccatatgtttataatttttttagattgggtaatgaatacatggagtttcattatacttttctctccacttttgtctatgttgaaaattttctgggagctaaatgatgagaacacatggacacatgatggggaacaacacacactagggcctgttgagggcagggagtcggcagagagagagcatcaggaagaatagctaatggatgctgggcttcatacctgggtgatgagatgatctgtgcagcaaagcaccatggtacatgtttacctatgtaacaaacctgcacatcctgcacatgtaccctggaacttaataaaagttggaaatttttaaaaagaatgaataagacctggtatttgatagcacaacagggagactatagtcaacagcaatttaattgtatattttaatatgactaaaagagtataatggattgtttgtaacacaaataaatgcttgaggggatggacaccccatattacatgatgtgattattacacattgcatgcctatatcaaaacatctcatgtaccccataaatatatacacctaatacccacaaaacttaaaatataaaatgttttaaataaaaataaagaaaagatttccacaataaaaagatttttactggaaaaaatcacnntattt

SEQ ID NO: 731744 - DNA, 2416 bp, Homo sapiens
  misc_feature (27)..(27): n is a, c, g, or t
  misc_feature (29)..(29): n is a, c, g, or t
  misc_feature (262)..(262): n is a, c, g, or t
aaagcttgctagattaactattgatananaagcttaaataggtagtaaaccactaaatatgcaaggaagtgattatcagggttgtgaaggagaagaacaggtaagttaaatgggcattctgaggagtagaaatttcctttacttcataattatttgttaattcatctttatatgtttaatgggcttttctctattattttatatttttcaataaaagaaaaaagaatttaaaaaatcttggagctcactgggagcaatgggnttgcagctgaagtccaatagtacaaatgatgtggtaagaggccggcagggctgtgaattacagcaacaaaggagaaaaggaagtgattggagaattaagcaacatgaatggtattattcaaagacagctcattataggacacggaactccctgggtaggagtttgaagctttcttaactcagaaagaaacttccaacacagtttcccaaagaaaaatgggcaccaagggcaaaattttgatttagtggatttgaggcagggctttcatctctaacaaattcccaagtgatgtgaataaatgcttgtccgaggaccacacttcgagttgcagagatgtaaaacacatctattctccagcaattatctgactcaggttattaaatgcaaagcagccatcgcctgggaagcaggcaagcccctttgcattgaagaggttgaagtagctccccccaaggctcatgaagttcgcattcagatcattgctacctccctgtgccatactgatgccactgttatcgattctaaatttgagggcctagctttcccagtgatcgttggccatgaggctgcaggtattgtggaaagtattgggccaggagtgaccaacgtcaaaccaggtgacaaagtaattccactttatgcacctctatgtagaaaatgcaagttttgtctgagtccactcacaaatttgtgtgggaaaatcagtaatctcaaaagtcctgctagtgatcaacaactaatggaagacaaaaccagcaggttgtcagatatcaatcttgccaaaatagatgatgatgcaaatttagagagagtttgtctgcttggatgtgggttttcaactggctatggggctgcaatcaacaatgccaaggtcacccctggttcgacttgtgctgtctttggcctaggaggtgtgggtctttctgctgtaatgggttgtaaagcagcaggagcttccagaatcataggtattgacatcaacagtgagaagtttgtgaaggctaaagccctgggagccactgactgcctcaatcctagagacttacataaacctatccaggaagttatcattgaattgaccaagggaggtgtggattttgcccttgactgtgcaggtggatctgaaaccatgaaagcagccctggactgtacaaccgcaggctggggatcatgtactttcattggagtagctgctggtagcaaaggattgactgtttttccagaggagctaataatcggccgtactataaatggaacattctttggtggttggaaaagtgtagattctatcccaaagctggtcactgactataagaataagaaattcaatctggatgcactggtgacccataccctgccttttgacaaaatcagtgaggcatttgacctaatgaaccaaggaaaaagcatccgaacaatcctcatcttttgaagatgccaggagcaattcggaatactatctgattgaatgtgaacctgcctggttaatttattacctgatttgatgaaccaaggaaagccatgcgtttaaacaaatatttacatttaatatgggaacataaaagagctttaaatattatagactttgtacctgttatatatatgaatattccctatgttaaataataataataactagtgtttatgaatagaatcatatcatctttagaaattgtttaaaattagttctgggaagttgaaagtggggaatgaagagataataaataaaactagattggccatatgtttataatttttttagattgggtaatgaatacatggagtttcattatacttttctctccacttttgtctatgttgaaaattttctgggagctaaatgatgagaacacatggacacatgatggggaacaacacacactagggcctgttgagggcagggagtcggcagagagagagcatcaggaagaatagctaatggatgctgggcttcatacctgggtgatgagatgatctgtgcagcaaagcaccatggtacatgtttacctatgtaacaaacctgcacatcctgcacatgtaccctggaacttaataaaaggagactatagtcaacagcaatttaattgtatattttaatatgactaaaagagtataatggattgtttgtaacacaaataaatgcttgaggggatg

SEQ ID NO: 731745 - DNA, 2596 bp, Homo sapiens
  misc_feature (27)..(27): n is a, c, g, or t
  misc_feature (29)..(29): n is a, c, g, or t
  misc_feature (262)..(262): n is a, c, g, or t
  misc_feature (2590)..(2591): n is a, c, g, or t
aaagcttgctagattaactattgatananaagcttaaataggtagtaaaccactaaatatgcaaggaagtgattatcagggttgtgaaggagaagaacaggtaagttaaatgggcattctgaggagtagaaatttcctttacttcataattatttgttaattcatctttatatgtttaatgggcttttctctattattttatatttttcaataaaagaaaaaagaatttaaaaaatcttggagctcactgggagcaatgggnttgcagctgaagtccaatagtacaaatgatgtggtaagaggccggcagggctgtgaattacagcaacaaaggagaaaaggaagtgattggagaattaagcaacatgaatggtattattcaaagacagctcattataggacacggaactccctgggtaggagtttgaagctttcttaactcagaaagaaacttccaacacagtttcccaaagaaaaatgggcaccaagggcaaaattttgatttagtggatttgaggcagggctttcatctctaacaaattcccaagtgatgtgaataaatgcttgtccgaggaccacacttcgagttgcagagatgtaaaacacatctattctccagcaattatctgactcaggttattaaatgcaaagcagccatcgcctgggaagcaggcaagcccctttgcattgaagaggttgaagtagctccccccaaggctcatgaagttcgcattcagatcattgctacctccctgtgccatactgatgccactgttatcgattctaaatttgagggcctagctttcccagtgatcgttggccatgaggctgcaggtattgtggaaagtattgggccaggagtgaccaacgtcaaaccaggtgacaaagtaattccactttatgcacctctatgtagaaaatgcaagttttgtctgagtccactcacaaatttgtgtgggaaaatcagtaatctcaaaagtcctgctagtgatcaacaactaatggaagacaaaaccagcaggttgtcagatatcaatcttgccaaaatagatgatgatgcaaatttagagagagtttgtctgcttggatgtgggttttcaactggctatggggctgcaatcaacaatgccaaggtcacccctggttcgacttgtgctgtctttggcctaggaggtgtgggtctttctgctgtaatgggttgtaaagcagcaggagcttccagaatcataggtattgacatcaacagtgagaagtttgtgaaggctaaagccctgggagccactgactgcctcaatcctagagacttacataaacctatccaggaagttatcattgaattgaccaagggaggtgtggattttgcccttgactgtgcaggtggatctgaaaccatgaaagcagccctggactgtacaaccgcaggctggggatcatgtactttcattggagtagctgctggtagcaaaggattgactgtttttccagaggagctaataatcggccgtactataaatggaacattctttggtggttggaaaagtgtagattctatcccaaagctggtcactgactataagaataagaaattcaatctggatgcactggtgacccataccctgccttttgacaaaatcagtgaggcatttgacctaatgaaccaaggaaaaagcatccgaacaatcctcatcttttgaagatgccaggagcaattcggaatactatctgattgaatgtgaacctgcctggttaatttattacctgatttgatgaaccaaggaaagccatgcgtttaaacaaatatttacatttaatatgggaacattatgttaaataataataataactagtgtttatgaatagaatcatatcatctttagaaattgtttaaaattagttctgggaagttgaaagtggggaatgaagagataataaataaaactagattggccatatgtttataatttttttagattgggtaatgaatacatggagtttcattatacttttctctccacttttgtctatgttgaaaattttctgggagctaaatgatgagaacacatggacacatgatggggaacaacacacactagggcctgttgagggcagggagtcggcagagagagagcatcaggaagaatagctaatggatgctgggcttcatacctgggtgatgagatgatctgtgcagcaaagcaccatggtacatgtttacctatgtaacaaacctgcacatcctgcacatgtaccctggaacttaataaaagttggaaatttttaaaaagaatgaataagacctggtatttgatagcacaacagggagactatagtcaacagcaatttaattgtatattttaatatgactaaaagagtataatggattgtttgtaacacaaataaatgcttgaggggatggacaccccatattacatgatgtgattattacacattgcatgcctatatcaaaacatctcatgtaccccataaatatatacacctaatacccacaaaacttaaaatataaaatgttttaaataaaaataaagaaaagatttccacaataaaaagatttttactggaaaaaatcacnntattt

SEQ ID NO: 731746 - DNA, 920 bp, Homo sapiens
agcacggccacagtcaccatcccgatttttgctacaaatgaaaattactgtataatgagctccttaacacttttctttaaacctgtgtttggaagacttgtgttggtgtggccctgtgccctaatacctgtgaaatcacagcaccgatgagctggttccaatttttaaaatatatacatgcagtacttccatgactattcaaagaaaaacaattccttccatttgccacctgagatgaccaccagggatgtgaactacctcctgccccatccccagccccaggatcctgggacagggcttatgaacgcaaccactgtagtcagctcacttgatccacagcctggcacctccactgtctggctagggagcctcgaatgggtcccaaggccaccctgctcctcagttacatcatctgcatagtagtggtggttgtgaggaattcaggagctgcagcataagggccctgcaggtactatgtgctcagtaaatgccagtggttcttaagggtctgagctcccatggtagaggcaagtaagctgaggttcagagacagaaaatgacttgcccaagatcacccagctgggaagtgacagtgccagggttggagccctggttgagctggttccacaggccagagctcattctgccctctccccggaagacctcccaccctgtccccatgcctctgcttctccctcaccccaattccccgctgccttctaggataagtgtgagccactggagaagcagcacgagaaggagaggaaacaggaggagggggaatcctagcaggacacagccttggatcaggacagagacttgggggccatcctgcccctccaacccgacatgtgtacctcagctttttccctcacttgcatcaataaagcttctgtgtttggaacagctaaaaaaaaagt

SEQ ID NO: 731747 - DNA, 1063 bp, Homo sapiens
  misc_feature (982)..(984): n is a, c, g, or t
  misc_feature (991)..(991): n is a, c, g, or t
  misc_feature (1007)..(1007): n is a, c, g, or t
ggcggtgctccgagctggcctttgggggaggttttgtgcgaggcatttcccaagtgctggcaggattgtgtcacagacacagagtaaacttttgctgggctccaagtgaccgcccatagtttattataaaggtgactgcaccctgcagccaccagcactgcctggctccacgtgcctcctggtctcagtatggcgctgtcctgggttcttacagtcctgagcctcctacctctgctggaagcccagatcccattgtgtgccaacctagtaccggtgcccatcaccaacgccaccctggaccggatcactggcaagtggttttatatcgcatcggcctttcgaaacgaggagtacaataagtcggttcaggagatccaagcaaccttcttttacttcacccccaacaagacagaggacacgatctttctcagagagtaccagacccgacaggaccagtgcatctataacaccacctacctgaatgtccagcgggaaaatgggaccatctccagatacgtgggaggccaagagcatttcgctcacttgctgatcctcagggacaccaagacctacatgcttgcttttgacgtgaacgatgagaagaactgggggctgtctgtctatgctgacaagccagagacgaccaaggagcaactgggagagttctacgaagctctcgactgcttgcgcattcccaagtcagatgtcgtgtacaccgattggaaaaaggataagtgtgagccactggagaagcagcacgagaaggagaggaaacaggaggagggggaatcctagcaggacacagccttggatcaggacagagacttgggggccatcctgcccctccaacccgacatgtgtacctcagctttttccctcacttgcatcaataaagcttctgtgtttggaacagctacaaaaaaaaacaaaacaacaaaaaaaattttgggggcgcatgggcccggaaagattttaaaacacnnnttgttgnggggggggggcccagntggttgtgcaaagtgggcaaaggggtgtccaggaaaatgggcaaagaaatggggga

SEQ ID NO: 731748 - DNA, 916 bp, Homo sapiens
ggcggtgctccgagctggcctttgggggaggttttgtgcgaggcatttcccaagtgctggcaggattgtgtcacagacacagagtaaacttttgctgggctccaagtgaccgcccatagtttattataaaggtgactgcaccctgcagccaccagcactgcctggctccacgtgcctcctggtctcagtatggcgctgtcctgggttcttacagtcctgagcctcctacctctgctggaagcccagatcccattgtgtgccaacctagtaccggtgcccatcaccaacgccaccctggaccggatcactggcaagtggttttatatcgcatcggcctttcgaaacgaggagtacaataagtcggttcaggagatccaagcaaccttcttttacttcacccccaacaagacagaggacacgatctttctcagagagtaccagacccgacaggaccagtgcatctataacaccacctacctgaatgtccagcgggaaaatgggaccatctccagatacgtgggaggccaagagcatttcgctcacttgctgatcctcagggacaccaagacctacatgcttgcttttgacgtgaacgatgagaagaactgggggctgtctgtctatgctgacaagccagagacgaccaaggagcaactgggagagttctacgaagctctcgactgcttgcgcattcccaagtcagatgtcgtgtacaccgattggaaaaaggataagtgtgagccactggagaagcagcacgagaaggagaggaaacaggaggagggggaatcctagcaggacacagccttggatcaggacagagacttgggggccatcctgcccctccaacccgacatgtgtacctcagctttttccctcacttgcatcaataaagcttctgtgtttggaacagcta

SEQ ID NO: 731749 - DNA, 745 bp, Homo sapiens
  misc_feature (31)..(31): n is a, c, g, or t
  misc_feature (35)..(35): n is a, c, g, or t
  misc_feature (38)..(38): n is a, c, g, or t
  misc_feature (42)..(43): n is a, c, g, or t
  misc_feature (46)..(46): n is a, c, g, or t
  misc_feature (53)..(53): n is a, c, g, or t
  misc_feature (60)..(60): n is a, c, g, or t
  misc_feature (62)..(62): n is a, c, g, or t
  misc_feature (66)..(66): n is a, c, g, or t
  misc_feature (83)..(84): n is a, c, g, or t
  misc_feature (99)..(99): n is a, c, g, or t
  misc_feature (108)..(109): n is a, c, g, or t
aaggtttttgaaaaaaaaaaaaaccgccganccantangccnntcngggtctncaatctnanctcnaccttgctgaagccagnnccattgtgtccaacntagtcgggnnccatcacaacgcaccctgaccagatcactggcaagtggttttatatcgcatcggcctttcgaaacgaggagtacaataagtcggttcaggagatccaagcaaccttcttttacttcacccccaacaagacagaggacacgatctttctcagagagtaccagacccgacaggaccagtgcatctataacaccacctacctgaatgtccagcgggaaaatgggaccatctccagatacgtgggaggccaagagcatttcgctcacttgctgatcctcagggacaccaagacctacatgcttgcttttgacgtgaacgatgagaagaactgggggctgtctgtctatgctgacaagccagagacgaccaaggagcaactgggagagttctacgaagctctcgactgcttgcgcattcccaagtcagatgtcgtgtacaccgattggaaaaaggataagtgtgagccactggagaagcagcacgagaaggagaggaaacaggaggagggggaatcctagcaggacacagccttggatcaggacagagacttgggggccatcctgcccctccaacccgacatgtgtacctcagctttttccctcacttgcatcaataaagcttctgtgtttggaacagcta

SEQ ID NO: 731750 - DNA, 857 bp, Homo sapiens
ggcggtgctccgagctggcctttgggggaggttttgtgcgaggcatttcccaagtgctggcaggattgtgtcacagacacagagtaaacttttgctgggctccaagtgaccgcccatagtttattataaaggtgactgcaccctgcagccaccagcactgcctggctccacgtgcctcctggtctcagtatggcgctgtcctgggttcttacagtcctgagcctcctacctctgctggaagcccagatcccattgtgtgccaacctagtaccggtgcccatcaccaacgccaccctggaccggatcactggcaagtggttttatatcgcatcggcctttcgaaacgaggagtacaataagtcggttcaggagatccaagcaaccttcttttacttcacccccaacaagacagaggacacgatctttctcagagagtaccagacccgacaggaccagtgcatctataacaccacctacctgaatgtccagcgggctcagggacaccaagacctacatgcttgcttttgacgtgaacgatgagaagaactgggggctgtctgtctatgctgacaagccagagacgaccaaggagcaactgggagagttctacgaagctctcgactgcttgcgcattcccaagtcagatgtcgtgtacaccgattggaaaaaggataagtgtgagccactggagaagcagcacgagaaggagaggaaacaggaggagggggaatcctagcaggacacagccttggatcaggacagagacttgggggccatcctgcccctccaacccgacatgtgtacctcagctttttccctcacttgcatcaataaagcttctgtgtttggaacagcta

SEQ ID NO: 731751 - DNA, 1004 bp, Homo sapiens
  misc_feature (923)..(925): n is a, c, g, or t
  misc_feature (932)..(932): n is a, c, g, or t
  misc_feature (948)..(948): n is a, c, g, or t
ggcggtgctccgagctggcctttgggggaggttttgtgcgaggcatttcccaagtgctggcaggattgtgtcacagacacagagtaaacttttgctgggctccaagtgaccgcccatagtttattataaaggtgactgcaccctgcagccaccagcactgcctggctccacgtgcctcctggtctcagtatggcgctgtcctgggttcttacagtcctgagcctcctacctctgctggaagcccagatcccattgtgtgccaacctagtaccggtgcccatcaccaacgccaccctggaccggatcactggcaagtggttttatatcgcatcggcctttcgaaacgaggagtacaataagtcggttcaggagatccaagcaaccttcttttacttcacccccaacaagacagaggacacgatctttctcagagagtaccagacccgacaggaccagtgcatctataacaccacctacctgaatgtccagcgggctcagggacaccaagacctacatgcttgcttttgacgtgaacgatgagaagaactgggggctgtctgtctatgctgacaagccagagacgaccaaggagcaactgggagagttctacgaagctctcgactgcttgcgcattcccaagtcagatgtcgtgtacaccgattggaaaaaggataagtgtgagccactggagaagcagcacgagaaggagaggaaacaggaggagggggaatcctagcaggacacagccttggatcaggacagagacttgggggccatcctgcccctccaacccgacatgtgtacctcagctttttccctcacttgcatcaataaagcttctgtgtttggaacagctacaaaaaaaaacaaaacaacaaaaaaaattttgggggcgcatgggcccggaaagattttaaaacacnnnttgttgnggggggggggcccagntggttgtgcaaagtgggcaaaggggtgtccaggaaaatgggcaaagaaatggggga

SEQ ID NO: 731752 - DNA, 819 bp, Homo sapiens
ggcggtgctccgagctggcctttgggggaggttttgtgcgaggcatttcccaagtgctggcaggattgtgtcacagacacagagtaaacttttgctgggctccaagtgaccgcccatagtttattataaaggtgactgcaccctgcagccaccagcactgcctggctccacgtgcctcctggtctcagtatggcgctgtcctgggttcttacagtcctgagcctcctacctctgctggaagcccagatcccattgtgtgccaacctagtaccggtgcccatcaccaacgccaccctggaccggatcactggcaagtggttttatatcgcatcggcctttcgaaacgaggagtacaataagtcggttcaggagatccaagcaaccttcttttacttcacccccaacaagacagaggacacgatctttctcagagagtaccagacccgacaggaccagtgcatctataacaccacctacctgaatgtccagcgggaaaatgggaccatctccagatacgtgggaggccaagagcatttcgctcacttgctgatcctcagggacaccaagacctacatgcttgcttttgacgtgaacgatgagaagaactgggggctgtctgtctatgctgacaagccagagacgaccaaggagcaactgggagagttctacgaagctctcgactgcttgcgcattcccaagtcagatgtcgtgtacaccgattggaaaaagggggaatcctagcaggacacagccttggatcaggacagagacttgggggccatcctgcccctccaacccgacatgtgtacctcagctttt

SEQ ID NO: 731753 - DNA, 881 bp, Homo sapiens
ggcggtgctccgagctggcctttgggggaggttttgtgcgaggcatttcccaagtgctggcaggattgtgtcacagacacagagtaaacttttgctgggctccaagtgaccgcccatagtttattataaaggtgactgcaccctgcagccaccagcactgcctggctccacgtgcctcctggtctcagtatggcgctgtcctgggttcttacagtcctgagcctcctacctctgctggaagcccagatcccattgtgtgccaacctagtaccggtgcccatcaccaacgccaccctggaccggatcactggcaagtggttttatatcgcatcggcctttcgaaacgaggagtacaataagtcggttcaggagatccaagcaaccttcttttacttcacccccaacaagacagaggacacgatctttctcagagagtaccagacccgacaggaccagtgcatctataacaccacctacctgaatgtccagcgggaaaatgggaccatctccagatacgctcagggacaccaagacctacatgcttgcttttgacgtgaacgatgagaagaactgggggctgtctgtctatgctgacaagccagagacgaccaaggagcaactgggagagttctacgaagctctcgactgcttgcgcattcccaagtcagatgtcgtgtacaccgattggaaaaaggataagtgtgagccactggagaagcagcacgagaaggagaggaaacaggaggagggggaatcctagcaggacacagccttggatcaggacagagacttgggggccatcctgcccctccaacccgacatgtgtacctcagctttttccctcacttgcatcaataaagcttctgtgtttggaacagcta

SEQ ID NO: 731754 - DNA, 926 bp, Homo sapiens
ggcggtgctccgagctggcctttgggggaggttttgtgcgaggcatttcccaagtgctggcaggattgtgtcacagacacagagtaaacttttgctgggctccaagtgaccgcccatagtttattataaaggtgactgcaccctgcagccaccagcactgcctggctccacgtgcctcctggtctcagtatggcgctgtcctgggttcttacagtcctgagcctcctacctctgctggaagcccagatcccattgtgtgccaacctagtaccggtgcccatcaccaacgccaccctggaccggatcactggcaagtggttttatatcgcatcggcctttcgaaacgaggagtacaataagtcggttcaggagatccaagcaaccttcttttactttacccccaacaagacagaggacacgatctttctcagagagtaccagacccgccagaaccagtgcttctataactccagttacctgaatgtccagcgggagaatgggaccgtctccagatacgagggaggccgagaacatgttgctcacctgctgttccttagggacaccaagaccttgatgtttggttcctacctggacgatgagaagaactgggggctgtctttctatgctgacaagccagagacgaccaaggagcaactgggagagttctacgaagctctcgactgcttgtgcattcccaggtcagatgtcatgtacaccgactggaaaaaggataagtgtgagccactggagaagcagcacgagaaggagaggaaacaggaggagggggaatcctagcaggacacagccttggatcaggacagagacttgggggccatcctgcccctccaacccgacatgtgtacctcagctttttccctcacttgcatcaataaagcttctgtgtttggaacagctaaaaaaaaagt

SEQ ID NO: 731755 - DNA, 892 bp, Homo sapiens
  misc_feature (31)..(31): n is a, c, g, or t
  misc_feature (35)..(35): n is a, c, g, or t
  misc_feature (38)..(38): n is a, c, g, or t
  misc_feature (42)..(43): n is a, c, g, or t
  misc_feature (46)..(46): n is a, c, g, or t
  misc_feature (53)..(53): n is a, c, g, or t
  misc_feature (60)..(60): n is a, c, g, or t
  misc_feature (62)..(62): n is a, c, g, or t
  misc_feature (66)..(66): n is a, c, g, or t
  misc_feature (83)..(84): n is a, c, g, or t
  misc_feature (99)..(99): n is a, c, g, or t
  misc_feature (108)..(109): n is a, c, g, or t
  misc_feature (811)..(813): n is a, c, g, or t
  misc_feature (820)..(820): n is a, c, g, or t
  misc_feature (836)..(836): n is a, c, g, or t
aaggtttttgaaaaaaaaaaaaaccgccganccantangccnntcngggtctncaatctnanctcnaccttgctgaagccagnnccattgtgtccaacntagtcgggnnccatcacaacgcaccctgaccagatcactggcaagtggttttatatcgcatcggcctttcgaaacgaggagtacaataagtcggttcaggagatccaagcaaccttcttttacttcacccccaacaagacagaggacacgatctttctcagagagtaccagacccgacaggaccagtgcatctataacaccacctacctgaatgtccagcgggaaaatgggaccatctccagatacgtgggaggccaagagcatttcgctcacttgctgatcctcagggacaccaagacctacatgcttgcttttgacgtgaacgatgagaagaactgggggctgtctgtctatgctgacaagccagagacgaccaaggagcaactgggagagttctacgaagctctcgactgcttgcgcattcccaagtcagatgtcgtgtacaccgattggaaaaaggataagtgtgagccactggagaagcagcacgagaaggagaggaaacaggaggagggggaatcctagcaggacacagccttggatcaggacagagacttgggggccatcctgcccctccaacccgacatgtgtacctcagctttttccctcacttgcatcaataaagcttctgtgtttggaacagctacaaaaaaaaacaaaacaacaaaaaaaattttgggggcgcatgggcccggaaagattttaaaacacnnnttgttgnggggggggggcccagntggttgtgcaaagtgggcaaaggggtgtccaggaaaatgggcaaagaaatggggga

SEQ ID NO: 731756 - DNA, 830 bp, Homo sapiens
ggcggtgctccgagctggcctttgggggaggttttgtgcgaggcatttcccaagtgctggcaggattgtgtcacagacacagagtaaacttttgctgggctccaagtgaccgcccatagtttattataaaggtgactgcaccctgcagccaccagcactgcctggctccacgtgcctcctggtctcagtatggcgctgtcctgggttcttacagtcctgagcctcctacctctgctggaagcccagatcccattgtgtgccaacctagtaccggtgcccatcaccaacgccaccctggaccggatcactggcaagtggttttatatcgcatcggcctttcgaaacgaggagtacaataagtcggttcaggagatccaagcaaccttcttttacttcacccccaacaagacagaggacacgatctttctcagagagtaccagacccgacaggaccagtgcatctataacaccacctacctgaatgtccagcgggaaaatgggaccatctccagatacgtgggaggccaagagcatttcgctcacttgctgatcctcagggacaccaagacctacatgcttgcttttgacgtgaacgatgagaagaactgggggctgtctgtctatgctgacaagccagagacgaccaaggagcaactgggagagttctacgaagctctcgactgcttgcgcattcccaagtcagatgtcgtgtacaccgattggaaaaagaggtaaacgcaagggattggacagtgcccaccttgtccatggcccaacttgggcagccccagaggcccagagcaggagagctgccaggcaaggctgcacag

SEQ ID NO: 731757 - DNA, 802 bp, Homo sapiens
ggcggtgctccgagctggcctttgggggaggttttgtgcgaggcatttcccaagtgctggcaggattgtgtcacagacacagagtaaacttttgctgggctccaagtgaccgcccatagtttattataaaggtgactgcaccctgcagccaccagcactgcctggctccacgtgcctcctggtctcagtatggcgctgtcctgggttcttacagtcctgagcctcctacctctgctggaagcccagatcccattgtgtgccaacctagtaccggtgcccatcaccaacgccaccctggaccggatcactggcaagtggttttatatcgcatcggcctttcgaaacgaggagtacaataagtcggttcaggagatccaagcaaccttcttttactttacccccaacaagacagaggacacgatctttctcagagagtaccagacccgccagaaccagtgcttctataactccagttacctgtcagaactttccatacgagtatatcagaacacacccttccaaggtatgtatgctctgttgttcctgtcctgtcttcactgagcgcagggctggaggcctcttagacattctccttggtcctcgttcagctgcccactgtagtatccacagtgcccgagttctcgctggttttggcaattaaacctccttcctactggtttagactacacttacaacaaggaaaatgcccctcgtgtgaccatagattgagatttataccacataccacacatagccacagaaacatcatcttgaaataaagaagagttttggccaaaaaaaa

SEQ ID NO: 731758 - DNA, 855 bp, Homo sapiens
ggcggtgctccgagctggcctttgggggaggttttgtgcgaggcatttcccaagtgctggcaggattgtgtcacagacacagagtaaacttttgctgggctccaagtgaccgcccatagtttattataaaggtgactgcaccctgcagccaccagcactgcctggctccacgtgcctcctggtctcagtatggcgctgtcctgggttcttacagtcctgagcctcctacctctgctggaagcccagatcccattgtgtgccaacctagtaccggtgcccatcaccaacgccaccctggaccggatcactggcaagtggttttatatcgcatcggcctttcgaaacgaggagtacaataagtcggttcaggagatccaagcaaccttcttttactttacccccaacaagacagaggacacgatctttctcagagagtaccagacccgagggaggccgagaacatgttgctcacctgctgttccttagggacaccaagaccttgatgtttggttcctacctggacgatgagaagaactgggggctgtctttctatgctgacaagccagagacgaccaaggagcaactgggagagttctacgaagctctcgactgcttgtgcattcccaggtcagatgtcatgtacaccgactggaaaaaggataagtgtgagccactggagaagcagcacgagaaggagaggaaacaggaggagggggaatcctagcaggacacagccttggatcaggacagagacttgggggccatcctgcccctccaacccgacatgtgtacctcagctttttccctcacttgcatcaataaagcttctgtgtttggaacagctaaaaaaaaagt

SEQ ID NO: 731759 - DNA, 871 bp, Homo sapiens
ggcggtgctccgagctggcctttgggggaggttttgtgcgaggcatttcccaagtgctggcaggattgtgtcacagacacagagtaaacttttgctgggctccaagtgaccgcccatagtttattataaaggtgactgcaccctgcagccaccagcactgcctggctccacgtgcctcctggtctcagtatggcgctgtcctgggttcttacagtcctgagcctcctacctctgctggaagcccagatcccattgtgtgccaacctagtaccggtgcccatcaccaacgccaccctggaccggatcactggcaagtggttttatatcgcatcggcctttcgaaacgaggagtacaataagtcggttcaggagatccaagcaaccttcttttactttacccccaacaagacagaggacacgatctttctcagagagtaccagacccgccagaaccagtgcttctataactccagttacctgaatgtccagcgggagaatgggaccgtctccagatacgagggaggccgagaacatgttgctcacctgctgttccttagggacaccaagaccttgatgtttggttcctacctggacgatgagaagaactgggggctgtctttctatgcttgcgcattcccaagtcagattgtcgtgtacaccgattggacacacaggataagtgtgagccactggagaagcagcacgagaaggagaggaaacaggaggagggggaatcctagcaggacacagccttggatcaggacagagacttgggggccatcctgcccctccaacccgacatgtgtacctcagctttttccctcacttgcatcaataaagcttctgtgtttggaacagctaaaaaaaaagt

SEQ ID NO: 731760 - DNA, 862 bp, Homo sapiens
ggcggtgctccgagctggcctttgggggaggttttgtgcgaggcatttcccaagtgctggcaggattgtgtcacagacacagagtaaacttttgctgggctccaagtgaccgcccatagtttattataaaggtgactgcaccctgcagccaccagcactgcctggctccacgtgcctcctggtctcagtatggcgctgtcctgggttcttacagtcctgagcctcctacctctgctggaagcccagatcccattgtgtgccaacctagtaccggtgcccatcaccaacgccaccctggaccggatcactggcaagtggttttatatcgcatcggcctttcgaaacgaggagtacaataagtcggttcaggagatccaagcaaccttcttttacttcacccccaacaagacagaggacacgatctttctcagagagtaccagacccgacaggaccagtgcatctataacaccacctacctgaatgtccagcgggaaaatgggaccatctccagatacgtgggaggccaagagcatttcgctcacttgctgatcctcagggacaccaagacctacatgcttgcttttgacgtgaacgatgagaagaactgggggctgtctgtctatgctgacaagccagagacgaccaaggagcaactgggagagttctacgaagctctcgactgcttgcgcattcccaagtcagatgtcgtgtacaccgattggaaaaaggataagtgtgagccactggagaagcagcacgagaaggagaggaaacaggaggagggggaatcctagcaggacacagccttggatcaggactccctcacttgcatcaataaagcttctgtgtttggaacagcta

SEQ ID NO: 731761 - DNA, 658 bp, Homo sapiens
ggcggtgctccgagctggcctttgggggaggttttgtgcgaggcatttcccaagtgctggcaggattgtgtcacagacacagagtaaacttttgctgggctccaagtgaccgcccatagtttattataaaggtgactgcaccctgcagccaccagcactgcctggctccacgtgcctcctggtctcagtatggcgctgtcctgggttcttacagtcctgagcctcctacctctgctggaagcccagatcccattgtgtgccaacctagtaccggtgcccatcaccaacgccaccctggaccggatcactggcaagtggttttatatcgcatcggcctttcgaaacgaggagtacaataagtcggttcaggagatccaagcaaccttcttttacttcacccccaacaagacagaggacacgatctttctcagagagtaccagacccgtgggaggccaagagcatttcgctcacttgctgatcctcagggacaccaagacctacatgcttgcttttgacgtgaacgatgagaagaactgggggctgtctgtctatgctgacaagccagagacgaccaaggagcaactgggagagttctacgaagctctcgactgcttgcgcattcccaagtcagatgtcgtgtacaccgattggaaaaag

SEQ ID NO: 731762 - DNA, 867 bp, Homo sapiens
agcacggccacagtcaccatcccgatttttgctacaaatgaaaattactgtataatgagctccttaacacttttctttaaacctgtgtttggaagacttgtgttggtgtggccctgtgccctaatacctgtgaaatcacagcaccgatgagctggttccaatttttaaaatatatacatgcagtacttccatgactattcaaagaaaaacaattccttccatttgccacctgagatgaccaccagggatgtgaactacctcctgccccatccccagccccaggatcctgggacagggcttatgaacgcaaccactgtagtcagctcacttgatccacagcctggcacctccactgtctggctagggagcctcgaatgggtcccaaggccaccctgctcctcagttacatcatctgcatagtagtggtggttgtgaggaattcaggagctgcagcataagggccctgcaggtactatgtgctcagtaaatgccagtggttcttaagggtctgagctcccatggtagaggcaagtaagctgaggttcagagacagaccctggttgagctggttccacaggccagagctcattctgccctctccccggaagacctcccaccctgtccccatgcctctgcttctccctcaccccaattccccgctgccttctaggataagtgtgagccactggagaagcagcacgagaaggagaggaaacaggaggagggggaatcctagcaggacacagccttggatcaggacagagacttgggggccatcctgcccctccaacccgacatgtgtacctcagctttttccctcacttgcatcaataaagcttctgtgtttggaacagctaaaaaaaaagt

SEQ ID NO: 731763 - DNA, 1759 bp, Homo sapiens
aggtccagaggacgccacaccccacatttgaatatttttttttcttgtcacgcaaacttcctgggcaggaactccaagggctcaatggacgggaagcagggtccttaaatacgtcccctcttggctcttgccgttccaggagccccagttaccgggagaggctgtgtcaaaggcgccatgagcaagatcagcgaggccgtgaagcgcgcccgcgccgccttcagctcgggcaggacccgtccgctgcagttccggatccagcagctggaggcgctgcagcgcctgatccaggagcaggagcaggagctggtgggcgcgctggccgcagacctgcacaagaatgaatggaacgcctactatgaggaggtggtgtacgtcctagaggagatcgagtacatgatccagaagctccctgagtgggccgcggatgagcccgtggagaagacgccccagactcagcaggacgagctctacatccactcggagccactgggcgtggtcctcgtcattggcacctggaactaccccttcaacctcaccatccagcccatggtgggcgccatcgctgcagggaacgcagtggtcctcaagccctcggagctgagtgagaacatggcgagcctgctggctaccatcatcccccagtacctggacaaggatctgtacccagtaatcaatgggggtgtccctgagaccacggagctgctcaaggagaggttcgaccatatcctgtacacgggcagcacgggggtggggaagatcatcatgacggctgctgccaagcacctgacccctgtcacgctggagctgggagggaagagtccctgctacgtggacaagaactgtgacctggacgtggcctgccgacgcatcgcctgggggaaattcatgaacagtggccagacctgcgtggccccagactacatcctctgtgacccctcgatccagaaccaaattgtggagaagctcaagaagtcactgaaagagttctacggggaagatgctaagaaatcccgggactatggaagaatcattagtgcccggcacttccagagggtgatgggcctgattgagggccagaaggtggcttatgggggcaccggggatgccgccactcgctacatagcccccaccatcctcacggacgtggacccccagtccccggtgatgcaagaggagatcttcgggcctgtgctgcccatcgtgtgcgtgcgcagcctggaggaggccatccagttcatcaaccagcgtgagaagcccctggccctctacatgttctccagcaacgacaaggtgattaagaagatgattgcagagacatccagtggtggggtggcggccaacgatgtcatcgtccacatcaccttgcactctctgcccttcgggggcgtggggaacagcggcatgggatcctaccatggcaagaagagcttcgagactttctctcaccgccgctcttgcctggtgaggcctctgatgaatgatgaaggcctgaaggtcagataccccccgagcccggccaagatgacccagcactgaggaggggttgctccgcctggcctggccatactgtgtcccatcggagtgcggaccaccctcactggctctcctggccctgggagaatcgctcctgcagccccagcccagccccactcctctgctgacctgctgacctgtgcacaccccactcccacatgggcccaggcctcaccattccaagtctccacccctttctagaccaataaagagacgaatacaa

SEQ ID NO: 731764 - DNA, 1370 bp, Homo sapiens
aggtccagaggacgccacaccccacatttgaatatttttttttcttgtcacgcaaacttcctgggcaggaactccaagggctcaatggacgggaagcagggtccttaaatacgtcccctcttggctcttgccgttccaggagccccagttaccgggagaggctgtgtcaaaggcgccatgagcaagatcagcgaggccgtgaagcgcgcccgcgccgccttcagctcgggcaggacccgtccgctgcagttccggatccagcagctggaggcgctgcagcgcctgatccaggagcaggagcaggagctggtgggcgcgctggccgcagacctgcacaagaatgaatggaacgcctactatgaggaggtggtgtacgtcctagaggagatcgagtacatgatccagaagctccctgagtgggccgcggatgagcccgtggagaagacgccccagactcagcaggacgagctctacatccactcggagccactgggcgtggtcctcgtcattggcacctggaactaccccttcaacctcaccatccagcccatggtgggcgccatcgctgcagggaacgcagtggtcctcaagccctcggagctgagtgagaacatggcgagcctgctggctaccatcatcccccagtacctggacaaggatctgtacccagtaatcaatgggggtgtccctgagaccacggagctgctcaaggagaggttcgaccatatcctgtacacgggcagcacgggggtggggaagatcatcatgacggctgctgccaagcacctgacccctgtcacgctggagctgggagggaagagtccctgctacgtggacaagaactgtgacctggacgtggcctgccgacgcatcgcctgggggaaattcatgaacagtggccagacctgcgtggccccagactacatcctctgtgacccctcgatccagaaccaaattgtggagaagctcaagaagtcactgaaagagttctacggggaagatgctaagaaatcccgggactatggaagaatcattagtgcccggcacttccagagggtgatgggcctgattgagggccagaaggtggcttatgggggcaccggggatgccgccactcgctacatagcccccaccatcctcacggacgtggacccccagtccccggtgatgcaagaggagatcttcgggcctgtgctgcccatcgtgtgcgtgcgcagcctggaggaggccatccagttcatcaaccagcgtgagaagcccctggccctctacatgttctccagcaacgacaaggtgattaagaagatgattgcagagacatccattccaagtctccacccctttctagaccaataaagagacgaatacaa

SEQ ID NO: 731765 - DNA, 1592 bp, Homo sapiens
aggtccagaggacgccacaccccacatttgaatatttttttttcttgtcacgcaaacttcctgggcaggaactccaagggctcaatggacgggaagcagggtccttaaatacgtcccctcttggctcttgccgttccaggagccccagttaccgggagaggctgtgtcaaagaatgaatggaacgcctactatgaggaggtggtgtacgtcctagaggagatcgagtacatgatccagaagctccctgagtgggccgcggatgagcccgtggagaagacgccccagactcagcaggacgagctctacatccactcggagccactgggcgtggtcctcgtcattggcacctggaactaccccttcaacctcaccatccagcccatggtgggcgccatcgctgcagggaacgcagtggtcctcaagccctcggagctgagtgagaacatggcgagcctgctggctaccatcatcccccagtacctggacaaggatctgtacccagtaatcaatgggggtgtccctgagaccacggagctgctcaaggagaggttcgaccatatcctgtacacgggcagcacgggggtggggaagatcatcatgacggctgctgccaagcacctgacccctgtcacgctggagctgggagggaagagtccctgctacgtggacaagaactgtgacctggacgtggcctgccgacgcatcgcctgggggaaattcatgaacagtggccagacctgcgtggccccagactacatcctctgtgacccctcgatccagaaccaaattgtggagaagctcaagaagtcactgaaagagttctacggggaagatgctaagaaatcccgggactatggaagaatcattagtgcccggcacttccagagggtgatgggcctgattgagggccagaaggtggcttatgggggcaccggggatgccgccactcgctacatagcccccaccatcctcacggacgtggacccccagtccccggtgatgcaagaggagatcttcgggcctgtgctgcccatcgtgtgcgtgcgcagcctggaggaggccatccagttcatcaaccagcgtgagaagcccctggccctctacatgttctccagcaacgacaaggtgattaagaagatgattgcagagacatccagtggtggggtggcggccaacgatgtcatcgtccacatcaccttgcactctctgcccttcgggggcgtggggaacagcggcatgggatcctaccatggcaagaagagcttcgagactttctctcaccgccgctcttgcctggtgaggcctctgatgaatgatgaaggcctgaaggtcagataccccccgagcccggccaagatgacccagcactgaggaggggttgctccgcctggcctggccatactgtgtcccatcggagtgcggaccaccctcactggctctcctggccctgggagaatcgctcctgcagccccagcccagccccactcctctgctgacctgctgacctgtgcacaccccactcccacatgggcccaggcctcaccattccaagtctccacccctttctagaccaataaagagacgaatacaa

SEQ ID NO: 731766 - DNA, 1203 bp, Homo sapiens
aggtccagaggacgccacaccccacatttgaatatttttttttcttgtcacgcaaacttcctgggcaggaactccaagggctcaatggacgggaagcagggtccttaaatacgtcccctcttggctcttgccgttccaggagccccagttaccgggagaggctgtgtcaaagaatgaatggaacgcctactatgaggaggtggtgtacgtcctagaggagatcgagtacatgatccagaagctccctgagtgggccgcggatgagcccgtggagaagacgccccagactcagcaggacgagctctacatccactcggagccactgggcgtggtcctcgtcattggcacctggaactaccccttcaacctcaccatccagcccatggtgggcgccatcgctgcagggaacgcagtggtcctcaagccctcggagctgagtgagaacatggcgagcctgctggctaccatcatcccccagtacctggacaaggatctgtacccagtaatcaatgggggtgtccctgagaccacggagctgctcaaggagaggttcgaccatatcctgtacacgggcagcacgggggtggggaagatcatcatgacggctgctgccaagcacctgacccctgtcacgctggagctgggagggaagagtccctgctacgtggacaagaactgtgacctggacgtggcctgccgacgcatcgcctgggggaaattcatgaacagtggccagacctgcgtggccccagactacatcctctgtgacccctcgatccagaaccaaattgtggagaagctcaagaagtcactgaaagagttctacggggaagatgctaagaaatcccgggactatggaagaatcattagtgcccggcacttccagagggtgatgggcctgattgagggccagaaggtggcttatgggggcaccggggatgccgccactcgctacatagcccccaccatcctcacggacgtggacccccagtccccggtgatgcaagaggagatcttcgggcctgtgctgcccatcgtgtgcgtgcgcagcctggaggaggccatccagttcatcaaccagcgtgagaagcccctggccctctacatgttctccagcaacgacaaggtgattaagaagatgattgcagagacatccattccaagtctccacccctttctagaccaataaagagacgaatacaa

SEQ ID NO: 731767 - DNA, 1839 bp, Homo sapiens
cccagcagcagttcggcttaggactcgggttgcggcgggtgtcaccttctcaggggctagcaaggcagccagggcccaggcgtctgagtgaggggcgggagaggaggcgaggcagaaagtggaccttccagcggaaaggccattttccccaaggccgagcccagggaagtcccttcctatagaattcaggcagggtgggaggcagggcgcgctcgtgcccctcagccagctgcaggtgctctctgtccccaggcgccatgagcaagatcagcgaggccgtgaagcgcgcccgcgccgccttcagctcgggcaggacccgtccgctgcagttccggatccagcagctggaggcgctgcagcgcctgatccaggagcaggagcaggagctggtgggcgcgctggccgcagacctgcacaagaatgaatggaacgcctactatgaggaggtggtgtacgtcctagaggagatcgagtacatgatccagaagctccctgagtgggccgcggatgagcccgtggagaagacgccccagactcagcaggacgagctctacatccactcggagccactgggcgtggtcctcgtcattggcacctggaactaccccttcaacctcaccatccagcccatggtgggcgccatcgctgcagggaacgcagtggtcctcaagccctcggagctgagtgagaacatggcgagcctgctggctaccatcatcccccagtacctggacaaggatctgtacccagtaatcaatgggggtgtccctgagaccacggagctgctcaaggagaggttcgaccatatcctgtacacgggcagcacgggggtggggaagatcatcatgacggctgctgccaagcacctgacccctgtcacgctggagctgggagggaagagtccctgctacgtggacaagaactgtgacctggacgtggcctgccgacgcatcgcctgggggaaattcatgaacagtggccagacctgcgtggccccagactacatcctctgtgacccctcgatccagaaccaaattgtggagaagctcaagaagtcactgaaagagttctacggggaagatgctaagaaatcccgggactatggaagaatcattagtgcccggcacttccagagggtgatgggcctgattgagggccagaaggtggcttatgggggcaccggggatgccgccactcgctacatagcccccaccatcctcacggacgtggacccccagtccccggtgatgcaagaggagatcttcgggcctgtgctgcccatcgtgtgcgtgcgcagcctggaggaggccatccagttcatcaaccagcgtgagaagcccctggccctctacatgttctccagcaacgacaaggtgattaagaagatgattgcagagacatccagtggtggggtggcggccaacgatgtcatcgtccacatcaccttgcactctctgcccttcgggggcgtggggaacagcggcatgggatcctaccatggcaagaagagcttcgagactttctctcaccgccgctcttgcctggtgaggcctctgatgaatgatgaaggcctgaaggtcagataccccccgagcccggccaagatgacccagcactgaggaggggttgctccgcctggcctggccatactgtgtcccatcggagtgcggaccaccctcactggctctcctggccctgggagaatcgctcctgcagccccagcccagccccactcctctgctgacctgctgacctgtgcacaccccactcccacatgggcccaggcctcaccattccaagtctccacccctttctagaccaataaagagacgaatacaa

SEQ ID NO: 731768 - DNA, 1450 bp, Homo sapiens
cccagcagcagttcggcttaggactcgggttgcggcgggtgtcaccttctcaggggctagcaaggcagccagggcccaggcgtctgagtgaggggcgggagaggaggcgaggcagaaagtggaccttccagcggaaaggccattttccccaaggccgagcccagggaagtcccttcctatagaattcaggcagggtgggaggcagggcgcgctcgtgcccctcagccagctgcaggtgctctctgtccccaggcgccatgagcaagatcagcgaggccgtgaagcgcgcccgcgccgccttcagctcgggcaggacccgtccgctgcagttccggatccagcagctggaggcgctgcagcgcctgatccaggagcaggagcaggagctggtgggcgcgctggccgcagacctgcacaagaatgaatggaacgcctactatgaggaggtggtgtacgtcctagaggagatcgagtacatgatccagaagctccctgagtgggccgcggatgagcccgtggagaagacgccccagactcagcaggacgagctctacatccactcggagccactgggcgtggtcctcgtcattggcacctggaactaccccttcaacctcaccatccagcccatggtgggcgccatcgctgcagggaacgcagtggtcctcaagccctcggagctgagtgagaacatggcgagcctgctggctaccatcatcccccagtacctggacaaggatctgtacccagtaatcaatgggggtgtccctgagaccacggagctgctcaaggagaggttcgaccatatcctgtacacgggcagcacgggggtggggaagatcatcatgacggctgctgccaagcacctgacccctgtcacgctggagctgggagggaagagtccctgctacgtggacaagaactgtgacctggacgtggcctgccgacgcatcgcctgggggaaattcatgaacagtggccagacctgcgtggccccagactacatcctctgtgacccctcgatccagaaccaaattgtggagaagctcaagaagtcactgaaagagttctacggggaagatgctaagaaatcccgggactatggaagaatcattagtgcccggcacttccagagggtgatgggcctgattgagggccagaaggtggcttatgggggcaccggggatgccgccactcgctacatagcccccaccatcctcacggacgtggacccccagtccccggtgatgcaagaggagatcttcgggcctgtgctgcccatcgtgtgcgtgcgcagcctggaggaggccatccagttcatcaaccagcgtgagaagcccctggccctctacatgttctccagcaacgacaaggtgattaagaagatgattgcagagacatccattccaagtctccacccctttctagaccaataaagagacgaatacaa

SEQ ID NO: 731769 - DNA, 1739 bp, Homo sapiens
cccagcagcagttcggcttaggactcgggttgcggcgggtgtcaccttctcaggggctagcaaggcagccagggcccaggcgtctgagtgaggggcgggagaggaggcgaggcagaaagtggaccttccagcggaaaggccattttccccaaggccgagcccagggaagtcccttcctatagaattcaggcagggtgggaggcagggcgcgctcgtgcccctcagccagctgcaggtgctctctgtccccaggcgccatgagcaagatcagcgaggccgtgaagcgcgcccgcgccgccttcagctcgggcaggacccgtccgctgcagttccggatccagcagctggaggcgctgcagcgcctgatccaggagcaggagcaggagctggtgggcgcgctggccgcagacctgcacaagaatgaatggaacgcctactatgaggaggtggtgtacgtcctagaggagatcgagtacatgatccagaagctccctgagtgggccgcggatgagcccgtggagaagacgccccagactcagcaggacgagctctacatccactcggagccactgggcgtggtcctcgtcattggcacctggaactaccccttcaacctcaccatccagcccatggtgggcgccatcgctgcagggaacgcagtggtcctcaagccctcggagctgagtgagaacatggcgagcctgctggctaccatcatcccccagtacctggacaaggatctgtacccagtaatcaatgggggtgtccctgagaccacggagctgctcaaggagaggttcgaccatatcctgtacacgggcagcacgggggtggggaagatcatcatgacggctgctgccaagcacctgacccctgtcacgctggagctgggagggaagagtccctgctacgtggacaagaactgtgacctggacgtggcctgccgacgcatcgcctgggggaaattcatgaacagtggccagacctgcgtggccccagactacatcctctgtgacccctcgatccagaaccaaattgtggagaagctcaagaagtcactgaaagagttctacggggaagatgctaagaaatcccgggactatggaagaatcattagtgcccggcacttccagagggtgatgggcctgattgagggccagaaggtggcttatgggggcaccggggatgccgccactcgctacatagcccccaccatcctcacggacgtggacccccagtccccggtgatgcaagaggagatcttcgggcctgtgctgcccatcgtgtgcgtgcgcagcctggaggaggccatccagttcatcaaccagcgtgagaagcccctggccctctacatgttctccagcaacgacaagggaacagcggcatgggatcctaccatggcaagaagagcttcgagactttctctcaccgccgctcttgcctggtgaggcctctgatgaatgatgaaggcctgaaggtcagataccccccgagcccggccaagatgacccagcactgaggaggggttgctccgcctggcctggccatactgtgtcccatcggagtgcggaccaccctcactggctctcctggccctgggagaatcgctcctgcagccccagcccagccccactcctctgctgacctgctgacctgtgcacaccccactcccacatgggcccaggcctcaccattccaagtctccacccctttctagaccaataaagagacgaatacaa

SEQ ID NO: 731770 - DNA, 1659 bp, Homo sapiens
aggtccagaggacgccacaccccacatttgaatatttttttttcttgtcacgcaaacttcctgggcaggaactccaagggctcaatggacgggaagcagggtccttaaatacgtcccctcttggctcttgccgttccaggagccccagttaccgggagaggctgtgtcaaaggcgccatgagcaagatcagcgaggccgtgaagcgcgcccgcgccgccttcagctcgggcaggacccgtccgctgcagttccggatccagcagctggaggcgctgcagcgcctgatccaggagcaggagcaggagctggtgggcgcgctggccgcagacctgcacaagaatgaatggaacgcctactatgaggaggtggtgtacgtcctagaggagatcgagtacatgatccagaagctccctgagtgggccgcggatgagcccgtggagaagacgccccagactcagcaggacgagctctacatccactcggagccactgggcgtggtcctcgtcattggcacctggaactaccccttcaacctcaccatccagcccatggtgggcgccatcgctgcagggaacgcagtggtcctcaagccctcggagctgagtgagaacatggcgagcctgctggctaccatcatcccccagtacctggacaaggatctgtacccagtaatcaatgggggtgtccctgagaccacggagctgctcaaggagaggttcgaccatatcctgtacacgggcagcacgggggtggggaagatcatcatgacggctgctgccaagcacctgacccctgtcacgctggagctgggagggaagagtccctgctacgtggacaagaactgtgacctggacgtggcctgccgacgcatcgcctgggggaaattcatgaacagtggccagacctgcgtggccccagactacatcctctgtgacccctcgatccagaaccaaattgtggagaagctcaagaagtcactgaaagagttctacggggaagatgctaagaaatcccgggactatggaagaatcattagtgcccggcacttccagagggtgatgggcctgattgagggccagaaggtggcttatgggggcaccggggatgccgccactcgctacatagcccccaccatcctcacggacgtggacccccagtccccggtgatgcaagaggagatcttcgggcctgtgctgcccatcgtgtgcgtgcgcagcctggaggaggccatccagttcatcaaccagcgtgagaagcccctggccctctacatgttctccagcaacgacaagggaacagcggcatgggatcctaccatggcaagaagagcttcgagactttctctcaccgccgctcttgcctggtgaggcctctgatgaatgatgaaggcctgaaggtcagataccccccgagcccggccaagatgacccagcactgaggaggggttgctccgcctggcctggccatactgtgtcccatcggagtgcggaccaccctcactggctctcctggccctgggagaatcgctcctgcagccccagcccagccccactcctctgctgacctgctgacctgtgcacaccccactcccacatgggcccaggcctcaccattccaagtctccacccctttctagaccaataaagagacgaatacaa

SEQ ID NO: 731771 - DNA, 1518 bp, Homo sapiens
aggtccagaggacgccacaccccacatttgaatatttttttttcttgtcacgcaaacttcctgggcaggaactccaagggctcaatggacgggaagcagggtccttaaatacgtcccctcttggctcttgccgttccaggagccccagttaccgggagaggctgtgtcaaaggcgccatgagcaagatcagcgaggccgtgaagcgcgcccgcgccgccttcagctcgggcagatccactcggagccactgggcgtggtcctcgtcattggcacctggaactaccccttcaacctcaccatccagcccatggtgggcgccatcgctgcagggaacgcagtggtcctcaagccctcggagctgagtgagaacatggcgagcctgctggctaccatcatcccccagtacctggacaaggatctgtacccagtaatcaatgggggtgtccctgagaccacggagctgctcaaggagaggttcgaccatatcctgtacacgggcagcacgggggtggggaagatcatcatgacggctgctgccaagcacctgacccctgtcacgctggagctgggagggaagagtccctgctacgtggacaagaactgtgacctggacgtggcctgccgacgcatcgcctgggggaaattcatgaacagtggccagacctgcgtggccccagactacatcctctgtgacccctcgatccagaaccaaattgtggagaagctcaagaagtcactgaaagagttctacggggaagatgctaagaaatcccgggactatggaagaatcattagtgcccggcacttccagagggtgatgggcctgattgagggccagaaggtggcttatgggggcaccggggatgccgccactcgctacatagcccccaccatcctcacggacgtggacccccagtccccggtgatgcaagaggagatcttcgggcctgtgctgcccatcgtgtgcgtgcgcagcctggaggaggccatccagttcatcaaccagcgtgagaagcccctggccctctacatgttctccagcaacgacaaggtgattaagaagatgattgcagagacatccagtggtggggtggcggccaacgatgtcatcgtccacatcaccttgcactctctgcccttcgggggcgtggggaacagcggcatgggatcctaccatggcaagaagagcttcgagactttctctcaccgccgctcttgcctggtgaggcctctgatgaatgatgaaggcctgaaggtcagataccccccgagcccggccaagatgacccagcactgaggaggggttgctccgcctggcctggccatactgtgtcccatcggagtgcggaccaccctcactggctctcctggccctgggagaatcgctcctgcagccccagcccagccccactcctctgctgacctgctgacctgtgcacaccccactcccacatgggcccaggcctcaccattccaagtctccacccctttctagaccaataaagagacgaatacaa

SEQ ID NO: 731772 - DNA, 1129 bp, Homo sapiens
aggtccagaggacgccacaccccacatttgaatatttttttttcttgtcacgcaaacttcctgggcaggaactccaagggctcaatggacgggaagcagggtccttaaatacgtcccctcttggctcttgccgttccaggagccccagttaccgggagaggctgtgtcaaaggcgccatgagcaagatcagcgaggccgtgaagcgcgcccgcgccgccttcagctcgggcagatccactcggagccactgggcgtggtcctcgtcattggcacctggaactaccccttcaacctcaccatccagcccatggtgggcgccatcgctgcagggaacgcagtggtcctcaagccctcggagctgagtgagaacatggcgagcctgctggctaccatcatcccccagtacctggacaaggatctgtacccagtaatcaatgggggtgtccctgagaccacggagctgctcaaggagaggttcgaccatatcctgtacacgggcagcacgggggtggggaagatcatcatgacggctgctgccaagcacctgacccctgtcacgctggagctgggagggaagagtccctgctacgtggacaagaactgtgacctggacgtggcctgccgacgcatcgcctgggggaaattcatgaacagtggccagacctgcgtggccccagactacatcctctgtgacccctcgatccagaaccaaattgtggagaagctcaagaagtcactgaaagagttctacggggaagatgctaagaaatcccgggactatggaagaatcattagtgcccggcacttccagagggtgatgggcctgattgagggccagaaggtggcttatgggggcaccggggatgccgccactcgctacatagcccccaccatcctcacggacgtggacccccagtccccggtgatgcaagaggagatcttcgggcctgtgctgcccatcgtgtgcgtgcgcagcctggaggaggccatccagttcatcaaccagcgtgagaagcccctggccctctacatgttctccagcaacgacaaggtgattaagaagatgattgcagagacatccattccaagtctccacccctttctagaccaataaagagacgaatacaa

SEQ ID NO: 731773 - DNA, 1418 bp, Homo sapiens
aggtccagaggacgccacaccccacatttgaatatttttttttcttgtcacgcaaacttcctgggcaggaactccaagggctcaatggacgggaagcagggtccttaaatacgtcccctcttggctcttgccgttccaggagccccagttaccgggagaggctgtgtcaaaggcgccatgagcaagatcagcgaggccgtgaagcgcgcccgcgccgccttcagctcgggcagatccactcggagccactgggcgtggtcctcgtcattggcacctggaactaccccttcaacctcaccatccagcccatggtgggcgccatcgctgcagggaacgcagtggtcctcaagccctcggagctgagtgagaacatggcgagcctgctggctaccatcatcccccagtacctggacaaggatctgtacccagtaatcaatgggggtgtccctgagaccacggagctgctcaaggagaggttcgaccatatcctgtacacgggcagcacgggggtggggaagatcatcatgacggctgctgccaagcacctgacccctgtcacgctggagctgggagggaagagtccctgctacgtggacaagaactgtgacctggacgtggcctgccgacgcatcgcctgggggaaattcatgaacagtggccagacctgcgtggccccagactacatcctctgtgacccctcgatccagaaccaaattgtggagaagctcaagaagtcactgaaagagttctacggggaagatgctaagaaatcccgggactatggaagaatcattagtgcccggcacttccagagggtgatgggcctgattgagggccagaaggtggcttatgggggcaccggggatgccgccactcgctacatagcccccaccatcctcacggacgtggacccccagtccccggtgatgcaagaggagatcttcgggcctgtgctgcccatcgtgtgcgtgcgcagcctggaggaggccatccagttcatcaaccagcgtgagaagcccctggccctctacatgttctccagcaacgacaagggaacagcggcatgggatcctaccatggcaagaagagcttcgagactttctctcaccgccgctcttgcctggtgaggcctctgatgaatgatgaaggcctgaaggtcagataccccccgagcccggccaagatgacccagcactgaggaggggttgctccgcctggcctggccatactgtgtcccatcggagtgcggaccaccctcactggctctcctggccctgggagaatcgctcctgcagccccagcccagccccactcctctgctgacctgctgacctgtgcacaccccactcccacatgggcccaggcctcaccattccaagtctccacccctttctagaccaataaagagacgaatacaa

SEQ ID NO: 731774 - DNA, 1843 bp, Homo sapiens
  misc_feature (324)..(324): n is a, c, g, or t
cccagcagcagttcggcttaggactcgggttgcggcgggtgtcaccttctcaggggctagcaaggcagccagggcccaggcgtctgagtgaggggcgggagaggaggcgaggcagaaagtggaccttccagcggaaaggccattttccccaaggccgagcccagggaagtcccttcctatagaattcaggcagggtgggaggcagggcgcgctcgtgcccctcagccagctgcaggtgctctctgtccccaggcgccatgagcaagatcagcgaggccgtgaagcgcgcccgcgccgccttcagctcgggcagagggggggagnggggaacaaaaaaagaaaaagaaatcccctgcgctgcagcgcctgatccaggagcaggagcaggagctggtgggcgcgctggccgcagacctgcacaagaatgaatggaacgcctactatgaggaggtggtgtacgtcctagaggagatcgagtacatgatccagaagctccctgagtgggccgcggatgagcccgtggagaagacgccccagactcagcaggacgagctctacatccactcggagccactgggcgtggtcctcgtcattggcacctggaactaccccttcaacctcaccatccagcccatggtgggcgccatcgctgcagggaacgcagtggtcctcaagccctcggagctgagtgagaacatggcgagcctgctggctaccatcatcccccagtacctggacaaggatctgtacccagtaatcaatgggggtgtccctgagaccacggagctgctcaaggagaggttcgaccatatcctgtacacgggcagcacgggggtggggaagatcatcatgacggctgctgccaagcacctgacccctgtcacgctggagctgggagggaagagtccctgctacgtggacaagaactgtgacctggacgtggcctgccgacgcatcgcctgggggaaattcatgaacagtggccagacctgcgtggccccagactacatcctctgtgacccctcgatccagaaccaaattgtggagaagctcaagaagtcactgaaagagttctacggggaagatgctaagaaatcccgggactatggaagaatcattagtgcccggcacttccagagggtgatgggcctgattgagggccagaaggtggcttatgggggcaccggggatgccgccactcgctacatagcccccaccatcctcacggacgtggacccccagtccccggtgatgcaagaggagatcttcgggcctgtgctgcccatcgtgtgcgtgcgcagcctggaggaggccatccagttcatcaaccagcgtgagaagcccctggccctctacatgttctccagcaacgacaaggtgattaagaagatgattgcagagacatccagtggtggggtggcggccaacgatgtcatcgtccacatcaccttgcactctctgcccttcgggggcgtggggaacagcggcatgggatcctaccatggcaagaagagcttcgagactttctctcaccgccgctcttgcctggtgaggcctctgatgaatgatgaaggcctgaaggtcagataccccccgagcccggccaagatgacccagcactgaggaggggttgctccgcctggcctggccatactgtgtcccatcggagtgcggaccaccctcactggctctcctggccctgggagaatcgctcctgcagccccagcccagccccactcctctgctgacctgctgacctgtgcacaccccactcccacatgggcccaggcctcaccattccaagtctccacccctttctagaccaataaagagacgaatacaa

SEQ ID NO: 731775 - DNA, 1454 bp, Homo sapiens
  misc_feature (324)..(324): n is a, c, g, or t
cccagcagcagttcggcttaggactcgggttgcggcgggtgtcaccttctcaggggctagcaaggcagccagggcccaggcgtctgagtgaggggcgggagaggaggcgaggcagaaagtggaccttccagcggaaaggccattttccccaaggccgagcccagggaagtcccttcctatagaattcaggcagggtgggaggcagggcgcgctcgtgcccctcagccagctgcaggtgctctctgtccccaggcgccatgagcaagatcagcgaggccgtgaagcgcgcccgcgccgccttcagctcgggcagagggggggagnggggaacaaaaaaagaaaaagaaatcccctgcgctgcagcgcctgatccaggagcaggagcaggagctggtgggcgcgctggccgcagacctgcacaagaatgaatggaacgcctactatgaggaggtggtgtacgtcctagaggagatcgagtacatgatccagaagctccctgagtgggccgcggatgagcccgtggagaagacgccccagactcagcaggacgagctctacatccactcggagccactgggcgtggtcctcgtcattggcacctggaactaccccttcaacctcaccatccagcccatggtgggcgccatcgctgcagggaacgcagtggtcctcaagccctcggagctgagtgagaacatggcgagcctgctggctaccatcatcccccagtacctggacaaggatctgtacccagtaatcaatgggggtgtccctgagaccacggagctgctcaaggagaggttcgaccatatcctgtacacgggcagcacgggggtggggaagatcatcatgacggctgctgccaagcacctgacccctgtcacgctggagctgggagggaagagtccctgctacgtggacaagaactgtgacctggacgtggcctgccgacgcatcgcctgggggaaattcatgaacagtggccagacctgcgtggccccagactacatcctctgtgacccctcgatccagaaccaaattgtggagaagctcaagaagtcactgaaagagttctacggggaagatgctaagaaatcccgggactatggaagaatcattagtgcccggcacttccagagggtgatgggcctgattgagggccagaaggtggcttatgggggcaccggggatgccgccactcgctacatagcccccaccatcctcacggacgtggacccccagtccccggtgatgcaagaggagatcttcgggcctgtgctgcccatcgtgtgcgtgcgcagcctggaggaggccatccagttcatcaaccagcgtgagaagcccctggccctctacatgttctccagcaacgacaaggtgattaagaagatgattgcagagacatccattccaagtctccacccctttctagaccaataaagagacgaatacaa

SEQ ID NO: 731776 - DNA, 1492 bp, Homo sapiens
aggtccagaggacgccacaccccacatttgaatatttttttttcttgtcacgcaaacttcctgggcaggaactccaagggctcaatggacgggaagcagggtccttaaatacgtcccctcttggctcttgccgttccaggagccccagttaccgggagaggctgtgtcaaagaatgaatggaacgcctactatgaggaggtggtgtacgtcctagaggagatcgagtacatgatccagaagctccctgagtgggccgcggatgagcccgtggagaagacgccccagactcagcaggacgagctctacatccactcggagccactgggcgtggtcctcgtcattggcacctggaactaccccttcaacctcaccatccagcccatggtgggcgccatcgctgcagggaacgcagtggtcctcaagccctcggagctgagtgagaacatggcgagcctgctggctaccatcatcccccagtacctggacaaggatctgtacccagtaatcaatgggggtgtccctgagaccacggagctgctcaaggagaggttcgaccatatcctgtacacgggcagcacgggggtggggaagatcatcatgacggctgctgccaagcacctgacccctgtcacgctggagctgggagggaagagtccctgctacgtggacaagaactgtgacctggacgtggcctgccgacgcatcgcctgggggaaattcatgaacagtggccagacctgcgtggccccagactacatcctctgtgacccctcgatccagaaccaaattgtggagaagctcaagaagtcactgaaagagttctacggggaagatgctaagaaatcccgggactatggaagaatcattagtgcccggcacttccagagggtgatgggcctgattgagggccagaaggtggcttatgggggcaccggggatgccgccactcgctacatagcccccaccatcctcacggacgtggacccccagtccccggtgatgcaagaggagatcttcgggcctgtgctgcccatcgtgtgcgtgcgcagcctggaggaggccatccagttcatcaaccagcgtgagaagcccctggccctctacatgttctccagcaacgacaagggaacagcggcatgggatcctaccatggcaagaagagcttcgagactttctctcaccgccgctcttgcctggtgaggcctctgatgaatgatgaaggcctgaaggtcagataccccccgagcccggccaagatgacccagcactgaggaggggttgctccgcctggcctggccatactgtgtcccatcggagtgcggaccaccctcactggctctcctggccctgggagaatcgctcctgcagccccagcccagccccactcctctgctgacctgctgacctgtgcacaccccactcccacatgggcccaggcctcaccattccaagtctccacccctttctagaccaataaagagacgaatacaa

SEQ ID NO: 731777 - DNA, 1743 bp, Homo sapiens
  misc_feature (324)..(324): n is a, c, g, or t
cccagcagcagttcggcttaggactcgggttgcggcgggtgtcaccttctcaggggctagcaaggcagccagggcccaggcgtctgagtgaggggcgggagaggaggcgaggcagaaagtggaccttccagcggaaaggccattttccccaaggccgagcccagggaagtcccttcctatagaattcaggcagggtgggaggcagggcgcgctcgtgcccctcagccagctgcaggtgctctctgtccccaggcgccatgagcaagatcagcgaggccgtgaagcgcgcccgcgccgccttcagctcgggcagagggggggagnggggaacaaaaaaagaaaaagaaatcccctgcgctgcagcgcctgatccaggagcaggagcaggagctggtgggcgcgctggccgcagacctgcacaagaatgaatggaacgcctactatgaggaggtggtgtacgtcctagaggagatcgagtacatgatccagaagctccctgagtgggccgcggatgagcccgtggagaagacgccccagactcagcaggacgagctctacatccactcggagccactgggcgtggtcctcgtcattggcacctggaactaccccttcaacctcaccatccagcccatggtgggcgccatcgctgcagggaacgcagtggtcctcaagccctcggagctgagtgagaacatggcgagcctgctggctaccatcatcccccagtacctggacaaggatctgtacccagtaatcaatgggggtgtccctgagaccacggagctgctcaaggagaggttcgaccatatcctgtacacgggcagcacgggggtggggaagatcatcatgacggctgctgccaagcacctgacccctgtcacgctggagctgggagggaagagtccctgctacgtggacaagaactgtgacctggacgtggcctgccgacgcatcgcctgggggaaattcatgaacagtggccagacctgcgtggccccagactacatcctctgtgacccctcgatccagaaccaaattgtggagaagctcaagaagtcactgaaagagttctacggggaagatgctaagaaatcccgggactatggaagaatcattagtgcccggcacttccagagggtgatgggcctgattgagggccagaaggtggcttatgggggcaccggggatgccgccactcgctacatagcccccaccatcctcacggacgtggacccccagtccccggtgatgcaagaggagatcttcgggcctgtgctgcccatcgtgtgcgtgcgcagcctggaggaggccatccagttcatcaaccagcgtgagaagcccctggccctctacatgttctccagcaacgacaagggaacagcggcatgggatcctaccatggcaagaagagcttcgagactttctctcaccgccgctcttgcctggtgaggcctctgatgaatgatgaaggcctgaaggtcagataccccccgagcccggccaagatgacccagcactgaggaggggttgctccgcctggcctggccatactgtgtcccatcggagtgcggaccaccctcactggctctcctggccctgggagaatcgctcctgcagccccagcccagccccactcctctgctgacctgctgacctgtgcacaccccactcccacatgggcccaggcctcaccattccaagtctccacccctttctagaccaataaagagacgaatacaa

SEQ ID NO: 731778 - DNA, 2779 bp, Homo sapiens; identical to SEQ ID NO: 376791

SEQ ID NO: 731779 - DNA, 1416 bp, Homo sapiens; identical to SEQ ID NO: 376795

SEQ ID NO: 731780 - DNA, 2855 bp, Homo sapiens
cagcctggagtgcagctcatactccatgcccagaattcctgcctcgccactgtcctgctgccctccagacatgctggggccctgcatgctgctgctgctgctgctgctgggcctgaggctacagctctccctgggcatcatcccagttgaggaggagaacccggacttctggaaccgcgaggcagccgaggccctgggtgccgccaagaagctgcagcctgcacagacagccgccaagaacctcatcatcttcctgggcgatgggatgggggtgtctacggtgacagctgccaggatcctaaaagggcagaagaaggacaaactggggcctgagatacccctggccatggaccgcttcccatatgtggctctgtccaagacatacaatgtagacaaacatgtgccagacagtggagccacagccacggcctacctgtgcggggtcaagggcaacttccagaccattggcttgagtgcagccgcccgctttaaccagtgcaacacgacacgcggcaacgaggtcatctccgtgatgaatcgggccaagaaagcaggtgagctggggcccgctgctgggtcacggccaggtcacagacgttggtcacatatactgacctctgacacccttagggaagtcagtgggagtggtaaccaccacacgagtgcagcacgcctcgccagccggcacctacgcccacacggtgaaccgcaactggtactcggacgccgacgtgcctgcctcggcccgccaggaggggtgccaggacatcgctacgcagctcatctccaacatggacattgacgtgatcctaggtggaggccgaaagtacatgtttcgcatgggaaccccagaccctgagtacccagatgactacagccaaggtgggaccaggctggacgggaagaatctggtgcaggaatggctggcgaagcgccagggtgcccggtacgtgtggaaccgcactgagctcatgcaggcttccctggacccgtctgtgacccatctcatgggtctctttgagcctggagacatgaaatacgagatccaccgagactccacactggacccctccctgatggagatgacagaggctgccctgcgcctgctgagcaggaacccccgcggcttcttcctcttcgtggagggtggtcgcatcgaccatggtcatcatgaaagcagggcttaccgggcactgactgagacgatcatgttcgacgacgccattgagagggcgggccagctcaccagcgaggaggacacgctgagcctcgtcactgccgaccactcccacgtcttctccttcggaggctaccccctgcgagggagctccatcttcgggctggcccctggcaaggcccgggacaggaaggcctacacggtcctcctatacggaaacggtccaggctatgtgctcaaggacggcgcccggccggatgttaccgagagcgagagcgggagccccgagtatcggcagcagtcagcagtgcccctggacgaagagacccacgcaggcgaggacgtggcggtgttcgcgcgcggcccgcaggcgcacctggttcacggcgtgcaggagcagaccttcatagcgcacgtcatggccttcgccgcctgcctggagccctacaccgcctgcgacctggcgccccccgccggcaccaccgacgccgcgcacccggggcggtccgtggtccccgcgttgcttcctctgctggccgggaccctgctgctgctggagacggccactgctccctgagtgtcccgtccctggggctcctgcttccccatcccggagttctcctgctccccacctcctgtcgtcctgcctggcctccagcccgagtcgtcatccccggagtccctatacagaggtcctgccatggaaccttcccctccccgtgcgctctggggactgagcccatgacaccaaacctgccccttggctgctctcggactccctaccccaaccccagggactgcaggttgtgccctgtggctgcctgcaccccaggaaaggagggggctcaggccatccagccaccacctacagcccagtgggtaccaggcaggctcccttcctggggaaaagaagcacccagaccccgcgccccgctgatctttgcttcagtccttgaatcacctgtgggacttgaggactcgggatcttcaggacgcctggagaagggtggtttcctgccaccctgctggccaaggaggctcctggggtggggatcaccagggggattttgacacagccttcggctgccccccactaagctaattccacacccctgtacccccccagggggccctctgcctcatggcaaaggcttgccccaaatctcaacttctcagacgttccatacccccacatgccaatttcagcacccaactgagatccgaggagctcctgggaagccctgggtgcaggacactggtcgagagccaaaggtccctccccagacatctggacactgggcatagatttctcaagaaggaagactcccctgcctccccagggcctctgctctcctgggagacaaagcaataataaaaggaagtgtttgtaatcccagcactttgggaggccgaggtgggcggatcacgaggtcaggagatggagaccatcctggctaacacggtgaaaccccttatctatgcgcctgtagtcccagctacccaggaggctgaagcaggataatcgcttgaacccgggcggcggagattgcagtgagccgaggtcatgccactgcactgcagcctgggcgacagagcgagattctgcctcaaaaataaacaaataaattttaaaaataaataaataataaaaggaagtgttagacaatgtaatgccagt

SEQ ID NO: 731781 - DNA, 1492 bp, Homo sapiens
cagcctggagtgcagctcatactccatgcccagaattcctgcctcgccactgtcctgctgccctccagacatgctggggccctgcatgctgctgctgctgctgctgctgggcctgaggctacagctctccctgggcatcatcccagttgaggaggagaacccggacttctggaaccgcgaggcagccgaggccctgggtgccgccaagaagctgcagcctgcacagacagccgccaagaacctcatcatcttcctgggcgatgggatgggggtgtctacggtgacagctgccaggatcctaaaagggcagaagaaggacaaactggggcctgagatacccctggccatggaccgcttcccatatgtggctctgtccaagacatacaatgtagacaaacatgtgccagacagtggagccacagccacggcctacctgtgcggggtcaagggcaacttccagaccattggcttgagtgcagccgcccgctttaaccagtgcaacacgacacgcggcaacgaggtcatctccgtgatgaatcgggccaagaaagcaggtgagctggggcccgctgctgggtcacggccaggtcacagacgttggtcacatatactgacctctgacacccttagggaagtcagtgggagtggtaaccaccacacgagtgcagcacgcctcgccagccggcacctacgcccacacggtgaaccgcaactggtactcggacgccgacgtgcctgcctcggcccgccaggaggggtgccaggacatcgctacgcagctcatctccaacatggacattgacgtgatcctaggtggaggccgaaagtacatgtttcgcatgggaaccccagaccctgagtacccagatgactacagccaaggtgggaccaggctggacgggaagaatctggtgcaggaatggctggcgaagcgccagggtgcccggtacgtgtggaaccgcactgagctcatgcaggcttccctggacccgtctgtgacccatctcatgggtctctttgagcctggagacatgaaatacgagatccaccgagactccacactggacccctccctgatggagatgacagaggctgccctgcgcctgctgagcaggaacccccgcggcttcttcctcttcgtggagggtggtcgcatcgaccatggtcatcatgaaagcagggcttaccgggcactgactgagacgatcatgttcgacgacgccattgagagggcgggccagctcaccagcgaggaggacacgctgagcctcgtcactgccgaccactcccacgtcttctccttcggaggctaccccctgcgagggagctccatcttcgggctggcccctggcaaggcccgggacaggaaggcctacacggtcctcctatacggaaacggtccaggctatgtgctcaaggacggcgcccggccggatgttaccgagagcgagagcggtgagtgccgcggggtggccccctgagggggaccagg

SEQ ID NO: 731782 - DNA, 2655 bp, Homo sapiens
tctttgctctccccctggccagttgaggaggagaacccggacttctggaaccgcgaggcagccgaggccctgggtgccgccaagaagctgcagcctgcacagacagccgccaagaacctcatcatcttcctgggcgatgggatgggggtgtctacggtgacagctgccaggatcctaaaagggcagaagaaggacaaactggggcctgagatacccctggccatggaccgcttcccatatgtggctctgtccaagacatacaatgtagacaaacatgtgccagacagtggagccacagccacggcctacctgtgcggggtcaagggcaacttccagaccattggcttgagtgcagccgcccgctttaaccagtgcaacacgacacgcggcaacgaggtcatctccgtgatgaatcgggccaagaaagcagggaagtcagtgggagtggtaaccaccacacgagtgcagcacgcctcgccagccggcacctacgcccacacggtgaaccgcaactggtactcggacgccgacgtgcctgcctcggcccgccaggaggggtgccaggacatcgctacgcagctcatctccaacatggacattgacgtgatcctaggtggaggccgaaagtacatgtttcgcatgggaaccccagaccctgagtacccagatgactacagccaaggtgggaccaggctggacgggaagaatctggtgcaggaatggctggcgaagcgccagggtgcccggtacgtgtggaaccgcactgagctcatgcaggcttccctggacccgtctgtgacccatctcatgggtctctttgagcctggagacatgaaatacgagatccaccgagactccacactggacccctccctgatggagatgacagaggctgccctgcgcctgctgagcaggaacccccgcggcttcttcctcttcgtggagggtggtcgcatcgaccatggtcatcatgaaagcagggcttaccgggcactgactgagacgatcatgttcgacgacgccattgagagggcgggccagctcaccagcgaggaggacacgctgagcctcgtcactgccgaccactcccacgtcttctccttcggaggctaccccctgcgagggagctccatcttcgggctggcccctggcaaggcccgggacaggaaggcctacacggtcctcctatacggaaacggtccaggctatgtgctcaaggacggcgcccggccggatgttaccgagagcgagagcgggagccccgagtatcggcagcagtcagcagtgcccctggacgaagagacccacgcaggcgaggacgtggcggtgttcgcgcgcggcccgcaggcgcacctggttcacggcgtgcaggagcagaccttcatagcgcacgtcatggccttcgccgcctgcctggagccctacaccgcctgcgacctggcgccccccgccggcaccaccgacgccgcgcacccggggcggtccgtggtccccgcgttgcttcctctgctggccgggaccctgctgctgctggagacggccactgctccctgagtgtcccgtccctggggctcctgcttccccatcccggagttctcctgctccccacctcctgtcgtcctgcctggcctccagcccgagtcgtcatccccggagtccctatacagaggtcctgccatggaaccttcccctccccgtgcgctctggggactgagcccatgacaccaaacctgccccttggctgctctcggactccctaccccaaccccagggactgcaggttgtgccctgtggctgcctgcaccccaggaaaggagggggctcaggccatccagccaccacctacagcccagtgggtaccaggcaggctcccttcctggggaaaagaagcacccagaccccgcgccccgctgatctttgcttcagtccttgaatcacctgtgggacttgaggactcgggatcttcaggacgcctggagaagggtggtttcctgccaccctgctggccaaggaggctcctggggtggggatcaccagggggattttgacacagccttcggctgccccccactaagctaattccacacccctgtacccccccagggggccctctgcctcatggcaaaggcttgccccaaatctcaacttctcagacgttccatacccccacatgccaatttcagcacccaactgagatccgaggagctcctgggaagccctgggtgcaggacactggtcgagagccaaaggtccctccccagacatctggacactgggcatagatttctcaagaaggaagactcccctgcctccccagggcctctgctctcctgggagacaaagcaataataaaaggaagtgtttgtaatcccagcactttgggaggccgaggtgggcggatcacgaggtcaggagatggagaccatcctggctaacacggtgaaaccccttatctatgcgcctgtagtcccagctacccaggaggctgaagcaggataatcgcttgaacccgggcggcggagattgcagtgagccgaggtcatgccactgcactgcagcctgggcgacagagcgagattctgcctcaaaaataaacaaataaattttaaaaataaataaataataaaaggaagtgttagacaatgtaatgccagt

SEQ ID NO: 731783 - DNA, 1292 bp, Homo sapiens
tctttgctctccccctggccagttgaggaggagaacccggacttctggaaccgcgaggcagccgaggccctgggtgccgccaagaagctgcagcctgcacagacagccgccaagaacctcatcatcttcctgggcgatgggatgggggtgtctacggtgacagctgccaggatcctaaaagggcagaagaaggacaaactggggcctgagatacccctggccatggaccgcttcccatatgtggctctgtccaagacatacaatgtagacaaacatgtgccagacagtggagccacagccacggcctacctgtgcggggtcaagggcaacttccagaccattggcttgagtgcagccgcccgctttaaccagtgcaacacgacacgcggcaacgaggtcatctccgtgatgaatcgggccaagaaagcagggaagtcagtgggagtggtaaccaccacacgagtgcagcacgcctcgccagccggcacctacgcccacacggtgaaccgcaactggtactcggacgccgacgtgcctgcctcggcccgccaggaggggtgccaggacatcgctacgcagctcatctccaacatggacattgacgtgatcctaggtggaggccgaaagtacatgtttcgcatgggaaccccagaccctgagtacccagatgactacagccaaggtgggaccaggctggacgggaagaatctggtgcaggaatggctggcgaagcgccagggtgcccggtacgtgtggaaccgcactgagctcatgcaggcttccctggacccgtctgtgacccatctcatgggtctctttgagcctggagacatgaaatacgagatccaccgagactccacactggacccctccctgatggagatgacagaggctgccctgcgcctgctgagcaggaacccccgcggcttcttcctcttcgtggagggtggtcgcatcgaccatggtcatcatgaaagcagggcttaccgggcactgactgagacgatcatgttcgacgacgccattgagagggcgggccagctcaccagcgaggaggacacgctgagcctcgtcactgccgaccactcccacgtcttctccttcggaggctaccccctgcgagggagctccatcttcgggctggcccctggcaaggcccgggacaggaaggcctacacggtcctcctatacggaaacggtccaggctatgtgctcaaggacggcgcccggccggatgttaccgagagcgagagcggtgagtgccgcggggtggccccctgagggggaccagg

SEQ ID NO: 731784 - DNA, 2435 bp, Homo sapiens; identical to SEQ ID NO: 376793

SEQ ID NO: 731785 - DNA, 1072 bp, Homo sapiens
ccccagagaagagctcagagtgtctctgtccccagacatacaatgtagacaaacatgtgccagacagtggagccacagccacggcctacctgtgcggggtcaagggcaacttccagaccattggcttgagtgcagccgcccgctttaaccagtgcaacacgacacgcggcaacgaggtcatctccgtgatgaatcgggccaagaaagcagggaagtcagtgggagtggtaaccaccacacgagtgcagcacgcctcgccagccggcacctacgcccacacggtgaaccgcaactggtactcggacgccgacgtgcctgcctcggcccgccaggaggggtgccaggacatcgctacgcagctcatctccaacatggacattgacgtgatcctaggtggaggccgaaagtacatgtttcgcatgggaaccccagaccctgagtacccagatgactacagccaaggtgggaccaggctggacgggaagaatctggtgcaggaatggctggcgaagcgccagggtgcccggtacgtgtggaaccgcactgagctcatgcaggcttccctggacccgtctgtgacccatctcatgggtctctttgagcctggagacatgaaatacgagatccaccgagactccacactggacccctccctgatggagatgacagaggctgccctgcgcctgctgagcaggaacccccgcggcttcttcctcttcgtggagggtggtcgcatcgaccatggtcatcatgaaagcagggcttaccgggcactgactgagacgatcatgttcgacgacgccattgagagggcgggccagctcaccagcgaggaggacacgctgagcctcgtcactgccgaccactcccacgtcttctccttcggaggctaccccctgcgagggagctccatcttcgggctggcccctggcaaggcccgggacaggaaggcctacacggtcctcctatacggaaacggtccaggctatgtgctcaaggacggcgcccggccggatgttaccgagagcgagagcggtgagtgccgcggggtggccccctgagggggaccagg

SEQ ID NO: 731786 - DNA, 2389 bp, Homo sapiens; identical to SEQ ID NO: 376798
  misc_feature (23)..(23): n is a, c, g, or t

SEQ ID NO: 731787 - DNA, 1026 bp, Homo sapiens
  misc_feature (23)..(23): n is a, c, g, or t
cccgccgtaccaagttgcgcccnccgtaccagttgcggcctacctgtgcggggtcaagggcaacttccagaccattggcttgagtgcagccgcccgctttaaccagtgcaacacgacacgcggcaacgaggtcatctccgtgatgaatcgggccaagaaagcagggaagtcagtgggagtggtaaccaccacacgagtgcagcacgcctcgccagccggcacctacgcccacacggtgaaccgcaactggtactcggacgccgacgtgcctgcctcggcccgccaggaggggtgccaggacatcgctacgcagctcatctccaacatggacattgacgtgatcctaggtggaggccgaaagtacatgtttcgcatgggaaccccagaccctgagtacccagatgactacagccaaggtgggaccaggctggacgggaagaatctggtgcaggaatggctggcgaagcgccagggtgcccggtacgtgtggaaccgcactgagctcatgcaggcttccctggacccgtctgtgacccatctcatgggtctctttgagcctggagacatgaaatacgagatccaccgagactccacactggacccctccctgatggagatgacagaggctgccctgcgcctgctgagcaggaacccccgcggcttcttcctcttcgtggagggtggtcgcatcgaccatggtcatcatgaaagcagggcttaccgggcactgactgagacgatcatgttcgacgacgccattgagagggcgggccagctcaccagcgaggaggacacgctgagcctcgtcactgccgaccactcccacgtcttctccttcggaggctaccccctgcgagggagctccatcttcgggctggcccctggcaaggcccgggacaggaaggcctacacggtcctcctatacggaaacggtccaggctatgtgctcaaggacggcgcccggccggatgttaccgagagcgagagcggtgagtgccgcggggtggccccctgagggggaccagg

SEQ ID NO: 731788 - DNA, 757 bp, Homo sapiens; identical to SEQ ID NO: 376796

SEQ ID NO: 731789 - DNA, 2469 bp, Homo sapiens
cagcctggagtgcagctcatactccatgcccagaattcctgcctcgccactgtcctgctgccctccagacatgctggggccctgcatgctgctgctgctgctgctgctgggcctgaggctacagctctccctgggcatcatcccagttgaggaggagaacccggacttctggaaccgcgaggcagccgaggccctgggtgccgccaagaagctgcagcctgcacagacagccgccaagaacctcatcatcttcctgggcgatgggatgggggtgtctacggtgacagctgccaggatcctaaaagggcagaagaaggacaaactggggcctgagatacccctggccatggaccgcttcccatatgtggctctgtccaagacatacaatgtagacaaacatgtgccagacagtggagccacagccacggcctacctgtgcggggtcaagggcaacttccagaccattggcttgagtgcagccgcccgctttaaccagtgcaacacgacacgcggcaacgaggtcatctccgtgatgaatcgggccaagaaagcagggaagtcagtgggagtggtaaccaccacacgagtgcagcacgcctcgccagccggcacctacgcccacacggtgaaccgcaactggtactcggacgccgacgtgcctgcctcggcccgccaggaggggtgccaggacatcgctacgcagctcatctccaacatggacattgacgtgatcctaggtggaggccgaaagtacatgtttcgcatgggaaccccagaccctgagtacccagatgactacagccaaggtgggaccaggctggacgggaagaatctggtgcaggaatggctggcgaagcgccagggtgcccggtacgtgtggaaccgcactgagctcatgcaggcttccctggacccgtctgtgacccatctcatgggtctctttgagcctggagacatgaaatacgagatccaccgagactccacactggacccctccctgatggagatgacagaggctgccctgcgcctgctgagcaggaacccccgcggcttcttcctcttcgtggagggtggtcgcatcgaccatggtcatcatgaaagcagggcttaccgggcactgactgagacgatcatgttcgacgacgccattgagagggcgggccagctcaccagcgaggaggacacgctgagcctcgtcactgccgaccactcccacgtcttctccttcggaggctaccccctgcgagggagctccatcttcgggctggcccctggcaaggcccgggacaggaaggcctacacggtcctcctatacggaaacggtccaggctatgtgctcaaggacggcgcccggccggatgttaccgagagcgagagcgggagccccgagtatcggcagcagtcagcagtgcccctggacgaagagacccacgcaggcgaggacgtggcggtgttcgcgcgcggcccgcaggcgcacctggttcacggcgtgcaggagcagaccttcatagcgcacgtcatggccttcgccgcctgcctggagccctacaccgcctgcgacctggcgccccccgccggcaccaccgacgccgcgcacccggggcggtccgtggtccccgcgttgcttcctctgctggccgggaccctgctgctgctggagacggccactgctccctgagtgtcccgtccctggggctcctgcttccccatcccggagttctcctgctccccacctcctgtcgtcctgcctggcctccagcccgagtcgtcatccccggagtccctatacagaggtcctgccatggaaccttcccctccccgtgcgctctggggactgagcccatgacaccaaacctgccccttggctgctctcggactccctaccccaaccccagggactgcaggttgtgccctgtggctgcctgcaccccaggaaaggagggggctcaggccatccagccaccacctacagcccagtgggtaccaggcaggctcccttcctggggaaaagaagcacccagaccccgcgccccgctgatctttgcttcagtccttgaatcacctgtgggacttgaggactcgggatcttcaggacgcctggagaagggtggtttcctgccaccctgctggccaaggaggctcctggggtggggatcaccagggggattttgacacagccttcggctgccccccactaagctaattccacacccctgtacccccccagggggccctctgcctcatggcaaaggcttgccccaaatctcaacttctcagacgttccatacccccacatgccaatttcagcacccaactgagatccgaggagctcctgggaagccctgggtgcaggacactggtcgagagccaaaggtccctccccagacatctggacactgggcatagatttctcaagaaggaagactcccctgcgccaggtgcagtggctcatgcctgtaatcccagcac

SEQ ID NO: 731790 - DNA, 854 bp, Homo sapiens
cagcctggagtgcagctcatactccatgcccagaattcctgcctcgccactgtcctgctgccctccagacatgctggggccctgcatgctgctgctgctgctgctgctgggcctgaggctacagctctccctgggcatcatcccagttgaggaggagaacccggacttctggaaccgcgaggcagccgaggccctgggtgccgccaagaagctgcagcctgcacagacagccgccaagaacctcatcatcttcctgggcgatgggatgggggtgtctacggtgacagctgccaggatcctaaaagggcagaagaaggacaaactggggcctgagatacccctggccatggaccgcttcccatatgtggctctgtccaagacatacaatgtagacaaacatgtgccagacagtggagccacagccacggcctacctgtgcggggtcaagggcaacttccagaccattggcttgagtgcagccgcccgctttaaccagtgcaacacgacacgcggcaacgaggtcatctccgtgatgaatcgggccaagaaagcagggaagtcagtgggagtggtaaccaccacacgagtgcagcacgcctcgccagccggcacctacgcccacacggtgaaccgcaactggtactcggacgccgacgtgcctgcctcggcccgccaggaggggtgccaggacatcgctacgcagctcatctccaacatggacattgacgtgatcctaggtggaggccgaaagtacatgtttcccatggggaccccagaccctgagtacccagatgactacagccaaggtgggaccaggctggacgggaagaatctggtgcaggaatggctggcga

SEQ ID NO: 731791 - DNA, 2545 bp, Homo sapiens
cagcctggagtgcagctcatactccatgcccagaattcctgcctcgccactgtcctgctgccctccagacatgctggggccctgcatgctgctgctgctgctgctgctgggcctgaggctacagctctccctgggcatcatcccagttgaggaggagaacccggacttctggaaccgcgaggcagccgaggccctgggtgccgccaagaagctgcagcctgcacagacagccgccaagaacctcatcatcttcctgggcgatgggatgggggtgtctacggtgacagctgccaggatcctaaaagggcagaagaaggacaaactggggcctgagatacccctggccatggaccgcttcccatatgtggctctgtccaagacatacaatgtagacaaacatgtgccagacagtggagccacagccacggcctacctgtgcggggtcaagggcaacttccagaccattggcttgagtgcagccgcccgctttaaccagtgcaacacgacacgcggcaacgaggtcatctccgtgatgaatcgggccaagaaagcaggtgagctggggcccgctgctgggtcacggccaggtcacagacgttggtcacatatactgacctctgacacccttagggaagtcagtgggagtggtaaccaccacacgagtgcagcacgcctcgccagccggcacctacgcccacacggtgaaccgcaactggtactcggacgccgacgtgcctgcctcggcccgccaggaggggtgccaggacatcgctacgcagctcatctccaacatggacattgacgtgatcctaggtggaggccgaaagtacatgtttcgcatgggaaccccagaccctgagtacccagatgactacagccaaggtgggaccaggctggacgggaagaatctggtgcaggaatggctggcgaagcgccagggtgcccggtacgtgtggaaccgcactgagctcatgcaggcttccctggacccgtctgtgacccatctcatgggtctctttgagcctggagacatgaaatacgagatccaccgagactccacactggacccctccctgatggagatgacagaggctgccctgcgcctgctgagcaggaacccccgcggcttcttcctcttcgtggagggtggtcgcatcgaccatggtcatcatgaaagcagggcttaccgggcactgactgagacgatcatgttcgacgacgccattgagagggcgggccagctcaccagcgaggaggacacgctgagcctcgtcactgccgaccactcccacgtcttctccttcggaggctaccccctgcgagggagctccatcttcgggctggcccctggcaaggcccgggacaggaaggcctacacggtcctcctatacggaaacggtccaggctatgtgctcaaggacggcgcccggccggatgttaccgagagcgagagcgggagccccgagtatcggcagcagtcagcagtgcccctggacgaagagacccacgcaggcgaggacgtggcggtgttcgcgcgcggcccgcaggcgcacctggttcacggcgtgcaggagcagaccttcatagcgcacgtcatggccttcgccgcctgcctggagccctacaccgcctgcgacctggcgccccccgccggcaccaccgacgccgcgcacccggggcggtccgtggtccccgcgttgcttcctctgctggccgggaccctgctgctgctggagacggccactgctccctgagtgtcccgtccctggggctcctgcttccccatcccggagttctcctgctccccacctcctgtcgtcctgcctggcctccagcccgagtcgtcatccccggagtccctatacagaggtcctgccatggaaccttcccctccccgtgcgctctggggactgagcccatgacaccaaacctgccccttggctgctctcggactccctaccccaaccccagggactgcaggttgtgccctgtggctgcctgcaccccaggaaaggagggggctcaggccatccagccaccacctacagcccagtgggtaccaggcaggctcccttcctggggaaaagaagcacccagaccccgcgccccgctgatctttgcttcagtccttgaatcacctgtgggacttgaggactcgggatcttcaggacgcctggagaagggtggtttcctgccaccctgctggccaaggaggctcctggggtggggatcaccagggggattttgacacagccttcggctgccccccactaagctaattccacacccctgtacccccccagggggccctctgcctcatggcaaaggcttgccccaaatctcaacttctcagacgttccatacccccacatgccaatttcagcacccaactgagatccgaggagctcctgggaagccctgggtgcaggacactggtcgagagccaaaggtccctccccagacatctggacactgggcatagatttctcaagaaggaagactcccctgcgccaggtgcagtggctcatgcctgtaatcccagcac

SEQ ID NO: 731792 - DNA, 730 bp, Homo sapiens
tctttgctctccccctggccagttgaggaggagaacccggacttctggaaccgcgaggcagccgaggccctgggtgccgccaagaagctgcagcctgcacagacagccgccaagaacctcatcatcttcctgggcgatgggatgggggtgtctacggtgacagctgccaggatcctaaaagggcagaagaaggacaaactggggcctgagatacccctggccatggaccgcttcccatatgtggctctgtccaagacatacaatgtagacaaacatgtgccagacagtggagccacagccacggcctacctgtgcggggtcaagggcaacttccagaccattggcttgagtgcagccgcccgctttaaccagtgcaacacgacacgcggcaacgaggtcatctccgtgatgaatcgggccaagaaagcagggaagtcagtgggagtggtaaccaccacacgagtgcagcacgcctcgccagccggcacctacgcccacacggtgaaccgcaactggtactcggacgccgacgtgcctgcctcggcccgccaggaggggtgccaggacatcgctacgcagctcatctccaacatggacattgacgtgatcctaggtggaggccgaaagtacatgtttcccatggggaccccagaccctgagtacccagatgactacagccaaggtgggaccaggctggacgggaagaatctggtgcaggaatggctggcga

SEQ ID NO: 731793 - DNA, 2345 bp, Homo sapiens
tctttgctctccccctggccagttgaggaggagaacccggacttctggaaccgcgaggcagccgaggccctgggtgccgccaagaagctgcagcctgcacagacagccgccaagaacctcatcatcttcctgggcgatgggatgggggtgtctacggtgacagctgccaggatcctaaaagggcagaagaaggacaaactggggcctgagatacccctggccatggaccgcttcccatatgtggctctgtccaagacatacaatgtagacaaacatgtgccagacagtggagccacagccacggcctacctgtgcggggtcaagggcaacttccagaccattggcttgagtgcagccgcccgctttaaccagtgcaacacgacacgcggcaacgaggtcatctccgtgatgaatcgggccaagaaagcagggaagtcagtgggagtggtaaccaccacacgagtgcagcacgcctcgccagccggcacctacgcccacacggtgaaccgcaactggtactcggacgccgacgtgcctgcctcggcccgccaggaggggtgccaggacatcgctacgcagctcatctccaacatggacattgacgtgatcctaggtggaggccgaaagtacatgtttcgcatgggaaccccagaccctgagtacccagatgactacagccaaggtgggaccaggctggacgggaagaatctggtgcaggaatggctggcgaagcgccagggtgcccggtacgtgtggaaccgcactgagctcatgcaggcttccctggacccgtctgtgacccatctcatgggtctctttgagcctggagacatgaaatacgagatccaccgagactccacactggacccctccctgatggagatgacagaggctgccctgcgcctgctgagcaggaacccccgcggcttcttcctcttcgtggagggtggtcgcatcgaccatggtcatcatgaaagcagggcttaccgggcactgactgagacgatcatgttcgacgacgccattgagagggcgggccagctcaccagcgaggaggacacgctgagcctcgtcactgccgaccactcccacgtcttctccttcggaggctaccccctgcgagggagctccatcttcgggctggcccctggcaaggcccgggacaggaaggcctacacggtcctcctatacggaaacggtccaggctatgtgctcaaggacggcgcccggccggatgttaccgagagcgagagcgggagccccgagtatcggcagcagtcagcagtgcccctggacgaagagacccacgcaggcgaggacgtggcggtgttcgcgcgcggcccgcaggcgcacctggttcacggcgtgcaggagcagaccttcatagcgcacgtcatggccttcgccgcctgcctggagccctacaccgcctgcgacctggcgccccccgccggcaccaccgacgccgcgcacccggggcggtccgtggtccccgcgttgcttcctctgctggccgggaccctgctgctgctggagacggccactgctccctgagtgtcccgtccctggggctcctgcttccccatcccggagttctcctgctccccacctcctgtcgtcctgcctggcctccagcccgagtcgtcatccccggagtccctatacagaggtcctgccatggaaccttcccctccccgtgcgctctggggactgagcccatgacaccaaacctgccccttggctgctctcggactccctaccccaaccccagggactgcaggttgtgccctgtggctgcctgcaccccaggaaaggagggggctcaggccatccagccaccacctacagcccagtgggtaccaggcaggctcccttcctggggaaaagaagcacccagaccccgcgccccgctgatctttgcttcagtccttgaatcacctgtgggacttgaggactcgggatcttcaggacgcctggagaagggtggtttcctgccaccctgctggccaaggaggctcctggggtggggatcaccagggggattttgacacagccttcggctgccccccactaagctaattccacacccctgtacccccccagggggccctctgcctcatggcaaaggcttgccccaaatctcaacttctcagacgttccatacccccacatgccaatttcagcacccaactgagatccgaggagctcctgggaagccctgggtgcaggacactggtcgagagccaaaggtccctccccagacatctggacactgggcatagatttctcaagaaggaagactcccctgcgccaggtgcagtggctcatgcctgtaatcccagcac

SEQ ID NO: 731794 - DNA, 1834 bp, Homo sapiens; identical to SEQ ID NO: 376794

SEQ ID NO: 731795 - DNA, 1524 bp, Homo sapiens
cggtacccatcaggcgaagactgtggcacgagactccacactggacccctccctgatggagatgacagaggctgccctgcgcctgctgagcaggaacccccgcggcttcttcctcttcgtggagggtggtcgcatcgaccatggtcatcatgaaagcagggcttaccgggcactgactgagacgatcatgttcgacgacgccattgagagggcgggccagctcaccagcgaggaggacacgctgagcctcgtcactgccgaccactcccacgtcttctccttcggaggctaccccctgcgagggagctccatcttcgggctggcccctggcaaggcccgggacaggaaggcctacacggtcctcctatacggaaacggtccaggctatgtgctcaaggacggcgcccggccggatgttaccgagagcgagagcgggagccccgagtatcggcagcagtcagcagtgcccctggacgaagagacccacgcaggcgaggacgtggcggtgttcgcgcgcggcccgcaggcgcacctggttcacggcgtgcaggagcagaccttcatagcgcacgtcatggccttcgccgcctgcctggagccctacaccgcctgcgacctggcgccccccgccggcaccaccgacgccgcgcacccggggcggtccgtggtccccgcgttgcttcctctgctggccgggaccctgctgctgctggagacggccactgctccctgagtgtcccgtccctggggctcctgcttccccatcccggagttctcctgctccccacctcctgtcgtcctgcctggcctccagcccgagtcgtcatccccggagtccctatacagaggtcctgccatggaaccttcccctccccgtgcgctctggggactgagcccatgacaccaaacctgccccttggctgctctcggactccctaccccaaccccagggactgcaggttgtgccctgtggctgcctgcaccccaggaaaggagggggctcaggccatccagccaccacctacagcccagtgggtaccaggcaggctcccttcctggggaaaagaagcacccagaccccgcgccccgctgatctttgcttcagtccttgaatcacctgtgggacttgaggactcgggatcttcaggacgcctggagaagggtggtttcctgccaccctgctggccaaggaggctcctggggtggggatcaccagggggattttgacacagccttcggctgccccccactaagctaattccacacccctgtacccccccagggggccctctgcctcatggcaaaggcttgccccaaatctcaacttctcagacgttccatacccccacatgccaatttcagcacccaactgagatccgaggagctcctgggaagccctgggtgcaggacactggtcgagagccaaaggtccctccccagacatctggacactgggcatagatttctcaagaaggaagactcccctgcgccaggtgcagtggctcatgcctgtaatcccagcac

SEQ ID NO: 731796 - DNA, 471 bp, Homo sapiens
cggtacccatcaggcgaagactgtggcacgagactccacactggacccctccctgatggagatgacagaggctgccctgcgcctgctgagcaggaacccccgcggcttcttcctcttcgtggagggtggtcgcatcgaccatggtcatcatgaaagcagggcttaccgggcactgactgagacgatcatgttcgacgacgccattgagagggcgggccagctcaccagcgaggaggacacgctgagcctcgtcactgccgaccactcccacgtcttctccttcggaggctaccccctgcgagggagctccatcttcgggctggcccctggcaaggcccgggacaggaaggcctacacggtcctcctatacggaaacggtccaggctatgtgctcaaggacggcgcccggccggatgttaccgagagcgagagcggtgagtgccgcggggtggccccctgagggggaccagg

SEQ ID NO: 731797 - DNA, 2125 bp, Homo sapiens
ccccagagaagagctcagagtgtctctgtccccagacatacaatgtagacaaacatgtgccagacagtggagccacagccacggcctacctgtgcggggtcaagggcaacttccagaccattggcttgagtgcagccgcccgctttaaccagtgcaacacgacacgcggcaacgaggtcatctccgtgatgaatcgggccaagaaagcagggaagtcagtgggagtggtaaccaccacacgagtgcagcacgcctcgccagccggcacctacgcccacacggtgaaccgcaactggtactcggacgccgacgtgcctgcctcggcccgccaggaggggtgccaggacatcgctacgcagctcatctccaacatggacattgacgtgatcctaggtggaggccgaaagtacatgtttcgcatgggaaccccagaccctgagtacccagatgactacagccaaggtgggaccaggctggacgggaagaatctggtgcaggaatggctggcgaagcgccagggtgcccggtacgtgtggaaccgcactgagctcatgcaggcttccctggacccgtctgtgacccatctcatgggtctctttgagcctggagacatgaaatacgagatccaccgagactccacactggacccctccctgatggagatgacagaggctgccctgcgcctgctgagcaggaacccccgcggcttcttcctcttcgtggagggtggtcgcatcgaccatggtcatcatgaaagcagggcttaccgggcactgactgagacgatcatgttcgacgacgccattgagagggcgggccagctcaccagcgaggaggacacgctgagcctcgtcactgccgaccactcccacgtcttctccttcggaggctaccccctgcgagggagctccatcttcgggctggcccctggcaaggcccgggacaggaaggcctacacggtcctcctatacggaaacggtccaggctatgtgctcaaggacggcgcccggccggatgttaccgagagcgagagcgggagccccgagtatcggcagcagtcagcagtgcccctggacgaagagacccacgcaggcgaggacgtggcggtgttcgcgcgcggcccgcaggcgcacctggttcacggcgtgcaggagcagaccttcatagcgcacgtcatggccttcgccgcctgcctggagccctacaccgcctgcgacctggcgccccccgccggcaccaccgacgccgcgcacccggggcggtccgtggtccccgcgttgcttcctctgctggccgggaccctgctgctgctggagacggccactgctccctgagtgtcccgtccctggggctcctgcttccccatcccggagttctcctgctccccacctcctgtcgtcctgcctggcctccagcccgagtcgtcatccccggagtccctatacagaggtcctgccatggaaccttcccctccccgtgcgctctggggactgagcccatgacaccaaacctgccccttggctgctctcggactccctaccccaaccccagggactgcaggttgtgccctgtggctgcctgcaccccaggaaaggagggggctcaggccatccagccaccacctacagcccagtgggtaccaggcaggctcccttcctggggaaaagaagcacccagaccccgcgccccgctgatctttgcttcagtccttgaatcacctgtgggacttgaggactcgggatcttcaggacgcctggagaagggtggtttcctgccaccctgctggccaaggaggctcctggggtggggatcaccagggggattttgacacagccttcggctgccccccactaagctaattccacacccctgtacccccccagggggccctctgcctcatggcaaaggcttgccccaaatctcaacttctcagacgttccatacccccacatgccaatttcagcacccaactgagatccgaggagctcctgggaagccctgggtgcaggacactggtcgagagccaaaggtccctccccagacatctggacactgggcatagatttctcaagaaggaagactcccctgcgccaggtgcagtggctcatgcctgtaatcccagcac

SEQ ID NO: 731798 - DNA, 2079 bp, Homo sapiens
  misc_feature (23)..(23): n is a, c, g, or t
cccgccgtaccaagttgcgcccnccgtaccagttgcggcctacctgtgcggggtcaagggcaacttccagaccattggcttgagtgcagccgcccgctttaaccagtgcaacacgacacgcggcaacgaggtcatctccgtgatgaatcgggccaagaaagcagggaagtcagtgggagtggtaaccaccacacgagtgcagcacgcctcgccagccggcacctacgcccacacggtgaaccgcaactggtactcggacgccgacgtgcctgcctcggcccgccaggaggggtgccaggacatcgctacgcagctcatctccaacatggacattgacgtgatcctaggtggaggccgaaagtacatgtttcgcatgggaaccccagaccctgagtacccagatgactacagccaaggtgggaccaggctggacgggaagaatctggtgcaggaatggctggcgaagcgccagggtgcccggtacgtgtggaaccgcactgagctcatgcaggcttccctggacccgtctgtgacccatctcatgggtctctttgagcctggagacatgaaatacgagatccaccgagactccacactggacccctccctgatggagatgacagaggctgccctgcgcctgctgagcaggaacccccgcggcttcttcctcttcgtggagggtggtcgcatcgaccatggtcatcatgaaagcagggcttaccgggcactgactgagacgatcatgttcgacgacgccattgagagggcgggccagctcaccagcgaggaggacacgctgagcctcgtcactgccgaccactcccacgtcttctccttcggaggctaccccctgcgagggagctccatcttcgggctggcccctggcaaggcccgggacaggaaggcctacacggtcctcctatacggaaacggtccaggctatgtgctcaaggacggcgcccggccggatgttaccgagagcgagagcgggagccccgagtatcggcagcagtcagcagtgcccctggacgaagagacccacgcaggcgaggacgtggcggtgttcgcgcgcggcccgcaggcgcacctggttcacggcgtgcaggagcagaccttcatagcgcacgtcatggccttcgccgcctgcctggagccctacaccgcctgcgacctggcgccccccgccggcaccaccgacgccgcgcacccggggcggtccgtggtccccgcgttgcttcctctgctggccgggaccctgctgctgctggagacggccactgctccctgagtgtcccgtccctggggctcctgcttccccatcccggagttctcctgctccccacctcctgtcgtcctgcctggcctccagcccgagtcgtcatccccggagtccctatacagaggtcctgccatggaaccttcccctccccgtgcgctctggggactgagcccatgacaccaaacctgccccttggctgctctcggactccctaccccaaccccagggactgcaggttgtgccctgtggctgcctgcaccccaggaaaggagggggctcaggccatccagccaccacctacagcccagtgggtaccaggcaggctcccttcctggggaaaagaagcacccagaccccgcgccccgctgatctttgcttcagtccttgaatcacctgtgggacttgaggactcgggatcttcaggacgcctggagaagggtggtttcctgccaccctgctggccaaggaggctcctggggtggggatcaccagggggattttgacacagccttcggctgccccccactaagctaattccacacccctgtacccccccagggggccctctgcctcatggcaaaggcttgccccaaatctcaacttctcagacgttccatacccccacatgccaatttcagcacccaactgagatccgaggagctcctgggaagccctgggtgcaggacactggtcgagagccaaaggtccctccccagacatctggacactgggcatagatttctcaagaaggaagactcccctgcgccaggtgcagtggctcatgcctgtaatcccagcac

SEQ ID NO: 731799 - DNA, 623 bp, Homo sapiens; identical to SEQ ID NO: 312040

SEQ ID NO: 731800 - DNA, 1491 bp, Homo sapiens
ggggtatataagagctggattactagttagcaaatgagggggtaaatattccagtggatacaagcttggactcttttcttgaagctttctttctatcagaagcatttgctgatattgctgacattgaaacattaaaagaaaatttgagaagcaatgggcatcctgaagctgcaagtatttctcattgtgctctctgttgcattgaaccatctgaaagctacacccattgaaagtcatcaggtggaaaagcggaaatgcaacactgccacatgtgcaacgcagcgcctggcaaattttttagttcattccagcaacaactttggtgccattctctcatctaccaacgtgggatccaatacatatggcaagaggaatgcagtagaggttttaaagagagagccactgaattacttgcccctttagaggacaatgtaactctatagttattgttttatgttctagtgatttcctgtataatttaacagtgcccttttcatctccagtgtgaatatatggtctgtgtgtctgatgtttgttgctaggacatataccttctcaaaagattgttttatatgtagtactaactaaggtcccataataaaaagatagtatcttttaaaatgaaatgtttttgctatagatttgtattttaaaacataagaacgtcattttgggacctatatctcagtggcacaggtttaagaacgaaggagaaaaaggtagtttgaaccttggtaaattgtaaacagctaataatgaagttattcttgacatgagaaaatcagtaattggaccaggcgcggtggctcttgcctgtaatcccagcactttgggaggccgaggcaggcagatcacaaggtcaggagttcgagaccagcctgaccaacatggtgaaaccctgtctctactaaaaatacaaaaattagccgggggtggtgacatgtgcctgtaatcccagctactcaggaggctaaggcaggagaatcgcttaaacccaggaggcggaggttgcagtgagccgagattgcaccactgcactccagcctgggtggcagagtgagactcgtctcaaaaaaaagaaagaaaattagtaattgtaagtacccctgataagcaaattagtaattgtcaatacccctgttaagcaattcctttttgcagtatatttctgaaatgacagaatgctgttttaaaaacaaagaaataaaatcctgctcctgactcggtcaaaatattttttaaagtctattgtttgttgtgcttgctggtactaagaggctatttaaaagtataaaactgctttgtatccatgagggtttcattgtgtgttagcagcagtgagcttctattaaatgtatatgtcatttattttgtttaagtggctttcagcaaacctcagtcatattcttatgcagggtattgcgaaacaacttgtgttctattaatcgtgtcttcaattaaaagaccacagacttctggaaaaaaaaaact

SEQ ID NO: 731801 - DNA, 1409 bp, Homo sapiens
aagctttgcacatctccaggtcagacctatcctaatatctacatctacatttccagaaaatttgagaagcaatgggcatcctgaagctgcaagtatttctcattgtgctctctgttgcattgaaccatctgaaagctacacccattgaaagtcatcaggtggaaaagcggaaatgcaacactgccacatgtgcaacgcagcgcctggcaaattttttagttcattccagcaacaactttggtgccattctctcatctaccaacgtgggatccaatacatatggcaagaggaatgcagtagaggttttaaagagagagccactgaattacttgcccctttagaggacaatgtaactctatagttattgttttatgttctagtgatttcctgtataatttaacagtgcccttttcatctccagtgtgaatatatggtctgtgtgtctgatgtttgttgctaggacatataccttctcaaaagattgttttatatgtagtactaactaaggtcccataataaaaagatagtatcttttaaaatgaaatgtttttgctatagatttgtattttaaaacataagaacgtcattttgggacctatatctcagtggcacaggtttaagaacgaaggagaaaaaggtagtttgaaccttggtaaattgtaaacagctaataatgaagttattcttgacatgagaaaatcagtaattggaccaggcgcggtggctcttgcctgtaatcccagcactttgggaggccgaggcaggcagatcacaaggtcaggagttcgagaccagcctgaccaacatggtgaaaccctgtctctactaaaaatacaaaaattagccgggggtggtgacatgtgcctgtaatcccagctactcaggaggctaaggcaggagaatcgcttaaacccaggaggcggaggttgcagtgagccgagattgcaccactgcactccagcctgggtggcagagtgagactcgtctcaaaaaaaagaaagaaaattagtaattgtaagtacccctgataagcaaattagtaattgtcaatacccctgttaagcaattcctttttgcagtatatttctgaaatgacagaatgctgttttaaaaacaaagaaataaaatcctgctcctgactcggtcaaaatattttttaaagtctattgtttgttgtgcttgctggtactaagaggctatttaaaagtataaaactgctttgtatccatgagggtttcattgtgtgttagcagcagtgagcttctattaaatgtatatgtcatttattttgtttaagtggctttcagcaaacctcagtcatattcttatgcagggtattgcgaaacaacttgtgttctattaatcgtgtcttcaattaaaagaccacagacttctggaaaaaaaaaact

SEQ ID NO: 731802 - DNA, 541 bp, Homo sapiens
aagctttgcacatctccaggtcagacctatcctaatatctacatctacatttccagaaaatttgagaagcaatgggcatcctgaagctgcaagtatttctcattgtgctctctgttgcattgaaccatctgaaagctacacccattgaaagtcatcaggtggaaaagcggaaatgcaacactgccacatgtgcaacgcagcgcctggcaaattttttagttcattccagcaacaactttggtgccattctctcatctaccaacgtgggatccaatacatatggcaagaggaatgcagtagaggttttaaagagagagccactgaattacttgcccctttagaggacaatgtaactctatagttattgttttatgttctagtgatttcctgtataatttaacagtgcccttttcatctccagtgtgaatatatggtctgtgtgtctgatgtttgttgctaggacatataccttctcaaaagattgttttatatgtagtactaactaaggtcccataataaaaagatagtatcttttaaaatg

SEQ ID NO: 731803 - DNA, 1583 bp, Homo sapiens
ggggtatataagagctggattactagttagcaaatgagggggtaaatattccagtggatacaagcttggactcttttcttgaagctttctttctatcagaagcatttgctgatattgctgacattgaaacattaaaagaaaatttgagaagcaatgggcatcctgaagctgcaagtatttctcattgtgctctctgttgcattgaaccatctgaaagctacacccattgaaagacaggaatggataattccagttttgtcaagaaatatactcttggaacttagaggggcaaagccagaacatgaagcgggaaaaaaatcaaaagtcatcaggtggaaaagcggaaatgcaacactgccacatgtgcaacgcagcgcctggcaaattttttagttcattccagcaacaactttggtgccattctctcatctaccaacgtgggatccaatacatatggcaagaggaatgcagtagaggttttaaagagagagccactgaattacttgcccctttagaggacaatgtaactctatagttattgttttatgttctagtgatttcctgtataatttaacagtgcccttttcatctccagtgtgaatatatggtctgtgtgtctgatgtttgttgctaggacatataccttctcaaaagattgttttatatgtagtactaactaaggtcccataataaaaagatagtatcttttaaaatgaaatgtttttgctatagatttgtattttaaaacataagaacgtcattttgggacctatatctcagtggcacaggtttaagaacgaaggagaaaaaggtagtttgaaccttggtaaattgtaaacagctaataatgaagttattcttgacatgagaaaatcagtaattggaccaggcgcggtggctcttgcctgtaatcccagcactttgggaggccgaggcaggcagatcacaaggtcaggagttcgagaccagcctgaccaacatggtgaaaccctgtctctactaaaaatacaaaaattagccgggggtggtgacatgtgcctgtaatcccagctactcaggaggctaaggcaggagaatcgcttaaacccaggaggcggaggttgcagtgagccgagattgcaccactgcactccagcctgggtggcagagtgagactcgtctcaaaaaaaagaaagaaaattagtaattgtaagtacccctgataagcaaattagtaattgtcaatacccctgttaagcaattcctttttgcagtatatttctgaaatgacagaatgctgttttaaaaacaaagaaataaaatcctgctcctgactcggtcaaaatattttttaaagtctattgtttgttgtgcttgctggtactaagaggctatttaaaagtataaaactgctttgtatccatgagggtttcattgtgtgttagcagcagtgagcttctattaaatgtatatgtcatttattttgtttaagtggctttcagcaaacctcagtcatattcttatgcagggtattgcgaaacaacttgtgttctattaatcgtgtcttcaattaaaagaccacagacttctggaaaaaaaaaact

SEQ ID NO: 731804 - DNA, 715 bp, Homo sapiens
ggggtatataagagctggattactagttagcaaatgagggggtaaatattccagtggatacaagcttggactcttttcttgaagctttctttctatcagaagcatttgctgatattgctgacattgaaacattaaaagaaaatttgagaagcaatgggcatcctgaagctgcaagtatttctcattgtgctctctgttgcattgaaccatctgaaagctacacccattgaaagacaggaatggataattccagttttgtcaagaaatatactcttggaacttagaggggcaaagccagaacatgaagcgggaaaaaaatcaaaagtcatcaggtggaaaagcggaaatgcaacactgccacatgtgcaacgcagcgcctggcaaattttttagttcattccagcaacaactttggtgccattctctcatctaccaacgtgggatccaatacatatggcaagaggaatgcagtagaggttttaaagagagagccactgaattacttgcccctttagaggacaatgtaactctatagttattgttttatgttctagtgatttcctgtataatttaacagtgcccttttcatctccagtgtgaatatatggtctgtgtgtctgatgtttgttgctaggacatataccttctcaaaagattgttttatatgtagtactaactaaggtcccataataaaaagatagtatcttttaaaatg

SEQ ID NO: 731805 - DNA, 581 bp, Homo sapiens
gaaggctcagtataaatagcagccaccgctccctggcaggcagggacccgcagctcagctacagcacagatcagcaccatgaagcttctcacgggcctggttttctgctccttggtcctgagtgtcagcagccgaagcttcttttcgttccttggcgaggcttttgatggggctcgggacatgtggagagcctactctgacatgagagaagccaattacatcggctcagacaaatacttccatgctcgggggaactatgatgctgccaaaaggggacctgggggtgcctgggccgcagaagtgatcagcaatgccagagagaatatccagagactcacaggccatggtgcggaggactcgctggccgatcaggctgccaataaatggggcaggagtggcagagaccccaatcacttccgacctgctggcctgcctgagaaatactgagcttcctcttcactctgctctcaggagacctggctatgaggccctcggggcagggatacaaagttagtgaggtctatgtccagagaagctgagatatggcatataataggcatctaataaatgcttaagaggtg

SEQ ID NO: 731806 - DNA, 851 bp, Homo sapiens
  misc_feature (688)..(688): n is a, c, g, or t
  misc_feature (693)..(693): n is a, c, g, or t
  misc_feature (703)..(703): n is a, c, g, or t
gaaggctcagtataaatagcagccaccgctccctggcaggcagggacccgcagctcagctacagcacagatcagcaccatgaagcttctcacgggcctggttttctgctccttggtcctgagtgtcagcagccgaagcttcttttcgttccttggcgaggcttttgatggggctcgggacatgtggagagcctactctgacatgagagaagccaattacatcggctcagacaaatacttccatgctcgggggaactatgatgctgccaaaaggggacctgggggtgcctgggccgcagaagtgatcagcaatgccagagagaatatccagagactcacaggccatggtgcggaggactcgctggccgatcaggctgccaataaatggggcaggagtggcagagaccccaatcacttccgacctgctggcctgcctgagaaatactgagcttcctcttcactctgctctcaggagacctggctatgaggccctcggggcagggatacaaagttagtgaggtctatgtccagagaagctgagatatggcatataataggcatctaataaatgcttaagaggtgcaaaaaaaaaaacaaaaacaaaaaaaaactttttgggccgcctgggcccctggaaaaaagtttttaaaaccctttcgttgtgggccgggggccccaatggttacgcnaccgnggcaaagcgngtcccaagaaaaaccgggccagaaagggcgggggattcccccgaagtaaaaagagcccggggcaaaccgggggttcggaaccaaccccaaggggatccggaggccacgaggagcctacacgggggtcccaagggagccgaataaaaca

SEQ ID NO: 731807 - DNA, 985 bp, Homo sapiens
gaaggctcagtataaatagcagccaccgctccctggcaggcagggacccgcagctcagctacagcacagatcagcaccatgaagcttctcacgggcctggttttctgctccttggtcctgagtgtcagcagccgaagcttcttttcgttccttggcgaggcttttgatggggctcgggacatgtggagagcctactctgacatgagagaagccaattacatcggctcagacaaatacttccatgctcgggggaactatgatgctgccaaaaggggacctgggggtgcctgggccgcagaagtgatcaggctgaagtgccatggcatgatcatggctcactgcaacctcgacctcccggggctcaagagatcctcccacttcagcctcttgaataactgggactgcagatgtgcgccatgacacttgcctaatttttatattttttgtagagatggggtttcgccgtgtcacccaggctggtcttgaactcctgggctcaagtgatctgcctgcctcagcctcccaaagtgctgggattacaggcatgagtcactgagcccagcctactgttatatttattttgtgtcggtttgaggctgcccagattcacattgtttctggggtcgtctgtgagggtgtttccagaggagattaacatttgaattggacttaataaagtagattgctattctcaatgcaactgggcatcacccaatctgttgaaggcttgaatagaacaaaaatagaggaaggacagatttgcctcccttttccccgcctcactgcttgagttggacatctcctctcatcttctcttgccctcaaattggatttacatgatcagttgctctggttctcaggcctttgaactcagactgaattacactttcctgagtttctagcttgcagagggcagatcgtgggacttctcagccccaattatcttgtgagccaattccttacaataaataaatacatacataca

SEQ ID NO: 731808 - DNA, 726 bp, Homo sapiens
gaaggctcagtataaatagcagccaccgctccctggcaggcagggacccgcagctcagctacagcacagatcaggaggagcacaccaaggagtgatttttaaaacttactctgttttctctttcccaacaagattatcatttcctttaaaaaaaatagttatcctggggcatacagccataccattctgaaggtgtcttatctcctctgatctagagagcaccatgaagcttctcacgggcctggttttctgctccttggtcctgagtgtcagcagccgaagcttcttttcgttccttggcgaggcttttgatggggctcgggacatgtggagagcctactctgacatgagagaagccaattacatcggctcagacaaatacttccatgctcgggggaactatgatgctgccaaaaggggacctgggggtgcctgggccgcagaagtgatcagcaatgccagagagaatatccagagactcacaggccatggtgcggaggactcgctggccgatcaggctgccaataaatggggcaggagtggcagagaccccaatcacttccgacctgctggcctgcctgagaaatactgagcttcctcttcactctgctctcaggagacctggctatgaggccctcggggcagggatacaaagttagtgaggtctatgtccagagaagctgagatatggcatataataggcatctaataaatgcttaagaggtg

SEQ ID NO: 731809 - DNA, 770 bp, Homo sapiens
  misc_feature (584)..(584): n is a, c, g, or t
gaaggctcagtataaatagcagccaccgctccctggcaggcagggacccgcagctcagctacagcacagatcagcaccatgaagcttctcacgggcctggttttctgctccttggtcctgagtgtcagcagccgaagcttcttttcgttccttggcgaggcttttgatggggctcgggacatgtggagagcctactctgacatgagagaagccaattacatcggctcagacaaatacttccatgctcgggggaactatgatgctgccaaaaggggacctgggggtgcctgggccgcagaagtgatcagcaatgccagagagaatatccagagactcacaggccatggtgcggaggactcgctggccgatcaggctgccaataaatggggcaggagtggcagagaccccaatcacttccgacctgctggcctgcctgagaaatactgagcttcctcttcactctgctctcaggagacctggctatgaggccctcggggcagggatacaaagttagtgaggtctatgtccagagaagctgagatatggcatataataggcatctaataaatgcttaagaggtgaanaaaagaaaaaaaaaaaaaaaaaaaaaaaaaaaacaatggtcggtacggactgaggccctcgagaaagctcgaagaacacatcggttgggcgaggggacccacaagatacagggacacagggccaaaagcggtcccaaaggagaaccggggccaagaacaggggcggggattcccaccaattaaaag

SEQ ID NO: 731810 - DNA, 642 bp, Homo sapiens
gaaggctcagtataaatagcagccaccgctccctggcaggcagggacccgcagctcagctacagcacagatcagttatcctggggcatacagccataccattctgaaggtgtcttatctcctctgatctagagagcaccatgaagcttctcacgggcctggttttctgctccttggtcctgagtgtcagcagccgaagcttcttttcgttccttggcgaggcttttgatggggctcgggacatgtggagagcctactctgacatgagagaagccaattacatcggctcagacaaatacttccatgctcgggggaactatgatgctgccaaaaggggacctgggggtgcctgggccgcagaagtgatcagcaatgccagagagaatatccagagactcacaggccatggtgcggaggactcgctggccgatcaggctgccaataaatggggcaggagtggcagagaccccaatcacttccgacctgctggcctgcctgagaaatactgagcttcctcttcactctgctctcaggagacctggctatgaggccctcggggcagggatacaaagttagtgaggtctatgtccagagaagctgagatatggcatataataggcatctaataaatgcttaagaggtg

SEQ ID NO: 731811 - DNA, 504 bp, Homo sapiens
tgggcgactgcctgacttctcctttcatttcagcaccatgaagcttctcacgggcctggttttctgctccttggtcctgagtgtcagcagccgaagcttcttttcgttccttggcgaggcttttgatggtaaggcttcagaaggtttgcaggatttctgaagagaaacatcgccctggacctgataaactggggaaaatgatgctttcggaaggctgcttttgaaccacagagttgctagtgtctgcgtttgctgaggcctgccaggaactagggtttgctgggttgcctgtctcgagtctttcagagctgctgggaatatcccctttccccgtagtgcagcttctcaggatgtgttaagtggatggatcacatttcagaagccgctgcaaggtgtatcaaaaacacatctcctgagccgtaagggacggggcatccagtaacaacgcacacggggtatttttgggcttccttaagatttgagccgctgccttaggttgtgctg

SEQ ID NO: 731812 - DNA, 825 bp, Homo sapiens
  misc_feature (662)..(662): n is a, c, g, or t
  misc_feature (667)..(667): n is a, c, g, or t
  misc_feature (677)..(677): n is a, c, g, or t
gaaggctcagtataaatagcagccaccgctccctggcaggcagggacccgcagctcagctacagcacagatcagcaccatgaagcttctcacgggcctggttttctgctccttggtcctgagtgtcagcagccgaagcttcttttcgttccttggcgaggcttttgatggggctcgggacatgtggagagcctactctgacatgagagaagccaattacatcggctcagacaaatacttccatgctcgggggaactatgatgctgccaaaaggggacctgggggtgcctgggccgcagaagtgatcagcaatgccagagagaatatccagagactcacaggccatggtgcggaggactcgctggccgatcaggctgccaataaatggggcaggagtggcagagaccccaatcacttccgacctgctggcctgcctgagaaatactgagcttcctcttcactctgctctcaggagacctggctatgaggccctcggggcagggatacaaagcggggagagggtacacaatgggtatctaataaatacttaagaggtcaaaaaaaaaaacaaaaacaaaaaaaaactttttgggccgcctgggcccctggaaaaaagtttttaaaaccctttcgttgtgggccgggggccccaatggttacgcnaccgnggcaaagcgngtcccaagaaaaaccgggccagaaagggcgggggattcccccgaagtaaaaagagcccggggcaaaccgggggttcggaaccaaccccaaggggatccggaggccacgaggagcctacacgggggtcccaagggagccgaataaaaca

SEQ ID NO: 731813 - DNA, 289 bp, Homo sapiens
gaaggctcagtataaatagcagccaccgctccctggcaggcagggacccgcagctcagctacagcacagatcaggaggagcacaccaaggagtgatttttaaaacttactctgttttctctttcccaacaagattatcatttcctttaaaaaaaatagttatcctggggcatacagccataccattctgaaggtgtcttatctcctctgatctagagaggtaagcagggtcgggcctggtagtacttggatgggagaacacctgggaataccaggtgctaaaggcttta

SEQ ID NO: 731814 - DNA, 906 bp, Homo sapiens
gaaggctcagtataaatagcagccaccgctccctggcaggcagggacccgcagctcagctacagcacagatcaggaggagcacaccaaggagtgatttttaaaacttactctgttttctctttcccaacaagattatcatttcctttaaaaaaaatagttatcctggggcatacagccataccattctgaaggtgtcttatctcctctgatctagagagcaccatgaagcttctcacgggcctggttttctgctccttggtcctgagtgtcagcagccgaagcttcttttcgttccttggcgaggcttttgatggggctcgggacatgtggagagcctactctgacatgagagaagccaattacatcggctcagacaaatacttccatgctcgggggaactatgatgctgccaaaaggggacctgggggtgcctgggccgcagaagtgatcagcaatgccagagagaatatccagagactcacaggccatggtgcggaggactcgctggccgatcaggctgccaataaatggggcaggagtggcagagaccccaatcacttccgacctgctggcctgcctgagaaatactgagcttcctcttcactctgctctcaggagacctggctatgaggccctcggggcagggatacaaagttagtgaggtctatgtccagagaagctgagatatggcatataataggcatctaataaatgcttaagaggtgtcaaaacaaacaaaaaaaagcgaacacactgggcgggcccagggcaccgaaaaagtgcatgagacaatgcgagggagcaggggcccaaaatacggacatggcagaaggggaccaagagaccggacaaaaaagggtgggaccccacaagaaaacgccgggaacgagcgtgaaacaaccaag

SEQ ID NO: 731815 - DNA, 375 bp, Homo sapiens
acctctaagtatatagatacctatatataccatagctcagctacagcacagatcagcaccatgaagcttctcacgggcctggttttctgctccttggtcctgagtgtcagcagccgaagcttcttttcgttccttggcgaggcttttgatggggctcgggacatgtggagagcctactctgacatgagagaagccaattacatcggctcagacaaatacttccatgctcgggggaactatgatgctgccaaaaggggacctgggggtgcctgggccgcagaagtgatcagagaagatgactgaggaatacaaccacaactggatggactttttcaaaagatgacacctgcttatttgcctcattcaaatttcaag

SEQ ID NO: 731816 - DNA, 996 bp, Homo sapiens
  misc_feature (833)..(833): n is a, c, g, or t
  misc_feature (838)..(838): n is a, c, g, or t
  misc_feature (848)..(848): n is a, c, g, or t
gaaggctcagtataaatagcagccaccgctccctggcaggcagggacccgcagctcagctacagcacagatcaggaggagcacaccaaggagtgatttttaaaacttactctgttttctctttcccaacaagattatcatttcctttaaaaaaaatagttatcctggggcatacagccataccattctgaaggtgtcttatctcctctgatctagagagcaccatgaagcttctcacgggcctggttttctgctccttggtcctgagtgtcagcagccgaagcttcttttcgttccttggcgaggcttttgatggggctcgggacatgtggagagcctactctgacatgagagaagccaattacatcggctcagacaaatacttccatgctcgggggaactatgatgctgccaaaaggggacctgggggtgcctgggccgcagaagtgatcagcaatgccagagagaatatccagagactcacaggccatggtgcggaggactcgctggccgatcaggctgccaataaatggggcaggagtggcagagaccccaatcacttccgacctgctggcctgcctgagaaatactgagcttcctcttcactctgctctcaggagacctggctatgaggccctcggggcagggatacaaagttagtgaggtctatgtccagagaagctgagatatggcatataataggcatctaataaatgcttaagaggtgcaaaaaaaaaaacaaaaacaaaaaaaaactttttgggccgcctgggcccctggaaaaaagtttttaaaaccctttcgttgtgggccgggggccccaatggttacgcnaccgnggcaaagcgngtcccaagaaaaaccgggccagaaagggcgggggattcccccgaagtaaaaagagcccggggcaaaccgggggttcggaaccaaccccaaggggatccggaggccacgaggagcctacacgggggtcccaagggagccgaataaaaca

SEQ ID NO: 731817 - DNA, 833 bp, Homo sapiens
  misc_feature (670)..(670): n is a, c, g, or t
  misc_feature (675)..(675): n is a, c, g, or t
  misc_feature (685)..(685): n is a, c, g, or t
acctctaagtatatagatacctatatataccatagctcagctacagcacagatcagcaccatgaagcttctcacgggcctggttttctgctccttggtcctgagtgtcagcagccgaagcttcttttcgttccttggcgaggcttttgatggggctcgggacatgtggagagcctactctgacatgagagaagccaattacatcggctcagacaaatacttccatgctcgggggaactatgatgctgccaaaaggggacctgggggtgcctgggccgcagaagtgatcagcaatgccagagagaatatccagagactcacaggccatggtgcggaggactcgctggccgatcaggctgccaataaatggggcaggagtggcagagaccccaatcacttccgacctgctggcctgcctgagaaatactgagcttcctcttcactctgctctcaggagacctggctatgaggccctcggggcagggatacaaagttagtgaggtctatgtccagagaagctgagatatggcatataataggcatctaataaatgcttaagaggtgcaaaaaaaaaaacaaaaacaaaaaaaaactttttgggccgcctgggcccctggaaaaaagtttttaaaaccctttcgttgtgggccgggggccccaatggttacgcnaccgnggcaaagcgngtcccaagaaaaaccgggccagaaagggcgggggattcccccgaagtaaaaagagcccggggcaaaccgggggttcggaaccaaccccaaggggatccggaggccacgaggagcctacacgggggtcccaagggagccgaataaaaca

SEQ ID NO: 731818 - DNA, 563 bp, Homo sapiens
acctctaagtatatagatacctatatataccatagctcagctacagcacagatcagcaccatgaagcttctcacgggcctggttttctgctccttggtcctgagtgtcagcagccgaagcttcttttcgttccttggcgaggcttttgatggggctcgggacatgtggagagcctactctgacatgagagaagccaattacatcggctcagacaaatacttccatgctcgggggaactatgatgctgccaaaaggggacctgggggtgcctgggccgcagaagtgatcagcaatgccagagagaatatccagagactcacaggccatggtgcggaggactcgctggccgatcaggctgccaataaatggggcaggagtggcagagaccccaatcacttccgacctgctggcctgcctgagaaatactgagcttcctcttcactctgctctcaggagacctggctatgaggccctcggggcagggatacaaagttagtgaggtctatgtccagagaagctgagatatggcatataataggcatctaataaatgcttaagaggtg

SEQ ID NO: 731819 - DNA, 178 bp, Homo sapiens
tgcgacctttacaaatgagtacagcgtagctaggaggagcacaccaaggagtgatttttaaaacttactctgttttctctttcccaacaagattatcatttcctttaaaaaaaatagttatcctggggcatacagccataccattctgaaggtgtcttatctcctctgatctagagag

SEQ ID NO: 731820 - DNA, 342 bp, Homo sapiens
catataataggcatctaataaatgcttaagaggtgaatttgttgaaacagtgtgttcttcttttggtgctgactgcctgtttggtacaaaagggaaatcaatgcacacccacatgaagggtgagcctaggtaggcctatgtgtttggatgtgaggagacattcttagtagtcacagtgcagacacctgcatcaacccttccacaaattagacctccttttttccagacctttgtggttacattgttgctatttccagtcccttccttgcccaggcttctcatctcctgtgaattatttcctgttaccttctctgtccctcagttcttcattcctcagtgatc

SEQ ID NO: 731821 - DNA, 442 bp, Homo sapiens; identical to SEQ ID NO: 51565

SEQ ID NO: 731822 - DNA, 892 bp, Homo sapiens; identical to SEQ ID NO: 446339

SEQ ID NO: 731823 - DNA, 864 bp, Homo sapiens; identical to SEQ ID NO: 446338

SEQ ID NO: 731824 - DNA, 145 bp, Homo sapiens
gatcccagaggaggaagtccagagacagagcaccatgacttctgagaaaggagaagaatcgaaccctgggagtttgacgtcttctatgaccccagagaacttcgtaaagaggcctgtctgctctacgaaatcaagtggggcatga

SEQ ID NO: 731825 - DNA, 879 bp, Homo sapiens; identical to SEQ ID NO: 307399

SEQ ID NO: 731826 - DNA, 460 bp, Homo sapiens
gatcaagaggaccccttcagtgcttagctcaattagtgtggctaaccaagagataactgtaaatgtgacattgatttgctcttactacagcttcagtgattgggggaggaaaagtcccaacccaatgggctcaaacttctaaggggtactcctctcatccccttatccttctccctcgacattttctccctctttcttcccatgaccccaaagccaagggcaacagatcagtaaagaacgtggtcagagtagaacccctgaagtattttttaatcctacctcaaaatttaacagttacctgagagatttaacattatctagttcattgaatcattgtatgtggtcatggataaattgcacaccttggaattcgctttctaaaggaaatcaaatgaatggaggaactttccaaacaccactttacttgtgttatatagccaatataactatctctactgaa

SEQ ID NO: 731827 - DNA, 694 bp, Homo sapiens; identical to SEQ ID NO: 307400

SEQ ID NO: 731828 - DNA, 599 bp, Homo sapiens
gtatccagaggatcccttcagcacatttagtcaagtacaaactaatttagtaatagcctgggttaagtattattagggccctgtgtctgctgtagaaaaaaaaattcacatgatgcacttcaaattcaaataaaaatccttttggcatgttcccatttttgcttagctcaattagtgtggctaaccaagagataactgtaaatgtgacattgatttgctcttactacagcttcagtgattgggggaggaaaagtcccaacccaatgggctcaaacttctaaggggtactcctctcatccccttatccttctccctcgacattttctccctctttcttcccatgaccccaaagccaagggcaacagatcagtaaagaacgtggtcagagtagaacccctgaagtattttttaatcctacctcaaaatttaacagttacctgagagatttaacattatctagttcattgaatcattgtatgtggtcatggataaattgcacaccttggaattcgctttctaaaggaaatcaaatgaatggaggaactttccaaacaccactttacttgtgttatatagccaatataactatctctactgaa

SEQ ID NO: 731829 - DNA, 563 bp, Homo sapiens; identical to SEQ ID NO: 307402

SEQ ID NO: 731830 - DNA, 469 bp, Homo sapiens
  misc_feature (24)..(24): n is a, c, g, or t
aaacagtgtatcaacgcagagtgnccattacggccgggattgatttgctcttactacagcttcagtgattgggggaggaaaagtcccaacccaatgggctcaaacttctaaggggtactcctctcatccccttatccttctccctcgacattttctccctctttcttcccatgaccccaaagccaagggcaacagatcagtaaagaacgtggtcagagtagaacccctgaagtattttttaatcctacctcaaaatttaacagttacctgagagatttaacattatctagttcattgaatcattgtatgtggtcatggataaattgcacaccttggaattcgctttctaaaggaaatcaaatgaatggaggaactttccaaacaccactttacttgtgttatatagccaatataactatctctactgaatgtcattgaaaaactaaaaaattaaacttatttacaaata

SEQ ID NO: 731831 - DNA, 358 bp, Homo sapiens
cctcctgagtagctgggactacaggtgcccaccaccacgcccagctaattttttgtattttcagtagagacggggtttcaccgtgttagccaggatggtctcgatctcctgacctcatgatttgcccacctcagcctcccaaagtgctgggatcacagacgtcagcctataacctacctcaaaatttaacagttacctgagagatttaacattatctagttcattgaatcattgtatgtggtcatggataaattgcacaccttggaattcgctttctaaaggaaatcaaatgaatggaggaactttccaaacaccactttacttgtgttatatagccaatataactatctctactgaa

SEQ ID NO: 731832 - DNA, 3021 bp, Homo sapiens
  misc_feature (24)..(24): n is a, c, g, or t
aaacagtgtatcaacgcagagtgnccattacggccgggggagtttctggagggctgaacacgtggaggcaaacaggaaggtgaagaagaacttatcctatcaggacggaaggtcctgtgctcgggatcttccagacgtcgcgactctaaattgccccctctgaggtcaaggaacacaagatggttttggaaatgctgaacccgatacattataacatcaccagcatcgtgcctgaagccatgcctgctgccaccatgccagtcctgctcctcactggcctttttctcttggtgtggaattatgagggcacatcctcaataccaggtcctggctactgcatgggaattggacccctcatctcccacggcagattcctgtggatggggatcggcagtgcctgcaactactacaaccgggtatatggagaattcatgcgagtctggatctctggagaggaaacactcattatcagcaagtcctcaagtatgttccacataatgaagcacaatcattacagctctcgattcggcagcaaacttgggctgcagtgcatcggtatgcatgagaaaggcatcatatttaacaacaatccagagctctggaaaacaactcgacccttctttatgaaagctctgtcaggccccggccttgttcgtatggtcacagtctgtgctgaatccctcaaaacacatctggacaggttggaggaggtgaccaatgaatcgggctatgtggacgtgttgacccttctgcgtcgtgtcatgctggacacctctaacacgctcttcttgaggatccctttggacgaaagtgctatcgtggttaaaatccaaggttattttgatgcatggcaagctctcctcatcaaaccagacatcttctttaagatttcttggctatacaaaaagtatgagaagtctgtcaaggatttgaaagatgccatagaagttctgatagcagaaaaaagacgcaggatttccacagaagagaaactggaagaatgtatggactttgccactgagttgattttagcagagaaacgtggtgacctgacaagagagaatgtgaaccagtgcatattggaaatgctgatcgcagctcctgacaccatgtctgtctctttgttcttcatgctatttctcattgcaaagcaccctaatgttgaagaggcaataataaaggaaatccagactgttattggtgagagagacataaagattgatgatatacaaaaattaaaagtgatggaaaacttcatttatgagagcatgcggtaccagcctgtcgtggacttggtcatgcgcaaagccttagaagatgatgtaatcgatggctacccagtgaaaaaggggacaaacattatcctgaatattggaaggatgcacagactcgagtttttccccaaacccaatgaatttactcttgaaaattttgcaaagaatgttccttataggtactttcagccatttggctttgggccccgtggctgtgcaggaaagtacatcgccatggtgatgatgaaagccatcctcgttacacttctgagacgattccacgtgaagacattgcaaggacagtgtgttgagagcatacagaagatacacgacttgtccttgcacccagatgagactaaaaacatgctggaaatgatctttaccccaagaaactcagacaggtgtctggaacactagagaaggctggtcagtacctactctggagcatttctcatcagtagttcacatacaaatcatccatccttgccaatagtgtcatcctcacagtgaacactcagtggcccatggcattttataggcatacctcctatgggttgtcaccaagctaggtgctattggtcatctgctcctgttcacaccagagaaccaggctacaagagaaaaagcagaggccaagagtttgagggagaaatagtcggtgaagaaaccgtatccataaagacccgattccaccaaatgtgctttgagaaggataggccttcattaacaaaatgtatgtctggttccccagtagagctctactgcctcaacccaaggggatttttatgtctggggcagaaacactcaagttgattagaaagaccaggccaatgtcagggtacctggggccaaacccacctgctagtgtgaattaaagtactttaattttgttttctgtggaggtggaaaagcaacattcatagtctttggagaaatgcttagaaattcagcatttgacccttgctgtgaattaagcccaattaattcctgtttgtctacatatgatctgtctgtggcaaaagtttaatcagaggaaattctttcccagtctgtcgatttatgcctcagccacttgcctgtgctacaattcattgtgttacctgtagattcaggtaatacaaactatatataatcatcaagtaatacaaactaatttagtaatagcctgggttaagtattattagggccctgtgtctgctgtagaaaaaaaaattcacatgatgcacttcaaattcaaataaaaatccttttggcatgttcccatttttgcttagctcaattagtgtggctaaccaagagataactgtaaatgtgacattgatttgctcttactacagcttcagtgattgggggaggaaaagtcccaacccaatgggctcaaacttctaaggggtactcctctcatccccttatccttctccctcgacattttctccctctttcttcccatgaccccaaagccaagggcaacagatcagtaaagaacgtggtcagagtagaacccctgaagtattttttaatcctacctcaaaatttaacagttacctgagagatttaacattatctagttcattgaatcattgtatgtggtcatggataaattgcacaccttggaattcgctttctaaaggaaatcaaatgaatggaggaactttccaaacaccactttacttgtgttatatagccaatataactatctctactgaatgtcattgaaaaactaaaaaattaaacttatttacaaata

SEQ ID NO: 731833 - DNA, 2888 bp, Homo sapiens
  misc_feature (24)..(24): n is a, c, g, or t
aaacagtgtatcaacgcagagtgnccattacggccgggggagtttctggagggctgaacacgtggaggcaaacaggaaggtgaagaagaacttatcctatcaggacggaaggtcctgtgctcgggatcttccagacgtcgcgactctaaattgccccctctgaggtcaaggaacacaagatggttttggaaatgctgaacccgatacattataacatcaccagcatcgtgcctgaagccatgcctgctgccaccatgccagtcctgctcctcactggcctttttctcttggtgtggaattatgagggcacatcctcaataccaggtcctggctactgcatgggaattggacccctcatctcccacggcagattcctgtggatggggatcggcagtgcctgcaactactacaaccgggtatatggagaattcatgcgagtctggatctctggagaggaaacactcattatcagcaagtcctcaagtatgttccacataatgaagcacaatcattacagctctcgattcggcagcaaacttgggctgcagtgcatcggtatgcatgagaaaggcatcatatttaacaacaatccagagctctggaaaacaactcgacccttctttatgaaagctctgtcaggccccggccttgttcgtatggtcacagtctgtgctgaatccctcaaaacacatctggacaggttggaggaggtgaccaatgaatcgggctatgtggacgtgttgacccttctgcgtcgtgtcatgctggacacctctaacacgctcttcttgaggatccctttggacgaaagtgctatcgtggttaaaatccaaggttattttgatgcatggcaagctctcctcatcaaaccagacatcttctttaagatttcttggctatacaaaaagtatgagaagtctgtcaaggatttgaaagatgccatagaagttctgatagcagaaaaaagacgcaggatttccacagaagagaaactggaagaatgtatggactttgccactgagttgattttagcagagaaacgtggtgacctgacaagagagaatgtgaaccagtgcatattggaaatgctgatcgcagctcctgacaccatgtctgtctctttgttcttcatgctatttctcattgcaaagcaccctaatgttgaagaggcaataataaaggaaatccagactgttattggtgagagagacataaagattgatgatatacaaaaattaaaagtgatggaaaacttcatttatgagagcatgcggtaccagcctgtcgtggacttggtcatgcgcaaagccttagaagatgatgtaatcgatggctacccagtgaaaaaggggacaaacattatcctgaatattggaaggatgcacagactcgagtttttccccaaacccaatgaatttactcttgaaaattttgcaaagaatgttccttataggtactttcagccatttggctttgggccccgtggctgtgcaggaaagtacatcgccatggtgatgatgaaagccatcctcgttacacttctgagacgattccacgtgaagacattgcaaggacagtgtgttgagagcatacagaagatacacgacttgtccttgcacccagatgagactaaaaacatgctggaaatgatctttaccccaagaaactcagacaggtgtctggaacactagagaaggctggtcagtacctactctggagcatttctcatcagtagttcacatacaaatcatccatccttgccaatagtgtcatcctcacagtgaacactcagtggcccatggcattttataggcatacctcctatgggttgtcaccaagctaggtgctattggtcatctgctcctgttcacaccagagaaccaggctacaagagaaaaagcagaggccaagagtttgagggagaaatagtcggtgaagaaaccgtatccataaagacccgattccaccaaatgtgctttgagaaggataggccttcattaacaaaatgtatgtctggttccccagtagagctctactgcctcaacccaaggggatttttatgtctggggcagaaacactcaagttgattagaaagaccaggccaatgtcagggtacctggggccaaacccacctgctagtgtgaattaaagtactttaattttgttttctgtggaggtggaaaagcaacattcatagtctttggagaaatgcttagaaattcagcatttgacccttgctgtgaattaagcccaattaattcctgtttgtctacatatgatctgtctgtggcaaaagtttaatcagaggaaattctttcccagtctgtcgatttatgcctcagccacttgcctgtgctacaattcattgtgttacctgtagattcaggtaatacaaactatatataatcatcaagtaatacaaactaatttagtaatagcctgggttaagtattattagggccctgtgtctgctgtagaaaaaaaaattcacatgatgcacttcaaattcaaataaaaatccttttggcatgttcccatttttgcttagctcaattagtgtggctaaccaagagataactgtaaatgtgacattgatttgctcttactacagcttcagtgattgggggaggaaaagtcccaacccaatgggctcaaacttctaaggggtactcctctcatccccttatccttctccctcgacattttctccctctttcttcccatgaccccaaagccaagggcaacagatcagtaaagaacgtggtcagagtagaacccctgaagtattttttaatcctacctcaaaatttaacagttacctgagagatttaacattatctagttcattgaatcattgtatgtggtcatggataaattgcacaccttgg

SEQ ID NO: 731834 - DNA, 2981 bp, Homo sapiens
  misc_feature (24)..(24): n is a, c, g, or t
aaacagtgtatcaacgcagagtgnccattacggccgggggagtttctggagggctgaacacgtggaggcaaacaggaaggtgaagaagaacttatcctatcaggacggaaggtcctgtgctcgggatcttccagacgtcgcgactctaaattgccccctctgaggtcaaggaacacaagatggttttggaaatgctgaacccgatacattataacatcaccagcatcgtgcctgaagccatgcctgctgccaccatgccagtcctgctcctcactggcctttttctcttggtgtggaattatgagggcacatcctcaataccaggtcctggctactgcatgggaattggacccctcatctcccacggcagattcctgtggatggggatcggcagtgcctgcaactactacaaccgggtatatggagaattcatgcgagtctggatctctggagaggaaacactcattatcagcaagtcctcaagtatgttccacataatgaagcacaatcattacagctctcgattcggcagcaaacttgggctgcagtgcatcggtatgcatgagaaaggcatcatatttaacaacaatccagagctctggaaaacaactcgacccttctttatgaaagctctgtcaggccccggccttgttcgtatggtcacagtctgtgctgaatccctcaaaacacatctggacaggttggaggaggtgaccaatgaatcgggctatgtggacgtgttgacccttctgcgtcgtgtcatgctggacacctctaacacgctcttcttgaggatccctttggacgaaagtgctatcgtggttaaaatccaaggttattttgatgcatggcaagctctcctcatcaaaccagacatcttctttaagatttcttggctatacaaaaagtatgagaagtctgtcaaggatttgaaagatgccatagaagttctgatagcagaaaaaagacgcaggatttccacagaagagaaactggaagaatgtatggactttgccactgagttgattttagcagagaaacgtggtgacctgacaagagagaatgtgaaccagtgcatattggaaatgctgatcgcagctcctgacaccatgtctgtctctttgttcttcatgctatttctcattgcaaagcaccctaatgttgaagaggcaataataaaggaaatccagactgttattggtgagagagacataaagattgatgatatacaaaaattaaaagtgatggaaaacttcatttatgagagcatgcggtaccagcctgtcgtggacttggtcatgcgcaaagccttagaagatgatgtaatcgatggctacccagtgaaaaaggggacaaacattatcctgaatattggaaggatgcacagactcgagtttttccccaaacccaatgaatttactcttgaaaattttgcaaagaatgttccttataggtactttcagccatttggctttgggccccgtggctgtgcaggaaagtacatcgccatggtgatgatgaaagccatcctcgttacacttctgagacgattccacgtgaagacattgcaaggacagtgtgttgagagcatacagaagatacacgacttgtccttgcacccagatgagactaaaaacatgctggaaatgatctttaccccaagaaactcagacaggtgtctggaacactagagaaggctggtcagtacctactctggagcatttctcatcagtagttcacatacaaatcatccatccttgccaatagtgtcatcctcacagtgaacactcagtggcccatggcattttataggcatacctcctatgggttgtcaccaagctaggtgctattggtcatctgctcctgttcacaccagagaaccaggctacaagagaaaaagcagaggccaagagtttgagggagaaatagtcggtgaagaaaccgtatccataaagacccgattccaccaaatgtgctttgagaaggataggccttcattaacaaaatgtatgtctggttccccagtagagctctactgcctcaacccaaggggatttttatgtctggggcagaaacactcaagttgattagaaagaccaggccaatgtcagggtacctggggccaaacccacctgctagtgtgaattaaagtactttaattttgttttctgtggaggtggaaaagcaacattcatagtctttggagaaatgcttagaaattcagcatttgacccttgctgtgaattaagcccaattaattcctgtttgtctacatatgatctgtctgtggcaaaagtttaatcagaggaaattctttcccagtctgtcgatttatgcctcagccacttgcctgtgctacaattcattgtgttacctgtagattcaggtaatacaaactatatataatcatcaagtaatacaaactaatttagtaatagcctgggttaagtattattagggccctgtgtctgctgtagaaaaaaaaattcacatgatgcacttcaaattcaaataaaaatccttttggcatgttcccatttttgcttagctcaattagtgtggctaaccaagagataactgtaaatgtgacattgatttgctcttactacagcttcagtgattgggggaggaaaagtcccaacccaatgggctcaaacttctaaggggtactcctctcatccccttatccttctccctcgacattttctccctctttcttcccatgaccccaaagccaagggcaacagatcagtaaagaacgtggtcagagtagaacccctgaagtattttttaatcctacctcaaaatttaacagttacctgagagatttaacattatctagttcattgaatcattgtatgtggtcatggataaattgcacaccttggaattcgctttctaaaggaaatcaaatgaatggaggaactttccaaacaccactttacttgtgttatatagccaatataactatctctactgaa

SEQ ID NO: 731835 - DNA, 3698 bp, Homo sapiens
  misc_feature (24)..(24): n is a, c, g, or t
aaacagtgtatcaacgcagagtgnccattacggccgggggagtttctggagggctgaacacgtggaggcaaacaggaaggtgaagaagaacttatcctatcaggacggaaggtcctgtgctcgggatcttccagacgtcgcgactctaaattgccccctctgaggtcaaggaacacaagatggttttggaaatgctgaacccgatacattataacatcaccagcatcgtgcctgaagccatgcctgctgccaccatgccagtcctgctcctcactggcctttttctcttggtgtggaattatgagggcacatcctcaataccaggtcctggctactgcatgggaattggacccctcatctcccacggcagattcctgtggatggggatcggcagtgcctgcaactactacaaccgggtatatggagaattcatgcgagtctggatctctggagaggaaacactcattatcagcaagtcctcaagtatgttccacataatgaagcacaatcattacagctctcgattcggcagcaaacttgggctgcagtgcatcggtatgcatgagaaaggcatcatatttaacaacaatccagagctctggaaaacaactcgacccttctttatgaaagctctgtcaggccccggccttgttcgtatggtcacagtctgtgctgaatccctcaaaacacatctggacaggttggaggaggtgaccaatgaatcgggctatgtggacgtgttgacccttctgcgtcgtgtcatgctggacacctctaacacgctcttcttgaggatccctttggacgaaagtgctatcgtggttaaaatccaaggttattttgatgcatggcaagctctcctcatcaaaccagacatcttctttaagatttcttggctatacaaaaagtatgagaagtctgtcaaggatttgaaagatgccatagaagttctgatagcagaaaaaagacgcaggatttccacagaagagaaactggaagaatgtatggactttgccactgagttgattttagcagagaaacgtggtgacctgacaagagagaatgtgaaccagtgcatattggaaatgctgatcgcagctcctgacaccatgtctgtctctttgttcttcatgctatttctcattgcaaagcaccctaatgttgaagaggcaataataaaggaaatccagactgttattggtgagagagacataaagattgatgatatacaaaaattaaaagtgatggaaaacttcatttatgagagcatgcggtaccagcctgtcgtggacttggtcatgcgcaaagccttagaagatgatgtaatcgatggctacccagtgaaaaaggggacaaacattatcctgaatattggaaggatgcacagactcgagtttttccccaaacccaatgaatttactcttgaaaattttgcaaagaatgttccttataggtactttcagccatttggctttgggccccgtggctgtgcaggaaagtacatcgccatggtgatgatgaaagccatcctcgttacacttctgagacgattccacgtgaagacattgcaaggacagtgtgttgagagcatacagaagatacacgacttgtccttgcacccagatgagactaaaaacatgctggaaatgatctttaccccaagaaactcagacaggtgtctggaacactagagaaggctggtcagtacctactctggagcatttctcatcagtagttcacatacaaatcatccatccttgccaatagtgtcatcctcacagtgaacactcagtggcccatggcattttataggcatacctcctatgggttgtcaccaagctaggtgctattggtcatctgctcctgttcacaccagagaaccaggctacaagagaaaaagcagaggccaagagtttgagggagaaatagtcggtgaagaaaccgtatccataaagacccgattccaccaaatgtgctttgagaaggataggccttcattaacaaaatgtatgtctggttccccagtagagctctactgcctcaacccaaggggatttttatgtctggggcagaaacactcaagttgattagaaagaccaggccaatgtcagggtacctggggccaaacccacctgctagtgtgaattaaagtactttaattttgttttctgtggaggtggaaaagcaacattcatagtctttggagaaatgcttagaaattcagcatttgacccttgctgtgaattaagcccaattaattcctgtttgtctacatatgatctgtctgtggcaaaagtttaatcagaggaaattctttcccagtctgtcgatttatgcctcagccacttgcctgtgctacaattcattgtgttacctgtagattcaggtaatacaaactatatataatcatcaagtaatacaaactaatttagtaatagcctgggttaagtattattagggccctgtgtctgctgtagaaaaaaaaattcacatgatgcacttcaaattcaaataaaaatccttttggcatgttcccatttttgcttagctcaattagtgtggctaaccaagagataactgtaaatgtgacattgatttgctcttactacagcttcagtgattgggggaggaaaagtcccaacccaatgggctcaaacttctaaggggtactcctctcatccccttatccttctccctcgacattttctccctctttcttcccatgaccccaaagccaagggcaacagatcagtaaagaacgtggtcagagtagaacccctgaagtattttttaatcctacctcaaaatttaacagttacctgagagatttaacattatctagttcattgaatcattgtatgtggtcatggataaattgcacaccttggaattcgctttctaaaggaaatcaaatgaatggaggaactttccaaacaccactttacttgtgttatatagccaatataactatctctactgaatgtcattgaaaaactaaaaaattaaacttatttacaaataggtaaatatttgtcattgaatccattgccatcccatttgactgttcttttcatcctactgtctagtaataagctgagtataagatgacagtgtaatctccctgaaagcaggagctactttctttcttttgtaatctatttccatccccatttccctgtcctgtctccctgtattcactcccaagctcagttctgaatagacattcctgctcagagatactcccaactgatgcagaaaccaaataaagaggtaggtattccaagaattcaagaatggacattagtaaagaataaaacatttatttgagcttggaattatttggatcatctatatggcctaaaaatatatggactatgcctgtgtacctgaatacgtatgtagtcaggtcaagacaatcatccaaataacttagacccctaaaagcaaggccaggatttgcaatttaatgtgtcccaattaattcacttgaaaattagtaacactctgtttacgttgcctctggctggagctgcatggtggaagaagcccaactttggatccatgtacttcacccatccaatactcttgggacatttatgtgtattttatctgtatatatgaagccaatgtctatgtctacacagtcaaagtgaaatgcatgtttgatatagctgtacatagatatctattttgcaggt

SEQ ID NO: 731836 - DNA, 3088 bp, Homo sapiens
  misc_feature (24)..(24): n is a, c, g, or t
  misc_feature (3057)..(3059): n is a, c, g, or t
  misc_feature (3071)..(3072): n is a, c, g, or t
  misc_feature (3078)..(3078): n is a, c, g, or t
aaacagtgtatcaacgcagagtgnccattacggccgggggagtttctggagggctgaacacgtggaggcaaacaggaaggtgaagaagaacttatcctatcaggacggaaggtcctgtgctcgggatcttccagacgtcgcgactctaaattgccccctctgaggtcaaggaacacaagatggttttggaaatgctgaacccgatacattataacatcaccagcatcgtgcctgaagccatgcctgctgccaccatgccagtcctgctcctcactggcctttttctcttggtgtggaattatgagggcacatcctcaataccaggtcctggctactgcatgggaattggacccctcatctcccacggcagattcctgtggatggggatcggcagtgcctgcaactactacaaccgggtatatggagaattcatgcgagtctggatctctggagaggaaacactcattatcagcaagtcctcaagtatgttccacataatgaagcacaatcattacagctctcgattcggcagcaaacttgggctgcagtgcatcggtatgcatgagaaaggcatcatatttaacaacaatccagagctctggaaaacaactcgacccttctttatgaaagctctgtcaggccccggccttgttcgtatggtcacagtctgtgctgaatccctcaaaacacatctggacaggttggaggaggtgaccaatgaatcgggctatgtggacgtgttgacccttctgcgtcgtgtcatgctggacacctctaacacgctcttcttgaggatccctttggacgaaagtgctatcgtggttaaaatccaaggttattttgatgcatggcaagctctcctcatcaaaccagacatcttctttaagatttcttggctatacaaaaagtatgagaagtctgtcaaggatttgaaagatgccatagaagttctgatagcagaaaaaagacgcaggatttccacagaagagaaactggaagaatgtatggactttgccactgagttgattttagcagagaaacgtggtgacctgacaagagagaatgtgaaccagtgcatattggaaatgctgatcgcagctcctgacaccatgtctgtctctttgttcttcatgctatttctcattgcaaagcaccctaatgttgaagaggcaataataaaggaaatccagactgttattggtgagagagacataaagattgatgatatacaaaaattaaaagtgatggaaaacttcatttatgagagcatgcggtaccagcctgtcgtggacttggtcatgcgcaaagccttagaagatgatgtaatcgatggctacccagtgaaaaaggggacaaacattatcctgaatattggaaggatgcacagactcgagtttttccccaaacccaatgaatttactcttgaaaattttgcaaagaatgttccttataggtactttcagccatttggctttgggccccgtggctgtgcaggaaagtacatcgccatggtgatgatgaaagccatcctcgttacacttctgagacgattccacgtgaagacattgcaaggacagtgtgttgagagcatacagaagatacacgacttgtccttgcacccagatgagactaaaaacatgctggaaatgatctttaccccaagaaactcagacaggtgtctggaacactagagaaggctggtcagtacctactctggagcatttctcatcagtagttcacatacaaatcatccatccttgccaatagtgtcatcctcacagtgaacactcagtggcccatggcattttataggcatacctcctatgggttgtcaccaagctaggtgctattggtcatctgctcctgttcacaccagagaaccaggctacaagagaaaaagcagaggccaagagtttgagggagaaatagtcggtgaagaaaccgtatccataaagacccgattccaccaaatgtgctttgagaaggataggccttcattaacaaaatgtatgtctggttccccagtagagctctactgcctcaacccaaggggatttttatgtctggggcagaaacactcaagttgattagaaagaccaggccaatgtcagggtacctggggccaaacccacctgctagtgtgaattaaagtactttaattttgttttctgtggaggtggaaaagcaacattcatagtctttggagaaatgcttagaaattcagcatttgacccttgctgtgaattaagcccaattaattcctgtttgtctacatatgatctgtctgtggcaaaagtttaatcagaggaaattctttcccagtctgtcgatttatgcctcagccacttgcctgtgctacaattcattgtgttacctgtagattcaggtaatacaaactatatataatcatcaagtaatacaaactaatttagtaatagcctgggttaagtattattagggccctgtgtctgctgtagaaaaaaaaattcacatgatgcacttcaaattcaaataaaaatccttttggcatgttcccatttttgcttagctcaattagtgtggctaaccaagagataactgtaaatgtgacattgatttgctcttactacagcttcagtgattgggggaggaaaagtcccaacccaatgggctcaaacttctaaggggtactcctctcatccccttatccttctccctcgacattttctccctctttcttcccatgaccccaaagccaagggcaacagatcagtaaagaacgtggtcagagtagaacccctgaagtattttttaatcctacctcaaaatttaacagttacctgagagatttaacattatctagttcattgaatcattgtatgtggtcatggataaattgcacaccttggaattcgctttctaaaggaaatcaaatgaatggaggaactttccaaacaccactttacttgtgttatatagccaatataactatctctactgaatgtcattgaaaaactaaaaaattaaacttatttacaaataggtaaaaaaaaaaaaaaaaacaaacacaaaaaaacnnntggggggcgccnngggccncggaaaaacc

SEQ ID NO: 731837 - DNA, 2541 bp, Homo sapiens
  misc_feature (24)..(24): n is a, c, g, or t
aaacagtgtatcaacgcagagtgnccattacggccgggggagtttctggagggctgaacacgtggaggcaaacaggaaggtgaagaagaacttatcctatcaggacggaaggtcctgtgctcgggatcttccagacgtcgcgactctaaattgccccctctgaggtcaaggaacacaagatggttttggaaatgctgaacccgatacattataacatcaccagcatcgtgcctgaagccatgcctgctgccaccatgccagtcctgctcctcactggcctttttctcttggtgtggaattatgagggcacatcctcaataccaggtcctggctactgcatgggaattggacccctcatctcccacggcagattcctgtggatggggatcggcagtgcctgcaactactacaaccgggtatatggagaattcatgcgagtctggatctctggagaggaaacactcattatcagcaagtcctcaagtatgttccacataatgaagcacaatcattacagctctcgattcggcagcaaacttgggctgcagtgcatcggtatgcatgagaaaggcatcatatttaacaacaatccagagctctggaaaacaactcgacccttctttatgaaagctctgtcaggccccggccttgttcgtatggtcacagtctgtgctgaatccctcaaaacacatctggacaggttggaggaggtgaccaatgaatcgggctatgtggacgtgttgacccttctgcgtcgtgtcatgctggacacctctaacacgctcttcttgaggatccctttggacgaaagtgctatcgtggttaaaatccaaggttattttgatgcatggcaagctctcctcatcaaaccagacatcttctttaagatttcttggctatacaaaaagtatgagaagtctgtcaaggatttgaaagatgccatagaagttctgatagcagaaaaaagacgcaggatttccacagaagagaaactggaagaatgtatggactttgccactgagttgattttagcagagaaacgtggtgacctgacaagagagaatgtgaaccagtgcatattggaaatgctgatcgcagctcctgacaccatgtctgtctctttgttcttcatgctatttctcattgcaaagcaccctaatgttgaagaggcaataataaaggaaatccagactgttattggtgagagagacataaagattgatgatatacaaaaattaaaagtgatggaaaacttcatttatgagagcatgcggtaccagcctgtcgtggacttggtcatgcgcaaagccttagaagatgatgtaatcgatggctacccagtgaaaaaggggacaaacattatcctgaatattggaaggatgcacagactcgagtttttccccaaacccaatgaatttactcttgaaaattttgcaaagaatgttccttataggtactttcagccatttggctttgggccccgtggctgtgcaggaaagtacatcgccatggtgatgatgaaagccatcctcgttacacttctgagacgattccacgtgaagacattgcaaggacagtgtgttgagagcatacagaagatacacgacttgtccttgcacccagatgagactaaaaacatgctggaaatgatctttaccccaagaaactcagacaggtgtctggaacactagagaaggctggtcagtacctactctggagcatttctcatcagtagttcacatacaaatcatccatccttgccaatagtgtcatcctcacagtgaacactcagtggcccatggcattttataggcatacctcctatgggttgtcaccaagctaggtgctattggtcatctgctcctgttcacaccagagaaccaggctacaagagaaaaagcagaggccaagagtttgagggagaaatagtcggtgaagaaaccgtatccataaagacccgattccaccaaatgtgctttgagaaggataggccttcattaacaaaatgtatgtctggttccccagtagagctctactgcctcaacccaaggggatttttatgtctggggcagaaacactcaagttgattagaaagaccaggccaatgtcagggtacctggggccaaacccacctgctagtgtgaattaaagtactttaattttgttttctgtggaggtggaaaagcaacattcatagtctttggagaaatgcttagaaattcagcatttgacccttgctgtgaattaagcccaattaattcctgtttgtctacatatgatctgtctgtggcaaaagtttaatcagaggaaattctttcccagtctgtcgatttatgcctcagccacttgcctgtgctacaattcattgtgttacctgtagattcaggtaatacaaactatatataatcatcaagtaatacaaactaatttagtaatagcctgggttaagtattattagggccctgtgtctgctgtagaaaaaaaaattcacatgatgcacttcaaattcaaataaaaatccttttggcatgttcccatttt

SEQ ID NO: 731838 - DNA, 2804 bp, Homo sapiens
  misc_feature (24)..(24): n is a, c, g, or t
aaacagtgtatcaacgcagagtgnccattacggccgggggagtttctggagggctgaacacgtggaggcaaacaggaaggtgaagaagaacttatcctatcaggacggaaggtcctgtgctcgggatcttccagacgtcgcgactctaaattgccccctctgaggtcaaggaacacaagatggttttggaaatgctgaacccgatacattataacatcaccagcatcgtgcctgaagccatgcctgctgccaccatgccagtcctgctcctcactggcctttttctcttggtgtggaattatgagggcacatcctcaataccaggtcctggctactgcatgggaattggacccctcatctcccacggcagattcctgtggatggggatcggcagtgcctgcaactactacaaccgggtatatggagaattcatgcgagtctggatctctggagaggaaacactcattatcagcaagtcctcaagtatgttccacataatgaagcacaatcattacagctctcgattcggcagcaaacttgggctgcagtgcatcggtatgcatgagaaaggcatcatatttaacaacaatccagagctctggaaaacaactcgacccttctttatgaaagaaagtgctatcgtggttaaaatccaaggttattttgatgcatggcaagctctcctcatcaaaccagacatcttctttaagatttcttggctatacaaaaagtatgagaagtctgtcaaggatttgaaagatgccatagaagttctgatagcagaaaaaagacgcaggatttccacagaagagaaactggaagaatgtatggactttgccactgagttgattttagcagagaaacgtggtgacctgacaagagagaatgtgaaccagtgcatattggaaatgctgatcgcagctcctgacaccatgtctgtctctttgttcttcatgctatttctcattgcaaagcaccctaatgttgaagaggcaataataaaggaaatccagactgttattggtgagagagacataaagattgatgatatacaaaaattaaaagtgatggaaaacttcatttatgagagcatgcggtaccagcctgtcgtggacttggtcatgcgcaaagccttagaagatgatgtaatcgatggctacccagtgaaaaaggggacaaacattatcctgaatattggaaggatgcacagactcgagtttttccccaaacccaatgaatttactcttgaaaattttgcaaagaatgttccttataggtactttcagccatttggctttgggccccgtggctgtgcaggaaagtacatcgccatggtgatgatgaaagccatcctcgttacacttctgagacgattccacgtgaagacattgcaaggacagtgtgttgagagcatacagaagatacacgacttgtccttgcacccagatgagactaaaaacatgctggaaatgatctttaccccaagaaactcagacaggtgtctggaacactagagaaggctggtcagtacctactctggagcatttctcatcagtagttcacatacaaatcatccatccttgccaatagtgtcatcctcacagtgaacactcagtggcccatggcattttataggcatacctcctatgggttgtcaccaagctaggtgctattggtcatctgctcctgttcacaccagagaaccaggctacaagagaaaaagcagaggccaagagtttgagggagaaatagtcggtgaagaaaccgtatccataaagacccgattccaccaaatgtgctttgagaaggataggccttcattaacaaaatgtatgtctggttccccagtagagctctactgcctcaacccaaggggatttttatgtctggggcagaaacactcaagttgattagaaagaccaggccaatgtcagggtacctggggccaaacccacctgctagtgtgaattaaagtactttaattttgttttctgtggaggtggaaaagcaacattcatagtctttggagaaatgcttagaaattcagcatttgacccttgctgtgaattaagcccaattaattcctgtttgtctacatatgatctgtctgtggcaaaagtttaatcagaggaaattctttcccagtctgtcgatttatgcctcagccacttgcctgtgctacaattcattgtgttacctgtagattcaggtaatacaaactatatataatcatcaagtaatacaaactaatttagtaatagcctgggttaagtattattagggccctgtgtctgctgtagaaaaaaaaattcacatgatgcacttcaaattcaaataaaaatccttttggcatgttcccatttttgcttagctcaattagtgtggctaaccaagagataactgtaaatgtgacattgatttgctcttactacagcttcagtgattgggggaggaaaagtcccaacccaatgggctcaaacttctaaggggtactcctctcatccccttatccttctccctcgacattttctccctctttcttcccatgaccccaaagccaagggcaacagatcagtaaagaacgtggtcagagtagaacccctgaagtattttttaatcctacctcaaaatttaacagttacctgagagatttaacattatctagttcattgaatcattgtatgtggtcatggataaattgcacaccttggaattcgctttctaaaggaaatcaaatgaatggaggaactttccaaacaccactttacttgtgttatatagccaatataactatctctactgaa

SEQ ID NO: 731839 - DNA, 3521 bp, Homo sapiens
  misc_feature (24)..(24): n is a, c, g, or t
aaacagtgtatcaacgcagagtgnccattacggccgggggagtttctggagggctgaacacgtggaggcaaacaggaaggtgaagaagaacttatcctatcaggacggaaggtcctgtgctcgggatcttccagacgtcgcgactctaaattgccccctctgaggtcaaggaacacaagatggttttggaaatgctgaacccgatacattataacatcaccagcatcgtgcctgaagccatgcctgctgccaccatgccagtcctgctcctcactggcctttttctcttggtgtggaattatgagggcacatcctcaataccaggtcctggctactgcatgggaattggacccctcatctcccacggcagattcctgtggatggggatcggcagtgcctgcaactactacaaccgggtatatggagaattcatgcgagtctggatctctggagaggaaacactcattatcagcaagtcctcaagtatgttccacataatgaagcacaatcattacagctctcgattcggcagcaaacttgggctgcagtgcatcggtatgcatgagaaaggcatcatatttaacaacaatccagagctctggaaaacaactcgacccttctttatgaaagaaagtgctatcgtggttaaaatccaaggttattttgatgcatggcaagctctcctcatcaaaccagacatcttctttaagatttcttggctatacaaaaagtatgagaagtctgtcaaggatttgaaagatgccatagaagttctgatagcagaaaaaagacgcaggatttccacagaagagaaactggaagaatgtatggactttgccactgagttgattttagcagagaaacgtggtgacctgacaagagagaatgtgaaccagtgcatattggaaatgctgatcgcagctcctgacaccatgtctgtctctttgttcttcatgctatttctcattgcaaagcaccctaatgttgaagaggcaataataaaggaaatccagactgttattggtgagagagacataaagattgatgatatacaaaaattaaaagtgatggaaaacttcatttatgagagcatgcggtaccagcctgtcgtggacttggtcatgcgcaaagccttagaagatgatgtaatcgatggctacccagtgaaaaaggggacaaacattatcctgaatattggaaggatgcacagactcgagtttttccccaaacccaatgaatttactcttgaaaattttgcaaagaatgttccttataggtactttcagccatttggctttgggccccgtggctgtgcaggaaagtacatcgccatggtgatgatgaaagccatcctcgttacacttctgagacgattccacgtgaagacattgcaaggacagtgtgttgagagcatacagaagatacacgacttgtccttgcacccagatgagactaaaaacatgctggaaatgatctttaccccaagaaactcagacaggtgtctggaacactagagaaggctggtcagtacctactctggagcatttctcatcagtagttcacatacaaatcatccatccttgccaatagtgtcatcctcacagtgaacactcagtggcccatggcattttataggcatacctcctatgggttgtcaccaagctaggtgctattggtcatctgctcctgttcacaccagagaaccaggctacaagagaaaaagcagaggccaagagtttgagggagaaatagtcggtgaagaaaccgtatccataaagacccgattccaccaaatgtgctttgagaaggataggccttcattaacaaaatgtatgtctggttccccagtagagctctactgcctcaacccaaggggatttttatgtctggggcagaaacactcaagttgattagaaagaccaggccaatgtcagggtacctggggccaaacccacctgctagtgtgaattaaagtactttaattttgttttctgtggaggtggaaaagcaacattcatagtctttggagaaatgcttagaaattcagcatttgacccttgctgtgaattaagcccaattaattcctgtttgtctacatatgatctgtctgtggcaaaagtttaatcagaggaaattctttcccagtctgtcgatttatgcctcagccacttgcctgtgctacaattcattgtgttacctgtagattcaggtaatacaaactatatataatcatcaagtaatacaaactaatttagtaatagcctgggttaagtattattagggccctgtgtctgctgtagaaaaaaaaattcacatgatgcacttcaaattcaaataaaaatccttttggcatgttcccatttttgcttagctcaattagtgtggctaaccaagagataactgtaaatgtgacattgatttgctcttactacagcttcagtgattgggggaggaaaagtcccaacccaatgggctcaaacttctaaggggtactcctctcatccccttatccttctccctcgacattttctccctctttcttcccatgaccccaaagccaagggcaacagatcagtaaagaacgtggtcagagtagaacccctgaagtattttttaatcctacctcaaaatttaacagttacctgagagatttaacattatctagttcattgaatcattgtatgtggtcatggataaattgcacaccttggaattcgctttctaaaggaaatcaaatgaatggaggaactttccaaacaccactttacttgtgttatatagccaatataactatctctactgaatgtcattgaaaaactaaaaaattaaacttatttacaaataggtaaatatttgtcattgaatccattgccatcccatttgactgttcttttcatcctactgtctagtaataagctgagtataagatgacagtgtaatctccctgaaagcaggagctactttctttcttttgtaatctatttccatccccatttccctgtcctgtctccctgtattcactcccaagctcagttctgaatagacattcctgctcagagatactcccaactgatgcagaaaccaaataaagaggtaggtattccaagaattcaagaatggacattagtaaagaataaaacatttatttgagcttggaattatttggatcatctatatggcctaaaaatatatggactatgcctgtgtacctgaatacgtatgtagtcaggtcaagacaatcatccaaataacttagacccctaaaagcaaggccaggatttgcaatttaatgtgtcccaattaattcacttgaaaattagtaacactctgtttacgttgcctctggctggagctgcatggtggaagaagcccaactttggatccatgtacttcacccatccaatactcttgggacatttatgtgtattttatctgtatatatgaagccaatgtctatgtctacacagtcaaagtgaaatgcatgtttgatatagctgtacatagatatctattttgcaggt

SEQ ID NO: 731840 - DNA, 2911 bp, Homo sapiens
  misc_feature (24)..(24): n is a, c, g, or t
  misc_feature (2880)..(2882): n is a, c, g, or t
  misc_feature (2894)..(2895): n is a, c, g, or t
  misc_feature (2901)..(2901): n is a, c, g, or t
aaacagtgtatcaacgcagagtgnccattacggccgggggagtttctggagggctgaacacgtggaggcaaacaggaaggtgaagaagaacttatcctatcaggacggaaggtcctgtgctcgggatcttccagacgtcgcgactctaaattgccccctctgaggtcaaggaacacaagatggttttggaaatgctgaacccgatacattataacatcaccagcatcgtgcctgaagccatgcctgctgccaccatgccagtcctgctcctcactggcctttttctcttggtgtggaattatgagggcacatcctcaataccaggtcctggctactgcatgggaattggacccctcatctcccacggcagattcctgtggatggggatcggcagtgcctgcaactactacaaccgggtatatggagaattcatgcgagtctggatctctggagaggaaacactcattatcagcaagtcctcaagtatgttccacataatgaagcacaatcattacagctctcgattcggcagcaaacttgggctgcagtgcatcggtatgcatgagaaaggcatcatatttaacaacaatccagagctctggaaaacaactcgacccttctttatgaaagaaagtgctatcgtggttaaaatccaaggttattttgatgcatggcaagctctcctcatcaaaccagacatcttctttaagatttcttggctatacaaaaagtatgagaagtctgtcaaggatttgaaagatgccatagaagttctgatagcagaaaaaagacgcaggatttccacagaagagaaactggaagaatgtatggactttgccactgagttgattttagcagagaaacgtggtgacctgacaagagagaatgtgaaccagtgcatattggaaatgctgatcgcagctcctgacaccatgtctgtctctttgttcttcatgctatttctcattgcaaagcaccctaatgttgaagaggcaataataaaggaaatccagactgttattggtgagagagacataaagattgatgatatacaaaaattaaaagtgatggaaaacttcatttatgagagcatgcggtaccagcctgtcgtggacttggtcatgcgcaaagccttagaagatgatgtaatcgatggctacccagtgaaaaaggggacaaacattatcctgaatattggaaggatgcacagactcgagtttttccccaaacccaatgaatttactcttgaaaattttgcaaagaatgttccttataggtactttcagccatttggctttgggccccgtggctgtgcaggaaagtacatcgccatggtgatgatgaaagccatcctcgttacacttctgagacgattccacgtgaagacattgcaaggacagtgtgttgagagcatacagaagatacacgacttgtccttgcacccagatgagactaaaaacatgctggaaatgatctttaccccaagaaactcagacaggtgtctggaacactagagaaggctggtcagtacctactctggagcatttctcatcagtagttcacatacaaatcatccatccttgccaatagtgtcatcctcacagtgaacactcagtggcccatggcattttataggcatacctcctatgggttgtcaccaagctaggtgctattggtcatctgctcctgttcacaccagagaaccaggctacaagagaaaaagcagaggccaagagtttgagggagaaatagtcggtgaagaaaccgtatccataaagacccgattccaccaaatgtgctttgagaaggataggccttcattaacaaaatgtatgtctggttccccagtagagctctactgcctcaacccaaggggatttttatgtctggggcagaaacactcaagttgattagaaagaccaggccaatgtcagggtacctggggccaaacccacctgctagtgtgaattaaagtactttaattttgttttctgtggaggtggaaaagcaacattcatagtctttggagaaatgcttagaaattcagcatttgacccttgctgtgaattaagcccaattaattcctgtttgtctacatatgatctgtctgtggcaaaagtttaatcagaggaaattctttcccagtctgtcgatttatgcctcagccacttgcctgtgctacaattcattgtgttacctgtagattcaggtaatacaaactatatataatcatcaagtaatacaaactaatttagtaatagcctgggttaagtattattagggccctgtgtctgctgtagaaaaaaaaattcacatgatgcacttcaaattcaaataaaaatccttttggcatgttcccatttttgcttagctcaattagtgtggctaaccaagagataactgtaaatgtgacattgatttgctcttactacagcttcagtgattgggggaggaaaagtcccaacccaatgggctcaaacttctaaggggtactcctctcatccccttatccttctccctcgacattttctccctctttcttcccatgaccccaaagccaagggcaacagatcagtaaagaacgtggtcagagtagaacccctgaagtattttttaatcctacctcaaaatttaacagttacctgagagatttaacattatctagttcattgaatcattgtatgtggtcatggataaattgcacaccttggaattcgctttctaaaggaaatcaaatgaatggaggaactttccaaacaccactttacttgtgttatatagccaatataactatctctactgaatgtcattgaaaaactaaaaaattaaacttatttacaaataggtaaaaaaaaaaaaaaaaacaaacacaaaaaaacnnntggggggcgccnngggccncggaaaaacc

SEQ ID NO: 731841 - DNA, 2844 bp, Homo sapiens
  misc_feature (24)..(24): n is a, c, g, or t
aaacagtgtatcaacgcagagtgnccattacggccgggggagtttctggagggctgaacacgtggaggcaaacaggaaggtgaagaagaacttatcctatcaggacggaaggtcctgtgctcgggatcttccagacgtcgcgactctaaattgccccctctgaggtcaaggaacacaagatggttttggaaatgctgaacccgatacattataacatcaccagcatcgtgcctgaagccatgcctgctgccaccatgccagtcctgctcctcactggcctttttctcttggtgtggaattatgagggcacatcctcaataccaggtcctggctactgcatgggaattggacccctcatctcccacggcagattcctgtggatggggatcggcagtgcctgcaactactacaaccgggtatatggagaattcatgcgagtctggatctctggagaggaaacactcattatcagcaagtcctcaagtatgttccacataatgaagcacaatcattacagctctcgattcggcagcaaacttgggctgcagtgcatcggtatgcatgagaaaggcatcatatttaacaacaatccagagctctggaaaacaactcgacccttctttatgaaagaaagtgctatcgtggttaaaatccaaggttattttgatgcatggcaagctctcctcatcaaaccagacatcttctttaagatttcttggctatacaaaaagtatgagaagtctgtcaaggatttgaaagatgccatagaagttctgatagcagaaaaaagacgcaggatttccacagaagagaaactggaagaatgtatggactttgccactgagttgattttagcagagaaacgtggtgacctgacaagagagaatgtgaaccagtgcatattggaaatgctgatcgcagctcctgacaccatgtctgtctctttgttcttcatgctatttctcattgcaaagcaccctaatgttgaagaggcaataataaaggaaatccagactgttattggtgagagagacataaagattgatgatatacaaaaattaaaagtgatggaaaacttcatttatgagagcatgcggtaccagcctgtcgtggacttggtcatgcgcaaagccttagaagatgatgtaatcgatggctacccagtgaaaaaggggacaaacattatcctgaatattggaaggatgcacagactcgagtttttccccaaacccaatgaatttactcttgaaaattttgcaaagaatgttccttataggtactttcagccatttggctttgggccccgtggctgtgcaggaaagtacatcgccatggtgatgatgaaagccatcctcgttacacttctgagacgattccacgtgaagacattgcaaggacagtgtgttgagagcatacagaagatacacgacttgtccttgcacccagatgagactaaaaacatgctggaaatgatctttaccccaagaaactcagacaggtgtctggaacactagagaaggctggtcagtacctactctggagcatttctcatcagtagttcacatacaaatcatccatccttgccaatagtgtcatcctcacagtgaacactcagtggcccatggcattttataggcatacctcctatgggttgtcaccaagctaggtgctattggtcatctgctcctgttcacaccagagaaccaggctacaagagaaaaagcagaggccaagagtttgagggagaaatagtcggtgaagaaaccgtatccataaagacccgattccaccaaatgtgctttgagaaggataggccttcattaacaaaatgtatgtctggttccccagtagagctctactgcctcaacccaaggggatttttatgtctggggcagaaacactcaagttgattagaaagaccaggccaatgtcagggtacctggggccaaacccacctgctagtgtgaattaaagtactttaattttgttttctgtggaggtggaaaagcaacattcatagtctttggagaaatgcttagaaattcagcatttgacccttgctgtgaattaagcccaattaattcctgtttgtctacatatgatctgtctgtggcaaaagtttaatcagaggaaattctttcccagtctgtcgatttatgcctcagccacttgcctgtgctacaattcattgtgttacctgtagattcaggtaatacaaactatatataatcatcaagtaatacaaactaatttagtaatagcctgggttaagtattattagggccctgtgtctgctgtagaaaaaaaaattcacatgatgcacttcaaattcaaataaaaatccttttggcatgttcccatttttgcttagctcaattagtgtggctaaccaagagataactgtaaatgtgacattgatttgctcttactacagcttcagtgattgggggaggaaaagtcccaacccaatgggctcaaacttctaaggggtactcctctcatccccttatccttctccctcgacattttctccctctttcttcccatgaccccaaagccaagggcaacagatcagtaaagaacgtggtcagagtagaacccctgaagtattttttaatcctacctcaaaatttaacagttacctgagagatttaacattatctagttcattgaatcattgtatgtggtcatggataaattgcacaccttggaattcgctttctaaaggaaatcaaatgaatggaggaactttccaaacaccactttacttgtgttatatagccaatataactatctctactgaatgtcattgaaaaactaaaaaattaaacttatttacaaata

SEQ ID NO: 731842 - DNA, 2711 bp, Homo sapiens
  misc_feature (24)..(24): n is a, c, g, or t
aaacagtgtatcaacgcagagtgnccattacggccgggggagtttctggagggctgaacacgtggaggcaaacaggaaggtgaagaagaacttatcctatcaggacggaaggtcctgtgctcgggatcttccagacgtcgcgactctaaattgccccctctgaggtcaaggaacacaagatggttttggaaatgctgaacccgatacattataacatcaccagcatcgtgcctgaagccatgcctgctgccaccatgccagtcctgctcctcactggcctttttctcttggtgtggaattatgagggcacatcctcaataccaggtcctggctactgcatgggaattggacccctcatctcccacggcagattcctgtggatggggatcggcagtgcctgcaactactacaaccgggtatatggagaattcatgcgagtctggatctctggagaggaaacactcattatcagcaagtcctcaagtatgttccacataatgaagcacaatcattacagctctcgattcggcagcaaacttgggctgcagtgcatcggtatgcatgagaaaggcatcatatttaacaacaatccagagctctggaaaacaactcgacccttctttatgaaagaaagtgctatcgtggttaaaatccaaggttattttgatgcatggcaagctctcctcatcaaaccagacatcttctttaagatttcttggctatacaaaaagtatgagaagtctgtcaaggatttgaaagatgccatagaagttctgatagcagaaaaaagacgcaggatttccacagaagagaaactggaagaatgtatggactttgccactgagttgattttagcagagaaacgtggtgacctgacaagagagaatgtgaaccagtgcatattggaaatgctgatcgcagctcctgacaccatgtctgtctctttgttcttcatgctatttctcattgcaaagcaccctaatgttgaagaggcaataataaaggaaatccagactgttattggtgagagagacataaagattgatgatatacaaaaattaaaagtgatggaaaacttcatttatgagagcatgcggtaccagcctgtcgtggacttggtcatgcgcaaagccttagaagatgatgtaatcgatggctacccagtgaaaaaggggacaaacattatcctgaatattggaaggatgcacagactcgagtttttccccaaacccaatgaatttactcttgaaaattttgcaaagaatgttccttataggtactttcagccatttggctttgggccccgtggctgtgcaggaaagtacatcgccatggtgatgatgaaagccatcctcgttacacttctgagacgattccacgtgaagacattgcaaggacagtgtgttgagagcatacagaagatacacgacttgtccttgcacccagatgagactaaaaacatgctggaaatgatctttaccccaagaaactcagacaggtgtctggaacactagagaaggctggtcagtacctactctggagcatttctcatcagtagttcacatacaaatcatccatccttgccaatagtgtcatcctcacagtgaacactcagtggcccatggcattttataggcatacctcctatgggttgtcaccaagctaggtgctattggtcatctgctcctgttcacaccagagaaccaggctacaagagaaaaagcagaggccaagagtttgagggagaaatagtcggtgaagaaaccgtatccataaagacccgattccaccaaatgtgctttgagaaggataggccttcattaacaaaatgtatgtctggttccccagtagagctctactgcctcaacccaaggggatttttatgtctggggcagaaacactcaagttgattagaaagaccaggccaatgtcagggtacctggggccaaacccacctgctagtgtgaattaaagtactttaattttgttttctgtggaggtggaaaagcaacattcatagtctttggagaaatgcttagaaattcagcatttgacccttgctgtgaattaagcccaattaattcctgtttgtctacatatgatctgtctgtggcaaaagtttaatcagaggaaattctttcccagtctgtcgatttatgcctcagccacttgcctgtgctacaattcattgtgttacctgtagattcaggtaatacaaactatatataatcatcaagtaatacaaactaatttagtaatagcctgggttaagtattattagggccctgtgtctgctgtagaaaaaaaaattcacatgatgcacttcaaattcaaataaaaatccttttggcatgttcccatttttgcttagctcaattagtgtggctaaccaagagataactgtaaatgtgacattgatttgctcttactacagcttcagtgattgggggaggaaaagtcccaacccaatgggctcaaacttctaaggggtactcctctcatccccttatccttctccctcgacattttctccctctttcttcccatgaccccaaagccaagggcaacagatcagtaaagaacgtggtcagagtagaacccctgaagtattttttaatcctacctcaaaatttaacagttacctgagagatttaacattatctagttcattgaatcattgtatgtggtcatggataaattgcacaccttgg

SEQ ID NO: 731843 - DNA, 2364 bp, Homo sapiens
  misc_feature (24)..(24): n is a, c, g, or t
aaacagtgtatcaacgcagagtgnccattacggccgggggagtttctggagggctgaacacgtggaggcaaacaggaaggtgaagaagaacttatcctatcaggacggaaggtcctgtgctcgggatcttccagacgtcgcgactctaaattgccccctctgaggtcaaggaacacaagatggttttggaaatgctgaacccgatacattataacatcaccagcatcgtgcctgaagccatgcctgctgccaccatgccagtcctgctcctcactggcctttttctcttggtgtggaattatgagggcacatcctcaataccaggtcctggctactgcatgggaattggacccctcatctcccacggcagattcctgtggatggggatcggcagtgcctgcaactactacaaccgggtatatggagaattcatgcgagtctggatctctggagaggaaacactcattatcagcaagtcctcaagtatgttccacataatgaagcacaatcattacagctctcgattcggcagcaaacttgggctgcagtgcatcggtatgcatgagaaaggcatcatatttaacaacaatccagagctctggaaaacaactcgacccttctttatgaaagaaagtgctatcgtggttaaaatccaaggttattttgatgcatggcaagctctcctcatcaaaccagacatcttctttaagatttcttggctatacaaaaagtatgagaagtctgtcaaggatttgaaagatgccatagaagttctgatagcagaaaaaagacgcaggatttccacagaagagaaactggaagaatgtatggactttgccactgagttgattttagcagagaaacgtggtgacctgacaagagagaatgtgaaccagtgcatattggaaatgctgatcgcagctcctgacaccatgtctgtctctttgttcttcatgctatttctcattgcaaagcaccctaatgttgaagaggcaataataaaggaaatccagactgttattggtgagagagacataaagattgatgatatacaaaaattaaaagtgatggaaaacttcatttatgagagcatgcggtaccagcctgtcgtggacttggtcatgcgcaaagccttagaagatgatgtaatcgatggctacccagtgaaaaaggggacaaacattatcctgaatattggaaggatgcacagactcgagtttttccccaaacccaatgaatttactcttgaaaattttgcaaagaatgttccttataggtactttcagccatttggctttgggccccgtggctgtgcaggaaagtacatcgccatggtgatgatgaaagccatcctcgttacacttctgagacgattccacgtgaagacattgcaaggacagtgtgttgagagcatacagaagatacacgacttgtccttgcacccagatgagactaaaaacatgctggaaatgatctttaccccaagaaactcagacaggtgtctggaacactagagaaggctggtcagtacctactctggagcatttctcatcagtagttcacatacaaatcatccatccttgccaatagtgtcatcctcacagtgaacactcagtggcccatggcattttataggcatacctcctatgggttgtcaccaagctaggtgctattggtcatctgctcctgttcacaccagagaaccaggctacaagagaaaaagcagaggccaagagtttgagggagaaatagtcggtgaagaaaccgtatccataaagacccgattccaccaaatgtgctttgagaaggataggccttcattaacaaaatgtatgtctggttccccagtagagctctactgcctcaacccaaggggatttttatgtctggggcagaaacactcaagttgattagaaagaccaggccaatgtcagggtacctggggccaaacccacctgctagtgtgaattaaagtactttaattttgttttctgtggaggtggaaaagcaacattcatagtctttggagaaatgcttagaaattcagcatttgacccttgctgtgaattaagcccaattaattcctgtttgtctacatatgatctgtctgtggcaaaagtttaatcagaggaaattctttcccagtctgtcgatttatgcctcagccacttgcctgtgctacaattcattgtgttacctgtagattcaggtaatacaaactatatataatcatcaagtaatacaaactaatttagtaatagcctgggttaagtattattagggccctgtgtctgctgtagaaaaaaaaattcacatgatgcacttcaaattcaaataaaaatccttttggcatgttcccatttt

SEQ ID NO: 731844 - DNA, 1062 bp, Homo sapiens
  misc_feature (24)..(24): n is a, c, g, or t
aaacagtgtatcaacgcagagtgnccattacggccgggggagtttctggagggctgaacacgtggaggcaaacaggaaggtgaagaagaacttatcctatcaggacggaaggtcctgtgctcgggatcttccagacgtcgcgactctaaattgccccctctgaggtcaaggaacacaagatggttttggaaatgctgaacccgatacattataacatcaccagcatcgtgcctgaagccatgcctgctgccaccatgccagtcctgctcctcactggcctttttctcttggtgtggaattatgagggcacatcctcaataccaggtcctggctactgcatgggaattggacccctcatctcccacggcagattcctgtggatggggatcggcagtgcctgcaactactacaaccgggtatatggagaattcatgcgagtctggatctctggagaggaaacactcattatcagcaagtcctcaagtatgttccacataatgaagcacaatcattacagctctcgattcggcagcaaacttgggctgcagtgcatcggtatgcatgagaaaggcatcatatttaacaacaatccagagctctggaaaacaactcgacccttctttatgaaagaaagtgctatcgtggttaaaatccaaggttattttgatgcatggcaagctctcctcatcaaaccagacatcttctttaagatttcttggctatacaaaaagtatgagaagtctgtcaaggatttgaaagatgccatagaagttctgatagcagaaaaaagacgcaggatttccacagaagagaaactggaagaatgtatggactttgccactgagttgattttagcagagaaacgtggtgacctgacaagagagaatgtgaaccagtgcatattggaaatgctgatcgcagctcctgacaccatgtctgtctctttgttcttcatgctatttctcattgcaaagcaccctaatgttgaagaggcaataataaaggaaatccagactgttattggtaagaatttatcaaataaataatacatcttaaaaacaa

SEQ ID NO: 731845 - DNA, 1168 bp, Homo sapiens
  misc_feature (1130)..(1130): n is a, c, g, or t
  misc_feature (1165)..(1165): n is a, c, g, or t
aggaccccaattaggctggcgcacagtatgtacgctacccgatgatagctctactgcctcaacccaaggggatttttatgtctggggcagaaacactcaagttgattagaaagaccaggccaatgtcagggtacctggggccaaacccacctgctagtgtgaattaaagtactttaattttgttttctgtggaggtggaaaagcaacattcatagtctttggagaaatgcttagaaattcagcatttgacccttgctgtgaattaagcccaattaattcctgtttgtctacatatgatctgtctgtggcaaaagtttaatcagaggaaattctttcccagtctgtcgatttatgcctcagccacttgcctgtgctacaattcattgtgttacctgtagattcaggtaatacaaactatatataatcatcaagtaatacaaactaatttagtaatagcctgggttaagtattattagggccctgtgtctgctgtagaaaaaaaaattcacatgatgcacttcaaattcaaataaaaatccttttggcatgttcccatttttgcttagctcaattagtgtggctaaccaagagataactgtaaatgtgacattgatttgctcttactacagcttcagtgattgggggaggaaaagtcccaacccaatgggctcaaacttctaaggggtactcctctcatccccttatccttctccctcgacattttctccctctttcttcccatgaccccaaagccaagggcaacagatcagtaaagaacgtggtcagagtagaacccctgaagtattttttaatcctacctcaaaatttaacagttacctgagagatttaacattatctagttcattgaatcattgtatgtggtcatggataaattgcacaccttggaattcgctttctaaaggaaatcaaatgaatggaggaactttccaaacaccactttacttgtgttatatagccaatataactatctctactgaatgtcattgaaaaactaaaaaattaaacttatttacaaataaaaaaaaaaaaaaaaaaaaaaaaaaaaaaaaaaaaaaaaaaaataaaaaaaaaaaaaaaaaaaaaaaaaaaaaaaaaaaaaaaaaaaaaanaaaaaaaaaaaaaaaaaaaaaaaaaaaaaaaaaanaag

SEQ ID NO: 731846 - DNA, 1716 bp, Homo sapiens
aggaccccaattaggctggcgcacagtatgtacgctacccgatgatagctctactgcctcaacccaaggggatttttatgtctggggcagaaacactcaagttgattagaaagaccaggccaatgtcagggtacctggggccaaacccacctgctagtgtgaattaaagtactttaattttgttttctgtggaggtggaaaagcaacattcatagtctttggagaaatgcttagaaattcagcatttgacccttgctgtgaattaagcccaattaattcctgtttgtctacatatgatctgtctgtggcaaaagtttaatcagaggaaattctttcccagtctgtcgatttatgcctcagccacttgcctgtgctacaattcattgtgttacctgtagattcaggtaatacaaactatatataatcatcaagtaatacaaactaatttagtaatagcctgggttaagtattattagggccctgtgtctgctgtagaaaaaaaaattcacatgatgcacttcaaattcaaataaaaatccttttggcatgttcccatttttgcttagctcaattagtgtggctaaccaagagataactgtaaatgtgacattgatttgctcttactacagcttcagtgattgggggaggaaaagtcccaacccaatgggctcaaacttctaaggggtactcctctcatccccttatccttctccctcgacattttctccctctttcttcccatgaccccaaagccaagggcaacagatcagtaaagaacgtggtcagagtagaacccctgaagtattttttaatcctacctcaaaatttaacagttacctgagagatttaacattatctagttcattgaatcattgtatgtggtcatggataaattgcacaccttggaattcgctttctaaaggaaatcaaatgaatggaggaactttccaaacaccactttacttgtgttatatagccaatataactatctctactgaatgtcattgaaaaactaaaaaattaaacttatttacaaataggtaaatatttgtcattgaatccattgccatcccatttgactgttcttttcatcctactgtctagtaataagctgagtataagatgacagtgtaatctccctgaaagcaggagctactttctttcttttgtaatctatttccatccccatttccctgtcctgtctccctgtattcactcccaagctcagttctgaatagacattcctgctcagagatactcccaactgatgcagaaaccaaataaagaggtaggtattccaagaattcaagaatggacattagtaaagaataaaacatttatttgagcttggaattatttggatcatctatatggcctaaaaatatatggactatgcctgtgtacctgaatacgtatgtagtcaggtcaagacaatcatccaaataacttagacccctaaaagcaaggccaggatttgcaatttaatgtgtcccaattaattcacttgaaaattagtaacactctgtttacgttgcctctggctggagctgcatggtggaagaagcccaactttggatccatgtacttcacccatccaatactcttgggacatttatgtgtattttatctgtatatatgaagccaatgtctatgtctacacagtcaaagtgaaatgcatgtttgatatagctgtacatagatatctattttgcaggt

SEQ ID NO: 731847 - DNA, 1106 bp, Homo sapiens
  misc_feature (1075)..(1077): n is a, c, g, or t
  misc_feature (1089)..(1090): n is a, c, g, or t
  misc_feature (1096)..(1096): n is a, c, g, or t
aggaccccaattaggctggcgcacagtatgtacgctacccgatgatagctctactgcctcaacccaaggggatttttatgtctggggcagaaacactcaagttgattagaaagaccaggccaatgtcagggtacctggggccaaacccacctgctagtgtgaattaaagtactttaattttgttttctgtggaggtggaaaagcaacattcatagtctttggagaaatgcttagaaattcagcatttgacccttgctgtgaattaagcccaattaattcctgtttgtctacatatgatctgtctgtggcaaaagtttaatcagaggaaattctttcccagtctgtcgatttatgcctcagccacttgcctgtgctacaattcattgtgttacctgtagattcaggtaatacaaactatatataatcatcaagtaatacaaactaatttagtaatagcctgggttaagtattattagggccctgtgtctgctgtagaaaaaaaaattcacatgatgcacttcaaattcaaataaaaatccttttggcatgttcccatttttgcttagctcaattagtgtggctaaccaagagataactgtaaatgtgacattgatttgctcttactacagcttcagtgattgggggaggaaaagtcccaacccaatgggctcaaacttctaaggggtactcctctcatccccttatccttctccctcgacattttctccctctttcttcccatgaccccaaagccaagggcaacagatcagtaaagaacgtggtcagagtagaacccctgaagtattttttaatcctacctcaaaatttaacagttacctgagagatttaacattatctagttcattgaatcattgtatgtggtcatggataaattgcacaccttggaattcgctttctaaaggaaatcaaatgaatggaggaactttccaaacaccactttacttgtgttatatagccaatataactatctctactgaatgtcattgaaaaactaaaaaattaaacttatttacaaataggtaaaaaaaaaaaaaaaaacaaacacaaaaaaacnnntggggggcgccnngggccncggaaaaacc

SEQ ID NO: 731848 - DNA, 1039 bp, Homo sapiens; identical to SEQ ID NO: 307433

SEQ ID NO: 731849 - DNA, 1384 bp, Homo sapiens
aggaccccaattaggctggcgcacagtatgtacgctacccgatgatagctctactgcctcaacccaaggggatttttatgtctggggcagaaacactcaagttgattagaaagaccaggccaatgtcagggtacctggggccaaacccacctgctagtgtgaattaaagtactttaattttgttttctgtggaggtggaaaagcaacattcatagtctttggagaaatgcttagaaattcagcatttgacccttgctgtgaattaagcccaattaattcctgtttgtctacatatgatctgtctgtggcaaaagtttaatcagaggaaattctttcccagtctgtcgatttatgcctcagccacttgcctgtgctacaattcattgtgttacctgtagattcaggtaatacaaactatatataatcatcaagtaatacaaactaatttagtaatagcctgggttaagtattattagggccctgtgtctgctgtagaaaaaaaaattcacatgatgcacttcaaattcaaataaaaatccttttggcatgttcccatttttgcttagctcaattagtgtggctaaccaagagataactgtaaatgtgacattgatttgctcttactacagcttcagtgattgggggaggaaaagtcccaacccaatgggctcaaacttctaaggggtactcctctcatccccttatccttctccctcgacattttctccctctttcttcccatgaccccaaagccaagggcaacagatcagtaaagaacgtggtcagagtagaacccctgaagtattttttaatcctacctcaaaatttaacagttacctgagagatttaacattatctagttcattgaatcattgtatgtggtcatggataaattgcacaccttggaattcgctttctaaaggaaatcaaatgaatggaggaactttccaaacaccactttacttgtgttatatagccaatataactatctctactgaagcggaatacagcacattaagtcaagctaggtgctattggtcatctgctcctgttcacaccagagaaccaggctacaagagaaaaagcagaggccaagagtttgagggagaaatagtcggtgaagaaaccgtatccataaagacccgattccaccaaatgtgctttgagaaggataggccttcatcaacaaaatgtatgtctggttccccagtagagctatactgcctcaacccaaggggatattttaatgtctggggcagaaacactcaagttgattagaaagaccagccaatgtcagtgtatctgggtccttaacccacttggctagtgtgaattatagtacaatgatatttttttttgtggagataggtcagaacatagaggg

SEQ ID NO: 731850 - DNA, 999 bp, Homo sapiens
aggaccccaattaggctggcgcacagtatgtacgctacccgatgatagctctactgcctcaacccaaggggatttttatgtctggggcagaaacactcaagttgattagaaagaccaggccaatgtcagggtacctggggccaaacccacctgctagtgtgaattaaagtactttaattttgttttctgtggaggtggaaaagcaacattcatagtctttggagaaatgcttagaaattcagcatttgacccttgctgtgaattaagcccaattaattcctgtttgtctacatatgatctgtctgtggcaaaagtttaatcagaggaaattctttcccagtctgtcgatttatgcctcagccacttgcctgtgctacaattcattgtgttacctgtagattcaggtaatacaaactatatataatcatcaagtaatacaaactaatttagtaatagcctgggttaagtattattagggccctgtgtctgctgtagaaaaaaaaattcacatgatgcacttcaaattcaaataaaaatccttttggcatgttcccatttttgcttagctcaattagtgtggctaaccaagagataactgtaaatgtgacattgatttgctcttactacagcttcagtgattgggggaggaaaagtcccaacccaatgggctcaaacttctaaggggtactcctctcatccccttatccttctccctcgacattttctccctctttcttcccatgaccccaaagccaagggcaacagatcagtaaagaacgtggtcagagtagaacccctgaagtattttttaatcctacctcaaaatttaacagttacctgagagatttaacattatctagttcattgaatcattgtatgtggtcatggataaattgcacaccttggaattcgctttctaaaggaaatcaaatgaatggaggaactttccaaacaccactttacttgtgttatatagccaatataactatctctactgaa

SEQ ID NO: 731851 - DNA, 906 bp, Homo sapiens
aggaccccaattaggctggcgcacagtatgtacgctacccgatgatagctctactgcctcaacccaaggggatttttatgtctggggcagaaacactcaagttgattagaaagaccaggccaatgtcagggtacctggggccaaacccacctgctagtgtgaattaaagtactttaattttgttttctgtggaggtggaaaagcaacattcatagtctttggagaaatgcttagaaattcagcatttgacccttgctgtgaattaagcccaattaattcctgtttgtctacatatgatctgtctgtggcaaaagtttaatcagaggaaattctttcccagtctgtcgatttatgcctcagccacttgcctgtgctacaattcattgtgttacctgtagattcaggtaatacaaactatatataatcatcaagtaatacaaactaatttagtaatagcctgggttaagtattattagggccctgtgtctgctgtagaaaaaaaaattcacatgatgcacttcaaattcaaataaaaatccttttggcatgttcccatttttgcttagctcaattagtgtggctaaccaagagataactgtaaatgtgacattgatttgctcttactacagcttcagtgattgggggaggaaaagtcccaacccaatgggctcaaacttctaaggggtactcctctcatccccttatccttctccctcgacattttctccctctttcttcccatgaccccaaagccaagggcaacagatcagtaaagaacgtggtcagagtagaacccctgaagtattttttaatcctacctcaaaatttaacagttacctgagagatttaacattatctagttcattgaatcattgtatgtggtcatggataaattgcacaccttgg

SEQ ID NO: 731852 - DNA, 1053 bp, Homo sapiens
  misc_feature (1022)..(1024): n is a, c, g, or t
  misc_feature (1036)..(1037): n is a, c, g, or t
  misc_feature (1043)..(1043): n is a, c, g, or t
aggaccccaattaggctggcgcacagtatgtacgctacccgatgatagctctactgcctcaacccaaggggatttttatgtctggggcagaaacactcaagttgattagaaagaccaggccaatgtcagggtacctggggccaaacccacctgctagtgtgaattaaagtactttaattttgttttctgtggaggtggaaaagcaacattcatagtctttggagaaatgcttagaaattcagcatttgacccttgctgtgaattaagcccaattaattcctgtttgtctacatatgatctgtctgtggcaaaagtttaatcagaggaaattctttcccagtctgtcgatttatgcctcagccacttgcctgtgctacaattcattgtgttacctgtagattcaggtaatacaaactatatataatcatcaagtaatacaaactaatttagtaatagcctgggttaagtattattagggccctgtgtctgctgtagaaaaaaaaattcacatgatgcacttcaaattcaaataaaaatccttttggcatgttcccatttttgcttagctcaattagtgtggctaaccaagagataactgtaaatgtgacattgatttgctcttactacagcttcagtgattgggggaggaaaagtcccaacccaatgggctcaaacttctatcttcccatgaccccaaagccaagggcaacagatcagtaaagaacgtggtcagagtagaacccctgaagtattttttaatcctacctcaaaatttaacagttacctgagagatttaacattatctagttcattgaatcattgtatgtggtcatggataaattgcacaccttggaattcgctttctaaaggaaatcaaatgaatggaggaactttccaaacaccactttacttgtgttatatagccaatataactatctctactgaatgtcattgaaaaactaaaaaattaaacttatttacaaataggtaaaaaaaaaaaaaaaaacaaacacaaaaaaacnnntggggggcgccnngggccncggaaaaacc

SEQ ID NO: 731853 - DNA, 1663 bp, Homo sapiens
aggaccccaattaggctggcgcacagtatgtacgctacccgatgatagctctactgcctcaacccaaggggatttttatgtctggggcagaaacactcaagttgattagaaagaccaggccaatgtcagggtacctggggccaaacccacctgctagtgtgaattaaagtactttaattttgttttctgtggaggtggaaaagcaacattcatagtctttggagaaatgcttagaaattcagcatttgacccttgctgtgaattaagcccaattaattcctgtttgtctacatatgatctgtctgtggcaaaagtttaatcagaggaaattctttcccagtctgtcgatttatgcctcagccacttgcctgtgctacaattcattgtgttacctgtagattcaggtaatacaaactatatataatcatcaagtaatacaaactaatttagtaatagcctgggttaagtattattagggccctgtgtctgctgtagaaaaaaaaattcacatgatgcacttcaaattcaaataaaaatccttttggcatgttcccatttttgcttagctcaattagtgtggctaaccaagagataactgtaaatgtgacattgatttgctcttactacagcttcagtgattgggggaggaaaagtcccaacccaatgggctcaaacttctatcttcccatgaccccaaagccaagggcaacagatcagtaaagaacgtggtcagagtagaacccctgaagtattttttaatcctacctcaaaatttaacagttacctgagagatttaacattatctagttcattgaatcattgtatgtggtcatggataaattgcacaccttggaattcgctttctaaaggaaatcaaatgaatggaggaactttccaaacaccactttacttgtgttatatagccaatataactatctctactgaatgtcattgaaaaactaaaaaattaaacttatttacaaataggtaaatatttgtcattgaatccattgccatcccatttgactgttcttttcatcctactgtctagtaataagctgagtataagatgacagtgtaatctccctgaaagcaggagctactttctttcttttgtaatctatttccatccccatttccctgtcctgtctccctgtattcactcccaagctcagttctgaatagacattcctgctcagagatactcccaactgatgcagaaaccaaataaagaggtaggtattccaagaattcaagaatggacattagtaaagaataaaacatttatttgagcttggaattatttggatcatctatatggcctaaaaatatatggactatgcctgtgtacctgaatacgtatgtagtcaggtcaagacaatcatccaaataacttagacccctaaaagcaaggccaggatttgcaatttaatgtgtcccaattaattcacttgaaaattagtaacactctgtttacgttgcctctggctggagctgcatggtggaagaagcccaactttggatccatgtacttcacccatccaatactcttgggacatttatgtgtattttatctgtatatatgaagccaatgtctatgtctacacagtcaaagtgaaatgcatgtttgatatagctgtacatagatatctattttgcaggt

SEQ ID NO: 731854 - DNA, 1115 bp, Homo sapiens
  misc_feature (1077)..(1077): n is a, c, g, or t
  misc_feature (1112)..(1112): n is a, c, g, or t
aggaccccaattaggctggcgcacagtatgtacgctacccgatgatagctctactgcctcaacccaaggggatttttatgtctggggcagaaacactcaagttgattagaaagaccaggccaatgtcagggtacctggggccaaacccacctgctagtgtgaattaaagtactttaattttgttttctgtggaggtggaaaagcaacattcatagtctttggagaaatgcttagaaattcagcatttgacccttgctgtgaattaagcccaattaattcctgtttgtctacatatgatctgtctgtggcaaaagtttaatcagaggaaattctttcccagtctgtcgatttatgcctcagccacttgcctgtgctacaattcattgtgttacctgtagattcaggtaatacaaactatatataatcatcaagtaatacaaactaatttagtaatagcctgggttaagtattattagggccctgtgtctgctgtagaaaaaaaaattcacatgatgcacttcaaattcaaataaaaatccttttggcatgttcccatttttgcttagctcaattagtgtggctaaccaagagataactgtaaatgtgacattgatttgctcttactacagcttcagtgattgggggaggaaaagtcccaacccaatgggctcaaacttctatcttcccatgaccccaaagccaagggcaacagatcagtaaagaacgtggtcagagtagaacccctgaagtattttttaatcctacctcaaaatttaacagttacctgagagatttaacattatctagttcattgaatcattgtatgtggtcatggataaattgcacaccttggaattcgctttctaaaggaaatcaaatgaatggaggaactttccaaacaccactttacttgtgttatatagccaatataactatctctactgaatgtcattgaaaaactaaaaaattaaacttatttacaaataaaaaaaaaaaaaaaaaaaaaaaaaaaaaaaaaaaaaaaaaaaataaaaaaaaaaaaaaaaaaaaaaaaaaaaaaaaaaaaaaaaaaaaaanaaaaaaaaaaaaaaaaaaaaaaaaaaaaaaaaaanaag

SEQ ID NO: 731855 - DNA, 986 bp, Homo sapiens
aggaccccaattaggctggcgcacagtatgtacgctacccgatgatagctctactgcctcaacccaaggggatttttatgtctggggcagaaacactcaagttgattagaaagaccaggccaatgtcagggtacctggggccaaacccacctgctagtgtgaattaaagtactttaattttgttttctgtggaggtggaaaagcaacattcatagtctttggagaaatgcttagaaattcagcatttgacccttgctgtgaattaagcccaattaattcctgtttgtctacatatgatctgtctgtggcaaaagtttaatcagaggaaattctttcccagtctgtcgatttatgcctcagccacttgcctgtgctacaattcattgtgttacctgtagattcaggtaatacaaactatatataatcatcaagtaatacaaactaatttagtaatagcctgggttaagtattattagggccctgtgtctgctgtagaaaaaaaaattcacatgatgcacttcaaattcaaataaaaatccttttggcatgttcccatttttgcttagctcaattagtgtggctaaccaagagataactgtaaatgtgacattgatttgctcttactacagcttcagtgattgggggaggaaaagtcccaacccaatgggctcaaacttctatcttcccatgaccccaaagccaagggcaacagatcagtaaagaacgtggtcagagtagaacccctgaagtattttttaatcctacctcaaaatttaacagttacctgagagatttaacattatctagttcattgaatcattgtatgtggtcatggataaattgcacaccttggaattcgctttctaaaggaaatcaaatgaatggaggaactttccaaacaccactttacttgtgttatatagccaatataactatctctactgaatgtcattgaaaaactaaaaaattaaacttatttacaaata

SEQ ID NO: 731856 - DNA, 946 bp, Homo sapiens
aggaccccaattaggctggcgcacagtatgtacgctacccgatgatagctctactgcctcaacccaaggggatttttatgtctggggcagaaacactcaagttgattagaaagaccaggccaatgtcagggtacctggggccaaacccacctgctagtgtgaattaaagtactttaattttgttttctgtggaggtggaaaagcaacattcatagtctttggagaaatgcttagaaattcagcatttgacccttgctgtgaattaagcccaattaattcctgtttgtctacatatgatctgtctgtggcaaaagtttaatcagaggaaattctttcccagtctgtcgatttatgcctcagccacttgcctgtgctacaattcattgtgttacctgtagattcaggtaatacaaactatatataatcatcaagtaatacaaactaatttagtaatagcctgggttaagtattattagggccctgtgtctgctgtagaaaaaaaaattcacatgatgcacttcaaattcaaataaaaatccttttggcatgttcccatttttgcttagctcaattagtgtggctaaccaagagataactgtaaatgtgacattgatttgctcttactacagcttcagtgattgggggaggaaaagtcccaacccaatgggctcaaacttctatcttcccatgaccccaaagccaagggcaacagatcagtaaagaacgtggtcagagtagaacccctgaagtattttttaatcctacctcaaaatttaacagttacctgagagatttaacattatctagttcattgaatcattgtatgtggtcatggataaattgcacaccttggaattcgctttctaaaggaaatcaaatgaatggaggaactttccaaacaccactttacttgtgttatatagccaatataactatctctactgaa

SEQ ID NO: 731857 - DNA, 603 bp, Homo sapiens
aggaccccaattaggctggcgcacagtatgtacgctacccgatgatagctctactgcctcaacccaaggggatttttatgtctggggcagaaacactcaagttgattagaaagaccaggccaatgtcagggtacctggggccaaacccacctgctagtgtgaattaaagtactttaattttgttttctgtggaggtggaaaagcaacattcatagtctttggagaaatgcttagaaattcagcatttgacccttgctgtgaattaagcccaattaattcctgtttgtctacatatgatctgtctgtggcaaaagtttaatcagaggaaattctttcccagtctgtcgatttatgcctcagccacttgcctgtgctacaattcattgtgttacctgtagattcaggtaatacaaactatatataatcatcaagtaatacaaactaatttagtaatagcctgggttaagtattattagggccctgtgtctgctgtagaaaaaaaaattcacatgatgcacttcaaattcaaataaaaatccttttggcatgttcccattttaaaaaaaaaaaaaaaaaaaaaaaaaaaaaaaaaaaaaaaaaaat

SEQ ID NO: 731858 - DNA, 559 bp, Homo sapiens
aggaccccaattaggctggcgcacagtatgtacgctacccgatgatagctctactgcctcaacccaaggggatttttatgtctggggcagaaacactcaagttgattagaaagaccaggccaatgtcagggtacctggggccaaacccacctgctagtgtgaattaaagtactttaattttgttttctgtggaggtggaaaagcaacattcatagtctttggagaaatgcttagaaattcagcatttgacccttgctgtgaattaagcccaattaattcctgtttgtctacatatgatctgtctgtggcaaaagtttaatcagaggaaattctttcccagtctgtcgatttatgcctcagccacttgcctgtgctacaattcattgtgttacctgtagattcaggtaatacaaactatatataatcatcaagtaatacaaactaatttagtaatagcctgggttaagtattattagggccctgtgtctgctgtagaaaaaaaaattcacatgatgcacttcaaattcaaataaaaatccttttggcatgttcccatttt

SEQ ID NO: 731859 - DNA, 459 bp, Homo sapiens
ggagtttctggagggctgaacacgtggaggcaaacaggaaggtgaagaagaacttatcctatcaggacggaaggtcctgtgctcgggatcttccagacgtcgcgactctaaattgccccctctgaggtcaaggaacacaagatggttttggaaatgctgaacccgatacattataacatcaccagcatcgtgcctgaagccatgcctgctgccaccatgccagtcctgctcctcactggcctttttctcttggtgtggaattatgagggcacatcctcaataccaggtcctggctactgcatgggaattggacccctcatctcccacggcagattcctgtggatggggatcggcagtgcctgcaactactacaaccgggtatatggagaattcatgcgagtctggatctctggagaggaaacactcattatcagcaagtgagtctgttcataatcgaag

SEQ ID NO: 731860 - DNA, 2772 bp, Homo sapiens
  misc_feature (14)..(14): n is a, c, g, or t
  misc_feature (16)..(16): n is a, c, g, or t
  misc_feature (25)..(25): n is a, c, g, or t
cgcgtgggttcctngnagacgtcgngactctaaattgccccctctgaggtcaaggaacacaagatggttttggaaatgctgaacccgatacattataacatcaccagcatcgtgcctgaagccatgcctgctgccaccatgccagtcctgctcctcactggcctttttctcttggtgtggaattatgagggcacatcctcaataccaggtcctggctactgcatgggaattggacccctcatctcccacggcagattcctgtggatggggatcggcagtgcctgcaactactacaaccgggtatatggagaattcatgcgagtctggatctctggagaggaaacactcattatcagcaagtcctcaagtatgttccacataatgaagcacaatcattacagctctcgattcggcagcaaacttgggctgcagtgcatcggtatgcatgagaaaggcatcatatttaacaacaatccagagctctggaaaacaactcgacccttctttatgaaagctctgtcaggccccggccttgttcgtatggtcacagtctgtgctgaatccctcaaaacacatctggacaggttggaggaggtgaccaatgaatcgggctatgtggacgtgttgacccttctgcgtcgtgtcatgctggacacctctaacacgctcttcttgaggatccctttggacgaaagtgctatcgtggttaaaatccaaggttattttgatgcatggcaagctctcctcatcaaaccagacatcttctttaagatttcttggctatacaaaaagtatgagaagtctgtcaaggatttgaaagatgccatagaagttctgatagcagaaaaaagacgcaggatttccacagaagagaaactggaagaatgtatggactttgccactgagttgattttagcagagaaacgtggtgacctgacaagagagaatgtgaaccagtgcatattggaaatgctgatcgcagctcctgacaccatgtctgtctctttgttcttcatgctatttctcattgcaaagcaccctaatgttgaagaggcaataataaaggaaatccagactgttattggtgagagagacataaagattgatgatatacaaaaattaaaagtgatggaaaacttcatttatgagagcatgcggtaccagcctgtcgtggacttggtcatgcgcaaagccttagaagatgatgtaatcgatggctacccagtgaaaaaggggacaaacattatcctgaatattggaaggatgcacagactcgagtttttccccaaacccaatgaatttactcttgaaaattttgcaaagaatgttccttataggtactttcagccatttggctttgggccccgtggctgtgcaggaaagtacatcgccatggtgatgatgaaagccatcctcgttacacttctgagacgattccacgtgaagacattgcaaggacagtgtgttgagagcatacagaagatacacgacttgtccttgcacccagatgagactaaaaacatgctggaaatgatctttaccccaagaaactcagacaggtgtctggaacactagagaaggctggtcagtacctactctggagcatttctcatcagtagttcacatacaaatcatccatccttgccaatagtgtcatcctcacagtgaacactcagtggcccatggcattttataggcatacctcctatgggttgtcaccaagctaggtgctattggtcatctgctcctgttcacaccagagaaccaggctacaagagaaaaagcagaggccaagagtttgagggagaaatagtcggtgaagaaaccgtatccataaagacccgattccaccaaatgtgctttgagaaggataggccttcattaacaaaatgtatgtctggttccccagtagagctctactgcctcaacccaaggggatttttatgtctggggcagaaacactcaagttgattagaaagaccaggccaatgtcagggtacctggggccaaacccacctgctagtgtgaattaaagtactttaattttgttttctgtggaggtggaaaagcaacattcatagtctttggagaaatgcttagaaattcagcatttgacccttgctgtgaattaagcccaattaattcctgtttgtctacatatgatctgtctgtggcaaaagtttaatcagaggaaattctttcccagtctgtcgatttatgcctcagccacttgcctgtgctacaattcattgtgttacctgtagattcaggtaatacaaactatatataatcatcaagtaatacaaactaatttagtaatagcctgggttaagtattattagggccctgtgtctgctgtagaaaaaaaaattcacatgatgcacttcaaattcaaataaaaatccttttggcatgttcccatttttgcttagctcaattagtgtggctaaccaagagataactgtaaatgtgacattgatttgctcttactacagcttcagtgattgggggaggaaaagtcccaacccaatgggctcaaacttctaaggggtactcctctcatccccttatccttctccctcgacattttctccctctttcttcccatgaccccaaagccaagggcaacagatcagtaaagaacgtggtcagagtagaacccctgaagtattttttaatcctacctcaaaatttaacagttacctgagagatttaacattatctagttcattgaatcattgtatgtggtcatggataaattgcacaccttgg

SEQ ID NO: 731861 - DNA, 381 bp, Homo sapiens
  misc_feature (14)..(14): n is a, c, g, or t
  misc_feature (16)..(16): n is a, c, g, or t
  misc_feature (25)..(25): n is a, c, g, or t
cgcgtgggttcctngnagacgtcgngactctaaattgccccctctgaggtcaaggaacacaagatggttttggaaatgctgaacccgatacattataacatcaccagcatcgtgcctgaagccatgcctgctgccaccatgccagtcctgctcctcactggcctttttctcttggtgtggaattatgagggcacatcctcaataccaggtcctggctactgcatgggaattggacccctcatctcccacggcagattcctgtggatggggatcggcagtgcctgcaactactacaaccgggtatatggagaattcatgcgagtctggatctctggagaggaaacactcattatcagcaagtgagtctgttcataatcgaag

SEQ ID NO: 731862 - DNA, 2865 bp, Homo sapiens
  misc_feature (14)..(14): n is a, c, g, or t
  misc_feature (16)..(16): n is a, c, g, or t
  misc_feature (25)..(25): n is a, c, g, or t
cgcgtgggttcctngnagacgtcgngactctaaattgccccctctgaggtcaaggaacacaagatggttttggaaatgctgaacccgatacattataacatcaccagcatcgtgcctgaagccatgcctgctgccaccatgccagtcctgctcctcactggcctttttctcttggtgtggaattatgagggcacatcctcaataccaggtcctggctactgcatgggaattggacccctcatctcccacggcagattcctgtggatggggatcggcagtgcctgcaactactacaaccgggtatatggagaattcatgcgagtctggatctctggagaggaaacactcattatcagcaagtcctcaagtatgttccacataatgaagcacaatcattacagctctcgattcggcagcaaacttgggctgcagtgcatcggtatgcatgagaaaggcatcatatttaacaacaatccagagctctggaaaacaactcgacccttctttatgaaagctctgtcaggccccggccttgttcgtatggtcacagtctgtgctgaatccctcaaaacacatctggacaggttggaggaggtgaccaatgaatcgggctatgtggacgtgttgacccttctgcgtcgtgtcatgctggacacctctaacacgctcttcttgaggatccctttggacgaaagtgctatcgtggttaaaatccaaggttattttgatgcatggcaagctctcctcatcaaaccagacatcttctttaagatttcttggctatacaaaaagtatgagaagtctgtcaaggatttgaaagatgccatagaagttctgatagcagaaaaaagacgcaggatttccacagaagagaaactggaagaatgtatggactttgccactgagttgattttagcagagaaacgtggtgacctgacaagagagaatgtgaaccagtgcatattggaaatgctgatcgcagctcctgacaccatgtctgtctctttgttcttcatgctatttctcattgcaaagcaccctaatgttgaagaggcaataataaaggaaatccagactgttattggtgagagagacataaagattgatgatatacaaaaattaaaagtgatggaaaacttcatttatgagagcatgcggtaccagcctgtcgtggacttggtcatgcgcaaagccttagaagatgatgtaatcgatggctacccagtgaaaaaggggacaaacattatcctgaatattggaaggatgcacagactcgagtttttccccaaacccaatgaatttactcttgaaaattttgcaaagaatgttccttataggtactttcagccatttggctttgggccccgtggctgtgcaggaaagtacatcgccatggtgatgatgaaagccatcctcgttacacttctgagacgattccacgtgaagacattgcaaggacagtgtgttgagagcatacagaagatacacgacttgtccttgcacccagatgagactaaaaacatgctggaaatgatctttaccccaagaaactcagacaggtgtctggaacactagagaaggctggtcagtacctactctggagcatttctcatcagtagttcacatacaaatcatccatccttgccaatagtgtcatcctcacagtgaacactcagtggcccatggcattttataggcatacctcctatgggttgtcaccaagctaggtgctattggtcatctgctcctgttcacaccagagaaccaggctacaagagaaaaagcagaggccaagagtttgagggagaaatagtcggtgaagaaaccgtatccataaagacccgattccaccaaatgtgctttgagaaggataggccttcattaacaaaatgtatgtctggttccccagtagagctctactgcctcaacccaaggggatttttatgtctggggcagaaacactcaagttgattagaaagaccaggccaatgtcagggtacctggggccaaacccacctgctagtgtgaattaaagtactttaattttgttttctgtggaggtggaaaagcaacattcatagtctttggagaaatgcttagaaattcagcatttgacccttgctgtgaattaagcccaattaattcctgtttgtctacatatgatctgtctgtggcaaaagtttaatcagaggaaattctttcccagtctgtcgatttatgcctcagccacttgcctgtgctacaattcattgtgttacctgtagattcaggtaatacaaactatatataatcatcaagtaatacaaactaatttagtaatagcctgggttaagtattattagggccctgtgtctgctgtagaaaaaaaaattcacatgatgcacttcaaattcaaataaaaatccttttggcatgttcccatttttgcttagctcaattagtgtggctaaccaagagataactgtaaatgtgacattgatttgctcttactacagcttcagtgattgggggaggaaaagtcccaacccaatgggctcaaacttctaaggggtactcctctcatccccttatccttctccctcgacattttctccctctttcttcccatgaccccaaagccaagggcaacagatcagtaaagaacgtggtcagagtagaacccctgaagtattttttaatcctacctcaaaatttaacagttacctgagagatttaacattatctagttcattgaatcattgtatgtggtcatggataaattgcacaccttggaattcgctttctaaaggaaatcaaatgaatggaggaactttccaaacaccactttacttgtgttatatagccaatataactatctctactgaa

SEQ ID NO: 731863 - DNA, 3034 bp, Homo sapiens
  misc_feature (14)..(14): n is a, c, g, or t
  misc_feature (16)..(16): n is a, c, g, or t
  misc_feature (25)..(25): n is a, c, g, or t
  misc_feature (2996)..(2996): n is a, c, g, or t
  misc_feature (3031)..(3031): n is a, c, g, or t
cgcgtgggttcctngnagacgtcgngactctaaattgccccctctgaggtcaaggaacacaagatggttttggaaatgctgaacccgatacattataacatcaccagcatcgtgcctgaagccatgcctgctgccaccatgccagtcctgctcctcactggcctttttctcttggtgtggaattatgagggcacatcctcaataccaggtcctggctactgcatgggaattggacccctcatctcccacggcagattcctgtggatggggatcggcagtgcctgcaactactacaaccgggtatatggagaattcatgcgagtctggatctctggagaggaaacactcattatcagcaagtcctcaagtatgttccacataatgaagcacaatcattacagctctcgattcggcagcaaacttgggctgcagtgcatcggtatgcatgagaaaggcatcatatttaacaacaatccagagctctggaaaacaactcgacccttctttatgaaagctctgtcaggccccggccttgttcgtatggtcacagtctgtgctgaatccctcaaaacacatctggacaggttggaggaggtgaccaatgaatcgggctatgtggacgtgttgacccttctgcgtcgtgtcatgctggacacctctaacacgctcttcttgaggatccctttggacgaaagtgctatcgtggttaaaatccaaggttattttgatgcatggcaagctctcctcatcaaaccagacatcttctttaagatttcttggctatacaaaaagtatgagaagtctgtcaaggatttgaaagatgccatagaagttctgatagcagaaaaaagacgcaggatttccacagaagagaaactggaagaatgtatggactttgccactgagttgattttagcagagaaacgtggtgacctgacaagagagaatgtgaaccagtgcatattggaaatgctgatcgcagctcctgacaccatgtctgtctctttgttcttcatgctatttctcattgcaaagcaccctaatgttgaagaggcaataataaaggaaatccagactgttattggtgagagagacataaagattgatgatatacaaaaattaaaagtgatggaaaacttcatttatgagagcatgcggtaccagcctgtcgtggacttggtcatgcgcaaagccttagaagatgatgtaatcgatggctacccagtgaaaaaggggacaaacattatcctgaatattggaaggatgcacagactcgagtttttccccaaacccaatgaatttactcttgaaaattttgcaaagaatgttccttataggtactttcagccatttggctttgggccccgtggctgtgcaggaaagtacatcgccatggtgatgatgaaagccatcctcgttacacttctgagacgattccacgtgaagacattgcaaggacagtgtgttgagagcatacagaagatacacgacttgtccttgcacccagatgagactaaaaacatgctggaaatgatctttaccccaagaaactcagacaggtgtctggaacactagagaaggctggtcagtacctactctggagcatttctcatcagtagttcacatacaaatcatccatccttgccaatagtgtcatcctcacagtgaacactcagtggcccatggcattttataggcatacctcctatgggttgtcaccaagctaggtgctattggtcatctgctcctgttcacaccagagaaccaggctacaagagaaaaagcagaggccaagagtttgagggagaaatagtcggtgaagaaaccgtatccataaagacccgattccaccaaatgtgctttgagaaggataggccttcattaacaaaatgtatgtctggttccccagtagagctctactgcctcaacccaaggggatttttatgtctggggcagaaacactcaagttgattagaaagaccaggccaatgtcagggtacctggggccaaacccacctgctagtgtgaattaaagtactttaattttgttttctgtggaggtggaaaagcaacattcatagtctttggagaaatgcttagaaattcagcatttgacccttgctgtgaattaagcccaattaattcctgtttgtctacatatgatctgtctgtggcaaaagtttaatcagaggaaattctttcccagtctgtcgatttatgcctcagccacttgcctgtgctacaattcattgtgttacctgtagattcaggtaatacaaactatatataatcatcaagtaatacaaactaatttagtaatagcctgggttaagtattattagggccctgtgtctgctgtagaaaaaaaaattcacatgatgcacttcaaattcaaataaaaatccttttggcatgttcccatttttgcttagctcaattagtgtggctaaccaagagataactgtaaatgtgacattgatttgctcttactacagcttcagtgattgggggaggaaaagtcccaacccaatgggctcaaacttctaaggggtactcctctcatccccttatccttctccctcgacattttctccctctttcttcccatgaccccaaagccaagggcaacagatcagtaaagaacgtggtcagagtagaacccctgaagtattttttaatcctacctcaaaatttaacagttacctgagagatttaacattatctagttcattgaatcattgtatgtggtcatggataaattgcacaccttggaattcgctttctaaaggaaatcaaatgaatggaggaactttccaaacaccactttacttgtgttatatagccaatataactatctctactgaatgtcattgaaaaactaaaaaattaaacttatttacaaataaaaaaaaaaaaaaaaaaaaaaaaaaaaaaaaaaaaaaaaaaaataaaaaaaaaaaaaaaaaaaaaaaaaaaaaaaaaaaaaaaaaaaaaanaaaaaaaaaaaaaaaaaaaaaaaaaaaaaaaaaanaag

SEQ ID NO: 731864 - DNA, 3582 bp, Homo sapiens
  misc_feature (14)..(14): n is a, c, g, or t
  misc_feature (16)..(16): n is a, c, g, or t
  misc_feature (25)..(25): n is a, c, g, or t
cgcgtgggttcctngnagacgtcgngactctaaattgccccctctgaggtcaaggaacacaagatggttttggaaatgctgaacccgatacattataacatcaccagcatcgtgcctgaagccatgcctgctgccaccatgccagtcctgctcctcactggcctttttctcttggtgtggaattatgagggcacatcctcaataccaggtcctggctactgcatgggaattggacccctcatctcccacggcagattcctgtggatggggatcggcagtgcctgcaactactacaaccgggtatatggagaattcatgcgagtctggatctctggagaggaaacactcattatcagcaagtcctcaagtatgttccacataatgaagcacaatcattacagctctcgattcggcagcaaacttgggctgcagtgcatcggtatgcatgagaaaggcatcatatttaacaacaatccagagctctggaaaacaactcgacccttctttatgaaagctctgtcaggccccggccttgttcgtatggtcacagtctgtgctgaatccctcaaaacacatctggacaggttggaggaggtgaccaatgaatcgggctatgtggacgtgttgacccttctgcgtcgtgtcatgctggacacctctaacacgctcttcttgaggatccctttggacgaaagtgctatcgtggttaaaatccaaggttattttgatgcatggcaagctctcctcatcaaaccagacatcttctttaagatttcttggctatacaaaaagtatgagaagtctgtcaaggatttgaaagatgccatagaagttctgatagcagaaaaaagacgcaggatttccacagaagagaaactggaagaatgtatggactttgccactgagttgattttagcagagaaacgtggtgacctgacaagagagaatgtgaaccagtgcatattggaaatgctgatcgcagctcctgacaccatgtctgtctctttgttcttcatgctatttctcattgcaaagcaccctaatgttgaagaggcaataataaaggaaatccagactgttattggtgagagagacataaagattgatgatatacaaaaattaaaagtgatggaaaacttcatttatgagagcatgcggtaccagcctgtcgtggacttggtcatgcgcaaagccttagaagatgatgtaatcgatggctacccagtgaaaaaggggacaaacattatcctgaatattggaaggatgcacagactcgagtttttccccaaacccaatgaatttactcttgaaaattttgcaaagaatgttccttataggtactttcagccatttggctttgggccccgtggctgtgcaggaaagtacatcgccatggtgatgatgaaagccatcctcgttacacttctgagacgattccacgtgaagacattgcaaggacagtgtgttgagagcatacagaagatacacgacttgtccttgcacccagatgagactaaaaacatgctggaaatgatctttaccccaagaaactcagacaggtgtctggaacactagagaaggctggtcagtacctactctggagcatttctcatcagtagttcacatacaaatcatccatccttgccaatagtgtcatcctcacagtgaacactcagtggcccatggcattttataggcatacctcctatgggttgtcaccaagctaggtgctattggtcatctgctcctgttcacaccagagaaccaggctacaagagaaaaagcagaggccaagagtttgagggagaaatagtcggtgaagaaaccgtatccataaagacccgattccaccaaatgtgctttgagaaggataggccttcattaacaaaatgtatgtctggttccccagtagagctctactgcctcaacccaaggggatttttatgtctggggcagaaacactcaagttgattagaaagaccaggccaatgtcagggtacctggggccaaacccacctgctagtgtgaattaaagtactttaattttgttttctgtggaggtggaaaagcaacattcatagtctttggagaaatgcttagaaattcagcatttgacccttgctgtgaattaagcccaattaattcctgtttgtctacatatgatctgtctgtggcaaaagtttaatcagaggaaattctttcccagtctgtcgatttatgcctcagccacttgcctgtgctacaattcattgtgttacctgtagattcaggtaatacaaactatatataatcatcaagtaatacaaactaatttagtaatagcctgggttaagtattattagggccctgtgtctgctgtagaaaaaaaaattcacatgatgcacttcaaattcaaataaaaatccttttggcatgttcccatttttgcttagctcaattagtgtggctaaccaagagataactgtaaatgtgacattgatttgctcttactacagcttcagtgattgggggaggaaaagtcccaacccaatgggctcaaacttctaaggggtactcctctcatccccttatccttctccctcgacattttctccctctttcttcccatgaccccaaagccaagggcaacagatcagtaaagaacgtggtcagagtagaacccctgaagtattttttaatcctacctcaaaatttaacagttacctgagagatttaacattatctagttcattgaatcattgtatgtggtcatggataaattgcacaccttggaattcgctttctaaaggaaatcaaatgaatggaggaactttccaaacaccactttacttgtgttatatagccaatataactatctctactgaatgtcattgaaaaactaaaaaattaaacttatttacaaataggtaaatatttgtcattgaatccattgccatcccatttgactgttcttttcatcctactgtctagtaataagctgagtataagatgacagtgtaatctccctgaaagcaggagctactttctttcttttgtaatctatttccatccccatttccctgtcctgtctccctgtattcactcccaagctcagttctgaatagacattcctgctcagagatactcccaactgatgcagaaaccaaataaagaggtaggtattccaagaattcaagaatggacattagtaaagaataaaacatttatttgagcttggaattatttggatcatctatatggcctaaaaatatatggactatgcctgtgtacctgaatacgtatgtagtcaggtcaagacaatcatccaaataacttagacccctaaaagcaaggccaggatttgcaatttaatgtgtcccaattaattcacttgaaaattagtaacactctgtttacgttgcctctggctggagctgcatggtggaagaagcccaactttggatccatgtacttcacccatccaatactcttgggacatttatgtgtattttatctgtatatatgaagccaatgtctatgtctacacagtcaaagtgaaatgcatgtttgatatagctgtacatagatatctattttgcaggt

SEQ ID NO: 731865 - DNA, 2972 bp, Homo sapiens
  misc_feature (14)..(14): n is a, c, g, or t
  misc_feature (16)..(16): n is a, c, g, or t
  misc_feature (25)..(25): n is a, c, g, or t
  misc_feature (2941)..(2943): n is a, c, g, or t
  misc_feature (2955)..(2956): n is a, c, g, or t
  misc_feature (2962)..(2962): n is a, c, g, or t
cgcgtgggttcctngnagacgtcgngactctaaattgccccctctgaggtcaaggaacacaagatggttttggaaatgctgaacccgatacattataacatcaccagcatcgtgcctgaagccatgcctgctgccaccatgccagtcctgctcctcactggcctttttctcttggtgtggaattatgagggcacatcctcaataccaggtcctggctactgcatgggaattggacccctcatctcccacggcagattcctgtggatggggatcggcagtgcctgcaactactacaaccgggtatatggagaattcatgcgagtctggatctctggagaggaaacactcattatcagcaagtcctcaagtatgttccacataatgaagcacaatcattacagctctcgattcggcagcaaacttgggctgcagtgcatcggtatgcatgagaaaggcatcatatttaacaacaatccagagctctggaaaacaactcgacccttctttatgaaagctctgtcaggccccggccttgttcgtatggtcacagtctgtgctgaatccctcaaaacacatctggacaggttggaggaggtgaccaatgaatcgggctatgtggacgtgttgacccttctgcgtcgtgtcatgctggacacctctaacacgctcttcttgaggatccctttggacgaaagtgctatcgtggttaaaatccaaggttattttgatgcatggcaagctctcctcatcaaaccagacatcttctttaagatttcttggctatacaaaaagtatgagaagtctgtcaaggatttgaaagatgccatagaagttctgatagcagaaaaaagacgcaggatttccacagaagagaaactggaagaatgtatggactttgccactgagttgattttagcagagaaacgtggtgacctgacaagagagaatgtgaaccagtgcatattggaaatgctgatcgcagctcctgacaccatgtctgtctctttgttcttcatgctatttctcattgcaaagcaccctaatgttgaagaggcaataataaaggaaatccagactgttattggtgagagagacataaagattgatgatatacaaaaattaaaagtgatggaaaacttcatttatgagagcatgcggtaccagcctgtcgtggacttggtcatgcgcaaagccttagaagatgatgtaatcgatggctacccagtgaaaaaggggacaaacattatcctgaatattggaaggatgcacagactcgagtttttccccaaacccaatgaatttactcttgaaaattttgcaaagaatgttccttataggtactttcagccatttggctttgggccccgtggctgtgcaggaaagtacatcgccatggtgatgatgaaagccatcctcgttacacttctgagacgattccacgtgaagacattgcaaggacagtgtgttgagagcatacagaagatacacgacttgtccttgcacccagatgagactaaaaacatgctggaaatgatctttaccccaagaaactcagacaggtgtctggaacactagagaaggctggtcagtacctactctggagcatttctcatcagtagttcacatacaaatcatccatccttgccaatagtgtcatcctcacagtgaacactcagtggcccatggcattttataggcatacctcctatgggttgtcaccaagctaggtgctattggtcatctgctcctgttcacaccagagaaccaggctacaagagaaaaagcagaggccaagagtttgagggagaaatagtcggtgaagaaaccgtatccataaagacccgattccaccaaatgtgctttgagaaggataggccttcattaacaaaatgtatgtctggttccccagtagagctctactgcctcaacccaaggggatttttatgtctggggcagaaacactcaagttgattagaaagaccaggccaatgtcagggtacctggggccaaacccacctgctagtgtgaattaaagtactttaattttgttttctgtggaggtggaaaagcaacattcatagtctttggagaaatgcttagaaattcagcatttgacccttgctgtgaattaagcccaattaattcctgtttgtctacatatgatctgtctgtggcaaaagtttaatcagaggaaattctttcccagtctgtcgatttatgcctcagccacttgcctgtgctacaattcattgtgttacctgtagattcaggtaatacaaactatatataatcatcaagtaatacaaactaatttagtaatagcctgggttaagtattattagggccctgtgtctgctgtagaaaaaaaaattcacatgatgcacttcaaattcaaataaaaatccttttggcatgttcccatttttgcttagctcaattagtgtggctaaccaagagataactgtaaatgtgacattgatttgctcttactacagcttcagtgattgggggaggaaaagtcccaacccaatgggctcaaacttctaaggggtactcctctcatccccttatccttctccctcgacattttctccctctttcttcccatgaccccaaagccaagggcaacagatcagtaaagaacgtggtcagagtagaacccctgaagtattttttaatcctacctcaaaatttaacagttacctgagagatttaacattatctagttcattgaatcattgtatgtggtcatggataaattgcacaccttggaattcgctttctaaaggaaatcaaatgaatggaggaactttccaaacaccactttacttgtgttatatagccaatataactatctctactgaatgtcattgaaaaactaaaaaattaaacttatttacaaataggtaaaaaaaaaaaaaaaaacaaacacaaaaaaacnnntggggggcgccnngggccncggaaaaacc

SEQ ID NO: 731866 - DNA, 2905 bp, Homo sapiens
  misc_feature (14)..(14): n is a, c, g, or t
  misc_feature (16)..(16): n is a, c, g, or t
  misc_feature (25)..(25): n is a, c, g, or t
cgcgtgggttcctngnagacgtcgngactctaaattgccccctctgaggtcaaggaacacaagatggttttggaaatgctgaacccgatacattataacatcaccagcatcgtgcctgaagccatgcctgctgccaccatgccagtcctgctcctcactggcctttttctcttggtgtggaattatgagggcacatcctcaataccaggtcctggctactgcatgggaattggacccctcatctcccacggcagattcctgtggatggggatcggcagtgcctgcaactactacaaccgggtatatggagaattcatgcgagtctggatctctggagaggaaacactcattatcagcaagtcctcaagtatgttccacataatgaagcacaatcattacagctctcgattcggcagcaaacttgggctgcagtgcatcggtatgcatgagaaaggcatcatatttaacaacaatccagagctctggaaaacaactcgacccttctttatgaaagctctgtcaggccccggccttgttcgtatggtcacagtctgtgctgaatccctcaaaacacatctggacaggttggaggaggtgaccaatgaatcgggctatgtggacgtgttgacccttctgcgtcgtgtcatgctggacacctctaacacgctcttcttgaggatccctttggacgaaagtgctatcgtggttaaaatccaaggttattttgatgcatggcaagctctcctcatcaaaccagacatcttctttaagatttcttggctatacaaaaagtatgagaagtctgtcaaggatttgaaagatgccatagaagttctgatagcagaaaaaagacgcaggatttccacagaagagaaactggaagaatgtatggactttgccactgagttgattttagcagagaaacgtggtgacctgacaagagagaatgtgaaccagtgcatattggaaatgctgatcgcagctcctgacaccatgtctgtctctttgttcttcatgctatttctcattgcaaagcaccctaatgttgaagaggcaataataaaggaaatccagactgttattggtgagagagacataaagattgatgatatacaaaaattaaaagtgatggaaaacttcatttatgagagcatgcggtaccagcctgtcgtggacttggtcatgcgcaaagccttagaagatgatgtaatcgatggctacccagtgaaaaaggggacaaacattatcctgaatattggaaggatgcacagactcgagtttttccccaaacccaatgaatttactcttgaaaattttgcaaagaatgttccttataggtactttcagccatttggctttgggccccgtggctgtgcaggaaagtacatcgccatggtgatgatgaaagccatcctcgttacacttctgagacgattccacgtgaagacattgcaaggacagtgtgttgagagcatacagaagatacacgacttgtccttgcacccagatgagactaaaaacatgctggaaatgatctttaccccaagaaactcagacaggtgtctggaacactagagaaggctggtcagtacctactctggagcatttctcatcagtagttcacatacaaatcatccatccttgccaatagtgtcatcctcacagtgaacactcagtggcccatggcattttataggcatacctcctatgggttgtcaccaagctaggtgctattggtcatctgctcctgttcacaccagagaaccaggctacaagagaaaaagcagaggccaagagtttgagggagaaatagtcggtgaagaaaccgtatccataaagacccgattccaccaaatgtgctttgagaaggataggccttcattaacaaaatgtatgtctggttccccagtagagctctactgcctcaacccaaggggatttttatgtctggggcagaaacactcaagttgattagaaagaccaggccaatgtcagggtacctggggccaaacccacctgctagtgtgaattaaagtactttaattttgttttctgtggaggtggaaaagcaacattcatagtctttggagaaatgcttagaaattcagcatttgacccttgctgtgaattaagcccaattaattcctgtttgtctacatatgatctgtctgtggcaaaagtttaatcagaggaaattctttcccagtctgtcgatttatgcctcagccacttgcctgtgctacaattcattgtgttacctgtagattcaggtaatacaaactatatataatcatcaagtaatacaaactaatttagtaatagcctgggttaagtattattagggccctgtgtctgctgtagaaaaaaaaattcacatgatgcacttcaaattcaaataaaaatccttttggcatgttcccatttttgcttagctcaattagtgtggctaaccaagagataactgtaaatgtgacattgatttgctcttactacagcttcagtgattgggggaggaaaagtcccaacccaatgggctcaaacttctaaggggtactcctctcatccccttatccttctccctcgacattttctccctctttcttcccatgaccccaaagccaagggcaacagatcagtaaagaacgtggtcagagtagaacccctgaagtattttttaatcctacctcaaaatttaacagttacctgagagatttaacattatctagttcattgaatcattgtatgtggtcatggataaattgcacaccttggaattcgctttctaaaggaaatcaaatgaatggaggaactttccaaacaccactttacttgtgttatatagccaatataactatctctactgaatgtcattgaaaaactaaaaaattaaacttatttacaaata

SEQ ID NO: 731867 - DNA, 3250 bp, Homo sapiens
  misc_feature (14)..(14): n is a, c, g, or t
  misc_feature (16)..(16): n is a, c, g, or t
  misc_feature (25)..(25): n is a, c, g, or t
cgcgtgggttcctngnagacgtcgngactctaaattgccccctctgaggtcaaggaacacaagatggttttggaaatgctgaacccgatacattataacatcaccagcatcgtgcctgaagccatgcctgctgccaccatgccagtcctgctcctcactggcctttttctcttggtgtggaattatgagggcacatcctcaataccaggtcctggctactgcatgggaattggacccctcatctcccacggcagattcctgtggatggggatcggcagtgcctgcaactactacaaccgggtatatggagaattcatgcgagtctggatctctggagaggaaacactcattatcagcaagtcctcaagtatgttccacataatgaagcacaatcattacagctctcgattcggcagcaaacttgggctgcagtgcatcggtatgcatgagaaaggcatcatatttaacaacaatccagagctctggaaaacaactcgacccttctttatgaaagctctgtcaggccccggccttgttcgtatggtcacagtctgtgctgaatccctcaaaacacatctggacaggttggaggaggtgaccaatgaatcgggctatgtggacgtgttgacccttctgcgtcgtgtcatgctggacacctctaacacgctcttcttgaggatccctttggacgaaagtgctatcgtggttaaaatccaaggttattttgatgcatggcaagctctcctcatcaaaccagacatcttctttaagatttcttggctatacaaaaagtatgagaagtctgtcaaggatttgaaagatgccatagaagttctgatagcagaaaaaagacgcaggatttccacagaagagaaactggaagaatgtatggactttgccactgagttgattttagcagagaaacgtggtgacctgacaagagagaatgtgaaccagtgcatattggaaatgctgatcgcagctcctgacaccatgtctgtctctttgttcttcatgctatttctcattgcaaagcaccctaatgttgaagaggcaataataaaggaaatccagactgttattggtgagagagacataaagattgatgatatacaaaaattaaaagtgatggaaaacttcatttatgagagcatgcggtaccagcctgtcgtggacttggtcatgcgcaaagccttagaagatgatgtaatcgatggctacccagtgaaaaaggggacaaacattatcctgaatattggaaggatgcacagactcgagtttttccccaaacccaatgaatttactcttgaaaattttgcaaagaatgttccttataggtactttcagccatttggctttgggccccgtggctgtgcaggaaagtacatcgccatggtgatgatgaaagccatcctcgttacacttctgagacgattccacgtgaagacattgcaaggacagtgtgttgagagcatacagaagatacacgacttgtccttgcacccagatgagactaaaaacatgctggaaatgatctttaccccaagaaactcagacaggtgtctggaacactagagaaggctggtcagtacctactctggagcatttctcatcagtagttcacatacaaatcatccatccttgccaatagtgtcatcctcacagtgaacactcagtggcccatggcattttataggcatacctcctatgggttgtcaccaagctaggtgctattggtcatctgctcctgttcacaccagagaaccaggctacaagagaaaaagcagaggccaagagtttgagggagaaatagtcggtgaagaaaccgtatccataaagacccgattccaccaaatgtgctttgagaaggataggccttcattaacaaaatgtatgtctggttccccagtagagctctactgcctcaacccaaggggatttttatgtctggggcagaaacactcaagttgattagaaagaccaggccaatgtcagggtacctggggccaaacccacctgctagtgtgaattaaagtactttaattttgttttctgtggaggtggaaaagcaacattcatagtctttggagaaatgcttagaaattcagcatttgacccttgctgtgaattaagcccaattaattcctgtttgtctacatatgatctgtctgtggcaaaagtttaatcagaggaaattctttcccagtctgtcgatttatgcctcagccacttgcctgtgctacaattcattgtgttacctgtagattcaggtaatacaaactatatataatcatcaagtaatacaaactaatttagtaatagcctgggttaagtattattagggccctgtgtctgctgtagaaaaaaaaattcacatgatgcacttcaaattcaaataaaaatccttttggcatgttcccatttttgcttagctcaattagtgtggctaaccaagagataactgtaaatgtgacattgatttgctcttactacagcttcagtgattgggggaggaaaagtcccaacccaatgggctcaaacttctaaggggtactcctctcatccccttatccttctccctcgacattttctccctctttcttcccatgaccccaaagccaagggcaacagatcagtaaagaacgtggtcagagtagaacccctgaagtattttttaatcctacctcaaaatttaacagttacctgagagatttaacattatctagttcattgaatcattgtatgtggtcatggataaattgcacaccttggaattcgctttctaaaggaaatcaaatgaatggaggaactttccaaacaccactttacttgtgttatatagccaatataactatctctactgaagcggaatacagcacattaagtcaagctaggtgctattggtcatctgctcctgttcacaccagagaaccaggctacaagagaaaaagcagaggccaagagtttgagggagaaatagtcggtgaagaaaccgtatccataaagacccgattccaccaaatgtgctttgagaaggataggccttcatcaacaaaatgtatgtctggttccccagtagagctatactgcctcaacccaaggggatattttaatgtctggggcagaaacactcaagttgattagaaagaccagccaatgtcagtgtatctgggtccttaacccacttggctagtgtgaattatagtacaatgatatttttttttgtggagataggtcagaacatagaggg

SEQ ID NO: 731868 - DNA, 2919 bp, Homo sapiens
  misc_feature (14)..(14): n is a, c, g, or t
  misc_feature (16)..(16): n is a, c, g, or t
  misc_feature (25)..(25): n is a, c, g, or t
  misc_feature (2888)..(2890): n is a, c, g, or t
  misc_feature (2902)..(2903): n is a, c, g, or t
  misc_feature (2909)..(2909): n is a, c, g, or t
cgcgtgggttcctngnagacgtcgngactctaaattgccccctctgaggtcaaggaacacaagatggttttggaaatgctgaacccgatacattataacatcaccagcatcgtgcctgaagccatgcctgctgccaccatgccagtcctgctcctcactggcctttttctcttggtgtggaattatgagggcacatcctcaataccaggtcctggctactgcatgggaattggacccctcatctcccacggcagattcctgtggatggggatcggcagtgcctgcaactactacaaccgggtatatggagaattcatgcgagtctggatctctggagaggaaacactcattatcagcaagtcctcaagtatgttccacataatgaagcacaatcattacagctctcgattcggcagcaaacttgggctgcagtgcatcggtatgcatgagaaaggcatcatatttaacaacaatccagagctctggaaaacaactcgacccttctttatgaaagctctgtcaggccccggccttgttcgtatggtcacagtctgtgctgaatccctcaaaacacatctggacaggttggaggaggtgaccaatgaatcgggctatgtggacgtgttgacccttctgcgtcgtgtcatgctggacacctctaacacgctcttcttgaggatccctttggacgaaagtgctatcgtggttaaaatccaaggttattttgatgcatggcaagctctcctcatcaaaccagacatcttctttaagatttcttggctatacaaaaagtatgagaagtctgtcaaggatttgaaagatgccatagaagttctgatagcagaaaaaagacgcaggatttccacagaagagaaactggaagaatgtatggactttgccactgagttgattttagcagagaaacgtggtgacctgacaagagagaatgtgaaccagtgcatattggaaatgctgatcgcagctcctgacaccatgtctgtctctttgttcttcatgctatttctcattgcaaagcaccctaatgttgaagaggcaataataaaggaaatccagactgttattggtgagagagacataaagattgatgatatacaaaaattaaaagtgatggaaaacttcatttatgagagcatgcggtaccagcctgtcgtggacttggtcatgcgcaaagccttagaagatgatgtaatcgatggctacccagtgaaaaaggggacaaacattatcctgaatattggaaggatgcacagactcgagtttttccccaaacccaatgaatttactcttgaaaattttgcaaagaatgttccttataggtactttcagccatttggctttgggccccgtggctgtgcaggaaagtacatcgccatggtgatgatgaaagccatcctcgttacacttctgagacgattccacgtgaagacattgcaaggacagtgtgttgagagcatacagaagatacacgacttgtccttgcacccagatgagactaaaaacatgctggaaatgatctttaccccaagaaactcagacaggtgtctggaacactagagaaggctggtcagtacctactctggagcatttctcatcagtagttcacatacaaatcatccatccttgccaatagtgtcatcctcacagtgaacactcagtggcccatggcattttataggcatacctcctatgggttgtcaccaagctaggtgctattggtcatctgctcctgttcacaccagagaaccaggctacaagagaaaaagcagaggccaagagtttgagggagaaatagtcggtgaagaaaccgtatccataaagacccgattccaccaaatgtgctttgagaaggataggccttcattaacaaaatgtatgtctggttccccagtagagctctactgcctcaacccaaggggatttttatgtctggggcagaaacactcaagttgattagaaagaccaggccaatgtcagggtacctggggccaaacccacctgctagtgtgaattaaagtactttaattttgttttctgtggaggtggaaaagcaacattcatagtctttggagaaatgcttagaaattcagcatttgacccttgctgtgaattaagcccaattaattcctgtttgtctacatatgatctgtctgtggcaaaagtttaatcagaggaaattctttcccagtctgtcgatttatgcctcagccacttgcctgtgctacaattcattgtgttacctgtagattcaggtaatacaaactatatataatcatcaagtaatacaaactaatttagtaatagcctgggttaagtattattagggccctgtgtctgctgtagaaaaaaaaattcacatgatgcacttcaaattcaaataaaaatccttttggcatgttcccatttttgcttagctcaattagtgtggctaaccaagagataactgtaaatgtgacattgatttgctcttactacagcttcagtgattgggggaggaaaagtcccaacccaatgggctcaaacttctatcttcccatgaccccaaagccaagggcaacagatcagtaaagaacgtggtcagagtagaacccctgaagtattttttaatcctacctcaaaatttaacagttacctgagagatttaacattatctagttcattgaatcattgtatgtggtcatggataaattgcacaccttggaattcgctttctaaaggaaatcaaatgaatggaggaactttccaaacaccactttacttgtgttatatagccaatataactatctctactgaatgtcattgaaaaactaaaaaattaaacttatttacaaataggtaaaaaaaaaaaaaaaaacaaacacaaaaaaacnnntggggggcgccnngggccncggaaaaacc

SEQ ID NO: 731869 - DNA, 3529 bp, Homo sapiens
  misc_feature (14)..(14): n is a, c, g, or t
  misc_feature (16)..(16): n is a, c, g, or t
  misc_feature (25)..(25): n is a, c, g, or t
cgcgtgggttcctngnagacgtcgngactctaaattgccccctctgaggtcaaggaacacaagatggttttggaaatgctgaacccgatacattataacatcaccagcatcgtgcctgaagccatgcctgctgccaccatgccagtcctgctcctcactggcctttttctcttggtgtggaattatgagggcacatcctcaataccaggtcctggctactgcatgggaattggacccctcatctcccacggcagattcctgtggatggggatcggcagtgcctgcaactactacaaccgggtatatggagaattcatgcgagtctggatctctggagaggaaacactcattatcagcaagtcctcaagtatgttccacataatgaagcacaatcattacagctctcgattcggcagcaaacttgggctgcagtgcatcggtatgcatgagaaaggcatcatatttaacaacaatccagagctctggaaaacaactcgacccttctttatgaaagctctgtcaggccccggccttgttcgtatggtcacagtctgtgctgaatccctcaaaacacatctggacaggttggaggaggtgaccaatgaatcgggctatgtggacgtgttgacccttctgcgtcgtgtcatgctggacacctctaacacgctcttcttgaggatccctttggacgaaagtgctatcgtggttaaaatccaaggttattttgatgcatggcaagctctcctcatcaaaccagacatcttctttaagatttcttggctatacaaaaagtatgagaagtctgtcaaggatttgaaagatgccatagaagttctgatagcagaaaaaagacgcaggatttccacagaagagaaactggaagaatgtatggactttgccactgagttgattttagcagagaaacgtggtgacctgacaagagagaatgtgaaccagtgcatattggaaatgctgatcgcagctcctgacaccatgtctgtctctttgttcttcatgctatttctcattgcaaagcaccctaatgttgaagaggcaataataaaggaaatccagactgttattggtgagagagacataaagattgatgatatacaaaaattaaaagtgatggaaaacttcatttatgagagcatgcggtaccagcctgtcgtggacttggtcatgcgcaaagccttagaagatgatgtaatcgatggctacccagtgaaaaaggggacaaacattatcctgaatattggaaggatgcacagactcgagtttttccccaaacccaatgaatttactcttgaaaattttgcaaagaatgttccttataggtactttcagccatttggctttgggccccgtggctgtgcaggaaagtacatcgccatggtgatgatgaaagccatcctcgttacacttctgagacgattccacgtgaagacattgcaaggacagtgtgttgagagcatacagaagatacacgacttgtccttgcacccagatgagactaaaaacatgctggaaatgatctttaccccaagaaactcagacaggtgtctggaacactagagaaggctggtcagtacctactctggagcatttctcatcagtagttcacatacaaatcatccatccttgccaatagtgtcatcctcacagtgaacactcagtggcccatggcattttataggcatacctcctatgggttgtcaccaagctaggtgctattggtcatctgctcctgttcacaccagagaaccaggctacaagagaaaaagcagaggccaagagtttgagggagaaatagtcggtgaagaaaccgtatccataaagacccgattccaccaaatgtgctttgagaaggataggccttcattaacaaaatgtatgtctggttccccagtagagctctactgcctcaacccaaggggatttttatgtctggggcagaaacactcaagttgattagaaagaccaggccaatgtcagggtacctggggccaaacccacctgctagtgtgaattaaagtactttaattttgttttctgtggaggtggaaaagcaacattcatagtctttggagaaatgcttagaaattcagcatttgacccttgctgtgaattaagcccaattaattcctgtttgtctacatatgatctgtctgtggcaaaagtttaatcagaggaaattctttcccagtctgtcgatttatgcctcagccacttgcctgtgctacaattcattgtgttacctgtagattcaggtaatacaaactatatataatcatcaagtaatacaaactaatttagtaatagcctgggttaagtattattagggccctgtgtctgctgtagaaaaaaaaattcacatgatgcacttcaaattcaaataaaaatccttttggcatgttcccatttttgcttagctcaattagtgtggctaaccaagagataactgtaaatgtgacattgatttgctcttactacagcttcagtgattgggggaggaaaagtcccaacccaatgggctcaaacttctatcttcccatgaccccaaagccaagggcaacagatcagtaaagaacgtggtcagagtagaacccctgaagtattttttaatcctacctcaaaatttaacagttacctgagagatttaacattatctagttcattgaatcattgtatgtggtcatggataaattgcacaccttggaattcgctttctaaaggaaatcaaatgaatggaggaactttccaaacaccactttacttgtgttatatagccaatataactatctctactgaatgtcattgaaaaactaaaaaattaaacttatttacaaataggtaaatatttgtcattgaatccattgccatcccatttgactgttcttttcatcctactgtctagtaataagctgagtataagatgacagtgtaatctccctgaaagcaggagctactttctttcttttgtaatctatttccatccccatttccctgtcctgtctccctgtattcactcccaagctcagttctgaatagacattcctgctcagagatactcccaactgatgcagaaaccaaataaagaggtaggtattccaagaattcaagaatggacattagtaaagaataaaacatttatttgagcttggaattatttggatcatctatatggcctaaaaatatatggactatgcctgtgtacctgaatacgtatgtagtcaggtcaagacaatcatccaaataacttagacccctaaaagcaaggccaggatttgcaatttaatgtgtcccaattaattcacttgaaaattagtaacactctgtttacgttgcctctggctggagctgcatggtggaagaagcccaactttggatccatgtacttcacccatccaatactcttgggacatttatgtgtattttatctgtatatatgaagccaatgtctatgtctacacagtcaaagtgaaatgcatgtttgatatagctgtacatagatatctattttgcaggt

SEQ ID NO: 731870 - DNA, 2981 bp, Homo sapiens
  misc_feature (14)..(14): n is a, c, g, or t
  misc_feature (16)..(16): n is a, c, g, or t
  misc_feature (25)..(25): n is a, c, g, or t
  misc_feature (2943)..(2943): n is a, c, g, or t
  misc_feature (2978)..(2978): n is a, c, g, or t
cgcgtgggttcctngnagacgtcgngactctaaattgccccctctgaggtcaaggaacacaagatggttttggaaatgctgaacccgatacattataacatcaccagcatcgtgcctgaagccatgcctgctgccaccatgccagtcctgctcctcactggcctttttctcttggtgtggaattatgagggcacatcctcaataccaggtcctggctactgcatgggaattggacccctcatctcccacggcagattcctgtggatggggatcggcagtgcctgcaactactacaaccgggtatatggagaattcatgcgagtctggatctctggagaggaaacactcattatcagcaagtcctcaagtatgttccacataatgaagcacaatcattacagctctcgattcggcagcaaacttgggctgcagtgcatcggtatgcatgagaaaggcatcatatttaacaacaatccagagctctggaaaacaactcgacccttctttatgaaagctctgtcaggccccggccttgttcgtatggtcacagtctgtgctgaatccctcaaaacacatctggacaggttggaggaggtgaccaatgaatcgggctatgtggacgtgttgacccttctgcgtcgtgtcatgctggacacctctaacacgctcttcttgaggatccctttggacgaaagtgctatcgtggttaaaatccaaggttattttgatgcatggcaagctctcctcatcaaaccagacatcttctttaagatttcttggctatacaaaaagtatgagaagtctgtcaaggatttgaaagatgccatagaagttctgatagcagaaaaaagacgcaggatttccacagaagagaaactggaagaatgtatggactttgccactgagttgattttagcagagaaacgtggtgacctgacaagagagaatgtgaaccagtgcatattggaaatgctgatcgcagctcctgacaccatgtctgtctctttgttcttcatgctatttctcattgcaaagcaccctaatgttgaagaggcaataataaaggaaatccagactgttattggtgagagagacataaagattgatgatatacaaaaattaaaagtgatggaaaacttcatttatgagagcatgcggtaccagcctgtcgtggacttggtcatgcgcaaagccttagaagatgatgtaatcgatggctacccagtgaaaaaggggacaaacattatcctgaatattggaaggatgcacagactcgagtttttccccaaacccaatgaatttactcttgaaaattttgcaaagaatgttccttataggtactttcagccatttggctttgggccccgtggctgtgcaggaaagtacatcgccatggtgatgatgaaagccatcctcgttacacttctgagacgattccacgtgaagacattgcaaggacagtgtgttgagagcatacagaagatacacgacttgtccttgcacccagatgagactaaaaacatgctggaaatgatctttaccccaagaaactcagacaggtgtctggaacactagagaaggctggtcagtacctactctggagcatttctcatcagtagttcacatacaaatcatccatccttgccaatagtgtcatcctcacagtgaacactcagtggcccatggcattttataggcatacctcctatgggttgtcaccaagctaggtgctattggtcatctgctcctgttcacaccagagaaccaggctacaagagaaaaagcagaggccaagagtttgagggagaaatagtcggtgaagaaaccgtatccataaagacccgattccaccaaatgtgctttgagaaggataggccttcattaacaaaatgtatgtctggttccccagtagagctctactgcctcaacccaaggggatttttatgtctggggcagaaacactcaagttgattagaaagaccaggccaatgtcagggtacctggggccaaacccacctgctagtgtgaattaaagtactttaattttgttttctgtggaggtggaaaagcaacattcatagtctttggagaaatgcttagaaattcagcatttgacccttgctgtgaattaagcccaattaattcctgtttgtctacatatgatctgtctgtggcaaaagtttaatcagaggaaattctttcccagtctgtcgatttatgcctcagccacttgcctgtgctacaattcattgtgttacctgtagattcaggtaatacaaactatatataatcatcaagtaatacaaactaatttagtaatagcctgggttaagtattattagggccctgtgtctgctgtagaaaaaaaaattcacatgatgcacttcaaattcaaataaaaatccttttggcatgttcccatttttgcttagctcaattagtgtggctaaccaagagataactgtaaatgtgacattgatttgctcttactacagcttcagtgattgggggaggaaaagtcccaacccaatgggctcaaacttctatcttcccatgaccccaaagccaagggcaacagatcagtaaagaacgtggtcagagtagaacccctgaagtattttttaatcctacctcaaaatttaacagttacctgagagatttaacattatctagttcattgaatcattgtatgtggtcatggataaattgcacaccttggaattcgctttctaaaggaaatcaaatgaatggaggaactttccaaacaccactttacttgtgttatatagccaatataactatctctactgaatgtcattgaaaaactaaaaaattaaacttatttacaaataaaaaaaaaaaaaaaaaaaaaaaaaaaaaaaaaaaaaaaaaaaataaaaaaaaaaaaaaaaaaaaaaaaaaaaaaaaaaaaaaaaaaaaaanaaaaaaaaaaaaaaaaaaaaaaaaaaaaaaaaaanaag

SEQ ID NO: 731871 - DNA, 2852 bp, Homo sapiens
  misc_feature (14)..(14): n is a, c, g, or t
  misc_feature (16)..(16): n is a, c, g, or t
  misc_feature (25)..(25): n is a, c, g, or t
cgcgtgggttcctngnagacgtcgngactctaaattgccccctctgaggtcaaggaacacaagatggttttggaaatgctgaacccgatacattataacatcaccagcatcgtgcctgaagccatgcctgctgccaccatgccagtcctgctcctcactggcctttttctcttggtgtggaattatgagggcacatcctcaataccaggtcctggctactgcatgggaattggacccctcatctcccacggcagattcctgtggatggggatcggcagtgcctgcaactactacaaccgggtatatggagaattcatgcgagtctggatctctggagaggaaacactcattatcagcaagtcctcaagtatgttccacataatgaagcacaatcattacagctctcgattcggcagcaaacttgggctgcagtgcatcggtatgcatgagaaaggcatcatatttaacaacaatccagagctctggaaaacaactcgacccttctttatgaaagctctgtcaggccccggccttgttcgtatggtcacagtctgtgctgaatccctcaaaacacatctggacaggttggaggaggtgaccaatgaatcgggctatgtggacgtgttgacccttctgcgtcgtgtcatgctggacacctctaacacgctcttcttgaggatccctttggacgaaagtgctatcgtggttaaaatccaaggttattttgatgcatggcaagctctcctcatcaaaccagacatcttctttaagatttcttggctatacaaaaagtatgagaagtctgtcaaggatttgaaagatgccatagaagttctgatagcagaaaaaagacgcaggatttccacagaagagaaactggaagaatgtatggactttgccactgagttgattttagcagagaaacgtggtgacctgacaagagagaatgtgaaccagtgcatattggaaatgctgatcgcagctcctgacaccatgtctgtctctttgttcttcatgctatttctcattgcaaagcaccctaatgttgaagaggcaataataaaggaaatccagactgttattggtgagagagacataaagattgatgatatacaaaaattaaaagtgatggaaaacttcatttatgagagcatgcggtaccagcctgtcgtggacttggtcatgcgcaaagccttagaagatgatgtaatcgatggctacccagtgaaaaaggggacaaacattatcctgaatattggaaggatgcacagactcgagtttttccccaaacccaatgaatttactcttgaaaattttgcaaagaatgttccttataggtactttcagccatttggctttgggccccgtggctgtgcaggaaagtacatcgccatggtgatgatgaaagccatcctcgttacacttctgagacgattccacgtgaagacattgcaaggacagtgtgttgagagcatacagaagatacacgacttgtccttgcacccagatgagactaaaaacatgctggaaatgatctttaccccaagaaactcagacaggtgtctggaacactagagaaggctggtcagtacctactctggagcatttctcatcagtagttcacatacaaatcatccatccttgccaatagtgtcatcctcacagtgaacactcagtggcccatggcattttataggcatacctcctatgggttgtcaccaagctaggtgctattggtcatctgctcctgttcacaccagagaaccaggctacaagagaaaaagcagaggccaagagtttgagggagaaatagtcggtgaagaaaccgtatccataaagacccgattccaccaaatgtgctttgagaaggataggccttcattaacaaaatgtatgtctggttccccagtagagctctactgcctcaacccaaggggatttttatgtctggggcagaaacactcaagttgattagaaagaccaggccaatgtcagggtacctggggccaaacccacctgctagtgtgaattaaagtactttaattttgttttctgtggaggtggaaaagcaacattcatagtctttggagaaatgcttagaaattcagcatttgacccttgctgtgaattaagcccaattaattcctgtttgtctacatatgatctgtctgtggcaaaagtttaatcagaggaaattctttcccagtctgtcgatttatgcctcagccacttgcctgtgctacaattcattgtgttacctgtagattcaggtaatacaaactatatataatcatcaagtaatacaaactaatttagtaatagcctgggttaagtattattagggccctgtgtctgctgtagaaaaaaaaattcacatgatgcacttcaaattcaaataaaaatccttttggcatgttcccatttttgcttagctcaattagtgtggctaaccaagagataactgtaaatgtgacattgatttgctcttactacagcttcagtgattgggggaggaaaagtcccaacccaatgggctcaaacttctatcttcccatgaccccaaagccaagggcaacagatcagtaaagaacgtggtcagagtagaacccctgaagtattttttaatcctacctcaaaatttaacagttacctgagagatttaacattatctagttcattgaatcattgtatgtggtcatggataaattgcacaccttggaattcgctttctaaaggaaatcaaatgaatggaggaactttccaaacaccactttacttgtgttatatagccaatataactatctctactgaatgtcattgaaaaactaaaaaattaaacttatttacaaata

SEQ ID NO: 731872 - DNA, 2812 bp, Homo sapiens
  misc_feature (14)..(14): n is a, c, g, or t
  misc_feature (16)..(16): n is a, c, g, or t
  misc_feature (25)..(25): n is a, c, g, or t
cgcgtgggttcctngnagacgtcgngactctaaattgccccctctgaggtcaaggaacacaagatggttttggaaatgctgaacccgatacattataacatcaccagcatcgtgcctgaagccatgcctgctgccaccatgccagtcctgctcctcactggcctttttctcttggtgtggaattatgagggcacatcctcaataccaggtcctggctactgcatgggaattggacccctcatctcccacggcagattcctgtggatggggatcggcagtgcctgcaactactacaaccgggtatatggagaattcatgcgagtctggatctctggagaggaaacactcattatcagcaagtcctcaagtatgttccacataatgaagcacaatcattacagctctcgattcggcagcaaacttgggctgcagtgcatcggtatgcatgagaaaggcatcatatttaacaacaatccagagctctggaaaacaactcgacccttctttatgaaagctctgtcaggccccggccttgttcgtatggtcacagtctgtgctgaatccctcaaaacacatctggacaggttggaggaggtgaccaatgaatcgggctatgtggacgtgttgacccttctgcgtcgtgtcatgctggacacctctaacacgctcttcttgaggatccctttggacgaaagtgctatcgtggttaaaatccaaggttattttgatgcatggcaagctctcctcatcaaaccagacatcttctttaagatttcttggctatacaaaaagtatgagaagtctgtcaaggatttgaaagatgccatagaagttctgatagcagaaaaaagacgcaggatttccacagaagagaaactggaagaatgtatggactttgccactgagttgattttagcagagaaacgtggtgacctgacaagagagaatgtgaaccagtgcatattggaaatgctgatcgcagctcctgacaccatgtctgtctctttgttcttcatgctatttctcattgcaaagcaccctaatgttgaagaggcaataataaaggaaatccagactgttattggtgagagagacataaagattgatgatatacaaaaattaaaagtgatggaaaacttcatttatgagagcatgcggtaccagcctgtcgtggacttggtcatgcgcaaagccttagaagatgatgtaatcgatggctacccagtgaaaaaggggacaaacattatcctgaatattggaaggatgcacagactcgagtttttccccaaacccaatgaatttactcttgaaaattttgcaaagaatgttccttataggtactttcagccatttggctttgggccccgtggctgtgcaggaaagtacatcgccatggtgatgatgaaagccatcctcgttacacttctgagacgattccacgtgaagacattgcaaggacagtgtgttgagagcatacagaagatacacgacttgtccttgcacccagatgagactaaaaacatgctggaaatgatctttaccccaagaaactcagacaggtgtctggaacactagagaaggctggtcagtacctactctggagcatttctcatcagtagttcacatacaaatcatccatccttgccaatagtgtcatcctcacagtgaacactcagtggcccatggcattttataggcatacctcctatgggttgtcaccaagctaggtgctattggtcatctgctcctgttcacaccagagaaccaggctacaagagaaaaagcagaggccaagagtttgagggagaaatagtcggtgaagaaaccgtatccataaagacccgattccaccaaatgtgctttgagaaggataggccttcattaacaaaatgtatgtctggttccccagtagagctctactgcctcaacccaaggggatttttatgtctggggcagaaacactcaagttgattagaaagaccaggccaatgtcagggtacctggggccaaacccacctgctagtgtgaattaaagtactttaattttgttttctgtggaggtggaaaagcaacattcatagtctttggagaaatgcttagaaattcagcatttgacccttgctgtgaattaagcccaattaattcctgtttgtctacatatgatctgtctgtggcaaaagtttaatcagaggaaattctttcccagtctgtcgatttatgcctcagccacttgcctgtgctacaattcattgtgttacctgtagattcaggtaatacaaactatatataatcatcaagtaatacaaactaatttagtaatagcctgggttaagtattattagggccctgtgtctgctgtagaaaaaaaaattcacatgatgcacttcaaattcaaataaaaatccttttggcatgttcccatttttgcttagctcaattagtgtggctaaccaagagataactgtaaatgtgacattgatttgctcttactacagcttcagtgattgggggaggaaaagtcccaacccaatgggctcaaacttctatcttcccatgaccccaaagccaagggcaacagatcagtaaagaacgtggtcagagtagaacccctgaagtattttttaatcctacctcaaaatttaacagttacctgagagatttaacattatctagttcattgaatcattgtatgtggtcatggataaattgcacaccttggaattcgctttctaaaggaaatcaaatgaatggaggaactttccaaacaccactttacttgtgttatatagccaatataactatctctactgaa

SEQ ID NO: 731873 - DNA, 2813 bp, Homo sapiens
  misc_feature (14)..(14): n is a, c, g, or t
  misc_feature (16)..(16): n is a, c, g, or t
  misc_feature (25)..(25): n is a, c, g, or t
cgcgtgggttcctngnagacgtcgngactctaaattgccccctctgaggtcaaggaacacaagatggttttggaaatgctgaacccgatacattataacatcaccagcatcgtgcctgaagccatgcctgctgccaccatgccagtcctgctcctcactggcctttttctcttggtgtggaattatgagggcacatcctcaataccaggtcctggctactgcatgggaattggacccctcatctcccacggcagattcctgtggatggggatcggcagtgcctgcaactactacaaccgggtatatggagaattcatgcgagtctggatctctggagaggaaacactcattatcagcaagtcctcaagtatgttccacataatgaagcacaatcattacagctctcgattcggcagcaaacttgggctgcagtgcatcggtatgcatgagaaaggcatcatatttaacaacaatccagagctctggaaaacaactcgacccttctttatgaaagctctgtcaggccccggccttgttcgtatggtcacagtctgtgctgaatccctcaaaacacatctggacaggttggaggaggtgaccaatgaatcgggctatgtggacgtgttgacccttctgcgtcgtgtcatgctggacacctctaacacgctcttcttgaggatccctttggacgaaagtgctatcgtggttaaaatccaaggttattttgatgcatggcaagctctcctcatcaaaccagacatcttctttaagatttcttggctatacaaaaagtatgagaagtctgtcaaggatttgaaagatgccatagaagttctgatagcagaaaaaagacgcaggatttccacagaagagaaactggaagaatgtatggactttgccactgagttgattttagcagagaaacgtggtgacctgacaagagagaatgtgaaccagtgcatattggaaatgctgatcgcagctcctgacaccatgtctgtctctttgttcttcatgctatttctcattgcaaagcaccctaatgttgaagaggcaataataaaggaaatccagactgttattggtgagagagacataaagattgatgatatacaaaaattaaaagtgatggaaaacttcatttatgagagcatgcggtaccagcctgtcgtggacttggtcatgcgcaaagccttagaagatgatgtaatcgatggctacccagtgaaaaaggggacaaacattatcctgaatattggaaggatgcacagactcgagtttttccccaaacccaatgaatttactcttgaaaattttgcaaagaatgttccttataggtactttcagccatttggctttgggccccgtggctgtgcaggaaagtacatcgccatggtgatgatgaaagccatcctcgttacacttctgagacgattccacgtgaagacattgcaaggacagtgtgttgagagcatacagaagatacacgacttgtccttgcacccagatgagactaaaaacatgctggaaatgatctttaccccaagaaactcagacaggtgtctggaacactagagaaggctggtcagtacctactctggagcatttctcatcagtagttcacatacaaatcatccatccttgccaatagtgtcatcctcacagtgaacactcagtggcccatggcattttataggcatacctcctatgggttgtcaccaagctaggtgctattggtcatctgctcctgttcacaccagagaaccaggctacaagagaaaaagcagaggccaagagtttgagggagaaatagtcggtgaagaaaccgtatccataaagacccgattccaccaaatgtgctttgagaaggataggccttcattaacaaaatgtatgtctggttccccagtagagctctactgcctcaacccaaggggatttttatgtctggggcagaaacactcaagttgattagaaagaccaggccaatgtcagggtacctggggccaaacccacctgctagtgtgaattaaagtactttaattttgttttctgtggaggtggaaaagcaacattcatagtctttggagaaatgcttagaaattcagcatttgacccttgctgtgaattaagcccaattaattcctgtttgtctacatatgatctgtctgtggcaaaagtttaatcagaggaaattctttcccagtctgtcgatttatgcctcagccacttgcctgtgctacaattcattgtgttacctgtagattcaggtaatacaaactatatataatcatcaagtaatacaaactaatttagtaatagcctgggttaagtattattagggccctgtgtctgctgtagaaaaaaaaattcacatgatgcacttcaaattcaaataaaaatccttttggcatgttcccatttttgcttagctcaattagtgtggctaaccaagagataactgtaaatgtgacattgatttgctcttactacaaggggtactcctctcatccccttatccttctccctcgacattttctccctctttcttcccatgaccccaaagccaagggcaacagatcagtaaagaacgtggtcagagtagaacccctgaagtattttttaatcctacctcaaaatttaacagttacctgagagatttaacattatctagttcattgaatcattgtatgtggtcatggataaattgcacaccttggaattcgctttctaaaggaaatcaaatgaatggaggaactttccaaacaccactttacttgtgttatatagccaatataactatctctactgaa

SEQ ID NO: 731874 - DNA, 2920 bp, Homo sapiens
  misc_feature (14)..(14): n is a, c, g, or t
  misc_feature (16)..(16): n is a, c, g, or t
  misc_feature (25)..(25): n is a, c, g, or t
  misc_feature (2889)..(2891): n is a, c, g, or t
  misc_feature (2903)..(2904): n is a, c, g, or t
  misc_feature (2910)..(2910): n is a, c, g, or t
cgcgtgggttcctngnagacgtcgngactctaaattgccccctctgaggtcaaggaacacaagatggttttggaaatgctgaacccgatacattataacatcaccagcatcgtgcctgaagccatgcctgctgccaccatgccagtcctgctcctcactggcctttttctcttggtgtggaattatgagggcacatcctcaataccaggtcctggctactgcatgggaattggacccctcatctcccacggcagattcctgtggatggggatcggcagtgcctgcaactactacaaccgggtatatggagaattcatgcgagtctggatctctggagaggaaacactcattatcagcaagtcctcaagtatgttccacataatgaagcacaatcattacagctctcgattcggcagcaaacttgggctgcagtgcatcggtatgcatgagaaaggcatcatatttaacaacaatccagagctctggaaaacaactcgacccttctttatgaaagctctgtcaggccccggccttgttcgtatggtcacagtctgtgctgaatccctcaaaacacatctggacaggttggaggaggtgaccaatgaatcgggctatgtggacgtgttgacccttctgcgtcgtgtcatgctggacacctctaacacgctcttcttgaggatccctttggacgaaagtgctatcgtggttaaaatccaaggttattttgatgcatggcaagctctcctcatcaaaccagacatcttctttaagatttcttggctatacaaaaagtatgagaagtctgtcaaggatttgaaagatgccatagaagttctgatagcagaaaaaagacgcaggatttccacagaagagaaactggaagaatgtatggactttgccactgagttgattttagcagagaaacgtggtgacctgacaagagagaatgtgaaccagtgcatattggaaatgctgatcgcagctcctgacaccatgtctgtctctttgttcttcatgctatttctcattgcaaagcaccctaatgttgaagaggcaataataaaggaaatccagactgttattggtgagagagacataaagattgatgatatacaaaaattaaaagtgatggaaaacttcatttatgagagcatgcggtaccagcctgtcgtggacttggtcatgcgcaaagccttagaagatgatgtaatcgatggctacccagtgaaaaaggggacaaacattatcctgaatattggaaggatgcacagactcgagtttttccccaaacccaatgaatttactcttgaaaattttgcaaagaatgttccttataggtactttcagccatttggctttgggccccgtggctgtgcaggaaagtacatcgccatggtgatgatgaaagccatcctcgttacacttctgagacgattccacgtgaagacattgcaaggacagtgtgttgagagcatacagaagatacacgacttgtccttgcacccagatgagactaaaaacatgctggaaatgatctttaccccaagaaactcagacaggtgtctggaacactagagaaggctggtcagtacctactctggagcatttctcatcagtagttcacatacaaatcatccatccttgccaatagtgtcatcctcacagtgaacactcagtggcccatggcattttataggcatacctcctatgggttgtcaccaagctaggtgctattggtcatctgctcctgttcacaccagagaaccaggctacaagagaaaaagcagaggccaagagtttgagggagaaatagtcggtgaagaaaccgtatccataaagacccgattccaccaaatgtgctttgagaaggataggccttcattaacaaaatgtatgtctggttccccagtagagctctactgcctcaacccaaggggatttttatgtctggggcagaaacactcaagttgattagaaagaccaggccaatgtcagggtacctggggccaaacccacctgctagtgtgaattaaagtactttaattttgttttctgtggaggtggaaaagcaacattcatagtctttggagaaatgcttagaaattcagcatttgacccttgctgtgaattaagcccaattaattcctgtttgtctacatatgatctgtctgtggcaaaagtttaatcagaggaaattctttcccagtctgtcgatttatgcctcagccacttgcctgtgctacaattcattgtgttacctgtagattcaggtaatacaaactatatataatcatcaagtaatacaaactaatttagtaatagcctgggttaagtattattagggccctgtgtctgctgtagaaaaaaaaattcacatgatgcacttcaaattcaaataaaaatccttttggcatgttcccatttttgcttagctcaattagtgtggctaaccaagagataactgtaaatgtgacattgatttgctcttactacaaggggtactcctctcatccccttatccttctccctcgacattttctccctctttcttcccatgaccccaaagccaagggcaacagatcagtaaagaacgtggtcagagtagaacccctgaagtattttttaatcctacctcaaaatttaacagttacctgagagatttaacattatctagttcattgaatcattgtatgtggtcatggataaattgcacaccttggaattcgctttctaaaggaaatcaaatgaatggaggaactttccaaacaccactttacttgtgttatatagccaatataactatctctactgaatgtcattgaaaaactaaaaaattaaacttatttacaaataggtaaaaaaaaaaaaaaaaacaaacacaaaaaaacnnntggggggcgccnngggccncggaaaaacc

SEQ ID NO: 731875 - DNA, 2853 bp, Homo sapiens
  misc_feature (14)..(14): n is a, c, g, or t
  misc_feature (16)..(16): n is a, c, g, or t
  misc_feature (25)..(25): n is a, c, g, or t
cgcgtgggttcctngnagacgtcgngactctaaattgccccctctgaggtcaaggaacacaagatggttttggaaatgctgaacccgatacattataacatcaccagcatcgtgcctgaagccatgcctgctgccaccatgccagtcctgctcctcactggcctttttctcttggtgtggaattatgagggcacatcctcaataccaggtcctggctactgcatgggaattggacccctcatctcccacggcagattcctgtggatggggatcggcagtgcctgcaactactacaaccgggtatatggagaattcatgcgagtctggatctctggagaggaaacactcattatcagcaagtcctcaagtatgttccacataatgaagcacaatcattacagctctcgattcggcagcaaacttgggctgcagtgcatcggtatgcatgagaaaggcatcatatttaacaacaatccagagctctggaaaacaactcgacccttctttatgaaagctctgtcaggccccggccttgttcgtatggtcacagtctgtgctgaatccctcaaaacacatctggacaggttggaggaggtgaccaatgaatcgggctatgtggacgtgttgacccttctgcgtcgtgtcatgctggacacctctaacacgctcttcttgaggatccctttggacgaaagtgctatcgtggttaaaatccaaggttattttgatgcatggcaagctctcctcatcaaaccagacatcttctttaagatttcttggctatacaaaaagtatgagaagtctgtcaaggatttgaaagatgccatagaagttctgatagcagaaaaaagacgcaggatttccacagaagagaaactggaagaatgtatggactttgccactgagttgattttagcagagaaacgtggtgacctgacaagagagaatgtgaaccagtgcatattggaaatgctgatcgcagctcctgacaccatgtctgtctctttgttcttcatgctatttctcattgcaaagcaccctaatgttgaagaggcaataataaaggaaatccagactgttattggtgagagagacataaagattgatgatatacaaaaattaaaagtgatggaaaacttcatttatgagagcatgcggtaccagcctgtcgtggacttggtcatgcgcaaagccttagaagatgatgtaatcgatggctacccagtgaaaaaggggacaaacattatcctgaatattggaaggatgcacagactcgagtttttccccaaacccaatgaatttactcttgaaaattttgcaaagaatgttccttataggtactttcagccatttggctttgggccccgtggctgtgcaggaaagtacatcgccatggtgatgatgaaagccatcctcgttacacttctgagacgattccacgtgaagacattgcaaggacagtgtgttgagagcatacagaagatacacgacttgtccttgcacccagatgagactaaaaacatgctggaaatgatctttaccccaagaaactcagacaggtgtctggaacactagagaaggctggtcagtacctactctggagcatttctcatcagtagttcacatacaaatcatccatccttgccaatagtgtcatcctcacagtgaacactcagtggcccatggcattttataggcatacctcctatgggttgtcaccaagctaggtgctattggtcatctgctcctgttcacaccagagaaccaggctacaagagaaaaagcagaggccaagagtttgagggagaaatagtcggtgaagaaaccgtatccataaagacccgattccaccaaatgtgctttgagaaggataggccttcattaacaaaatgtatgtctggttccccagtagagctctactgcctcaacccaaggggatttttatgtctggggcagaaacactcaagttgattagaaagaccaggccaatgtcagggtacctggggccaaacccacctgctagtgtgaattaaagtactttaattttgttttctgtggaggtggaaaagcaacattcatagtctttggagaaatgcttagaaattcagcatttgacccttgctgtgaattaagcccaattaattcctgtttgtctacatatgatctgtctgtggcaaaagtttaatcagaggaaattctttcccagtctgtcgatttatgcctcagccacttgcctgtgctacaattcattgtgttacctgtagattcaggtaatacaaactatatataatcatcaagtaatacaaactaatttagtaatagcctgggttaagtattattagggccctgtgtctgctgtagaaaaaaaaattcacatgatgcacttcaaattcaaataaaaatccttttggcatgttcccatttttgcttagctcaattagtgtggctaaccaagagataactgtaaatgtgacattgatttgctcttactacaaggggtactcctctcatccccttatccttctccctcgacattttctccctctttcttcccatgaccccaaagccaagggcaacagatcagtaaagaacgtggtcagagtagaacccctgaagtattttttaatcctacctcaaaatttaacagttacctgagagatttaacattatctagttcattgaatcattgtatgtggtcatggataaattgcacaccttggaattcgctttctaaaggaaatcaaatgaatggaggaactttccaaacaccactttacttgtgttatatagccaatataactatctctactgaatgtcattgaaaaactaaaaaattaaacttatttacaaata

SEQ ID NO: 731876 - DNA, 3530 bp, Homo sapiens
  misc_feature (14)..(14): n is a, c, g, or t
  misc_feature (16)..(16): n is a, c, g, or t
  misc_feature (25)..(25): n is a, c, g, or t
cgcgtgggttcctngnagacgtcgngactctaaattgccccctctgaggtcaaggaacacaagatggttttggaaatgctgaacccgatacattataacatcaccagcatcgtgcctgaagccatgcctgctgccaccatgccagtcctgctcctcactggcctttttctcttggtgtggaattatgagggcacatcctcaataccaggtcctggctactgcatgggaattggacccctcatctcccacggcagattcctgtggatggggatcggcagtgcctgcaactactacaaccgggtatatggagaattcatgcgagtctggatctctggagaggaaacactcattatcagcaagtcctcaagtatgttccacataatgaagcacaatcattacagctctcgattcggcagcaaacttgggctgcagtgcatcggtatgcatgagaaaggcatcatatttaacaacaatccagagctctggaaaacaactcgacccttctttatgaaagctctgtcaggccccggccttgttcgtatggtcacagtctgtgctgaatccctcaaaacacatctggacaggttggaggaggtgaccaatgaatcgggctatgtggacgtgttgacccttctgcgtcgtgtcatgctggacacctctaacacgctcttcttgaggatccctttggacgaaagtgctatcgtggttaaaatccaaggttattttgatgcatggcaagctctcctcatcaaaccagacatcttctttaagatttcttggctatacaaaaagtatgagaagtctgtcaaggatttgaaagatgccatagaagttctgatagcagaaaaaagacgcaggatttccacagaagagaaactggaagaatgtatggactttgccactgagttgattttagcagagaaacgtggtgacctgacaagagagaatgtgaaccagtgcatattggaaatgctgatcgcagctcctgacaccatgtctgtctctttgttcttcatgctatttctcattgcaaagcaccctaatgttgaagaggcaataataaaggaaatccagactgttattggtgagagagacataaagattgatgatatacaaaaattaaaagtgatggaaaacttcatttatgagagcatgcggtaccagcctgtcgtggacttggtcatgcgcaaagccttagaagatgatgtaatcgatggctacccagtgaaaaaggggacaaacattatcctgaatattggaaggatgcacagactcgagtttttccccaaacccaatgaatttactcttgaaaattttgcaaagaatgttccttataggtactttcagccatttggctttgggccccgtggctgtgcaggaaagtacatcgccatggtgatgatgaaagccatcctcgttacacttctgagacgattccacgtgaagacattgcaaggacagtgtgttgagagcatacagaagatacacgacttgtccttgcacccagatgagactaaaaacatgctggaaatgatctttaccccaagaaactcagacaggtgtctggaacactagagaaggctggtcagtacctactctggagcatttctcatcagtagttcacatacaaatcatccatccttgccaatagtgtcatcctcacagtgaacactcagtggcccatggcattttataggcatacctcctatgggttgtcaccaagctaggtgctattggtcatctgctcctgttcacaccagagaaccaggctacaagagaaaaagcagaggccaagagtttgagggagaaatagtcggtgaagaaaccgtatccataaagacccgattccaccaaatgtgctttgagaaggataggccttcattaacaaaatgtatgtctggttccccagtagagctctactgcctcaacccaaggggatttttatgtctggggcagaaacactcaagttgattagaaagaccaggccaatgtcagggtacctggggccaaacccacctgctagtgtgaattaaagtactttaattttgttttctgtggaggtggaaaagcaacattcatagtctttggagaaatgcttagaaattcagcatttgacccttgctgtgaattaagcccaattaattcctgtttgtctacatatgatctgtctgtggcaaaagtttaatcagaggaaattctttcccagtctgtcgatttatgcctcagccacttgcctgtgctacaattcattgtgttacctgtagattcaggtaatacaaactatatataatcatcaagtaatacaaactaatttagtaatagcctgggttaagtattattagggccctgtgtctgctgtagaaaaaaaaattcacatgatgcacttcaaattcaaataaaaatccttttggcatgttcccatttttgcttagctcaattagtgtggctaaccaagagataactgtaaatgtgacattgatttgctcttactacaaggggtactcctctcatccccttatccttctccctcgacattttctccctctttcttcccatgaccccaaagccaagggcaacagatcagtaaagaacgtggtcagagtagaacccctgaagtattttttaatcctacctcaaaatttaacagttacctgagagatttaacattatctagttcattgaatcattgtatgtggtcatggataaattgcacaccttggaattcgctttctaaaggaaatcaaatgaatggaggaactttccaaacaccactttacttgtgttatatagccaatataactatctctactgaatgtcattgaaaaactaaaaaattaaacttatttacaaataggtaaatatttgtcattgaatccattgccatcccatttgactgttcttttcatcctactgtctagtaataagctgagtataagatgacagtgtaatctccctgaaagcaggagctactttctttcttttgtaatctatttccatccccatttccctgtcctgtctccctgtattcactcccaagctcagttctgaatagacattcctgctcagagatactcccaactgatgcagaaaccaaataaagaggtaggtattccaagaattcaagaatggacattagtaaagaataaaacatttatttgagcttggaattatttggatcatctatatggcctaaaaatatatggactatgcctgtgtacctgaatacgtatgtagtcaggtcaagacaatcatccaaataacttagacccctaaaagcaaggccaggatttgcaatttaatgtgtcccaattaattcacttgaaaattagtaacactctgtttacgttgcctctggctggagctgcatggtggaagaagcccaactttggatccatgtacttcacccatccaatactcttgggacatttatgtgtattttatctgtatatatgaagccaatgtctatgtctacacagtcaaagtgaaatgcatgtttgatatagctgtacatagatatctattttgcaggt

SEQ ID NO: 731877 - DNA, 2982 bp, Homo sapiens
  misc_feature (14)..(14): n is a, c, g, or t
  misc_feature (16)..(16): n is a, c, g, or t
  misc_feature (25)..(25): n is a, c, g, or t
  misc_feature (2944)..(2944): n is a, c, g, or t
  misc_feature (2979)..(2979): n is a, c, g, or t
cgcgtgggttcctngnagacgtcgngactctaaattgccccctctgaggtcaaggaacacaagatggttttggaaatgctgaacccgatacattataacatcaccagcatcgtgcctgaagccatgcctgctgccaccatgccagtcctgctcctcactggcctttttctcttggtgtggaattatgagggcacatcctcaataccaggtcctggctactgcatgggaattggacccctcatctcccacggcagattcctgtggatggggatcggcagtgcctgcaactactacaaccgggtatatggagaattcatgcgagtctggatctctggagaggaaacactcattatcagcaagtcctcaagtatgttccacataatgaagcacaatcattacagctctcgattcggcagcaaacttgggctgcagtgcatcggtatgcatgagaaaggcatcatatttaacaacaatccagagctctggaaaacaactcgacccttctttatgaaagctctgtcaggccccggccttgttcgtatggtcacagtctgtgctgaatccctcaaaacacatctggacaggttggaggaggtgaccaatgaatcgggctatgtggacgtgttgacccttctgcgtcgtgtcatgctggacacctctaacacgctcttcttgaggatccctttggacgaaagtgctatcgtggttaaaatccaaggttattttgatgcatggcaagctctcctcatcaaaccagacatcttctttaagatttcttggctatacaaaaagtatgagaagtctgtcaaggatttgaaagatgccatagaagttctgatagcagaaaaaagacgcaggatttccacagaagagaaactggaagaatgtatggactttgccactgagttgattttagcagagaaacgtggtgacctgacaagagagaatgtgaaccagtgcatattggaaatgctgatcgcagctcctgacaccatgtctgtctctttgttcttcatgctatttctcattgcaaagcaccctaatgttgaagaggcaataataaaggaaatccagactgttattggtgagagagacataaagattgatgatatacaaaaattaaaagtgatggaaaacttcatttatgagagcatgcggtaccagcctgtcgtggacttggtcatgcgcaaagccttagaagatgatgtaatcgatggctacccagtgaaaaaggggacaaacattatcctgaatattggaaggatgcacagactcgagtttttccccaaacccaatgaatttactcttgaaaattttgcaaagaatgttccttataggtactttcagccatttggctttgggccccgtggctgtgcaggaaagtacatcgccatggtgatgatgaaagccatcctcgttacacttctgagacgattccacgtgaagacattgcaaggacagtgtgttgagagcatacagaagatacacgacttgtccttgcacccagatgagactaaaaacatgctggaaatgatctttaccccaagaaactcagacaggtgtctggaacactagagaaggctggtcagtacctactctggagcatttctcatcagtagttcacatacaaatcatccatccttgccaatagtgtcatcctcacagtgaacactcagtggcccatggcattttataggcatacctcctatgggttgtcaccaagctaggtgctattggtcatctgctcctgttcacaccagagaaccaggctacaagagaaaaagcagaggccaagagtttgagggagaaatagtcggtgaagaaaccgtatccataaagacccgattccaccaaatgtgctttgagaaggataggccttcattaacaaaatgtatgtctggttccccagtagagctctactgcctcaacccaaggggatttttatgtctggggcagaaacactcaagttgattagaaagaccaggccaatgtcagggtacctggggccaaacccacctgctagtgtgaattaaagtactttaattttgttttctgtggaggtggaaaagcaacattcatagtctttggagaaatgcttagaaattcagcatttgacccttgctgtgaattaagcccaattaattcctgtttgtctacatatgatctgtctgtggcaaaagtttaatcagaggaaattctttcccagtctgtcgatttatgcctcagccacttgcctgtgctacaattcattgtgttacctgtagattcaggtaatacaaactatatataatcatcaagtaatacaaactaatttagtaatagcctgggttaagtattattagggccctgtgtctgctgtagaaaaaaaaattcacatgatgcacttcaaattcaaataaaaatccttttggcatgttcccatttttgcttagctcaattagtgtggctaaccaagagataactgtaaatgtgacattgatttgctcttactacaaggggtactcctctcatccccttatccttctccctcgacattttctccctctttcttcccatgaccccaaagccaagggcaacagatcagtaaagaacgtggtcagagtagaacccctgaagtattttttaatcctacctcaaaatttaacagttacctgagagatttaacattatctagttcattgaatcattgtatgtggtcatggataaattgcacaccttggaattcgctttctaaaggaaatcaaatgaatggaggaactttccaaacaccactttacttgtgttatatagccaatataactatctctactgaatgtcattgaaaaactaaaaaattaaacttatttacaaataaaaaaaaaaaaaaaaaaaaaaaaaaaaaaaaaaaaaaaaaaaataaaaaaaaaaaaaaaaaaaaaaaaaaaaaaaaaaaaaaaaaaaaaanaaaaaaaaaaaaaaaaaaaaaaaaaaaaaaaaaanaag

SEQ ID NO: 731878 - DNA, 2469 bp, Homo sapiens
  misc_feature (14)..(14): n is a, c, g, or t
  misc_feature (16)..(16): n is a, c, g, or t
  misc_feature (25)..(25): n is a, c, g, or t
cgcgtgggttcctngnagacgtcgngactctaaattgccccctctgaggtcaaggaacacaagatggttttggaaatgctgaacccgatacattataacatcaccagcatcgtgcctgaagccatgcctgctgccaccatgccagtcctgctcctcactggcctttttctcttggtgtggaattatgagggcacatcctcaataccaggtcctggctactgcatgggaattggacccctcatctcccacggcagattcctgtggatggggatcggcagtgcctgcaactactacaaccgggtatatggagaattcatgcgagtctggatctctggagaggaaacactcattatcagcaagtcctcaagtatgttccacataatgaagcacaatcattacagctctcgattcggcagcaaacttgggctgcagtgcatcggtatgcatgagaaaggcatcatatttaacaacaatccagagctctggaaaacaactcgacccttctttatgaaagctctgtcaggccccggccttgttcgtatggtcacagtctgtgctgaatccctcaaaacacatctggacaggttggaggaggtgaccaatgaatcgggctatgtggacgtgttgacccttctgcgtcgtgtcatgctggacacctctaacacgctcttcttgaggatccctttggacgaaagtgctatcgtggttaaaatccaaggttattttgatgcatggcaagctctcctcatcaaaccagacatcttctttaagatttcttggctatacaaaaagtatgagaagtctgtcaaggatttgaaagatgccatagaagttctgatagcagaaaaaagacgcaggatttccacagaagagaaactggaagaatgtatggactttgccactgagttgattttagcagagaaacgtggtgacctgacaagagagaatgtgaaccagtgcatattggaaatgctgatcgcagctcctgacaccatgtctgtctctttgttcttcatgctatttctcattgcaaagcaccctaatgttgaagaggcaataataaaggaaatccagactgttattggtgagagagacataaagattgatgatatacaaaaattaaaagtgatggaaaacttcatttatgagagcatgcggtaccagcctgtcgtggacttggtcatgcgcaaagccttagaagatgatgtaatcgatggctacccagtgaaaaaggggacaaacattatcctgaatattggaaggatgcacagactcgagtttttccccaaacccaatgaatttactcttgaaaattttgcaaagaatgttccttataggtactttcagccatttggctttgggccccgtggctgtgcaggaaagtacatcgccatggtgatgatgaaagccatcctcgttacacttctgagacgattccacgtgaagacattgcaaggacagtgtgttgagagcatacagaagatacacgacttgtccttgcacccagatgagactaaaaacatgctggaaatgatctttaccccaagaaactcagacaggtgtctggaacactagagaaggctggtcagtacctactctggagcatttctcatcagtagttcacatacaaatcatccatccttgccaatagtgtcatcctcacagtgaacactcagtggcccatggcattttataggcatacctcctatgggttgtcaccaagctaggtgctattggtcatctgctcctgttcacaccagagaaccaggctacaagagaaaaagcagaggccaagagtttgagggagaaatagtcggtgaagaaaccgtatccataaagacccgattccaccaaatgtgctttgagaaggataggccttcattaacaaaatgtatgtctggttccccagtagagctctactgcctcaacccaaggggatttttatgtctggggcagaaacactcaagttgattagaaagaccaggccaatgtcagggtacctggggccaaacccacctgctagtgtgaattaaagtactttaattttgttttctgtggaggtggaaaagcaacattcatagtctttggagaaatgcttagaaattcagcatttgacccttgctgtgaattaagcccaattaattcctgtttgtctacatatgatctgtctgtggcaaaagtttaatcagaggaaattctttcccagtctgtcgatttatgcctcagccacttgcctgtgctacaattcattgtgttacctgtagattcaggtaatacaaactatatataatcatcaagtaatacaaactaatttagtaatagcctgggttaagtattattagggccctgtgtctgctgtagaaaaaaaaattcacatgatgcacttcaaattcaaataaaaatccttttggcatgttcccattttaaaaaaaaaaaaaaaaaaaaaaaaaaaaaaaaaaaaaaaaaaat

SEQ ID NO: 731879 - DNA, 2425 bp, Homo sapiens
  misc_feature (14)..(14): n is a, c, g, or t
  misc_feature (16)..(16): n is a, c, g, or t
  misc_feature (25)..(25): n is a, c, g, or t
cgcgtgggttcctngnagacgtcgngactctaaattgccccctctgaggtcaaggaacacaagatggttttggaaatgctgaacccgatacattataacatcaccagcatcgtgcctgaagccatgcctgctgccaccatgccagtcctgctcctcactggcctttttctcttggtgtggaattatgagggcacatcctcaataccaggtcctggctactgcatgggaattggacccctcatctcccacggcagattcctgtggatggggatcggcagtgcctgcaactactacaaccgggtatatggagaattcatgcgagtctggatctctggagaggaaacactcattatcagcaagtcctcaagtatgttccacataatgaagcacaatcattacagctctcgattcggcagcaaacttgggctgcagtgcatcggtatgcatgagaaaggcatcatatttaacaacaatccagagctctggaaaacaactcgacccttctttatgaaagctctgtcaggccccggccttgttcgtatggtcacagtctgtgctgaatccctcaaaacacatctggacaggttggaggaggtgaccaatgaatcgggctatgtggacgtgttgacccttctgcgtcgtgtcatgctggacacctctaacacgctcttcttgaggatccctttggacgaaagtgctatcgtggttaaaatccaaggttattttgatgcatggcaagctctcctcatcaaaccagacatcttctttaagatttcttggctatacaaaaagtatgagaagtctgtcaaggatttgaaagatgccatagaagttctgatagcagaaaaaagacgcaggatttccacagaagagaaactggaagaatgtatggactttgccactgagttgattttagcagagaaacgtggtgacctgacaagagagaatgtgaaccagtgcatattggaaatgctgatcgcagctcctgacaccatgtctgtctctttgttcttcatgctatttctcattgcaaagcaccctaatgttgaagaggcaataataaaggaaatccagactgttattggtgagagagacataaagattgatgatatacaaaaattaaaagtgatggaaaacttcatttatgagagcatgcggtaccagcctgtcgtggacttggtcatgcgcaaagccttagaagatgatgtaatcgatggctacccagtgaaaaaggggacaaacattatcctgaatattggaaggatgcacagactcgagtttttccccaaacccaatgaatttactcttgaaaattttgcaaagaatgttccttataggtactttcagccatttggctttgggccccgtggctgtgcaggaaagtacatcgccatggtgatgatgaaagccatcctcgttacacttctgagacgattccacgtgaagacattgcaaggacagtgtgttgagagcatacagaagatacacgacttgtccttgcacccagatgagactaaaaacatgctggaaatgatctttaccccaagaaactcagacaggtgtctggaacactagagaaggctggtcagtacctactctggagcatttctcatcagtagttcacatacaaatcatccatccttgccaatagtgtcatcctcacagtgaacactcagtggcccatggcattttataggcatacctcctatgggttgtcaccaagctaggtgctattggtcatctgctcctgttcacaccagagaaccaggctacaagagaaaaagcagaggccaagagtttgagggagaaatagtcggtgaagaaaccgtatccataaagacccgattccaccaaatgtgctttgagaaggataggccttcattaacaaaatgtatgtctggttccccagtagagctctactgcctcaacccaaggggatttttatgtctggggcagaaacactcaagttgattagaaagaccaggccaatgtcagggtacctggggccaaacccacctgctagtgtgaattaaagtactttaattttgttttctgtggaggtggaaaagcaacattcatagtctttggagaaatgcttagaaattcagcatttgacccttgctgtgaattaagcccaattaattcctgtttgtctacatatgatctgtctgtggcaaaagtttaatcagaggaaattctttcccagtctgtcgatttatgcctcagccacttgcctgtgctacaattcattgtgttacctgtagattcaggtaatacaaactatatataatcatcaagtaatacaaactaatttagtaatagcctgggttaagtattattagggccctgtgtctgctgtagaaaaaaaaattcacatgatgcacttcaaattcaaataaaaatccttttggcatgttcccatttt

SEQ ID NO: 731880 - DNA, 1372 bp, Homo sapiens
  misc_feature (14)..(14): n is a, c, g, or t
  misc_feature (16)..(16): n is a, c, g, or t
  misc_feature (25)..(25): n is a, c, g, or t
cgcgtgggttcctngnagacgtcgngactctaaattgccccctctgaggtcaaggaacacaagatggttttggaaatgctgaacccgatacattataacatcaccagcatcgtgcctgaagccatgcctgctgccaccatgccagtcctgctcctcactggcctttttctcttggtgtggaattatgagggcacatcctcaataccaggtcctggctactgcatgggaattggacccctcatctcccacggcagattcctgtggatggggatcggcagtgcctgcaactactacaaccgggtatatggagaattcatgcgagtctggatctctggagaggaaacactcattatcagcaagtcctcaagtatgttccacataatgaagcacaatcattacagctctcgattcggcagcaaacttgggctgcagtgcatcggtatgcatgagaaaggcatcatatttaacaacaatccagagctctggaaaacaactcgacccttctttatgaaagctctgtcaggccccggccttgttcgtatggtcacagtctgtgctgaatccctcaaaacacatctggacaggttggaggaggtgaccaatgaatcgggctatgtggacgtgttgacccttctgcgtcgtgtcatgctggacacctctaacacgctcttcttgaggatccctttggacgaaagtgctatcgtggttaaaatccaaggttattttgatgcatggcaagctctcctcatcaaaccagacatcttctttaagatttcttggctatacaaaaagtatgagaagtctgtcaaggatttgaaagatgccatagaagttctgatagcagaaaaaagacgcaggatttccacagaagagaaactggaagaatgtatggactttgccactgagttgattttagcagagaaacgtggtgacctgacaagagagaatgtgaaccagtgcatattggaaatgctgatcgcagctcctgacaccatgtctgtctctttgttcttcatgctatttctcattgcaaagcaccctaatgttgaagaggcaataataaaggaaatccagactgttattggtgagagagacataaagattgatgatatacaaaaattaaaagtgatggaaaacttcatttatgagagcatgcggtaccagcctgtcgtggacttggtcatgcgcaaagccttagaagatgatgtaatcgatggctacccagtgaaaaaggggacaaacattatcctgaatattggaaggatgcacagactcgagtttttccccaaacccaatgaatttactcttgaaaattttgcaaagaatgtaagagcccttccttaaaactgagtgtgccactcttgaaaatgtc

SEQ ID NO: 731881 - DNA, 2052 bp, Homo sapiens
  misc_feature (14)..(14): n is a, c, g, or t
  misc_feature (16)..(16): n is a, c, g, or t
  misc_feature (25)..(25): n is a, c, g, or t
cgcgtgggttcctngnagacgtcgngactctaaattgccccctctgaggtcaaggaacacaagatggttttggaaatgctgaacccgatacattataacatcaccagcatcgtgcctgaagccatgcctgctgccaccatgccagtcctgctcctcactggcctttttctcttggtgtggaattatgagggcacatcctcaataccaggtcctggctactgcatgggaattggacccctcatctcccacggcagattcctgtggatggggatcggcagtgcctgcaactactacaaccgggtatatggagaattcatgcgagtctggatctctggagaggaaacactcattatcagcaagtcctcaagtatgttccacataatgaagcacaatcattacagctctcgattcggcagcaaacttgggctgcagtgcatcggtatgcatgagaaaggcatcatatttaacaacaatccagagctctggaaaacaactcgacccttctttatgaaagctctgtcaggccccggccttgttcgtatggtcacagtctgtgctgaatccctcaaaacacatctggacaggttggaggaggtgaccaatgaatcgggctatgtggacgtgttgacccttctgcgtcgtgtcatgctggacacctctaacacgctcttcttgaggatccctttggacggtactgaaattttcactctcacatcttgaccatctgtcctttactgaacaaggagctaggagggataacagaccaaaggaatcacatgccattttctacattgctcttgtttaaacatttctaagtactcctcgtttttttccctagtgtttctgctttgttcacttataaaatataaatttccataaagtaggggccagcatctactagccttttgtatctttcctcattactctaggaaatagaattctacccacagttgaaacttaacaaatgtgattagttcgtttggttattaacatatcctaccaccaatcaactttatatatttaaccatttccagttgttcttttgggcatgatatatacatacatatatacatacatacccacacatatatacacacactcctccctcaaagctactaaacatgaaaacattgtgcctatatgataaaaatgtcaatattgctggtgatactgatgctgatggaaatgacgatattagctgccattaacgtagtatctaatgtgtgccaaacaatattaaaaattgctgtatatacatgtttgccatttattatttataaccttaacaagatgtctcactcataagactactttccgcactatgatacagaaatgaatattaaaacatgtgcatgctcatgtcaaactcatagaacttgattttattttggcaggattaaaccaatttgcaacttgagtacaaatgccaatatttcagctagttcttgaaaagttgtgccattgtgcaaaagtcattgaattatttgataactttttaacctaatgaccaaacacctgacaggaatggaattcactggacttgtatctaattgttttacactgttttctatgggttacattttttattgccattgtgacctttatccacacactaacctggaaagtataggaataaaagaattggcattctttctgatacaccctttttgttttcttcttaaagtcatttatattatgtattactcttaaagaatgttttagtctccattttagtagtctgtgcataaggtagtaatacatgtacacaaagaaaaattcacaagcccattcaggtgtcttttagaacattatttaccactaaatatttatacagttgacataatgcttattatgcccttgaataatagaatttgttttgtttttacttcttatccataagcattggccttacattgcctcaagaggaacagaatttattattaaacaggattcttaaatccataactcatattgtgacttcatacattttgtaaccctagtagtgaatataccctaaaaacctataaatccccccaaatcactctactgatg

SEQ ID NO: 731882 - DNA, 2688 bp, Homo sapiens
  misc_feature (14)..(14): n is a, c, g, or t
  misc_feature (16)..(16): n is a, c, g, or t
  misc_feature (25)..(25): n is a, c, g, or t
cgcgtgggttcctngnagacgtcgngactctaaattgccccctctgaggtcaaggaacacaagatggttttggaaatgctgaacccgatacattataacatcaccagcatcgtgcctgaagccatgcctgctgccaccatgccagtcctgctcctcactggcctttttctcttggtgtggaattatgagggcacatcctcaataccaggtcctggctactgcatgggaattggacccctcatctcccacggcagattcctgtggatggggatcggcagtgcctgcaactactacaaccgggtatatggagaattcatgcgagtctggatctctggagaggaaacactcattatcagcaagtcctcaagtatgttccacataatgaagcacaatcattacagctctcgattcggcagcaaacttgggctgcagtgcatcggtatgcatgagaaaggcatcatatttaacaacaatccagagctctggaaaacaactcgacccttctttatgaaagaaagtgctatcgtggttaaaatccaaggttattttgatgcatggcaagctctcctcatcaaaccagacatcttctttaagatttcttggctatacaaaaagtatgagaagtctgtcaaggatttgaaagatgccatagaagttctgatagcagaaaaaagacgcaggatttccacagaagagaaactggaagaatgtatggactttgccactgagttgattttagcagagaaacgtggtgacctgacaagagagaatgtgaaccagtgcatattggaaatgctgatcgcagctcctgacaccatgtctgtctctttgttcttcatgctatttctcattgcaaagcaccctaatgttgaagaggcaataataaaggaaatccagactgttattggtgagagagacataaagattgatgatatacaaaaattaaaagtgatggaaaacttcatttatgagagcatgcggtaccagcctgtcgtggacttggtcatgcgcaaagccttagaagatgatgtaatcgatggctacccagtgaaaaaggggacaaacattatcctgaatattggaaggatgcacagactcgagtttttccccaaacccaatgaatttactcttgaaaattttgcaaagaatgttccttataggtactttcagccatttggctttgggccccgtggctgtgcaggaaagtacatcgccatggtgatgatgaaagccatcctcgttacacttctgagacgattccacgtgaagacattgcaaggacagtgtgttgagagcatacagaagatacacgacttgtccttgcacccagatgagactaaaaacatgctggaaatgatctttaccccaagaaactcagacaggtgtctggaacactagagaaggctggtcagtacctactctggagcatttctcatcagtagttcacatacaaatcatccatccttgccaatagtgtcatcctcacagtgaacactcagtggcccatggcattttataggcatacctcctatgggttgtcaccaagctaggtgctattggtcatctgctcctgttcacaccagagaaccaggctacaagagaaaaagcagaggccaagagtttgagggagaaatagtcggtgaagaaaccgtatccataaagacccgattccaccaaatgtgctttgagaaggataggccttcattaacaaaatgtatgtctggttccccagtagagctctactgcctcaacccaaggggatttttatgtctggggcagaaacactcaagttgattagaaagaccaggccaatgtcagggtacctggggccaaacccacctgctagtgtgaattaaagtactttaattttgttttctgtggaggtggaaaagcaacattcatagtctttggagaaatgcttagaaattcagcatttgacccttgctgtgaattaagcccaattaattcctgtttgtctacatatgatctgtctgtggcaaaagtttaatcagaggaaattctttcccagtctgtcgatttatgcctcagccacttgcctgtgctacaattcattgtgttacctgtagattcaggtaatacaaactatatataatcatcaagtaatacaaactaatttagtaatagcctgggttaagtattattagggccctgtgtctgctgtagaaaaaaaaattcacatgatgcacttcaaattcaaataaaaatccttttggcatgttcccatttttgcttagctcaattagtgtggctaaccaagagataactgtaaatgtgacattgatttgctcttactacagcttcagtgattgggggaggaaaagtcccaacccaatgggctcaaacttctaaggggtactcctctcatccccttatccttctccctcgacattttctccctctttcttcccatgaccccaaagccaagggcaacagatcagtaaagaacgtggtcagagtagaacccctgaagtattttttaatcctacctcaaaatttaacagttacctgagagatttaacattatctagttcattgaatcattgtatgtggtcatggataaattgcacaccttggaattcgctttctaaaggaaatcaaatgaatggaggaactttccaaacaccactttacttgtgttatatagccaatataactatctctactgaa

SEQ ID NO: 731883 - DNA, 2857 bp, Homo sapiens
  misc_feature (14)..(14): n is a, c, g, or t
  misc_feature (16)..(16): n is a, c, g, or t
  misc_feature (25)..(25): n is a, c, g, or t
  misc_feature (2819)..(2819): n is a, c, g, or t
  misc_feature (2854)..(2854): n is a, c, g, or t
cgcgtgggttcctngnagacgtcgngactctaaattgccccctctgaggtcaaggaacacaagatggttttggaaatgctgaacccgatacattataacatcaccagcatcgtgcctgaagccatgcctgctgccaccatgccagtcctgctcctcactggcctttttctcttggtgtggaattatgagggcacatcctcaataccaggtcctggctactgcatgggaattggacccctcatctcccacggcagattcctgtggatggggatcggcagtgcctgcaactactacaaccgggtatatggagaattcatgcgagtctggatctctggagaggaaacactcattatcagcaagtcctcaagtatgttccacataatgaagcacaatcattacagctctcgattcggcagcaaacttgggctgcagtgcatcggtatgcatgagaaaggcatcatatttaacaacaatccagagctctggaaaacaactcgacccttctttatgaaagaaagtgctatcgtggttaaaatccaaggttattttgatgcatggcaagctctcctcatcaaaccagacatcttctttaagatttcttggctatacaaaaagtatgagaagtctgtcaaggatttgaaagatgccatagaagttctgatagcagaaaaaagacgcaggatttccacagaagagaaactggaagaatgtatggactttgccactgagttgattttagcagagaaacgtggtgacctgacaagagagaatgtgaaccagtgcatattggaaatgctgatcgcagctcctgacaccatgtctgtctctttgttcttcatgctatttctcattgcaaagcaccctaatgttgaagaggcaataataaaggaaatccagactgttattggtgagagagacataaagattgatgatatacaaaaattaaaagtgatggaaaacttcatttatgagagcatgcggtaccagcctgtcgtggacttggtcatgcgcaaagccttagaagatgatgtaatcgatggctacccagtgaaaaaggggacaaacattatcctgaatattggaaggatgcacagactcgagtttttccccaaacccaatgaatttactcttgaaaattttgcaaagaatgttccttataggtactttcagccatttggctttgggccccgtggctgtgcaggaaagtacatcgccatggtgatgatgaaagccatcctcgttacacttctgagacgattccacgtgaagacattgcaaggacagtgtgttgagagcatacagaagatacacgacttgtccttgcacccagatgagactaaaaacatgctggaaatgatctttaccccaagaaactcagacaggtgtctggaacactagagaaggctggtcagtacctactctggagcatttctcatcagtagttcacatacaaatcatccatccttgccaatagtgtcatcctcacagtgaacactcagtggcccatggcattttataggcatacctcctatgggttgtcaccaagctaggtgctattggtcatctgctcctgttcacaccagagaaccaggctacaagagaaaaagcagaggccaagagtttgagggagaaatagtcggtgaagaaaccgtatccataaagacccgattccaccaaatgtgctttgagaaggataggccttcattaacaaaatgtatgtctggttccccagtagagctctactgcctcaacccaaggggatttttatgtctggggcagaaacactcaagttgattagaaagaccaggccaatgtcagggtacctggggccaaacccacctgctagtgtgaattaaagtactttaattttgttttctgtggaggtggaaaagcaacattcatagtctttggagaaatgcttagaaattcagcatttgacccttgctgtgaattaagcccaattaattcctgtttgtctacatatgatctgtctgtggcaaaagtttaatcagaggaaattctttcccagtctgtcgatttatgcctcagccacttgcctgtgctacaattcattgtgttacctgtagattcaggtaatacaaactatatataatcatcaagtaatacaaactaatttagtaatagcctgggttaagtattattagggccctgtgtctgctgtagaaaaaaaaattcacatgatgcacttcaaattcaaataaaaatccttttggcatgttcccatttttgcttagctcaattagtgtggctaaccaagagataactgtaaatgtgacattgatttgctcttactacagcttcagtgattgggggaggaaaagtcccaacccaatgggctcaaacttctaaggggtactcctctcatccccttatccttctccctcgacattttctccctctttcttcccatgaccccaaagccaagggcaacagatcagtaaagaacgtggtcagagtagaacccctgaagtattttttaatcctacctcaaaatttaacagttacctgagagatttaacattatctagttcattgaatcattgtatgtggtcatggataaattgcacaccttggaattcgctttctaaaggaaatcaaatgaatggaggaactttccaaacaccactttacttgtgttatatagccaatataactatctctactgaatgtcattgaaaaactaaaaaattaaacttatttacaaataaaaaaaaaaaaaaaaaaaaaaaaaaaaaaaaaaaaaaaaaaaataaaaaaaaaaaaaaaaaaaaaaaaaaaaaaaaaaaaaaaaaaaaaanaaaaaaaaaaaaaaaaaaaaaaaaaaaaaaaaaanaag

SEQ ID NO: 731884 - DNA, 3405 bp, Homo sapiens
  misc_feature (14)..(14): n is a, c, g, or t
  misc_feature (16)..(16): n is a, c, g, or t
  misc_feature (25)..(25): n is a, c, g, or t
cgcgtgggttcctngnagacgtcgngactctaaattgccccctctgaggtcaaggaacacaagatggttttggaaatgctgaacccgatacattataacatcaccagcatcgtgcctgaagccatgcctgctgccaccatgccagtcctgctcctcactggcctttttctcttggtgtggaattatgagggcacatcctcaataccaggtcctggctactgcatgggaattggacccctcatctcccacggcagattcctgtggatggggatcggcagtgcctgcaactactacaaccgggtatatggagaattcatgcgagtctggatctctggagaggaaacactcattatcagcaagtcctcaagtatgttccacataatgaagcacaatcattacagctctcgattcggcagcaaacttgggctgcagtgcatcggtatgcatgagaaaggcatcatatttaacaacaatccagagctctggaaaacaactcgacccttctttatgaaagaaagtgctatcgtggttaaaatccaaggttattttgatgcatggcaagctctcctcatcaaaccagacatcttctttaagatttcttggctatacaaaaagtatgagaagtctgtcaaggatttgaaagatgccatagaagttctgatagcagaaaaaagacgcaggatttccacagaagagaaactggaagaatgtatggactttgccactgagttgattttagcagagaaacgtggtgacctgacaagagagaatgtgaaccagtgcatattggaaatgctgatcgcagctcctgacaccatgtctgtctctttgttcttcatgctatttctcattgcaaagcaccctaatgttgaagaggcaataataaaggaaatccagactgttattggtgagagagacataaagattgatgatatacaaaaattaaaagtgatggaaaacttcatttatgagagcatgcggtaccagcctgtcgtggacttggtcatgcgcaaagccttagaagatgatgtaatcgatggctacccagtgaaaaaggggacaaacattatcctgaatattggaaggatgcacagactcgagtttttccccaaacccaatgaatttactcttgaaaattttgcaaagaatgttccttataggtactttcagccatttggctttgggccccgtggctgtgcaggaaagtacatcgccatggtgatgatgaaagccatcctcgttacacttctgagacgattccacgtgaagacattgcaaggacagtgtgttgagagcatacagaagatacacgacttgtccttgcacccagatgagactaaaaacatgctggaaatgatctttaccccaagaaactcagacaggtgtctggaacactagagaaggctggtcagtacctactctggagcatttctcatcagtagttcacatacaaatcatccatccttgccaatagtgtcatcctcacagtgaacactcagtggcccatggcattttataggcatacctcctatgggttgtcaccaagctaggtgctattggtcatctgctcctgttcacaccagagaaccaggctacaagagaaaaagcagaggccaagagtttgagggagaaatagtcggtgaagaaaccgtatccataaagacccgattccaccaaatgtgctttgagaaggataggccttcattaacaaaatgtatgtctggttccccagtagagctctactgcctcaacccaaggggatttttatgtctggggcagaaacactcaagttgattagaaagaccaggccaatgtcagggtacctggggccaaacccacctgctagtgtgaattaaagtactttaattttgttttctgtggaggtggaaaagcaacattcatagtctttggagaaatgcttagaaattcagcatttgacccttgctgtgaattaagcccaattaattcctgtttgtctacatatgatctgtctgtggcaaaagtttaatcagaggaaattctttcccagtctgtcgatttatgcctcagccacttgcctgtgctacaattcattgtgttacctgtagattcaggtaatacaaactatatataatcatcaagtaatacaaactaatttagtaatagcctgggttaagtattattagggccctgtgtctgctgtagaaaaaaaaattcacatgatgcacttcaaattcaaataaaaatccttttggcatgttcccatttttgcttagctcaattagtgtggctaaccaagagataactgtaaatgtgacattgatttgctcttactacagcttcagtgattgggggaggaaaagtcccaacccaatgggctcaaacttctaaggggtactcctctcatccccttatccttctccctcgacattttctccctctttcttcccatgaccccaaagccaagggcaacagatcagtaaagaacgtggtcagagtagaacccctgaagtattttttaatcctacctcaaaatttaacagttacctgagagatttaacattatctagttcattgaatcattgtatgtggtcatggataaattgcacaccttggaattcgctttctaaaggaaatcaaatgaatggaggaactttccaaacaccactttacttgtgttatatagccaatataactatctctactgaatgtcattgaaaaactaaaaaattaaacttatttacaaataggtaaatatttgtcattgaatccattgccatcccatttgactgttcttttcatcctactgtctagtaataagctgagtataagatgacagtgtaatctccctgaaagcaggagctactttctttcttttgtaatctatttccatccccatttccctgtcctgtctccctgtattcactcccaagctcagttctgaatagacattcctgctcagagatactcccaactgatgcagaaaccaaataaagaggtaggtattccaagaattcaagaatggacattagtaaagaataaaacatttatttgagcttggaattatttggatcatctatatggcctaaaaatatatggactatgcctgtgtacctgaatacgtatgtagtcaggtcaagacaatcatccaaataacttagacccctaaaagcaaggccaggatttgcaatttaatgtgtcccaattaattcacttgaaaattagtaacactctgtttacgttgcctctggctggagctgcatggtggaagaagcccaactttggatccatgtacttcacccatccaatactcttgggacatttatgtgtattttatctgtatatatgaagccaatgtctatgtctacacagtcaaagtgaaatgcatgtttgatatagctgtacatagatatctattttgcaggt

SEQ ID NO: 731885 - DNA, 2795 bp, Homo sapiens
  misc_feature (14)..(14): n is a, c, g, or t
  misc_feature (16)..(16): n is a, c, g, or t
  misc_feature (25)..(25): n is a, c, g, or t
  misc_feature (2764)..(2766): n is a, c, g, or t
  misc_feature (2778)..(2779): n is a, c, g, or t
  misc_feature (2785)..(2785): n is a, c, g, or t
cgcgtgggttcctngnagacgtcgngactctaaattgccccctctgaggtcaaggaacacaagatggttttggaaatgctgaacccgatacattataacatcaccagcatcgtgcctgaagccatgcctgctgccaccatgccagtcctgctcctcactggcctttttctcttggtgtggaattatgagggcacatcctcaataccaggtcctggctactgcatgggaattggacccctcatctcccacggcagattcctgtggatggggatcggcagtgcctgcaactactacaaccgggtatatggagaattcatgcgagtctggatctctggagaggaaacactcattatcagcaagtcctcaagtatgttccacataatgaagcacaatcattacagctctcgattcggcagcaaacttgggctgcagtgcatcggtatgcatgagaaaggcatcatatttaacaacaatccagagctctggaaaacaactcgacccttctttatgaaagaaagtgctatcgtggttaaaatccaaggttattttgatgcatggcaagctctcctcatcaaaccagacatcttctttaagatttcttggctatacaaaaagtatgagaagtctgtcaaggatttgaaagatgccatagaagttctgatagcagaaaaaagacgcaggatttccacagaagagaaactggaagaatgtatggactttgccactgagttgattttagcagagaaacgtggtgacctgacaagagagaatgtgaaccagtgcatattggaaatgctgatcgcagctcctgacaccatgtctgtctctttgttcttcatgctatttctcattgcaaagcaccctaatgttgaagaggcaataataaaggaaatccagactgttattggtgagagagacataaagattgatgatatacaaaaattaaaagtgatggaaaacttcatttatgagagcatgcggtaccagcctgtcgtggacttggtcatgcgcaaagccttagaagatgatgtaatcgatggctacccagtgaaaaaggggacaaacattatcctgaatattggaaggatgcacagactcgagtttttccccaaacccaatgaatttactcttgaaaattttgcaaagaatgttccttataggtactttcagccatttggctttgggccccgtggctgtgcaggaaagtacatcgccatggtgatgatgaaagccatcctcgttacacttctgagacgattccacgtgaagacattgcaaggacagtgtgttgagagcatacagaagatacacgacttgtccttgcacccagatgagactaaaaacatgctggaaatgatctttaccccaagaaactcagacaggtgtctggaacactagagaaggctggtcagtacctactctggagcatttctcatcagtagttcacatacaaatcatccatccttgccaatagtgtcatcctcacagtgaacactcagtggcccatggcattttataggcatacctcctatgggttgtcaccaagctaggtgctattggtcatctgctcctgttcacaccagagaaccaggctacaagagaaaaagcagaggccaagagtttgagggagaaatagtcggtgaagaaaccgtatccataaagacccgattccaccaaatgtgctttgagaaggataggccttcattaacaaaatgtatgtctggttccccagtagagctctactgcctcaacccaaggggatttttatgtctggggcagaaacactcaagttgattagaaagaccaggccaatgtcagggtacctggggccaaacccacctgctagtgtgaattaaagtactttaattttgttttctgtggaggtggaaaagcaacattcatagtctttggagaaatgcttagaaattcagcatttgacccttgctgtgaattaagcccaattaattcctgtttgtctacatatgatctgtctgtggcaaaagtttaatcagaggaaattctttcccagtctgtcgatttatgcctcagccacttgcctgtgctacaattcattgtgttacctgtagattcaggtaatacaaactatatataatcatcaagtaatacaaactaatttagtaatagcctgggttaagtattattagggccctgtgtctgctgtagaaaaaaaaattcacatgatgcacttcaaattcaaataaaaatccttttggcatgttcccatttttgcttagctcaattagtgtggctaaccaagagataactgtaaatgtgacattgatttgctcttactacagcttcagtgattgggggaggaaaagtcccaacccaatgggctcaaacttctaaggggtactcctctcatccccttatccttctccctcgacattttctccctctttcttcccatgaccccaaagccaagggcaacagatcagtaaagaacgtggtcagagtagaacccctgaagtattttttaatcctacctcaaaatttaacagttacctgagagatttaacattatctagttcattgaatcattgtatgtggtcatggataaattgcacaccttggaattcgctttctaaaggaaatcaaatgaatggaggaactttccaaacaccactttacttgtgttatatagccaatataactatctctactgaatgtcattgaaaaactaaaaaattaaacttatttacaaataggtaaaaaaaaaaaaaaaaacaaacacaaaaaaacnnntggggggcgccnngggccncggaaaaacc

SEQ ID NO: 731886 - DNA, 2728 bp, Homo sapiens
  misc_feature (14)..(14): n is a, c, g, or t
  misc_feature (16)..(16): n is a, c, g, or t
  misc_feature (25)..(25): n is a, c, g, or t
cgcgtgggttcctngnagacgtcgngactctaaattgccccctctgaggtcaaggaacacaagatggttttggaaatgctgaacccgatacattataacatcaccagcatcgtgcctgaagccatgcctgctgccaccatgccagtcctgctcctcactggcctttttctcttggtgtggaattatgagggcacatcctcaataccaggtcctggctactgcatgggaattggacccctcatctcccacggcagattcctgtggatggggatcggcagtgcctgcaactactacaaccgggtatatggagaattcatgcgagtctggatctctggagaggaaacactcattatcagcaagtcctcaagtatgttccacataatgaagcacaatcattacagctctcgattcggcagcaaacttgggctgcagtgcatcggtatgcatgagaaaggcatcatatttaacaacaatccagagctctggaaaacaactcgacccttctttatgaaagaaagtgctatcgtggttaaaatccaaggttattttgatgcatggcaagctctcctcatcaaaccagacatcttctttaagatttcttggctatacaaaaagtatgagaagtctgtcaaggatttgaaagatgccatagaagttctgatagcagaaaaaagacgcaggatttccacagaagagaaactggaagaatgtatggactttgccactgagttgattttagcagagaaacgtggtgacctgacaagagagaatgtgaaccagtgcatattggaaatgctgatcgcagctcctgacaccatgtctgtctctttgttcttcatgctatttctcattgcaaagcaccctaatgttgaagaggcaataataaaggaaatccagactgttattggtgagagagacataaagattgatgatatacaaaaattaaaagtgatggaaaacttcatttatgagagcatgcggtaccagcctgtcgtggacttggtcatgcgcaaagccttagaagatgatgtaatcgatggctacccagtgaaaaaggggacaaacattatcctgaatattggaaggatgcacagactcgagtttttccccaaacccaatgaatttactcttgaaaattttgcaaagaatgttccttataggtactttcagccatttggctttgggccccgtggctgtgcaggaaagtacatcgccatggtgatgatgaaagccatcctcgttacacttctgagacgattccacgtgaagacattgcaaggacagtgtgttgagagcatacagaagatacacgacttgtccttgcacccagatgagactaaaaacatgctggaaatgatctttaccccaagaaactcagacaggtgtctggaacactagagaaggctggtcagtacctactctggagcatttctcatcagtagttcacatacaaatcatccatccttgccaatagtgtcatcctcacagtgaacactcagtggcccatggcattttataggcatacctcctatgggttgtcaccaagctaggtgctattggtcatctgctcctgttcacaccagagaaccaggctacaagagaaaaagcagaggccaagagtttgagggagaaatagtcggtgaagaaaccgtatccataaagacccgattccaccaaatgtgctttgagaaggataggccttcattaacaaaatgtatgtctggttccccagtagagctctactgcctcaacccaaggggatttttatgtctggggcagaaacactcaagttgattagaaagaccaggccaatgtcagggtacctggggccaaacccacctgctagtgtgaattaaagtactttaattttgttttctgtggaggtggaaaagcaacattcatagtctttggagaaatgcttagaaattcagcatttgacccttgctgtgaattaagcccaattaattcctgtttgtctacatatgatctgtctgtggcaaaagtttaatcagaggaaattctttcccagtctgtcgatttatgcctcagccacttgcctgtgctacaattcattgtgttacctgtagattcaggtaatacaaactatatataatcatcaagtaatacaaactaatttagtaatagcctgggttaagtattattagggccctgtgtctgctgtagaaaaaaaaattcacatgatgcacttcaaattcaaataaaaatccttttggcatgttcccatttttgcttagctcaattagtgtggctaaccaagagataactgtaaatgtgacattgatttgctcttactacagcttcagtgattgggggaggaaaagtcccaacccaatgggctcaaacttctaaggggtactcctctcatccccttatccttctccctcgacattttctccctctttcttcccatgaccccaaagccaagggcaacagatcagtaaagaacgtggtcagagtagaacccctgaagtattttttaatcctacctcaaaatttaacagttacctgagagatttaacattatctagttcattgaatcattgtatgtggtcatggataaattgcacaccttggaattcgctttctaaaggaaatcaaatgaatggaggaactttccaaacaccactttacttgtgttatatagccaatataactatctctactgaatgtcattgaaaaactaaaaaattaaacttatttacaaata

SEQ ID NO: 731887 - DNA, 3073 bp, Homo sapiens
  misc_feature (14)..(14): n is a, c, g, or t
  misc_feature (16)..(16): n is a, c, g, or t
  misc_feature (25)..(25): n is a, c, g, or t
cgcgtgggttcctngnagacgtcgngactctaaattgccccctctgaggtcaaggaacacaagatggttttggaaatgctgaacccgatacattataacatcaccagcatcgtgcctgaagccatgcctgctgccaccatgccagtcctgctcctcactggcctttttctcttggtgtggaattatgagggcacatcctcaataccaggtcctggctactgcatgggaattggacccctcatctcccacggcagattcctgtggatggggatcggcagtgcctgcaactactacaaccgggtatatggagaattcatgcgagtctggatctctggagaggaaacactcattatcagcaagtcctcaagtatgttccacataatgaagcacaatcattacagctctcgattcggcagcaaacttgggctgcagtgcatcggtatgcatgagaaaggcatcatatttaacaacaatccagagctctggaaaacaactcgacccttctttatgaaagaaagtgctatcgtggttaaaatccaaggttattttgatgcatggcaagctctcctcatcaaaccagacatcttctttaagatttcttggctatacaaaaagtatgagaagtctgtcaaggatttgaaagatgccatagaagttctgatagcagaaaaaagacgcaggatttccacagaagagaaactggaagaatgtatggactttgccactgagttgattttagcagagaaacgtggtgacctgacaagagagaatgtgaaccagtgcatattggaaatgctgatcgcagctcctgacaccatgtctgtctctttgttcttcatgctatttctcattgcaaagcaccctaatgttgaagaggcaataataaaggaaatccagactgttattggtgagagagacataaagattgatgatatacaaaaattaaaagtgatggaaaacttcatttatgagagcatgcggtaccagcctgtcgtggacttggtcatgcgcaaagccttagaagatgatgtaatcgatggctacccagtgaaaaaggggacaaacattatcctgaatattggaaggatgcacagactcgagtttttccccaaacccaatgaatttactcttgaaaattttgcaaagaatgttccttataggtactttcagccatttggctttgggccccgtggctgtgcaggaaagtacatcgccatggtgatgatgaaagccatcctcgttacacttctgagacgattccacgtgaagacattgcaaggacagtgtgttgagagcatacagaagatacacgacttgtccttgcacccagatgagactaaaaacatgctggaaatgatctttaccccaagaaactcagacaggtgtctggaacactagagaaggctggtcagtacctactctggagcatttctcatcagtagttcacatacaaatcatccatccttgccaatagtgtcatcctcacagtgaacactcagtggcccatggcattttataggcatacctcctatgggttgtcaccaagctaggtgctattggtcatctgctcctgttcacaccagagaaccaggctacaagagaaaaagcagaggccaagagtttgagggagaaatagtcggtgaagaaaccgtatccataaagacccgattccaccaaatgtgctttgagaaggataggccttcattaacaaaatgtatgtctggttccccagtagagctctactgcctcaacccaaggggatttttatgtctggggcagaaacactcaagttgattagaaagaccaggccaatgtcagggtacctggggccaaacccacctgctagtgtgaattaaagtactttaattttgttttctgtggaggtggaaaagcaacattcatagtctttggagaaatgcttagaaattcagcatttgacccttgctgtgaattaagcccaattaattcctgtttgtctacatatgatctgtctgtggcaaaagtttaatcagaggaaattctttcccagtctgtcgatttatgcctcagccacttgcctgtgctacaattcattgtgttacctgtagattcaggtaatacaaactatatataatcatcaagtaatacaaactaatttagtaatagcctgggttaagtattattagggccctgtgtctgctgtagaaaaaaaaattcacatgatgcacttcaaattcaaataaaaatccttttggcatgttcccatttttgcttagctcaattagtgtggctaaccaagagataactgtaaatgtgacattgatttgctcttactacagcttcagtgattgggggaggaaaagtcccaacccaatgggctcaaacttctaaggggtactcctctcatccccttatccttctccctcgacattttctccctctttcttcccatgaccccaaagccaagggcaacagatcagtaaagaacgtggtcagagtagaacccctgaagtattttttaatcctacctcaaaatttaacagttacctgagagatttaacattatctagttcattgaatcattgtatgtggtcatggataaattgcacaccttggaattcgctttctaaaggaaatcaaatgaatggaggaactttccaaacaccactttacttgtgttatatagccaatataactatctctactgaagcggaatacagcacattaagtcaagctaggtgctattggtcatctgctcctgttcacaccagagaaccaggctacaagagaaaaagcagaggccaagagtttgagggagaaatagtcggtgaagaaaccgtatccataaagacccgattccaccaaatgtgctttgagaaggataggccttcatcaacaaaatgtatgtctggttccccagtagagctatactgcctcaacccaaggggatattttaatgtctggggcagaaacactcaagttgattagaaagaccagccaatgtcagtgtatctgggtccttaacccacttggctagtgtgaattatagtacaatgatatttttttttgtggagataggtcagaacatagaggg

SEQ ID NO: 731888 - DNA, 2595 bp, Homo sapiens
  misc_feature (14)..(14): n is a, c, g, or t
  misc_feature (16)..(16): n is a, c, g, or t
  misc_feature (25)..(25): n is a, c, g, or t
cgcgtgggttcctngnagacgtcgngactctaaattgccccctctgaggtcaaggaacacaagatggttttggaaatgctgaacccgatacattataacatcaccagcatcgtgcctgaagccatgcctgctgccaccatgccagtcctgctcctcactggcctttttctcttggtgtggaattatgagggcacatcctcaataccaggtcctggctactgcatgggaattggacccctcatctcccacggcagattcctgtggatggggatcggcagtgcctgcaactactacaaccgggtatatggagaattcatgcgagtctggatctctggagaggaaacactcattatcagcaagtcctcaagtatgttccacataatgaagcacaatcattacagctctcgattcggcagcaaacttgggctgcagtgcatcggtatgcatgagaaaggcatcatatttaacaacaatccagagctctggaaaacaactcgacccttctttatgaaagaaagtgctatcgtggttaaaatccaaggttattttgatgcatggcaagctctcctcatcaaaccagacatcttctttaagatttcttggctatacaaaaagtatgagaagtctgtcaaggatttgaaagatgccatagaagttctgatagcagaaaaaagacgcaggatttccacagaagagaaactggaagaatgtatggactttgccactgagttgattttagcagagaaacgtggtgacctgacaagagagaatgtgaaccagtgcatattggaaatgctgatcgcagctcctgacaccatgtctgtctctttgttcttcatgctatttctcattgcaaagcaccctaatgttgaagaggcaataataaaggaaatccagactgttattggtgagagagacataaagattgatgatatacaaaaattaaaagtgatggaaaacttcatttatgagagcatgcggtaccagcctgtcgtggacttggtcatgcgcaaagccttagaagatgatgtaatcgatggctacccagtgaaaaaggggacaaacattatcctgaatattggaaggatgcacagactcgagtttttccccaaacccaatgaatttactcttgaaaattttgcaaagaatgttccttataggtactttcagccatttggctttgggccccgtggctgtgcaggaaagtacatcgccatggtgatgatgaaagccatcctcgttacacttctgagacgattccacgtgaagacattgcaaggacagtgtgttgagagcatacagaagatacacgacttgtccttgcacccagatgagactaaaaacatgctggaaatgatctttaccccaagaaactcagacaggtgtctggaacactagagaaggctggtcagtacctactctggagcatttctcatcagtagttcacatacaaatcatccatccttgccaatagtgtcatcctcacagtgaacactcagtggcccatggcattttataggcatacctcctatgggttgtcaccaagctaggtgctattggtcatctgctcctgttcacaccagagaaccaggctacaagagaaaaagcagaggccaagagtttgagggagaaatagtcggtgaagaaaccgtatccataaagacccgattccaccaaatgtgctttgagaaggataggccttcattaacaaaatgtatgtctggttccccagtagagctctactgcctcaacccaaggggatttttatgtctggggcagaaacactcaagttgattagaaagaccaggccaatgtcagggtacctggggccaaacccacctgctagtgtgaattaaagtactttaattttgttttctgtggaggtggaaaagcaacattcatagtctttggagaaatgcttagaaattcagcatttgacccttgctgtgaattaagcccaattaattcctgtttgtctacatatgatctgtctgtggcaaaagtttaatcagaggaaattctttcccagtctgtcgatttatgcctcagccacttgcctgtgctacaattcattgtgttacctgtagattcaggtaatacaaactatatataatcatcaagtaatacaaactaatttagtaatagcctgggttaagtattattagggccctgtgtctgctgtagaaaaaaaaattcacatgatgcacttcaaattcaaataaaaatccttttggcatgttcccatttttgcttagctcaattagtgtggctaaccaagagataactgtaaatgtgacattgatttgctcttactacagcttcagtgattgggggaggaaaagtcccaacccaatgggctcaaacttctaaggggtactcctctcatccccttatccttctccctcgacattttctccctctttcttcccatgaccccaaagccaagggcaacagatcagtaaagaacgtggtcagagtagaacccctgaagtattttttaatcctacctcaaaatttaacagttacctgagagatttaacattatctagttcattgaatcattgtatgtggtcatggataaattgcacaccttgg

SEQ ID NO: 731889 - DNA, 2742 bp, Homo sapiens
  misc_feature (14)..(14): n is a, c, g, or t
  misc_feature (16)..(16): n is a, c, g, or t
  misc_feature (25)..(25): n is a, c, g, or t
  misc_feature (2711)..(2713): n is a, c, g, or t
  misc_feature (2725)..(2726): n is a, c, g, or t
  misc_feature (2732)..(2732): n is a, c, g, or t
cgcgtgggttcctngnagacgtcgngactctaaattgccccctctgaggtcaaggaacacaagatggttttggaaatgctgaacccgatacattataacatcaccagcatcgtgcctgaagccatgcctgctgccaccatgccagtcctgctcctcactggcctttttctcttggtgtggaattatgagggcacatcctcaataccaggtcctggctactgcatgggaattggacccctcatctcccacggcagattcctgtggatggggatcggcagtgcctgcaactactacaaccgggtatatggagaattcatgcgagtctggatctctggagaggaaacactcattatcagcaagtcctcaagtatgttccacataatgaagcacaatcattacagctctcgattcggcagcaaacttgggctgcagtgcatcggtatgcatgagaaaggcatcatatttaacaacaatccagagctctggaaaacaactcgacccttctttatgaaagaaagtgctatcgtggttaaaatccaaggttattttgatgcatggcaagctctcctcatcaaaccagacatcttctttaagatttcttggctatacaaaaagtatgagaagtctgtcaaggatttgaaagatgccatagaagttctgatagcagaaaaaagacgcaggatttccacagaagagaaactggaagaatgtatggactttgccactgagttgattttagcagagaaacgtggtgacctgacaagagagaatgtgaaccagtgcatattggaaatgctgatcgcagctcctgacaccatgtctgtctctttgttcttcatgctatttctcattgcaaagcaccctaatgttgaagaggcaataataaaggaaatccagactgttattggtgagagagacataaagattgatgatatacaaaaattaaaagtgatggaaaacttcatttatgagagcatgcggtaccagcctgtcgtggacttggtcatgcgcaaagccttagaagatgatgtaatcgatggctacccagtgaaaaaggggacaaacattatcctgaatattggaaggatgcacagactcgagtttttccccaaacccaatgaatttactcttgaaaattttgcaaagaatgttccttataggtactttcagccatttggctttgggccccgtggctgtgcaggaaagtacatcgccatggtgatgatgaaagccatcctcgttacacttctgagacgattccacgtgaagacattgcaaggacagtgtgttgagagcatacagaagatacacgacttgtccttgcacccagatgagactaaaaacatgctggaaatgatctttaccccaagaaactcagacaggtgtctggaacactagagaaggctggtcagtacctactctggagcatttctcatcagtagttcacatacaaatcatccatccttgccaatagtgtcatcctcacagtgaacactcagtggcccatggcattttataggcatacctcctatgggttgtcaccaagctaggtgctattggtcatctgctcctgttcacaccagagaaccaggctacaagagaaaaagcagaggccaagagtttgagggagaaatagtcggtgaagaaaccgtatccataaagacccgattccaccaaatgtgctttgagaaggataggccttcattaacaaaatgtatgtctggttccccagtagagctctactgcctcaacccaaggggatttttatgtctggggcagaaacactcaagttgattagaaagaccaggccaatgtcagggtacctggggccaaacccacctgctagtgtgaattaaagtactttaattttgttttctgtggaggtggaaaagcaacattcatagtctttggagaaatgcttagaaattcagcatttgacccttgctgtgaattaagcccaattaattcctgtttgtctacatatgatctgtctgtggcaaaagtttaatcagaggaaattctttcccagtctgtcgatttatgcctcagccacttgcctgtgctacaattcattgtgttacctgtagattcaggtaatacaaactatatataatcatcaagtaatacaaactaatttagtaatagcctgggttaagtattattagggccctgtgtctgctgtagaaaaaaaaattcacatgatgcacttcaaattcaaataaaaatccttttggcatgttcccatttttgcttagctcaattagtgtggctaaccaagagataactgtaaatgtgacattgatttgctcttactacagcttcagtgattgggggaggaaaagtcccaacccaatgggctcaaacttctatcttcccatgaccccaaagccaagggcaacagatcagtaaagaacgtggtcagagtagaacccctgaagtattttttaatcctacctcaaaatttaacagttacctgagagatttaacattatctagttcattgaatcattgtatgtggtcatggataaattgcacaccttggaattcgctttctaaaggaaatcaaatgaatggaggaactttccaaacaccactttacttgtgttatatagccaatataactatctctactgaatgtcattgaaaaactaaaaaattaaacttatttacaaataggtaaaaaaaaaaaaaaaaacaaacacaaaaaaacnnntggggggcgccnngggccncggaaaaacc

SEQ ID NO: 731890 - DNA, 3352 bp, Homo sapiens
  misc_feature (14)..(14): n is a, c, g, or t
  misc_feature (16)..(16): n is a, c, g, or t
  misc_feature (25)..(25): n is a, c, g, or t
cgcgtgggttcctngnagacgtcgngactctaaattgccccctctgaggtcaaggaacacaagatggttttggaaatgctgaacccgatacattataacatcaccagcatcgtgcctgaagccatgcctgctgccaccatgccagtcctgctcctcactggcctttttctcttggtgtggaattatgagggcacatcctcaataccaggtcctggctactgcatgggaattggacccctcatctcccacggcagattcctgtggatggggatcggcagtgcctgcaactactacaaccgggtatatggagaattcatgcgagtctggatctctggagaggaaacactcattatcagcaagtcctcaagtatgttccacataatgaagcacaatcattacagctctcgattcggcagcaaacttgggctgcagtgcatcggtatgcatgagaaaggcatcatatttaacaacaatccagagctctggaaaacaactcgacccttctttatgaaagaaagtgctatcgtggttaaaatccaaggttattttgatgcatggcaagctctcctcatcaaaccagacatcttctttaagatttcttggctatacaaaaagtatgagaagtctgtcaaggatttgaaagatgccatagaagttctgatagcagaaaaaagacgcaggatttccacagaagagaaactggaagaatgtatggactttgccactgagttgattttagcagagaaacgtggtgacctgacaagagagaatgtgaaccagtgcatattggaaatgctgatcgcagctcctgacaccatgtctgtctctttgttcttcatgctatttctcattgcaaagcaccctaatgttgaagaggcaataataaaggaaatccagactgttattggtgagagagacataaagattgatgatatacaaaaattaaaagtgatggaaaacttcatttatgagagcatgcggtaccagcctgtcgtggacttggtcatgcgcaaagccttagaagatgatgtaatcgatggctacccagtgaaaaaggggacaaacattatcctgaatattggaaggatgcacagactcgagtttttccccaaacccaatgaatttactcttgaaaattttgcaaagaatgttccttataggtactttcagccatttggctttgggccccgtggctgtgcaggaaagtacatcgccatggtgatgatgaaagccatcctcgttacacttctgagacgattccacgtgaagacattgcaaggacagtgtgttgagagcatacagaagatacacgacttgtccttgcacccagatgagactaaaaacatgctggaaatgatctttaccccaagaaactcagacaggtgtctggaacactagagaaggctggtcagtacctactctggagcatttctcatcagtagttcacatacaaatcatccatccttgccaatagtgtcatcctcacagtgaacactcagtggcccatggcattttataggcatacctcctatgggttgtcaccaagctaggtgctattggtcatctgctcctgttcacaccagagaaccaggctacaagagaaaaagcagaggccaagagtttgagggagaaatagtcggtgaagaaaccgtatccataaagacccgattccaccaaatgtgctttgagaaggataggccttcattaacaaaatgtatgtctggttccccagtagagctctactgcctcaacccaaggggatttttatgtctggggcagaaacactcaagttgattagaaagaccaggccaatgtcagggtacctggggccaaacccacctgctagtgtgaattaaagtactttaattttgttttctgtggaggtggaaaagcaacattcatagtctttggagaaatgcttagaaattcagcatttgacccttgctgtgaattaagcccaattaattcctgtttgtctacatatgatctgtctgtggcaaaagtttaatcagaggaaattctttcccagtctgtcgatttatgcctcagccacttgcctgtgctacaattcattgtgttacctgtagattcaggtaatacaaactatatataatcatcaagtaatacaaactaatttagtaatagcctgggttaagtattattagggccctgtgtctgctgtagaaaaaaaaattcacatgatgcacttcaaattcaaataaaaatccttttggcatgttcccatttttgcttagctcaattagtgtggctaaccaagagataactgtaaatgtgacattgatttgctcttactacagcttcagtgattgggggaggaaaagtcccaacccaatgggctcaaacttctatcttcccatgaccccaaagccaagggcaacagatcagtaaagaacgtggtcagagtagaacccctgaagtattttttaatcctacctcaaaatttaacagttacctgagagatttaacattatctagttcattgaatcattgtatgtggtcatggataaattgcacaccttggaattcgctttctaaaggaaatcaaatgaatggaggaactttccaaacaccactttacttgtgttatatagccaatataactatctctactgaatgtcattgaaaaactaaaaaattaaacttatttacaaataggtaaatatttgtcattgaatccattgccatcccatttgactgttcttttcatcctactgtctagtaataagctgagtataagatgacagtgtaatctccctgaaagcaggagctactttctttcttttgtaatctatttccatccccatttccctgtcctgtctccctgtattcactcccaagctcagttctgaatagacattcctgctcagagatactcccaactgatgcagaaaccaaataaagaggtaggtattccaagaattcaagaatggacattagtaaagaataaaacatttatttgagcttggaattatttggatcatctatatggcctaaaaatatatggactatgcctgtgtacctgaatacgtatgtagtcaggtcaagacaatcatccaaataacttagacccctaaaagcaaggccaggatttgcaatttaatgtgtcccaattaattcacttgaaaattagtaacactctgtttacgttgcctctggctggagctgcatggtggaagaagcccaactttggatccatgtacttcacccatccaatactcttgggacatttatgtgtattttatctgtatatatgaagccaatgtctatgtctacacagtcaaagtgaaatgcatgtttgatatagctgtacatagatatctattttgcaggt

SEQ ID NO: 731891 - DNA, 2804 bp, Homo sapiens
  misc_feature (14)..(14): n is a, c, g, or t
  misc_feature (16)..(16): n is a, c, g, or t
  misc_feature (25)..(25): n is a, c, g, or t
  misc_feature (2766)..(2766): n is a, c, g, or t
  misc_feature (2801)..(2801): n is a, c, g, or t
cgcgtgggttcctngnagacgtcgngactctaaattgccccctctgaggtcaaggaacacaagatggttttggaaatgctgaacccgatacattataacatcaccagcatcgtgcctgaagccatgcctgctgccaccatgccagtcctgctcctcactggcctttttctcttggtgtggaattatgagggcacatcctcaataccaggtcctggctactgcatgggaattggacccctcatctcccacggcagattcctgtggatggggatcggcagtgcctgcaactactacaaccgggtatatggagaattcatgcgagtctggatctctggagaggaaacactcattatcagcaagtcctcaagtatgttccacataatgaagcacaatcattacagctctcgattcggcagcaaacttgggctgcagtgcatcggtatgcatgagaaaggcatcatatttaacaacaatccagagctctggaaaacaactcgacccttctttatgaaagaaagtgctatcgtggttaaaatccaaggttattttgatgcatggcaagctctcctcatcaaaccagacatcttctttaagatttcttggctatacaaaaagtatgagaagtctgtcaaggatttgaaagatgccatagaagttctgatagcagaaaaaagacgcaggatttccacagaagagaaactggaagaatgtatggactttgccactgagttgattttagcagagaaacgtggtgacctgacaagagagaatgtgaaccagtgcatattggaaatgctgatcgcagctcctgacaccatgtctgtctctttgttcttcatgctatttctcattgcaaagcaccctaatgttgaagaggcaataataaaggaaatccagactgttattggtgagagagacataaagattgatgatatacaaaaattaaaagtgatggaaaacttcatttatgagagcatgcggtaccagcctgtcgtggacttggtcatgcgcaaagccttagaagatgatgtaatcgatggctacccagtgaaaaaggggacaaacattatcctgaatattggaaggatgcacagactcgagtttttccccaaacccaatgaatttactcttgaaaattttgcaaagaatgttccttataggtactttcagccatttggctttgggccccgtggctgtgcaggaaagtacatcgccatggtgatgatgaaagccatcctcgttacacttctgagacgattccacgtgaagacattgcaaggacagtgtgttgagagcatacagaagatacacgacttgtccttgcacccagatgagactaaaaacatgctggaaatgatctttaccccaagaaactcagacaggtgtctggaacactagagaaggctggtcagtacctactctggagcatttctcatcagtagttcacatacaaatcatccatccttgccaatagtgtcatcctcacagtgaacactcagtggcccatggcattttataggcatacctcctatgggttgtcaccaagctaggtgctattggtcatctgctcctgttcacaccagagaaccaggctacaagagaaaaagcagaggccaagagtttgagggagaaatagtcggtgaagaaaccgtatccataaagacccgattccaccaaatgtgctttgagaaggataggccttcattaacaaaatgtatgtctggttccccagtagagctctactgcctcaacccaaggggatttttatgtctggggcagaaacactcaagttgattagaaagaccaggccaatgtcagggtacctggggccaaacccacctgctagtgtgaattaaagtactttaattttgttttctgtggaggtggaaaagcaacattcatagtctttggagaaatgcttagaaattcagcatttgacccttgctgtgaattaagcccaattaattcctgtttgtctacatatgatctgtctgtggcaaaagtttaatcagaggaaattctttcccagtctgtcgatttatgcctcagccacttgcctgtgctacaattcattgtgttacctgtagattcaggtaatacaaactatatataatcatcaagtaatacaaactaatttagtaatagcctgggttaagtattattagggccctgtgtctgctgtagaaaaaaaaattcacatgatgcacttcaaattcaaataaaaatccttttggcatgttcccatttttgcttagctcaattagtgtggctaaccaagagataactgtaaatgtgacattgatttgctcttactacagcttcagtgattgggggaggaaaagtcccaacccaatgggctcaaacttctatcttcccatgaccccaaagccaagggcaacagatcagtaaagaacgtggtcagagtagaacccctgaagtattttttaatcctacctcaaaatttaacagttacctgagagatttaacattatctagttcattgaatcattgtatgtggtcatggataaattgcacaccttggaattcgctttctaaaggaaatcaaatgaatggaggaactttccaaacaccactttacttgtgttatatagccaatataactatctctactgaatgtcattgaaaaactaaaaaattaaacttatttacaaataaaaaaaaaaaaaaaaaaaaaaaaaaaaaaaaaaaaaaaaaaaataaaaaaaaaaaaaaaaaaaaaaaaaaaaaaaaaaaaaaaaaaaaaanaaaaaaaaaaaaaaaaaaaaaaaaaaaaaaaaaanaag

SEQ ID NO: 731892 - DNA, 2675 bp, Homo sapiens
  misc_feature (14)..(14): n is a, c, g, or t
  misc_feature (16)..(16): n is a, c, g, or t
  misc_feature (25)..(25): n is a, c, g, or t
cgcgtgggttcctngnagacgtcgngactctaaattgccccctctgaggtcaaggaacacaagatggttttggaaatgctgaacccgatacattataacatcaccagcatcgtgcctgaagccatgcctgctgccaccatgccagtcctgctcctcactggcctttttctcttggtgtggaattatgagggcacatcctcaataccaggtcctggctactgcatgggaattggacccctcatctcccacggcagattcctgtggatggggatcggcagtgcctgcaactactacaaccgggtatatggagaattcatgcgagtctggatctctggagaggaaacactcattatcagcaagtcctcaagtatgttccacataatgaagcacaatcattacagctctcgattcggcagcaaacttgggctgcagtgcatcggtatgcatgagaaaggcatcatatttaacaacaatccagagctctggaaaacaactcgacccttctttatgaaagaaagtgctatcgtggttaaaatccaaggttattttgatgcatggcaagctctcctcatcaaaccagacatcttctttaagatttcttggctatacaaaaagtatgagaagtctgtcaaggatttgaaagatgccatagaagttctgatagcagaaaaaagacgcaggatttccacagaagagaaactggaagaatgtatggactttgccactgagttgattttagcagagaaacgtggtgacctgacaagagagaatgtgaaccagtgcatattggaaatgctgatcgcagctcctgacaccatgtctgtctctttgttcttcatgctatttctcattgcaaagcaccctaatgttgaagaggcaataataaaggaaatccagactgttattggtgagagagacataaagattgatgatatacaaaaattaaaagtgatggaaaacttcatttatgagagcatgcggtaccagcctgtcgtggacttggtcatgcgcaaagccttagaagatgatgtaatcgatggctacccagtgaaaaaggggacaaacattatcctgaatattggaaggatgcacagactcgagtttttccccaaacccaatgaatttactcttgaaaattttgcaaagaatgttccttataggtactttcagccatttggctttgggccccgtggctgtgcaggaaagtacatcgccatggtgatgatgaaagccatcctcgttacacttctgagacgattccacgtgaagacattgcaaggacagtgtgttgagagcatacagaagatacacgacttgtccttgcacccagatgagactaaaaacatgctggaaatgatctttaccccaagaaactcagacaggtgtctggaacactagagaaggctggtcagtacctactctggagcatttctcatcagtagttcacatacaaatcatccatccttgccaatagtgtcatcctcacagtgaacactcagtggcccatggcattttataggcatacctcctatgggttgtcaccaagctaggtgctattggtcatctgctcctgttcacaccagagaaccaggctacaagagaaaaagcagaggccaagagtttgagggagaaatagtcggtgaagaaaccgtatccataaagacccgattccaccaaatgtgctttgagaaggataggccttcattaacaaaatgtatgtctggttccccagtagagctctactgcctcaacccaaggggatttttatgtctggggcagaaacactcaagttgattagaaagaccaggccaatgtcagggtacctggggccaaacccacctgctagtgtgaattaaagtactttaattttgttttctgtggaggtggaaaagcaacattcatagtctttggagaaatgcttagaaattcagcatttgacccttgctgtgaattaagcccaattaattcctgtttgtctacatatgatctgtctgtggcaaaagtttaatcagaggaaattctttcccagtctgtcgatttatgcctcagccacttgcctgtgctacaattcattgtgttacctgtagattcaggtaatacaaactatatataatcatcaagtaatacaaactaatttagtaatagcctgggttaagtattattagggccctgtgtctgctgtagaaaaaaaaattcacatgatgcacttcaaattcaaataaaaatccttttggcatgttcccatttttgcttagctcaattagtgtggctaaccaagagataactgtaaatgtgacattgatttgctcttactacagcttcagtgattgggggaggaaaagtcccaacccaatgggctcaaacttctatcttcccatgaccccaaagccaagggcaacagatcagtaaagaacgtggtcagagtagaacccctgaagtattttttaatcctacctcaaaatttaacagttacctgagagatttaacattatctagttcattgaatcattgtatgtggtcatggataaattgcacaccttggaattcgctttctaaaggaaatcaaatgaatggaggaactttccaaacaccactttacttgtgttatatagccaatataactatctctactgaatgtcattgaaaaactaaaaaattaaacttatttacaaata

SEQ ID NO: 731893 - DNA, 2635 bp, Homo sapiens
  misc_feature (14)..(14): n is a, c, g, or t
  misc_feature (16)..(16): n is a, c, g, or t
  misc_feature (25)..(25): n is a, c, g, or t
cgcgtgggttcctngnagacgtcgngactctaaattgccccctctgaggtcaaggaacacaagatggttttggaaatgctgaacccgatacattataacatcaccagcatcgtgcctgaagccatgcctgctgccaccatgccagtcctgctcctcactggcctttttctcttggtgtggaattatgagggcacatcctcaataccaggtcctggctactgcatgggaattggacccctcatctcccacggcagattcctgtggatggggatcggcagtgcctgcaactactacaaccgggtatatggagaattcatgcgagtctggatctctggagaggaaacactcattatcagcaagtcctcaagtatgttccacataatgaagcacaatcattacagctctcgattcggcagcaaacttgggctgcagtgcatcggtatgcatgagaaaggcatcatatttaacaacaatccagagctctggaaaacaactcgacccttctttatgaaagaaagtgctatcgtggttaaaatccaaggttattttgatgcatggcaagctctcctcatcaaaccagacatcttctttaagatttcttggctatacaaaaagtatgagaagtctgtcaaggatttgaaagatgccatagaagttctgatagcagaaaaaagacgcaggatttccacagaagagaaactggaagaatgtatggactttgccactgagttgattttagcagagaaacgtggtgacctgacaagagagaatgtgaaccagtgcatattggaaatgctgatcgcagctcctgacaccatgtctgtctctttgttcttcatgctatttctcattgcaaagcaccctaatgttgaagaggcaataataaaggaaatccagactgttattggtgagagagacataaagattgatgatatacaaaaattaaaagtgatggaaaacttcatttatgagagcatgcggtaccagcctgtcgtggacttggtcatgcgcaaagccttagaagatgatgtaatcgatggctacccagtgaaaaaggggacaaacattatcctgaatattggaaggatgcacagactcgagtttttccccaaacccaatgaatttactcttgaaaattttgcaaagaatgttccttataggtactttcagccatttggctttgggccccgtggctgtgcaggaaagtacatcgccatggtgatgatgaaagccatcctcgttacacttctgagacgattccacgtgaagacattgcaaggacagtgtgttgagagcatacagaagatacacgacttgtccttgcacccagatgagactaaaaacatgctggaaatgatctttaccccaagaaactcagacaggtgtctggaacactagagaaggctggtcagtacctactctggagcatttctcatcagtagttcacatacaaatcatccatccttgccaatagtgtcatcctcacagtgaacactcagtggcccatggcattttataggcatacctcctatgggttgtcaccaagctaggtgctattggtcatctgctcctgttcacaccagagaaccaggctacaagagaaaaagcagaggccaagagtttgagggagaaatagtcggtgaagaaaccgtatccataaagacccgattccaccaaatgtgctttgagaaggataggccttcattaacaaaatgtatgtctggttccccagtagagctctactgcctcaacccaaggggatttttatgtctggggcagaaacactcaagttgattagaaagaccaggccaatgtcagggtacctggggccaaacccacctgctagtgtgaattaaagtactttaattttgttttctgtggaggtggaaaagcaacattcatagtctttggagaaatgcttagaaattcagcatttgacccttgctgtgaattaagcccaattaattcctgtttgtctacatatgatctgtctgtggcaaaagtttaatcagaggaaattctttcccagtctgtcgatttatgcctcagccacttgcctgtgctacaattcattgtgttacctgtagattcaggtaatacaaactatatataatcatcaagtaatacaaactaatttagtaatagcctgggttaagtattattagggccctgtgtctgctgtagaaaaaaaaattcacatgatgcacttcaaattcaaataaaaatccttttggcatgttcccatttttgcttagctcaattagtgtggctaaccaagagataactgtaaatgtgacattgatttgctcttactacagcttcagtgattgggggaggaaaagtcccaacccaatgggctcaaacttctatcttcccatgaccccaaagccaagggcaacagatcagtaaagaacgtggtcagagtagaacccctgaagtattttttaatcctacctcaaaatttaacagttacctgagagatttaacattatctagttcattgaatcattgtatgtggtcatggataaattgcacaccttggaattcgctttctaaaggaaatcaaatgaatggaggaactttccaaacaccactttacttgtgttatatagccaatataactatctctactgaa

SEQ ID NO: 731894 - DNA, 2636 bp, Homo sapiens
  misc_feature (14)..(14): n is a, c, g, or t
  misc_feature (16)..(16): n is a, c, g, or t
  misc_feature (25)..(25): n is a, c, g, or t
cgcgtgggttcctngnagacgtcgngactctaaattgccccctctgaggtcaaggaacacaagatggttttggaaatgctgaacccgatacattataacatcaccagcatcgtgcctgaagccatgcctgctgccaccatgccagtcctgctcctcactggcctttttctcttggtgtggaattatgagggcacatcctcaataccaggtcctggctactgcatgggaattggacccctcatctcccacggcagattcctgtggatggggatcggcagtgcctgcaactactacaaccgggtatatggagaattcatgcgagtctggatctctggagaggaaacactcattatcagcaagtcctcaagtatgttccacataatgaagcacaatcattacagctctcgattcggcagcaaacttgggctgcagtgcatcggtatgcatgagaaaggcatcatatttaacaacaatccagagctctggaaaacaactcgacccttctttatgaaagaaagtgctatcgtggttaaaatccaaggttattttgatgcatggcaagctctcctcatcaaaccagacatcttctttaagatttcttggctatacaaaaagtatgagaagtctgtcaaggatttgaaagatgccatagaagttctgatagcagaaaaaagacgcaggatttccacagaagagaaactggaagaatgtatggactttgccactgagttgattttagcagagaaacgtggtgacctgacaagagagaatgtgaaccagtgcatattggaaatgctgatcgcagctcctgacaccatgtctgtctctttgttcttcatgctatttctcattgcaaagcaccctaatgttgaagaggcaataataaaggaaatccagactgttattggtgagagagacataaagattgatgatatacaaaaattaaaagtgatggaaaacttcatttatgagagcatgcggtaccagcctgtcgtggacttggtcatgcgcaaagccttagaagatgatgtaatcgatggctacccagtgaaaaaggggacaaacattatcctgaatattggaaggatgcacagactcgagtttttccccaaacccaatgaatttactcttgaaaattttgcaaagaatgttccttataggtactttcagccatttggctttgggccccgtggctgtgcaggaaagtacatcgccatggtgatgatgaaagccatcctcgttacacttctgagacgattccacgtgaagacattgcaaggacagtgtgttgagagcatacagaagatacacgacttgtccttgcacccagatgagactaaaaacatgctggaaatgatctttaccccaagaaactcagacaggtgtctggaacactagagaaggctggtcagtacctactctggagcatttctcatcagtagttcacatacaaatcatccatccttgccaatagtgtcatcctcacagtgaacactcagtggcccatggcattttataggcatacctcctatgggttgtcaccaagctaggtgctattggtcatctgctcctgttcacaccagagaaccaggctacaagagaaaaagcagaggccaagagtttgagggagaaatagtcggtgaagaaaccgtatccataaagacccgattccaccaaatgtgctttgagaaggataggccttcattaacaaaatgtatgtctggttccccagtagagctctactgcctcaacccaaggggatttttatgtctggggcagaaacactcaagttgattagaaagaccaggccaatgtcagggtacctggggccaaacccacctgctagtgtgaattaaagtactttaattttgttttctgtggaggtggaaaagcaacattcatagtctttggagaaatgcttagaaattcagcatttgacccttgctgtgaattaagcccaattaattcctgtttgtctacatatgatctgtctgtggcaaaagtttaatcagaggaaattctttcccagtctgtcgatttatgcctcagccacttgcctgtgctacaattcattgtgttacctgtagattcaggtaatacaaactatatataatcatcaagtaatacaaactaatttagtaatagcctgggttaagtattattagggccctgtgtctgctgtagaaaaaaaaattcacatgatgcacttcaaattcaaataaaaatccttttggcatgttcccatttttgcttagctcaattagtgtggctaaccaagagataactgtaaatgtgacattgatttgctcttactacaaggggtactcctctcatccccttatccttctccctcgacattttctccctctttcttcccatgaccccaaagccaagggcaacagatcagtaaagaacgtggtcagagtagaacccctgaagtattttttaatcctacctcaaaatttaacagttacctgagagatttaacattatctagttcattgaatcattgtatgtggtcatggataaattgcacaccttggaattcgctttctaaaggaaatcaaatgaatggaggaactttccaaacaccactttacttgtgttatatagccaatataactatctctactgaa

SEQ ID NO: 731895 - DNA, 2743 bp, Homo sapiens
  misc_feature (14)..(14): n is a, c, g, or t
  misc_feature (16)..(16): n is a, c, g, or t
  misc_feature (25)..(25): n is a, c, g, or t
  misc_feature (2712)..(2714): n is a, c, g, or t
  misc_feature (2726)..(2727): n is a, c, g, or t
  misc_feature (2733)..(2733): n is a, c, g, or t
cgcgtgggttcctngnagacgtcgngactctaaattgccccctctgaggtcaaggaacacaagatggttttggaaatgctgaacccgatacattataacatcaccagcatcgtgcctgaagccatgcctgctgccaccatgccagtcctgctcctcactggcctttttctcttggtgtggaattatgagggcacatcctcaataccaggtcctggctactgcatgggaattggacccctcatctcccacggcagattcctgtggatggggatcggcagtgcctgcaactactacaaccgggtatatggagaattcatgcgagtctggatctctggagaggaaacactcattatcagcaagtcctcaagtatgttccacataatgaagcacaatcattacagctctcgattcggcagcaaacttgggctgcagtgcatcggtatgcatgagaaaggcatcatatttaacaacaatccagagctctggaaaacaactcgacccttctttatgaaagaaagtgctatcgtggttaaaatccaaggttattttgatgcatggcaagctctcctcatcaaaccagacatcttctttaagatttcttggctatacaaaaagtatgagaagtctgtcaaggatttgaaagatgccatagaagttctgatagcagaaaaaagacgcaggatttccacagaagagaaactggaagaatgtatggactttgccactgagttgattttagcagagaaacgtggtgacctgacaagagagaatgtgaaccagtgcatattggaaatgctgatcgcagctcctgacaccatgtctgtctctttgttcttcatgctatttctcattgcaaagcaccctaatgttgaagaggcaataataaaggaaatccagactgttattggtgagagagacataaagattgatgatatacaaaaattaaaagtgatggaaaacttcatttatgagagcatgcggtaccagcctgtcgtggacttggtcatgcgcaaagccttagaagatgatgtaatcgatggctacccagtgaaaaaggggacaaacattatcctgaatattggaaggatgcacagactcgagtttttccccaaacccaatgaatttactcttgaaaattttgcaaagaatgttccttataggtactttcagccatttggctttgggccccgtggctgtgcaggaaagtacatcgccatggtgatgatgaaagccatcctcgttacacttctgagacgattccacgtgaagacattgcaaggacagtgtgttgagagcatacagaagatacacgacttgtccttgcacccagatgagactaaaaacatgctggaaatgatctttaccccaagaaactcagacaggtgtctggaacactagagaaggctggtcagtacctactctggagcatttctcatcagtagttcacatacaaatcatccatccttgccaatagtgtcatcctcacagtgaacactcagtggcccatggcattttataggcatacctcctatgggttgtcaccaagctaggtgctattggtcatctgctcctgttcacaccagagaaccaggctacaagagaaaaagcagaggccaagagtttgagggagaaatagtcggtgaagaaaccgtatccataaagacccgattccaccaaatgtgctttgagaaggataggccttcattaacaaaatgtatgtctggttccccagtagagctctactgcctcaacccaaggggatttttatgtctggggcagaaacactcaagttgattagaaagaccaggccaatgtcagggtacctggggccaaacccacctgctagtgtgaattaaagtactttaattttgttttctgtggaggtggaaaagcaacattcatagtctttggagaaatgcttagaaattcagcatttgacccttgctgtgaattaagcccaattaattcctgtttgtctacatatgatctgtctgtggcaaaagtttaatcagaggaaattctttcccagtctgtcgatttatgcctcagccacttgcctgtgctacaattcattgtgttacctgtagattcaggtaatacaaactatatataatcatcaagtaatacaaactaatttagtaatagcctgggttaagtattattagggccctgtgtctgctgtagaaaaaaaaattcacatgatgcacttcaaattcaaataaaaatccttttggcatgttcccatttttgcttagctcaattagtgtggctaaccaagagataactgtaaatgtgacattgatttgctcttactacaaggggtactcctctcatccccttatccttctccctcgacattttctccctctttcttcccatgaccccaaagccaagggcaacagatcagtaaagaacgtggtcagagtagaacccctgaagtattttttaatcctacctcaaaatttaacagttacctgagagatttaacattatctagttcattgaatcattgtatgtggtcatggataaattgcacaccttggaattcgctttctaaaggaaatcaaatgaatggaggaactttccaaacaccactttacttgtgttatatagccaatataactatctctactgaatgtcattgaaaaactaaaaaattaaacttatttacaaataggtaaaaaaaaaaaaaaaaacaaacacaaaaaaacnnntggggggcgccnngggccncggaaaaacc

SEQ ID NO: 731896 - DNA, 2676 bp, Homo sapiens
  misc_feature (14)..(14): n is a, c, g, or t
  misc_feature (16)..(16): n is a, c, g, or t
  misc_feature (25)..(25): n is a, c, g, or t
cgcgtgggttcctngnagacgtcgngactctaaattgccccctctgaggtcaaggaacacaagatggttttggaaatgctgaacccgatacattataacatcaccagcatcgtgcctgaagccatgcctgctgccaccatgccagtcctgctcctcactggcctttttctcttggtgtggaattatgagggcacatcctcaataccaggtcctggctactgcatgggaattggacccctcatctcccacggcagattcctgtggatggggatcggcagtgcctgcaactactacaaccgggtatatggagaattcatgcgagtctggatctctggagaggaaacactcattatcagcaagtcctcaagtatgttccacataatgaagcacaatcattacagctctcgattcggcagcaaacttgggctgcagtgcatcggtatgcatgagaaaggcatcatatttaacaacaatccagagctctggaaaacaactcgacccttctttatgaaagaaagtgctatcgtggttaaaatccaaggttattttgatgcatggcaagctctcctcatcaaaccagacatcttctttaagatttcttggctatacaaaaagtatgagaagtctgtcaaggatttgaaagatgccatagaagttctgatagcagaaaaaagacgcaggatttccacagaagagaaactggaagaatgtatggactttgccactgagttgattttagcagagaaacgtggtgacctgacaagagagaatgtgaaccagtgcatattggaaatgctgatcgcagctcctgacaccatgtctgtctctttgttcttcatgctatttctcattgcaaagcaccctaatgttgaagaggcaataataaaggaaatccagactgttattggtgagagagacataaagattgatgatatacaaaaattaaaagtgatggaaaacttcatttatgagagcatgcggtaccagcctgtcgtggacttggtcatgcgcaaagccttagaagatgatgtaatcgatggctacccagtgaaaaaggggacaaacattatcctgaatattggaaggatgcacagactcgagtttttccccaaacccaatgaatttactcttgaaaattttgcaaagaatgttccttataggtactttcagccatttggctttgggccccgtggctgtgcaggaaagtacatcgccatggtgatgatgaaagccatcctcgttacacttctgagacgattccacgtgaagacattgcaaggacagtgtgttgagagcatacagaagatacacgacttgtccttgcacccagatgagactaaaaacatgctggaaatgatctttaccccaagaaactcagacaggtgtctggaacactagagaaggctggtcagtacctactctggagcatttctcatcagtagttcacatacaaatcatccatccttgccaatagtgtcatcctcacagtgaacactcagtggcccatggcattttataggcatacctcctatgggttgtcaccaagctaggtgctattggtcatctgctcctgttcacaccagagaaccaggctacaagagaaaaagcagaggccaagagtttgagggagaaatagtcggtgaagaaaccgtatccataaagacccgattccaccaaatgtgctttgagaaggataggccttcattaacaaaatgtatgtctggttccccagtagagctctactgcctcaacccaaggggatttttatgtctggggcagaaacactcaagttgattagaaagaccaggccaatgtcagggtacctggggccaaacccacctgctagtgtgaattaaagtactttaattttgttttctgtggaggtggaaaagcaacattcatagtctttggagaaatgcttagaaattcagcatttgacccttgctgtgaattaagcccaattaattcctgtttgtctacatatgatctgtctgtggcaaaagtttaatcagaggaaattctttcccagtctgtcgatttatgcctcagccacttgcctgtgctacaattcattgtgttacctgtagattcaggtaatacaaactatatataatcatcaagtaatacaaactaatttagtaatagcctgggttaagtattattagggccctgtgtctgctgtagaaaaaaaaattcacatgatgcacttcaaattcaaataaaaatccttttggcatgttcccatttttgcttagctcaattagtgtggctaaccaagagataactgtaaatgtgacattgatttgctcttactacaaggggtactcctctcatccccttatccttctccctcgacattttctccctctttcttcccatgaccccaaagccaagggcaacagatcagtaaagaacgtggtcagagtagaacccctgaagtattttttaatcctacctcaaaatttaacagttacctgagagatttaacattatctagttcattgaatcattgtatgtggtcatggataaattgcacaccttggaattcgctttctaaaggaaatcaaatgaatggaggaactttccaaacaccactttacttgtgttatatagccaatataactatctctactgaatgtcattgaaaaactaaaaaattaaacttatttacaaata

SEQ ID NO: 731897 - DNA, 3353 bp, Homo sapiens
  misc_feature (14)..(14): n is a, c, g, or t
  misc_feature (16)..(16): n is a, c, g, or t
  misc_feature (25)..(25): n is a, c, g, or t
cgcgtgggttcctngnagacgtcgngactctaaattgccccctctgaggtcaaggaacacaagatggttttggaaatgctgaacccgatacattataacatcaccagcatcgtgcctgaagccatgcctgctgccaccatgccagtcctgctcctcactggcctttttctcttggtgtggaattatgagggcacatcctcaataccaggtcctggctactgcatgggaattggacccctcatctcccacggcagattcctgtggatggggatcggcagtgcctgcaactactacaaccgggtatatggagaattcatgcgagtctggatctctggagaggaaacactcattatcagcaagtcctcaagtatgttccacataatgaagcacaatcattacagctctcgattcggcagcaaacttgggctgcagtgcatcggtatgcatgagaaaggcatcatatttaacaacaatccagagctctggaaaacaactcgacccttctttatgaaagaaagtgctatcgtggttaaaatccaaggttattttgatgcatggcaagctctcctcatcaaaccagacatcttctttaagatttcttggctatacaaaaagtatgagaagtctgtcaaggatttgaaagatgccatagaagttctgatagcagaaaaaagacgcaggatttccacagaagagaaactggaagaatgtatggactttgccactgagttgattttagcagagaaacgtggtgacctgacaagagagaatgtgaaccagtgcatattggaaatgctgatcgcagctcctgacaccatgtctgtctctttgttcttcatgctatttctcattgcaaagcaccctaatgttgaagaggcaataataaaggaaatccagactgttattggtgagagagacataaagattgatgatatacaaaaattaaaagtgatggaaaacttcatttatgagagcatgcggtaccagcctgtcgtggacttggtcatgcgcaaagccttagaagatgatgtaatcgatggctacccagtgaaaaaggggacaaacattatcctgaatattggaaggatgcacagactcgagtttttccccaaacccaatgaatttactcttgaaaattttgcaaagaatgttccttataggtactttcagccatttggctttgggccccgtggctgtgcaggaaagtacatcgccatggtgatgatgaaagccatcctcgttacacttctgagacgattccacgtgaagacattgcaaggacagtgtgttgagagcatacagaagatacacgacttgtccttgcacccagatgagactaaaaacatgctggaaatgatctttaccccaagaaactcagacaggtgtctggaacactagagaaggctggtcagtacctactctggagcatttctcatcagtagttcacatacaaatcatccatccttgccaatagtgtcatcctcacagtgaacactcagtggcccatggcattttataggcatacctcctatgggttgtcaccaagctaggtgctattggtcatctgctcctgttcacaccagagaaccaggctacaagagaaaaagcagaggccaagagtttgagggagaaatagtcggtgaagaaaccgtatccataaagacccgattccaccaaatgtgctttgagaaggataggccttcattaacaaaatgtatgtctggttccccagtagagctctactgcctcaacccaaggggatttttatgtctggggcagaaacactcaagttgattagaaagaccaggccaatgtcagggtacctggggccaaacccacctgctagtgtgaattaaagtactttaattttgttttctgtggaggtggaaaagcaacattcatagtctttggagaaatgcttagaaattcagcatttgacccttgctgtgaattaagcccaattaattcctgtttgtctacatatgatctgtctgtggcaaaagtttaatcagaggaaattctttcccagtctgtcgatttatgcctcagccacttgcctgtgctacaattcattgtgttacctgtagattcaggtaatacaaactatatataatcatcaagtaatacaaactaatttagtaatagcctgggttaagtattattagggccctgtgtctgctgtagaaaaaaaaattcacatgatgcacttcaaattcaaataaaaatccttttggcatgttcccatttttgcttagctcaattagtgtggctaaccaagagataactgtaaatgtgacattgatttgctcttactacaaggggtactcctctcatccccttatccttctccctcgacattttctccctctttcttcccatgaccccaaagccaagggcaacagatcagtaaagaacgtggtcagagtagaacccctgaagtattttttaatcctacctcaaaatttaacagttacctgagagatttaacattatctagttcattgaatcattgtatgtggtcatggataaattgcacaccttggaattcgctttctaaaggaaatcaaatgaatggaggaactttccaaacaccactttacttgtgttatatagccaatataactatctctactgaatgtcattgaaaaactaaaaaattaaacttatttacaaataggtaaatatttgtcattgaatccattgccatcccatttgactgttcttttcatcctactgtctagtaataagctgagtataagatgacagtgtaatctccctgaaagcaggagctactttctttcttttgtaatctatttccatccccatttccctgtcctgtctccctgtattcactcccaagctcagttctgaatagacattcctgctcagagatactcccaactgatgcagaaaccaaataaagaggtaggtattccaagaattcaagaatggacattagtaaagaataaaacatttatttgagcttggaattatttggatcatctatatggcctaaaaatatatggactatgcctgtgtacctgaatacgtatgtagtcaggtcaagacaatcatccaaataacttagacccctaaaagcaaggccaggatttgcaatttaatgtgtcccaattaattcacttgaaaattagtaacactctgtttacgttgcctctggctggagctgcatggtggaagaagcccaactttggatccatgtacttcacccatccaatactcttgggacatttatgtgtattttatctgtatatatgaagccaatgtctatgtctacacagtcaaagtgaaatgcatgtttgatatagctgtacatagatatctattttgcaggt

SEQ ID NO: 731898 - DNA, 2805 bp, Homo sapiens
  misc_feature (14)..(14): n is a, c, g, or t
  misc_feature (16)..(16): n is a, c, g, or t
  misc_feature (25)..(25): n is a, c, g, or t
  misc_feature (2767)..(2767): n is a, c, g, or t
  misc_feature (2802)..(2802): n is a, c, g, or t
cgcgtgggttcctngnagacgtcgngactctaaattgccccctctgaggtcaaggaacacaagatggttttggaaatgctgaacccgatacattataacatcaccagcatcgtgcctgaagccatgcctgctgccaccatgccagtcctgctcctcactggcctttttctcttggtgtggaattatgagggcacatcctcaataccaggtcctggctactgcatgggaattggacccctcatctcccacggcagattcctgtggatggggatcggcagtgcctgcaactactacaaccgggtatatggagaattcatgcgagtctggatctctggagaggaaacactcattatcagcaagtcctcaagtatgttccacataatgaagcacaatcattacagctctcgattcggcagcaaacttgggctgcagtgcatcggtatgcatgagaaaggcatcatatttaacaacaatccagagctctggaaaacaactcgacccttctttatgaaagaaagtgctatcgtggttaaaatccaaggttattttgatgcatggcaagctctcctcatcaaaccagacatcttctttaagatttcttggctatacaaaaagtatgagaagtctgtcaaggatttgaaagatgccatagaagttctgatagcagaaaaaagacgcaggatttccacagaagagaaactggaagaatgtatggactttgccactgagttgattttagcagagaaacgtggtgacctgacaagagagaatgtgaaccagtgcatattggaaatgctgatcgcagctcctgacaccatgtctgtctctttgttcttcatgctatttctcattgcaaagcaccctaatgttgaagaggcaataataaaggaaatccagactgttattggtgagagagacataaagattgatgatatacaaaaattaaaagtgatggaaaacttcatttatgagagcatgcggtaccagcctgtcgtggacttggtcatgcgcaaagccttagaagatgatgtaatcgatggctacccagtgaaaaaggggacaaacattatcctgaatattggaaggatgcacagactcgagtttttccccaaacccaatgaatttactcttgaaaattttgcaaagaatgttccttataggtactttcagccatttggctttgggccccgtggctgtgcaggaaagtacatcgccatggtgatgatgaaagccatcctcgttacacttctgagacgattccacgtgaagacattgcaaggacagtgtgttgagagcatacagaagatacacgacttgtccttgcacccagatgagactaaaaacatgctggaaatgatctttaccccaagaaactcagacaggtgtctggaacactagagaaggctggtcagtacctactctggagcatttctcatcagtagttcacatacaaatcatccatccttgccaatagtgtcatcctcacagtgaacactcagtggcccatggcattttataggcatacctcctatgggttgtcaccaagctaggtgctattggtcatctgctcctgttcacaccagagaaccaggctacaagagaaaaagcagaggccaagagtttgagggagaaatagtcggtgaagaaaccgtatccataaagacccgattccaccaaatgtgctttgagaaggataggccttcattaacaaaatgtatgtctggttccccagtagagctctactgcctcaacccaaggggatttttatgtctggggcagaaacactcaagttgattagaaagaccaggccaatgtcagggtacctggggccaaacccacctgctagtgtgaattaaagtactttaattttgttttctgtggaggtggaaaagcaacattcatagtctttggagaaatgcttagaaattcagcatttgacccttgctgtgaattaagcccaattaattcctgtttgtctacatatgatctgtctgtggcaaaagtttaatcagaggaaattctttcccagtctgtcgatttatgcctcagccacttgcctgtgctacaattcattgtgttacctgtagattcaggtaatacaaactatatataatcatcaagtaatacaaactaatttagtaatagcctgggttaagtattattagggccctgtgtctgctgtagaaaaaaaaattcacatgatgcacttcaaattcaaataaaaatccttttggcatgttcccatttttgcttagctcaattagtgtggctaaccaagagataactgtaaatgtgacattgatttgctcttactacaaggggtactcctctcatccccttatccttctccctcgacattttctccctctttcttcccatgaccccaaagccaagggcaacagatcagtaaagaacgtggtcagagtagaacccctgaagtattttttaatcctacctcaaaatttaacagttacctgagagatttaacattatctagttcattgaatcattgtatgtggtcatggataaattgcacaccttggaattcgctttctaaaggaaatcaaatgaatggaggaactttccaaacaccactttacttgtgttatatagccaatataactatctctactgaatgtcattgaaaaactaaaaaattaaacttatttacaaataaaaaaaaaaaaaaaaaaaaaaaaaaaaaaaaaaaaaaaaaaaataaaaaaaaaaaaaaaaaaaaaaaaaaaaaaaaaaaaaaaaaaaaaanaaaaaaaaaaaaaaaaaaaaaaaaaaaaaaaaaanaag

SEQ ID NO: 731899 - DNA, 2292 bp, Homo sapiens
  misc_feature (14)..(14): n is a, c, g, or t
  misc_feature (16)..(16): n is a, c, g, or t
  misc_feature (25)..(25): n is a, c, g, or t
cgcgtgggttcctngnagacgtcgngactctaaattgccccctctgaggtcaaggaacacaagatggttttggaaatgctgaacccgatacattataacatcaccagcatcgtgcctgaagccatgcctgctgccaccatgccagtcctgctcctcactggcctttttctcttggtgtggaattatgagggcacatcctcaataccaggtcctggctactgcatgggaattggacccctcatctcccacggcagattcctgtggatggggatcggcagtgcctgcaactactacaaccgggtatatggagaattcatgcgagtctggatctctggagaggaaacactcattatcagcaagtcctcaagtatgttccacataatgaagcacaatcattacagctctcgattcggcagcaaacttgggctgcagtgcatcggtatgcatgagaaaggcatcatatttaacaacaatccagagctctggaaaacaactcgacccttctttatgaaagaaagtgctatcgtggttaaaatccaaggttattttgatgcatggcaagctctcctcatcaaaccagacatcttctttaagatttcttggctatacaaaaagtatgagaagtctgtcaaggatttgaaagatgccatagaagttctgatagcagaaaaaagacgcaggatttccacagaagagaaactggaagaatgtatggactttgccactgagttgattttagcagagaaacgtggtgacctgacaagagagaatgtgaaccagtgcatattggaaatgctgatcgcagctcctgacaccatgtctgtctctttgttcttcatgctatttctcattgcaaagcaccctaatgttgaagaggcaataataaaggaaatccagactgttattggtgagagagacataaagattgatgatatacaaaaattaaaagtgatggaaaacttcatttatgagagcatgcggtaccagcctgtcgtggacttggtcatgcgcaaagccttagaagatgatgtaatcgatggctacccagtgaaaaaggggacaaacattatcctgaatattggaaggatgcacagactcgagtttttccccaaacccaatgaatttactcttgaaaattttgcaaagaatgttccttataggtactttcagccatttggctttgggccccgtggctgtgcaggaaagtacatcgccatggtgatgatgaaagccatcctcgttacacttctgagacgattccacgtgaagacattgcaaggacagtgtgttgagagcatacagaagatacacgacttgtccttgcacccagatgagactaaaaacatgctggaaatgatctttaccccaagaaactcagacaggtgtctggaacactagagaaggctggtcagtacctactctggagcatttctcatcagtagttcacatacaaatcatccatccttgccaatagtgtcatcctcacagtgaacactcagtggcccatggcattttataggcatacctcctatgggttgtcaccaagctaggtgctattggtcatctgctcctgttcacaccagagaaccaggctacaagagaaaaagcagaggccaagagtttgagggagaaatagtcggtgaagaaaccgtatccataaagacccgattccaccaaatgtgctttgagaaggataggccttcattaacaaaatgtatgtctggttccccagtagagctctactgcctcaacccaaggggatttttatgtctggggcagaaacactcaagttgattagaaagaccaggccaatgtcagggtacctggggccaaacccacctgctagtgtgaattaaagtactttaattttgttttctgtggaggtggaaaagcaacattcatagtctttggagaaatgcttagaaattcagcatttgacccttgctgtgaattaagcccaattaattcctgtttgtctacatatgatctgtctgtggcaaaagtttaatcagaggaaattctttcccagtctgtcgatttatgcctcagccacttgcctgtgctacaattcattgtgttacctgtagattcaggtaatacaaactatatataatcatcaagtaatacaaactaatttagtaatagcctgggttaagtattattagggccctgtgtctgctgtagaaaaaaaaattcacatgatgcacttcaaattcaaataaaaatccttttggcatgttcccattttaaaaaaaaaaaaaaaaaaaaaaaaaaaaaaaaaaaaaaaaaaat

SEQ ID NO: 731900 - DNA, 2248 bp, Homo sapiens
  misc_feature (14)..(14): n is a, c, g, or t
  misc_feature (16)..(16): n is a, c, g, or t
  misc_feature (25)..(25): n is a, c, g, or t
cgcgtgggttcctngnagacgtcgngactctaaattgccccctctgaggtcaaggaacacaagatggttttggaaatgctgaacccgatacattataacatcaccagcatcgtgcctgaagccatgcctgctgccaccatgccagtcctgctcctcactggcctttttctcttggtgtggaattatgagggcacatcctcaataccaggtcctggctactgcatgggaattggacccctcatctcccacggcagattcctgtggatggggatcggcagtgcctgcaactactacaaccgggtatatggagaattcatgcgagtctggatctctggagaggaaacactcattatcagcaagtcctcaagtatgttccacataatgaagcacaatcattacagctctcgattcggcagcaaacttgggctgcagtgcatcggtatgcatgagaaaggcatcatatttaacaacaatccagagctctggaaaacaactcgacccttctttatgaaagaaagtgctatcgtggttaaaatccaaggttattttgatgcatggcaagctctcctcatcaaaccagacatcttctttaagatttcttggctatacaaaaagtatgagaagtctgtcaaggatttgaaagatgccatagaagttctgatagcagaaaaaagacgcaggatttccacagaagagaaactggaagaatgtatggactttgccactgagttgattttagcagagaaacgtggtgacctgacaagagagaatgtgaaccagtgcatattggaaatgctgatcgcagctcctgacaccatgtctgtctctttgttcttcatgctatttctcattgcaaagcaccctaatgttgaagaggcaataataaaggaaatccagactgttattggtgagagagacataaagattgatgatatacaaaaattaaaagtgatggaaaacttcatttatgagagcatgcggtaccagcctgtcgtggacttggtcatgcgcaaagccttagaagatgatgtaatcgatggctacccagtgaaaaaggggacaaacattatcctgaatattggaaggatgcacagactcgagtttttccccaaacccaatgaatttactcttgaaaattttgcaaagaatgttccttataggtactttcagccatttggctttgggccccgtggctgtgcaggaaagtacatcgccatggtgatgatgaaagccatcctcgttacacttctgagacgattccacgtgaagacattgcaaggacagtgtgttgagagcatacagaagatacacgacttgtccttgcacccagatgagactaaaaacatgctggaaatgatctttaccccaagaaactcagacaggtgtctggaacactagagaaggctggtcagtacctactctggagcatttctcatcagtagttcacatacaaatcatccatccttgccaatagtgtcatcctcacagtgaacactcagtggcccatggcattttataggcatacctcctatgggttgtcaccaagctaggtgctattggtcatctgctcctgttcacaccagagaaccaggctacaagagaaaaagcagaggccaagagtttgagggagaaatagtcggtgaagaaaccgtatccataaagacccgattccaccaaatgtgctttgagaaggataggccttcattaacaaaatgtatgtctggttccccagtagagctctactgcctcaacccaaggggatttttatgtctggggcagaaacactcaagttgattagaaagaccaggccaatgtcagggtacctggggccaaacccacctgctagtgtgaattaaagtactttaattttgttttctgtggaggtggaaaagcaacattcatagtctttggagaaatgcttagaaattcagcatttgacccttgctgtgaattaagcccaattaattcctgtttgtctacatatgatctgtctgtggcaaaagtttaatcagaggaaattctttcccagtctgtcgatttatgcctcagccacttgcctgtgctacaattcattgtgttacctgtagattcaggtaatacaaactatatataatcatcaagtaatacaaactaatttagtaatagcctgggttaagtattattagggccctgtgtctgctgtagaaaaaaaaattcacatgatgcacttcaaattcaaataaaaatccttttggcatgttcccatttt

SEQ ID NO: 731901 - DNA, 1195 bp, Homo sapiens
  misc_feature (14)..(14): n is a, c, g, or t
  misc_feature (16)..(16): n is a, c, g, or t
  misc_feature (25)..(25): n is a, c, g, or t
cgcgtgggttcctngnagacgtcgngactctaaattgccccctctgaggtcaaggaacacaagatggttttggaaatgctgaacccgatacattataacatcaccagcatcgtgcctgaagccatgcctgctgccaccatgccagtcctgctcctcactggcctttttctcttggtgtggaattatgagggcacatcctcaataccaggtcctggctactgcatgggaattggacccctcatctcccacggcagattcctgtggatggggatcggcagtgcctgcaactactacaaccgggtatatggagaattcatgcgagtctggatctctggagaggaaacactcattatcagcaagtcctcaagtatgttccacataatgaagcacaatcattacagctctcgattcggcagcaaacttgggctgcagtgcatcggtatgcatgagaaaggcatcatatttaacaacaatccagagctctggaaaacaactcgacccttctttatgaaagaaagtgctatcgtggttaaaatccaaggttattttgatgcatggcaagctctcctcatcaaaccagacatcttctttaagatttcttggctatacaaaaagtatgagaagtctgtcaaggatttgaaagatgccatagaagttctgatagcagaaaaaagacgcaggatttccacagaagagaaactggaagaatgtatggactttgccactgagttgattttagcagagaaacgtggtgacctgacaagagagaatgtgaaccagtgcatattggaaatgctgatcgcagctcctgacaccatgtctgtctctttgttcttcatgctatttctcattgcaaagcaccctaatgttgaagaggcaataataaaggaaatccagactgttattggtgagagagacataaagattgatgatatacaaaaattaaaagtgatggaaaacttcatttatgagagcatgcggtaccagcctgtcgtggacttggtcatgcgcaaagccttagaagatgatgtaatcgatggctacccagtgaaaaaggggacaaacattatcctgaatattggaaggatgcacagactcgagtttttccccaaacccaatgaatttactcttgaaaattttgcaaagaatgtaagagcccttccttaaaactgagtgtgccactcttgaaaatgtc

SEQ ID NO: 731902 - DNA, 946 bp, Homo sapiens
  misc_feature (14)..(14): n is a, c, g, or t
  misc_feature (16)..(16): n is a, c, g, or t
  misc_feature (25)..(25): n is a, c, g, or t
cgcgtgggttcctngnagacgtcgngactctaaattgccccctctgaggtcaaggaacacaagatggttttggaaatgctgaacccgatacattataacatcaccagcatcgtgcctgaagccatgcctgctgccaccatgccagtcctgctcctcactggcctttttctcttggtgtggaattatgagggcacatcctcaataccaggtcctggctactgcatgggaattggacccctcatctcccacggcagattcctgtggatggggatcggcagtgcctgcaactactacaaccgggtatatggagaattcatgcgagtctggatctctggagaggaaacactcattatcagcaagtcctcaagtatgttccacataatgaagcacaatcattacagctctcgattcggcagcaaacttgggctgcagtgcatcggtatgcatgagaaaggcatcatatttaacaacaatccagagctctggaaaacaactcgacccttctttatgaaagaaagtgctatcgtggttaaaatccaaggttattttgatgcatggcaagctctcctcatcaaaccagacatcttctttaagatttcttggctatacaaaaagtatgagaagtctgtcaaggatttgaaagatgccatagaagttctgatagcagaaaaaagacgcaggatttccacagaagagaaactggaagaatgtatggactttgccactgagttgattttagcagagaaacgtggtgacctgacaagagagaatgtgaaccagtgcatattggaaatgctgatcgcagctcctgacaccatgtctgtctctttgttcttcatgctatttctcattgcaaagcaccctaatgttgaagaggcaataataaaggaaatccagactgttattggtaagaatttatcaaataaataatacatcttaaaaacaa

SEQ ID NO: 731903 - DNA, 3150 bp, Homo sapiens
  misc_feature (24)..(24): n is a, c, g, or t
  misc_feature (3112)..(3112): n is a, c, g, or t
  misc_feature (3147)..(3147): n is a, c, g, or t
aaacagtgtatcaacgcagagtgnccattacggccgggggagtttctggagggctgaacacgtggaggcaaacaggaaggtgaagaagaacttatcctatcaggacggaaggtcctgtgctcgggatcttccagacgtcgcgactctaaattgccccctctgaggtcaaggaacacaagatggttttggaaatgctgaacccgatacattataacatcaccagcatcgtgcctgaagccatgcctgctgccaccatgccagtcctgctcctcactggcctttttctcttggtgtggaattatgagggcacatcctcaataccaggtcctggctactgcatgggaattggacccctcatctcccacggcagattcctgtggatggggatcggcagtgcctgcaactactacaaccgggtatatggagaattcatgcgagtctggatctctggagaggaaacactcattatcagcaagtcctcaagtatgttccacataatgaagcacaatcattacagctctcgattcggcagcaaacttgggctgcagtgcatcggtatgcatgagaaaggcatcatatttaacaacaatccagagctctggaaaacaactcgacccttctttatgaaagctctgtcaggccccggccttgttcgtatggtcacagtctgtgctgaatccctcaaaacacatctggacaggttggaggaggtgaccaatgaatcgggctatgtggacgtgttgacccttctgcgtcgtgtcatgctggacacctctaacacgctcttcttgaggatccctttggacgaaagtgctatcgtggttaaaatccaaggttattttgatgcatggcaagctctcctcatcaaaccagacatcttctttaagatttcttggctatacaaaaagtatgagaagtctgtcaaggatttgaaagatgccatagaagttctgatagcagaaaaaagacgcaggatttccacagaagagaaactggaagaatgtatggactttgccactgagttgattttagcagagaaacgtggtgacctgacaagagagaatgtgaaccagtgcatattggaaatgctgatcgcagctcctgacaccatgtctgtctctttgttcttcatgctatttctcattgcaaagcaccctaatgttgaagaggcaataataaaggaaatccagactgttattggtgagagagacataaagattgatgatatacaaaaattaaaagtgatggaaaacttcatttatgagagcatgcggtaccagcctgtcgtggacttggtcatgcgcaaagccttagaagatgatgtaatcgatggctacccagtgaaaaaggggacaaacattatcctgaatattggaaggatgcacagactcgagtttttccccaaacccaatgaatttactcttgaaaattttgcaaagaatgttccttataggtactttcagccatttggctttgggccccgtggctgtgcaggaaagtacatcgccatggtgatgatgaaagccatcctcgttacacttctgagacgattccacgtgaagacattgcaaggacagtgtgttgagagcatacagaagatacacgacttgtccttgcacccagatgagactaaaaacatgctggaaatgatctttaccccaagaaactcagacaggtgtctggaacactagagaaggctggtcagtacctactctggagcatttctcatcagtagttcacatacaaatcatccatccttgccaatagtgtcatcctcacagtgaacactcagtggcccatggcattttataggcatacctcctatgggttgtcaccaagctaggtgctattggtcatctgctcctgttcacaccagagaaccaggctacaagagaaaaagcagaggccaagagtttgagggagaaatagtcggtgaagaaaccgtatccataaagacccgattccaccaaatgtgctttgagaaggataggccttcattaacaaaatgtatgtctggttccccagtagagctctactgcctcaacccaaggggatttttatgtctggggcagaaacactcaagttgattagaaagaccaggccaatgtcagggtacctggggccaaacccacctgctagtgtgaattaaagtactttaattttgttttctgtggaggtggaaaagcaacattcatagtctttggagaaatgcttagaaattcagcatttgacccttgctgtgaattaagcccaattaattcctgtttgtctacatatgatctgtctgtggcaaaagtttaatcagaggaaattctttcccagtctgtcgatttatgcctcagccacttgcctgtgctacaattcattgtgttacctgtagattcaggtaatacaaactatatataatcatcaagtaatacaaactaatttagtaatagcctgggttaagtattattagggccctgtgtctgctgtagaaaaaaaaattcacatgatgcacttcaaattcaaataaaaatccttttggcatgttcccatttttgcttagctcaattagtgtggctaaccaagagataactgtaaatgtgacattgatttgctcttactacagcttcagtgattgggggaggaaaagtcccaacccaatgggctcaaacttctaaggggtactcctctcatccccttatccttctccctcgacattttctccctctttcttcccatgaccccaaagccaagggcaacagatcagtaaagaacgtggtcagagtagaacccctgaagtattttttaatcctacctcaaaatttaacagttacctgagagatttaacattatctagttcattgaatcattgtatgtggtcatggataaattgcacaccttggaattcgctttctaaaggaaatcaaatgaatggaggaactttccaaacaccactttacttgtgttatatagccaatataactatctctactgaatgtcattgaaaaactaaaaaattaaacttatttacaaataaaaaaaaaaaaaaaaaaaaaaaaaaaaaaaaaaaaaaaaaaaataaaaaaaaaaaaaaaaaaaaaaaaaaaaaaaaaaaaaaaaaaaaaanaaaaaaaaaaaaaaaaaaaaaaaaaaaaaaaaaanaag

SEQ ID NO: 731904 - DNA, 3366 bp, Homo sapiens
  misc_feature (24)..(24): n is a, c, g, or t
aaacagtgtatcaacgcagagtgnccattacggccgggggagtttctggagggctgaacacgtggaggcaaacaggaaggtgaagaagaacttatcctatcaggacggaaggtcctgtgctcgggatcttccagacgtcgcgactctaaattgccccctctgaggtcaaggaacacaagatggttttggaaatgctgaacccgatacattataacatcaccagcatcgtgcctgaagccatgcctgctgccaccatgccagtcctgctcctcactggcctttttctcttggtgtggaattatgagggcacatcctcaataccaggtcctggctactgcatgggaattggacccctcatctcccacggcagattcctgtggatggggatcggcagtgcctgcaactactacaaccgggtatatggagaattcatgcgagtctggatctctggagaggaaacactcattatcagcaagtcctcaagtatgttccacataatgaagcacaatcattacagctctcgattcggcagcaaacttgggctgcagtgcatcggtatgcatgagaaaggcatcatatttaacaacaatccagagctctggaaaacaactcgacccttctttatgaaagctctgtcaggccccggccttgttcgtatggtcacagtctgtgctgaatccctcaaaacacatctggacaggttggaggaggtgaccaatgaatcgggctatgtggacgtgttgacccttctgcgtcgtgtcatgctggacacctctaacacgctcttcttgaggatccctttggacgaaagtgctatcgtggttaaaatccaaggttattttgatgcatggcaagctctcctcatcaaaccagacatcttctttaagatttcttggctatacaaaaagtatgagaagtctgtcaaggatttgaaagatgccatagaagttctgatagcagaaaaaagacgcaggatttccacagaagagaaactggaagaatgtatggactttgccactgagttgattttagcagagaaacgtggtgacctgacaagagagaatgtgaaccagtgcatattggaaatgctgatcgcagctcctgacaccatgtctgtctctttgttcttcatgctatttctcattgcaaagcaccctaatgttgaagaggcaataataaaggaaatccagactgttattggtgagagagacataaagattgatgatatacaaaaattaaaagtgatggaaaacttcatttatgagagcatgcggtaccagcctgtcgtggacttggtcatgcgcaaagccttagaagatgatgtaatcgatggctacccagtgaaaaaggggacaaacattatcctgaatattggaaggatgcacagactcgagtttttccccaaacccaatgaatttactcttgaaaattttgcaaagaatgttccttataggtactttcagccatttggctttgggccccgtggctgtgcaggaaagtacatcgccatggtgatgatgaaagccatcctcgttacacttctgagacgattccacgtgaagacattgcaaggacagtgtgttgagagcatacagaagatacacgacttgtccttgcacccagatgagactaaaaacatgctggaaatgatctttaccccaagaaactcagacaggtgtctggaacactagagaaggctggtcagtacctactctggagcatttctcatcagtagttcacatacaaatcatccatccttgccaatagtgtcatcctcacagtgaacactcagtggcccatggcattttataggcatacctcctatgggttgtcaccaagctaggtgctattggtcatctgctcctgttcacaccagagaaccaggctacaagagaaaaagcagaggccaagagtttgagggagaaatagtcggtgaagaaaccgtatccataaagacccgattccaccaaatgtgctttgagaaggataggccttcattaacaaaatgtatgtctggttccccagtagagctctactgcctcaacccaaggggatttttatgtctggggcagaaacactcaagttgattagaaagaccaggccaatgtcagggtacctggggccaaacccacctgctagtgtgaattaaagtactttaattttgttttctgtggaggtggaaaagcaacattcatagtctttggagaaatgcttagaaattcagcatttgacccttgctgtgaattaagcccaattaattcctgtttgtctacatatgatctgtctgtggcaaaagtttaatcagaggaaattctttcccagtctgtcgatttatgcctcagccacttgcctgtgctacaattcattgtgttacctgtagattcaggtaatacaaactatatataatcatcaagtaatacaaactaatttagtaatagcctgggttaagtattattagggccctgtgtctgctgtagaaaaaaaaattcacatgatgcacttcaaattcaaataaaaatccttttggcatgttcccatttttgcttagctcaattagtgtggctaaccaagagataactgtaaatgtgacattgatttgctcttactacagcttcagtgattgggggaggaaaagtcccaacccaatgggctcaaacttctaaggggtactcctctcatccccttatccttctccctcgacattttctccctctttcttcccatgaccccaaagccaagggcaacagatcagtaaagaacgtggtcagagtagaacccctgaagtattttttaatcctacctcaaaatttaacagttacctgagagatttaacattatctagttcattgaatcattgtatgtggtcatggataaattgcacaccttggaattcgctttctaaaggaaatcaaatgaatggaggaactttccaaacaccactttacttgtgttatatagccaatataactatctctactgaagcggaatacagcacattaagtcaagctaggtgctattggtcatctgctcctgttcacaccagagaaccaggctacaagagaaaaagcagaggccaagagtttgagggagaaatagtcggtgaagaaaccgtatccataaagacccgattccaccaaatgtgctttgagaaggataggccttcatcaacaaaatgtatgtctggttccccagtagagctatactgcctcaacccaaggggatattttaatgtctggggcagaaacactcaagttgattagaaagaccagccaatgtcagtgtatctgggtccttaacccacttggctagtgtgaattatagtacaatgatatttttttttgtggagataggtcagaacatagaggg

SEQ ID NO: 731905 - DNA, 3035 bp, Homo sapiens
  misc_feature (24)..(24): n is a, c, g, or t
  misc_feature (3004)..(3006): n is a, c, g, or t
  misc_feature (3018)..(3019): n is a, c, g, or t
  misc_feature (3025)..(3025): n is a, c, g, or t
aaacagtgtatcaacgcagagtgnccattacggccgggggagtttctggagggctgaacacgtggaggcaaacaggaaggtgaagaagaacttatcctatcaggacggaaggtcctgtgctcgggatcttccagacgtcgcgactctaaattgccccctctgaggtcaaggaacacaagatggttttggaaatgctgaacccgatacattataacatcaccagcatcgtgcctgaagccatgcctgctgccaccatgccagtcctgctcctcactggcctttttctcttggtgtggaattatgagggcacatcctcaataccaggtcctggctactgcatgggaattggacccctcatctcccacggcagattcctgtggatggggatcggcagtgcctgcaactactacaaccgggtatatggagaattcatgcgagtctggatctctggagaggaaacactcattatcagcaagtcctcaagtatgttccacataatgaagcacaatcattacagctctcgattcggcagcaaacttgggctgcagtgcatcggtatgcatgagaaaggcatcatatttaacaacaatccagagctctggaaaacaactcgacccttctttatgaaagctctgtcaggccccggccttgttcgtatggtcacagtctgtgctgaatccctcaaaacacatctggacaggttggaggaggtgaccaatgaatcgggctatgtggacgtgttgacccttctgcgtcgtgtcatgctggacacctctaacacgctcttcttgaggatccctttggacgaaagtgctatcgtggttaaaatccaaggttattttgatgcatggcaagctctcctcatcaaaccagacatcttctttaagatttcttggctatacaaaaagtatgagaagtctgtcaaggatttgaaagatgccatagaagttctgatagcagaaaaaagacgcaggatttccacagaagagaaactggaagaatgtatggactttgccactgagttgattttagcagagaaacgtggtgacctgacaagagagaatgtgaaccagtgcatattggaaatgctgatcgcagctcctgacaccatgtctgtctctttgttcttcatgctatttctcattgcaaagcaccctaatgttgaagaggcaataataaaggaaatccagactgttattggtgagagagacataaagattgatgatatacaaaaattaaaagtgatggaaaacttcatttatgagagcatgcggtaccagcctgtcgtggacttggtcatgcgcaaagccttagaagatgatgtaatcgatggctacccagtgaaaaaggggacaaacattatcctgaatattggaaggatgcacagactcgagtttttccccaaacccaatgaatttactcttgaaaattttgcaaagaatgttccttataggtactttcagccatttggctttgggccccgtggctgtgcaggaaagtacatcgccatggtgatgatgaaagccatcctcgttacacttctgagacgattccacgtgaagacattgcaaggacagtgtgttgagagcatacagaagatacacgacttgtccttgcacccagatgagactaaaaacatgctggaaatgatctttaccccaagaaactcagacaggtgtctggaacactagagaaggctggtcagtacctactctggagcatttctcatcagtagttcacatacaaatcatccatccttgccaatagtgtcatcctcacagtgaacactcagtggcccatggcattttataggcatacctcctatgggttgtcaccaagctaggtgctattggtcatctgctcctgttcacaccagagaaccaggctacaagagaaaaagcagaggccaagagtttgagggagaaatagtcggtgaagaaaccgtatccataaagacccgattccaccaaatgtgctttgagaaggataggccttcattaacaaaatgtatgtctggttccccagtagagctctactgcctcaacccaaggggatttttatgtctggggcagaaacactcaagttgattagaaagaccaggccaatgtcagggtacctggggccaaacccacctgctagtgtgaattaaagtactttaattttgttttctgtggaggtggaaaagcaacattcatagtctttggagaaatgcttagaaattcagcatttgacccttgctgtgaattaagcccaattaattcctgtttgtctacatatgatctgtctgtggcaaaagtttaatcagaggaaattctttcccagtctgtcgatttatgcctcagccacttgcctgtgctacaattcattgtgttacctgtagattcaggtaatacaaactatatataatcatcaagtaatacaaactaatttagtaatagcctgggttaagtattattagggccctgtgtctgctgtagaaaaaaaaattcacatgatgcacttcaaattcaaataaaaatccttttggcatgttcccatttttgcttagctcaattagtgtggctaaccaagagataactgtaaatgtgacattgatttgctcttactacagcttcagtgattgggggaggaaaagtcccaacccaatgggctcaaacttctatcttcccatgaccccaaagccaagggcaacagatcagtaaagaacgtggtcagagtagaacccctgaagtattttttaatcctacctcaaaatttaacagttacctgagagatttaacattatctagttcattgaatcattgtatgtggtcatggataaattgcacaccttggaattcgctttctaaaggaaatcaaatgaatggaggaactttccaaacaccactttacttgtgttatatagccaatataactatctctactgaatgtcattgaaaaactaaaaaattaaacttatttacaaataggtaaaaaaaaaaaaaaaaacaaacacaaaaaaacnnntggggggcgccnngggccncggaaaaacc

SEQ ID NO: 731906 - DNA, 3645 bp, Homo sapiens
  misc_feature (24)..(24): n is a, c, g, or t
aaacagtgtatcaacgcagagtgnccattacggccgggggagtttctggagggctgaacacgtggaggcaaacaggaaggtgaagaagaacttatcctatcaggacggaaggtcctgtgctcgggatcttccagacgtcgcgactctaaattgccccctctgaggtcaaggaacacaagatggttttggaaatgctgaacccgatacattataacatcaccagcatcgtgcctgaagccatgcctgctgccaccatgccagtcctgctcctcactggcctttttctcttggtgtggaattatgagggcacatcctcaataccaggtcctggctactgcatgggaattggacccctcatctcccacggcagattcctgtggatggggatcggcagtgcctgcaactactacaaccgggtatatggagaattcatgcgagtctggatctctggagaggaaacactcattatcagcaagtcctcaagtatgttccacataatgaagcacaatcattacagctctcgattcggcagcaaacttgggctgcagtgcatcggtatgcatgagaaaggcatcatatttaacaacaatccagagctctggaaaacaactcgacccttctttatgaaagctctgtcaggccccggccttgttcgtatggtcacagtctgtgctgaatccctcaaaacacatctggacaggttggaggaggtgaccaatgaatcgggctatgtggacgtgttgacccttctgcgtcgtgtcatgctggacacctctaacacgctcttcttgaggatccctttggacgaaagtgctatcgtggttaaaatccaaggttattttgatgcatggcaagctctcctcatcaaaccagacatcttctttaagatttcttggctatacaaaaagtatgagaagtctgtcaaggatttgaaagatgccatagaagttctgatagcagaaaaaagacgcaggatttccacagaagagaaactggaagaatgtatggactttgccactgagttgattttagcagagaaacgtggtgacctgacaagagagaatgtgaaccagtgcatattggaaatgctgatcgcagctcctgacaccatgtctgtctctttgttcttcatgctatttctcattgcaaagcaccctaatgttgaagaggcaataataaaggaaatccagactgttattggtgagagagacataaagattgatgatatacaaaaattaaaagtgatggaaaacttcatttatgagagcatgcggtaccagcctgtcgtggacttggtcatgcgcaaagccttagaagatgatgtaatcgatggctacccagtgaaaaaggggacaaacattatcctgaatattggaaggatgcacagactcgagtttttccccaaacccaatgaatttactcttgaaaattttgcaaagaatgttccttataggtactttcagccatttggctttgggccccgtggctgtgcaggaaagtacatcgccatggtgatgatgaaagccatcctcgttacacttctgagacgattccacgtgaagacattgcaaggacagtgtgttgagagcatacagaagatacacgacttgtccttgcacccagatgagactaaaaacatgctggaaatgatctttaccccaagaaactcagacaggtgtctggaacactagagaaggctggtcagtacctactctggagcatttctcatcagtagttcacatacaaatcatccatccttgccaatagtgtcatcctcacagtgaacactcagtggcccatggcattttataggcatacctcctatgggttgtcaccaagctaggtgctattggtcatctgctcctgttcacaccagagaaccaggctacaagagaaaaagcagaggccaagagtttgagggagaaatagtcggtgaagaaaccgtatccataaagacccgattccaccaaatgtgctttgagaaggataggccttcattaacaaaatgtatgtctggttccccagtagagctctactgcctcaacccaaggggatttttatgtctggggcagaaacactcaagttgattagaaagaccaggccaatgtcagggtacctggggccaaacccacctgctagtgtgaattaaagtactttaattttgttttctgtggaggtggaaaagcaacattcatagtctttggagaaatgcttagaaattcagcatttgacccttgctgtgaattaagcccaattaattcctgtttgtctacatatgatctgtctgtggcaaaagtttaatcagaggaaattctttcccagtctgtcgatttatgcctcagccacttgcctgtgctacaattcattgtgttacctgtagattcaggtaatacaaactatatataatcatcaagtaatacaaactaatttagtaatagcctgggttaagtattattagggccctgtgtctgctgtagaaaaaaaaattcacatgatgcacttcaaattcaaataaaaatccttttggcatgttcccatttttgcttagctcaattagtgtggctaaccaagagataactgtaaatgtgacattgatttgctcttactacagcttcagtgattgggggaggaaaagtcccaacccaatgggctcaaacttctatcttcccatgaccccaaagccaagggcaacagatcagtaaagaacgtggtcagagtagaacccctgaagtattttttaatcctacctcaaaatttaacagttacctgagagatttaacattatctagttcattgaatcattgtatgtggtcatggataaattgcacaccttggaattcgctttctaaaggaaatcaaatgaatggaggaactttccaaacaccactttacttgtgttatatagccaatataactatctctactgaatgtcattgaaaaactaaaaaattaaacttatttacaaataggtaaatatttgtcattgaatccattgccatcccatttgactgttcttttcatcctactgtctagtaataagctgagtataagatgacagtgtaatctccctgaaagcaggagctactttctttcttttgtaatctatttccatccccatttccctgtcctgtctccctgtattcactcccaagctcagttctgaatagacattcctgctcagagatactcccaactgatgcagaaaccaaataaagaggtaggtattccaagaattcaagaatggacattagtaaagaataaaacatttatttgagcttggaattatttggatcatctatatggcctaaaaatatatggactatgcctgtgtacctgaatacgtatgtagtcaggtcaagacaatcatccaaataacttagacccctaaaagcaaggccaggatttgcaatttaatgtgtcccaattaattcacttgaaaattagtaacactctgtttacgttgcctctggctggagctgcatggtggaagaagcccaactttggatccatgtacttcacccatccaatactcttgggacatttatgtgtattttatctgtatatatgaagccaatgtctatgtctacacagtcaaagtgaaatgcatgtttgatatagctgtacatagatatctattttgcaggt

SEQ ID NO: 731907 - DNA, 3097 bp, Homo sapiens
  misc_feature (24)..(24): n is a, c, g, or t
  misc_feature (3059)..(3059): n is a, c, g, or t
  misc_feature (3094)..(3094): n is a, c, g, or t
aaacagtgtatcaacgcagagtgnccattacggccgggggagtttctggagggctgaacacgtggaggcaaacaggaaggtgaagaagaacttatcctatcaggacggaaggtcctgtgctcgggatcttccagacgtcgcgactctaaattgccccctctgaggtcaaggaacacaagatggttttggaaatgctgaacccgatacattataacatcaccagcatcgtgcctgaagccatgcctgctgccaccatgccagtcctgctcctcactggcctttttctcttggtgtggaattatgagggcacatcctcaataccaggtcctggctactgcatgggaattggacccctcatctcccacggcagattcctgtggatggggatcggcagtgcctgcaactactacaaccgggtatatggagaattcatgcgagtctggatctctggagaggaaacactcattatcagcaagtcctcaagtatgttccacataatgaagcacaatcattacagctctcgattcggcagcaaacttgggctgcagtgcatcggtatgcatgagaaaggcatcatatttaacaacaatccagagctctggaaaacaactcgacccttctttatgaaagctctgtcaggccccggccttgttcgtatggtcacagtctgtgctgaatccctcaaaacacatctggacaggttggaggaggtgaccaatgaatcgggctatgtggacgtgttgacccttctgcgtcgtgtcatgctggacacctctaacacgctcttcttgaggatccctttggacgaaagtgctatcgtggttaaaatccaaggttattttgatgcatggcaagctctcctcatcaaaccagacatcttctttaagatttcttggctatacaaaaagtatgagaagtctgtcaaggatttgaaagatgccatagaagttctgatagcagaaaaaagacgcaggatttccacagaagagaaactggaagaatgtatggactttgccactgagttgattttagcagagaaacgtggtgacctgacaagagagaatgtgaaccagtgcatattggaaatgctgatcgcagctcctgacaccatgtctgtctctttgttcttcatgctatttctcattgcaaagcaccctaatgttgaagaggcaataataaaggaaatccagactgttattggtgagagagacataaagattgatgatatacaaaaattaaaagtgatggaaaacttcatttatgagagcatgcggtaccagcctgtcgtggacttggtcatgcgcaaagccttagaagatgatgtaatcgatggctacccagtgaaaaaggggacaaacattatcctgaatattggaaggatgcacagactcgagtttttccccaaacccaatgaatttactcttgaaaattttgcaaagaatgttccttataggtactttcagccatttggctttgggccccgtggctgtgcaggaaagtacatcgccatggtgatgatgaaagccatcctcgttacacttctgagacgattccacgtgaagacattgcaaggacagtgtgttgagagcatacagaagatacacgacttgtccttgcacccagatgagactaaaaacatgctggaaatgatctttaccccaagaaactcagacaggtgtctggaacactagagaaggctggtcagtacctactctggagcatttctcatcagtagttcacatacaaatcatccatccttgccaatagtgtcatcctcacagtgaacactcagtggcccatggcattttataggcatacctcctatgggttgtcaccaagctaggtgctattggtcatctgctcctgttcacaccagagaaccaggctacaagagaaaaagcagaggccaagagtttgagggagaaatagtcggtgaagaaaccgtatccataaagacccgattccaccaaatgtgctttgagaaggataggccttcattaacaaaatgtatgtctggttccccagtagagctctactgcctcaacccaaggggatttttatgtctggggcagaaacactcaagttgattagaaagaccaggccaatgtcagggtacctggggccaaacccacctgctagtgtgaattaaagtactttaattttgttttctgtggaggtggaaaagcaacattcatagtctttggagaaatgcttagaaattcagcatttgacccttgctgtgaattaagcccaattaattcctgtttgtctacatatgatctgtctgtggcaaaagtttaatcagaggaaattctttcccagtctgtcgatttatgcctcagccacttgcctgtgctacaattcattgtgttacctgtagattcaggtaatacaaactatatataatcatcaagtaatacaaactaatttagtaatagcctgggttaagtattattagggccctgtgtctgctgtagaaaaaaaaattcacatgatgcacttcaaattcaaataaaaatccttttggcatgttcccatttttgcttagctcaattagtgtggctaaccaagagataactgtaaatgtgacattgatttgctcttactacagcttcagtgattgggggaggaaaagtcccaacccaatgggctcaaacttctatcttcccatgaccccaaagccaagggcaacagatcagtaaagaacgtggtcagagtagaacccctgaagtattttttaatcctacctcaaaatttaacagttacctgagagatttaacattatctagttcattgaatcattgtatgtggtcatggataaattgcacaccttggaattcgctttctaaaggaaatcaaatgaatggaggaactttccaaacaccactttacttgtgttatatagccaatataactatctctactgaatgtcattgaaaaactaaaaaattaaacttatttacaaataaaaaaaaaaaaaaaaaaaaaaaaaaaaaaaaaaaaaaaaaaaataaaaaaaaaaaaaaaaaaaaaaaaaaaaaaaaaaaaaaaaaaaaaanaaaaaaaaaaaaaaaaaaaaaaaaaaaaaaaaaanaag

SEQ ID NO: 731908 - DNA, 2968 bp, Homo sapiens
  misc_feature (24)..(24): n is a, c, g, or t
aaacagtgtatcaacgcagagtgnccattacggccgggggagtttctggagggctgaacacgtggaggcaaacaggaaggtgaagaagaacttatcctatcaggacggaaggtcctgtgctcgggatcttccagacgtcgcgactctaaattgccccctctgaggtcaaggaacacaagatggttttggaaatgctgaacccgatacattataacatcaccagcatcgtgcctgaagccatgcctgctgccaccatgccagtcctgctcctcactggcctttttctcttggtgtggaattatgagggcacatcctcaataccaggtcctggctactgcatgggaattggacccctcatctcccacggcagattcctgtggatggggatcggcagtgcctgcaactactacaaccgggtatatggagaattcatgcgagtctggatctctggagaggaaacactcattatcagcaagtcctcaagtatgttccacataatgaagcacaatcattacagctctcgattcggcagcaaacttgggctgcagtgcatcggtatgcatgagaaaggcatcatatttaacaacaatccagagctctggaaaacaactcgacccttctttatgaaagctctgtcaggccccggccttgttcgtatggtcacagtctgtgctgaatccctcaaaacacatctggacaggttggaggaggtgaccaatgaatcgggctatgtggacgtgttgacccttctgcgtcgtgtcatgctggacacctctaacacgctcttcttgaggatccctttggacgaaagtgctatcgtggttaaaatccaaggttattttgatgcatggcaagctctcctcatcaaaccagacatcttctttaagatttcttggctatacaaaaagtatgagaagtctgtcaaggatttgaaagatgccatagaagttctgatagcagaaaaaagacgcaggatttccacagaagagaaactggaagaatgtatggactttgccactgagttgattttagcagagaaacgtggtgacctgacaagagagaatgtgaaccagtgcatattggaaatgctgatcgcagctcctgacaccatgtctgtctctttgttcttcatgctatttctcattgcaaagcaccctaatgttgaagaggcaataataaaggaaatccagactgttattggtgagagagacataaagattgatgatatacaaaaattaaaagtgatggaaaacttcatttatgagagcatgcggtaccagcctgtcgtggacttggtcatgcgcaaagccttagaagatgatgtaatcgatggctacccagtgaaaaaggggacaaacattatcctgaatattggaaggatgcacagactcgagtttttccccaaacccaatgaatttactcttgaaaattttgcaaagaatgttccttataggtactttcagccatttggctttgggccccgtggctgtgcaggaaagtacatcgccatggtgatgatgaaagccatcctcgttacacttctgagacgattccacgtgaagacattgcaaggacagtgtgttgagagcatacagaagatacacgacttgtccttgcacccagatgagactaaaaacatgctggaaatgatctttaccccaagaaactcagacaggtgtctggaacactagagaaggctggtcagtacctactctggagcatttctcatcagtagttcacatacaaatcatccatccttgccaatagtgtcatcctcacagtgaacactcagtggcccatggcattttataggcatacctcctatgggttgtcaccaagctaggtgctattggtcatctgctcctgttcacaccagagaaccaggctacaagagaaaaagcagaggccaagagtttgagggagaaatagtcggtgaagaaaccgtatccataaagacccgattccaccaaatgtgctttgagaaggataggccttcattaacaaaatgtatgtctggttccccagtagagctctactgcctcaacccaaggggatttttatgtctggggcagaaacactcaagttgattagaaagaccaggccaatgtcagggtacctggggccaaacccacctgctagtgtgaattaaagtactttaattttgttttctgtggaggtggaaaagcaacattcatagtctttggagaaatgcttagaaattcagcatttgacccttgctgtgaattaagcccaattaattcctgtttgtctacatatgatctgtctgtggcaaaagtttaatcagaggaaattctttcccagtctgtcgatttatgcctcagccacttgcctgtgctacaattcattgtgttacctgtagattcaggtaatacaaactatatataatcatcaagtaatacaaactaatttagtaatagcctgggttaagtattattagggccctgtgtctgctgtagaaaaaaaaattcacatgatgcacttcaaattcaaataaaaatccttttggcatgttcccatttttgcttagctcaattagtgtggctaaccaagagataactgtaaatgtgacattgatttgctcttactacagcttcagtgattgggggaggaaaagtcccaacccaatgggctcaaacttctatcttcccatgaccccaaagccaagggcaacagatcagtaaagaacgtggtcagagtagaacccctgaagtattttttaatcctacctcaaaatttaacagttacctgagagatttaacattatctagttcattgaatcattgtatgtggtcatggataaattgcacaccttggaattcgctttctaaaggaaatcaaatgaatggaggaactttccaaacaccactttacttgtgttatatagccaatataactatctctactgaatgtcattgaaaaactaaaaaattaaacttatttacaaata

SEQ ID NO: 731909 - DNA, 2928 bp, Homo sapiens
  misc_feature (24)..(24): n is a, c, g, or t
aaacagtgtatcaacgcagagtgnccattacggccgggggagtttctggagggctgaacacgtggaggcaaacaggaaggtgaagaagaacttatcctatcaggacggaaggtcctgtgctcgggatcttccagacgtcgcgactctaaattgccccctctgaggtcaaggaacacaagatggttttggaaatgctgaacccgatacattataacatcaccagcatcgtgcctgaagccatgcctgctgccaccatgccagtcctgctcctcactggcctttttctcttggtgtggaattatgagggcacatcctcaataccaggtcctggctactgcatgggaattggacccctcatctcccacggcagattcctgtggatggggatcggcagtgcctgcaactactacaaccgggtatatggagaattcatgcgagtctggatctctggagaggaaacactcattatcagcaagtcctcaagtatgttccacataatgaagcacaatcattacagctctcgattcggcagcaaacttgggctgcagtgcatcggtatgcatgagaaaggcatcatatttaacaacaatccagagctctggaaaacaactcgacccttctttatgaaagctctgtcaggccccggccttgttcgtatggtcacagtctgtgctgaatccctcaaaacacatctggacaggttggaggaggtgaccaatgaatcgggctatgtggacgtgttgacccttctgcgtcgtgtcatgctggacacctctaacacgctcttcttgaggatccctttggacgaaagtgctatcgtggttaaaatccaaggttattttgatgcatggcaagctctcctcatcaaaccagacatcttctttaagatttcttggctatacaaaaagtatgagaagtctgtcaaggatttgaaagatgccatagaagttctgatagcagaaaaaagacgcaggatttccacagaagagaaactggaagaatgtatggactttgccactgagttgattttagcagagaaacgtggtgacctgacaagagagaatgtgaaccagtgcatattggaaatgctgatcgcagctcctgacaccatgtctgtctctttgttcttcatgctatttctcattgcaaagcaccctaatgttgaagaggcaataataaaggaaatccagactgttattggtgagagagacataaagattgatgatatacaaaaattaaaagtgatggaaaacttcatttatgagagcatgcggtaccagcctgtcgtggacttggtcatgcgcaaagccttagaagatgatgtaatcgatggctacccagtgaaaaaggggacaaacattatcctgaatattggaaggatgcacagactcgagtttttccccaaacccaatgaatttactcttgaaaattttgcaaagaatgttccttataggtactttcagccatttggctttgggccccgtggctgtgcaggaaagtacatcgccatggtgatgatgaaagccatcctcgttacacttctgagacgattccacgtgaagacattgcaaggacagtgtgttgagagcatacagaagatacacgacttgtccttgcacccagatgagactaaaaacatgctggaaatgatctttaccccaagaaactcagacaggtgtctggaacactagagaaggctggtcagtacctactctggagcatttctcatcagtagttcacatacaaatcatccatccttgccaatagtgtcatcctcacagtgaacactcagtggcccatggcattttataggcatacctcctatgggttgtcaccaagctaggtgctattggtcatctgctcctgttcacaccagagaaccaggctacaagagaaaaagcagaggccaagagtttgagggagaaatagtcggtgaagaaaccgtatccataaagacccgattccaccaaatgtgctttgagaaggataggccttcattaacaaaatgtatgtctggttccccagtagagctctactgcctcaacccaaggggatttttatgtctggggcagaaacactcaagttgattagaaagaccaggccaatgtcagggtacctggggccaaacccacctgctagtgtgaattaaagtactttaattttgttttctgtggaggtggaaaagcaacattcatagtctttggagaaatgcttagaaattcagcatttgacccttgctgtgaattaagcccaattaattcctgtttgtctacatatgatctgtctgtggcaaaagtttaatcagaggaaattctttcccagtctgtcgatttatgcctcagccacttgcctgtgctacaattcattgtgttacctgtagattcaggtaatacaaactatatataatcatcaagtaatacaaactaatttagtaatagcctgggttaagtattattagggccctgtgtctgctgtagaaaaaaaaattcacatgatgcacttcaaattcaaataaaaatccttttggcatgttcccatttttgcttagctcaattagtgtggctaaccaagagataactgtaaatgtgacattgatttgctcttactacagcttcagtgattgggggaggaaaagtcccaacccaatgggctcaaacttctatcttcccatgaccccaaagccaagggcaacagatcagtaaagaacgtggtcagagtagaacccctgaagtattttttaatcctacctcaaaatttaacagttacctgagagatttaacattatctagttcattgaatcattgtatgtggtcatggataaattgcacaccttggaattcgctttctaaaggaaatcaaatgaatggaggaactttccaaacaccactttacttgtgttatatagccaatataactatctctactgaa

SEQ ID NO: 731910 - DNA, 2929 bp, Homo sapiens
  misc_feature (24)..(24): n is a, c, g, or t
aaacagtgtatcaacgcagagtgnccattacggccgggggagtttctggagggctgaacacgtggaggcaaacaggaaggtgaagaagaacttatcctatcaggacggaaggtcctgtgctcgggatcttccagacgtcgcgactctaaattgccccctctgaggtcaaggaacacaagatggttttggaaatgctgaacccgatacattataacatcaccagcatcgtgcctgaagccatgcctgctgccaccatgccagtcctgctcctcactggcctttttctcttggtgtggaattatgagggcacatcctcaataccaggtcctggctactgcatgggaattggacccctcatctcccacggcagattcctgtggatggggatcggcagtgcctgcaactactacaaccgggtatatggagaattcatgcgagtctggatctctggagaggaaacactcattatcagcaagtcctcaagtatgttccacataatgaagcacaatcattacagctctcgattcggcagcaaacttgggctgcagtgcatcggtatgcatgagaaaggcatcatatttaacaacaatccagagctctggaaaacaactcgacccttctttatgaaagctctgtcaggccccggccttgttcgtatggtcacagtctgtgctgaatccctcaaaacacatctggacaggttggaggaggtgaccaatgaatcgggctatgtggacgtgttgacccttctgcgtcgtgtcatgctggacacctctaacacgctcttcttgaggatccctttggacgaaagtgctatcgtggttaaaatccaaggttattttgatgcatggcaagctctcctcatcaaaccagacatcttctttaagatttcttggctatacaaaaagtatgagaagtctgtcaaggatttgaaagatgccatagaagttctgatagcagaaaaaagacgcaggatttccacagaagagaaactggaagaatgtatggactttgccactgagttgattttagcagagaaacgtggtgacctgacaagagagaatgtgaaccagtgcatattggaaatgctgatcgcagctcctgacaccatgtctgtctctttgttcttcatgctatttctcattgcaaagcaccctaatgttgaagaggcaataataaaggaaatccagactgttattggtgagagagacataaagattgatgatatacaaaaattaaaagtgatggaaaacttcatttatgagagcatgcggtaccagcctgtcgtggacttggtcatgcgcaaagccttagaagatgatgtaatcgatggctacccagtgaaaaaggggacaaacattatcctgaatattggaaggatgcacagactcgagtttttccccaaacccaatgaatttactcttgaaaattttgcaaagaatgttccttataggtactttcagccatttggctttgggccccgtggctgtgcaggaaagtacatcgccatggtgatgatgaaagccatcctcgttacacttctgagacgattccacgtgaagacattgcaaggacagtgtgttgagagcatacagaagatacacgacttgtccttgcacccagatgagactaaaaacatgctggaaatgatctttaccccaagaaactcagacaggtgtctggaacactagagaaggctggtcagtacctactctggagcatttctcatcagtagttcacatacaaatcatccatccttgccaatagtgtcatcctcacagtgaacactcagtggcccatggcattttataggcatacctcctatgggttgtcaccaagctaggtgctattggtcatctgctcctgttcacaccagagaaccaggctacaagagaaaaagcagaggccaagagtttgagggagaaatagtcggtgaagaaaccgtatccataaagacccgattccaccaaatgtgctttgagaaggataggccttcattaacaaaatgtatgtctggttccccagtagagctctactgcctcaacccaaggggatttttatgtctggggcagaaacactcaagttgattagaaagaccaggccaatgtcagggtacctggggccaaacccacctgctagtgtgaattaaagtactttaattttgttttctgtggaggtggaaaagcaacattcatagtctttggagaaatgcttagaaattcagcatttgacccttgctgtgaattaagcccaattaattcctgtttgtctacatatgatctgtctgtggcaaaagtttaatcagaggaaattctttcccagtctgtcgatttatgcctcagccacttgcctgtgctacaattcattgtgttacctgtagattcaggtaatacaaactatatataatcatcaagtaatacaaactaatttagtaatagcctgggttaagtattattagggccctgtgtctgctgtagaaaaaaaaattcacatgatgcacttcaaattcaaataaaaatccttttggcatgttcccatttttgcttagctcaattagtgtggctaaccaagagataactgtaaatgtgacattgatttgctcttactacaaggggtactcctctcatccccttatccttctccctcgacattttctccctctttcttcccatgaccccaaagccaagggcaacagatcagtaaagaacgtggtcagagtagaacccctgaagtattttttaatcctacctcaaaatttaacagttacctgagagatttaacattatctagttcattgaatcattgtatgtggtcatggataaattgcacaccttggaattcgctttctaaaggaaatcaaatgaatggaggaactttccaaacaccactttacttgtgttatatagccaatataactatctctactgaa

SEQ ID NO: 731911 - DNA, 3036 bp, Homo sapiens
  misc_feature (24)..(24): n is a, c, g, or t
  misc_feature (3005)..(3007): n is a, c, g, or t
  misc_feature (3019)..(3020): n is a, c, g, or t
  misc_feature (3026)..(3026): n is a, c, g, or t
aaacagtgtatcaacgcagagtgnccattacggccgggggagtttctggagggctgaacacgtggaggcaaacaggaaggtgaagaagaacttatcctatcaggacggaaggtcctgtgctcgggatcttccagacgtcgcgactctaaattgccccctctgaggtcaaggaacacaagatggttttggaaatgctgaacccgatacattataacatcaccagcatcgtgcctgaagccatgcctgctgccaccatgccagtcctgctcctcactggcctttttctcttggtgtggaattatgagggcacatcctcaataccaggtcctggctactgcatgggaattggacccctcatctcccacggcagattcctgtggatggggatcggcagtgcctgcaactactacaaccgggtatatggagaattcatgcgagtctggatctctggagaggaaacactcattatcagcaagtcctcaagtatgttccacataatgaagcacaatcattacagctctcgattcggcagcaaacttgggctgcagtgcatcggtatgcatgagaaaggcatcatatttaacaacaatccagagctctggaaaacaactcgacccttctttatgaaagctctgtcaggccccggccttgttcgtatggtcacagtctgtgctgaatccctcaaaacacatctggacaggttggaggaggtgaccaatgaatcgggctatgtggacgtgttgacccttctgcgtcgtgtcatgctggacacctctaacacgctcttcttgaggatccctttggacgaaagtgctatcgtggttaaaatccaaggttattttgatgcatggcaagctctcctcatcaaaccagacatcttctttaagatttcttggctatacaaaaagtatgagaagtctgtcaaggatttgaaagatgccatagaagttctgatagcagaaaaaagacgcaggatttccacagaagagaaactggaagaatgtatggactttgccactgagttgattttagcagagaaacgtggtgacctgacaagagagaatgtgaaccagtgcatattggaaatgctgatcgcagctcctgacaccatgtctgtctctttgttcttcatgctatttctcattgcaaagcaccctaatgttgaagaggcaataataaaggaaatccagactgttattggtgagagagacataaagattgatgatatacaaaaattaaaagtgatggaaaacttcatttatgagagcatgcggtaccagcctgtcgtggacttggtcatgcgcaaagccttagaagatgatgtaatcgatggctacccagtgaaaaaggggacaaacattatcctgaatattggaaggatgcacagactcgagtttttccccaaacccaatgaatttactcttgaaaattttgcaaagaatgttccttataggtactttcagccatttggctttgggccccgtggctgtgcaggaaagtacatcgccatggtgatgatgaaagccatcctcgttacacttctgagacgattccacgtgaagacattgcaaggacagtgtgttgagagcatacagaagatacacgacttgtccttgcacccagatgagactaaaaacatgctggaaatgatctttaccccaagaaactcagacaggtgtctggaacactagagaaggctggtcagtacctactctggagcatttctcatcagtagttcacatacaaatcatccatccttgccaatagtgtcatcctcacagtgaacactcagtggcccatggcattttataggcatacctcctatgggttgtcaccaagctaggtgctattggtcatctgctcctgttcacaccagagaaccaggctacaagagaaaaagcagaggccaagagtttgagggagaaatagtcggtgaagaaaccgtatccataaagacccgattccaccaaatgtgctttgagaaggataggccttcattaacaaaatgtatgtctggttccccagtagagctctactgcctcaacccaaggggatttttatgtctggggcagaaacactcaagttgattagaaagaccaggccaatgtcagggtacctggggccaaacccacctgctagtgtgaattaaagtactttaattttgttttctgtggaggtggaaaagcaacattcatagtctttggagaaatgcttagaaattcagcatttgacccttgctgtgaattaagcccaattaattcctgtttgtctacatatgatctgtctgtggcaaaagtttaatcagaggaaattctttcccagtctgtcgatttatgcctcagccacttgcctgtgctacaattcattgtgttacctgtagattcaggtaatacaaactatatataatcatcaagtaatacaaactaatttagtaatagcctgggttaagtattattagggccctgtgtctgctgtagaaaaaaaaattcacatgatgcacttcaaattcaaataaaaatccttttggcatgttcccatttttgcttagctcaattagtgtggctaaccaagagataactgtaaatgtgacattgatttgctcttactacaaggggtactcctctcatccccttatccttctccctcgacattttctccctctttcttcccatgaccccaaagccaagggcaacagatcagtaaagaacgtggtcagagtagaacccctgaagtattttttaatcctacctcaaaatttaacagttacctgagagatttaacattatctagttcattgaatcattgtatgtggtcatggataaattgcacaccttggaattcgctttctaaaggaaatcaaatgaatggaggaactttccaaacaccactttacttgtgttatatagccaatataactatctctactgaatgtcattgaaaaactaaaaaattaaacttatttacaaataggtaaaaaaaaaaaaaaaaacaaacacaaaaaaacnnntggggggcgccnngggccncggaaaaacc

SEQ ID NO: 731912 - DNA, 2969 bp, Homo sapiens
  misc_feature (24)..(24): n is a, c, g, or t
aaacagtgtatcaacgcagagtgnccattacggccgggggagtttctggagggctgaacacgtggaggcaaacaggaaggtgaagaagaacttatcctatcaggacggaaggtcctgtgctcgggatcttccagacgtcgcgactctaaattgccccctctgaggtcaaggaacacaagatggttttggaaatgctgaacccgatacattataacatcaccagcatcgtgcctgaagccatgcctgctgccaccatgccagtcctgctcctcactggcctttttctcttggtgtggaattatgagggcacatcctcaataccaggtcctggctactgcatgggaattggacccctcatctcccacggcagattcctgtggatggggatcggcagtgcctgcaactactacaaccgggtatatggagaattcatgcgagtctggatctctggagaggaaacactcattatcagcaagtcctcaagtatgttccacataatgaagcacaatcattacagctctcgattcggcagcaaacttgggctgcagtgcatcggtatgcatgagaaaggcatcatatttaacaacaatccagagctctggaaaacaactcgacccttctttatgaaagctctgtcaggccccggccttgttcgtatggtcacagtctgtgctgaatccctcaaaacacatctggacaggttggaggaggtgaccaatgaatcgggctatgtggacgtgttgacccttctgcgtcgtgtcatgctggacacctctaacacgctcttcttgaggatccctttggacgaaagtgctatcgtggttaaaatccaaggttattttgatgcatggcaagctctcctcatcaaaccagacatcttctttaagatttcttggctatacaaaaagtatgagaagtctgtcaaggatttgaaagatgccatagaagttctgatagcagaaaaaagacgcaggatttccacagaagagaaactggaagaatgtatggactttgccactgagttgattttagcagagaaacgtggtgacctgacaagagagaatgtgaaccagtgcatattggaaatgctgatcgcagctcctgacaccatgtctgtctctttgttcttcatgctatttctcattgcaaagcaccctaatgttgaagaggcaataataaaggaaatccagactgttattggtgagagagacataaagattgatgatatacaaaaattaaaagtgatggaaaacttcatttatgagagcatgcggtaccagcctgtcgtggacttggtcatgcgcaaagccttagaagatgatgtaatcgatggctacccagtgaaaaaggggacaaacattatcctgaatattggaaggatgcacagactcgagtttttccccaaacccaatgaatttactcttgaaaattttgcaaagaatgttccttataggtactttcagccatttggctttgggccccgtggctgtgcaggaaagtacatcgccatggtgatgatgaaagccatcctcgttacacttctgagacgattccacgtgaagacattgcaaggacagtgtgttgagagcatacagaagatacacgacttgtccttgcacccagatgagactaaaaacatgctggaaatgatctttaccccaagaaactcagacaggtgtctggaacactagagaaggctggtcagtacctactctggagcatttctcatcagtagttcacatacaaatcatccatccttgccaatagtgtcatcctcacagtgaacactcagtggcccatggcattttataggcatacctcctatgggttgtcaccaagctaggtgctattggtcatctgctcctgttcacaccagagaaccaggctacaagagaaaaagcagaggccaagagtttgagggagaaatagtcggtgaagaaaccgtatccataaagacccgattccaccaaatgtgctttgagaaggataggccttcattaacaaaatgtatgtctggttccccagtagagctctactgcctcaacccaaggggatttttatgtctggggcagaaacactcaagttgattagaaagaccaggccaatgtcagggtacctggggccaaacccacctgctagtgtgaattaaagtactttaattttgttttctgtggaggtggaaaagcaacattcatagtctttggagaaatgcttagaaattcagcatttgacccttgctgtgaattaagcccaattaattcctgtttgtctacatatgatctgtctgtggcaaaagtttaatcagaggaaattctttcccagtctgtcgatttatgcctcagccacttgcctgtgctacaattcattgtgttacctgtagattcaggtaatacaaactatatataatcatcaagtaatacaaactaatttagtaatagcctgggttaagtattattagggccctgtgtctgctgtagaaaaaaaaattcacatgatgcacttcaaattcaaataaaaatccttttggcatgttcccatttttgcttagctcaattagtgtggctaaccaagagataactgtaaatgtgacattgatttgctcttactacaaggggtactcctctcatccccttatccttctccctcgacattttctccctctttcttcccatgaccccaaagccaagggcaacagatcagtaaagaacgtggtcagagtagaacccctgaagtattttttaatcctacctcaaaatttaacagttacctgagagatttaacattatctagttcattgaatcattgtatgtggtcatggataaattgcacaccttggaattcgctttctaaaggaaatcaaatgaatggaggaactttccaaacaccactttacttgtgttatatagccaatataactatctctactgaatgtcattgaaaaactaaaaaattaaacttatttacaaata

SEQ ID NO: 731913 - DNA, 3646 bp, Homo sapiens
  misc_feature (24)..(24): n is a, c, g, or t
aaacagtgtatcaacgcagagtgnccattacggccgggggagtttctggagggctgaacacgtggaggcaaacaggaaggtgaagaagaacttatcctatcaggacggaaggtcctgtgctcgggatcttccagacgtcgcgactctaaattgccccctctgaggtcaaggaacacaagatggttttggaaatgctgaacccgatacattataacatcaccagcatcgtgcctgaagccatgcctgctgccaccatgccagtcctgctcctcactggcctttttctcttggtgtggaattatgagggcacatcctcaataccaggtcctggctactgcatgggaattggacccctcatctcccacggcagattcctgtggatggggatcggcagtgcctgcaactactacaaccgggtatatggagaattcatgcgagtctggatctctggagaggaaacactcattatcagcaagtcctcaagtatgttccacataatgaagcacaatcattacagctctcgattcggcagcaaacttgggctgcagtgcatcggtatgcatgagaaaggcatcatatttaacaacaatccagagctctggaaaacaactcgacccttctttatgaaagctctgtcaggccccggccttgttcgtatggtcacagtctgtgctgaatccctcaaaacacatctggacaggttggaggaggtgaccaatgaatcgggctatgtggacgtgttgacccttctgcgtcgtgtcatgctggacacctctaacacgctcttcttgaggatccctttggacgaaagtgctatcgtggttaaaatccaaggttattttgatgcatggcaagctctcctcatcaaaccagacatcttctttaagatttcttggctatacaaaaagtatgagaagtctgtcaaggatttgaaagatgccatagaagttctgatagcagaaaaaagacgcaggatttccacagaagagaaactggaagaatgtatggactttgccactgagttgattttagcagagaaacgtggtgacctgacaagagagaatgtgaaccagtgcatattggaaatgctgatcgcagctcctgacaccatgtctgtctctttgttcttcatgctatttctcattgcaaagcaccctaatgttgaagaggcaataataaaggaaatccagactgttattggtgagagagacataaagattgatgatatacaaaaattaaaagtgatggaaaacttcatttatgagagcatgcggtaccagcctgtcgtggacttggtcatgcgcaaagccttagaagatgatgtaatcgatggctacccagtgaaaaaggggacaaacattatcctgaatattggaaggatgcacagactcgagtttttccccaaacccaatgaatttactcttgaaaattttgcaaagaatgttccttataggtactttcagccatttggctttgggccccgtggctgtgcaggaaagtacatcgccatggtgatgatgaaagccatcctcgttacacttctgagacgattccacgtgaagacattgcaaggacagtgtgttgagagcatacagaagatacacgacttgtccttgcacccagatgagactaaaaacatgctggaaatgatctttaccccaagaaactcagacaggtgtctggaacactagagaaggctggtcagtacctactctggagcatttctcatcagtagttcacatacaaatcatccatccttgccaatagtgtcatcctcacagtgaacactcagtggcccatggcattttataggcatacctcctatgggttgtcaccaagctaggtgctattggtcatctgctcctgttcacaccagagaaccaggctacaagagaaaaagcagaggccaagagtttgagggagaaatagtcggtgaagaaaccgtatccataaagacccgattccaccaaatgtgctttgagaaggataggccttcattaacaaaatgtatgtctggttccccagtagagctctactgcctcaacccaaggggatttttatgtctggggcagaaacactcaagttgattagaaagaccaggccaatgtcagggtacctggggccaaacccacctgctagtgtgaattaaagtactttaattttgttttctgtggaggtggaaaagcaacattcatagtctttggagaaatgcttagaaattcagcatttgacccttgctgtgaattaagcccaattaattcctgtttgtctacatatgatctgtctgtggcaaaagtttaatcagaggaaattctttcccagtctgtcgatttatgcctcagccacttgcctgtgctacaattcattgtgttacctgtagattcaggtaatacaaactatatataatcatcaagtaatacaaactaatttagtaatagcctgggttaagtattattagggccctgtgtctgctgtagaaaaaaaaattcacatgatgcacttcaaattcaaataaaaatccttttggcatgttcccatttttgcttagctcaattagtgtggctaaccaagagataactgtaaatgtgacattgatttgctcttactacaaggggtactcctctcatccccttatccttctccctcgacattttctccctctttcttcccatgaccccaaagccaagggcaacagatcagtaaagaacgtggtcagagtagaacccctgaagtattttttaatcctacctcaaaatttaacagttacctgagagatttaacattatctagttcattgaatcattgtatgtggtcatggataaattgcacaccttggaattcgctttctaaaggaaatcaaatgaatggaggaactttccaaacaccactttacttgtgttatatagccaatataactatctctactgaatgtcattgaaaaactaaaaaattaaacttatttacaaataggtaaatatttgtcattgaatccattgccatcccatttgactgttcttttcatcctactgtctagtaataagctgagtataagatgacagtgtaatctccctgaaagcaggagctactttctttcttttgtaatctatttccatccccatttccctgtcctgtctccctgtattcactcccaagctcagttctgaatagacattcctgctcagagatactcccaactgatgcagaaaccaaataaagaggtaggtattccaagaattcaagaatggacattagtaaagaataaaacatttatttgagcttggaattatttggatcatctatatggcctaaaaatatatggactatgcctgtgtacctgaatacgtatgtagtcaggtcaagacaatcatccaaataacttagacccctaaaagcaaggccaggatttgcaatttaatgtgtcccaattaattcacttgaaaattagtaacactctgtttacgttgcctctggctggagctgcatggtggaagaagcccaactttggatccatgtacttcacccatccaatactcttgggacatttatgtgtattttatctgtatatatgaagccaatgtctatgtctacacagtcaaagtgaaatgcatgtttgatatagctgtacatagatatctattttgcaggt

SEQ ID NO: 731914 - DNA, 3098 bp, Homo sapiens
  misc_feature (24)..(24): n is a, c, g, or t
  misc_feature (3060)..(3060): n is a, c, g, or t
  misc_feature (3095)..(3095): n is a, c, g, or t
aaacagtgtatcaacgcagagtgnccattacggccgggggagtttctggagggctgaacacgtggaggcaaacaggaaggtgaagaagaacttatcctatcaggacggaaggtcctgtgctcgggatcttccagacgtcgcgactctaaattgccccctctgaggtcaaggaacacaagatggttttggaaatgctgaacccgatacattataacatcaccagcatcgtgcctgaagccatgcctgctgccaccatgccagtcctgctcctcactggcctttttctcttggtgtggaattatgagggcacatcctcaataccaggtcctggctactgcatgggaattggacccctcatctcccacggcagattcctgtggatggggatcggcagtgcctgcaactactacaaccgggtatatggagaattcatgcgagtctggatctctggagaggaaacactcattatcagcaagtcctcaagtatgttccacataatgaagcacaatcattacagctctcgattcggcagcaaacttgggctgcagtgcatcggtatgcatgagaaaggcatcatatttaacaacaatccagagctctggaaaacaactcgacccttctttatgaaagctctgtcaggccccggccttgttcgtatggtcacagtctgtgctgaatccctcaaaacacatctggacaggttggaggaggtgaccaatgaatcgggctatgtggacgtgttgacccttctgcgtcgtgtcatgctggacacctctaacacgctcttcttgaggatccctttggacgaaagtgctatcgtggttaaaatccaaggttattttgatgcatggcaagctctcctcatcaaaccagacatcttctttaagatttcttggctatacaaaaagtatgagaagtctgtcaaggatttgaaagatgccatagaagttctgatagcagaaaaaagacgcaggatttccacagaagagaaactggaagaatgtatggactttgccactgagttgattttagcagagaaacgtggtgacctgacaagagagaatgtgaaccagtgcatattggaaatgctgatcgcagctcctgacaccatgtctgtctctttgttcttcatgctatttctcattgcaaagcaccctaatgttgaagaggcaataataaaggaaatccagactgttattggtgagagagacataaagattgatgatatacaaaaattaaaagtgatggaaaacttcatttatgagagcatgcggtaccagcctgtcgtggacttggtcatgcgcaaagccttagaagatgatgtaatcgatggctacccagtgaaaaaggggacaaacattatcctgaatattggaaggatgcacagactcgagtttttccccaaacccaatgaatttactcttgaaaattttgcaaagaatgttccttataggtactttcagccatttggctttgggccccgtggctgtgcaggaaagtacatcgccatggtgatgatgaaagccatcctcgttacacttctgagacgattccacgtgaagacattgcaaggacagtgtgttgagagcatacagaagatacacgacttgtccttgcacccagatgagactaaaaacatgctggaaatgatctttaccccaagaaactcagacaggtgtctggaacactagagaaggctggtcagtacctactctggagcatttctcatcagtagttcacatacaaatcatccatccttgccaatagtgtcatcctcacagtgaacactcagtggcccatggcattttataggcatacctcctatgggttgtcaccaagctaggtgctattggtcatctgctcctgttcacaccagagaaccaggctacaagagaaaaagcagaggccaagagtttgagggagaaatagtcggtgaagaaaccgtatccataaagacccgattccaccaaatgtgctttgagaaggataggccttcattaacaaaatgtatgtctggttccccagtagagctctactgcctcaacccaaggggatttttatgtctggggcagaaacactcaagttgattagaaagaccaggccaatgtcagggtacctggggccaaacccacctgctagtgtgaattaaagtactttaattttgttttctgtggaggtggaaaagcaacattcatagtctttggagaaatgcttagaaattcagcatttgacccttgctgtgaattaagcccaattaattcctgtttgtctacatatgatctgtctgtggcaaaagtttaatcagaggaaattctttcccagtctgtcgatttatgcctcagccacttgcctgtgctacaattcattgtgttacctgtagattcaggtaatacaaactatatataatcatcaagtaatacaaactaatttagtaatagcctgggttaagtattattagggccctgtgtctgctgtagaaaaaaaaattcacatgatgcacttcaaattcaaataaaaatccttttggcatgttcccatttttgcttagctcaattagtgtggctaaccaagagataactgtaaatgtgacattgatttgctcttactacaaggggtactcctctcatccccttatccttctccctcgacattttctccctctttcttcccatgaccccaaagccaagggcaacagatcagtaaagaacgtggtcagagtagaacccctgaagtattttttaatcctacctcaaaatttaacagttacctgagagatttaacattatctagttcattgaatcattgtatgtggtcatggataaattgcacaccttggaattcgctttctaaaggaaatcaaatgaatggaggaactttccaaacaccactttacttgtgttatatagccaatataactatctctactgaatgtcattgaaaaactaaaaaattaaacttatttacaaataaaaaaaaaaaaaaaaaaaaaaaaaaaaaaaaaaaaaaaaaaaataaaaaaaaaaaaaaaaaaaaaaaaaaaaaaaaaaaaaaaaaaaaaanaaaaaaaaaaaaaaaaaaaaaaaaaaaaaaaaaanaag

SEQ ID NO: 731915 - DNA, 2585 bp, Homo sapiens
  misc_feature (24)..(24): n is a, c, g, or t
aaacagtgtatcaacgcagagtgnccattacggccgggggagtttctggagggctgaacacgtggaggcaaacaggaaggtgaagaagaacttatcctatcaggacggaaggtcctgtgctcgggatcttccagacgtcgcgactctaaattgccccctctgaggtcaaggaacacaagatggttttggaaatgctgaacccgatacattataacatcaccagcatcgtgcctgaagccatgcctgctgccaccatgccagtcctgctcctcactggcctttttctcttggtgtggaattatgagggcacatcctcaataccaggtcctggctactgcatgggaattggacccctcatctcccacggcagattcctgtggatggggatcggcagtgcctgcaactactacaaccgggtatatggagaattcatgcgagtctggatctctggagaggaaacactcattatcagcaagtcctcaagtatgttccacataatgaagcacaatcattacagctctcgattcggcagcaaacttgggctgcagtgcatcggtatgcatgagaaaggcatcatatttaacaacaatccagagctctggaaaacaactcgacccttctttatgaaagctctgtcaggccccggccttgttcgtatggtcacagtctgtgctgaatccctcaaaacacatctggacaggttggaggaggtgaccaatgaatcgggctatgtggacgtgttgacccttctgcgtcgtgtcatgctggacacctctaacacgctcttcttgaggatccctttggacgaaagtgctatcgtggttaaaatccaaggttattttgatgcatggcaagctctcctcatcaaaccagacatcttctttaagatttcttggctatacaaaaagtatgagaagtctgtcaaggatttgaaagatgccatagaagttctgatagcagaaaaaagacgcaggatttccacagaagagaaactggaagaatgtatggactttgccactgagttgattttagcagagaaacgtggtgacctgacaagagagaatgtgaaccagtgcatattggaaatgctgatcgcagctcctgacaccatgtctgtctctttgttcttcatgctatttctcattgcaaagcaccctaatgttgaagaggcaataataaaggaaatccagactgttattggtgagagagacataaagattgatgatatacaaaaattaaaagtgatggaaaacttcatttatgagagcatgcggtaccagcctgtcgtggacttggtcatgcgcaaagccttagaagatgatgtaatcgatggctacccagtgaaaaaggggacaaacattatcctgaatattggaaggatgcacagactcgagtttttccccaaacccaatgaatttactcttgaaaattttgcaaagaatgttccttataggtactttcagccatttggctttgggccccgtggctgtgcaggaaagtacatcgccatggtgatgatgaaagccatcctcgttacacttctgagacgattccacgtgaagacattgcaaggacagtgtgttgagagcatacagaagatacacgacttgtccttgcacccagatgagactaaaaacatgctggaaatgatctttaccccaagaaactcagacaggtgtctggaacactagagaaggctggtcagtacctactctggagcatttctcatcagtagttcacatacaaatcatccatccttgccaatagtgtcatcctcacagtgaacactcagtggcccatggcattttataggcatacctcctatgggttgtcaccaagctaggtgctattggtcatctgctcctgttcacaccagagaaccaggctacaagagaaaaagcagaggccaagagtttgagggagaaatagtcggtgaagaaaccgtatccataaagacccgattccaccaaatgtgctttgagaaggataggccttcattaacaaaatgtatgtctggttccccagtagagctctactgcctcaacccaaggggatttttatgtctggggcagaaacactcaagttgattagaaagaccaggccaatgtcagggtacctggggccaaacccacctgctagtgtgaattaaagtactttaattttgttttctgtggaggtggaaaagcaacattcatagtctttggagaaatgcttagaaattcagcatttgacccttgctgtgaattaagcccaattaattcctgtttgtctacatatgatctgtctgtggcaaaagtttaatcagaggaaattctttcccagtctgtcgatttatgcctcagccacttgcctgtgctacaattcattgtgttacctgtagattcaggtaatacaaactatatataatcatcaagtaatacaaactaatttagtaatagcctgggttaagtattattagggccctgtgtctgctgtagaaaaaaaaattcacatgatgcacttcaaattcaaataaaaatccttttggcatgttcccattttaaaaaaaaaaaaaaaaaaaaaaaaaaaaaaaaaaaaaaaaaaat

SEQ ID NO: 731916 - DNA, 1488 bp, Homo sapiens; identical to SEQ ID NO: 307434
  misc_feature (24)..(24): n is a, c, g, or t

SEQ ID NO: 731917 - DNA, 2168 bp, Homo sapiens; identical to SEQ ID NO: 307437
  misc_feature (24)..(24): n is a, c, g, or t

SEQ ID NO: 731918 - DNA, 2973 bp, Homo sapiens
  misc_feature (24)..(24): n is a, c, g, or t
  misc_feature (2935)..(2935): n is a, c, g, or t
  misc_feature (2970)..(2970): n is a, c, g, or t
aaacagtgtatcaacgcagagtgnccattacggccgggggagtttctggagggctgaacacgtggaggcaaacaggaaggtgaagaagaacttatcctatcaggacggaaggtcctgtgctcgggatcttccagacgtcgcgactctaaattgccccctctgaggtcaaggaacacaagatggttttggaaatgctgaacccgatacattataacatcaccagcatcgtgcctgaagccatgcctgctgccaccatgccagtcctgctcctcactggcctttttctcttggtgtggaattatgagggcacatcctcaataccaggtcctggctactgcatgggaattggacccctcatctcccacggcagattcctgtggatggggatcggcagtgcctgcaactactacaaccgggtatatggagaattcatgcgagtctggatctctggagaggaaacactcattatcagcaagtcctcaagtatgttccacataatgaagcacaatcattacagctctcgattcggcagcaaacttgggctgcagtgcatcggtatgcatgagaaaggcatcatatttaacaacaatccagagctctggaaaacaactcgacccttctttatgaaagaaagtgctatcgtggttaaaatccaaggttattttgatgcatggcaagctctcctcatcaaaccagacatcttctttaagatttcttggctatacaaaaagtatgagaagtctgtcaaggatttgaaagatgccatagaagttctgatagcagaaaaaagacgcaggatttccacagaagagaaactggaagaatgtatggactttgccactgagttgattttagcagagaaacgtggtgacctgacaagagagaatgtgaaccagtgcatattggaaatgctgatcgcagctcctgacaccatgtctgtctctttgttcttcatgctatttctcattgcaaagcaccctaatgttgaagaggcaataataaaggaaatccagactgttattggtgagagagacataaagattgatgatatacaaaaattaaaagtgatggaaaacttcatttatgagagcatgcggtaccagcctgtcgtggacttggtcatgcgcaaagccttagaagatgatgtaatcgatggctacccagtgaaaaaggggacaaacattatcctgaatattggaaggatgcacagactcgagtttttccccaaacccaatgaatttactcttgaaaattttgcaaagaatgttccttataggtactttcagccatttggctttgggccccgtggctgtgcaggaaagtacatcgccatggtgatgatgaaagccatcctcgttacacttctgagacgattccacgtgaagacattgcaaggacagtgtgttgagagcatacagaagatacacgacttgtccttgcacccagatgagactaaaaacatgctggaaatgatctttaccccaagaaactcagacaggtgtctggaacactagagaaggctggtcagtacctactctggagcatttctcatcagtagttcacatacaaatcatccatccttgccaatagtgtcatcctcacagtgaacactcagtggcccatggcattttataggcatacctcctatgggttgtcaccaagctaggtgctattggtcatctgctcctgttcacaccagagaaccaggctacaagagaaaaagcagaggccaagagtttgagggagaaatagtcggtgaagaaaccgtatccataaagacccgattccaccaaatgtgctttgagaaggataggccttcattaacaaaatgtatgtctggttccccagtagagctctactgcctcaacccaaggggatttttatgtctggggcagaaacactcaagttgattagaaagaccaggccaatgtcagggtacctggggccaaacccacctgctagtgtgaattaaagtactttaattttgttttctgtggaggtggaaaagcaacattcatagtctttggagaaatgcttagaaattcagcatttgacccttgctgtgaattaagcccaattaattcctgtttgtctacatatgatctgtctgtggcaaaagtttaatcagaggaaattctttcccagtctgtcgatttatgcctcagccacttgcctgtgctacaattcattgtgttacctgtagattcaggtaatacaaactatatataatcatcaagtaatacaaactaatttagtaatagcctgggttaagtattattagggccctgtgtctgctgtagaaaaaaaaattcacatgatgcacttcaaattcaaataaaaatccttttggcatgttcccatttttgcttagctcaattagtgtggctaaccaagagataactgtaaatgtgacattgatttgctcttactacagcttcagtgattgggggaggaaaagtcccaacccaatgggctcaaacttctaaggggtactcctctcatccccttatccttctccctcgacattttctccctctttcttcccatgaccccaaagccaagggcaacagatcagtaaagaacgtggtcagagtagaacccctgaagtattttttaatcctacctcaaaatttaacagttacctgagagatttaacattatctagttcattgaatcattgtatgtggtcatggataaattgcacaccttggaattcgctttctaaaggaaatcaaatgaatggaggaactttccaaacaccactttacttgtgttatatagccaatataactatctctactgaatgtcattgaaaaactaaaaaattaaacttatttacaaataaaaaaaaaaaaaaaaaaaaaaaaaaaaaaaaaaaaaaaaaaaataaaaaaaaaaaaaaaaaaaaaaaaaaaaaaaaaaaaaaaaaaaaaanaaaaaaaaaaaaaaaaaaaaaaaaaaaaaaaaaanaag

SEQ ID NO: 731919 - DNA, 3189 bp, Homo sapiens
  misc_feature (24)..(24): n is a, c, g, or t
aaacagtgtatcaacgcagagtgnccattacggccgggggagtttctggagggctgaacacgtggaggcaaacaggaaggtgaagaagaacttatcctatcaggacggaaggtcctgtgctcgggatcttccagacgtcgcgactctaaattgccccctctgaggtcaaggaacacaagatggttttggaaatgctgaacccgatacattataacatcaccagcatcgtgcctgaagccatgcctgctgccaccatgccagtcctgctcctcactggcctttttctcttggtgtggaattatgagggcacatcctcaataccaggtcctggctactgcatgggaattggacccctcatctcccacggcagattcctgtggatggggatcggcagtgcctgcaactactacaaccgggtatatggagaattcatgcgagtctggatctctggagaggaaacactcattatcagcaagtcctcaagtatgttccacataatgaagcacaatcattacagctctcgattcggcagcaaacttgggctgcagtgcatcggtatgcatgagaaaggcatcatatttaacaacaatccagagctctggaaaacaactcgacccttctttatgaaagaaagtgctatcgtggttaaaatccaaggttattttgatgcatggcaagctctcctcatcaaaccagacatcttctttaagatttcttggctatacaaaaagtatgagaagtctgtcaaggatttgaaagatgccatagaagttctgatagcagaaaaaagacgcaggatttccacagaagagaaactggaagaatgtatggactttgccactgagttgattttagcagagaaacgtggtgacctgacaagagagaatgtgaaccagtgcatattggaaatgctgatcgcagctcctgacaccatgtctgtctctttgttcttcatgctatttctcattgcaaagcaccctaatgttgaagaggcaataataaaggaaatccagactgttattggtgagagagacataaagattgatgatatacaaaaattaaaagtgatggaaaacttcatttatgagagcatgcggtaccagcctgtcgtggacttggtcatgcgcaaagccttagaagatgatgtaatcgatggctacccagtgaaaaaggggacaaacattatcctgaatattggaaggatgcacagactcgagtttttccccaaacccaatgaatttactcttgaaaattttgcaaagaatgttccttataggtactttcagccatttggctttgggccccgtggctgtgcaggaaagtacatcgccatggtgatgatgaaagccatcctcgttacacttctgagacgattccacgtgaagacattgcaaggacagtgtgttgagagcatacagaagatacacgacttgtccttgcacccagatgagactaaaaacatgctggaaatgatctttaccccaagaaactcagacaggtgtctggaacactagagaaggctggtcagtacctactctggagcatttctcatcagtagttcacatacaaatcatccatccttgccaatagtgtcatcctcacagtgaacactcagtggcccatggcattttataggcatacctcctatgggttgtcaccaagctaggtgctattggtcatctgctcctgttcacaccagagaaccaggctacaagagaaaaagcagaggccaagagtttgagggagaaatagtcggtgaagaaaccgtatccataaagacccgattccaccaaatgtgctttgagaaggataggccttcattaacaaaatgtatgtctggttccccagtagagctctactgcctcaacccaaggggatttttatgtctggggcagaaacactcaagttgattagaaagaccaggccaatgtcagggtacctggggccaaacccacctgctagtgtgaattaaagtactttaattttgttttctgtggaggtggaaaagcaacattcatagtctttggagaaatgcttagaaattcagcatttgacccttgctgtgaattaagcccaattaattcctgtttgtctacatatgatctgtctgtggcaaaagtttaatcagaggaaattctttcccagtctgtcgatttatgcctcagccacttgcctgtgctacaattcattgtgttacctgtagattcaggtaatacaaactatatataatcatcaagtaatacaaactaatttagtaatagcctgggttaagtattattagggccctgtgtctgctgtagaaaaaaaaattcacatgatgcacttcaaattcaaataaaaatccttttggcatgttcccatttttgcttagctcaattagtgtggctaaccaagagataactgtaaatgtgacattgatttgctcttactacagcttcagtgattgggggaggaaaagtcccaacccaatgggctcaaacttctaaggggtactcctctcatccccttatccttctccctcgacattttctccctctttcttcccatgaccccaaagccaagggcaacagatcagtaaagaacgtggtcagagtagaacccctgaagtattttttaatcctacctcaaaatttaacagttacctgagagatttaacattatctagttcattgaatcattgtatgtggtcatggataaattgcacaccttggaattcgctttctaaaggaaatcaaatgaatggaggaactttccaaacaccactttacttgtgttatatagccaatataactatctctactgaagcggaatacagcacattaagtcaagctaggtgctattggtcatctgctcctgttcacaccagagaaccaggctacaagagaaaaagcagaggccaagagtttgagggagaaatagtcggtgaagaaaccgtatccataaagacccgattccaccaaatgtgctttgagaaggataggccttcatcaacaaaatgtatgtctggttccccagtagagctatactgcctcaacccaaggggatattttaatgtctggggcagaaacactcaagttgattagaaagaccagccaatgtcagtgtatctgggtccttaacccacttggctagtgtgaattatagtacaatgatatttttttttgtggagataggtcagaacatagaggg

SEQ ID NO: 731920 - DNA, 2858 bp, Homo sapiens
  misc_feature (24)..(24): n is a, c, g, or t
  misc_feature (2827)..(2829): n is a, c, g, or t
  misc_feature (2841)..(2842): n is a, c, g, or t
  misc_feature (2848)..(2848): n is a, c, g, or t
aaacagtgtatcaacgcagagtgnccattacggccgggggagtttctggagggctgaacacgtggaggcaaacaggaaggtgaagaagaacttatcctatcaggacggaaggtcctgtgctcgggatcttccagacgtcgcgactctaaattgccccctctgaggtcaaggaacacaagatggttttggaaatgctgaacccgatacattataacatcaccagcatcgtgcctgaagccatgcctgctgccaccatgccagtcctgctcctcactggcctttttctcttggtgtggaattatgagggcacatcctcaataccaggtcctggctactgcatgggaattggacccctcatctcccacggcagattcctgtggatggggatcggcagtgcctgcaactactacaaccgggtatatggagaattcatgcgagtctggatctctggagaggaaacactcattatcagcaagtcctcaagtatgttccacataatgaagcacaatcattacagctctcgattcggcagcaaacttgggctgcagtgcatcggtatgcatgagaaaggcatcatatttaacaacaatccagagctctggaaaacaactcgacccttctttatgaaagaaagtgctatcgtggttaaaatccaaggttattttgatgcatggcaagctctcctcatcaaaccagacatcttctttaagatttcttggctatacaaaaagtatgagaagtctgtcaaggatttgaaagatgccatagaagttctgatagcagaaaaaagacgcaggatttccacagaagagaaactggaagaatgtatggactttgccactgagttgattttagcagagaaacgtggtgacctgacaagagagaatgtgaaccagtgcatattggaaatgctgatcgcagctcctgacaccatgtctgtctctttgttcttcatgctatttctcattgcaaagcaccctaatgttgaagaggcaataataaaggaaatccagactgttattggtgagagagacataaagattgatgatatacaaaaattaaaagtgatggaaaacttcatttatgagagcatgcggtaccagcctgtcgtggacttggtcatgcgcaaagccttagaagatgatgtaatcgatggctacccagtgaaaaaggggacaaacattatcctgaatattggaaggatgcacagactcgagtttttccccaaacccaatgaatttactcttgaaaattttgcaaagaatgttccttataggtactttcagccatttggctttgggccccgtggctgtgcaggaaagtacatcgccatggtgatgatgaaagccatcctcgttacacttctgagacgattccacgtgaagacattgcaaggacagtgtgttgagagcatacagaagatacacgacttgtccttgcacccagatgagactaaaaacatgctggaaatgatctttaccccaagaaactcagacaggtgtctggaacactagagaaggctggtcagtacctactctggagcatttctcatcagtagttcacatacaaatcatccatccttgccaatagtgtcatcctcacagtgaacactcagtggcccatggcattttataggcatacctcctatgggttgtcaccaagctaggtgctattggtcatctgctcctgttcacaccagagaaccaggctacaagagaaaaagcagaggccaagagtttgagggagaaatagtcggtgaagaaaccgtatccataaagacccgattccaccaaatgtgctttgagaaggataggccttcattaacaaaatgtatgtctggttccccagtagagctctactgcctcaacccaaggggatttttatgtctggggcagaaacactcaagttgattagaaagaccaggccaatgtcagggtacctggggccaaacccacctgctagtgtgaattaaagtactttaattttgttttctgtggaggtggaaaagcaacattcatagtctttggagaaatgcttagaaattcagcatttgacccttgctgtgaattaagcccaattaattcctgtttgtctacatatgatctgtctgtggcaaaagtttaatcagaggaaattctttcccagtctgtcgatttatgcctcagccacttgcctgtgctacaattcattgtgttacctgtagattcaggtaatacaaactatatataatcatcaagtaatacaaactaatttagtaatagcctgggttaagtattattagggccctgtgtctgctgtagaaaaaaaaattcacatgatgcacttcaaattcaaataaaaatccttttggcatgttcccatttttgcttagctcaattagtgtggctaaccaagagataactgtaaatgtgacattgatttgctcttactacagcttcagtgattgggggaggaaaagtcccaacccaatgggctcaaacttctatcttcccatgaccccaaagccaagggcaacagatcagtaaagaacgtggtcagagtagaacccctgaagtattttttaatcctacctcaaaatttaacagttacctgagagatttaacattatctagttcattgaatcattgtatgtggtcatggataaattgcacaccttggaattcgctttctaaaggaaatcaaatgaatggaggaactttccaaacaccactttacttgtgttatatagccaatataactatctctactgaatgtcattgaaaaactaaaaaattaaacttatttacaaataggtaaaaaaaaaaaaaaaaacaaacacaaaaaaacnnntggggggcgccnngggccncggaaaaacc

SEQ ID NO: 731921 - DNA, 3468 bp, Homo sapiens
  misc_feature (24)..(24): n is a, c, g, or t
aaacagtgtatcaacgcagagtgnccattacggccgggggagtttctggagggctgaacacgtggaggcaaacaggaaggtgaagaagaacttatcctatcaggacggaaggtcctgtgctcgggatcttccagacgtcgcgactctaaattgccccctctgaggtcaaggaacacaagatggttttggaaatgctgaacccgatacattataacatcaccagcatcgtgcctgaagccatgcctgctgccaccatgccagtcctgctcctcactggcctttttctcttggtgtggaattatgagggcacatcctcaataccaggtcctggctactgcatgggaattggacccctcatctcccacggcagattcctgtggatggggatcggcagtgcctgcaactactacaaccgggtatatggagaattcatgcgagtctggatctctggagaggaaacactcattatcagcaagtcctcaagtatgttccacataatgaagcacaatcattacagctctcgattcggcagcaaacttgggctgcagtgcatcggtatgcatgagaaaggcatcatatttaacaacaatccagagctctggaaaacaactcgacccttctttatgaaagaaagtgctatcgtggttaaaatccaaggttattttgatgcatggcaagctctcctcatcaaaccagacatcttctttaagatttcttggctatacaaaaagtatgagaagtctgtcaaggatttgaaagatgccatagaagttctgatagcagaaaaaagacgcaggatttccacagaagagaaactggaagaatgtatggactttgccactgagttgattttagcagagaaacgtggtgacctgacaagagagaatgtgaaccagtgcatattggaaatgctgatcgcagctcctgacaccatgtctgtctctttgttcttcatgctatttctcattgcaaagcaccctaatgttgaagaggcaataataaaggaaatccagactgttattggtgagagagacataaagattgatgatatacaaaaattaaaagtgatggaaaacttcatttatgagagcatgcggtaccagcctgtcgtggacttggtcatgcgcaaagccttagaagatgatgtaatcgatggctacccagtgaaaaaggggacaaacattatcctgaatattggaaggatgcacagactcgagtttttccccaaacccaatgaatttactcttgaaaattttgcaaagaatgttccttataggtactttcagccatttggctttgggccccgtggctgtgcaggaaagtacatcgccatggtgatgatgaaagccatcctcgttacacttctgagacgattccacgtgaagacattgcaaggacagtgtgttgagagcatacagaagatacacgacttgtccttgcacccagatgagactaaaaacatgctggaaatgatctttaccccaagaaactcagacaggtgtctggaacactagagaaggctggtcagtacctactctggagcatttctcatcagtagttcacatacaaatcatccatccttgccaatagtgtcatcctcacagtgaacactcagtggcccatggcattttataggcatacctcctatgggttgtcaccaagctaggtgctattggtcatctgctcctgttcacaccagagaaccaggctacaagagaaaaagcagaggccaagagtttgagggagaaatagtcggtgaagaaaccgtatccataaagacccgattccaccaaatgtgctttgagaaggataggccttcattaacaaaatgtatgtctggttccccagtagagctctactgcctcaacccaaggggatttttatgtctggggcagaaacactcaagttgattagaaagaccaggccaatgtcagggtacctggggccaaacccacctgctagtgtgaattaaagtactttaattttgttttctgtggaggtggaaaagcaacattcatagtctttggagaaatgcttagaaattcagcatttgacccttgctgtgaattaagcccaattaattcctgtttgtctacatatgatctgtctgtggcaaaagtttaatcagaggaaattctttcccagtctgtcgatttatgcctcagccacttgcctgtgctacaattcattgtgttacctgtagattcaggtaatacaaactatatataatcatcaagtaatacaaactaatttagtaatagcctgggttaagtattattagggccctgtgtctgctgtagaaaaaaaaattcacatgatgcacttcaaattcaaataaaaatccttttggcatgttcccatttttgcttagctcaattagtgtggctaaccaagagataactgtaaatgtgacattgatttgctcttactacagcttcagtgattgggggaggaaaagtcccaacccaatgggctcaaacttctatcttcccatgaccccaaagccaagggcaacagatcagtaaagaacgtggtcagagtagaacccctgaagtattttttaatcctacctcaaaatttaacagttacctgagagatttaacattatctagttcattgaatcattgtatgtggtcatggataaattgcacaccttggaattcgctttctaaaggaaatcaaatgaatggaggaactttccaaacaccactttacttgtgttatatagccaatataactatctctactgaatgtcattgaaaaactaaaaaattaaacttatttacaaataggtaaatatttgtcattgaatccattgccatcccatttgactgttcttttcatcctactgtctagtaataagctgagtataagatgacagtgtaatctccctgaaagcaggagctactttctttcttttgtaatctatttccatccccatttccctgtcctgtctccctgtattcactcccaagctcagttctgaatagacattcctgctcagagatactcccaactgatgcagaaaccaaataaagaggtaggtattccaagaattcaagaatggacattagtaaagaataaaacatttatttgagcttggaattatttggatcatctatatggcctaaaaatatatggactatgcctgtgtacctgaatacgtatgtagtcaggtcaagacaatcatccaaataacttagacccctaaaagcaaggccaggatttgcaatttaatgtgtcccaattaattcacttgaaaattagtaacactctgtttacgttgcctctggctggagctgcatggtggaagaagcccaactttggatccatgtacttcacccatccaatactcttgggacatttatgtgtattttatctgtatatatgaagccaatgtctatgtctacacagtcaaagtgaaatgcatgtttgatatagctgtacatagatatctattttgcaggt

SEQ ID NO: 731922 - DNA, 2920 bp, Homo sapiens
  misc_feature (24)..(24): n is a, c, g, or t
  misc_feature (2882)..(2882): n is a, c, g, or t
  misc_feature (2917)..(2917): n is a, c, g, or t
aaacagtgtatcaacgcagagtgnccattacggccgggggagtttctggagggctgaacacgtggaggcaaacaggaaggtgaagaagaacttatcctatcaggacggaaggtcctgtgctcgggatcttccagacgtcgcgactctaaattgccccctctgaggtcaaggaacacaagatggttttggaaatgctgaacccgatacattataacatcaccagcatcgtgcctgaagccatgcctgctgccaccatgccagtcctgctcctcactggcctttttctcttggtgtggaattatgagggcacatcctcaataccaggtcctggctactgcatgggaattggacccctcatctcccacggcagattcctgtggatggggatcggcagtgcctgcaactactacaaccgggtatatggagaattcatgcgagtctggatctctggagaggaaacactcattatcagcaagtcctcaagtatgttccacataatgaagcacaatcattacagctctcgattcggcagcaaacttgggctgcagtgcatcggtatgcatgagaaaggcatcatatttaacaacaatccagagctctggaaaacaactcgacccttctttatgaaagaaagtgctatcgtggttaaaatccaaggttattttgatgcatggcaagctctcctcatcaaaccagacatcttctttaagatttcttggctatacaaaaagtatgagaagtctgtcaaggatttgaaagatgccatagaagttctgatagcagaaaaaagacgcaggatttccacagaagagaaactggaagaatgtatggactttgccactgagttgattttagcagagaaacgtggtgacctgacaagagagaatgtgaaccagtgcatattggaaatgctgatcgcagctcctgacaccatgtctgtctctttgttcttcatgctatttctcattgcaaagcaccctaatgttgaagaggcaataataaaggaaatccagactgttattggtgagagagacataaagattgatgatatacaaaaattaaaagtgatggaaaacttcatttatgagagcatgcggtaccagcctgtcgtggacttggtcatgcgcaaagccttagaagatgatgtaatcgatggctacccagtgaaaaaggggacaaacattatcctgaatattggaaggatgcacagactcgagtttttccccaaacccaatgaatttactcttgaaaattttgcaaagaatgttccttataggtactttcagccatttggctttgggccccgtggctgtgcaggaaagtacatcgccatggtgatgatgaaagccatcctcgttacacttctgagacgattccacgtgaagacattgcaaggacagtgtgttgagagcatacagaagatacacgacttgtccttgcacccagatgagactaaaaacatgctggaaatgatctttaccccaagaaactcagacaggtgtctggaacactagagaaggctggtcagtacctactctggagcatttctcatcagtagttcacatacaaatcatccatccttgccaatagtgtcatcctcacagtgaacactcagtggcccatggcattttataggcatacctcctatgggttgtcaccaagctaggtgctattggtcatctgctcctgttcacaccagagaaccaggctacaagagaaaaagcagaggccaagagtttgagggagaaatagtcggtgaagaaaccgtatccataaagacccgattccaccaaatgtgctttgagaaggataggccttcattaacaaaatgtatgtctggttccccagtagagctctactgcctcaacccaaggggatttttatgtctggggcagaaacactcaagttgattagaaagaccaggccaatgtcagggtacctggggccaaacccacctgctagtgtgaattaaagtactttaattttgttttctgtggaggtggaaaagcaacattcatagtctttggagaaatgcttagaaattcagcatttgacccttgctgtgaattaagcccaattaattcctgtttgtctacatatgatctgtctgtggcaaaagtttaatcagaggaaattctttcccagtctgtcgatttatgcctcagccacttgcctgtgctacaattcattgtgttacctgtagattcaggtaatacaaactatatataatcatcaagtaatacaaactaatttagtaatagcctgggttaagtattattagggccctgtgtctgctgtagaaaaaaaaattcacatgatgcacttcaaattcaaataaaaatccttttggcatgttcccatttttgcttagctcaattagtgtggctaaccaagagataactgtaaatgtgacattgatttgctcttactacagcttcagtgattgggggaggaaaagtcccaacccaatgggctcaaacttctatcttcccatgaccccaaagccaagggcaacagatcagtaaagaacgtggtcagagtagaacccctgaagtattttttaatcctacctcaaaatttaacagttacctgagagatttaacattatctagttcattgaatcattgtatgtggtcatggataaattgcacaccttggaattcgctttctaaaggaaatcaaatgaatggaggaactttccaaacaccactttacttgtgttatatagccaatataactatctctactgaatgtcattgaaaaactaaaaaattaaacttatttacaaataaaaaaaaaaaaaaaaaaaaaaaaaaaaaaaaaaaaaaaaaaaataaaaaaaaaaaaaaaaaaaaaaaaaaaaaaaaaaaaaaaaaaaaaanaaaaaaaaaaaaaaaaaaaaaaaaaaaaaaaaaanaag

SEQ ID NO: 731923 - DNA, 2791 bp, Homo sapiens
  misc_feature (24)..(24): n is a, c, g, or t
aaacagtgtatcaacgcagagtgnccattacggccgggggagtttctggagggctgaacacgtggaggcaaacaggaaggtgaagaagaacttatcctatcaggacggaaggtcctgtgctcgggatcttccagacgtcgcgactctaaattgccccctctgaggtcaaggaacacaagatggttttggaaatgctgaacccgatacattataacatcaccagcatcgtgcctgaagccatgcctgctgccaccatgccagtcctgctcctcactggcctttttctcttggtgtggaattatgagggcacatcctcaataccaggtcctggctactgcatgggaattggacccctcatctcccacggcagattcctgtggatggggatcggcagtgcctgcaactactacaaccgggtatatggagaattcatgcgagtctggatctctggagaggaaacactcattatcagcaagtcctcaagtatgttccacataatgaagcacaatcattacagctctcgattcggcagcaaacttgggctgcagtgcatcggtatgcatgagaaaggcatcatatttaacaacaatccagagctctggaaaacaactcgacccttctttatgaaagaaagtgctatcgtggttaaaatccaaggttattttgatgcatggcaagctctcctcatcaaaccagacatcttctttaagatttcttggctatacaaaaagtatgagaagtctgtcaaggatttgaaagatgccatagaagttctgatagcagaaaaaagacgcaggatttccacagaagagaaactggaagaatgtatggactttgccactgagttgattttagcagagaaacgtggtgacctgacaagagagaatgtgaaccagtgcatattggaaatgctgatcgcagctcctgacaccatgtctgtctctttgttcttcatgctatttctcattgcaaagcaccctaatgttgaagaggcaataataaaggaaatccagactgttattggtgagagagacataaagattgatgatatacaaaaattaaaagtgatggaaaacttcatttatgagagcatgcggtaccagcctgtcgtggacttggtcatgcgcaaagccttagaagatgatgtaatcgatggctacccagtgaaaaaggggacaaacattatcctgaatattggaaggatgcacagactcgagtttttccccaaacccaatgaatttactcttgaaaattttgcaaagaatgttccttataggtactttcagccatttggctttgggccccgtggctgtgcaggaaagtacatcgccatggtgatgatgaaagccatcctcgttacacttctgagacgattccacgtgaagacattgcaaggacagtgtgttgagagcatacagaagatacacgacttgtccttgcacccagatgagactaaaaacatgctggaaatgatctttaccccaagaaactcagacaggtgtctggaacactagagaaggctggtcagtacctactctggagcatttctcatcagtagttcacatacaaatcatccatccttgccaatagtgtcatcctcacagtgaacactcagtggcccatggcattttataggcatacctcctatgggttgtcaccaagctaggtgctattggtcatctgctcctgttcacaccagagaaccaggctacaagagaaaaagcagaggccaagagtttgagggagaaatagtcggtgaagaaaccgtatccataaagacccgattccaccaaatgtgctttgagaaggataggccttcattaacaaaatgtatgtctggttccccagtagagctctactgcctcaacccaaggggatttttatgtctggggcagaaacactcaagttgattagaaagaccaggccaatgtcagggtacctggggccaaacccacctgctagtgtgaattaaagtactttaattttgttttctgtggaggtggaaaagcaacattcatagtctttggagaaatgcttagaaattcagcatttgacccttgctgtgaattaagcccaattaattcctgtttgtctacatatgatctgtctgtggcaaaagtttaatcagaggaaattctttcccagtctgtcgatttatgcctcagccacttgcctgtgctacaattcattgtgttacctgtagattcaggtaatacaaactatatataatcatcaagtaatacaaactaatttagtaatagcctgggttaagtattattagggccctgtgtctgctgtagaaaaaaaaattcacatgatgcacttcaaattcaaataaaaatccttttggcatgttcccatttttgcttagctcaattagtgtggctaaccaagagataactgtaaatgtgacattgatttgctcttactacagcttcagtgattgggggaggaaaagtcccaacccaatgggctcaaacttctatcttcccatgaccccaaagccaagggcaacagatcagtaaagaacgtggtcagagtagaacccctgaagtattttttaatcctacctcaaaatttaacagttacctgagagatttaacattatctagttcattgaatcattgtatgtggtcatggataaattgcacaccttggaattcgctttctaaaggaaatcaaatgaatggaggaactttccaaacaccactttacttgtgttatatagccaatataactatctctactgaatgtcattgaaaaactaaaaaattaaacttatttacaaata

SEQ ID NO: 731924 - DNA, 2751 bp, Homo sapiens
  misc_feature (24)..(24): n is a, c, g, or t
aaacagtgtatcaacgcagagtgnccattacggccgggggagtttctggagggctgaacacgtggaggcaaacaggaaggtgaagaagaacttatcctatcaggacggaaggtcctgtgctcgggatcttccagacgtcgcgactctaaattgccccctctgaggtcaaggaacacaagatggttttggaaatgctgaacccgatacattataacatcaccagcatcgtgcctgaagccatgcctgctgccaccatgccagtcctgctcctcactggcctttttctcttggtgtggaattatgagggcacatcctcaataccaggtcctggctactgcatgggaattggacccctcatctcccacggcagattcctgtggatggggatcggcagtgcctgcaactactacaaccgggtatatggagaattcatgcgagtctggatctctggagaggaaacactcattatcagcaagtcctcaagtatgttccacataatgaagcacaatcattacagctctcgattcggcagcaaacttgggctgcagtgcatcggtatgcatgagaaaggcatcatatttaacaacaatccagagctctggaaaacaactcgacccttctttatgaaagaaagtgctatcgtggttaaaatccaaggttattttgatgcatggcaagctctcctcatcaaaccagacatcttctttaagatttcttggctatacaaaaagtatgagaagtctgtcaaggatttgaaagatgccatagaagttctgatagcagaaaaaagacgcaggatttccacagaagagaaactggaagaatgtatggactttgccactgagttgattttagcagagaaacgtggtgacctgacaagagagaatgtgaaccagtgcatattggaaatgctgatcgcagctcctgacaccatgtctgtctctttgttcttcatgctatttctcattgcaaagcaccctaatgttgaagaggcaataataaaggaaatccagactgttattggtgagagagacataaagattgatgatatacaaaaattaaaagtgatggaaaacttcatttatgagagcatgcggtaccagcctgtcgtggacttggtcatgcgcaaagccttagaagatgatgtaatcgatggctacccagtgaaaaaggggacaaacattatcctgaatattggaaggatgcacagactcgagtttttccccaaacccaatgaatttactcttgaaaattttgcaaagaatgttccttataggtactttcagccatttggctttgggccccgtggctgtgcaggaaagtacatcgccatggtgatgatgaaagccatcctcgttacacttctgagacgattccacgtgaagacattgcaaggacagtgtgttgagagcatacagaagatacacgacttgtccttgcacccagatgagactaaaaacatgctggaaatgatctttaccccaagaaactcagacaggtgtctggaacactagagaaggctggtcagtacctactctggagcatttctcatcagtagttcacatacaaatcatccatccttgccaatagtgtcatcctcacagtgaacactcagtggcccatggcattttataggcatacctcctatgggttgtcaccaagctaggtgctattggtcatctgctcctgttcacaccagagaaccaggctacaagagaaaaagcagaggccaagagtttgagggagaaatagtcggtgaagaaaccgtatccataaagacccgattccaccaaatgtgctttgagaaggataggccttcattaacaaaatgtatgtctggttccccagtagagctctactgcctcaacccaaggggatttttatgtctggggcagaaacactcaagttgattagaaagaccaggccaatgtcagggtacctggggccaaacccacctgctagtgtgaattaaagtactttaattttgttttctgtggaggtggaaaagcaacattcatagtctttggagaaatgcttagaaattcagcatttgacccttgctgtgaattaagcccaattaattcctgtttgtctacatatgatctgtctgtggcaaaagtttaatcagaggaaattctttcccagtctgtcgatttatgcctcagccacttgcctgtgctacaattcattgtgttacctgtagattcaggtaatacaaactatatataatcatcaagtaatacaaactaatttagtaatagcctgggttaagtattattagggccctgtgtctgctgtagaaaaaaaaattcacatgatgcacttcaaattcaaataaaaatccttttggcatgttcccatttttgcttagctcaattagtgtggctaaccaagagataactgtaaatgtgacattgatttgctcttactacagcttcagtgattgggggaggaaaagtcccaacccaatgggctcaaacttctatcttcccatgaccccaaagccaagggcaacagatcagtaaagaacgtggtcagagtagaacccctgaagtattttttaatcctacctcaaaatttaacagttacctgagagatttaacattatctagttcattgaatcattgtatgtggtcatggataaattgcacaccttggaattcgctttctaaaggaaatcaaatgaatggaggaactttccaaacaccactttacttgtgttatatagccaatataactatctctactgaa

SEQ ID NO: 731925 - DNA, 2482 bp, Homo sapiens; identical to SEQ ID NO: 406823

SEQ ID NO: 731926 - DNA, 1369 bp, Homo sapiens; identical to SEQ ID NO: 406822

SEQ ID NO: 731927 - DNA, 1969 bp, Homo sapiens; identical to SEQ ID NO: 406820

SEQ ID NO: 731928 - DNA, 2313 bp, Homo sapiens; identical to SEQ ID NO: 406824

SEQ ID NO: 731929 - DNA, 516 bp, Homo sapiens
tcgtgccgaattcggcacgagctgacttctggattctcctcttgagtaaaaggactcagccaactatgaagttttttgtttttgctttaatcttggctctcatgctttccatgactggagctgattcacatgcaaagagacatcatgggtataaaagaaaattccatgaaaagcatcattcacatcgaggctatagatcaaattatctgtatgacaattgatatcttcagtaatcatggggcatgattatggaggtttgactggcaaattcgctttggactcgtgtattctcatttgtcataccgcatcacactaccactgctttttgaagaattatcataaggcaatgcagaataaaagaaataccatgatttagtgaattctgtgtttcaggatacttcccttcctaattatcatttgattagatacttgcaatttaaatgttaagctgttttcactgctgtttctgagtaatagaaattcattcctctccaaaagcaataaaattcaagcaca

SEQ ID NO: 731930 - DNA, 523 bp, Homo sapiens
catctcttgagacttcacttcagcttcactgacttctggattctcctcttgagtaaaaggactcagccaactatgaagttttttgtttttgctttaatcttggctctcatgctttccatgactggagctgattcacatgcaaagagacatcatgggtataaaagaaaattccatgaaaagcatcattcacatcgaggctatagatcaaattatctgtatgacaattgatatcttcagtaatcatggggcatgattatggaggtttgactggcaaattcgctttggactcgtgtattctcatttgtcataccgcatcacactaccactgctttttgaagaattatcataaggcaatgcagaataaaagaaataccatgatttagtgaattctgtgtttcaggatacttcccttcctaattatcatttgattagatacttgcaatttaaatgttaagctgttttcactgctgtttctgagtaatagaaattcattcctctccaaaagcaataaaattcaagcaca

SEQ ID NO: 731931 - DNA, 467 bp, Homo sapiens
aggacgcctaccaggaggacctgggactcagccaactatgaagttttttgtttttgctttaatcttggctctcatgctttccatgactagacatcatgggtataaaagaaaattccatgaaaagcatcattcacatcgaggctatagatcaaattatctgtatgacaattgatatcttcagtaatcatggggcatgattatggaggtttgactggcaaattcgctttggactcgtgtattctcatttgtcataccgcatcacactaccactgctttttgaagaattatcataaggcaatgcagaataaaagaaataccatgatttagtgaattctgtgtttcaggatacttcccttcctaattatcatttgattagatacttgcaatttaaatgttaagctgttttcactgctgtttctgagtaatagaaattcattcctctccaaaagcaataaaattcaagcaca

SEQ ID NO: 731932 - DNA, 1014 bp, Homo sapiens; identical to SEQ ID NO: 284263
  misc_feature (25)..(25): n is a, c, g, or t

SEQ ID NO: 731933 - DNA, 1134 bp, Homo sapiens; identical to SEQ ID NO: 284252
  misc_feature (25)..(25): n is a, c, g, or t

SEQ ID NO: 731934 - DNA, 1247 bp, Homo sapiens; identical to SEQ ID NO: 284254

SEQ ID NO: 731935 - DNA, 1149 bp, Homo sapiens; identical to SEQ ID NO: 284253

SEQ ID NO: 731936 - DNA, 382 bp, Homo sapiens; identical to SEQ ID NO: 284256
  misc_feature (25)..(25): n is a, c, g, or t
  misc_feature (287)..(287): n is a, c, g, or t
  misc_feature (289)..(289): n is a, c, g, or t
  misc_feature (373)..(373): n is a, c, g, or t

SEQ ID NO: 731937 - DNA, 1356 bp, Homo sapiens; identical to SEQ ID NO: 284257

SEQ ID NO: 731938 - DNA, 1083 bp, Homo sapiens; identical to SEQ ID NO: 284259

SEQ ID NO: 731939 - DNA, 959 bp, Homo sapiens; identical to SEQ ID NO: 284261

SEQ ID NO: 731940 - DNA, 972 bp, Homo sapiens; identical to SEQ ID NO: 284258

SEQ ID NO: 731941 - DNA, 969 bp, Homo sapiens; identical to SEQ ID NO: 284260
  misc_feature (25)..(25): n is a, c, g, or t

SEQ ID NO: 731942 - DNA, 690 bp, Homo sapiens; identical to SEQ ID NO: 284262

SEQ ID NO: 731943 - DNA, 2917 bp, Homo sapiens
  misc_feature (798)..(798): n is a, c, g, or t
  misc_feature (904)..(904): n is a, c, g, or t
  misc_feature (1295)..(1295): n is a, c, g, or t
  misc_feature (1510)..(1510): n is a, c, g, or t
  misc_feature (1590)..(1590): n is a, c, g, or t
  misc_feature (1655)..(1655): n is a, c, g, or t
  misc_feature (1664)..(1664): n is a, c, g, or t
  misc_feature (1668)..(1668): n is a, c, g, or t
  misc_feature (1710)..(1711): n is a, c, g, or t
  misc_feature (1717)..(1717): n is a, c, g, or t
  misc_feature (2654)..(2654): n is a, c, g, or t
  misc_feature (2912)..(2912): n is a, c, g, or t
  misc_feature (2914)..(2917): n is a, c, g, or t
ggagcctggctgctctggacctccctcctgctcctggccaggcctgcccagccctgtcccatgggttgtgactgcttcgtccaggaggtgttctgctcagatgaggagcttgccaccgtcccgctggacatcccgccatatacgaaaaacatcatctttgtggagacctcgttcaccacattggaaaccagagcttttggcagtaaccccaacttgaccaaggtggtcttcctcaacactcagctctgccagtttaggccggatgcctttggggggctgcccaggctggaggacctggaggtcacaggcagtagcttcttgaacctcagcaccaacatcttctccaacctgacctcgctgggcaagctcaccctcaacttcaacatgctggaggctctgcccgagggtcttttccagcacctggctgccctggagtccctccacctgcaggggaaccagctccaggccctgcccaggaggctcttccagcctctgacccatctgaagacactcaacctggcccagaacctcctggcccagctcccggaggagctgttccacccactcaccagcctgcagaccctgaagctgagcaacaacgcgctctctggtctcccccagggtgtgtttggcaaactgggcagcctgcaggagctcttcctggacagcaacaacatctcggagctgccccctcaggtgttctcccagctcttctgcctagagaggctgtggctgcaacgcaacgccatcacgcacctgccgctctccatctttgcctccctgggtaatctgaccttnctgagcttgcagtggaacatgcttcgggtcctgcctgccggcctctttgcccacaccccatgcctggttggcctgtctctgacccataaccagctggagactgtcnctgagggcacctttgcccacctgtccaacctgcgttccctcatgctctcatacaatgccattacccacctcccagctggcatcttcagagacctggaggagttggtcaaactctacctgggcagcaacaaccttacggcgctgcacccagccctcttccagaacctgtccaagctggagctgctcagcctctccaagaaccagctgaccacacttccggaggcatcttcgacaccaactacaacctgttcaacctggccctgcacggtaacccctggcagtgcgactgcacctggcctacctcttcaactggctgcagcagtacaccgatcggctcctgaacatccagacctactgcgctgccctgcctacctcaaaggccaggtggtgcncgccttgaatgagaagcagctggtgtccgtcacccgggaccacttgggcttccaggtcacgtggccggacgaaagcaaggcagggggcagctgggatctggctgtgcaggaaagggcagcccggagccagtgcacctacagcaaccccgagggcaccgtggtgctcgcctgtgaccaggcccagtgtcgctggctgaacgtccagctctctcctnggcagggctccctgggactgcagtacaatgctagtcaggagtgggacctgaggcgagctgcggttctctgcggctcaccntgtctatcgaggctcgggcagcagggccctagtagcagccatacaggagctggggaagggggctntggggctgnccangcgacaggtaggggcgaggggagctgagtctccgaagcttgnntttacntgcaagggacagggttacatccccaaggtgagggggtggagtctggtctgctccactaaccagggtctcctcctcctcttccttcatcgcttctcctggagtgtgcggcctaacaaggccatccttatgccttgcaaagcaccctcaaaagctgcaccacagcctggagaataaaatatcctcagccctgatgcctccccattatgtaacacccaaccgctctcacctacaccctgaggtctattcactgcatcccagtgatacaaagtggaggccactgccttctgacatctggctcaaaagcccagtgtctgtttccatttatttccctggaatttcatttaaaattggtatagagaaaaaaaggatgtgacagaagcagagatgaccagaaagcacaggggcagggttctgactggcgtgtgggagaccctgtggccggcacccacctccacacgaggactaagctctgatttttttatcttgcccaaattcctacctaaggggtctagggagtcgcgccttacaaatcataaattctcatcagatgggttttatttgaccctgtatatcatgacttatttttaatctgactatggcataacattacaagacgaggcaaaaatatttaacccccaaatatatttccttggccctaccttgaacttggccctgcagagtctcttgtgaggagaatccacatcctataaaggaagcccctttcccctttgttttccttcctttctttccagtccaggagatcatcaactaagagccaggcaccccttttaagtcgataagaaacagtttacaacctgctctctctctctctgaagtctgctgagagcttcccctgcacaataaaacttggcctccacaatcctttatcttaacctgaacattcctttccattgatcccaggtcttcagctaagctnaaccaattgtcaaccagaaaatgtttaaatttacctacagcctggaagcacccacccccgctgcttcgagttgtcctgcctttctgaactcaaccaatgtatttcttaaatgtatttgattgatgcctcattcctccctaaaatgtataaaaccaagctgtacctcgaccaccttgggcacatgttcccaggccctcctgaggtctgtgtcacgggccatggccactcatatttggctcagaataaatctcttcaaanannnn

SEQ ID NO: 731944 - DNA, 637 bp, Homo sapiens
  misc_feature (632)..(632): n is a, c, g, or t
  misc_feature (634)..(637): n is a, c, g, or t
ggagcctggctgctctggacctccctcctgctcctggccaggcctgcccagccctgtcccatgggttgtgactgcttcgtccaggaggtgttctgctcagatgaggagcttgccaccgtcccgctggacatcccgccatatacgaaaaacatcatctttgtggagacctcgttcaccacattggaaaccagagcttttggcagtaaccccaacttgaccaaggtggtcttcctcaacactcagctctgccagtttaggccggatgcctttggggggctgcccaggctggaggacctggaggtcacaggcagtagcttcttgaacctcagcaccaacatcttctccaacctgacctcgctgggcaagctcaccctcaacaattgtcaaccagaaaatgtttaaatttacctacagcctggaagcacccacccccgctgcttcgagttgtcctgcctttctgaactcaaccaatgtatttcttaaatgtatttgattgatgcctcattcctccctaaaatgtataaaaccaagctgtacctcgaccaccttgggcacatgttcccaggccctcctgaggtctgtgtcacgggccatggccactcatatttggctcagaataaatctcttcaaanannnn

SEQ ID NO: 731945 - DNA, 884 bp, Homo sapiens
  misc_feature (881)..(881): n is a, c, g, or t
caagggacagggttacatccccaaggtgagggggtggagtctggtctgctccactaaccagggtctcctcctcctcttccttcatcgcttctcctggagtgtgcggcctaacaaggccatccttatgccttgcaaagcaccctcaaaagctgcaccacagcctggagaataaaatatcctcagccctgatgcctccccattatgtaacacccaaccgctctcacctacaccctgaggtctattcactgcatcccagtgatacaaagtggaggccactgccttctgacatctggctcaaaagcccagtgtctgtttccatttatttccctggaatttcatttaaaattggtatagagaaaatggcgtgtgggagaccctgtggccggcacccacctccacacgaggactaagctctgatttttttatcttgcccaaattcctacctaaggggtctagggagtcgcgccttacaaatcataaattctcatcagatgggttttatttgaccctgtatatcatgacttatttttaatctgactatggcataacattacaagacgaggcaaaaatatttaacccccaaatatatttccttggccctaccttgaacttggccctgcagagtctcttgtgaggagaatccacatcctataaaggaagcccctttcccctttgttttccttcctttctttccagtccaggagatcatcaactaagagccaggcaccccttttaagtcgataagaaacagtttacaacctgctctctctctctctgaagtctgctgagagcttcccctgcacaataaaacttggcctccacaatcctttatcttaacctgaacattcctttccattgatcccaggtcttcagctaagctnaac

SEQ ID NO: 731946 - DNA, 3054 bp, Homo sapiens
ctcagggcagagggaggaaggacagcagaccagacagtcacagcagccttgacaaaacgttcctggaactcaagctcttctccacagaggaggacagagcagacagcagagaccatggagtctccctcggcccctccccacagatggtgcatcccctggcagaggctcctgctcacagcctcacttctaaccttctggaacccgcccaccactgccaagctcactattgaatccacgccgttcaatgtcgcagaggggaaggaggtgcttctacttgtccacaatctgccccagcatctttttggctacagctggtacaaaggtgaaagagtggatggcaaccgtcaaattataggatatgtaataggaactcaacaagctaccccagggcccgcatacagtggtcgagagataatataccccaatgcatccctgctgatccagaacatcatccagaatgacacaggattctacaccctacacgtcataaagtcagatcttgtgaatgaagaagcaactggccagttccgggtatacccggagctgcccaagccctccatctccagcaacaactccaaacccgtggaggacaaggatgctgtggccttcacctgtgaacctgagactcaggacgcaacctacctgtggtgggtaaacaatcagagcctcccggtcagtcccaggctgcagctgtccaatggcaacaggaccctcactctattcaatgtcacaagaaatgacacagcaagctacaaatgtgaaacccagaacccagtgagtgccaggcgcagtgattcagtcatcctgaatgtcctctatggcccggatgcccccaccatttcccctctaaacacatcttacagatcaggggaaaatctgaacctctcctgccacgcagcctctaacccacctgcacagtactcttggtttgtcaatgggactttccagcaatccacccaagagctctttatccccaacatcactgtgaataatagtggatcctatacgtgccaagcccataactcagacactggcctcaataggaccacagtcacgacgatcacagtctatgcagagccacccaaacccttcatcaccagcaacaactccaaccccgtggaggatgaggatgctgtagccttaacctgtgaacctgagattcagaacacaacctacctgtggtgggtaaataatcagagcctcccggtcagtcccaggctgcagctgtccaatgacaacaggaccctcactctactcagtgtcacaaggaatgatgtaggaccctatgagtgtggaatccagaacgaattaagtgttgaccacagcgacccagtcatcctgaatgtcctctatggcccagacgaccccaccatttccccctcatacacctattaccgtccaggggtgaacctcagcctctcctgccatgcagcctctaacccacctgcacagtattcttggctgattgatgggaacatccagcaacacacacaagagctctttatctccaacatcactgagaagaacagcggactctatacctgccaggccaataactcagccagtggccacagcaggactacagtcaagacaatcacagtctctgcggagctgcccaagccctccatctccagcaacaactccaaacccgtggaggacaaggatgctgtggccttcacctgtgaacctgaggctcagaacacaacctacctgtggtgggtaaatggtcagagcctcccagtcagtcccaggctgcagctgtccaatggcaacaggaccctcactctattcaatgtcacaagaaatgacgcaagagcctatgtatgtggaatccagaactcagtgagtgcaaaccgcagtgacccagtcaccctggatgtcctctatgggccggacacccccatcatttcccccccagactcgtcttacctttcgggagcgaacctcaacctctcctgccactcggcctctaacccatccccgcagtattcttggcgtatcaatgggataccgcagcaacacacacaagttctctttatcgccaaaatcacgccaaataataacgggacctatgcctgttttgtctctaacttggctactggccgcaataattccatagtcaagagcatcacagtctctgcatctggaacttctcctggtctctcagctggggccactgtcggcatcatgattggagtgctggttggggttgctctgatatagcagccctggtgtagtttcttcatttcaggaagactgacagttgttttgcttcttccttaaagcatttgcaacagctacagtctaaaattgcttctttaccaaggatatttacagaaaagactctgaccagagatcgagaccatcctagccaacatcgtgaaaccccatctctactaaaaatacaaaaatgagctgggcttggtggcgcgcacctgtagtcccagttactcgggaggctgaggcaggagaatcgcttgaacccgggaggtggagattgcagtgagcccagatcgcaccactgcactccagtctggcaacagagcaagactccatctcaaaaagaaaagaaaagaagactctgacctgtactcttgaatacaagtttctgataccactgcactgtctgagaatttccaaaactttaatgaactaactgacagcttcatgaaactgtccaccaagatcaagcagagaaaataattaatttcatgggactaaatgaactaatgaggataatattttcataattttttatttgaaattttgctgattctttaaatgtcttgtttcccagatttcaggaaactttttttcttttaagctatccacagcttacagcaatttgataaaatatacttttgtgaacaaaaattgagacatttacattttctccctatgtggtcgctccagacttgggaaactattcatgaatatttatattgtatggtaatatagttattgcacaagttcaataaaaatctgctctttgtataacagaatacatttgaaaacattggttatattaccaagactttgactagaatgtcgtat

SEQ ID NO: 731947 - DNA, 856 bp, Homo sapiens; identical to SEQ ID NO: 358589

SEQ ID NO: 731948 - DNA, 2972 bp, Homo sapiens
ctcagggcagagggaggaaggacagcagaccagacagtcacagcagccttgacaaaacgttcctggaactcaagctcttctccacagaggaggacagagcagacagcagagaccatggagtctccctcggcccctccccacagatggtgcatcccctggcagaggctcctgctcacagcctcacttctaaccttctggaacccgcccaccactgccaagctcactattgaatccacgccgttcaatgtcgcagaggggaaggaggtgcttctacttgtccacaatctgccccagcatctttttggctacagctggtacaaaggtgaaagagtggatggcaaccgtcaaattataggatatgtaataggaactcaacaagctaccccagggcccgcatacagtggtcgagagataatataccccaatgcatccctgctgatccagaacatcatccagaatgacacaggattctacaccctacacgtcataaagtcagatcttgtgaatgaagaagcaactggccagttccgggtatacccggagctgcccaagccctccatctccagcaacaactccaaacccgtggaggacaaggatgctgtggccttcacctgtgaacctgagactcaggacgcaacctacctgtggtgggtaaacaatcagagcctcccggtcagtcccaggctgcagctgtccaatggcaacaggaccctcactctattcaatgtcacaagaaatgacacagcaagctacaaatgtgaaacccagaacccagtgagtgccaggcgcagtgattcagtcatcctgaatgtcctctatggcccggatgcccccaccatttcccctctaaacacatcttacagatcaggggaaaatctgaacctctcctgccacgcagcctctaacccacctgcacagtactcttggtttgtcaatgggactttccagcaatccacccaagagctctttatccccaacatcactgtgaataatagtggatcctatacgtgccaagcccataactcagacactggcctcaataggaccacagtcacgacgatcacagtctatgcagagccacccaaacccttcatcaccagcaacaactccaaccccgtggaggatgaggatgctgtagccttaacctgtgaacctgagattcagaacacaacctacctgtggtgggtaaataatcagagcctcccggtcagtcccaggctgcagctgtccaatgacaacaggaccctcactctactcagtgtcacaaggaatgatgtaggaccctatgagtgtggaatccagaacgaattaagtgttgaccacagcgacccagtcatcctgaatgtcctctatggcccagacgaccccaccatttccccctcatacacctattaccgtccaggggtgaacctcagcctctcctgccatgcagcctctaacccacctgcacagtattcttggctgattgatgggaacatccagcaacacacacaagagctctttatctccaacatcactgagaagaacagcggactctatacctgccaggccaataactcagccagtggccacagcaggactacagtcaagacaatcacagtctctgcggagctgcccaagccctccatctccagcaacaactccaaacccgtggaggacaaggatgctgtggccttcacctgtgaacctgaggctcagaacacaacctacctgtggtgggtaaatggtcagagcctcccagtcagtcccaggctgcagctgtccaatggcaacaggaccctcactctattcaatgtcacaagaaatgacgcaagagcctatgtatgtggaatccagaactcagtgagtgcaaaccgcagtgacccagtcaccctggatgtcctctatgggccggacacccccatcatttcccccccagactcgtcttacctttcgggagcgaacctcaacctctcctgccactcggcctctaacccatccccgcagtattcttggcgtatcaatgggataccgcagcaacacacacaagttctctttatcgccaaaatcacgccaaataataacgggacctatgcctgttttgtctctaacttggctactggccgcaataattccatagtcaagagcatcacagtctctgcatctggaacttctcctggtctctcagctggggccactgtcggcatcatgattggagtgctggttggggttgctctgatatagcagccctggtgtagtttcttcatttcaggaagactgacagttgttttgcttcttccttaaagcatttgcaacagctacagtctaaaattgcttctttaccaaggatatttacagaaaagactctgaccagagatcgagaccatcctagccaacatcgtgaaaccccatctctactaaaaatacaaaaatgagctgggcttggtggcgcgcacctgtagtcccagttactcgggaggctgaggcaggagaatcgcttgaacccgggaggtggagattgcagtgagcccagatcgcaccactgcactccagtctggcaacagagcaagactccatctcaaaaagaaaagaaaagaagactctgacctgtactcttgaatacaagtttctgataccactgcactgtctgagaatttccaaaactttaatgaactaactgacagcttcatgaaactgtccaccaagatcaagcagagaaaataattaatttcatgggactaaatgaactaatgaggattgctgattctttaaatgtcttgtttcccagatttcaggaaactttttttcttttaagctatccacagcttacagcaatttgataaaatatacttttgtgaacaaaaattgagacatttacattttctccctatgtggtcgctccagacttgggaaactattcatgaatatttatattgtatggtaatatagttattgcacaagttcaataaaaatctgctctttgtataacagaa

SEQ ID NO: 731949 - DNA, 1546 bp, Homo sapiens
aaaaaagttaagtgcaaagaatcaagcctggtatgttagttttcatcactgagatcagccaagatggaattagagtgcaagataatttaccggggggaccaccatgaggaaaagtggagtagaagtgggaggagcctgagagagccctcagaccacgatgcagatctgattcctgagaaggagaaagaggagagagttttagatagtgatgcagttctcagagtttccacaaggctggtggggcgtcctcaagcccctcacccatgagagagaagcagagtcccccagaactgggcttttcattcccctggtgggagcccatgagaagcgagttctctgtgcaacggacttagtaaatacagaatgcactagcctgggccttctgccaatcaagtccctgccacagagacccaacagacttatttatgcctaccacaactgagacactgagaaaaagatgcaaccatgaaaagatagaaagttctaatgacacgcaaaaatagcaatcagactttctcaaatttcaaagccttcagaaatagctgagtgcagacaggccagggtggaattgacagaagactgatcaccaactagcaacacagtgagagagaaaaaattgcaactttcccacaaaactaatgcattccttgaagcaacaagtagagactgcttcatgctgagagctggaacctggggcaccccactgtaaaataacatcacattcattccttctcttttctttccatgacggacgattcaatacattgtcaaagcctcttggtccttttttaacatctcacacttgtgtcattctctccattcccataaacctcaacaactgctcaaagtcctgcttgaccccttgttgccagtctttgaaatctttcttgcatatgactgcctcattaccttcctaaaatctagttcactcgcctactcaagaagacacaggggcctactgtggtgtattagataagttcacatttcttctctttactaatcttttttacttcctttaccaccactcccttatataattccatcatcctaatagatctgtttccctacacatccctgcctctccaccccacatgtacacagaattcttagttccggtgttacacctaaaaacatgtcaaacagggtgacctccttccactgtctgcactgtggagttacccacacccttaatcacaagcaacttctgacctcatgaagaacaaagactgtagcattaacctgtgagtcttaagctcaggacacaactgtgcctgtgactgagaaccttttcctgataaccaattcatatgttcataacagatacagaaatgaagaaggcaaggtccttaattctataacaggagacaaaacctgaaaaataatcataatgccaaaatagaaaggagtgaacatcacaagaaattagagaaatctgacggaaaatatagctacacattggaatcactcagaaacattttataaaatggatacttaagtcccaccgataaattccgatttactgatctataggagtggtgaggcattc

SEQ ID NO: 731950 - DNA, 1790 bp, Homo sapiens; identical to SEQ ID NO: 358611

SEQ ID NO: 731951 - DNA, 1308 bp, Homo sapiens
aactcctgatctgcccgcctcggcctcccaaagtgctgggattacaggcgtgagccaccgcacccggccgatttggactttttaacacaggattgggacaggattcagagggacactgtggcccttctacaatcaggagcttcccctttcctctgatgacatcacctgtggctttgttctctttgttccagatgggccggacacccccatcatttcccccccagactcgtcttacctttcgggagcgaacctcaacctctcctgccactcggcctctaacccatccccgcagtattcttggcgtatcaatgggataccgcagcaacacacacaagttctctttatcgccaaaatcacgccaaataataacgggacctatgcctgttttgtctctaacttggctactggccgcaataattccatagtcaagagcatcacagtctctgcatctggaacttctcctggtctctcagctggggccactgtcggcatcatgattggagtgctggttggggttgctctgatatagcagccctggtgtagtttcttcatttcaggaagactgacagttgttttgcttcttccttaaagcatttgcaacagctacagtctaaaattgcttctttaccaaggatatttacagaaaagactctgaccagagatcgagaccatcctagccaacatcgtgaaaccccatctctactaaaaatacaaaaatgagctgggcttggtggcgcgcacctgtagtcccagttactcgggaggctgaggcaggagaatcgcttgaacccgggaggtggagattgcagtgagcccagatcgcaccactgcactccagtctggcaacagagcaagactccatctcaaaaagaaaagaaaagaagactctgacctgtactcttgaatacaagtttctgataccactgcactgtctgagaatttccaaaactttaatgaactaactgacagcttcatgaaactgtccaccaagatcaagcagagaaaataattaatttcatgggactaaatgaactaatgaggataatattttcataattttttatttgaaattttgctgattctttaaatgtcttgtttcccagatttcaggaaactttttttcttttaagctatccacagcttacagcaatttgataaaatatacttttgtgaacaaaaattgagacatttacattttctccctatgtggtcgctccagacttgggaaactattcatgaatatttatattgtatggtaatatagttattgcacaagttcaataaaaatctgctctttgtataacagaa

SEQ ID NO: 731952 - DNA, 3687 bp, Homo sapiens
gacaaagaacatacatatggttctgctgttaaatccgggcagctcctgcctgtcacctgaagttctagatcattccctggactccactctatctttaggggtctctggctcaagtcagtcatcatcaaacacctgggaaaaactgccccaccttgtgcctccactgcctaacgactgagctgacctccaggcttgcctctggtgtcccctgtgttatttctactgaaacatccagtcccaggccaggctgcacaatatgtacagggtttaaggacaatgggaagacccatcactatccatttctaggatgtccttgcaaagggaaaccacagaaaaaatatacctagggaaacaaagtaggactgaaggtggaagggacccagcacttgaatgttccaggtgaggaccctacagtgggccaagtagtcaactggtcagggagggaccaggagaggcaccaggagctgtgacctcccccccagtcctgtgtctgttcacagcccaatgctgctgcttaattcacacttgagaaagtctgtgcttcccccacagtgagcaggcagcctcgcagtctctgagatctcagatcatcgtgcatctgtcttgtgacacatgcacccaccgtgggtttttaagggctcaggtgggctgagaggtggaaggtgccaactctgattgaaagatgcctgtgaggaatcaaaggtgccacacagggcaatcttctctctgttatctgcacagcggagctgcccaagccctccatctccagcaacaactccaaacccgtggaggacaaggatgctgtggccttcacctgtgaacctgagactcaggacgcaacctacctgtggtgggtaaacaatcagagcctcccggtcagtcccaggctgcagctgtccaatggcaacaggaccctcactctattcaatgtcacaagaaatgacacagcaagctacaaatgtgaaacccagaacccagtgagtgccaggcgcagtgattcagtcatcctgaatgtcctctatggcccggatgcccccaccatttcccctctaaacacatcttacagatcaggggaaaatctgaacctctcctgccacgcagcctctaacccacctgcacagtactcttggtttgtcaatgggactttccagcaatccacccaagagctctttatccccaacatcactgtgaataatagtggatcctatacgtgccaagcccataactcagacactggcctcaataggaccacagtcacgacgatcacagtctatgcagagccacccaaacccttcatcaccagcaacaactccaaccccgtggaggatgaggatgctgtagccttaacctgtgaacctgagattcagaacacaacctacctgtggtgggtaaataatcagagcctcccggtcagtcccaggctgcagctgtccaatgacaacaggaccctcactctactcagtgtcacaaggaatgatgtaggaccctatgagtgtggaatccagaacgaattaagtgttgaccacagcgacccagtcatcctgaatgtcctctatggcccagacgaccccaccatttccccctcatacacctattaccgtccaggggtgaacctcagcctctcctgccatgcagcctctaacccacctgcacagtattcttggctgattgatgggaacatccagcaacacacacaagagctctttatctccaacatcactgagaagaacagcggactctatacctgccaggccaataactcagccagtggccacagcaggactacagtcaagacaatcacagtctctgcggagctgcccaagccctccatctccagcaacaactccaaacccgtggaggacaaggatgctgtggccttcacctgtgaacctgaggctcagaacacaacctacctgtggtgggtaaatggtcagagcctcccagtcagtcccaggctgcagctgtccaatggcaacaggaccctcactctattcaatgtcacaagaaatgacgcaagagcctatgtatgtggaatccagaactcagtgagtgcaaaccgcagtgacccagtcaccctggatgtcctctatgggccggacacccccatcatttcccccccagactcgtcttacctttcgggagcgaacctcaacctctcctgccactcggcctctaacccatccccgcagtattcttggcgtatcaatgggataccgcagcaacacacacaagttctctttatcgccaaaatcacgccaaataataacgggacctatgcctgttttgtctctaacttggctactggccgcaataattccatagtcaagagcatcacagtctctgcatctggaacttctcctggtctctcagctggggccactgtcggcatcatgattggagtgctggttggggttgctctgatatagcagccctggtgtagtttcttcatttcaggaagactgacagttgttttgcttcttccttaaagcatttgcaacagctacagtctaaaattgcttctttaccaaggatatttacagaaaagactctgaccagagatcgagaccatcctagccaacatcgtgaaaccccatctctactaaaaatacaaaaatgagctgggcttggtggcgcgcacctgtagtcccagttactcgggaggctgaggcaggagaatcgcttgaacccgggaggtggagattgcagtgagcccagatcgcaccactgcactccagtctggcaacagagcaagactccatctcaaaaagaaaagaaaagaagactctgacctgtactcttgaatacaagtttctgataccactgcactgtctgagaatttccaaaactttaatgaactaactgacagcttcatgaaactgtccaccaagatcaagcagagaaaataattaatttcatgggactaaatgaactaatgaggataatattttcataattttttatttgaaattttgctgattctttaaatgtcttgtttcccagatttcaggaaactttttttcttttaagctatccacagcttacagcaatttgataaaatatacttttgtgaacaaaaattgagacatttacattttctccctatgtggtcgctccagacttgggaaactattcatgaatatttatattgtatggtaatatagttattgcacaagttcaataaaaatctgctctttgtataacagaatacatttgaaaacattggttatattaccaagactttgactagaatgtcgtatttgaggatataaacccataggtaataaacccacaggtactacaaacaaagtctgaagtcagccttggtttggcttcctagtgtcaattaaacttctaaaagtttaatctgagattccttataaaaacttccagcaaagcaactttaaaaaagtctgtgtgggccgggcgcggtggctcacgcctgtaatcccagcactttgatccgccgaggcgggcggatcacgaggtcaggagatccagaccatcctggctaacacagtgaaaccccgtctctactaaaaatacaaaaaaagttagccgggcgtggtggtgggggcctgtagtcccagctactcaggaggctgaggcaggagaacggcatgaacccgggaggcagggcttgcagtgagccaagatcatgccgctgcactccagcctgggagacaaagt

SEQ ID NO: 731953 - DNA, 3205 bp, Homo sapiens
gacaaagaacatacatatggttctgctgttaaatccgggcagctcctgcctgtcacctgaagttctagatcattccctggactccactctatctttaggggtctctggctcaagtcagtcatcatcaaacacctgggaaaaactgccccaccttgtgcctccactgcctaacgactgagctgacctccaggcttgcctctggtgtcccctgtgttatttctactgaaacatccagtcccaggccaggctgcacaatatgtacagggtttaaggacaatgggaagacccatcactatccatttctaggatgtccttgcaaagggaaaccacagaaaaaatatacctagggaaacaaagtaggactgaaggtggaagggacccagcacttgaatgttccaggtgaggaccctacagtgggccaagtagtcaactggtcagggagggaccaggagaggcaccaggagctgtgacctcccccccagtcctgtgtctgttcacagcccaatgctgctgcttaattcacacttgagaaagtctgtgcttcccccacagtgagcaggcagcctcgcagtctctgagatctcagatcatcgtgcatctgtcttgtgacacatgcacccaccgtgggtttttaagggctcaggtgggctgagaggtggaaggtgccaactctgattgaaagatgcctgtgaggaatcaaaggtgccacacagggcaatcttctctctgttatctgcacagcggagctgcccaagccctccatctccagcaacaactccaaacccgtggaggacaaggatgctgtggccttcacctgtgaacctgagactcaggacgcaacctacctgtggtgggtaaacaatcagagcctcccggtcagtcccaggctgcagctgtccaatggcaacaggaccctcactctattcaatgtcacaagaaatgacacagcaagctacaaatgtgaaacccagaacccagtgagtgccaggcgcagtgattcagtcatcctgaatgtcctctatggcccggatgcccccaccatttcccctctaaacacatcttacagatcaggggaaaatctgaacctctcctgccacgcagcctctaacccacctgcacagtactcttggtttgtcaatgggactttccagcaatccacccaagagctctttatccccaacatcactgtgaataatagtggatcctatacgtgccaagcccataactcagacactggcctcaataggaccacagtcacgacgatcacagtctatgcagagccacccaaacccttcatcaccagcaacaactccaaccccgtggaggatgaggatgctgtagccttaacctgtgaacctgagattcagaacacaacctacctgtggtgggtaaataatcagagcctcccggtcagtcccaggctgcagctgtccaatgacaacaggaccctcactctactcagtgtcacaaggaatgatgtaggaccctatgagtgtggaatccagaacgaattaagtgttgaccacagcgacccagtcatcctgaatgtcctctatggcccagacgaccccaccatttccccctcatacacctattaccgtccaggggtgaacctcagcctctcctgccatgcagcctctaacccacctgcacagtattcttggctgattgatgggaacatccagcaacacacacaagagctctttatctccaacatcactgagaagaacagcggactctatacctgccaggccaataactcagccagtggccacagcaggactacagtcaagacaatcacagtctctgcggagctgcccaagccctccatctccagcaacaactccaaacccgtggaggacaaggatgctgtggccttcacctgtgaacctgaggctcagaacacaacctacctgtggtgggtaaatggtcagagcctcccagtcagtcccaggctgcagctgtccaatggcaacaggaccctcactctattcaatgtcacaagaaatgacgcaagagcctatgtatgtggaatccagaactcagtgagtgcaaaccgcagtgacccagtcaccctggatgtcctctatgggccggacacccccatcatttcccccccagactcgtcttacctttcgggagcgaacctcaacctctcctgccactcggcctctaacccatccccgcagtattcttggcgtatcaatgggataccgcagcaacacacacaagttctctttatcgccaaaatcacgccaaataataacgggacctatgcctgttttgtctctaacttggctactggccgcaataattccatagtcaagagcatcacagtctctgcatctggaacttctcctggtctctcagctggggccactgtcggcatcatgattggagtgctggttggggttgctctgatatagcagccctggtgtagtttcttcatttcaggaagactgacagttgttttgcttcttccttaaagcatttgcaacagctacagtctaaaattgcttctttaccaaggatatttacagaaaagactctgaccagagatcgagaccatcctagccaacatcgtgaaaccccatctctactaaaaatacaaaaatgagctgggcttggtggcgcgcacctgtagtcccagttactcgggaggctgaggcaggagaatcgcttgaacccgggaggtggagattgcagtgagcccagatcgcaccactgcactccagtctggcaacagagcaagactccatctcaaaaagaaaagaaaagaagactctgacctgtactcttgaatacaagtttctgataccactgcactgtctgagaatttccaaaactttaatgaactaactgacagcttcatgaaactgtccaccaagatcaagcagagaaaataattaatttcatgggactaaatgaactaatgaggataatattttcataattttttatttgaaattttgctgattctttaaatgtcttgtttcccagatttcaggaaactttttttcttttaagctatccacagcttacagcaatttgataaaatatacttttgtgaacaaaaattgagacatttacattttctccctatgtggtcgctccagacttgggaaactattcatgaatatttatattgtatggtaatatagttattgcacaagttcaataaaaatctgctctttgtataacagaa

SEQ ID NO: 731954 - DNA, 3484 bp, Homo sapiens; identical to SEQ ID NO: 358585

SEQ ID NO: 731955 - DNA, 3002 bp, Homo sapiens
ctcagggcagagggaggaaggacagcagaccagacagtcacagcagccttgacaaaacgttcctggaactcaagctcttctccacagaggaggacagagcagacagcagagaccatggagtctccctcggcccctccccacagatggtgcatcccctggcagaggctcctgctcacagcctcacttctaaccttctggaacccgcccaccactgccaagctcactattgaatccacgccgttcaatgtcgcagaggggaaggaggtgcttctacttgtccacaatctgccccagcatctttttggctacagctggtacaaaggtgaaagagtggatggcaaccgtcaaattataggatatgtaataggaactcaacaagctaccccagggcccgcatacagtggtcgagagataatataccccaatgcatccctgctgatccagaacatcatccagaatgacacaggattctacaccctacacgtcataaagtcagatcttgtgaatgaagaagcaactggccagttccgggtatacccggagctgcccaagccctccatctccagcaacaactccaaacccgtggaggacaaggatgctgtggccttcacctgtgaacctgagactcaggacgcaacctacctgtggtgggtaaacaatcagagcctcccggtcagtcccaggctgcagctgtccaatggcaacaggaccctcactctattcaatgtcacaagaaatgacacagcaagctacaaatgtgaaacccagaacccagtgagtgccaggcgcagtgattcagtcatcctgaatgtcctctatggcccggatgcccccaccatttcccctctaaacacatcttacagatcaggggaaaatctgaacctctcctgccacgcagcctctaacccacctgcacagtactcttggtttgtcaatgggactttccagcaatccacccaagagctctttatccccaacatcactgtgaataatagtggatcctatacgtgccaagcccataactcagacactggcctcaataggaccacagtcacgacgatcacagtctatgcagagccacccaaacccttcatcaccagcaacaactccaaccccgtggaggatgaggatgctgtagccttaacctgtgaacctgagattcagaacacaacctacctgtggtgggtaaataatcagagcctcccggtcagtcccaggctgcagctgtccaatgacaacaggaccctcactctactcagtgtcacaaggaatgatgtaggaccctatgagtgtggaatccagaacgaattaagtgttgaccacagcgacccagtcatcctgaatgtcctctatggcccagacgaccccaccatttccccctcatacacctattaccgtccaggggtgaacctcagcctctcctgccatgcagcctctaacccacctgcacagtattcttggctgattgatgggaacatccagcaacacacacaagagctctttatctccaacatcactgagaagaacagcggactctatacctgccaggccaataactcagccagtggccacagcaggactacagtcaagacaatcacagtctctgcggagctgcccaagccctccatctccagcaacaactccaaacccgtggaggacaaggatgctgtggccttcacctgtgaacctgaggctcagaacacaacctacctgtggtgggtaaatggtcagagcctcccagtcagtcccaggctgcagctgtccaatggcaacaggaccctcactctattcaatgtcacaagaaatgacgcaagagcctatgtatgtggaatccagaactcagtgagtgcaaaccgcagtgacccagtcaccctggatgtcctctatgggccggacacccccatcatttcccccccagactcgtcttacctttcgggagcgaacctcaacctctcctgccactcggcctctaacccatccccgcagtattcttggcgtatcaatgggataccgcagcaacacacacaagttctctttatcgccaaaatcacgccaaataataacgggacctatgcctgttttgtctctaacttggctactggccgcaataattccatagtcaagagcatcacagtctctgcatctggaacttctcctggtctctcagctggggccactgtcggcatcatgattggagtgctggttggggttgctctgatatagcagccctggtgtagtttcttcatttcaggaagactgacagttgttttgcttcttccttaaagcatttgcaacagctacagtctaaaattgcttctttaccaaggatatttacagaaaagactctgaccagagatcgagaccatcctagccaacatcgtgaaaccccatctctactaaaaatacaaaaatgagctgggcttggtggcgcgcacctgtagtcccagttactcgggaggctgaggcaggagaatcgcttgaacccgggaggtggagattgcagtgagcccagatcgcaccactgcactccagtctggcaacagagcaagactccatctcaaaaagaaaagaaaagaagactctgacctgtactcttgaatacaagtttctgataccactgcactgtctgagaatttccaaaactttaatgaactaactgacagcttcatgaaactgtccaccaagatcaagcagagaaaataattaatttcatgggactaaatgaactaatgaggataatattttcataattttttatttgaaattttgctgattctttaaatgtcttgtttcccagatttcaggaaactttttttcttttaagctatccacagcttacagcaatttgataaaatatacttttgtgaacaaaaattgagacatttacattttctccctatgtggtcgctccagacttgggaaactattcatgaatatttatattgtatggtaatatagttattgcacaagttcaataaaaatctgctctttgtataacagaa

SEQ ID NO: 731956 - DNA, 2550 bp, Homo sapiens; identical to SEQ ID NO: 358604

SEQ ID NO: 731957 - DNA, 2753 bp, Homo sapiens
gacaaagaacatacatatggttctgctgttaaatccgggcagctcctgcctgtcacctgaagttctagatcattccctggactccactctatctttaggggtctctggctcaagtcagtcatcatcaaacacctgggaaaaactgccccaccttgtgcctccactgcctaacgactgagctgacctccaggcttgcctctggtgtcccctgtgttatttctactgaaacatccagtcccaggccaggctgcacaatatgtacagggtttaaggacaatgggaagacccatcactatccatttctaggatgtccttgcaaagggaaaccacagaaaaaatatacctagggaaacaaagtaggactgaaggtggaagggacccagcacttgaatgttccaggtgaggaccctacagtgggccaagtagtcaactggtcagggagggaccaggagaggcaccaggagctgtgacctcccccccagtcctgtgtctgttcacagcccaatgctgctgcttaattcacacttgagaaagtctgtgcttcccccacagtgagcaggcagcctcgcagtctctgagatctcagatcatcgtgcatctgtcttgtgacacatgcacccaccgtgggtttttaagggctcaggtgggctgagaggtggaaggtgccaactctgattgaaagatgcctgtgaggaatcaaaggtgccacacagggcaatcttctctctgttatctgcacagcggagctgcccaagccctccatctccagcaacaactccaaacccgtggaggacaaggatgctgtggccttcacctgtgaacctgagactcaggacgcaacctacctgtggtgggtaaacaatcagagcctcccggtcagtcccaggctgcagctgtccaatggcaacaggaccctcactctattcaatgtcacaagaaatgacacagcaagctacaaatgtgaaacccagaacccagtgagtgccaggcgcagtgattcagtcatcctgaatgtcctctatggcccggatgcccccaccatttcccctctaaacacatcttacagatcaggggaaaatctgaacctctcctgccacgcagcctctaacccacctgcacagtactcttggtttgtcaatgggactttccagcaatccacccaagagctctttatccccaacatcactgtgaataatagtggatcctatacgtgccaagcccataactcagacactggcctcaataggaccacagtcacgacgatcacagtctatgcagagccacccaaacccttcatcaccagcaacaactccaaccccgtggaggatgaggatgctgtagccttaacctgtgaacctgagattcagaacacaacctacctgtggtgggtaaataatcagagcctcccggtcagtcccaggctgcagctgtccaatgacaacaggaccctcactctactcagtgtcacaaggaatgatgtaggaccctatgagtgtggaatccagaacgaattaagtgttgaccacagcgacccagtcatcctgaatgtcctctatggcccagacgaccccaccatttccccctcatacacctattaccgtccaggggtgaacctcagcctctcctgccatgcagcctctaacccacctgcacagtattcttggctgattgatgggaacatccagcaacacacacaagagctctttatctccaacatcactgagaagaacagcggactctatacctgccaggccaataactcagccagtggccacagcaggactacagtcaagacaatcacagtctctgcggagctgcccaagccctccatctccagcaacaactccaaacccgtggaggacaaggatgctgtggccttcacctgtgaacctgaggctcagaacacaacctacctgtggtgggtaaatggtcagagcctcccagtcagtcccaggctgcagctgtccaatggcaacaggaccctcactctattcaatgtcacaagaaatgacgcaagagcctatgtatgtggaatccagaactcagtgagtgcaaaccgcagtgacccagtcaccctggatgtcctctatgggccggacacccccatcatttcccccccagactcgtcttacctttcgggagcgaacctcaacctctcctgccactcggcctctaacccatccccgcagtattcttggcgtatcaatgggataccgcagcaacacacacaagttctctttatcgccaaaatcacgccaaataataacgggacctatgcctgttttgtctctaacttggctactggccgcaataattccatagtcaagagcatcacagtctctggtaagtggctccctggagcatcagcatcatattctggggtggagtctatctggttctcaccaaagagccaagaagacattttctttcccagtctgtgttccatgggcacaaggaaatcccaaattctatcctgagccccctcactccatctcggccaactctctcctccccggcttctctgatatctcacggctgacctcgggtccagcctggaatgtggggaggggcctcccttagccccagaaggcccccaatagtgaaagggacttcatagtccagaagaaagaagggtccttaaggtcgagttgctcctctctatcaccaatatgtccctttctgtcacctctttgtgttttttcacctactctgtgagctacaaggaacaaggaggctttgaaaccagcccacac

SEQ ID NO: 731958 - DNA, 852 bp, Homo sapiens; identical to SEQ ID NO: 358632

SEQ ID NO: 731959 - DNA, 3459 bp, Homo sapiens; identical to SEQ ID NO: 358601

SEQ ID NO: 731960 - DNA, 2977 bp, Homo sapiens
ctcagggcagagggaggaaggacagcagaccagacagtcacagcagccttgacaaaacgttcctggaactcaagctcttctccacagaggaggacagagcagacagcagagaccatggagtctccctcggcccctccccacagatggtgcatcccctggcagaggctcctgctcacagcctcacttctaaccttctggaacccgcccaccactgccaagctcactattgaatccacgccgttcaatgtcgcagaggggaaggaggtgcttctacttgtccacaatctgccccagcatctttttggctacagctggtacaaaggtgaaagagtggatggcaaccgtcaaattataggatatgtaataggaactcaacaagctaccccagggcccgcatacagtggtcgagagataatataccccaatgcatccctgctgatccagaacatcatccagaatgacacaggattctacaccctacacgtcataaagtcagatcttgtgaatgaagaagcaactggccagttccgggtatacccggagctgcccaagccctccatctccagcaacaactccaaacccgtggaggacaaggatgctgtggccttcacctgtgaacctgagactcaggacgcaacctacctgtggtgggtaaacaatcagagcctcccggtcagtcccaggctgcagctgtccaatggcaacaggaccctcactctattcaatgtcacaagaaatgacacagcaagctacaaatgtgaaacccagaacccagtgagtgccaggcgcagtgattcagtcatcctgaatgtcctctatggcccggatgcccccaccatttcccctctaaacacatcttacagatcaggggaaaatctgaacctctcctgccacgcagcctctaacccacctgcacagtactcttggtttgtcaatgggactttccagcaatccacccaagagctctttatccccaacatcactgtgaataatagtggatcctatacgtgccaagcccataactcagacactggcctcaataggaccacagtcacgacgatcacagtctatgcagagccacccaaacccttcatcaccagcaacaactccaaccccgtggaggatgaggatgctgtagccttaacctgtgaacctgagattcagaacacaacctacctgtggtgggtaaataatcagagcctcccggtcagtcccaggctgcagctgtccaatgacaacaggaccctcactctactcagtgtcacaaggaatgatgtaggaccctatgagtgtggaatccagaacgaattaagtgttgaccacagcatggcccagacgaccccaccatttccccctcatacacctattaccgtccaggggtgaacctcagcctctcctgccatgcagcctctaacccacctgcacagtattcttggctgattgatgggaacatccagcaacacacacaagagctctttatctccaacatcactgagaagaacagcggactctatacctgccaggccaataactcagccagtggccacagcaggactacagtcaagacaatcacagtctctgcggagctgcccaagccctccatctccagcaacaactccaaacccgtggaggacaaggatgctgtggccttcacctgtgaacctgaggctcagaacacaacctacctgtggtgggtaaatggtcagagcctcccagtcagtcccaggctgcagctgtccaatggcaacaggaccctcactctattcaatgtcacaagaaatgacgcaagagcctatgtatgtggaatccagaactcagtgagtgcaaaccgcagtgacccagtcaccctggatgtcctctatgggccggacacccccatcatttcccccccagactcgtcttacctttcgggagcgaacctcaacctctcctgccactcggcctctaacccatccccgcagtattcttggcgtatcaatgggataccgcagcaacacacacaagttctctttatcgccaaaatcacgccaaataataacgggacctatgcctgttttgtctctaacttggctactggccgcaataattccatagtcaagagcatcacagtctctgcatctggaacttctcctggtctctcagctggggccactgtcggcatcatgattggagtgctggttggggttgctctgatatagcagccctggtgtagtttcttcatttcaggaagactgacagttgttttgcttcttccttaaagcatttgcaacagctacagtctaaaattgcttctttaccaaggatatttacagaaaagactctgaccagagatcgagaccatcctagccaacatcgtgaaaccccatctctactaaaaatacaaaaatgagctgggcttggtggcgcgcacctgtagtcccagttactcgggaggctgaggcaggagaatcgcttgaacccgggaggtggagattgcagtgagcccagatcgcaccactgcactccagtctggcaacagagcaagactccatctcaaaaagaaaagaaaagaagactctgacctgtactcttgaatacaagtttctgataccactgcactgtctgagaatttccaaaactttaatgaactaactgacagcttcatgaaactgtccaccaagatcaagcagagaaaataattaatttcatgggactaaatgaactaatgaggataatattttcataattttttatttgaaattttgctgattctttaaatgtcttgtttcccagatttcaggaaactttttttcttttaagctatccacagcttacagcaatttgataaaatatacttttgtgaacaaaaattgagacatttacattttctccctatgtggtcgctccagacttgggaaactattcatgaatatttatattgtatggtaatatagttattgcacaagttcaataaaaatctgctctttgtataacagaa

SEQ ID NO: 731961 - DNA, 2525 bp, Homo sapiens
ctcagggcagagggaggaaggacagcagaccagacagtcacagcagccttgacaaaacgttcctggaactcaagctcttctccacagaggaggacagagcagacagcagagaccatggagtctccctcggcccctccccacagatggtgcatcccctggcagaggctcctgctcacagcctcacttctaaccttctggaacccgcccaccactgccaagctcactattgaatccacgccgttcaatgtcgcagaggggaaggaggtgcttctacttgtccacaatctgccccagcatctttttggctacagctggtacaaaggtgaaagagtggatggcaaccgtcaaattataggatatgtaataggaactcaacaagctaccccagggcccgcatacagtggtcgagagataatataccccaatgcatccctgctgatccagaacatcatccagaatgacacaggattctacaccctacacgtcataaagtcagatcttgtgaatgaagaagcaactggccagttccgggtatacccggagctgcccaagccctccatctccagcaacaactccaaacccgtggaggacaaggatgctgtggccttcacctgtgaacctgagactcaggacgcaacctacctgtggtgggtaaacaatcagagcctcccggtcagtcccaggctgcagctgtccaatggcaacaggaccctcactctattcaatgtcacaagaaatgacacagcaagctacaaatgtgaaacccagaacccagtgagtgccaggcgcagtgattcagtcatcctgaatgtcctctatggcccggatgcccccaccatttcccctctaaacacatcttacagatcaggggaaaatctgaacctctcctgccacgcagcctctaacccacctgcacagtactcttggtttgtcaatgggactttccagcaatccacccaagagctctttatccccaacatcactgtgaataatagtggatcctatacgtgccaagcccataactcagacactggcctcaataggaccacagtcacgacgatcacagtctatgcagagccacccaaacccttcatcaccagcaacaactccaaccccgtggaggatgaggatgctgtagccttaacctgtgaacctgagattcagaacacaacctacctgtggtgggtaaataatcagagcctcccggtcagtcccaggctgcagctgtccaatgacaacaggaccctcactctactcagtgtcacaaggaatgatgtaggaccctatgagtgtggaatccagaacgaattaagtgttgaccacagcatggcccagacgaccccaccatttccccctcatacacctattaccgtccaggggtgaacctcagcctctcctgccatgcagcctctaacccacctgcacagtattcttggctgattgatgggaacatccagcaacacacacaagagctctttatctccaacatcactgagaagaacagcggactctatacctgccaggccaataactcagccagtggccacagcaggactacagtcaagacaatcacagtctctgcggagctgcccaagccctccatctccagcaacaactccaaacccgtggaggacaaggatgctgtggccttcacctgtgaacctgaggctcagaacacaacctacctgtggtgggtaaatggtcagagcctcccagtcagtcccaggctgcagctgtccaatggcaacaggaccctcactctattcaatgtcacaagaaatgacgcaagagcctatgtatgtggaatccagaactcagtgagtgcaaaccgcagtgacccagtcaccctggatgtcctctatgggccggacacccccatcatttcccccccagactcgtcttacctttcgggagcgaacctcaacctctcctgccactcggcctctaacccatccccgcagtattcttggcgtatcaatgggataccgcagcaacacacacaagttctctttatcgccaaaatcacgccaaataataacgggacctatgcctgttttgtctctaacttggctactggccgcaataattccatagtcaagagcatcacagtctctggtaagtggctccctggagcatcagcatcatattctggggtggagtctatctggttctcaccaaagagccaagaagacattttctttcccagtctgtgttccatgggcacaaggaaatcccaaattctatcctgagccccctcactccatctcggccaactctctcctccccggcttctctgatatctcacggctgacctcgggtccagcctggaatgtggggaggggcctcccttagccccagaaggcccccaatagtgaaagggacttcatagtccagaagaaagaagggtccttaaggtcgagttgctcctctctatcaccaatatgtccctttctgtcacctctttgtgttttttcacctactctgtgagctacaaggaacaaggaggctttgaaaccagcccacac

SEQ ID NO: 731962 - DNA, 3662 bp, Homo sapiens
gacaaagaacatacatatggttctgctgttaaatccgggcagctcctgcctgtcacctgaagttctagatcattccctggactccactctatctttaggggtctctggctcaagtcagtcatcatcaaacacctgggaaaaactgccccaccttgtgcctccactgcctaacgactgagctgacctccaggcttgcctctggtgtcccctgtgttatttctactgaaacatccagtcccaggccaggctgcacaatatgtacagggtttaaggacaatgggaagacccatcactatccatttctaggatgtccttgcaaagggaaaccacagaaaaaatatacctagggaaacaaagtaggactgaaggtggaagggacccagcacttgaatgttccaggtgaggaccctacagtgggccaagtagtcaactggtcagggagggaccaggagaggcaccaggagctgtgacctcccccccagtcctgtgtctgttcacagcccaatgctgctgcttaattcacacttgagaaagtctgtgcttcccccacagtgagcaggcagcctcgcagtctctgagatctcagatcatcgtgcatctgtcttgtgacacatgcacccaccgtgggtttttaagggctcaggtgggctgagaggtggaaggtgccaactctgattgaaagatgcctgtgaggaatcaaaggtgccacacagggcaatcttctctctgttatctgcacagcggagctgcccaagccctccatctccagcaacaactccaaacccgtggaggacaaggatgctgtggccttcacctgtgaacctgagactcaggacgcaacctacctgtggtgggtaaacaatcagagcctcccggtcagtcccaggctgcagctgtccaatggcaacaggaccctcactctattcaatgtcacaagaaatgacacagcaagctacaaatgtgaaacccagaacccagtgagtgccaggcgcagtgattcagtcatcctgaatgtcctctatggcccggatgcccccaccatttcccctctaaacacatcttacagatcaggggaaaatctgaacctctcctgccacgcagcctctaacccacctgcacagtactcttggtttgtcaatgggactttccagcaatccacccaagagctctttatccccaacatcactgtgaataatagtggatcctatacgtgccaagcccataactcagacactggcctcaataggaccacagtcacgacgatcacagtctatgcagagccacccaaacccttcatcaccagcaacaactccaaccccgtggaggatgaggatgctgtagccttaacctgtgaacctgagattcagaacacaacctacctgtggtgggtaaataatcagagcctcccggtcagtcccaggctgcagctgtccaatgacaacaggaccctcactctactcagtgtcacaaggaatgatgtaggaccctatgagtgtggaatccagaacgaattaagtgttgaccacagcatggcccagacgaccccaccatttccccctcatacacctattaccgtccaggggtgaacctcagcctctcctgccatgcagcctctaacccacctgcacagtattcttggctgattgatgggaacatccagcaacacacacaagagctctttatctccaacatcactgagaagaacagcggactctatacctgccaggccaataactcagccagtggccacagcaggactacagtcaagacaatcacagtctctgcggagctgcccaagccctccatctccagcaacaactccaaacccgtggaggacaaggatgctgtggccttcacctgtgaacctgaggctcagaacacaacctacctgtggtgggtaaatggtcagagcctcccagtcagtcccaggctgcagctgtccaatggcaacaggaccctcactctattcaatgtcacaagaaatgacgcaagagcctatgtatgtggaatccagaactcagtgagtgcaaaccgcagtgacccagtcaccctggatgtcctctatgggccggacacccccatcatttcccccccagactcgtcttacctttcgggagcgaacctcaacctctcctgccactcggcctctaacccatccccgcagtattcttggcgtatcaatgggataccgcagcaacacacacaagttctctttatcgccaaaatcacgccaaataataacgggacctatgcctgttttgtctctaacttggctactggccgcaataattccatagtcaagagcatcacagtctctgcatctggaacttctcctggtctctcagctggggccactgtcggcatcatgattggagtgctggttggggttgctctgatatagcagccctggtgtagtttcttcatttcaggaagactgacagttgttttgcttcttccttaaagcatttgcaacagctacagtctaaaattgcttctttaccaaggatatttacagaaaagactctgaccagagatcgagaccatcctagccaacatcgtgaaaccccatctctactaaaaatacaaaaatgagctgggcttggtggcgcgcacctgtagtcccagttactcgggaggctgaggcaggagaatcgcttgaacccgggaggtggagattgcagtgagcccagatcgcaccactgcactccagtctggcaacagagcaagactccatctcaaaaagaaaagaaaagaagactctgacctgtactcttgaatacaagtttctgataccactgcactgtctgagaatttccaaaactttaatgaactaactgacagcttcatgaaactgtccaccaagatcaagcagagaaaataattaatttcatgggactaaatgaactaatgaggataatattttcataattttttatttgaaattttgctgattctttaaatgtcttgtttcccagatttcaggaaactttttttcttttaagctatccacagcttacagcaatttgataaaatatacttttgtgaacaaaaattgagacatttacattttctccctatgtggtcgctccagacttgggaaactattcatgaatatttatattgtatggtaatatagttattgcacaagttcaataaaaatctgctctttgtataacagaatacatttgaaaacattggttatattaccaagactttgactagaatgtcgtatttgaggatataaacccataggtaataaacccacaggtactacaaacaaagtctgaagtcagccttggtttggcttcctagtgtcaattaaacttctaaaagtttaatctgagattccttataaaaacttccagcaaagcaactttaaaaaagtctgtgtgggccgggcgcggtggctcacgcctgtaatcccagcactttgatccgccgaggcgggcggatcacgaggtcaggagatccagaccatcctggctaacacagtgaaaccccgtctctactaaaaatacaaaaaaagttagccgggcgtggtggtgggggcctgtagtcccagctactcaggaggctgaggcaggagaacggcatgaacccgggaggcagggcttgcagtgagccaagatcatgccgctgcactccagcctgggagacaaagt

SEQ ID NO: 731963 - DNA, 3180 bp, Homo sapiens
gacaaagaacatacatatggttctgctgttaaatccgggcagctcctgcctgtcacctgaagttctagatcattccctggactccactctatctttaggggtctctggctcaagtcagtcatcatcaaacacctgggaaaaactgccccaccttgtgcctccactgcctaacgactgagctgacctccaggcttgcctctggtgtcccctgtgttatttctactgaaacatccagtcccaggccaggctgcacaatatgtacagggtttaaggacaatgggaagacccatcactatccatttctaggatgtccttgcaaagggaaaccacagaaaaaatatacctagggaaacaaagtaggactgaaggtggaagggacccagcacttgaatgttccaggtgaggaccctacagtgggccaagtagtcaactggtcagggagggaccaggagaggcaccaggagctgtgacctcccccccagtcctgtgtctgttcacagcccaatgctgctgcttaattcacacttgagaaagtctgtgcttcccccacagtgagcaggcagcctcgcagtctctgagatctcagatcatcgtgcatctgtcttgtgacacatgcacccaccgtgggtttttaagggctcaggtgggctgagaggtggaaggtgccaactctgattgaaagatgcctgtgaggaatcaaaggtgccacacagggcaatcttctctctgttatctgcacagcggagctgcccaagccctccatctccagcaacaactccaaacccgtggaggacaaggatgctgtggccttcacctgtgaacctgagactcaggacgcaacctacctgtggtgggtaaacaatcagagcctcccggtcagtcccaggctgcagctgtccaatggcaacaggaccctcactctattcaatgtcacaagaaatgacacagcaagctacaaatgtgaaacccagaacccagtgagtgccaggcgcagtgattcagtcatcctgaatgtcctctatggcccggatgcccccaccatttcccctctaaacacatcttacagatcaggggaaaatctgaacctctcctgccacgcagcctctaacccacctgcacagtactcttggtttgtcaatgggactttccagcaatccacccaagagctctttatccccaacatcactgtgaataatagtggatcctatacgtgccaagcccataactcagacactggcctcaataggaccacagtcacgacgatcacagtctatgcagagccacccaaacccttcatcaccagcaacaactccaaccccgtggaggatgaggatgctgtagccttaacctgtgaacctgagattcagaacacaacctacctgtggtgggtaaataatcagagcctcccggtcagtcccaggctgcagctgtccaatgacaacaggaccctcactctactcagtgtcacaaggaatgatgtaggaccctatgagtgtggaatccagaacgaattaagtgttgaccacagcatggcccagacgaccccaccatttccccctcatacacctattaccgtccaggggtgaacctcagcctctcctgccatgcagcctctaacccacctgcacagtattcttggctgattgatgggaacatccagcaacacacacaagagctctttatctccaacatcactgagaagaacagcggactctatacctgccaggccaataactcagccagtggccacagcaggactacagtcaagacaatcacagtctctgcggagctgcccaagccctccatctccagcaacaactccaaacccgtggaggacaaggatgctgtggccttcacctgtgaacctgaggctcagaacacaacctacctgtggtgggtaaatggtcagagcctcccagtcagtcccaggctgcagctgtccaatggcaacaggaccctcactctattcaatgtcacaagaaatgacgcaagagcctatgtatgtggaatccagaactcagtgagtgcaaaccgcagtgacccagtcaccctggatgtcctctatgggccggacacccccatcatttcccccccagactcgtcttacctttcgggagcgaacctcaacctctcctgccactcggcctctaacccatccccgcagtattcttggcgtatcaatgggataccgcagcaacacacacaagttctctttatcgccaaaatcacgccaaataataacgggacctatgcctgttttgtctctaacttggctactggccgcaataattccatagtcaagagcatcacagtctctgcatctggaacttctcctggtctctcagctggggccactgtcggcatcatgattggagtgctggttggggttgctctgatatagcagccctggtgtagtttcttcatttcaggaagactgacagttgttttgcttcttccttaaagcatttgcaacagctacagtctaaaattgcttctttaccaaggatatttacagaaaagactctgaccagagatcgagaccatcctagccaacatcgtgaaaccccatctctactaaaaatacaaaaatgagctgggcttggtggcgcgcacctgtagtcccagttactcgggaggctgaggcaggagaatcgcttgaacccgggaggtggagattgcagtgagcccagatcgcaccactgcactccagtctggcaacagagcaagactccatctcaaaaagaaaagaaaagaagactctgacctgtactcttgaatacaagtttctgataccactgcactgtctgagaatttccaaaactttaatgaactaactgacagcttcatgaaactgtccaccaagatcaagcagagaaaataattaatttcatgggactaaatgaactaatgaggataatattttcataattttttatttgaaattttgctgattctttaaatgtcttgtttcccagatttcaggaaactttttttcttttaagctatccacagcttacagcaatttgataaaatatacttttgtgaacaaaaattgagacatttacattttctccctatgtggtcgctccagacttgggaaactattcatgaatatttatattgtatggtaatatagttattgcacaagttcaataaaaatctgctctttgtataacagaa

SEQ ID NO: 731964 - DNA, 2728 bp, Homo sapiens
gacaaagaacatacatatggttctgctgttaaatccgggcagctcctgcctgtcacctgaagttctagatcattccctggactccactctatctttaggggtctctggctcaagtcagtcatcatcaaacacctgggaaaaactgccccaccttgtgcctccactgcctaacgactgagctgacctccaggcttgcctctggtgtcccctgtgttatttctactgaaacatccagtcccaggccaggctgcacaatatgtacagggtttaaggacaatgggaagacccatcactatccatttctaggatgtccttgcaaagggaaaccacagaaaaaatatacctagggaaacaaagtaggactgaaggtggaagggacccagcacttgaatgttccaggtgaggaccctacagtgggccaagtagtcaactggtcagggagggaccaggagaggcaccaggagctgtgacctcccccccagtcctgtgtctgttcacagcccaatgctgctgcttaattcacacttgagaaagtctgtgcttcccccacagtgagcaggcagcctcgcagtctctgagatctcagatcatcgtgcatctgtcttgtgacacatgcacccaccgtgggtttttaagggctcaggtgggctgagaggtggaaggtgccaactctgattgaaagatgcctgtgaggaatcaaaggtgccacacagggcaatcttctctctgttatctgcacagcggagctgcccaagccctccatctccagcaacaactccaaacccgtggaggacaaggatgctgtggccttcacctgtgaacctgagactcaggacgcaacctacctgtggtgggtaaacaatcagagcctcccggtcagtcccaggctgcagctgtccaatggcaacaggaccctcactctattcaatgtcacaagaaatgacacagcaagctacaaatgtgaaacccagaacccagtgagtgccaggcgcagtgattcagtcatcctgaatgtcctctatggcccggatgcccccaccatttcccctctaaacacatcttacagatcaggggaaaatctgaacctctcctgccacgcagcctctaacccacctgcacagtactcttggtttgtcaatgggactttccagcaatccacccaagagctctttatccccaacatcactgtgaataatagtggatcctatacgtgccaagcccataactcagacactggcctcaataggaccacagtcacgacgatcacagtctatgcagagccacccaaacccttcatcaccagcaacaactccaaccccgtggaggatgaggatgctgtagccttaacctgtgaacctgagattcagaacacaacctacctgtggtgggtaaataatcagagcctcccggtcagtcccaggctgcagctgtccaatgacaacaggaccctcactctactcagtgtcacaaggaatgatgtaggaccctatgagtgtggaatccagaacgaattaagtgttgaccacagcatggcccagacgaccccaccatttccccctcatacacctattaccgtccaggggtgaacctcagcctctcctgccatgcagcctctaacccacctgcacagtattcttggctgattgatgggaacatccagcaacacacacaagagctctttatctccaacatcactgagaagaacagcggactctatacctgccaggccaataactcagccagtggccacagcaggactacagtcaagacaatcacagtctctgcggagctgcccaagccctccatctccagcaacaactccaaacccgtggaggacaaggatgctgtggccttcacctgtgaacctgaggctcagaacacaacctacctgtggtgggtaaatggtcagagcctcccagtcagtcccaggctgcagctgtccaatggcaacaggaccctcactctattcaatgtcacaagaaatgacgcaagagcctatgtatgtggaatccagaactcagtgagtgcaaaccgcagtgacccagtcaccctggatgtcctctatgggccggacacccccatcatttcccccccagactcgtcttacctttcgggagcgaacctcaacctctcctgccactcggcctctaacccatccccgcagtattcttggcgtatcaatgggataccgcagcaacacacacaagttctctttatcgccaaaatcacgccaaataataacgggacctatgcctgttttgtctctaacttggctactggccgcaataattccatagtcaagagcatcacagtctctggtaagtggctccctggagcatcagcatcatattctggggtggagtctatctggttctcaccaaagagccaagaagacattttctttcccagtctgtgttccatgggcacaaggaaatcccaaattctatcctgagccccctcactccatctcggccaactctctcctccccggcttctctgatatctcacggctgacctcgggtccagcctggaatgtggggaggggcctcccttagccccagaaggcccccaatagtgaaagggacttcatagtccagaagaaagaagggtccttaaggtcgagttgctcctctctatcaccaatatgtccctttctgtcacctctttgtgttttttcacctactctgtgagctacaaggaacaaggaggctttgaaaccagcccacac

SEQ ID NO: 731965 - DNA, 2485 bp, Homo sapiens; identical to SEQ ID NO: 358623
  misc_feature (54)..(54): n is a, c, g, or t

SEQ ID NO: 731966 - DNA, 2003 bp, Homo sapiens
  misc_feature (54)..(54): n is a, c, g, or t
aagcagtgcatcgtctcatggtatagctgttccagtgggctcagagtcttagcncagatcaccatgcaagatgcagagccacccaaacccttcatcaccagcaacaactccaaccccgtggaggatgaggatgctgtagccttaacctgtgaacctgagattcagaacacaacctacctgtggtgggtaaataatcagagcctcccggtcagtcccaggctgcagctgtccaatgacaacaggaccctcactctactcagtgtcacaaggaatgatgtaggaccctatgagtgtggaatccagaacgaattaagtgttgaccacagcgacccagtcatcctgaatgtcctctatggcccagacgaccccaccatttccccctcatacacctattaccgtccaggggtgaacctcagcctctcctgccatgcagcctctaacccacctgcacagtattcttggctgattgatgggaacatccagcaacacacacaagagctctttatctccaacatcactgagaagaacagcggactctatacctgccaggccaataactcagccagtggccacagcaggactacagtcaagacaatcacagtctctgcggagctgcccaagccctccatctccagcaacaactccaaacccgtggaggacaaggatgctgtggccttcacctgtgaacctgaggctcagaacacaacctacctgtggtgggtaaatggtcagagcctcccagtcagtcccaggctgcagctgtccaatggcaacaggaccctcactctattcaatgtcacaagaaatgacgcaagagcctatgtatgtggaatccagaactcagtgagtgcaaaccgcagtgacccagtcaccctggatgtcctctatgggccggacacccccatcatttcccccccagactcgtcttacctttcgggagcgaacctcaacctctcctgccactcggcctctaacccatccccgcagtattcttggcgtatcaatgggataccgcagcaacacacacaagttctctttatcgccaaaatcacgccaaataataacgggacctatgcctgttttgtctctaacttggctactggccgcaataattccatagtcaagagcatcacagtctctgcatctggaacttctcctggtctctcagctggggccactgtcggcatcatgattggagtgctggttggggttgctctgatatagcagccctggtgtagtttcttcatttcaggaagactgacagttgttttgcttcttccttaaagcatttgcaacagctacagtctaaaattgcttctttaccaaggatatttacagaaaagactctgaccagagatcgagaccatcctagccaacatcgtgaaaccccatctctactaaaaatacaaaaatgagctgggcttggtggcgcgcacctgtagtcccagttactcgggaggctgaggcaggagaatcgcttgaacccgggaggtggagattgcagtgagcccagatcgcaccactgcactccagtctggcaacagagcaagactccatctcaaaaagaaaagaaaagaagactctgacctgtactcttgaatacaagtttctgataccactgcactgtctgagaatttccaaaactttaatgaactaactgacagcttcatgaaactgtccaccaagatcaagcagagaaaataattaatttcatgggactaaatgaactaatgaggataatattttcataattttttatttgaaattttgctgattctttaaatgtcttgtttcccagatttcaggaaactttttttcttttaagctatccacagcttacagcaatttgataaaatatacttttgtgaacaaaaattgagacatttacattttctccctatgtggtcgctccagacttgggaaactattcatgaatatttatattgtatggtaatatagttattgcacaagttcaataaaaatctgctctttgtataacagaa

SEQ ID NO: 731967 - DNA, 1551 bp, Homo sapiens
  misc_feature (54)..(54): n is a, c, g, or t
aagcagtgcatcgtctcatggtatagctgttccagtgggctcagagtcttagcncagatcaccatgcaagatgcagagccacccaaacccttcatcaccagcaacaactccaaccccgtggaggatgaggatgctgtagccttaacctgtgaacctgagattcagaacacaacctacctgtggtgggtaaataatcagagcctcccggtcagtcccaggctgcagctgtccaatgacaacaggaccctcactctactcagtgtcacaaggaatgatgtaggaccctatgagtgtggaatccagaacgaattaagtgttgaccacagcgacccagtcatcctgaatgtcctctatggcccagacgaccccaccatttccccctcatacacctattaccgtccaggggtgaacctcagcctctcctgccatgcagcctctaacccacctgcacagtattcttggctgattgatgggaacatccagcaacacacacaagagctctttatctccaacatcactgagaagaacagcggactctatacctgccaggccaataactcagccagtggccacagcaggactacagtcaagacaatcacagtctctgcggagctgcccaagccctccatctccagcaacaactccaaacccgtggaggacaaggatgctgtggccttcacctgtgaacctgaggctcagaacacaacctacctgtggtgggtaaatggtcagagcctcccagtcagtcccaggctgcagctgtccaatggcaacaggaccctcactctattcaatgtcacaagaaatgacgcaagagcctatgtatgtggaatccagaactcagtgagtgcaaaccgcagtgacccagtcaccctggatgtcctctatgggccggacacccccatcatttcccccccagactcgtcttacctttcgggagcgaacctcaacctctcctgccactcggcctctaacccatccccgcagtattcttggcgtatcaatgggataccgcagcaacacacacaagttctctttatcgccaaaatcacgccaaataataacgggacctatgcctgttttgtctctaacttggctactggccgcaataattccatagtcaagagcatcacagtctctggtaagtggctccctggagcatcagcatcatattctggggtggagtctatctggttctcaccaaagagccaagaagacattttctttcccagtctgtgttccatgggcacaaggaaatcccaaattctatcctgagccccctcactccatctcggccaactctctcctccccggcttctctgatatctcacggctgacctcgggtccagcctggaatgtggggaggggcctcccttagccccagaaggcccccaatagtgaaagggacttcatagtccagaagaaagaagggtccttaaggtcgagttgctcctctctatcaccaatatgtccctttctgtcacctctttgtgttttttcacctactctgtgagctacaaggaacaaggaggctttgaaaccagcccacac

SEQ ID NO: 731968 - DNA, 584 bp, Homo sapiens
  misc_feature (54)..(54): n is a, c, g, or t
aagcagtgcatcgtctcatggtatagctgttccagtgggctcagagtcttagcncagatcaccatgcaagatgcagagccacccaaacccttcatcaccagcaacaactccaaccccgtggaggatgaggatgctgtagccttaacctgtgaacctgagattcagaacacaacctacctgtggtgggtaaataatcagagcctcccggtcagtcccaggctgcagctgtccaatgacaacaggaccctcactctactcagtgtcacaaggaatgatgtaggaccctatgagtgtggaatccagaacgaattaagtgttgaccacagcgacccagtcatcctgaatgtcctctatggcccagacgaccccaccatttccccctcatacacctattaccgtccaggggtgaacctcagcctctcctgccatgcagcctctaacccacctgcacagtattcttggctgattgatgggaacatccagcaacacacacaagagctctttatctccaacatcactgagaagaacagcggactctatacctgccaggccaataacttgtccaccgggcgatcctctaatca

SEQ ID NO: 731969 - DNA, 1583 bp, Homo sapiens
ctcagggcagagggaggaaggacagcagaccagacagtcacagcagccttgacaaaacgttcctggaactcaagctcttctccacagaggaggacagagcagacagcagagaccatggagtctccctcggcccctccccacagatggtgcatcccctggcagaggctcctgctcacagcctcacttctaaccttctggaacccgcccaccactgccaagctcactattgaatccacgccgttcaatgtcgcagaggggaaggaggtgcttctacttgtccacaatctgccccagcatctttttggctacagctggtacaaaggtgaaagagtggatggcaaccgtcaaattataggatatgtaataggaactcaacaagctaccccagggcccgcatacagtggtcgagagataatataccccaatgcatccctgctgatccagaacatcatccagaatgacacaggattctacaccctacacgtcataaagtcagatcttgtgaatgaagaagcaactggccagttccgggtatacccggagctgcccaagccctccatctccagcaacaactccaaacccgtggaggacaaggatgctgtggccttcacctgtgaacctgagactcaggacgcaacctacctgtggtgggtaaacaatcagagcctcccggtcagtcccaggctgcagctgtccaatggcaacaggaccctcactctattcaatgtcacaagaaatgacacagcaagctacaaatgtgaaacccagaacccagtgagtgccaggcgcagtgattcagtcatcctgaatgtcctctatggcccggatgcccccaccatttcccctctaaacacatcttacagatcaggggaaaatctgaacctctcctgccacgcagcctctaacccacctgcacagtactcttggtttgtcaatgggactttccagcaatccacccaagagctctttatccccaacatcactgtgaataatagtggatcctatacgtgccaagcccataactcagacactggcctcaataggaccacagtcacgacgatcacagtctatgcagagccacccaaacccttcatcaccagcaacaactccaaccccgtggaggatgaggatgctgtagccttaacctgtgaacctgagattcagaacacaacctacctgtggtgggtaaataatcagagcctcccggtcagtcccaggctgcagctgtccaatgacaacaggaccctcactctactcagtgtcacaaggaatgatgtaggaccctatgagtgtggaatccagaacgaattaagtgttgaccacagcgacccagtcatcctgaatgtcctctatggcccagacgaccccaccatttccccctcatacacctattaccgtccaggggtgaacctcagcctctcctgccatgcagcctctaacccacctgcacagtattcttggctgattgatgggaacatccagcaacacacacaagagctctttatctccaacatcactgagaagaacagcggactctatacctgccaggccaataacttgtccaccgggcgatcctctaatca

SEQ ID NO: 731970 - DNA, 1630 bp, Homo sapiens; identical to SEQ ID NO: 358615

SEQ ID NO: 731971 - DNA, 1148 bp, Homo sapiens
tccgtctcaaaaaaaaaaaaaaaaaaagaattgcctgtggagtttttcaacatacgtaagcctatactttgttggccctgttcattaatgggctccaccaggaaattaggaatctagttgagaaacagaagctgaatggaaaggccaccttatttgatatgttaaattatatgggaagcactgtcaaatcattagtgatgttaaaccttctctaagttatatttatgagtatgttattgatgtattccaaaagttatataagaaattctagaaatctaattggttatcagccataatgtcatatgccacagaagtaactaaatttctatgtgagttgtgttcttattataataaattatcatcagatttttaactgtactcattttaaatctttgtcattcacagacagttgttttgcttcttccttaaagcatttgcaacagctacagtctaaaattgcttctttaccaaggatatttacagaaaagactctgaccagagatcgagaccatcctagccaacatcgtgaaaccccatctctactaaaaatacaaaaatgagctgggcttggtggcgcgcacctgtagtcccagttactcgggaggctgaggcaggagaatcgcttgaacccgggaggtggagattgcagtgagcccagatcgcaccactgcactccagtctggcaacagagcaagactccatctcaaaaagaaaagaaaagaagactctgacctgtactcttgaatacaagtttctgataccactgcactgtctgagaatttccaaaactttaatgaactaactgacagcttcatgaaactgtccaccaagatcaagcagagaaaataattaatttcatgggactaaatgaactaatgaggataatattttcataattttttatttgaaattttgctgattctttaaatgtcttgtttcccagatttcaggaaactttttttcttttaagctatccacagcttacagcaatttgataaaatatacttttgtgaacaaaaattgagacatttacattttctccctatgtggtcgctccagacttgggaaactattcatgaatatttatattgtatggtaatatagttattgcacaagttcaataaaaatctgctctttgtataacagaa

SEQ ID NO: 731972 - DNA, 1407 bp, Homo sapiens; identical to SEQ ID NO: 358614

SEQ ID NO: 731973 - DNA, 925 bp, Homo sapiens
ggcccgaggggcacaggagaggtagcaaaggcccaggcttttctttggttttcttcaaacataggtgaaaaaaacactgccattcacaagtcaaggaacccagggccagctggaagtgtggagcacacatgctgtggagcacacatgctgtggagattgcagtgtgtctgaggtttgtgtagtagtggaagattttaggtatgtaaagcatttgcaacagctacagtctaaaattgcttctttaccaaggatatttacagaaaagactctgaccagagatcgagaccatcctagccaacatcgtgaaaccccatctctactaaaaatacaaaaatgagctgggcttggtggcgcgcacctgtagtcccagttactcgggaggctgaggcaggagaatcgcttgaacccgggaggtggagattgcagtgagcccagatcgcaccactgcactccagtctggcaacagagcaagactccatctcaaaaagaaaagaaaagaagactctgacctgtactcttgaatacaagtttctgataccactgcactgtctgagaatttccaaaactttaatgaactaactgacagcttcatgaaactgtccaccaagatcaagcagagaaaataattaatttcatgggactaaatgaactaatgaggataatattttcataattttttatttgaaattttgctgattctttaaatgtcttgtttcccagatttcaggaaactttttttcttttaagctatccacagcttacagcaatttgataaaatatacttttgtgaacaaaaattgagacatttacattttctccctatgtggtcgctccagacttgggaaactattcatgaatatttatattgtatggtaatatagttattgcacaagttcaataaaaatctgctctttgtataacagaa

SEQ ID NO: 731974 - DNA, 1786 bp, Homo sapiens
gacaaagaacatacatatggttctgctgttaaatccgggcagctcctgcctgtcacctgaagttctagatcattccctggactccactctatctttaggggtctctggctcaagtcagtcatcatcaaacacctgggaaaaactgccccaccttgtgcctccactgcctaacgactgagctgacctccaggcttgcctctggtgtcccctgtgttatttctactgaaacatccagtcccaggccaggctgcacaatatgtacagggtttaaggacaatgggaagacccatcactatccatttctaggatgtccttgcaaagggaaaccacagaaaaaatatacctagggaaacaaagtaggactgaaggtggaagggacccagcacttgaatgttccaggtgaggaccctacagtgggccaagtagtcaactggtcagggagggaccaggagaggcaccaggagctgtgacctcccccccagtcctgtgtctgttcacagcccaatgctgctgcttaattcacacttgagaaagtctgtgcttcccccacagtgagcaggcagcctcgcagtctctgagatctcagatcatcgtgcatctgtcttgtgacacatgcacccaccgtgggtttttaagggctcaggtgggctgagaggtggaaggtgccaactctgattgaaagatgcctgtgaggaatcaaaggtgccacacagggcaatcttctctctgttatctgcacagcggagctgcccaagccctccatctccagcaacaactccaaacccgtggaggacaaggatgctgtggccttcacctgtgaacctgagactcaggacgcaacctacctgtggtgggtaaacaatcagagcctcccggtcagtcccaggctgcagctgtccaatggcaacaggaccctcactctattcaatgtcacaagaaatgacacagcaagctacaaatgtgaaacccagaacccagtgagtgccaggcgcagtgattcagtcatcctgaatgtcctctatggcccggatgcccccaccatttcccctctaaacacatcttacagatcaggggaaaatctgaacctctcctgccacgcagcctctaacccacctgcacagtactcttggtttgtcaatgggactttccagcaatccacccaagagctctttatccccaacatcactgtgaataatagtggatcctatacgtgccaagcccataactcagacactggcctcaataggaccacagtcacgacgatcacagtctatgcagagccacccaaacccttcatcaccagcaacaactccaaccccgtggaggatgaggatgctgtagccttaacctgtgaacctgagattcagaacacaacctacctgtggtgggtaaataatcagagcctcccggtcagtcccaggctgcagctgtccaatgacaacaggaccctcactctactcagtgtcacaaggaatgatgtaggaccctatgagtgtggaatccagaacgaattaagtgttgaccacagcgacccagtcatcctgaatgtcctctatggcccagacgaccccaccatttccccctcatacacctattaccgtccaggggtgaacctcagcctctcctgccatgcagcctctaacccacctgcacagtattcttggctgattgatgggaacatccagcaacacacacaagagctctttatctccaacatcactgagaagaacagcggactctatacctgccaggccaataacttgtccaccgggcgatcctctaatca

SEQ ID NO: 731975 - DNA, 3067 bp, Homo sapiens
gtgagtatatctgctcctctctggcccaggctgccagcccaaatccacagggccagaggcaggatttctcagtccctctcaggttcaagtacacagaccctcaaccctggacatccagactgtctgtgactttctgccccagaaaaacctgggcagaccaagtcttgaccaagaataggaggggaggggctgcttctgtcctgggaggctcagggtccacaccctatgatgggagaaacaggtgaatatctcagactcaggctcagtagatacaagaggggtttggctgagactttaggattgtgattcagcttagagggacactgtggtccttccatagaccaggaacttccacttccctctgacaatatcacctgtggctttattttgtttgctccagatggcccggatgcccccaccatttcccctctaaacacatcttacagatcaggggaaaatctgaacctctcctgccacgcagcctctaacccacctgcacagtactcttggtttgtcaatgggactttccagcaatccacccaagagctctttatccccaacatcactgtgaataatagtggatcctatacgtgccaagcccataactcagacactggcctcaataggaccacagtcacgacgatcacagtctatgcagagccacccaaacccttcatcaccagcaacaactccaaccccgtggaggatgaggatgctgtagccttaacctgtgaacctgagattcagaacacaacctacctgtggtgggtaaataatcagagcctcccggtcagtcccaggctgcagctgtccaatgacaacaggaccctcactctactcagtgtcacaaggaatgatgtaggaccctatgagtgtggaatccagaacgaattaagtgttgaccacagcgacccagtcatcctgaatgtcctctatggcccagacgaccccaccatttccccctcatacacctattaccgtccaggggtgaacctcagcctctcctgccatgcagcctctaacccacctgcacagtattcttggctgattgatgggaacatccagcaacacacacaagagctctttatctccaacatcactgagaagaacagcggactctatacctgccaggccaataactcagccagtggccacagcaggactacagtcaagacaatcacagtctctgcggagctgcccaagccctccatctccagcaacaactccaaacccgtggaggacaaggatgctgtggccttcacctgtgaacctgaggctcagaacacaacctacctgtggtgggtaaatggtcagagcctcccagtcagtcccaggctgcagctgtccaatggcaacaggaccctcactctattcaatgtcacaagaaatgacgcaagagcctatgtatgtggaatccagaactcagtgagtgcaaaccgcagtgacccagtcaccctggatgtcctctatgggccggacacccccatcatttcccccccagactcgtcttacctttcgggagcgaacctcaacctctcctgccactcggcctctaacccatccccgcagtattcttggcgtatcaatgggataccgcagcaacacacacaagttctctttatcgccaaaatcacgccaaataataacgggacctatgcctgttttgtctctaacttggctactggccgcaataattccatagtcaagagcatcacagtctctgcatctggaacttctcctggtctctcagctggggccactgtcggcatcatgattggagtgctggttggggttgctctgatatagcagccctggtgtagtttcttcatttcaggaagactgacagttgttttgcttcttccttaaagcatttgcaacagctacagtctaaaattgcttctttaccaaggatatttacagaaaagactctgaccagagatcgagaccatcctagccaacatcgtgaaaccccatctctactaaaaatacaaaaatgagctgggcttggtggcgcgcacctgtagtcccagttactcgggaggctgaggcaggagaatcgcttgaacccgggaggtggagattgcagtgagcccagatcgcaccactgcactccagtctggcaacagagcaagactccatctcaaaaagaaaagaaaagaagactctgacctgtactcttgaatacaagtttctgataccactgcactgtctgagaatttccaaaactttaatgaactaactgacagcttcatgaaactgtccaccaagatcaagcagagaaaataattaatttcatgggactaaatgaactaatgaggataatattttcataattttttatttgaaattttgctgattctttaaatgtcttgtttcccagatttcaggaaactttttttcttttaagctatccacagcttacagcaatttgataaaatatacttttgtgaacaaaaattgagacatttacattttctccctatgtggtcgctccagacttgggaaactattcatgaatatttatattgtatggtaatatagttattgcacaagttcaataaaaatctgctctttgtataacagaatacatttgaaaacattggttatattaccaagactttgactagaatgtcgtatttgaggatataaacccataggtaataaacccacaggtactacaaacaaagtctgaagtcagccttggtttggcttcctagtgtcaattaaacttctaaaagtttaatctgagattccttataaaaacttccagcaaagcaactttaaaaaagtctgtgtgggccgggcgcggtggctcacgcctgtaatcccagcactttgatccgccgaggcgggcggatcacgaggtcaggagatccagaccatcctggctaacacagtgaaaccccgtctctactaaaaatacaaaaaaagttagccgggcgtggtggtgggggcctgtagtcccagctactcaggaggctgaggcaggagaacggcatgaacccgggaggcagggcttgcagtgagccaagatcatgccgctgcactccagcctgggagacaaagt

SEQ ID NO: 731976 - DNA, 2585 bp, Homo sapiens
gtgagtatatctgctcctctctggcccaggctgccagcccaaatccacagggccagaggcaggatttctcagtccctctcaggttcaagtacacagaccctcaaccctggacatccagactgtctgtgactttctgccccagaaaaacctgggcagaccaagtcttgaccaagaataggaggggaggggctgcttctgtcctgggaggctcagggtccacaccctatgatgggagaaacaggtgaatatctcagactcaggctcagtagatacaagaggggtttggctgagactttaggattgtgattcagcttagagggacactgtggtccttccatagaccaggaacttccacttccctctgacaatatcacctgtggctttattttgtttgctccagatggcccggatgcccccaccatttcccctctaaacacatcttacagatcaggggaaaatctgaacctctcctgccacgcagcctctaacccacctgcacagtactcttggtttgtcaatgggactttccagcaatccacccaagagctctttatccccaacatcactgtgaataatagtggatcctatacgtgccaagcccataactcagacactggcctcaataggaccacagtcacgacgatcacagtctatgcagagccacccaaacccttcatcaccagcaacaactccaaccccgtggaggatgaggatgctgtagccttaacctgtgaacctgagattcagaacacaacctacctgtggtgggtaaataatcagagcctcccggtcagtcccaggctgcagctgtccaatgacaacaggaccctcactctactcagtgtcacaaggaatgatgtaggaccctatgagtgtggaatccagaacgaattaagtgttgaccacagcgacccagtcatcctgaatgtcctctatggcccagacgaccccaccatttccccctcatacacctattaccgtccaggggtgaacctcagcctctcctgccatgcagcctctaacccacctgcacagtattcttggctgattgatgggaacatccagcaacacacacaagagctctttatctccaacatcactgagaagaacagcggactctatacctgccaggccaataactcagccagtggccacagcaggactacagtcaagacaatcacagtctctgcggagctgcccaagccctccatctccagcaacaactccaaacccgtggaggacaaggatgctgtggccttcacctgtgaacctgaggctcagaacacaacctacctgtggtgggtaaatggtcagagcctcccagtcagtcccaggctgcagctgtccaatggcaacaggaccctcactctattcaatgtcacaagaaatgacgcaagagcctatgtatgtggaatccagaactcagtgagtgcaaaccgcagtgacccagtcaccctggatgtcctctatgggccggacacccccatcatttcccccccagactcgtcttacctttcgggagcgaacctcaacctctcctgccactcggcctctaacccatccccgcagtattcttggcgtatcaatgggataccgcagcaacacacacaagttctctttatcgccaaaatcacgccaaataataacgggacctatgcctgttttgtctctaacttggctactggccgcaataattccatagtcaagagcatcacagtctctgcatctggaacttctcctggtctctcagctggggccactgtcggcatcatgattggagtgctggttggggttgctctgatatagcagccctggtgtagtttcttcatttcaggaagactgacagttgttttgcttcttccttaaagcatttgcaacagctacagtctaaaattgcttctttaccaaggatatttacagaaaagactctgaccagagatcgagaccatcctagccaacatcgtgaaaccccatctctactaaaaatacaaaaatgagctgggcttggtggcgcgcacctgtagtcccagttactcgggaggctgaggcaggagaatcgcttgaacccgggaggtggagattgcagtgagcccagatcgcaccactgcactccagtctggcaacagagcaagactccatctcaaaaagaaaagaaaagaagactctgacctgtactcttgaatacaagtttctgataccactgcactgtctgagaatttccaaaactttaatgaactaactgacagcttcatgaaactgtccaccaagatcaagcagagaaaataattaatttcatgggactaaatgaactaatgaggataatattttcataattttttatttgaaattttgctgattctttaaatgtcttgtttcccagatttcaggaaactttttttcttttaagctatccacagcttacagcaatttgataaaatatacttttgtgaacaaaaattgagacatttacattttctccctatgtggtcgctccagacttgggaaactattcatgaatatttatattgtatggtaatatagttattgcacaagttcaataaaaatctgctctttgtataacagaa

SEQ ID NO: 731977 - DNA, 2133 bp, Homo sapiens
gtgagtatatctgctcctctctggcccaggctgccagcccaaatccacagggccagaggcaggatttctcagtccctctcaggttcaagtacacagaccctcaaccctggacatccagactgtctgtgactttctgccccagaaaaacctgggcagaccaagtcttgaccaagaataggaggggaggggctgcttctgtcctgggaggctcagggtccacaccctatgatgggagaaacaggtgaatatctcagactcaggctcagtagatacaagaggggtttggctgagactttaggattgtgattcagcttagagggacactgtggtccttccatagaccaggaacttccacttccctctgacaatatcacctgtggctttattttgtttgctccagatggcccggatgcccccaccatttcccctctaaacacatcttacagatcaggggaaaatctgaacctctcctgccacgcagcctctaacccacctgcacagtactcttggtttgtcaatgggactttccagcaatccacccaagagctctttatccccaacatcactgtgaataatagtggatcctatacgtgccaagcccataactcagacactggcctcaataggaccacagtcacgacgatcacagtctatgcagagccacccaaacccttcatcaccagcaacaactccaaccccgtggaggatgaggatgctgtagccttaacctgtgaacctgagattcagaacacaacctacctgtggtgggtaaataatcagagcctcccggtcagtcccaggctgcagctgtccaatgacaacaggaccctcactctactcagtgtcacaaggaatgatgtaggaccctatgagtgtggaatccagaacgaattaagtgttgaccacagcgacccagtcatcctgaatgtcctctatggcccagacgaccccaccatttccccctcatacacctattaccgtccaggggtgaacctcagcctctcctgccatgcagcctctaacccacctgcacagtattcttggctgattgatgggaacatccagcaacacacacaagagctctttatctccaacatcactgagaagaacagcggactctatacctgccaggccaataactcagccagtggccacagcaggactacagtcaagacaatcacagtctctgcggagctgcccaagccctccatctccagcaacaactccaaacccgtggaggacaaggatgctgtggccttcacctgtgaacctgaggctcagaacacaacctacctgtggtgggtaaatggtcagagcctcccagtcagtcccaggctgcagctgtccaatggcaacaggaccctcactctattcaatgtcacaagaaatgacgcaagagcctatgtatgtggaatccagaactcagtgagtgcaaaccgcagtgacccagtcaccctggatgtcctctatgggccggacacccccatcatttcccccccagactcgtcttacctttcgggagcgaacctcaacctctcctgccactcggcctctaacccatccccgcagtattcttggcgtatcaatgggataccgcagcaacacacacaagttctctttatcgccaaaatcacgccaaataataacgggacctatgcctgttttgtctctaacttggctactggccgcaataattccatagtcaagagcatcacagtctctggtaagtggctccctggagcatcagcatcatattctggggtggagtctatctggttctcaccaaagagccaagaagacattttctttcccagtctgtgttccatgggcacaaggaaatcccaaattctatcctgagccccctcactccatctcggccaactctctcctccccggcttctctgatatctcacggctgacctcgggtccagcctggaatgtggggaggggcctcccttagccccagaaggcccccaatagtgaaagggacttcatagtccagaagaaagaagggtccttaaggtcgagttgctcctctctatcaccaatatgtccctttctgtcacctctttgtgttttttcacctactctgtgagctacaaggaacaaggaggctttgaaaccagcccacac

SEQ ID NO: 731978 - DNA, 1166 bp, Homo sapiens
gtgagtatatctgctcctctctggcccaggctgccagcccaaatccacagggccagaggcaggatttctcagtccctctcaggttcaagtacacagaccctcaaccctggacatccagactgtctgtgactttctgccccagaaaaacctgggcagaccaagtcttgaccaagaataggaggggaggggctgcttctgtcctgggaggctcagggtccacaccctatgatgggagaaacaggtgaatatctcagactcaggctcagtagatacaagaggggtttggctgagactttaggattgtgattcagcttagagggacactgtggtccttccatagaccaggaacttccacttccctctgacaatatcacctgtggctttattttgtttgctccagatggcccggatgcccccaccatttcccctctaaacacatcttacagatcaggggaaaatctgaacctctcctgccacgcagcctctaacccacctgcacagtactcttggtttgtcaatgggactttccagcaatccacccaagagctctttatccccaacatcactgtgaataatagtggatcctatacgtgccaagcccataactcagacactggcctcaataggaccacagtcacgacgatcacagtctatgcagagccacccaaacccttcatcaccagcaacaactccaaccccgtggaggatgaggatgctgtagccttaacctgtgaacctgagattcagaacacaacctacctgtggtgggtaaataatcagagcctcccggtcagtcccaggctgcagctgtccaatgacaacaggaccctcactctactcagtgtcacaaggaatgatgtaggaccctatgagtgtggaatccagaacgaattaagtgttgaccacagcgacccagtcatcctgaatgtcctctatggcccagacgaccccaccatttccccctcatacacctattaccgtccaggggtgaacctcagcctctcctgccatgcagcctctaacccacctgcacagtattcttggctgattgatgggaacatccagcaacacacacaagagctctttatctccaacatcactgagaagaacagcggactctatacctgccaggccaataacttgtccaccgggcgatcctctaatca

SEQ ID NO: 731979 - DNA, 3042 bp, Homo sapiens
gtgagtatatctgctcctctctggcccaggctgccagcccaaatccacagggccagaggcaggatttctcagtccctctcaggttcaagtacacagaccctcaaccctggacatccagactgtctgtgactttctgccccagaaaaacctgggcagaccaagtcttgaccaagaataggaggggaggggctgcttctgtcctgggaggctcagggtccacaccctatgatgggagaaacaggtgaatatctcagactcaggctcagtagatacaagaggggtttggctgagactttaggattgtgattcagcttagagggacactgtggtccttccatagaccaggaacttccacttccctctgacaatatcacctgtggctttattttgtttgctccagatggcccggatgcccccaccatttcccctctaaacacatcttacagatcaggggaaaatctgaacctctcctgccacgcagcctctaacccacctgcacagtactcttggtttgtcaatgggactttccagcaatccacccaagagctctttatccccaacatcactgtgaataatagtggatcctatacgtgccaagcccataactcagacactggcctcaataggaccacagtcacgacgatcacagtctatgcagagccacccaaacccttcatcaccagcaacaactccaaccccgtggaggatgaggatgctgtagccttaacctgtgaacctgagattcagaacacaacctacctgtggtgggtaaataatcagagcctcccggtcagtcccaggctgcagctgtccaatgacaacaggaccctcactctactcagtgtcacaaggaatgatgtaggaccctatgagtgtggaatccagaacgaattaagtgttgaccacagcatggcccagacgaccccaccatttccccctcatacacctattaccgtccaggggtgaacctcagcctctcctgccatgcagcctctaacccacctgcacagtattcttggctgattgatgggaacatccagcaacacacacaagagctctttatctccaacatcactgagaagaacagcggactctatacctgccaggccaataactcagccagtggccacagcaggactacagtcaagacaatcacagtctctgcggagctgcccaagccctccatctccagcaacaactccaaacccgtggaggacaaggatgctgtggccttcacctgtgaacctgaggctcagaacacaacctacctgtggtgggtaaatggtcagagcctcccagtcagtcccaggctgcagctgtccaatggcaacaggaccctcactctattcaatgtcacaagaaatgacgcaagagcctatgtatgtggaatccagaactcagtgagtgcaaaccgcagtgacccagtcaccctggatgtcctctatgggccggacacccccatcatttcccccccagactcgtcttacctttcgggagcgaacctcaacctctcctgccactcggcctctaacccatccccgcagtattcttggcgtatcaatgggataccgcagcaacacacacaagttctctttatcgccaaaatcacgccaaataataacgggacctatgcctgttttgtctctaacttggctactggccgcaataattccatagtcaagagcatcacagtctctgcatctggaacttctcctggtctctcagctggggccactgtcggcatcatgattggagtgctggttggggttgctctgatatagcagccctggtgtagtttcttcatttcaggaagactgacagttgttttgcttcttccttaaagcatttgcaacagctacagtctaaaattgcttctttaccaaggatatttacagaaaagactctgaccagagatcgagaccatcctagccaacatcgtgaaaccccatctctactaaaaatacaaaaatgagctgggcttggtggcgcgcacctgtagtcccagttactcgggaggctgaggcaggagaatcgcttgaacccgggaggtggagattgcagtgagcccagatcgcaccactgcactccagtctggcaacagagcaagactccatctcaaaaagaaaagaaaagaagactctgacctgtactcttgaatacaagtttctgataccactgcactgtctgagaatttccaaaactttaatgaactaactgacagcttcatgaaactgtccaccaagatcaagcagagaaaataattaatttcatgggactaaatgaactaatgaggataatattttcataattttttatttgaaattttgctgattctttaaatgtcttgtttcccagatttcaggaaactttttttcttttaagctatccacagcttacagcaatttgataaaatatacttttgtgaacaaaaattgagacatttacattttctccctatgtggtcgctccagacttgggaaactattcatgaatatttatattgtatggtaatatagttattgcacaagttcaataaaaatctgctctttgtataacagaatacatttgaaaacattggttatattaccaagactttgactagaatgtcgtatttgaggatataaacccataggtaataaacccacaggtactacaaacaaagtctgaagtcagccttggtttggcttcctagtgtcaattaaacttctaaaagtttaatctgagattccttataaaaacttccagcaaagcaactttaaaaaagtctgtgtgggccgggcgcggtggctcacgcctgtaatcccagcactttgatccgccgaggcgggcggatcacgaggtcaggagatccagaccatcctggctaacacagtgaaaccccgtctctactaaaaatacaaaaaaagttagccgggcgtggtggtgggggcctgtagtcccagctactcaggaggctgaggcaggagaacggcatgaacccgggaggcagggcttgcagtgagccaagatcatgccgctgcactccagcctgggagacaaagt

SEQ ID NO: 731980 - DNA, 2560 bp, Homo sapiens
gtgagtatatctgctcctctctggcccaggctgccagcccaaatccacagggccagaggcaggatttctcagtccctctcaggttcaagtacacagaccctcaaccctggacatccagactgtctgtgactttctgccccagaaaaacctgggcagaccaagtcttgaccaagaataggaggggaggggctgcttctgtcctgggaggctcagggtccacaccctatgatgggagaaacaggtgaatatctcagactcaggctcagtagatacaagaggggtttggctgagactttaggattgtgattcagcttagagggacactgtggtccttccatagaccaggaacttccacttccctctgacaatatcacctgtggctttattttgtttgctccagatggcccggatgcccccaccatttcccctctaaacacatcttacagatcaggggaaaatctgaacctctcctgccacgcagcctctaacccacctgcacagtactcttggtttgtcaatgggactttccagcaatccacccaagagctctttatccccaacatcactgtgaataatagtggatcctatacgtgccaagcccataactcagacactggcctcaataggaccacagtcacgacgatcacagtctatgcagagccacccaaacccttcatcaccagcaacaactccaaccccgtggaggatgaggatgctgtagccttaacctgtgaacctgagattcagaacacaacctacctgtggtgggtaaataatcagagcctcccggtcagtcccaggctgcagctgtccaatgacaacaggaccctcactctactcagtgtcacaaggaatgatgtaggaccctatgagtgtggaatccagaacgaattaagtgttgaccacagcatggcccagacgaccccaccatttccccctcatacacctattaccgtccaggggtgaacctcagcctctcctgccatgcagcctctaacccacctgcacagtattcttggctgattgatgggaacatccagcaacacacacaagagctctttatctccaacatcactgagaagaacagcggactctatacctgccaggccaataactcagccagtggccacagcaggactacagtcaagacaatcacagtctctgcggagctgcccaagccctccatctccagcaacaactccaaacccgtggaggacaaggatgctgtggccttcacctgtgaacctgaggctcagaacacaacctacctgtggtgggtaaatggtcagagcctcccagtcagtcccaggctgcagctgtccaatggcaacaggaccctcactctattcaatgtcacaagaaatgacgcaagagcctatgtatgtggaatccagaactcagtgagtgcaaaccgcagtgacccagtcaccctggatgtcctctatgggccggacacccccatcatttcccccccagactcgtcttacctttcgggagcgaacctcaacctctcctgccactcggcctctaacccatccccgcagtattcttggcgtatcaatgggataccgcagcaacacacacaagttctctttatcgccaaaatcacgccaaataataacgggacctatgcctgttttgtctctaacttggctactggccgcaataattccatagtcaagagcatcacagtctctgcatctggaacttctcctggtctctcagctggggccactgtcggcatcatgattggagtgctggttggggttgctctgatatagcagccctggtgtagtttcttcatttcaggaagactgacagttgttttgcttcttccttaaagcatttgcaacagctacagtctaaaattgcttctttaccaaggatatttacagaaaagactctgaccagagatcgagaccatcctagccaacatcgtgaaaccccatctctactaaaaatacaaaaatgagctgggcttggtggcgcgcacctgtagtcccagttactcgggaggctgaggcaggagaatcgcttgaacccgggaggtggagattgcagtgagcccagatcgcaccactgcactccagtctggcaacagagcaagactccatctcaaaaagaaaagaaaagaagactctgacctgtactcttgaatacaagtttctgataccactgcactgtctgagaatttccaaaactttaatgaactaactgacagcttcatgaaactgtccaccaagatcaagcagagaaaataattaatttcatgggactaaatgaactaatgaggataatattttcataattttttatttgaaattttgctgattctttaaatgtcttgtttcccagatttcaggaaactttttttcttttaagctatccacagcttacagcaatttgataaaatatacttttgtgaacaaaaattgagacatttacattttctccctatgtggtcgctccagacttgggaaactattcatgaatatttatattgtatggtaatatagttattgcacaagttcaataaaaatctgctctttgtataacagaa

SEQ ID NO: 731981 - DNA, 2108 bp, Homo sapiens
gtgagtatatctgctcctctctggcccaggctgccagcccaaatccacagggccagaggcaggatttctcagtccctctcaggttcaagtacacagaccctcaaccctggacatccagactgtctgtgactttctgccccagaaaaacctgggcagaccaagtcttgaccaagaataggaggggaggggctgcttctgtcctgggaggctcagggtccacaccctatgatgggagaaacaggtgaatatctcagactcaggctcagtagatacaagaggggtttggctgagactttaggattgtgattcagcttagagggacactgtggtccttccatagaccaggaacttccacttccctctgacaatatcacctgtggctttattttgtttgctccagatggcccggatgcccccaccatttcccctctaaacacatcttacagatcaggggaaaatctgaacctctcctgccacgcagcctctaacccacctgcacagtactcttggtttgtcaatgggactttccagcaatccacccaagagctctttatccccaacatcactgtgaataatagtggatcctatacgtgccaagcccataactcagacactggcctcaataggaccacagtcacgacgatcacagtctatgcagagccacccaaacccttcatcaccagcaacaactccaaccccgtggaggatgaggatgctgtagccttaacctgtgaacctgagattcagaacacaacctacctgtggtgggtaaataatcagagcctcccggtcagtcccaggctgcagctgtccaatgacaacaggaccctcactctactcagtgtcacaaggaatgatgtaggaccctatgagtgtggaatccagaacgaattaagtgttgaccacagcatggcccagacgaccccaccatttccccctcatacacctattaccgtccaggggtgaacctcagcctctcctgccatgcagcctctaacccacctgcacagtattcttggctgattgatgggaacatccagcaacacacacaagagctctttatctccaacatcactgagaagaacagcggactctatacctgccaggccaataactcagccagtggccacagcaggactacagtcaagacaatcacagtctctgcggagctgcccaagccctccatctccagcaacaactccaaacccgtggaggacaaggatgctgtggccttcacctgtgaacctgaggctcagaacacaacctacctgtggtgggtaaatggtcagagcctcccagtcagtcccaggctgcagctgtccaatggcaacaggaccctcactctattcaatgtcacaagaaatgacgcaagagcctatgtatgtggaatccagaactcagtgagtgcaaaccgcagtgacccagtcaccctggatgtcctctatgggccggacacccccatcatttcccccccagactcgtcttacctttcgggagcgaacctcaacctctcctgccactcggcctctaacccatccccgcagtattcttggcgtatcaatgggataccgcagcaacacacacaagttctctttatcgccaaaatcacgccaaataataacgggacctatgcctgttttgtctctaacttggctactggccgcaataattccatagtcaagagcatcacagtctctggtaagtggctccctggagcatcagcatcatattctggggtggagtctatctggttctcaccaaagagccaagaagacattttctttcccagtctgtgttccatgggcacaaggaaatcccaaattctatcctgagccccctcactccatctcggccaactctctcctccccggcttctctgatatctcacggctgacctcgggtccagcctggaatgtggggaggggcctcccttagccccagaaggcccccaatagtgaaagggacttcatagtccagaagaaagaagggtccttaaggtcgagttgctcctctctatcaccaatatgtccctttctgtcacctctttgtgttttttcacctactctgtgagctacaaggaacaaggaggctttgaaaccagcccacac

SEQ ID NO: 731982 - DNA, 1845 bp, Homo sapiens
  misc_feature (191)..(191): n is a, c, g, or t
gaatgataggtgcagtgagattcactcaattgagctgatcgattttataaacgtcgtcgaccttgagtcagaactctggcgtctgatcagagacaggccacccaatcacagcaggtgcttggaggggagtggaatctcagtagagttgatgactcaccaagtgcaaatgggaaaaagcaacacagtcacanttccatgtatacccggcagagccacccaaacccttcatcaccagcaacaactccaaccccgtggaggatgaggatgctgtagccttaacctgtgaacctgagattcagaacacaacctacctgtggtgggtaaataatcagagcctcccggtcagtcccaggctgcagctgtccaatgacaacaggaccctcactctactcagtgtcacaaggaatgatgtaggaccctatgagtgtggaatccagaacgaattaagtgttgaccacagcgacccagtcatcctgaatgtcctctatggcccagacgaccccaccatttccccctcatacacctattaccgtccaggggtgaacctcagcctctcctgccatgcagcctctaacccacctgcacagtattcttggctgattgatgggaacatccagcaacacacacaagagctctttatctccaacatcactgagaagaacagcggactctatacctgccaggccaataactcagccagtggccacagcaggactacagtcaagacaatcacagtctctgtgaaaccccatctctactaaaaatacaaaaatgagctgggcttggtggcgcgcacctgtagtcccagttactcgggaggctgaggcaggagaatcgcttgaacccgggaggtggagattgcagtgagcccagatcgcaccactgcactccagtctggcaacagagcaagactccatctcaaaaagaaaagaaaagaagactctgacctgtactcttgaatacaagtttctgataccactgcactgtctgagaatttccaaaactttaatgaactaactgacagcttcatgaaactgtccaccaagatcaagcagagaaaataattaatttcatgggactaaatgaactaatgaggataatattttcataattttttatttgaaattttgctgattctttaaatgtcttgtttcccagatttcaggaaactttttttcttttaagctatccacagcttacagcaatttgataaaatatacttttgtgaacaaaaattgagacatttacattttctccctatgtggtcgctccagacttgggaaactattcatgaatatttatattgtatggtaatatagttattgcacaagttcaataaaaatctgctctttgtataacagaatacatttgaaaacattggttatattaccaagactttgactagaatgtcgtatttgaggatataaacccataggtaataaacccacaggtactacaaacaaagtctgaagtcagccttggtttggcttcctagtgtcaattaaacttctaaaagtttaatctgagattccttataaaaacttccagcaaagcaactttaaaaaagtctgtgtgggccgggcgcggtggctcacgcctgtaatcccagcactttgatccgccgaggcgggcggatcacgaggtcaggagatccagaccatcctggctaacacagtgaaaccccgtctctactaaaaatacaaaaaaagttagccgggcgtggtggtgggggcctgtagtcccagctactcaggaggctgaggcaggagaacggcatgaacccgggaggcagggcttgcagtgagccaagatcatgccgctgcactccagcctgggagacaaagt

SEQ ID NO: 731983 - DNA, 1363 bp, Homo sapiens
  misc_feature (191)..(191): n is a, c, g, or t
gaatgataggtgcagtgagattcactcaattgagctgatcgattttataaacgtcgtcgaccttgagtcagaactctggcgtctgatcagagacaggccacccaatcacagcaggtgcttggaggggagtggaatctcagtagagttgatgactcaccaagtgcaaatgggaaaaagcaacacagtcacanttccatgtatacccggcagagccacccaaacccttcatcaccagcaacaactccaaccccgtggaggatgaggatgctgtagccttaacctgtgaacctgagattcagaacacaacctacctgtggtgggtaaataatcagagcctcccggtcagtcccaggctgcagctgtccaatgacaacaggaccctcactctactcagtgtcacaaggaatgatgtaggaccctatgagtgtggaatccagaacgaattaagtgttgaccacagcgacccagtcatcctgaatgtcctctatggcccagacgaccccaccatttccccctcatacacctattaccgtccaggggtgaacctcagcctctcctgccatgcagcctctaacccacctgcacagtattcttggctgattgatgggaacatccagcaacacacacaagagctctttatctccaacatcactgagaagaacagcggactctatacctgccaggccaataactcagccagtggccacagcaggactacagtcaagacaatcacagtctctgtgaaaccccatctctactaaaaatacaaaaatgagctgggcttggtggcgcgcacctgtagtcccagttactcgggaggctgaggcaggagaatcgcttgaacccgggaggtggagattgcagtgagcccagatcgcaccactgcactccagtctggcaacagagcaagactccatctcaaaaagaaaagaaaagaagactctgacctgtactcttgaatacaagtttctgataccactgcactgtctgagaatttccaaaactttaatgaactaactgacagcttcatgaaactgtccaccaagatcaagcagagaaaataattaatttcatgggactaaatgaactaatgaggataatattttcataattttttatttgaaattttgctgattctttaaatgtcttgtttcccagatttcaggaaactttttttcttttaagctatccacagcttacagcaatttgataaaatatacttttgtgaacaaaaattgagacatttacattttctccctatgtggtcgctccagacttgggaaactattcatgaatatttatattgtatggtaatatagttattgcacaagttcaataaaaatctgctctttgtataacagaa

SEQ ID NO: 731984 - DNA, 2619 bp, Homo sapiens
  misc_feature (191)..(191): n is a, c, g, or t
gaatgataggtgcagtgagattcactcaattgagctgatcgattttataaacgtcgtcgaccttgagtcagaactctggcgtctgatcagagacaggccacccaatcacagcaggtgcttggaggggagtggaatctcagtagagttgatgactcaccaagtgcaaatgggaaaaagcaacacagtcacanttccatgtatacccggcagagccacccaaacccttcatcaccagcaacaactccaaccccgtggaggatgaggatgctgtagccttaacctgtgaacctgagattcagaacacaacctacctgtggtgggtaaataatcagagcctcccggtcagtcccaggctgcagctgtccaatgacaacaggaccctcactctactcagtgtcacaaggaatgatgtaggaccctatgagtgtggaatccagaacgaattaagtgttgaccacagcgacccagtcatcctgaatgtcctctatggcccagacgaccccaccatttccccctcatacacctattaccgtccaggggtgaacctcagcctctcctgccatgcagcctctaacccacctgcacagtattcttggctgattgatgggaacatccagcaacacacacaagagctctttatctccaacatcactgagaagaacagcggactctatacctgccaggccaataactcagccagtggccacagcaggactacagtcaagacaatcacagtctctgcggagctgcccaagccctccatctccagcaacaactccaaacccgtggaggacaaggatgctgtggccttcacctgtgaacctgaggctcagaacacaacctacctgtggtgggtaaatggtcagagcctcccagtcagtcccaggctgcagctgtccaatggcaacaggaccctcactctattcaatgtcacaagaaatgacgcaagagcctatgtatgtggaatccagaactcagtgagtgcaaaccgcagtgacccagtcaccctggatgtcctctatgggccggacacccccatcatttcccccccagactcgtcttacctttcgggagcgaacctcaacctctcctgccactcggcctctaacccatccccgcagtattcttggcgtatcaatgggataccgcagcaacacacacaagttctctttatcgccaaaatcacgccaaataataacgggacctatgcctgttttgtctctaacttggctactggccgcaataattccatagtcaagagcatcacagtctctgcatctggaacttctcctggtctctcagctggggccactgtcggcatcatgattggagtgctggttggggttgctctgatatagcagccctggtgtagtttcttcatttcaggaagactgacagttgttttgcttcttccttaaagcatttgcaacagctacagtctaaaattgcttctttaccaaggatatttacagaaaagactctgaccagagatcgagaccatcctagccaacatcgtgaaaccccatctctactaaaaatacaaaaatgagctgggcttggtggcgcgcacctgtagtcccagttactcgggaggctgaggcaggagaatcgcttgaacccgggaggtggagattgcagtgagcccagatcgcaccactgcactccagtctggcaacagagcaagactccatctcaaaaagaaaagaaaagaagactctgacctgtactcttgaatacaagtttctgataccactgcactgtctgagaatttccaaaactttaatgaactaactgacagcttcatgaaactgtccaccaagatcaagcagagaaaataattaatttcatgggactaaatgaactaatgaggataatattttcataattttttatttgaaattttgctgattctttaaatgtcttgtttcccagatttcaggaaactttttttcttttaagctatccacagcttacagcaatttgataaaatatacttttgtgaacaaaaattgagacatttacattttctccctatgtggtcgctccagacttgggaaactattcatgaatatttatattgtatggtaatatagttattgcacaagttcaataaaaatctgctctttgtataacagaatacatttgaaaacattggttatattaccaagactttgactagaatgtcgtatttgaggatataaacccataggtaataaacccacaggtactacaaacaaagtctgaagtcagccttggtttggcttcctagtgtcaattaaacttctaaaagtttaatctgagattccttataaaaacttccagcaaagcaactttaaaaaagtctgtgtgggccgggcgcggtggctcacgcctgtaatcccagcactttgatccgccgaggcgggcggatcacgaggtcaggagatccagaccatcctggctaacacagtgaaaccccgtctctactaaaaatacaaaaaaagttagccgggcgtggtggtgggggcctgtagtcccagctactcaggaggctgaggcaggagaacggcatgaacccgggaggcagggcttgcagtgagccaagatcatgccgctgcactccagcctgggagacaaagt

SEQ ID NO: 731985 - DNA, 2137 bp, Homo sapiens
  misc_feature (191)..(191): n is a, c, g, or t
gaatgataggtgcagtgagattcactcaattgagctgatcgattttataaacgtcgtcgaccttgagtcagaactctggcgtctgatcagagacaggccacccaatcacagcaggtgcttggaggggagtggaatctcagtagagttgatgactcaccaagtgcaaatgggaaaaagcaacacagtcacanttccatgtatacccggcagagccacccaaacccttcatcaccagcaacaactccaaccccgtggaggatgaggatgctgtagccttaacctgtgaacctgagattcagaacacaacctacctgtggtgggtaaataatcagagcctcccggtcagtcccaggctgcagctgtccaatgacaacaggaccctcactctactcagtgtcacaaggaatgatgtaggaccctatgagtgtggaatccagaacgaattaagtgttgaccacagcgacccagtcatcctgaatgtcctctatggcccagacgaccccaccatttccccctcatacacctattaccgtccaggggtgaacctcagcctctcctgccatgcagcctctaacccacctgcacagtattcttggctgattgatgggaacatccagcaacacacacaagagctctttatctccaacatcactgagaagaacagcggactctatacctgccaggccaataactcagccagtggccacagcaggactacagtcaagacaatcacagtctctgcggagctgcccaagccctccatctccagcaacaactccaaacccgtggaggacaaggatgctgtggccttcacctgtgaacctgaggctcagaacacaacctacctgtggtgggtaaatggtcagagcctcccagtcagtcccaggctgcagctgtccaatggcaacaggaccctcactctattcaatgtcacaagaaatgacgcaagagcctatgtatgtggaatccagaactcagtgagtgcaaaccgcagtgacccagtcaccctggatgtcctctatgggccggacacccccatcatttcccccccagactcgtcttacctttcgggagcgaacctcaacctctcctgccactcggcctctaacccatccccgcagtattcttggcgtatcaatgggataccgcagcaacacacacaagttctctttatcgccaaaatcacgccaaataataacgggacctatgcctgttttgtctctaacttggctactggccgcaataattccatagtcaagagcatcacagtctctgcatctggaacttctcctggtctctcagctggggccactgtcggcatcatgattggagtgctggttggggttgctctgatatagcagccctggtgtagtttcttcatttcaggaagactgacagttgttttgcttcttccttaaagcatttgcaacagctacagtctaaaattgcttctttaccaaggatatttacagaaaagactctgaccagagatcgagaccatcctagccaacatcgtgaaaccccatctctactaaaaatacaaaaatgagctgggcttggtggcgcgcacctgtagtcccagttactcgggaggctgaggcaggagaatcgcttgaacccgggaggtggagattgcagtgagcccagatcgcaccactgcactccagtctggcaacagagcaagactccatctcaaaaagaaaagaaaagaagactctgacctgtactcttgaatacaagtttctgataccactgcactgtctgagaatttccaaaactttaatgaactaactgacagcttcatgaaactgtccaccaagatcaagcagagaaaataattaatttcatgggactaaatgaactaatgaggataatattttcataattttttatttgaaattttgctgattctttaaatgtcttgtttcccagatttcaggaaactttttttcttttaagctatccacagcttacagcaatttgataaaatatacttttgtgaacaaaaattgagacatttacattttctccctatgtggtcgctccagacttgggaaactattcatgaatatttatattgtatggtaatatagttattgcacaagttcaataaaaatctgctctttgtataacagaa

SEQ ID NO: 731986 - DNA, 1685 bp, Homo sapiens
  misc_feature (191)..(191): n is a, c, g, or t
gaatgataggtgcagtgagattcactcaattgagctgatcgattttataaacgtcgtcgaccttgagtcagaactctggcgtctgatcagagacaggccacccaatcacagcaggtgcttggaggggagtggaatctcagtagagttgatgactcaccaagtgcaaatgggaaaaagcaacacagtcacanttccatgtatacccggcagagccacccaaacccttcatcaccagcaacaactccaaccccgtggaggatgaggatgctgtagccttaacctgtgaacctgagattcagaacacaacctacctgtggtgggtaaataatcagagcctcccggtcagtcccaggctgcagctgtccaatgacaacaggaccctcactctactcagtgtcacaaggaatgatgtaggaccctatgagtgtggaatccagaacgaattaagtgttgaccacagcgacccagtcatcctgaatgtcctctatggcccagacgaccccaccatttccccctcatacacctattaccgtccaggggtgaacctcagcctctcctgccatgcagcctctaacccacctgcacagtattcttggctgattgatgggaacatccagcaacacacacaagagctctttatctccaacatcactgagaagaacagcggactctatacctgccaggccaataactcagccagtggccacagcaggactacagtcaagacaatcacagtctctgcggagctgcccaagccctccatctccagcaacaactccaaacccgtggaggacaaggatgctgtggccttcacctgtgaacctgaggctcagaacacaacctacctgtggtgggtaaatggtcagagcctcccagtcagtcccaggctgcagctgtccaatggcaacaggaccctcactctattcaatgtcacaagaaatgacgcaagagcctatgtatgtggaatccagaactcagtgagtgcaaaccgcagtgacccagtcaccctggatgtcctctatgggccggacacccccatcatttcccccccagactcgtcttacctttcgggagcgaacctcaacctctcctgccactcggcctctaacccatccccgcagtattcttggcgtatcaatgggataccgcagcaacacacacaagttctctttatcgccaaaatcacgccaaataataacgggacctatgcctgttttgtctctaacttggctactggccgcaataattccatagtcaagagcatcacagtctctggtaagtggctccctggagcatcagcatcatattctggggtggagtctatctggttctcaccaaagagccaagaagacattttctttcccagtctgtgttccatgggcacaaggaaatcccaaattctatcctgagccccctcactccatctcggccaactctctcctccccggcttctctgatatctcacggctgacctcgggtccagcctggaatgtggggaggggcctcccttagccccagaaggcccccaatagtgaaagggacttcatagtccagaagaaagaagggtccttaaggtcgagttgctcctctctatcaccaatatgtccctttctgtcacctctttgtgttttttcacctactctgtgagctacaaggaacaaggaggctttgaaaccagcccacac

SEQ ID NO: 731987 - DNA, 1248 bp, Homo sapiens
  misc_feature (191)..(191): n is a, c, g, or t
  misc_feature (1181)..(1181): n is a, c, g, or t
  misc_feature (1203)..(1203): n is a, c, g, or t
  misc_feature (1213)..(1213): n is a, c, g, or t
gaatgataggtgcagtgagattcactcaattgagctgatcgattttataaacgtcgtcgaccttgagtcagaactctggcgtctgatcagagacaggccacccaatcacagcaggtgcttggaggggagtggaatctcagtagagttgatgactcaccaagtgcaaatgggaaaaagcaacacagtcacanttccatgtatacccggcagagccacccaaacccttcatcaccagcaacaactccaaccccgtggaggatgaggatgctgtagccttaacctgtgaacctgagattcagaacacaacctacctgtggtgggtaaataatcagagcctcccggtcagtcccaggctgcagctgtccaatgacaacaggaccctcactctactcagtgtcacaaggaatgatgtaggaccctatgagtgtggaatccagaacgaattaagtgttgaccacagcgacccagtcatcctgaatgtcctctatggcccagacgaccccaccatttccccctcatacacctattaccgtccaggggtgaacctcagcctctcctgccatgcagcctctaacccacctgcacagtattcttggctgattgatgggaacatccagcaacacacacaagagctctttatctccaacatcactgagaagaacagcggactctatacctgccaggccaataactcagccagtggccacagcaggactacagtcaagacaatcacagtctctgcggagctgcccaagccctccatctccagcaacaactccaaacccgtggaggacaaggatgctgtggccttcacctgtgaacctgaggctcagaacacaacctacctgtggtgggtaaatggtcagagcctcccagtcagtcccaggctgcagctgtccaatggcaacaggaccctcactctattcaatgtcacaagaaatgacgcaagagcctatgtatgtggaatccagaactcagtgagtgcaaaccgcagtgacccagtcaccctggatgtcctctatgggccggacacccccatcatttcccccccagactcgtcttacctgatgggagcaagactgatcttctcccatcagcattttgtaaatcaatgtgaaatttgcaaacaagctaagatacattttcttgaaaattgtcctaatttttgattgtatagtttngtcttctgtgattctatctgtncaggcatatnagcataaatttttcatatcgatcacaacatatcac

SEQ ID NO: 731988 - DNA, 718 bp, Homo sapiens
  misc_feature (191)..(191): n is a, c, g, or t
gaatgataggtgcagtgagattcactcaattgagctgatcgattttataaacgtcgtcgaccttgagtcagaactctggcgtctgatcagagacaggccacccaatcacagcaggtgcttggaggggagtggaatctcagtagagttgatgactcaccaagtgcaaatgggaaaaagcaacacagtcacanttccatgtatacccggcagagccacccaaacccttcatcaccagcaacaactccaaccccgtggaggatgaggatgctgtagccttaacctgtgaacctgagattcagaacacaacctacctgtggtgggtaaataatcagagcctcccggtcagtcccaggctgcagctgtccaatgacaacaggaccctcactctactcagtgtcacaaggaatgatgtaggaccctatgagtgtggaatccagaacgaattaagtgttgaccacagcgacccagtcatcctgaatgtcctctatggcccagacgaccccaccatttccccctcatacacctattaccgtccaggggtgaacctcagcctctcctgccatgcagcctctaacccacctgcacagtattcttggctgattgatgggaacatccagcaacacacacaagagctctttatctccaacatcactgagaagaacagcggactctatacctgccaggccaataacttgtccaccgggcgatcctctaatca

SEQ ID NO: 731989 - DNA, 1678 bp, Homo sapiens
  misc_feature (31)..(31): n is a, c, g, or t
  misc_feature (34)..(34): n is a, c, g, or t
ttagaggatcccattggaccaggcagacgancantctatgcagagccacccaaacccttcatcaccagcaacaactccaaccccgtggaggatgaggatgctgtagccttaacctgtgaacctgagattcagaacacaacctacctgtggtgggtaaataatcagagcctcccggtcagtcccaggctgcagctgtccaatgacaacaggaccctcactctactcagtgtcacaaggaatgatgtaggaccctatgagtgtggaatccagaacgaattaagtgttgaccacagcgacccagtcatcctgaatgtcctctatggcccagacgaccccaccatttccccctcatacacctattaccgtccaggggtgaacctcagcctctcctgccatgcagcctctaacccacctgcacagtattcttggctgattgatgggaacatccagcaacacacacaagagctctttatctccaacatcactgagaagaacagcggactctatacctgccaggccaataactcagccagtggccacagcaggactacagtcaagacaatcacagtctctgtgaaaccccatctctactaaaaatacaaaaatgagctgggcttggtggcgcgcacctgtagtcccagttactcgggaggctgaggcaggagaatcgcttgaacccgggaggtggagattgcagtgagcccagatcgcaccactgcactccagtctggcaacagagcaagactccatctcaaaaagaaaagaaaagaagactctgacctgtactcttgaatacaagtttctgataccactgcactgtctgagaatttccaaaactttaatgaactaactgacagcttcatgaaactgtccaccaagatcaagcagagaaaataattaatttcatgggactaaatgaactaatgaggataatattttcataattttttatttgaaattttgctgattctttaaatgtcttgtttcccagatttcaggaaactttttttcttttaagctatccacagcttacagcaatttgataaaatatacttttgtgaacaaaaattgagacatttacattttctccctatgtggtcgctccagacttgggaaactattcatgaatatttatattgtatggtaatatagttattgcacaagttcaataaaaatctgctctttgtataacagaatacatttgaaaacattggttatattaccaagactttgactagaatgtcgtatttgaggatataaacccataggtaataaacccacaggtactacaaacaaagtctgaagtcagccttggtttggcttcctagtgtcaattaaacttctaaaagtttaatctgagattccttataaaaacttccagcaaagcaactttaaaaaagtctgtgtgggccgggcgcggtggctcacgcctgtaatcccagcactttgatccgccgaggcgggcggatcacgaggtcaggagatccagaccatcctggctaacacagtgaaaccccgtctctactaaaaatacaaaaaaagttagccgggcgtggtggtgggggcctgtagtcccagctactcaggaggctgaggcaggagaacggcatgaacccgggaggcagggcttgcagtgagccaagatcatgccgctgcactccagcctgggagacaaagt

SEQ ID NO: 731990 - DNA, 1196 bp, Homo sapiens
  misc_feature (31)..(31): n is a, c, g, or t
  misc_feature (34)..(34): n is a, c, g, or t
ttagaggatcccattggaccaggcagacgancantctatgcagagccacccaaacccttcatcaccagcaacaactccaaccccgtggaggatgaggatgctgtagccttaacctgtgaacctgagattcagaacacaacctacctgtggtgggtaaataatcagagcctcccggtcagtcccaggctgcagctgtccaatgacaacaggaccctcactctactcagtgtcacaaggaatgatgtaggaccctatgagtgtggaatccagaacgaattaagtgttgaccacagcgacccagtcatcctgaatgtcctctatggcccagacgaccccaccatttccccctcatacacctattaccgtccaggggtgaacctcagcctctcctgccatgcagcctctaacccacctgcacagtattcttggctgattgatgggaacatccagcaacacacacaagagctctttatctccaacatcactgagaagaacagcggactctatacctgccaggccaataactcagccagtggccacagcaggactacagtcaagacaatcacagtctctgtgaaaccccatctctactaaaaatacaaaaatgagctgggcttggtggcgcgcacctgtagtcccagttactcgggaggctgaggcaggagaatcgcttgaacccgggaggtggagattgcagtgagcccagatcgcaccactgcactccagtctggcaacagagcaagactccatctcaaaaagaaaagaaaagaagactctgacctgtactcttgaatacaagtttctgataccactgcactgtctgagaatttccaaaactttaatgaactaactgacagcttcatgaaactgtccaccaagatcaagcagagaaaataattaatttcatgggactaaatgaactaatgaggataatattttcataattttttatttgaaattttgctgattctttaaatgtcttgtttcccagatttcaggaaactttttttcttttaagctatccacagcttacagcaatttgataaaatatacttttgtgaacaaaaattgagacatttacattttctccctatgtggtcgctccagacttgggaaactattcatgaatatttatattgtatggtaatatagttattgcacaagttcaataaaaatctgctctttgtataacagaa

SEQ ID NO: 731991 - DNA, 2452 bp, Homo sapiens
  misc_feature (31)..(31): n is a, c, g, or t
  misc_feature (34)..(34): n is a, c, g, or t
ttagaggatcccattggaccaggcagacgancantctatgcagagccacccaaacccttcatcaccagcaacaactccaaccccgtggaggatgaggatgctgtagccttaacctgtgaacctgagattcagaacacaacctacctgtggtgggtaaataatcagagcctcccggtcagtcccaggctgcagctgtccaatgacaacaggaccctcactctactcagtgtcacaaggaatgatgtaggaccctatgagtgtggaatccagaacgaattaagtgttgaccacagcgacccagtcatcctgaatgtcctctatggcccagacgaccccaccatttccccctcatacacctattaccgtccaggggtgaacctcagcctctcctgccatgcagcctctaacccacctgcacagtattcttggctgattgatgggaacatccagcaacacacacaagagctctttatctccaacatcactgagaagaacagcggactctatacctgccaggccaataactcagccagtggccacagcaggactacagtcaagacaatcacagtctctgcggagctgcccaagccctccatctccagcaacaactccaaacccgtggaggacaaggatgctgtggccttcacctgtgaacctgaggctcagaacacaacctacctgtggtgggtaaatggtcagagcctcccagtcagtcccaggctgcagctgtccaatggcaacaggaccctcactctattcaatgtcacaagaaatgacgcaagagcctatgtatgtggaatccagaactcagtgagtgcaaaccgcagtgacccagtcaccctggatgtcctctatgggccggacacccccatcatttcccccccagactcgtcttacctttcgggagcgaacctcaacctctcctgccactcggcctctaacccatccccgcagtattcttggcgtatcaatgggataccgcagcaacacacacaagttctctttatcgccaaaatcacgccaaataataacgggacctatgcctgttttgtctctaacttggctactggccgcaataattccatagtcaagagcatcacagtctctgcatctggaacttctcctggtctctcagctggggccactgtcggcatcatgattggagtgctggttggggttgctctgatatagcagccctggtgtagtttcttcatttcaggaagactgacagttgttttgcttcttccttaaagcatttgcaacagctacagtctaaaattgcttctttaccaaggatatttacagaaaagactctgaccagagatcgagaccatcctagccaacatcgtgaaaccccatctctactaaaaatacaaaaatgagctgggcttggtggcgcgcacctgtagtcccagttactcgggaggctgaggcaggagaatcgcttgaacccgggaggtggagattgcagtgagcccagatcgcaccactgcactccagtctggcaacagagcaagactccatctcaaaaagaaaagaaaagaagactctgacctgtactcttgaatacaagtttctgataccactgcactgtctgagaatttccaaaactttaatgaactaactgacagcttcatgaaactgtccaccaagatcaagcagagaaaataattaatttcatgggactaaatgaactaatgaggataatattttcataattttttatttgaaattttgctgattctttaaatgtcttgtttcccagatttcaggaaactttttttcttttaagctatccacagcttacagcaatttgataaaatatacttttgtgaacaaaaattgagacatttacattttctccctatgtggtcgctccagacttgggaaactattcatgaatatttatattgtatggtaatatagttattgcacaagttcaataaaaatctgctctttgtataacagaatacatttgaaaacattggttatattaccaagactttgactagaatgtcgtatttgaggatataaacccataggtaataaacccacaggtactacaaacaaagtctgaagtcagccttggtttggcttcctagtgtcaattaaacttctaaaagtttaatctgagattccttataaaaacttccagcaaagcaactttaaaaaagtctgtgtgggccgggcgcggtggctcacgcctgtaatcccagcactttgatccgccgaggcgggcggatcacgaggtcaggagatccagaccatcctggctaacacagtgaaaccccgtctctactaaaaatacaaaaaaagttagccgggcgtggtggtgggggcctgtagtcccagctactcaggaggctgaggcaggagaacggcatgaacccgggaggcagggcttgcagtgagccaagatcatgccgctgcactccagcctgggagacaaagt

SEQ ID NO: 731992 - DNA, 1970 bp, Homo sapiens
  misc_feature (31)..(31): n is a, c, g, or t
  misc_feature (34)..(34): n is a, c, g, or t
ttagaggatcccattggaccaggcagacgancantctatgcagagccacccaaacccttcatcaccagcaacaactccaaccccgtggaggatgaggatgctgtagccttaacctgtgaacctgagattcagaacacaacctacctgtggtgggtaaataatcagagcctcccggtcagtcccaggctgcagctgtccaatgacaacaggaccctcactctactcagtgtcacaaggaatgatgtaggaccctatgagtgtggaatccagaacgaattaagtgttgaccacagcgacccagtcatcctgaatgtcctctatggcccagacgaccccaccatttccccctcatacacctattaccgtccaggggtgaacctcagcctctcctgccatgcagcctctaacccacctgcacagtattcttggctgattgatgggaacatccagcaacacacacaagagctctttatctccaacatcactgagaagaacagcggactctatacctgccaggccaataactcagccagtggccacagcaggactacagtcaagacaatcacagtctctgcggagctgcccaagccctccatctccagcaacaactccaaacccgtggaggacaaggatgctgtggccttcacctgtgaacctgaggctcagaacacaacctacctgtggtgggtaaatggtcagagcctcccagtcagtcccaggctgcagctgtccaatggcaacaggaccctcactctattcaatgtcacaagaaatgacgcaagagcctatgtatgtggaatccagaactcagtgagtgcaaaccgcagtgacccagtcaccctggatgtcctctatgggccggacacccccatcatttcccccccagactcgtcttacctttcgggagcgaacctcaacctctcctgccactcggcctctaacccatccccgcagtattcttggcgtatcaatgggataccgcagcaacacacacaagttctctttatcgccaaaatcacgccaaataataacgggacctatgcctgttttgtctctaacttggctactggccgcaataattccatagtcaagagcatcacagtctctgcatctggaacttctcctggtctctcagctggggccactgtcggcatcatgattggagtgctggttggggttgctctgatatagcagccctggtgtagtttcttcatttcaggaagactgacagttgttttgcttcttccttaaagcatttgcaacagctacagtctaaaattgcttctttaccaaggatatttacagaaaagactctgaccagagatcgagaccatcctagccaacatcgtgaaaccccatctctactaaaaatacaaaaatgagctgggcttggtggcgcgcacctgtagtcccagttactcgggaggctgaggcaggagaatcgcttgaacccgggaggtggagattgcagtgagcccagatcgcaccactgcactccagtctggcaacagagcaagactccatctcaaaaagaaaagaaaagaagactctgacctgtactcttgaatacaagtttctgataccactgcactgtctgagaatttccaaaactttaatgaactaactgacagcttcatgaaactgtccaccaagatcaagcagagaaaataattaatttcatgggactaaatgaactaatgaggataatattttcataattttttatttgaaattttgctgattctttaaatgtcttgtttcccagatttcaggaaactttttttcttttaagctatccacagcttacagcaatttgataaaatatacttttgtgaacaaaaattgagacatttacattttctccctatgtggtcgctccagacttgggaaactattcatgaatatttatattgtatggtaatatagttattgcacaagttcaataaaaatctgctctttgtataacagaa

SEQ ID NO: 731993 - DNA, 1518 bp, Homo sapiens
  misc_feature (31)..(31): n is a, c, g, or t
  misc_feature (34)..(34): n is a, c, g, or t
ttagaggatcccattggaccaggcagacgancantctatgcagagccacccaaacccttcatcaccagcaacaactccaaccccgtggaggatgaggatgctgtagccttaacctgtgaacctgagattcagaacacaacctacctgtggtgggtaaataatcagagcctcccggtcagtcccaggctgcagctgtccaatgacaacaggaccctcactctactcagtgtcacaaggaatgatgtaggaccctatgagtgtggaatccagaacgaattaagtgttgaccacagcgacccagtcatcctgaatgtcctctatggcccagacgaccccaccatttccccctcatacacctattaccgtccaggggtgaacctcagcctctcctgccatgcagcctctaacccacctgcacagtattcttggctgattgatgggaacatccagcaacacacacaagagctctttatctccaacatcactgagaagaacagcggactctatacctgccaggccaataactcagccagtggccacagcaggactacagtcaagacaatcacagtctctgcggagctgcccaagccctccatctccagcaacaactccaaacccgtggaggacaaggatgctgtggccttcacctgtgaacctgaggctcagaacacaacctacctgtggtgggtaaatggtcagagcctcccagtcagtcccaggctgcagctgtccaatggcaacaggaccctcactctattcaatgtcacaagaaatgacgcaagagcctatgtatgtggaatccagaactcagtgagtgcaaaccgcagtgacccagtcaccctggatgtcctctatgggccggacacccccatcatttcccccccagactcgtcttacctttcgggagcgaacctcaacctctcctgccactcggcctctaacccatccccgcagtattcttggcgtatcaatgggataccgcagcaacacacacaagttctctttatcgccaaaatcacgccaaataataacgggacctatgcctgttttgtctctaacttggctactggccgcaataattccatagtcaagagcatcacagtctctggtaagtggctccctggagcatcagcatcatattctggggtggagtctatctggttctcaccaaagagccaagaagacattttctttcccagtctgtgttccatgggcacaaggaaatcccaaattctatcctgagccccctcactccatctcggccaactctctcctccccggcttctctgatatctcacggctgacctcgggtccagcctggaatgtggggaggggcctcccttagccccagaaggcccccaatagtgaaagggacttcatagtccagaagaaagaagggtccttaaggtcgagttgctcctctctatcaccaatatgtccctttctgtcacctctttgtgttttttcacctactctgtgagctacaaggaacaaggaggctttgaaaccagcccacac

SEQ ID NO: 731994 - DNA, 1081 bp, Homo sapiens
  misc_feature (31)..(31): n is a, c, g, or t
  misc_feature (34)..(34): n is a, c, g, or t
  misc_feature (1014)..(1014): n is a, c, g, or t
  misc_feature (1036)..(1036): n is a, c, g, or t
  misc_feature (1046)..(1046): n is a, c, g, or t
ttagaggatcccattggaccaggcagacgancantctatgcagagccacccaaacccttcatcaccagcaacaactccaaccccgtggaggatgaggatgctgtagccttaacctgtgaacctgagattcagaacacaacctacctgtggtgggtaaataatcagagcctcccggtcagtcccaggctgcagctgtccaatgacaacaggaccctcactctactcagtgtcacaaggaatgatgtaggaccctatgagtgtggaatccagaacgaattaagtgttgaccacagcgacccagtcatcctgaatgtcctctatggcccagacgaccccaccatttccccctcatacacctattaccgtccaggggtgaacctcagcctctcctgccatgcagcctctaacccacctgcacagtattcttggctgattgatgggaacatccagcaacacacacaagagctctttatctccaacatcactgagaagaacagcggactctatacctgccaggccaataactcagccagtggccacagcaggactacagtcaagacaatcacagtctctgcggagctgcccaagccctccatctccagcaacaactccaaacccgtggaggacaaggatgctgtggccttcacctgtgaacctgaggctcagaacacaacctacctgtggtgggtaaatggtcagagcctcccagtcagtcccaggctgcagctgtccaatggcaacaggaccctcactctattcaatgtcacaagaaatgacgcaagagcctatgtatgtggaatccagaactcagtgagtgcaaaccgcagtgacccagtcaccctggatgtcctctatgggccggacacccccatcatttcccccccagactcgtcttacctgatgggagcaagactgatcttctcccatcagcattttgtaaatcaatgtgaaatttgcaaacaagctaagatacattttcttgaaaattgtcctaatttttgattgtatagtttngtcttctgtgattctatctgtncaggcatatnagcataaatttttcatatcgatcacaacatatcac

SEQ ID NO: 731995 - DNA, 551 bp, Homo sapiens
  misc_feature (31)..(31): n is a, c, g, or t
  misc_feature (34)..(34): n is a, c, g, or t
ttagaggatcccattggaccaggcagacgancantctatgcagagccacccaaacccttcatcaccagcaacaactccaaccccgtggaggatgaggatgctgtagccttaacctgtgaacctgagattcagaacacaacctacctgtggtgggtaaataatcagagcctcccggtcagtcccaggctgcagctgtccaatgacaacaggaccctcactctactcagtgtcacaaggaatgatgtaggaccctatgagtgtggaatccagaacgaattaagtgttgaccacagcgacccagtcatcctgaatgtcctctatggcccagacgaccccaccatttccccctcatacacctattaccgtccaggggtgaacctcagcctctcctgccatgcagcctctaacccacctgcacagtattcttggctgattgatgggaacatccagcaacacacacaagagctctttatctccaacatcactgagaagaacagcggactctatacctgccaggccaataacttgtccaccgggcgatcctctaatca

SEQ ID NO: 731996 - DNA, 1711 bp, Homo sapiens
  misc_feature (54)..(54): n is a, c, g, or t
aagcagtgcatcgtctcatggtatagctgttccagtgggctcagagtcttagcncagatcaccatgcaagatgcagagccacccaaacccttcatcaccagcaacaactccaaccccgtggaggatgaggatgctgtagccttaacctgtgaacctgagattcagaacacaacctacctgtggtgggtaaataatcagagcctcccggtcagtcccaggctgcagctgtccaatgacaacaggaccctcactctactcagtgtcacaaggaatgatgtaggaccctatgagtgtggaatccagaacgaattaagtgttgaccacagcgacccagtcatcctgaatgtcctctatggcccagacgaccccaccatttccccctcatacacctattaccgtccaggggtgaacctcagcctctcctgccatgcagcctctaacccacctgcacagtattcttggctgattgatgggaacatccagcaacacacacaagagctctttatctccaacatcactgagaagaacagcggactctatacctgccaggccaataactcagccagtggccacagcaggactacagtcaagacaatcacagtctctgtgaaaccccatctctactaaaaatacaaaaatgagctgggcttggtggcgcgcacctgtagtcccagttactcgggaggctgaggcaggagaatcgcttgaacccgggaggtggagattgcagtgagcccagatcgcaccactgcactccagtctggcaacagagcaagactccatctcaaaaagaaaagaaaagaagactctgacctgtactcttgaatacaagtttctgataccactgcactgtctgagaatttccaaaactttaatgaactaactgacagcttcatgaaactgtccaccaagatcaagcagagaaaataattaatttcatgggactaaatgaactaatgaggataatattttcataattttttatttgaaattttgctgattctttaaatgtcttgtttcccagatttcaggaaactttttttcttttaagctatccacagcttacagcaatttgataaaatatacttttgtgaacaaaaattgagacatttacattttctccctatgtggtcgctccagacttgggaaactattcatgaatatttatattgtatggtaatatagttattgcacaagttcaataaaaatctgctctttgtataacagaatacatttgaaaacattggttatattaccaagactttgactagaatgtcgtatttgaggatataaacccataggtaataaacccacaggtactacaaacaaagtctgaagtcagccttggtttggcttcctagtgtcaattaaacttctaaaagtttaatctgagattccttataaaaacttccagcaaagcaactttaaaaaagtctgtgtgggccgggcgcggtggctcacgcctgtaatcccagcactttgatccgccgaggcgggcggatcacgaggtcaggagatccagaccatcctggctaacacagtgaaaccccgtctctactaaaaatacaaaaaaagttagccgggcgtggtggtgggggcctgtagtcccagctactcaggaggctgaggcaggagaacggcatgaacccgggaggcagggcttgcagtgagccaagatcatgccgctgcactccagcctgggagacaaagt

SEQ ID NO: 731997 - DNA, 1229 bp, Homo sapiens
  misc_feature (54)..(54): n is a, c, g, or t
aagcagtgcatcgtctcatggtatagctgttccagtgggctcagagtcttagcncagatcaccatgcaagatgcagagccacccaaacccttcatcaccagcaacaactccaaccccgtggaggatgaggatgctgtagccttaacctgtgaacctgagattcagaacacaacctacctgtggtgggtaaataatcagagcctcccggtcagtcccaggctgcagctgtccaatgacaacaggaccctcactctactcagtgtcacaaggaatgatgtaggaccctatgagtgtggaatccagaacgaattaagtgttgaccacagcgacccagtcatcctgaatgtcctctatggcccagacgaccccaccatttccccctcatacacctattaccgtccaggggtgaacctcagcctctcctgccatgcagcctctaacccacctgcacagtattcttggctgattgatgggaacatccagcaacacacacaagagctctttatctccaacatcactgagaagaacagcggactctatacctgccaggccaataactcagccagtggccacagcaggactacagtcaagacaatcacagtctctgtgaaaccccatctctactaaaaatacaaaaatgagctgggcttggtggcgcgcacctgtagtcccagttactcgggaggctgaggcaggagaatcgcttgaacccgggaggtggagattgcagtgagcccagatcgcaccactgcactccagtctggcaacagagcaagactccatctcaaaaagaaaagaaaagaagactctgacctgtactcttgaatacaagtttctgataccactgcactgtctgagaatttccaaaactttaatgaactaactgacagcttcatgaaactgtccaccaagatcaagcagagaaaataattaatttcatgggactaaatgaactaatgaggataatattttcataattttttatttgaaattttgctgattctttaaatgtcttgtttcccagatttcaggaaactttttttcttttaagctatccacagcttacagcaatttgataaaatatacttttgtgaacaaaaattgagacatttacattttctccctatgtggtcgctccagacttgggaaactattcatgaatatttatattgtatggtaatatagttattgcacaagttcaataaaaatctgctctttgtataacagaa

SEQ ID NO: 731998 - DNA, 1114 bp, Homo sapiens
  misc_feature (54)..(54): n is a, c, g, or t
  misc_feature (1047)..(1047): n is a, c, g, or t
  misc_feature (1069)..(1069): n is a, c, g, or t
  misc_feature (1079)..(1079): n is a, c, g, or t
aagcagtgcatcgtctcatggtatagctgttccagtgggctcagagtcttagcncagatcaccatgcaagatgcagagccacccaaacccttcatcaccagcaacaactccaaccccgtggaggatgaggatgctgtagccttaacctgtgaacctgagattcagaacacaacctacctgtggtgggtaaataatcagagcctcccggtcagtcccaggctgcagctgtccaatgacaacaggaccctcactctactcagtgtcacaaggaatgatgtaggaccctatgagtgtggaatccagaacgaattaagtgttgaccacagcgacccagtcatcctgaatgtcctctatggcccagacgaccccaccatttccccctcatacacctattaccgtccaggggtgaacctcagcctctcctgccatgcagcctctaacccacctgcacagtattcttggctgattgatgggaacatccagcaacacacacaagagctctttatctccaacatcactgagaagaacagcggactctatacctgccaggccaataactcagccagtggccacagcaggactacagtcaagacaatcacagtctctgcggagctgcccaagccctccatctccagcaacaactccaaacccgtggaggacaaggatgctgtggccttcacctgtgaacctgaggctcagaacacaacctacctgtggtgggtaaatggtcagagcctcccagtcagtcccaggctgcagctgtccaatggcaacaggaccctcactctattcaatgtcacaagaaatgacgcaagagcctatgtatgtggaatccagaactcagtgagtgcaaaccgcagtgacccagtcaccctggatgtcctctatgggccggacacccccatcatttcccccccagactcgtcttacctgatgggagcaagactgatcttctcccatcagcattttgtaaatcaatgtgaaatttgcaaacaagctaagatacattttcttgaaaattgtcctaatttttgattgtatagtttngtcttctgtgattctatctgtncaggcatatnagcataaatttttcatatcgatcacaacatatcac

SEQ ID NO: 731999 - DNA, 747 bp, Homo sapiens
ctcagggcagagggaggaaggacagcagaccagacagtcacagcagccttgacaaaacgttcctggaactcaagctcttctccacagaggaggacagagcagacagcagagaccatggagtctccctcggcccctccccacagatggtgcatcccctggcagaggctcctgctcacagcctcacttctaaccttctggaacccgcccaccactgccaagctcactattgaatccacgccgttcaatgtcgcagaggggaaggaggtgcttctacttgtccacaatctgccccagcatctttttggctacagctggtacaaaggtgaaagagtggatggcaaccgtcaaattataggatatgtaataggaactcaacaagctaccccagggcccgcatacagtggtcgagagataatataccccaatgcatccctgctgatccagaacatcatccagaatgacacaggattctacaccctacacgtcataaagtcagatcttgtgaatgaagaagcaactggccagttccgggtatacccggagctgcccaagccctccatctccagcaacaactccaaacccgtggaggacaaggatgctgtggccttcacctgtgaacctgaggttcagaacacaacctacctgtggtgggtaaatggtcagagcctcccggtcagtcccaggctgcagctgtccaatggcaacatgaccctcactctactcagcgtcaaaaggaacgatgcagga

SEQ ID NO: 732000 - DNA, 2710 bp, Homo sapiens
ctcagggcagagggaggaaggacagcagaccagacagtcacagcagccttgacaaaacgttcctggaactcaagctcttctccacagaggaggacagagcagacagcagagaccatggagtctccctcggcccctccccacagatggtgcatcccctggcagaggctcctgctcacagcctcacttctaaccttctggaacccgcccaccactgccaagctcactattgaatccacgccgttcaatgtcgcagaggggaaggaggtgcttctacttgtccacaatctgccccagcatctttttggctacagctggtacaaaggtgaaagagtggatggcaaccgtcaaattataggatatgtaataggaactcaacaagctaccccagggcccgcatacagtggtcgagagataatataccccaatgcatccctgctgatccagaacatcatccagaatgacacaggattctacaccctacacgtcataaagtcagatcttgtgaatgaagaagcaactggccagttccgggtatacccggagctgcccaagccctccatctccagcaacaactccaaacccgtggaggacaaggatgctgtggccttcacctgtgaacctgagactcaggacgcaacctacctgtggtgggtaaacaatcagagcctcccggtcagtcccaggctgcagctgtccaatggcaacaggaccctcactctattcaatgtcacaagaaatgacacagcaagctacaaatgtgaaacccagaacccagtgagtgccaggcgcagtgattcagtcatcctgaatgtcctctatggcccggatgcccccaccatttcccctctaaacacatcttacagatcaggggaaaatctgaacctctcctgccacgcagcctctaacccacctgcacagtactcttggtttgtcaatgggactttccagcaatccacccaagagctctttatccccaacatcactgtgaataatagtggatcctatacgtgccaagcccataactcagacactggcctcaataggaccacagtcacgacgatcacagtctatgcagagccacccaaacccttcatcaccagcaacaactccaaccccgtggaggatgaggatgctgtagccttaacctgtgaacctgagattcagaacacaacctacctgtggtgggtaaataatcagagcctcccggtcagtcccaggctgcagctgtccaatgacaacaggaccctcactctactcagtgtcacaaggaatgatgtaggaccctatgagtgtggaatccagaacgaattaagtgttgaccacagcgacccagtcatcctgaatgtcctctatggcccagacgaccccaccatttccccctcatacacctattaccgtccaggggtgaacctcagcctctcctgccatgcagcctctaacccacctgcacagtattcttggctgattgatgggaacatccagcaacacacacaagagctctttatctccaacatcactgagaagaacagcggactctatacctgccaggccaataactcagccagtggccacagcaggactacagtcaagacaatcacagtctctgtgaaaccccatctctactaaaaatacaaaaatgagctgggcttggtggcgcgcacctgtagtcccagttactcgggaggctgaggcaggagaatcgcttgaacccgggaggtggagattgcagtgagcccagatcgcaccactgcactccagtctggcaacagagcaagactccatctcaaaaagaaaagaaaagaagactctgacctgtactcttgaatacaagtttctgataccactgcactgtctgagaatttccaaaactttaatgaactaactgacagcttcatgaaactgtccaccaagatcaagcagagaaaataattaatttcatgggactaaatgaactaatgaggataatattttcataattttttatttgaaattttgctgattctttaaatgtcttgtttcccagatttcaggaaactttttttcttttaagctatccacagcttacagcaatttgataaaatatacttttgtgaacaaaaattgagacatttacattttctccctatgtggtcgctccagacttgggaaactattcatgaatatttatattgtatggtaatatagttattgcacaagttcaataaaaatctgctctttgtataacagaatacatttgaaaacattggttatattaccaagactttgactagaatgtcgtatttgaggatataaacccataggtaataaacccacaggtactacaaacaaagtctgaagtcagccttggtttggcttcctagtgtcaattaaacttctaaaagtttaatctgagattccttataaaaacttccagcaaagcaactttaaaaaagtctgtgtgggccgggcgcggtggctcacgcctgtaatcccagcactttgatccgccgaggcgggcggatcacgaggtcaggagatccagaccatcctggctaacacagtgaaaccccgtctctactaaaaatacaaaaaaagttagccgggcgtggtggtgggggcctgtagtcccagctactcaggaggctgaggcaggagaacggcatgaacccgggaggcagggcttgcagtgagccaagatcatgccgctgcactccagcctgggagacaaagt

SEQ ID NO: 732001 - DNA, 2228 bp, Homo sapiens
ctcagggcagagggaggaaggacagcagaccagacagtcacagcagccttgacaaaacgttcctggaactcaagctcttctccacagaggaggacagagcagacagcagagaccatggagtctccctcggcccctccccacagatggtgcatcccctggcagaggctcctgctcacagcctcacttctaaccttctggaacccgcccaccactgccaagctcactattgaatccacgccgttcaatgtcgcagaggggaaggaggtgcttctacttgtccacaatctgccccagcatctttttggctacagctggtacaaaggtgaaagagtggatggcaaccgtcaaattataggatatgtaataggaactcaacaagctaccccagggcccgcatacagtggtcgagagataatataccccaatgcatccctgctgatccagaacatcatccagaatgacacaggattctacaccctacacgtcataaagtcagatcttgtgaatgaagaagcaactggccagttccgggtatacccggagctgcccaagccctccatctccagcaacaactccaaacccgtggaggacaaggatgctgtggccttcacctgtgaacctgagactcaggacgcaacctacctgtggtgggtaaacaatcagagcctcccggtcagtcccaggctgcagctgtccaatggcaacaggaccctcactctattcaatgtcacaagaaatgacacagcaagctacaaatgtgaaacccagaacccagtgagtgccaggcgcagtgattcagtcatcctgaatgtcctctatggcccggatgcccccaccatttcccctctaaacacatcttacagatcaggggaaaatctgaacctctcctgccacgcagcctctaacccacctgcacagtactcttggtttgtcaatgggactttccagcaatccacccaagagctctttatccccaacatcactgtgaataatagtggatcctatacgtgccaagcccataactcagacactggcctcaataggaccacagtcacgacgatcacagtctatgcagagccacccaaacccttcatcaccagcaacaactccaaccccgtggaggatgaggatgctgtagccttaacctgtgaacctgagattcagaacacaacctacctgtggtgggtaaataatcagagcctcccggtcagtcccaggctgcagctgtccaatgacaacaggaccctcactctactcagtgtcacaaggaatgatgtaggaccctatgagtgtggaatccagaacgaattaagtgttgaccacagcgacccagtcatcctgaatgtcctctatggcccagacgaccccaccatttccccctcatacacctattaccgtccaggggtgaacctcagcctctcctgccatgcagcctctaacccacctgcacagtattcttggctgattgatgggaacatccagcaacacacacaagagctctttatctccaacatcactgagaagaacagcggactctatacctgccaggccaataactcagccagtggccacagcaggactacagtcaagacaatcacagtctctgtgaaaccccatctctactaaaaatacaaaaatgagctgggcttggtggcgcgcacctgtagtcccagttactcgggaggctgaggcaggagaatcgcttgaacccgggaggtggagattgcagtgagcccagatcgcaccactgcactccagtctggcaacagagcaagactccatctcaaaaagaaaagaaaagaagactctgacctgtactcttgaatacaagtttctgataccactgcactgtctgagaatttccaaaactttaatgaactaactgacagcttcatgaaactgtccaccaagatcaagcagagaaaataattaatttcatgggactaaatgaactaatgaggataatattttcataattttttatttgaaattttgctgattctttaaatgtcttgtttcccagatttcaggaaactttttttcttttaagctatccacagcttacagcaatttgataaaatatacttttgtgaacaaaaattgagacatttacattttctccctatgtggtcgctccagacttgggaaactattcatgaatatttatattgtatggtaatatagttattgcacaagttcaataaaaatctgctctttgtataacagaa

SEQ ID NO: 732002 - DNA, 2113 bp, Homo sapiens; identical to SEQ ID NO: 358606
  misc_feature (2046)..(2046): n is a, c, g, or t
  misc_feature (2068)..(2068): n is a, c, g, or t
  misc_feature (2078)..(2078): n is a, c, g, or t

SEQ ID NO: 732003 - DNA, 2088 bp, Homo sapiens
  misc_feature (2021)..(2021): n is a, c, g, or t
  misc_feature (2043)..(2043): n is a, c, g, or t
  misc_feature (2053)..(2053): n is a, c, g, or t
ctcagggcagagggaggaaggacagcagaccagacagtcacagcagccttgacaaaacgttcctggaactcaagctcttctccacagaggaggacagagcagacagcagagaccatggagtctccctcggcccctccccacagatggtgcatcccctggcagaggctcctgctcacagcctcacttctaaccttctggaacccgcccaccactgccaagctcactattgaatccacgccgttcaatgtcgcagaggggaaggaggtgcttctacttgtccacaatctgccccagcatctttttggctacagctggtacaaaggtgaaagagtggatggcaaccgtcaaattataggatatgtaataggaactcaacaagctaccccagggcccgcatacagtggtcgagagataatataccccaatgcatccctgctgatccagaacatcatccagaatgacacaggattctacaccctacacgtcataaagtcagatcttgtgaatgaagaagcaactggccagttccgggtatacccggagctgcccaagccctccatctccagcaacaactccaaacccgtggaggacaaggatgctgtggccttcacctgtgaacctgagactcaggacgcaacctacctgtggtgggtaaacaatcagagcctcccggtcagtcccaggctgcagctgtccaatggcaacaggaccctcactctattcaatgtcacaagaaatgacacagcaagctacaaatgtgaaacccagaacccagtgagtgccaggcgcagtgattcagtcatcctgaatgtcctctatggcccggatgcccccaccatttcccctctaaacacatcttacagatcaggggaaaatctgaacctctcctgccacgcagcctctaacccacctgcacagtactcttggtttgtcaatgggactttccagcaatccacccaagagctctttatccccaacatcactgtgaataatagtggatcctatacgtgccaagcccataactcagacactggcctcaataggaccacagtcacgacgatcacagtctatgcagagccacccaaacccttcatcaccagcaacaactccaaccccgtggaggatgaggatgctgtagccttaacctgtgaacctgagattcagaacacaacctacctgtggtgggtaaataatcagagcctcccggtcagtcccaggctgcagctgtccaatgacaacaggaccctcactctactcagtgtcacaaggaatgatgtaggaccctatgagtgtggaatccagaacgaattaagtgttgaccacagcatggcccagacgaccccaccatttccccctcatacacctattaccgtccaggggtgaacctcagcctctcctgccatgcagcctctaacccacctgcacagtattcttggctgattgatgggaacatccagcaacacacacaagagctctttatctccaacatcactgagaagaacagcggactctatacctgccaggccaataactcagccagtggccacagcaggactacagtcaagacaatcacagtctctgcggagctgcccaagccctccatctccagcaacaactccaaacccgtggaggacaaggatgctgtggccttcacctgtgaacctgaggctcagaacacaacctacctgtggtgggtaaatggtcagagcctcccagtcagtcccaggctgcagctgtccaatggcaacaggaccctcactctattcaatgtcacaagaaatgacgcaagagcctatgtatgtggaatccagaactcagtgagtgcaaaccgcagtgacccagtcaccctggatgtcctctatgggccggacacccccatcatttcccccccagactcgtcttacctgatgggagcaagactgatcttctcccatcagcattttgtaaatcaatgtgaaatttgcaaacaagctaagatacattttcttgaaaattgtcctaatttttgattgtatagtttngtcttctgtgattctatctgtncaggcatatnagcataaatttttcatatcgatcacaacatatcac

SEQ ID NO: 732004 - DNA, 2183 bp, Homo sapiens
ctcagggcagagggaggaaggacagcagaccagacagtcacagcagccttgacaaaacgttcctggaactcaagctcttctccacagaggaggacagagcagacagcagagaccatggagtctccctcggcccctccccacagatggtgcatcccctggcagaggctcctgctcacagcctcacttctaaccttctggaacccgcccaccactgccaagctcactattgaatccacgccgttcaatgtcgcagaggggaaggaggtgcttctacttgtccacaatctgccccagcatctttttggctacagctggtacaaaggtgaaagagtggatggcaaccgtcaaattataggatatgtaataggaactcaacaagctaccccagggcccgcatacagtggtcgagagataatataccccaatgcatccctgctgatccagaacatcatccagaatgacacaggattctacaccctacacgtcataaagtcagatcttgtgaatgaagaagcaactggccagttccgggtatacccggagctgcccaagccctccatctccagcaacaactccaaacccgtggaggacaaggatgctgtggccttcacctgtgaacctgagactcaggacgcaacctacctgtggtgggtaaacaatcagagcctcccggtcagtcccaggctgcaggctgcagctgtccaatgacaacaggaccctcactctactcagtgtcacaaggaatgatgtaggaccctatgagtgtggaatccagaacgaattaagtgttgaccacagcgacccagtcatcctgaatgtcctctatggcccagacgaccccaccatttccccctcatacacctattaccgtccaggggtgaacctcagcctctcctgccatgcagcctctaacccacctgcacagtattcttggctgattgatgggaacatccagcaacacacacaagagctctttatctccaacatcactgagaagaacagcggactctatacctgccaggccaataactcagccagtggccacagcaggactacagtcaagacaatcacagtctctgtgaaaccccatctctactaaaaatacaaaaatgagctgggcttggtggcgcgcacctgtagtcccagttactcgggaggctgaggcaggagaatcgcttgaacccgggaggtggagattgcagtgagcccagatcgcaccactgcactccagtctggcaacagagcaagactccatctcaaaaagaaaagaaaagaagactctgacctgtactcttgaatacaagtttctgataccactgcactgtctgagaatttccaaaactttaatgaactaactgacagcttcatgaaactgtccaccaagatcaagcagagaaaataattaatttcatgggactaaatgaactaatgaggataatattttcataattttttatttgaaattttgctgattctttaaatgtcttgtttcccagatttcaggaaactttttttcttttaagctatccacagcttacagcaatttgataaaatatacttttgtgaacaaaaattgagacatttacattttctccctatgtggtcgctccagacttgggaaactattcatgaatatttatattgtatggtaatatagttattgcacaagttcaataaaaatctgctctttgtataacagaatacatttgaaaacattggttatattaccaagactttgactagaatgtcgtatttgaggatataaacccataggtaataaacccacaggtactacaaacaaagtctgaagtcagccttggtttggcttcctagtgtcaattaaacttctaaaagtttaatctgagattccttataaaaacttccagcaaagcaactttaaaaaagtctgtgtgggccgggcgcggtggctcacgcctgtaatcccagcactttgatccgccgaggcgggcggatcacgaggtcaggagatccagaccatcctggctaacacagtgaaaccccgtctctactaaaaatacaaaaaaagttagccgggcgtggtggtgggggcctgtagtcccagctactcaggaggctgaggcaggagaacggcatgaacccgggaggcagggcttgcagtgagccaagatcatgccgctgcactccagcctgggagacaaagt

SEQ ID NO: 732005 - DNA, 1701 bp, Homo sapiens
ctcagggcagagggaggaaggacagcagaccagacagtcacagcagccttgacaaaacgttcctggaactcaagctcttctccacagaggaggacagagcagacagcagagaccatggagtctccctcggcccctccccacagatggtgcatcccctggcagaggctcctgctcacagcctcacttctaaccttctggaacccgcccaccactgccaagctcactattgaatccacgccgttcaatgtcgcagaggggaaggaggtgcttctacttgtccacaatctgccccagcatctttttggctacagctggtacaaaggtgaaagagtggatggcaaccgtcaaattataggatatgtaataggaactcaacaagctaccccagggcccgcatacagtggtcgagagataatataccccaatgcatccctgctgatccagaacatcatccagaatgacacaggattctacaccctacacgtcataaagtcagatcttgtgaatgaagaagcaactggccagttccgggtatacccggagctgcccaagccctccatctccagcaacaactccaaacccgtggaggacaaggatgctgtggccttcacctgtgaacctgagactcaggacgcaacctacctgtggtgggtaaacaatcagagcctcccggtcagtcccaggctgcaggctgcagctgtccaatgacaacaggaccctcactctactcagtgtcacaaggaatgatgtaggaccctatgagtgtggaatccagaacgaattaagtgttgaccacagcgacccagtcatcctgaatgtcctctatggcccagacgaccccaccatttccccctcatacacctattaccgtccaggggtgaacctcagcctctcctgccatgcagcctctaacccacctgcacagtattcttggctgattgatgggaacatccagcaacacacacaagagctctttatctccaacatcactgagaagaacagcggactctatacctgccaggccaataactcagccagtggccacagcaggactacagtcaagacaatcacagtctctgtgaaaccccatctctactaaaaatacaaaaatgagctgggcttggtggcgcgcacctgtagtcccagttactcgggaggctgaggcaggagaatcgcttgaacccgggaggtggagattgcagtgagcccagatcgcaccactgcactccagtctggcaacagagcaagactccatctcaaaaagaaaagaaaagaagactctgacctgtactcttgaatacaagtttctgataccactgcactgtctgagaatttccaaaactttaatgaactaactgacagcttcatgaaactgtccaccaagatcaagcagagaaaataattaatttcatgggactaaatgaactaatgaggataatattttcataattttttatttgaaattttgctgattctttaaatgtcttgtttcccagatttcaggaaactttttttcttttaagctatccacagcttacagcaatttgataaaatatacttttgtgaacaaaaattgagacatttacattttctccctatgtggtcgctccagacttgggaaactattcatgaatatttatattgtatggtaatatagttattgcacaagttcaataaaaatctgctctttgtataacagaa

SEQ ID NO: 732006 - DNA, 2957 bp, Homo sapiens
ctcagggcagagggaggaaggacagcagaccagacagtcacagcagccttgacaaaacgttcctggaactcaagctcttctccacagaggaggacagagcagacagcagagaccatggagtctccctcggcccctccccacagatggtgcatcccctggcagaggctcctgctcacagcctcacttctaaccttctggaacccgcccaccactgccaagctcactattgaatccacgccgttcaatgtcgcagaggggaaggaggtgcttctacttgtccacaatctgccccagcatctttttggctacagctggtacaaaggtgaaagagtggatggcaaccgtcaaattataggatatgtaataggaactcaacaagctaccccagggcccgcatacagtggtcgagagataatataccccaatgcatccctgctgatccagaacatcatccagaatgacacaggattctacaccctacacgtcataaagtcagatcttgtgaatgaagaagcaactggccagttccgggtatacccggagctgcccaagccctccatctccagcaacaactccaaacccgtggaggacaaggatgctgtggccttcacctgtgaacctgagactcaggacgcaacctacctgtggtgggtaaacaatcagagcctcccggtcagtcccaggctgcaggctgcagctgtccaatgacaacaggaccctcactctactcagtgtcacaaggaatgatgtaggaccctatgagtgtggaatccagaacgaattaagtgttgaccacagcgacccagtcatcctgaatgtcctctatggcccagacgaccccaccatttccccctcatacacctattaccgtccaggggtgaacctcagcctctcctgccatgcagcctctaacccacctgcacagtattcttggctgattgatgggaacatccagcaacacacacaagagctctttatctccaacatcactgagaagaacagcggactctatacctgccaggccaataactcagccagtggccacagcaggactacagtcaagacaatcacagtctctgcggagctgcccaagccctccatctccagcaacaactccaaacccgtggaggacaaggatgctgtggccttcacctgtgaacctgaggctcagaacacaacctacctgtggtgggtaaatggtcagagcctcccagtcagtcccaggctgcagctgtccaatggcaacaggaccctcactctattcaatgtcacaagaaatgacgcaagagcctatgtatgtggaatccagaactcagtgagtgcaaaccgcagtgacccagtcaccctggatgtcctctatgggccggacacccccatcatttcccccccagactcgtcttacctttcgggagcgaacctcaacctctcctgccactcggcctctaacccatccccgcagtattcttggcgtatcaatgggataccgcagcaacacacacaagttctctttatcgccaaaatcacgccaaataataacgggacctatgcctgttttgtctctaacttggctactggccgcaataattccatagtcaagagcatcacagtctctgcatctggaacttctcctggtctctcagctggggccactgtcggcatcatgattggagtgctggttggggttgctctgatatagcagccctggtgtagtttcttcatttcaggaagactgacagttgttttgcttcttccttaaagcatttgcaacagctacagtctaaaattgcttctttaccaaggatatttacagaaaagactctgaccagagatcgagaccatcctagccaacatcgtgaaaccccatctctactaaaaatacaaaaatgagctgggcttggtggcgcgcacctgtagtcccagttactcgggaggctgaggcaggagaatcgcttgaacccgggaggtggagattgcagtgagcccagatcgcaccactgcactccagtctggcaacagagcaagactccatctcaaaaagaaaagaaaagaagactctgacctgtactcttgaatacaagtttctgataccactgcactgtctgagaatttccaaaactttaatgaactaactgacagcttcatgaaactgtccaccaagatcaagcagagaaaataattaatttcatgggactaaatgaactaatgaggataatattttcataattttttatttgaaattttgctgattctttaaatgtcttgtttcccagatttcaggaaactttttttcttttaagctatccacagcttacagcaatttgataaaatatacttttgtgaacaaaaattgagacatttacattttctccctatgtggtcgctccagacttgggaaactattcatgaatatttatattgtatggtaatatagttattgcacaagttcaataaaaatctgctctttgtataacagaatacatttgaaaacattggttatattaccaagactttgactagaatgtcgtatttgaggatataaacccataggtaataaacccacaggtactacaaacaaagtctgaagtcagccttggtttggcttcctagtgtcaattaaacttctaaaagtttaatctgagattccttataaaaacttccagcaaagcaactttaaaaaagtctgtgtgggccgggcgcggtggctcacgcctgtaatcccagcactttgatccgccgaggcgggcggatcacgaggtcaggagatccagaccatcctggctaacacagtgaaaccccgtctctactaaaaatacaaaaaaagttagccgggcgtggtggtgggggcctgtagtcccagctactcaggaggctgaggcaggagaacggcatgaacccgggaggcagggcttgcagtgagccaagatcatgccgctgcactccagcctgggagacaaagt

SEQ ID NO: 732007 - DNA, 2475 bp, Homo sapiens
ctcagggcagagggaggaaggacagcagaccagacagtcacagcagccttgacaaaacgttcctggaactcaagctcttctccacagaggaggacagagcagacagcagagaccatggagtctccctcggcccctccccacagatggtgcatcccctggcagaggctcctgctcacagcctcacttctaaccttctggaacccgcccaccactgccaagctcactattgaatccacgccgttcaatgtcgcagaggggaaggaggtgcttctacttgtccacaatctgccccagcatctttttggctacagctggtacaaaggtgaaagagtggatggcaaccgtcaaattataggatatgtaataggaactcaacaagctaccccagggcccgcatacagtggtcgagagataatataccccaatgcatccctgctgatccagaacatcatccagaatgacacaggattctacaccctacacgtcataaagtcagatcttgtgaatgaagaagcaactggccagttccgggtatacccggagctgcccaagccctccatctccagcaacaactccaaacccgtggaggacaaggatgctgtggccttcacctgtgaacctgagactcaggacgcaacctacctgtggtgggtaaacaatcagagcctcccggtcagtcccaggctgcaggctgcagctgtccaatgacaacaggaccctcactctactcagtgtcacaaggaatgatgtaggaccctatgagtgtggaatccagaacgaattaagtgttgaccacagcgacccagtcatcctgaatgtcctctatggcccagacgaccccaccatttccccctcatacacctattaccgtccaggggtgaacctcagcctctcctgccatgcagcctctaacccacctgcacagtattcttggctgattgatgggaacatccagcaacacacacaagagctctttatctccaacatcactgagaagaacagcggactctatacctgccaggccaataactcagccagtggccacagcaggactacagtcaagacaatcacagtctctgcggagctgcccaagccctccatctccagcaacaactccaaacccgtggaggacaaggatgctgtggccttcacctgtgaacctgaggctcagaacacaacctacctgtggtgggtaaatggtcagagcctcccagtcagtcccaggctgcagctgtccaatggcaacaggaccctcactctattcaatgtcacaagaaatgacgcaagagcctatgtatgtggaatccagaactcagtgagtgcaaaccgcagtgacccagtcaccctggatgtcctctatgggccggacacccccatcatttcccccccagactcgtcttacctttcgggagcgaacctcaacctctcctgccactcggcctctaacccatccccgcagtattcttggcgtatcaatgggataccgcagcaacacacacaagttctctttatcgccaaaatcacgccaaataataacgggacctatgcctgttttgtctctaacttggctactggccgcaataattccatagtcaagagcatcacagtctctgcatctggaacttctcctggtctctcagctggggccactgtcggcatcatgattggagtgctggttggggttgctctgatatagcagccctggtgtagtttcttcatttcaggaagactgacagttgttttgcttcttccttaaagcatttgcaacagctacagtctaaaattgcttctttaccaaggatatttacagaaaagactctgaccagagatcgagaccatcctagccaacatcgtgaaaccccatctctactaaaaatacaaaaatgagctgggcttggtggcgcgcacctgtagtcccagttactcgggaggctgaggcaggagaatcgcttgaacccgggaggtggagattgcagtgagcccagatcgcaccactgcactccagtctggcaacagagcaagactccatctcaaaaagaaaagaaaagaagactctgacctgtactcttgaatacaagtttctgataccactgcactgtctgagaatttccaaaactttaatgaactaactgacagcttcatgaaactgtccaccaagatcaagcagagaaaataattaatttcatgggactaaatgaactaatgaggataatattttcataattttttatttgaaattttgctgattctttaaatgtcttgtttcccagatttcaggaaactttttttcttttaagctatccacagcttacagcaatttgataaaatatacttttgtgaacaaaaattgagacatttacattttctccctatgtggtcgctccagacttgggaaactattcatgaatatttatattgtatggtaatatagttattgcacaagttcaataaaaatctgctctttgtataacagaa

SEQ ID NO: 732008 - DNA, 2023 bp, Homo sapiens
ctcagggcagagggaggaaggacagcagaccagacagtcacagcagccttgacaaaacgttcctggaactcaagctcttctccacagaggaggacagagcagacagcagagaccatggagtctccctcggcccctccccacagatggtgcatcccctggcagaggctcctgctcacagcctcacttctaaccttctggaacccgcccaccactgccaagctcactattgaatccacgccgttcaatgtcgcagaggggaaggaggtgcttctacttgtccacaatctgccccagcatctttttggctacagctggtacaaaggtgaaagagtggatggcaaccgtcaaattataggatatgtaataggaactcaacaagctaccccagggcccgcatacagtggtcgagagataatataccccaatgcatccctgctgatccagaacatcatccagaatgacacaggattctacaccctacacgtcataaagtcagatcttgtgaatgaagaagcaactggccagttccgggtatacccggagctgcccaagccctccatctccagcaacaactccaaacccgtggaggacaaggatgctgtggccttcacctgtgaacctgagactcaggacgcaacctacctgtggtgggtaaacaatcagagcctcccggtcagtcccaggctgcaggctgcagctgtccaatgacaacaggaccctcactctactcagtgtcacaaggaatgatgtaggaccctatgagtgtggaatccagaacgaattaagtgttgaccacagcgacccagtcatcctgaatgtcctctatggcccagacgaccccaccatttccccctcatacacctattaccgtccaggggtgaacctcagcctctcctgccatgcagcctctaacccacctgcacagtattcttggctgattgatgggaacatccagcaacacacacaagagctctttatctccaacatcactgagaagaacagcggactctatacctgccaggccaataactcagccagtggccacagcaggactacagtcaagacaatcacagtctctgcggagctgcccaagccctccatctccagcaacaactccaaacccgtggaggacaaggatgctgtggccttcacctgtgaacctgaggctcagaacacaacctacctgtggtgggtaaatggtcagagcctcccagtcagtcccaggctgcagctgtccaatggcaacaggaccctcactctattcaatgtcacaagaaatgacgcaagagcctatgtatgtggaatccagaactcagtgagtgcaaaccgcagtgacccagtcaccctggatgtcctctatgggccggacacccccatcatttcccccccagactcgtcttacctttcgggagcgaacctcaacctctcctgccactcggcctctaacccatccccgcagtattcttggcgtatcaatgggataccgcagcaacacacacaagttctctttatcgccaaaatcacgccaaataataacgggacctatgcctgttttgtctctaacttggctactggccgcaataattccatagtcaagagcatcacagtctctggtaagtggctccctggagcatcagcatcatattctggggtggagtctatctggttctcaccaaagagccaagaagacattttctttcccagtctgtgttccatgggcacaaggaaatcccaaattctatcctgagccccctcactccatctcggccaactctctcctccccggcttctctgatatctcacggctgacctcgggtccagcctggaatgtggggaggggcctcccttagccccagaaggcccccaatagtgaaagggacttcatagtccagaagaaagaagggtccttaaggtcgagttgctcctctctatcaccaatatgtccctttctgtcacctctttgtgttttttcacctactctgtgagctacaaggaacaaggaggctttgaaaccagcccacac

SEQ ID NO: 732009 - DNA, 1586 bp, Homo sapiens
  misc_feature (1519)..(1519): n is a, c, g, or t
  misc_feature (1541)..(1541): n is a, c, g, or t
  misc_feature (1551)..(1551): n is a, c, g, or t
ctcagggcagagggaggaaggacagcagaccagacagtcacagcagccttgacaaaacgttcctggaactcaagctcttctccacagaggaggacagagcagacagcagagaccatggagtctccctcggcccctccccacagatggtgcatcccctggcagaggctcctgctcacagcctcacttctaaccttctggaacccgcccaccactgccaagctcactattgaatccacgccgttcaatgtcgcagaggggaaggaggtgcttctacttgtccacaatctgccccagcatctttttggctacagctggtacaaaggtgaaagagtggatggcaaccgtcaaattataggatatgtaataggaactcaacaagctaccccagggcccgcatacagtggtcgagagataatataccccaatgcatccctgctgatccagaacatcatccagaatgacacaggattctacaccctacacgtcataaagtcagatcttgtgaatgaagaagcaactggccagttccgggtatacccggagctgcccaagccctccatctccagcaacaactccaaacccgtggaggacaaggatgctgtggccttcacctgtgaacctgagactcaggacgcaacctacctgtggtgggtaaacaatcagagcctcccggtcagtcccaggctgcaggctgcagctgtccaatgacaacaggaccctcactctactcagtgtcacaaggaatgatgtaggaccctatgagtgtggaatccagaacgaattaagtgttgaccacagcgacccagtcatcctgaatgtcctctatggcccagacgaccccaccatttccccctcatacacctattaccgtccaggggtgaacctcagcctctcctgccatgcagcctctaacccacctgcacagtattcttggctgattgatgggaacatccagcaacacacacaagagctctttatctccaacatcactgagaagaacagcggactctatacctgccaggccaataactcagccagtggccacagcaggactacagtcaagacaatcacagtctctgcggagctgcccaagccctccatctccagcaacaactccaaacccgtggaggacaaggatgctgtggccttcacctgtgaacctgaggctcagaacacaacctacctgtggtgggtaaatggtcagagcctcccagtcagtcccaggctgcagctgtccaatggcaacaggaccctcactctattcaatgtcacaagaaatgacgcaagagcctatgtatgtggaatccagaactcagtgagtgcaaaccgcagtgacccagtcaccctggatgtcctctatgggccggacacccccatcatttcccccccagactcgtcttacctgatgggagcaagactgatcttctcccatcagcattttgtaaatcaatgtgaaatttgcaaacaagctaagatacattttcttgaaaattgtcctaatttttgattgtatagtttngtcttctgtgattctatctgtncaggcatatnagcataaatttttcatatcgatcacaacatatcac

SEQ ID NO: 732010 - DNA, 1056 bp, Homo sapiens
ctcagggcagagggaggaaggacagcagaccagacagtcacagcagccttgacaaaacgttcctggaactcaagctcttctccacagaggaggacagagcagacagcagagaccatggagtctccctcggcccctccccacagatggtgcatcccctggcagaggctcctgctcacagcctcacttctaaccttctggaacccgcccaccactgccaagctcactattgaatccacgccgttcaatgtcgcagaggggaaggaggtgcttctacttgtccacaatctgccccagcatctttttggctacagctggtacaaaggtgaaagagtggatggcaaccgtcaaattataggatatgtaataggaactcaacaagctaccccagggcccgcatacagtggtcgagagataatataccccaatgcatccctgctgatccagaacatcatccagaatgacacaggattctacaccctacacgtcataaagtcagatcttgtgaatgaagaagcaactggccagttccgggtatacccggagctgcccaagccctccatctccagcaacaactccaaacccgtggaggacaaggatgctgtggccttcacctgtgaacctgagactcaggacgcaacctacctgtggtgggtaaacaatcagagcctcccggtcagtcccaggctgcaggctgcagctgtccaatgacaacaggaccctcactctactcagtgtcacaaggaatgatgtaggaccctatgagtgtggaatccagaacgaattaagtgttgaccacagcgacccagtcatcctgaatgtcctctatggcccagacgaccccaccatttccccctcatacacctattaccgtccaggggtgaacctcagcctctcctgccatgcagcctctaacccacctgcacagtattcttggctgattgatgggaacatccagcaacacacacaagagctctttatctccaacatcactgagaagaacagcggactctatacctgccaggccaataacttgtccaccgggcgatcctctaatca

SEQ ID NO: 732011 - DNA, 1747 bp, Homo sapiens; identical to SEQ ID NO: 358610

SEQ ID NO: 732012 - DNA, 1265 bp, Homo sapiens
tggtgattagaggatcccccgctgtccaatggcaacaggaccctcactctattcaatgtcacaagaaatgacgcaagagcctatgtatgtggaatccagaactcagtgagtgcaaaccgcagtgacccagtcaccctggatgtcctctatgggccggacacccccatcatttcccccccagactcgtcttacctttcgggagcgaacctcaacctctcctgccactcggcctctaacccatccccgcagtattcttggcgtatcaatgggataccgcagcaacacacacaagttctctttatcgccaaaatcacgccaaataataacgggacctatgcctgttttgtctctaacttggctactggccgcaataattccatagtcaagagcatcacagtctctgcatctggaacttctcctggtctctcagctggggccactgtcggcatcatgattggagtgctggttggggttgctctgatatagcagccctggtgtagtttcttcatttcaggaagactgacagttgttttgcttcttccttaaagcatttgcaacagctacagtctaaaattgcttctttaccaaggatatttacagaaaagactctgaccagagatcgagaccatcctagccaacatcgtgaaaccccatctctactaaaaatacaaaaatgagctgggcttggtggcgcgcacctgtagtcccagttactcgggaggctgaggcaggagaatcgcttgaacccgggaggtggagattgcagtgagcccagatcgcaccactgcactccagtctggcaacagagcaagactccatctcaaaaagaaaagaaaagaagactctgacctgtactcttgaatacaagtttctgataccactgcactgtctgagaatttccaaaactttaatgaactaactgacagcttcatgaaactgtccaccaagatcaagcagagaaaataattaatttcatgggactaaatgaactaatgaggataatattttcataattttttatttgaaattttgctgattctttaaatgtcttgtttcccagatttcaggaaactttttttcttttaagctatccacagcttacagcaatttgataaaatatacttttgtgaacaaaaattgagacatttacattttctccctatgtggtcgctccagacttgggaaactattcatgaatatttatattgtatggtaatatagttattgcacaagttcaataaaaatctgctctttgtataacagaa

SEQ ID NO: 732013 - DNA, 2913 bp, Homo sapiens
gacaaagaacatacatatggttctgctgttaaatccgggcagctcctgcctgtcacctgaagttctagatcattccctggactccactctatctttaggggtctctggctcaagtcagtcatcatcaaacacctgggaaaaactgccccaccttgtgcctccactgcctaacgactgagctgacctccaggcttgcctctggtgtcccctgtgttatttctactgaaacatccagtcccaggccaggctgcacaatatgtacagggtttaaggacaatgggaagacccatcactatccatttctaggatgtccttgcaaagggaaaccacagaaaaaatatacctagggaaacaaagtaggactgaaggtggaagggacccagcacttgaatgttccaggtgaggaccctacagtgggccaagtagtcaactggtcagggagggaccaggagaggcaccaggagctgtgacctcccccccagtcctgtgtctgttcacagcccaatgctgctgcttaattcacacttgagaaagtctgtgcttcccccacagtgagcaggcagcctcgcagtctctgagatctcagatcatcgtgcatctgtcttgtgacacatgcacccaccgtgggtttttaagggctcaggtgggctgagaggtggaaggtgccaactctgattgaaagatgcctgtgaggaatcaaaggtgccacacagggcaatcttctctctgttatctgcacagcggagctgcccaagccctccatctccagcaacaactccaaacccgtggaggacaaggatgctgtggccttcacctgtgaacctgagactcaggacgcaacctacctgtggtgggtaaacaatcagagcctcccggtcagtcccaggctgcagctgtccaatggcaacaggaccctcactctattcaatgtcacaagaaatgacacagcaagctacaaatgtgaaacccagaacccagtgagtgccaggcgcagtgattcagtcatcctgaatgtcctctatggcccggatgcccccaccatttcccctctaaacacatcttacagatcaggggaaaatctgaacctctcctgccacgcagcctctaacccacctgcacagtactcttggtttgtcaatgggactttccagcaatccacccaagagctctttatccccaacatcactgtgaataatagtggatcctatacgtgccaagcccataactcagacactggcctcaataggaccacagtcacgacgatcacagtctatgcagagccacccaaacccttcatcaccagcaacaactccaaccccgtggaggatgaggatgctgtagccttaacctgtgaacctgagattcagaacacaacctacctgtggtgggtaaataatcagagcctcccggtcagtcccaggctgcagctgtccaatgacaacaggaccctcactctactcagtgtcacaaggaatgatgtaggaccctatgagtgtggaatccagaacgaattaagtgttgaccacagcgacccagtcatcctgaatgtcctctatggcccagacgaccccaccatttccccctcatacacctattaccgtccaggggtgaacctcagcctctcctgccatgcagcctctaacccacctgcacagtattcttggctgattgatgggaacatccagcaacacacacaagagctctttatctccaacatcactgagaagaacagcggactctatacctgccaggccaataactcagccagtggccacagcaggactacagtcaagacaatcacagtctctgtgaaaccccatctctactaaaaatacaaaaatgagctgggcttggtggcgcgcacctgtagtcccagttactcgggaggctgaggcaggagaatcgcttgaacccgggaggtggagattgcagtgagcccagatcgcaccactgcactccagtctggcaacagagcaagactccatctcaaaaagaaaagaaaagaagactctgacctgtactcttgaatacaagtttctgataccactgcactgtctgagaatttccaaaactttaatgaactaactgacagcttcatgaaactgtccaccaagatcaagcagagaaaataattaatttcatgggactaaatgaactaatgaggataatattttcataattttttatttgaaattttgctgattctttaaatgtcttgtttcccagatttcaggaaactttttttcttttaagctatccacagcttacagcaatttgataaaatatacttttgtgaacaaaaattgagacatttacattttctccctatgtggtcgctccagacttgggaaactattcatgaatatttatattgtatggtaatatagttattgcacaagttcaataaaaatctgctctttgtataacagaatacatttgaaaacattggttatattaccaagactttgactagaatgtcgtatttgaggatataaacccataggtaataaacccacaggtactacaaacaaagtctgaagtcagccttggtttggcttcctagtgtcaattaaacttctaaaagtttaatctgagattccttataaaaacttccagcaaagcaactttaaaaaagtctgtgtgggccgggcgcggtggctcacgcctgtaatcccagcactttgatccgccgaggcgggcggatcacgaggtcaggagatccagaccatcctggctaacacagtgaaaccccgtctctactaaaaatacaaaaaaagttagccgggcgtggtggtgggggcctgtagtcccagctactcaggaggctgaggcaggagaacggcatgaacccgggaggcagggcttgcagtgagccaagatcatgccgctgcactccagcctgggagacaaagt

SEQ ID NO: 732014 - DNA, 2431 bp, Homo sapiens
gacaaagaacatacatatggttctgctgttaaatccgggcagctcctgcctgtcacctgaagttctagatcattccctggactccactctatctttaggggtctctggctcaagtcagtcatcatcaaacacctgggaaaaactgccccaccttgtgcctccactgcctaacgactgagctgacctccaggcttgcctctggtgtcccctgtgttatttctactgaaacatccagtcccaggccaggctgcacaatatgtacagggtttaaggacaatgggaagacccatcactatccatttctaggatgtccttgcaaagggaaaccacagaaaaaatatacctagggaaacaaagtaggactgaaggtggaagggacccagcacttgaatgttccaggtgaggaccctacagtgggccaagtagtcaactggtcagggagggaccaggagaggcaccaggagctgtgacctcccccccagtcctgtgtctgttcacagcccaatgctgctgcttaattcacacttgagaaagtctgtgcttcccccacagtgagcaggcagcctcgcagtctctgagatctcagatcatcgtgcatctgtcttgtgacacatgcacccaccgtgggtttttaagggctcaggtgggctgagaggtggaaggtgccaactctgattgaaagatgcctgtgaggaatcaaaggtgccacacagggcaatcttctctctgttatctgcacagcggagctgcccaagccctccatctccagcaacaactccaaacccgtggaggacaaggatgctgtggccttcacctgtgaacctgagactcaggacgcaacctacctgtggtgggtaaacaatcagagcctcccggtcagtcccaggctgcagctgtccaatggcaacaggaccctcactctattcaatgtcacaagaaatgacacagcaagctacaaatgtgaaacccagaacccagtgagtgccaggcgcagtgattcagtcatcctgaatgtcctctatggcccggatgcccccaccatttcccctctaaacacatcttacagatcaggggaaaatctgaacctctcctgccacgcagcctctaacccacctgcacagtactcttggtttgtcaatgggactttccagcaatccacccaagagctctttatccccaacatcactgtgaataatagtggatcctatacgtgccaagcccataactcagacactggcctcaataggaccacagtcacgacgatcacagtctatgcagagccacccaaacccttcatcaccagcaacaactccaaccccgtggaggatgaggatgctgtagccttaacctgtgaacctgagattcagaacacaacctacctgtggtgggtaaataatcagagcctcccggtcagtcccaggctgcagctgtccaatgacaacaggaccctcactctactcagtgtcacaaggaatgatgtaggaccctatgagtgtggaatccagaacgaattaagtgttgaccacagcgacccagtcatcctgaatgtcctctatggcccagacgaccccaccatttccccctcatacacctattaccgtccaggggtgaacctcagcctctcctgccatgcagcctctaacccacctgcacagtattcttggctgattgatgggaacatccagcaacacacacaagagctctttatctccaacatcactgagaagaacagcggactctatacctgccaggccaataactcagccagtggccacagcaggactacagtcaagacaatcacagtctctgtgaaaccccatctctactaaaaatacaaaaatgagctgggcttggtggcgcgcacctgtagtcccagttactcgggaggctgaggcaggagaatcgcttgaacccgggaggtggagattgcagtgagcccagatcgcaccactgcactccagtctggcaacagagcaagactccatctcaaaaagaaaagaaaagaagactctgacctgtactcttgaatacaagtttctgataccactgcactgtctgagaatttccaaaactttaatgaactaactgacagcttcatgaaactgtccaccaagatcaagcagagaaaataattaatttcatgggactaaatgaactaatgaggataatattttcataattttttatttgaaattttgctgattctttaaatgtcttgtttcccagatttcaggaaactttttttcttttaagctatccacagcttacagcaatttgataaaatatacttttgtgaacaaaaattgagacatttacattttctccctatgtggtcgctccagacttgggaaactattcatgaatatttatattgtatggtaatatagttattgcacaagttcaataaaaatctgctctttgtataacagaa

SEQ ID NO: 732015 - DNA, 2316 bp, Homo sapiens
  misc_feature (2249)..(2249): n is a, c, g, or t
  misc_feature (2271)..(2271): n is a, c, g, or t
  misc_feature (2281)..(2281): n is a, c, g, or t
gacaaagaacatacatatggttctgctgttaaatccgggcagctcctgcctgtcacctgaagttctagatcattccctggactccactctatctttaggggtctctggctcaagtcagtcatcatcaaacacctgggaaaaactgccccaccttgtgcctccactgcctaacgactgagctgacctccaggcttgcctctggtgtcccctgtgttatttctactgaaacatccagtcccaggccaggctgcacaatatgtacagggtttaaggacaatgggaagacccatcactatccatttctaggatgtccttgcaaagggaaaccacagaaaaaatatacctagggaaacaaagtaggactgaaggtggaagggacccagcacttgaatgttccaggtgaggaccctacagtgggccaagtagtcaactggtcagggagggaccaggagaggcaccaggagctgtgacctcccccccagtcctgtgtctgttcacagcccaatgctgctgcttaattcacacttgagaaagtctgtgcttcccccacagtgagcaggcagcctcgcagtctctgagatctcagatcatcgtgcatctgtcttgtgacacatgcacccaccgtgggtttttaagggctcaggtgggctgagaggtggaaggtgccaactctgattgaaagatgcctgtgaggaatcaaaggtgccacacagggcaatcttctctctgttatctgcacagcggagctgcccaagccctccatctccagcaacaactccaaacccgtggaggacaaggatgctgtggccttcacctgtgaacctgagactcaggacgcaacctacctgtggtgggtaaacaatcagagcctcccggtcagtcccaggctgcagctgtccaatggcaacaggaccctcactctattcaatgtcacaagaaatgacacagcaagctacaaatgtgaaacccagaacccagtgagtgccaggcgcagtgattcagtcatcctgaatgtcctctatggcccggatgcccccaccatttcccctctaaacacatcttacagatcaggggaaaatctgaacctctcctgccacgcagcctctaacccacctgcacagtactcttggtttgtcaatgggactttccagcaatccacccaagagctctttatccccaacatcactgtgaataatagtggatcctatacgtgccaagcccataactcagacactggcctcaataggaccacagtcacgacgatcacagtctatgcagagccacccaaacccttcatcaccagcaacaactccaaccccgtggaggatgaggatgctgtagccttaacctgtgaacctgagattcagaacacaacctacctgtggtgggtaaataatcagagcctcccggtcagtcccaggctgcagctgtccaatgacaacaggaccctcactctactcagtgtcacaaggaatgatgtaggaccctatgagtgtggaatccagaacgaattaagtgttgaccacagcgacccagtcatcctgaatgtcctctatggcccagacgaccccaccatttccccctcatacacctattaccgtccaggggtgaacctcagcctctcctgccatgcagcctctaacccacctgcacagtattcttggctgattgatgggaacatccagcaacacacacaagagctctttatctccaacatcactgagaagaacagcggactctatacctgccaggccaataactcagccagtggccacagcaggactacagtcaagacaatcacagtctctgcggagctgcccaagccctccatctccagcaacaactccaaacccgtggaggacaaggatgctgtggccttcacctgtgaacctgaggctcagaacacaacctacctgtggtgggtaaatggtcagagcctcccagtcagtcccaggctgcagctgtccaatggcaacaggaccctcactctattcaatgtcacaagaaatgacgcaagagcctatgtatgtggaatccagaactcagtgagtgcaaaccgcagtgacccagtcaccctggatgtcctctatgggccggacacccccatcatttcccccccagactcgtcttacctgatgggagcaagactgatcttctcccatcagcattttgtaaatcaatgtgaaatttgcaaacaagctaagatacattttcttgaaaattgtcctaatttttgattgtatagtttngtcttctgtgattctatctgtncaggcatatnagcataaatttttcatatcgatcacaacatatcac

SEQ ID NO: 732016 - DNA, 2291 bp, Homo sapiens
  misc_feature (2224)..(2224): n is a, c, g, or t
  misc_feature (2246)..(2246): n is a, c, g, or t
  misc_feature (2256)..(2256): n is a, c, g, or t
gacaaagaacatacatatggttctgctgttaaatccgggcagctcctgcctgtcacctgaagttctagatcattccctggactccactctatctttaggggtctctggctcaagtcagtcatcatcaaacacctgggaaaaactgccccaccttgtgcctccactgcctaacgactgagctgacctccaggcttgcctctggtgtcccctgtgttatttctactgaaacatccagtcccaggccaggctgcacaatatgtacagggtttaaggacaatgggaagacccatcactatccatttctaggatgtccttgcaaagggaaaccacagaaaaaatatacctagggaaacaaagtaggactgaaggtggaagggacccagcacttgaatgttccaggtgaggaccctacagtgggccaagtagtcaactggtcagggagggaccaggagaggcaccaggagctgtgacctcccccccagtcctgtgtctgttcacagcccaatgctgctgcttaattcacacttgagaaagtctgtgcttcccccacagtgagcaggcagcctcgcagtctctgagatctcagatcatcgtgcatctgtcttgtgacacatgcacccaccgtgggtttttaagggctcaggtgggctgagaggtggaaggtgccaactctgattgaaagatgcctgtgaggaatcaaaggtgccacacagggcaatcttctctctgttatctgcacagcggagctgcccaagccctccatctccagcaacaactccaaacccgtggaggacaaggatgctgtggccttcacctgtgaacctgagactcaggacgcaacctacctgtggtgggtaaacaatcagagcctcccggtcagtcccaggctgcagctgtccaatggcaacaggaccctcactctattcaatgtcacaagaaatgacacagcaagctacaaatgtgaaacccagaacccagtgagtgccaggcgcagtgattcagtcatcctgaatgtcctctatggcccggatgcccccaccatttcccctctaaacacatcttacagatcaggggaaaatctgaacctctcctgccacgcagcctctaacccacctgcacagtactcttggtttgtcaatgggactttccagcaatccacccaagagctctttatccccaacatcactgtgaataatagtggatcctatacgtgccaagcccataactcagacactggcctcaataggaccacagtcacgacgatcacagtctatgcagagccacccaaacccttcatcaccagcaacaactccaaccccgtggaggatgaggatgctgtagccttaacctgtgaacctgagattcagaacacaacctacctgtggtgggtaaataatcagagcctcccggtcagtcccaggctgcagctgtccaatgacaacaggaccctcactctactcagtgtcacaaggaatgatgtaggaccctatgagtgtggaatccagaacgaattaagtgttgaccacagcatggcccagacgaccccaccatttccccctcatacacctattaccgtccaggggtgaacctcagcctctcctgccatgcagcctctaacccacctgcacagtattcttggctgattgatgggaacatccagcaacacacacaagagctctttatctccaacatcactgagaagaacagcggactctatacctgccaggccaataactcagccagtggccacagcaggactacagtcaagacaatcacagtctctgcggagctgcccaagccctccatctccagcaacaactccaaacccgtggaggacaaggatgctgtggccttcacctgtgaacctgaggctcagaacacaacctacctgtggtgggtaaatggtcagagcctcccagtcagtcccaggctgcagctgtccaatggcaacaggaccctcactctattcaatgtcacaagaaatgacgcaagagcctatgtatgtggaatccagaactcagtgagtgcaaaccgcagtgacccagtcaccctggatgtcctctatgggccggacacccccatcatttcccccccagactcgtcttacctgatgggagcaagactgatcttctcccatcagcattttgtaaatcaatgtgaaatttgcaaacaagctaagatacattttcttgaaaattgtcctaatttttgattgtatagtttngtcttctgtgattctatctgtncaggcatatnagcataaatttttcatatcgatcacaacatatcac

SEQ ID NO: 732017 - DNA, 2293 bp, Homo sapiens
gtgagtatatctgctcctctctggcccaggctgccagcccaaatccacagggccagaggcaggatttctcagtccctctcaggttcaagtacacagaccctcaaccctggacatccagactgtctgtgactttctgccccagaaaaacctgggcagaccaagtcttgaccaagaataggaggggaggggctgcttctgtcctgggaggctcagggtccacaccctatgatgggagaaacaggtgaatatctcagactcaggctcagtagatacaagaggggtttggctgagactttaggattgtgattcagcttagagggacactgtggtccttccatagaccaggaacttccacttccctctgacaatatcacctgtggctttattttgtttgctccagatggcccggatgcccccaccatttcccctctaaacacatcttacagatcaggggaaaatctgaacctctcctgccacgcagcctctaacccacctgcacagtactcttggtttgtcaatgggactttccagcaatccacccaagagctctttatccccaacatcactgtgaataatagtggatcctatacgtgccaagcccataactcagacactggcctcaataggaccacagtcacgacgatcacagtctatgcagagccacccaaacccttcatcaccagcaacaactccaaccccgtggaggatgaggatgctgtagccttaacctgtgaacctgagattcagaacacaacctacctgtggtgggtaaataatcagagcctcccggtcagtcccaggctgcagctgtccaatgacaacaggaccctcactctactcagtgtcacaaggaatgatgtaggaccctatgagtgtggaatccagaacgaattaagtgttgaccacagcgacccagtcatcctgaatgtcctctatggcccagacgaccccaccatttccccctcatacacctattaccgtccaggggtgaacctcagcctctcctgccatgcagcctctaacccacctgcacagtattcttggctgattgatgggaacatccagcaacacacacaagagctctttatctccaacatcactgagaagaacagcggactctatacctgccaggccaataactcagccagtggccacagcaggactacagtcaagacaatcacagtctctgtgaaaccccatctctactaaaaatacaaaaatgagctgggcttggtggcgcgcacctgtagtcccagttactcgggaggctgaggcaggagaatcgcttgaacccgggaggtggagattgcagtgagcccagatcgcaccactgcactccagtctggcaacagagcaagactccatctcaaaaagaaaagaaaagaagactctgacctgtactcttgaatacaagtttctgataccactgcactgtctgagaatttccaaaactttaatgaactaactgacagcttcatgaaactgtccaccaagatcaagcagagaaaataattaatttcatgggactaaatgaactaatgaggataatattttcataattttttatttgaaattttgctgattctttaaatgtcttgtttcccagatttcaggaaactttttttcttttaagctatccacagcttacagcaatttgataaaatatacttttgtgaacaaaaattgagacatttacattttctccctatgtggtcgctccagacttgggaaactattcatgaatatttatattgtatggtaatatagttattgcacaagttcaataaaaatctgctctttgtataacagaatacatttgaaaacattggttatattaccaagactttgactagaatgtcgtatttgaggatataaacccataggtaataaacccacaggtactacaaacaaagtctgaagtcagccttggtttggcttcctagtgtcaattaaacttctaaaagtttaatctgagattccttataaaaacttccagcaaagcaactttaaaaaagtctgtgtgggccgggcgcggtggctcacgcctgtaatcccagcactttgatccgccgaggcgggcggatcacgaggtcaggagatccagaccatcctggctaacacagtgaaaccccgtctctactaaaaatacaaaaaaagttagccgggcgtggtggtgggggcctgtagtcccagctactcaggaggctgaggcaggagaacggcatgaacccgggaggcagggcttgcagtgagccaagatcatgccgctgcactccagcctgggagacaaagt

SEQ ID NO: 732018 - DNA, 1811 bp, Homo sapiens
gtgagtatatctgctcctctctggcccaggctgccagcccaaatccacagggccagaggcaggatttctcagtccctctcaggttcaagtacacagaccctcaaccctggacatccagactgtctgtgactttctgccccagaaaaacctgggcagaccaagtcttgaccaagaataggaggggaggggctgcttctgtcctgggaggctcagggtccacaccctatgatgggagaaacaggtgaatatctcagactcaggctcagtagatacaagaggggtttggctgagactttaggattgtgattcagcttagagggacactgtggtccttccatagaccaggaacttccacttccctctgacaatatcacctgtggctttattttgtttgctccagatggcccggatgcccccaccatttcccctctaaacacatcttacagatcaggggaaaatctgaacctctcctgccacgcagcctctaacccacctgcacagtactcttggtttgtcaatgggactttccagcaatccacccaagagctctttatccccaacatcactgtgaataatagtggatcctatacgtgccaagcccataactcagacactggcctcaataggaccacagtcacgacgatcacagtctatgcagagccacccaaacccttcatcaccagcaacaactccaaccccgtggaggatgaggatgctgtagccttaacctgtgaacctgagattcagaacacaacctacctgtggtgggtaaataatcagagcctcccggtcagtcccaggctgcagctgtccaatgacaacaggaccctcactctactcagtgtcacaaggaatgatgtaggaccctatgagtgtggaatccagaacgaattaagtgttgaccacagcgacccagtcatcctgaatgtcctctatggcccagacgaccccaccatttccccctcatacacctattaccgtccaggggtgaacctcagcctctcctgccatgcagcctctaacccacctgcacagtattcttggctgattgatgggaacatccagcaacacacacaagagctctttatctccaacatcactgagaagaacagcggactctatacctgccaggccaataactcagccagtggccacagcaggactacagtcaagacaatcacagtctctgtgaaaccccatctctactaaaaatacaaaaatgagctgggcttggtggcgcgcacctgtagtcccagttactcgggaggctgaggcaggagaatcgcttgaacccgggaggtggagattgcagtgagcccagatcgcaccactgcactccagtctggcaacagagcaagactccatctcaaaaagaaaagaaaagaagactctgacctgtactcttgaatacaagtttctgataccactgcactgtctgagaatttccaaaactttaatgaactaactgacagcttcatgaaactgtccaccaagatcaagcagagaaaataattaatttcatgggactaaatgaactaatgaggataatattttcataattttttatttgaaattttgctgattctttaaatgtcttgtttcccagatttcaggaaactttttttcttttaagctatccacagcttacagcaatttgataaaatatacttttgtgaacaaaaattgagacatttacattttctccctatgtggtcgctccagacttgggaaactattcatgaatatttatattgtatggtaatatagttattgcacaagttcaataaaaatctgctctttgtataacagaa

SEQ ID NO: 732019 - DNA, 1696 bp, Homo sapiens
  misc_feature (1629)..(1629): n is a, c, g, or t
  misc_feature (1651)..(1651): n is a, c, g, or t
  misc_feature (1661)..(1661): n is a, c, g, or t
gtgagtatatctgctcctctctggcccaggctgccagcccaaatccacagggccagaggcaggatttctcagtccctctcaggttcaagtacacagaccctcaaccctggacatccagactgtctgtgactttctgccccagaaaaacctgggcagaccaagtcttgaccaagaataggaggggaggggctgcttctgtcctgggaggctcagggtccacaccctatgatgggagaaacaggtgaatatctcagactcaggctcagtagatacaagaggggtttggctgagactttaggattgtgattcagcttagagggacactgtggtccttccatagaccaggaacttccacttccctctgacaatatcacctgtggctttattttgtttgctccagatggcccggatgcccccaccatttcccctctaaacacatcttacagatcaggggaaaatctgaacctctcctgccacgcagcctctaacccacctgcacagtactcttggtttgtcaatgggactttccagcaatccacccaagagctctttatccccaacatcactgtgaataatagtggatcctatacgtgccaagcccataactcagacactggcctcaataggaccacagtcacgacgatcacagtctatgcagagccacccaaacccttcatcaccagcaacaactccaaccccgtggaggatgaggatgctgtagccttaacctgtgaacctgagattcagaacacaacctacctgtggtgggtaaataatcagagcctcccggtcagtcccaggctgcagctgtccaatgacaacaggaccctcactctactcagtgtcacaaggaatgatgtaggaccctatgagtgtggaatccagaacgaattaagtgttgaccacagcgacccagtcatcctgaatgtcctctatggcccagacgaccccaccatttccccctcatacacctattaccgtccaggggtgaacctcagcctctcctgccatgcagcctctaacccacctgcacagtattcttggctgattgatgggaacatccagcaacacacacaagagctctttatctccaacatcactgagaagaacagcggactctatacctgccaggccaataactcagccagtggccacagcaggactacagtcaagacaatcacagtctctgcggagctgcccaagccctccatctccagcaacaactccaaacccgtggaggacaaggatgctgtggccttcacctgtgaacctgaggctcagaacacaacctacctgtggtgggtaaatggtcagagcctcccagtcagtcccaggctgcagctgtccaatggcaacaggaccctcactctattcaatgtcacaagaaatgacgcaagagcctatgtatgtggaatccagaactcagtgagtgcaaaccgcagtgacccagtcaccctggatgtcctctatgggccggacacccccatcatttcccccccagactcgtcttacctgatgggagcaagactgatcttctcccatcagcattttgtaaatcaatgtgaaatttgcaaacaagctaagatacattttcttgaaaattgtcctaatttttgattgtatagtttngtcttctgtgattctatctgtncaggcatatnagcataaatttttcatatcgatcacaacatatcac

SEQ ID NO: 732020 - DNA, 1671 bp, Homo sapiens
  misc_feature (1604)..(1604): n is a, c, g, or t
  misc_feature (1626)..(1626): n is a, c, g, or t
  misc_feature (1636)..(1636): n is a, c, g, or t
gtgagtatatctgctcctctctggcccaggctgccagcccaaatccacagggccagaggcaggatttctcagtccctctcaggttcaagtacacagaccctcaaccctggacatccagactgtctgtgactttctgccccagaaaaacctgggcagaccaagtcttgaccaagaataggaggggaggggctgcttctgtcctgggaggctcagggtccacaccctatgatgggagaaacaggtgaatatctcagactcaggctcagtagatacaagaggggtttggctgagactttaggattgtgattcagcttagagggacactgtggtccttccatagaccaggaacttccacttccctctgacaatatcacctgtggctttattttgtttgctccagatggcccggatgcccccaccatttcccctctaaacacatcttacagatcaggggaaaatctgaacctctcctgccacgcagcctctaacccacctgcacagtactcttggtttgtcaatgggactttccagcaatccacccaagagctctttatccccaacatcactgtgaataatagtggatcctatacgtgccaagcccataactcagacactggcctcaataggaccacagtcacgacgatcacagtctatgcagagccacccaaacccttcatcaccagcaacaactccaaccccgtggaggatgaggatgctgtagccttaacctgtgaacctgagattcagaacacaacctacctgtggtgggtaaataatcagagcctcccggtcagtcccaggctgcagctgtccaatgacaacaggaccctcactctactcagtgtcacaaggaatgatgtaggaccctatgagtgtggaatccagaacgaattaagtgttgaccacagcatggcccagacgaccccaccatttccccctcatacacctattaccgtccaggggtgaacctcagcctctcctgccatgcagcctctaacccacctgcacagtattcttggctgattgatgggaacatccagcaacacacacaagagctctttatctccaacatcactgagaagaacagcggactctatacctgccaggccaataactcagccagtggccacagcaggactacagtcaagacaatcacagtctctgcggagctgcccaagccctccatctccagcaacaactccaaacccgtggaggacaaggatgctgtggccttcacctgtgaacctgaggctcagaacacaacctacctgtggtgggtaaatggtcagagcctcccagtcagtcccaggctgcagctgtccaatggcaacaggaccctcactctattcaatgtcacaagaaatgacgcaagagcctatgtatgtggaatccagaactcagtgagtgcaaaccgcagtgacccagtcaccctggatgtcctctatgggccggacacccccatcatttcccccccagactcgtcttacctgatgggagcaagactgatcttctcccatcagcattttgtaaatcaatgtgaaatttgcaaacaagctaagatacattttcttgaaaattgtcctaatttttgattgtatagtttngtcttctgtgattctatctgtncaggcatatnagcataaatttttcatatcgatcacaacatatcac

SEQ ID NO: 732021 - DNA, 2564 bp, Homo sapiens
  misc_feature (191)..(191): n is a, c, g, or t
gaatgataggtgcagtgagattcactcaattgagctgatcgattttataaacgtcgtcgaccttgagtcagaactctggcgtctgatcagagacaggccacccaatcacagcaggtgcttggaggggagtggaatctcagtagagttgatgactcaccaagtgcaaatgggaaaaagcaacacagtcacanttccatgtatacccggcagagccacccaaacccttcatcaccagcaacaactccaaccccgtggaggatgaggatgctgtagccttaacctgtgaacctgagattcagaacacaacctacctgtggtgggtaaataatcagagcctcccggtcagtcccaggctgcagctgtccaatgacaacaggaccctcactctactcagtgtcacaaggaatgatgtaggaccctatgagtgtggaatccagaacgaattaagtgttgaccacagcgacccagtcatcctgaatgtcctctatggcccagacgaccccaccatttccccctcatacacctattaccgtccaggggtgaacctcagcctctcctgccatgcagcctctaacccacctgcacagtattcttggctgattgatgggaacatccagcaacacacacaagagctctttatctccaacatcactgagaagaacagcggactctatacctgccaggccaataactcagccagtggccacagcaggactacagtcaagacaatcacagtctctgcggagctgcccaagccctccatctccagcaacaactccaaacccgtggaggacaaggatgctgtggccttcacctgtgaacctgaggctcagaacacaacctacctgtggtgggtaaatggtcagagcctcccagtcagtcccaggctgcagctgtccaatggcaacaggaccctcactctattcaatgtcacaagaaatgacgcaagagcctatgtatgtggaatccagaactcagtgagtgcaaaccgcagtgacccagtcaccctggatgtcctctatgggccggacacccccatcatttcccccccagactcgtcttacctttcgggagcgaacctcaacctctcctgccactcggcctctaacccatccccgcagtattcttggcgtatcaatgggataccgcagcaacacacacaagttctctttatcgccaaaatcacgccaaataataacgggacctatgcctgttttgtctctaacttggctactggccgcaataattccatagtcaagagcatcacagtctctgcatctggaacttctcctggtctctcagctggggccactgtcggcatcatgattggagtgctggttggggttgctctgatatagcagccctggtgtagtttcttcatttcaggaagactgacagttgttttgcttcttccttaaagcatttgcaacagctacagtctaaaattgcttctttaccaaggatatttacagaaaagactctgaccagagatcgagaccatcctagccaacatcgctgtagtcccagttactcgggaggctgaggcaggagaatcgcttgaacccgggaggtggagattgcagtgagcccagatcgcaccactgcactccagtctggcaacagagcaagactccatctcaaaaagaaaagaaaagaagactctgacctgtactcttgaatacaagtttctgataccactgcactgtctgagaatttccaaaactttaatgaactaactgacagcttcatgaaactgtccaccaagatcaagcagagaaaataattaatttcatgggactaaatgaactaatgaggataatattttcataattttttatttgaaattttgctgattctttaaatgtcttgtttcccagatttcaggaaactttttttcttttaagctatccacagcttacagcaatttgataaaatatacttttgtgaacaaaaattgagacatttacattttctccctatgtggtcgctccagacttgggaaactattcatgaatatttatattgtatggtaatatagttattgcacaagttcaataaaaatctgctctttgtataacagaatacatttgaaaacattggttatattaccaagactttgactagaatgtcgtatttgaggatataaacccataggtaataaacccacaggtactacaaacaaagtctgaagtcagccttggtttggcttcctagtgtcaattaaacttctaaaagtttaatctgagattccttataaaaacttccagcaaagcaactttaaaaaagtctgtgtgggccgggcgcggtggctcacgcctgtaatcccagcactttgatccgccgaggcgggcggatcacgaggtcaggagatccagaccatcctggctaacacagtgaaaccccgtctctactaaaaatacaaaaaaagttagccgggcgtggtggtgggggcctgtagtcccagctactcaggaggctgaggcaggagaacggcatgaacccgggaggcagggcttgcagtgagccaagatcatgccgctgcactccagcctgggagacaaagt

SEQ ID NO: 732022 - DNA, 2082 bp, Homo sapiens
  misc_feature (191)..(191): n is a, c, g, or t
gaatgataggtgcagtgagattcactcaattgagctgatcgattttataaacgtcgtcgaccttgagtcagaactctggcgtctgatcagagacaggccacccaatcacagcaggtgcttggaggggagtggaatctcagtagagttgatgactcaccaagtgcaaatgggaaaaagcaacacagtcacanttccatgtatacccggcagagccacccaaacccttcatcaccagcaacaactccaaccccgtggaggatgaggatgctgtagccttaacctgtgaacctgagattcagaacacaacctacctgtggtgggtaaataatcagagcctcccggtcagtcccaggctgcagctgtccaatgacaacaggaccctcactctactcagtgtcacaaggaatgatgtaggaccctatgagtgtggaatccagaacgaattaagtgttgaccacagcgacccagtcatcctgaatgtcctctatggcccagacgaccccaccatttccccctcatacacctattaccgtccaggggtgaacctcagcctctcctgccatgcagcctctaacccacctgcacagtattcttggctgattgatgggaacatccagcaacacacacaagagctctttatctccaacatcactgagaagaacagcggactctatacctgccaggccaataactcagccagtggccacagcaggactacagtcaagacaatcacagtctctgcggagctgcccaagccctccatctccagcaacaactccaaacccgtggaggacaaggatgctgtggccttcacctgtgaacctgaggctcagaacacaacctacctgtggtgggtaaatggtcagagcctcccagtcagtcccaggctgcagctgtccaatggcaacaggaccctcactctattcaatgtcacaagaaatgacgcaagagcctatgtatgtggaatccagaactcagtgagtgcaaaccgcagtgacccagtcaccctggatgtcctctatgggccggacacccccatcatttcccccccagactcgtcttacctttcgggagcgaacctcaacctctcctgccactcggcctctaacccatccccgcagtattcttggcgtatcaatgggataccgcagcaacacacacaagttctctttatcgccaaaatcacgccaaataataacgggacctatgcctgttttgtctctaacttggctactggccgcaataattccatagtcaagagcatcacagtctctgcatctggaacttctcctggtctctcagctggggccactgtcggcatcatgattggagtgctggttggggttgctctgatatagcagccctggtgtagtttcttcatttcaggaagactgacagttgttttgcttcttccttaaagcatttgcaacagctacagtctaaaattgcttctttaccaaggatatttacagaaaagactctgaccagagatcgagaccatcctagccaacatcgctgtagtcccagttactcgggaggctgaggcaggagaatcgcttgaacccgggaggtggagattgcagtgagcccagatcgcaccactgcactccagtctggcaacagagcaagactccatctcaaaaagaaaagaaaagaagactctgacctgtactcttgaatacaagtttctgataccactgcactgtctgagaatttccaaaactttaatgaactaactgacagcttcatgaaactgtccaccaagatcaagcagagaaaataattaatttcatgggactaaatgaactaatgaggataatattttcataattttttatttgaaattttgctgattctttaaatgtcttgtttcccagatttcaggaaactttttttcttttaagctatccacagcttacagcaatttgataaaatatacttttgtgaacaaaaattgagacatttacattttctccctatgtggtcgctccagacttgggaaactattcatgaatatttatattgtatggtaatatagttattgcacaagttcaataaaaatctgctctttgtataacagaa

SEQ ID NO: 732023 - DNA, 2397 bp, Homo sapiens
  misc_feature (31)..(31): n is a, c, g, or t
  misc_feature (34)..(34): n is a, c, g, or t
ttagaggatcccattggaccaggcagacgancantctatgcagagccacccaaacccttcatcaccagcaacaactccaaccccgtggaggatgaggatgctgtagccttaacctgtgaacctgagattcagaacacaacctacctgtggtgggtaaataatcagagcctcccggtcagtcccaggctgcagctgtccaatgacaacaggaccctcactctactcagtgtcacaaggaatgatgtaggaccctatgagtgtggaatccagaacgaattaagtgttgaccacagcgacccagtcatcctgaatgtcctctatggcccagacgaccccaccatttccccctcatacacctattaccgtccaggggtgaacctcagcctctcctgccatgcagcctctaacccacctgcacagtattcttggctgattgatgggaacatccagcaacacacacaagagctctttatctccaacatcactgagaagaacagcggactctatacctgccaggccaataactcagccagtggccacagcaggactacagtcaagacaatcacagtctctgcggagctgcccaagccctccatctccagcaacaactccaaacccgtggaggacaaggatgctgtggccttcacctgtgaacctgaggctcagaacacaacctacctgtggtgggtaaatggtcagagcctcccagtcagtcccaggctgcagctgtccaatggcaacaggaccctcactctattcaatgtcacaagaaatgacgcaagagcctatgtatgtggaatccagaactcagtgagtgcaaaccgcagtgacccagtcaccctggatgtcctctatgggccggacacccccatcatttcccccccagactcgtcttacctttcgggagcgaacctcaacctctcctgccactcggcctctaacccatccccgcagtattcttggcgtatcaatgggataccgcagcaacacacacaagttctctttatcgccaaaatcacgccaaataataacgggacctatgcctgttttgtctctaacttggctactggccgcaataattccatagtcaagagcatcacagtctctgcatctggaacttctcctggtctctcagctggggccactgtcggcatcatgattggagtgctggttggggttgctctgatatagcagccctggtgtagtttcttcatttcaggaagactgacagttgttttgcttcttccttaaagcatttgcaacagctacagtctaaaattgcttctttaccaaggatatttacagaaaagactctgaccagagatcgagaccatcctagccaacatcgctgtagtcccagttactcgggaggctgaggcaggagaatcgcttgaacccgggaggtggagattgcagtgagcccagatcgcaccactgcactccagtctggcaacagagcaagactccatctcaaaaagaaaagaaaagaagactctgacctgtactcttgaatacaagtttctgataccactgcactgtctgagaatttccaaaactttaatgaactaactgacagcttcatgaaactgtccaccaagatcaagcagagaaaataattaatttcatgggactaaatgaactaatgaggataatattttcataattttttatttgaaattttgctgattctttaaatgtcttgtttcccagatttcaggaaactttttttcttttaagctatccacagcttacagcaatttgataaaatatacttttgtgaacaaaaattgagacatttacattttctccctatgtggtcgctccagacttgggaaactattcatgaatatttatattgtatggtaatatagttattgcacaagttcaataaaaatctgctctttgtataacagaatacatttgaaaacattggttatattaccaagactttgactagaatgtcgtatttgaggatataaacccataggtaataaacccacaggtactacaaacaaagtctgaagtcagccttggtttggcttcctagtgtcaattaaacttctaaaagtttaatctgagattccttataaaaacttccagcaaagcaactttaaaaaagtctgtgtgggccgggcgcggtggctcacgcctgtaatcccagcactttgatccgccgaggcgggcggatcacgaggtcaggagatccagaccatcctggctaacacagtgaaaccccgtctctactaaaaatacaaaaaaagttagccgggcgtggtggtgggggcctgtagtcccagctactcaggaggctgaggcaggagaacggcatgaacccgggaggcagggcttgcagtgagccaagatcatgccgctgcactccagcctgggagacaaagt

SEQ ID NO: 732024 - DNA, 1915 bp, Homo sapiens
  misc_feature (31)..(31): n is a, c, g, or t
  misc_feature (34)..(34): n is a, c, g, or t
ttagaggatcccattggaccaggcagacgancantctatgcagagccacccaaacccttcatcaccagcaacaactccaaccccgtggaggatgaggatgctgtagccttaacctgtgaacctgagattcagaacacaacctacctgtggtgggtaaataatcagagcctcccggtcagtcccaggctgcagctgtccaatgacaacaggaccctcactctactcagtgtcacaaggaatgatgtaggaccctatgagtgtggaatccagaacgaattaagtgttgaccacagcgacccagtcatcctgaatgtcctctatggcccagacgaccccaccatttccccctcatacacctattaccgtccaggggtgaacctcagcctctcctgccatgcagcctctaacccacctgcacagtattcttggctgattgatgggaacatccagcaacacacacaagagctctttatctccaacatcactgagaagaacagcggactctatacctgccaggccaataactcagccagtggccacagcaggactacagtcaagacaatcacagtctctgcggagctgcccaagccctccatctccagcaacaactccaaacccgtggaggacaaggatgctgtggccttcacctgtgaacctgaggctcagaacacaacctacctgtggtgggtaaatggtcagagcctcccagtcagtcccaggctgcagctgtccaatggcaacaggaccctcactctattcaatgtcacaagaaatgacgcaagagcctatgtatgtggaatccagaactcagtgagtgcaaaccgcagtgacccagtcaccctggatgtcctctatgggccggacacccccatcatttcccccccagactcgtcttacctttcgggagcgaacctcaacctctcctgccactcggcctctaacccatccccgcagtattcttggcgtatcaatgggataccgcagcaacacacacaagttctctttatcgccaaaatcacgccaaataataacgggacctatgcctgttttgtctctaacttggctactggccgcaataattccatagtcaagagcatcacagtctctgcatctggaacttctcctggtctctcagctggggccactgtcggcatcatgattggagtgctggttggggttgctctgatatagcagccctggtgtagtttcttcatttcaggaagactgacagttgttttgcttcttccttaaagcatttgcaacagctacagtctaaaattgcttctttaccaaggatatttacagaaaagactctgaccagagatcgagaccatcctagccaacatcgctgtagtcccagttactcgggaggctgaggcaggagaatcgcttgaacccgggaggtggagattgcagtgagcccagatcgcaccactgcactccagtctggcaacagagcaagactccatctcaaaaagaaaagaaaagaagactctgacctgtactcttgaatacaagtttctgataccactgcactgtctgagaatttccaaaactttaatgaactaactgacagcttcatgaaactgtccaccaagatcaagcagagaaaataattaatttcatgggactaaatgaactaatgaggataatattttcataattttttatttgaaattttgctgattctttaaatgtcttgtttcccagatttcaggaaactttttttcttttaagctatccacagcttacagcaatttgataaaatatacttttgtgaacaaaaattgagacatttacattttctccctatgtggtcgctccagacttgggaaactattcatgaatatttatattgtatggtaatatagttattgcacaagttcaataaaaatctgctctttgtataacagaa

SEQ ID NO: 732025 - DNA, 416 bp, Homo sapiens
  misc_feature (31)..(31): n is a, c, g, or t
  misc_feature (34)..(34): n is a, c, g, or t
ttagaggatcccattggaccaggcagacgancantctatgcagagccacccaaacccttcatcaccagcaacaactccaaccccgtggaggatgaggatgctgtagccttaacctgtgaacctgagattcagaacacaacctacctgtggtgggtaaataatcagagcctcccggtcagtcccaggctgcagctgtccaatgacaacaggaccctcactctactcagtgtcacaaggaatgatgtaggaccctatgagtgtggaatccagaacgaattaagtgttgaccacagcgacccagtcatcctgaatgtcctctatggcccagacgaccccaccatttccccctcatacacctattaccgtccaggggtgaacctcagcctcccgagtaactgggattacacacacgtgcc

SEQ ID NO: 732026 - DNA, 2430 bp, Homo sapiens
  misc_feature (54)..(54): n is a, c, g, or t
aagcagtgcatcgtctcatggtatagctgttccagtgggctcagagtcttagcncagatcaccatgcaagatgcagagccacccaaacccttcatcaccagcaacaactccaaccccgtggaggatgaggatgctgtagccttaacctgtgaacctgagattcagaacacaacctacctgtggtgggtaaataatcagagcctcccggtcagtcccaggctgcagctgtccaatgacaacaggaccctcactctactcagtgtcacaaggaatgatgtaggaccctatgagtgtggaatccagaacgaattaagtgttgaccacagcgacccagtcatcctgaatgtcctctatggcccagacgaccccaccatttccccctcatacacctattaccgtccaggggtgaacctcagcctctcctgccatgcagcctctaacccacctgcacagtattcttggctgattgatgggaacatccagcaacacacacaagagctctttatctccaacatcactgagaagaacagcggactctatacctgccaggccaataactcagccagtggccacagcaggactacagtcaagacaatcacagtctctgcggagctgcccaagccctccatctccagcaacaactccaaacccgtggaggacaaggatgctgtggccttcacctgtgaacctgaggctcagaacacaacctacctgtggtgggtaaatggtcagagcctcccagtcagtcccaggctgcagctgtccaatggcaacaggaccctcactctattcaatgtcacaagaaatgacgcaagagcctatgtatgtggaatccagaactcagtgagtgcaaaccgcagtgacccagtcaccctggatgtcctctatgggccggacacccccatcatttcccccccagactcgtcttacctttcgggagcgaacctcaacctctcctgccactcggcctctaacccatccccgcagtattcttggcgtatcaatgggataccgcagcaacacacacaagttctctttatcgccaaaatcacgccaaataataacgggacctatgcctgttttgtctctaacttggctactggccgcaataattccatagtcaagagcatcacagtctctgcatctggaacttctcctggtctctcagctggggccactgtcggcatcatgattggagtgctggttggggttgctctgatatagcagccctggtgtagtttcttcatttcaggaagactgacagttgttttgcttcttccttaaagcatttgcaacagctacagtctaaaattgcttctttaccaaggatatttacagaaaagactctgaccagagatcgagaccatcctagccaacatcgctgtagtcccagttactcgggaggctgaggcaggagaatcgcttgaacccgggaggtggagattgcagtgagcccagatcgcaccactgcactccagtctggcaacagagcaagactccatctcaaaaagaaaagaaaagaagactctgacctgtactcttgaatacaagtttctgataccactgcactgtctgagaatttccaaaactttaatgaactaactgacagcttcatgaaactgtccaccaagatcaagcagagaaaataattaatttcatgggactaaatgaactaatgaggataatattttcataattttttatttgaaattttgctgattctttaaatgtcttgtttcccagatttcaggaaactttttttcttttaagctatccacagcttacagcaatttgataaaatatacttttgtgaacaaaaattgagacatttacattttctccctatgtggtcgctccagacttgggaaactattcatgaatatttatattgtatggtaatatagttattgcacaagttcaataaaaatctgctctttgtataacagaatacatttgaaaacattggttatattaccaagactttgactagaatgtcgtatttgaggatataaacccataggtaataaacccacaggtactacaaacaaagtctgaagtcagccttggtttggcttcctagtgtcaattaaacttctaaaagtttaatctgagattccttataaaaacttccagcaaagcaactttaaaaaagtctgtgtgggccgggcgcggtggctcacgcctgtaatcccagcactttgatccgccgaggcgggcggatcacgaggtcaggagatccagaccatcctggctaacacagtgaaaccccgtctctactaaaaatacaaaaaaagttagccgggcgtggtggtgggggcctgtagtcccagctactcaggaggctgaggcaggagaacggcatgaacccgggaggcagggcttgcagtgagccaagatcatgccgctgcactccagcctgggagacaaagt

SEQ ID NO: 732027 - DNA, 1948 bp, Homo sapiens
  misc_feature (54)..(54): n is a, c, g, or t
aagcagtgcatcgtctcatggtatagctgttccagtgggctcagagtcttagcncagatcaccatgcaagatgcagagccacccaaacccttcatcaccagcaacaactccaaccccgtggaggatgaggatgctgtagccttaacctgtgaacctgagattcagaacacaacctacctgtggtgggtaaataatcagagcctcccggtcagtcccaggctgcagctgtccaatgacaacaggaccctcactctactcagtgtcacaaggaatgatgtaggaccctatgagtgtggaatccagaacgaattaagtgttgaccacagcgacccagtcatcctgaatgtcctctatggcccagacgaccccaccatttccccctcatacacctattaccgtccaggggtgaacctcagcctctcctgccatgcagcctctaacccacctgcacagtattcttggctgattgatgggaacatccagcaacacacacaagagctctttatctccaacatcactgagaagaacagcggactctatacctgccaggccaataactcagccagtggccacagcaggactacagtcaagacaatcacagtctctgcggagctgcccaagccctccatctccagcaacaactccaaacccgtggaggacaaggatgctgtggccttcacctgtgaacctgaggctcagaacacaacctacctgtggtgggtaaatggtcagagcctcccagtcagtcccaggctgcagctgtccaatggcaacaggaccctcactctattcaatgtcacaagaaatgacgcaagagcctatgtatgtggaatccagaactcagtgagtgcaaaccgcagtgacccagtcaccctggatgtcctctatgggccggacacccccatcatttcccccccagactcgtcttacctttcgggagcgaacctcaacctctcctgccactcggcctctaacccatccccgcagtattcttggcgtatcaatgggataccgcagcaacacacacaagttctctttatcgccaaaatcacgccaaataataacgggacctatgcctgttttgtctctaacttggctactggccgcaataattccatagtcaagagcatcacagtctctgcatctggaacttctcctggtctctcagctggggccactgtcggcatcatgattggagtgctggttggggttgctctgatatagcagccctggtgtagtttcttcatttcaggaagactgacagttgttttgcttcttccttaaagcatttgcaacagctacagtctaaaattgcttctttaccaaggatatttacagaaaagactctgaccagagatcgagaccatcctagccaacatcgctgtagtcccagttactcgggaggctgaggcaggagaatcgcttgaacccgggaggtggagattgcagtgagcccagatcgcaccactgcactccagtctggcaacagagcaagactccatctcaaaaagaaaagaaaagaagactctgacctgtactcttgaatacaagtttctgataccactgcactgtctgagaatttccaaaactttaatgaactaactgacagcttcatgaaactgtccaccaagatcaagcagagaaaataattaatttcatgggactaaatgaactaatgaggataatattttcataattttttatttgaaattttgctgattctttaaatgtcttgtttcccagatttcaggaaactttttttcttttaagctatccacagcttacagcaatttgataaaatatacttttgtgaacaaaaattgagacatttacattttctccctatgtggtcgctccagacttgggaaactattcatgaatatttatattgtatggtaatatagttattgcacaagttcaataaaaatctgctctttgtataacagaa

SEQ ID NO: 732028 - DNA, 1932 bp, Homo sapiens
  misc_feature (12)..(12): n is a, c, g, or t
  misc_feature (24)..(24): n is a, c, g, or t
tgacccagtcancctgaatgtccnctatggcccagacgagcccatccattaccacctctcatatcgcctgattagcgtccaggggatgaacctcacctctgaacctctcctgccacgcagcctctaacccacctgcacagtactcttggtttgtcaatgggactttccagcaatccacccaagagctctttatccccaacatcactgtgaataatagtggatcctatacgtgccaagcccataactcagacactggcctcaataggaccacagtcacgacgatcacagtctatgcagagccacccaaacccttcatcaccagcaacaactccaaccccgtggaggatgaggatgctgtagccttaacctgtgaacctgagattcagaacacaacctacctgtggtgggtaaataatcagagcctcccggtcagtcccaggctgcagctgtccaatgacaacaggaccctcactctactcagtgtcacaaggaatgatgtaggaccctatgagtgtggaatccagaacgaattaagtgttgaccacagcgacccagtcatcctgaatgtcctctatggcccagacgaccccaccatttccccctcatacacctattaccgtccaggggtgaacctcagcctctcctgccatgcagcctctaacccacctgcacagtattcttggctgattgatgggaacatccagcaacacacacaagagctctttatctccaacatcactgagaagaacagcggactctatacctgccaggccaataactcagccagtggccacagcaggactacagtcaagacaatcacagtctctgtgaaaccccatctctactaaaaatacaaaaatgagctgggcttggtggcgcgcacctgtagtcccagttactcgggaggctgaggcaggagaatcgcttgaacccgggaggtggagattgcagtgagcccagatcgcaccactgcactccagtctggcaacagagcaagactccatctcaaaaagaaaagaaaagaagactctgacctgtactcttgaatacaagtttctgataccactgcactgtctgagaatttccaaaactttaatgaactaactgacagcttcatgaaactgtccaccaagatcaagcagagaaaataattaatttcatgggactaaatgaactaatgaggataatattttcataattttttatttgaaattttgctgattctttaaatgtcttgtttcccagatttcaggaaactttttttcttttaagctatccacagcttacagcaatttgataaaatatacttttgtgaacaaaaattgagacatttacattttctccctatgtggtcgctccagacttgggaaactattcatgaatatttatattgtatggtaatatagttattgcacaagttcaataaaaatctgctctttgtataacagaatacatttgaaaacattggttatattaccaagactttgactagaatgtcgtatttgaggatataaacccataggtaataaacccacaggtactacaaacaaagtctgaagtcagccttggtttggcttcctagtgtcaattaaacttctaaaagtttaatctgagattccttataaaaacttccagcaaagcaactttaaaaaagtctgtgtgggccgggcgcggtggctcacgcctgtaatcccagcactttgatccgccgaggcgggcggatcacgaggtcaggagatccagaccatcctggctaacacagtgaaaccccgtctctactaaaaatacaaaaaaagttagccgggcgtggtggtgggggcctgtagtcccagctactcaggaggctgaggcaggagaacggcatgaacccgggaggcagggcttgcagtgagccaagatcatgccgctgcactccagcctgggagacaaagt

SEQ ID NO: 732029 - DNA, 1450 bp, Homo sapiens
  misc_feature (12)..(12): n is a, c, g, or t
  misc_feature (24)..(24): n is a, c, g, or t
tgacccagtcancctgaatgtccnctatggcccagacgagcccatccattaccacctctcatatcgcctgattagcgtccaggggatgaacctcacctctgaacctctcctgccacgcagcctctaacccacctgcacagtactcttggtttgtcaatgggactttccagcaatccacccaagagctctttatccccaacatcactgtgaataatagtggatcctatacgtgccaagcccataactcagacactggcctcaataggaccacagtcacgacgatcacagtctatgcagagccacccaaacccttcatcaccagcaacaactccaaccccgtggaggatgaggatgctgtagccttaacctgtgaacctgagattcagaacacaacctacctgtggtgggtaaataatcagagcctcccggtcagtcccaggctgcagctgtccaatgacaacaggaccctcactctactcagtgtcacaaggaatgatgtaggaccctatgagtgtggaatccagaacgaattaagtgttgaccacagcgacccagtcatcctgaatgtcctctatggcccagacgaccccaccatttccccctcatacacctattaccgtccaggggtgaacctcagcctctcctgccatgcagcctctaacccacctgcacagtattcttggctgattgatgggaacatccagcaacacacacaagagctctttatctccaacatcactgagaagaacagcggactctatacctgccaggccaataactcagccagtggccacagcaggactacagtcaagacaatcacagtctctgtgaaaccccatctctactaaaaatacaaaaatgagctgggcttggtggcgcgcacctgtagtcccagttactcgggaggctgaggcaggagaatcgcttgaacccgggaggtggagattgcagtgagcccagatcgcaccactgcactccagtctggcaacagagcaagactccatctcaaaaagaaaagaaaagaagactctgacctgtactcttgaatacaagtttctgataccactgcactgtctgagaatttccaaaactttaatgaactaactgacagcttcatgaaactgtccaccaagatcaagcagagaaaataattaatttcatgggactaaatgaactaatgaggataatattttcataattttttatttgaaattttgctgattctttaaatgtcttgtttcccagatttcaggaaactttttttcttttaagctatccacagcttacagcaatttgataaaatatacttttgtgaacaaaaattgagacatttacattttctccctatgtggtcgctccagacttgggaaactattcatgaatatttatattgtatggtaatatagttattgcacaagttcaataaaaatctgctctttgtataacagaa

SEQ ID NO: 732030 - DNA, 2706 bp, Homo sapiens
  misc_feature (12)..(12): n is a, c, g, or t
  misc_feature (24)..(24): n is a, c, g, or t
tgacccagtcancctgaatgtccnctatggcccagacgagcccatccattaccacctctcatatcgcctgattagcgtccaggggatgaacctcacctctgaacctctcctgccacgcagcctctaacccacctgcacagtactcttggtttgtcaatgggactttccagcaatccacccaagagctctttatccccaacatcactgtgaataatagtggatcctatacgtgccaagcccataactcagacactggcctcaataggaccacagtcacgacgatcacagtctatgcagagccacccaaacccttcatcaccagcaacaactccaaccccgtggaggatgaggatgctgtagccttaacctgtgaacctgagattcagaacacaacctacctgtggtgggtaaataatcagagcctcccggtcagtcccaggctgcagctgtccaatgacaacaggaccctcactctactcagtgtcacaaggaatgatgtaggaccctatgagtgtggaatccagaacgaattaagtgttgaccacagcgacccagtcatcctgaatgtcctctatggcccagacgaccccaccatttccccctcatacacctattaccgtccaggggtgaacctcagcctctcctgccatgcagcctctaacccacctgcacagtattcttggctgattgatgggaacatccagcaacacacacaagagctctttatctccaacatcactgagaagaacagcggactctatacctgccaggccaataactcagccagtggccacagcaggactacagtcaagacaatcacagtctctgcggagctgcccaagccctccatctccagcaacaactccaaacccgtggaggacaaggatgctgtggccttcacctgtgaacctgaggctcagaacacaacctacctgtggtgggtaaatggtcagagcctcccagtcagtcccaggctgcagctgtccaatggcaacaggaccctcactctattcaatgtcacaagaaatgacgcaagagcctatgtatgtggaatccagaactcagtgagtgcaaaccgcagtgacccagtcaccctggatgtcctctatgggccggacacccccatcatttcccccccagactcgtcttacctttcgggagcgaacctcaacctctcctgccactcggcctctaacccatccccgcagtattcttggcgtatcaatgggataccgcagcaacacacacaagttctctttatcgccaaaatcacgccaaataataacgggacctatgcctgttttgtctctaacttggctactggccgcaataattccatagtcaagagcatcacagtctctgcatctggaacttctcctggtctctcagctggggccactgtcggcatcatgattggagtgctggttggggttgctctgatatagcagccctggtgtagtttcttcatttcaggaagactgacagttgttttgcttcttccttaaagcatttgcaacagctacagtctaaaattgcttctttaccaaggatatttacagaaaagactctgaccagagatcgagaccatcctagccaacatcgtgaaaccccatctctactaaaaatacaaaaatgagctgggcttggtggcgcgcacctgtagtcccagttactcgggaggctgaggcaggagaatcgcttgaacccgggaggtggagattgcagtgagcccagatcgcaccactgcactccagtctggcaacagagcaagactccatctcaaaaagaaaagaaaagaagactctgacctgtactcttgaatacaagtttctgataccactgcactgtctgagaatttccaaaactttaatgaactaactgacagcttcatgaaactgtccaccaagatcaagcagagaaaataattaatttcatgggactaaatgaactaatgaggataatattttcataattttttatttgaaattttgctgattctttaaatgtcttgtttcccagatttcaggaaactttttttcttttaagctatccacagcttacagcaatttgataaaatatacttttgtgaacaaaaattgagacatttacattttctccctatgtggtcgctccagacttgggaaactattcatgaatatttatattgtatggtaatatagttattgcacaagttcaataaaaatctgctctttgtataacagaatacatttgaaaacattggttatattaccaagactttgactagaatgtcgtatttgaggatataaacccataggtaataaacccacaggtactacaaacaaagtctgaagtcagccttggtttggcttcctagtgtcaattaaacttctaaaagtttaatctgagattccttataaaaacttccagcaaagcaactttaaaaaagtctgtgtgggccgggcgcggtggctcacgcctgtaatcccagcactttgatccgccgaggcgggcggatcacgaggtcaggagatccagaccatcctggctaacacagtgaaaccccgtctctactaaaaatacaaaaaaagttagccgggcgtggtggtgggggcctgtagtcccagctactcaggaggctgaggcaggagaacggcatgaacccgggaggcagggcttgcagtgagccaagatcatgccgctgcactccagcctgggagacaaagt

SEQ ID NO: 732031 - DNA, 2224 bp, Homo sapiens
  misc_feature (12)..(12): n is a, c, g, or t
  misc_feature (24)..(24): n is a, c, g, or t
tgacccagtcancctgaatgtccnctatggcccagacgagcccatccattaccacctctcatatcgcctgattagcgtccaggggatgaacctcacctctgaacctctcctgccacgcagcctctaacccacctgcacagtactcttggtttgtcaatgggactttccagcaatccacccaagagctctttatccccaacatcactgtgaataatagtggatcctatacgtgccaagcccataactcagacactggcctcaataggaccacagtcacgacgatcacagtctatgcagagccacccaaacccttcatcaccagcaacaactccaaccccgtggaggatgaggatgctgtagccttaacctgtgaacctgagattcagaacacaacctacctgtggtgggtaaataatcagagcctcccggtcagtcccaggctgcagctgtccaatgacaacaggaccctcactctactcagtgtcacaaggaatgatgtaggaccctatgagtgtggaatccagaacgaattaagtgttgaccacagcgacccagtcatcctgaatgtcctctatggcccagacgaccccaccatttccccctcatacacctattaccgtccaggggtgaacctcagcctctcctgccatgcagcctctaacccacctgcacagtattcttggctgattgatgggaacatccagcaacacacacaagagctctttatctccaacatcactgagaagaacagcggactctatacctgccaggccaataactcagccagtggccacagcaggactacagtcaagacaatcacagtctctgcggagctgcccaagccctccatctccagcaacaactccaaacccgtggaggacaaggatgctgtggccttcacctgtgaacctgaggctcagaacacaacctacctgtggtgggtaaatggtcagagcctcccagtcagtcccaggctgcagctgtccaatggcaacaggaccctcactctattcaatgtcacaagaaatgacgcaagagcctatgtatgtggaatccagaactcagtgagtgcaaaccgcagtgacccagtcaccctggatgtcctctatgggccggacacccccatcatttcccccccagactcgtcttacctttcgggagcgaacctcaacctctcctgccactcggcctctaacccatccccgcagtattcttggcgtatcaatgggataccgcagcaacacacacaagttctctttatcgccaaaatcacgccaaataataacgggacctatgcctgttttgtctctaacttggctactggccgcaataattccatagtcaagagcatcacagtctctgcatctggaacttctcctggtctctcagctggggccactgtcggcatcatgattggagtgctggttggggttgctctgatatagcagccctggtgtagtttcttcatttcaggaagactgacagttgttttgcttcttccttaaagcatttgcaacagctacagtctaaaattgcttctttaccaaggatatttacagaaaagactctgaccagagatcgagaccatcctagccaacatcgtgaaaccccatctctactaaaaatacaaaaatgagctgggcttggtggcgcgcacctgtagtcccagttactcgggaggctgaggcaggagaatcgcttgaacccgggaggtggagattgcagtgagcccagatcgcaccactgcactccagtctggcaacagagcaagactccatctcaaaaagaaaagaaaagaagactctgacctgtactcttgaatacaagtttctgataccactgcactgtctgagaatttccaaaactttaatgaactaactgacagcttcatgaaactgtccaccaagatcaagcagagaaaataattaatttcatgggactaaatgaactaatgaggataatattttcataattttttatttgaaattttgctgattctttaaatgtcttgtttcccagatttcaggaaactttttttcttttaagctatccacagcttacagcaatttgataaaatatacttttgtgaacaaaaattgagacatttacattttctccctatgtggtcgctccagacttgggaaactattcatgaatatttatattgtatggtaatatagttattgcacaagttcaataaaaatctgctctttgtataacagaa

SEQ ID NO: 732032 - DNA, 2651 bp, Homo sapiens
  misc_feature (12)..(12): n is a, c, g, or t
  misc_feature (24)..(24): n is a, c, g, or t
tgacccagtcancctgaatgtccnctatggcccagacgagcccatccattaccacctctcatatcgcctgattagcgtccaggggatgaacctcacctctgaacctctcctgccacgcagcctctaacccacctgcacagtactcttggtttgtcaatgggactttccagcaatccacccaagagctctttatccccaacatcactgtgaataatagtggatcctatacgtgccaagcccataactcagacactggcctcaataggaccacagtcacgacgatcacagtctatgcagagccacccaaacccttcatcaccagcaacaactccaaccccgtggaggatgaggatgctgtagccttaacctgtgaacctgagattcagaacacaacctacctgtggtgggtaaataatcagagcctcccggtcagtcccaggctgcagctgtccaatgacaacaggaccctcactctactcagtgtcacaaggaatgatgtaggaccctatgagtgtggaatccagaacgaattaagtgttgaccacagcgacccagtcatcctgaatgtcctctatggcccagacgaccccaccatttccccctcatacacctattaccgtccaggggtgaacctcagcctctcctgccatgcagcctctaacccacctgcacagtattcttggctgattgatgggaacatccagcaacacacacaagagctctttatctccaacatcactgagaagaacagcggactctatacctgccaggccaataactcagccagtggccacagcaggactacagtcaagacaatcacagtctctgcggagctgcccaagccctccatctccagcaacaactccaaacccgtggaggacaaggatgctgtggccttcacctgtgaacctgaggctcagaacacaacctacctgtggtgggtaaatggtcagagcctcccagtcagtcccaggctgcagctgtccaatggcaacaggaccctcactctattcaatgtcacaagaaatgacgcaagagcctatgtatgtggaatccagaactcagtgagtgcaaaccgcagtgacccagtcaccctggatgtcctctatgggccggacacccccatcatttcccccccagactcgtcttacctttcgggagcgaacctcaacctctcctgccactcggcctctaacccatccccgcagtattcttggcgtatcaatgggataccgcagcaacacacacaagttctctttatcgccaaaatcacgccaaataataacgggacctatgcctgttttgtctctaacttggctactggccgcaataattccatagtcaagagcatcacagtctctgcatctggaacttctcctggtctctcagctggggccactgtcggcatcatgattggagtgctggttggggttgctctgatatagcagccctggtgtagtttcttcatttcaggaagactgacagttgttttgcttcttccttaaagcatttgcaacagctacagtctaaaattgcttctttaccaaggatatttacagaaaagactctgaccagagatcgagaccatcctagccaacatcgctgtagtcccagttactcgggaggctgaggcaggagaatcgcttgaacccgggaggtggagattgcagtgagcccagatcgcaccactgcactccagtctggcaacagagcaagactccatctcaaaaagaaaagaaaagaagactctgacctgtactcttgaatacaagtttctgataccactgcactgtctgagaatttccaaaactttaatgaactaactgacagcttcatgaaactgtccaccaagatcaagcagagaaaataattaatttcatgggactaaatgaactaatgaggataatattttcataattttttatttgaaattttgctgattctttaaatgtcttgtttcccagatttcaggaaactttttttcttttaagctatccacagcttacagcaatttgataaaatatacttttgtgaacaaaaattgagacatttacattttctccctatgtggtcgctccagacttgggaaactattcatgaatatttatattgtatggtaatatagttattgcacaagttcaataaaaatctgctctttgtataacagaatacatttgaaaacattggttatattaccaagactttgactagaatgtcgtatttgaggatataaacccataggtaataaacccacaggtactacaaacaaagtctgaagtcagccttggtttggcttcctagtgtcaattaaacttctaaaagtttaatctgagattccttataaaaacttccagcaaagcaactttaaaaaagtctgtgtgggccgggcgcggtggctcacgcctgtaatcccagcactttgatccgccgaggcgggcggatcacgaggtcaggagatccagaccatcctggctaacacagtgaaaccccgtctctactaaaaatacaaaaaaagttagccgggcgtggtggtgggggcctgtagtcccagctactcaggaggctgaggcaggagaacggcatgaacccgggaggcagggcttgcagtgagccaagatcatgccgctgcactccagcctgggagacaaagt

SEQ ID NO: 732033 - DNA, 2169 bp, Homo sapiens
  misc_feature (12)..(12): n is a, c, g, or t
  misc_feature (24)..(24): n is a, c, g, or t
tgacccagtcancctgaatgtccnctatggcccagacgagcccatccattaccacctctcatatcgcctgattagcgtccaggggatgaacctcacctctgaacctctcctgccacgcagcctctaacccacctgcacagtactcttggtttgtcaatgggactttccagcaatccacccaagagctctttatccccaacatcactgtgaataatagtggatcctatacgtgccaagcccataactcagacactggcctcaataggaccacagtcacgacgatcacagtctatgcagagccacccaaacccttcatcaccagcaacaactccaaccccgtggaggatgaggatgctgtagccttaacctgtgaacctgagattcagaacacaacctacctgtggtgggtaaataatcagagcctcccggtcagtcccaggctgcagctgtccaatgacaacaggaccctcactctactcagtgtcacaaggaatgatgtaggaccctatgagtgtggaatccagaacgaattaagtgttgaccacagcgacccagtcatcctgaatgtcctctatggcccagacgaccccaccatttccccctcatacacctattaccgtccaggggtgaacctcagcctctcctgccatgcagcctctaacccacctgcacagtattcttggctgattgatgggaacatccagcaacacacacaagagctctttatctccaacatcactgagaagaacagcggactctatacctgccaggccaataactcagccagtggccacagcaggactacagtcaagacaatcacagtctctgcggagctgcccaagccctccatctccagcaacaactccaaacccgtggaggacaaggatgctgtggccttcacctgtgaacctgaggctcagaacacaacctacctgtggtgggtaaatggtcagagcctcccagtcagtcccaggctgcagctgtccaatggcaacaggaccctcactctattcaatgtcacaagaaatgacgcaagagcctatgtatgtggaatccagaactcagtgagtgcaaaccgcagtgacccagtcaccctggatgtcctctatgggccggacacccccatcatttcccccccagactcgtcttacctttcgggagcgaacctcaacctctcctgccactcggcctctaacccatccccgcagtattcttggcgtatcaatgggataccgcagcaacacacacaagttctctttatcgccaaaatcacgccaaataataacgggacctatgcctgttttgtctctaacttggctactggccgcaataattccatagtcaagagcatcacagtctctgcatctggaacttctcctggtctctcagctggggccactgtcggcatcatgattggagtgctggttggggttgctctgatatagcagccctggtgtagtttcttcatttcaggaagactgacagttgttttgcttcttccttaaagcatttgcaacagctacagtctaaaattgcttctttaccaaggatatttacagaaaagactctgaccagagatcgagaccatcctagccaacatcgctgtagtcccagttactcgggaggctgaggcaggagaatcgcttgaacccgggaggtggagattgcagtgagcccagatcgcaccactgcactccagtctggcaacagagcaagactccatctcaaaaagaaaagaaaagaagactctgacctgtactcttgaatacaagtttctgataccactgcactgtctgagaatttccaaaactttaatgaactaactgacagcttcatgaaactgtccaccaagatcaagcagagaaaataattaatttcatgggactaaatgaactaatgaggataatattttcataattttttatttgaaattttgctgattctttaaatgtcttgtttcccagatttcaggaaactttttttcttttaagctatccacagcttacagcaatttgataaaatatacttttgtgaacaaaaattgagacatttacattttctccctatgtggtcgctccagacttgggaaactattcatgaatatttatattgtatggtaatatagttattgcacaagttcaataaaaatctgctctttgtataacagaa

SEQ ID NO: 732034 - DNA, 1772 bp, Homo sapiens
  misc_feature (12)..(12): n is a, c, g, or t
  misc_feature (24)..(24): n is a, c, g, or t
tgacccagtcancctgaatgtccnctatggcccagacgagcccatccattaccacctctcatatcgcctgattagcgtccaggggatgaacctcacctctgaacctctcctgccacgcagcctctaacccacctgcacagtactcttggtttgtcaatgggactttccagcaatccacccaagagctctttatccccaacatcactgtgaataatagtggatcctatacgtgccaagcccataactcagacactggcctcaataggaccacagtcacgacgatcacagtctatgcagagccacccaaacccttcatcaccagcaacaactccaaccccgtggaggatgaggatgctgtagccttaacctgtgaacctgagattcagaacacaacctacctgtggtgggtaaataatcagagcctcccggtcagtcccaggctgcagctgtccaatgacaacaggaccctcactctactcagtgtcacaaggaatgatgtaggaccctatgagtgtggaatccagaacgaattaagtgttgaccacagcgacccagtcatcctgaatgtcctctatggcccagacgaccccaccatttccccctcatacacctattaccgtccaggggtgaacctcagcctctcctgccatgcagcctctaacccacctgcacagtattcttggctgattgatgggaacatccagcaacacacacaagagctctttatctccaacatcactgagaagaacagcggactctatacctgccaggccaataactcagccagtggccacagcaggactacagtcaagacaatcacagtctctgcggagctgcccaagccctccatctccagcaacaactccaaacccgtggaggacaaggatgctgtggccttcacctgtgaacctgaggctcagaacacaacctacctgtggtgggtaaatggtcagagcctcccagtcagtcccaggctgcagctgtccaatggcaacaggaccctcactctattcaatgtcacaagaaatgacgcaagagcctatgtatgtggaatccagaactcagtgagtgcaaaccgcagtgacccagtcaccctggatgtcctctatgggccggacacccccatcatttcccccccagactcgtcttacctttcgggagcgaacctcaacctctcctgccactcggcctctaacccatccccgcagtattcttggcgtatcaatgggataccgcagcaacacacacaagttctctttatcgccaaaatcacgccaaataataacgggacctatgcctgttttgtctctaacttggctactggccgcaataattccatagtcaagagcatcacagtctctggtaagtggctccctggagcatcagcatcatattctggggtggagtctatctggttctcaccaaagagccaagaagacattttctttcccagtctgtgttccatgggcacaaggaaatcccaaattctatcctgagccccctcactccatctcggccaactctctcctccccggcttctctgatatctcacggctgacctcgggtccagcctggaatgtggggaggggcctcccttagccccagaaggcccccaatagtgaaagggacttcatagtccagaagaaagaagggtccttaaggtcgagttgctcctctctatcaccaatatgtccctttctgtcacctctttgtgttttttcacctactctgtgagctacaaggaacaaggaggctttgaaaccagcccacac

SEQ ID NO: 732035 - DNA, 1335 bp, Homo sapiens
  misc_feature (12)..(12): n is a, c, g, or t
  misc_feature (24)..(24): n is a, c, g, or t
  misc_feature (1268)..(1268): n is a, c, g, or t
  misc_feature (1290)..(1290): n is a, c, g, or t
  misc_feature (1300)..(1300): n is a, c, g, or t
tgacccagtcancctgaatgtccnctatggcccagacgagcccatccattaccacctctcatatcgcctgattagcgtccaggggatgaacctcacctctgaacctctcctgccacgcagcctctaacccacctgcacagtactcttggtttgtcaatgggactttccagcaatccacccaagagctctttatccccaacatcactgtgaataatagtggatcctatacgtgccaagcccataactcagacactggcctcaataggaccacagtcacgacgatcacagtctatgcagagccacccaaacccttcatcaccagcaacaactccaaccccgtggaggatgaggatgctgtagccttaacctgtgaacctgagattcagaacacaacctacctgtggtgggtaaataatcagagcctcccggtcagtcccaggctgcagctgtccaatgacaacaggaccctcactctactcagtgtcacaaggaatgatgtaggaccctatgagtgtggaatccagaacgaattaagtgttgaccacagcgacccagtcatcctgaatgtcctctatggcccagacgaccccaccatttccccctcatacacctattaccgtccaggggtgaacctcagcctctcctgccatgcagcctctaacccacctgcacagtattcttggctgattgatgggaacatccagcaacacacacaagagctctttatctccaacatcactgagaagaacagcggactctatacctgccaggccaataactcagccagtggccacagcaggactacagtcaagacaatcacagtctctgcggagctgcccaagccctccatctccagcaacaactccaaacccgtggaggacaaggatgctgtggccttcacctgtgaacctgaggctcagaacacaacctacctgtggtgggtaaatggtcagagcctcccagtcagtcccaggctgcagctgtccaatggcaacaggaccctcactctattcaatgtcacaagaaatgacgcaagagcctatgtatgtggaatccagaactcagtgagtgcaaaccgcagtgacccagtcaccctggatgtcctctatgggccggacacccccatcatttcccccccagactcgtcttacctgatgggagcaagactgatcttctcccatcagcattttgtaaatcaatgtgaaatttgcaaacaagctaagatacattttcttgaaaattgtcctaatttttgattgtatagtttngtcttctgtgattctatctgtncaggcatatnagcataaatttttcatatcgatcacaacatatcac

SEQ ID NO: 732036 - DNA, 805 bp, Homo sapiens
  misc_feature (12)..(12): n is a, c, g, or t
  misc_feature (24)..(24): n is a, c, g, or t
tgacccagtcancctgaatgtccnctatggcccagacgagcccatccattaccacctctcatatcgcctgattagcgtccaggggatgaacctcacctctgaacctctcctgccacgcagcctctaacccacctgcacagtactcttggtttgtcaatgggactttccagcaatccacccaagagctctttatccccaacatcactgtgaataatagtggatcctatacgtgccaagcccataactcagacactggcctcaataggaccacagtcacgacgatcacagtctatgcagagccacccaaacccttcatcaccagcaacaactccaaccccgtggaggatgaggatgctgtagccttaacctgtgaacctgagattcagaacacaacctacctgtggtgggtaaataatcagagcctcccggtcagtcccaggctgcagctgtccaatgacaacaggaccctcactctactcagtgtcacaaggaatgatgtaggaccctatgagtgtggaatccagaacgaattaagtgttgaccacagcgacccagtcatcctgaatgtcctctatggcccagacgaccccaccatttccccctcatacacctattaccgtccaggggtgaacctcagcctctcctgccatgcagcctctaacccacctgcacagtattcttggctgattgatgggaacatccagcaacacacacaagagctctttatctccaacatcactgagaagaacagcggactctatacctgccaggccaataacttgtccaccgggcgatcctctaatca

SEQ ID NO: 732037 - DNA, 670 bp, Homo sapiens
  misc_feature (12)..(12): n is a, c, g, or t
  misc_feature (24)..(24): n is a, c, g, or t
tgacccagtcancctgaatgtccnctatggcccagacgagcccatccattaccacctctcatatcgcctgattagcgtccaggggatgaacctcacctctgaacctctcctgccacgcagcctctaacccacctgcacagtactcttggtttgtcaatgggactttccagcaatccacccaagagctctttatccccaacatcactgtgaataatagtggatcctatacgtgccaagcccataactcagacactggcctcaataggaccacagtcacgacgatcacagtctatgcagagccacccaaacccttcatcaccagcaacaactccaaccccgtggaggatgaggatgctgtagccttaacctgtgaacctgagattcagaacacaacctacctgtggtgggtaaataatcagagcctcccggtcagtcccaggctgcagctgtccaatgacaacaggaccctcactctactcagtgtcacaaggaatgatgtaggaccctatgagtgtggaatccagaacgaattaagtgttgaccacagcgacccagtcatcctgaatgtcctctatggcccagacgaccccaccatttccccctcatacacctattaccgtccaggggtgaacctcagcctcccgagtaactgggattacacacacgtgcc

SEQ ID NO: 732038 - DNA, 2681 bp, Homo sapiens
  misc_feature (12)..(12): n is a, c, g, or t
  misc_feature (24)..(24): n is a, c, g, or t
tgacccagtcancctgaatgtccnctatggcccagacgagcccatccattaccacctctcatatcgcctgattagcgtccaggggatgaacctcacctctgaacctctcctgccacgcagcctctaacccacctgcacagtactcttggtttgtcaatgggactttccagcaatccacccaagagctctttatccccaacatcactgtgaataatagtggatcctatacgtgccaagcccataactcagacactggcctcaataggaccacagtcacgacgatcacagtctatgcagagccacccaaacccttcatcaccagcaacaactccaaccccgtggaggatgaggatgctgtagccttaacctgtgaacctgagattcagaacacaacctacctgtggtgggtaaataatcagagcctcccggtcagtcccaggctgcagctgtccaatgacaacaggaccctcactctactcagtgtcacaaggaatgatgtaggaccctatgagtgtggaatccagaacgaattaagtgttgaccacagcatggcccagacgaccccaccatttccccctcatacacctattaccgtccaggggtgaacctcagcctctcctgccatgcagcctctaacccacctgcacagtattcttggctgattgatgggaacatccagcaacacacacaagagctctttatctccaacatcactgagaagaacagcggactctatacctgccaggccaataactcagccagtggccacagcaggactacagtcaagacaatcacagtctctgcggagctgcccaagccctccatctccagcaacaactccaaacccgtggaggacaaggatgctgtggccttcacctgtgaacctgaggctcagaacacaacctacctgtggtgggtaaatggtcagagcctcccagtcagtcccaggctgcagctgtccaatggcaacaggaccctcactctattcaatgtcacaagaaatgacgcaagagcctatgtatgtggaatccagaactcagtgagtgcaaaccgcagtgacccagtcaccctggatgtcctctatgggccggacacccccatcatttcccccccagactcgtcttacctttcgggagcgaacctcaacctctcctgccactcggcctctaacccatccccgcagtattcttggcgtatcaatgggataccgcagcaacacacacaagttctctttatcgccaaaatcacgccaaataataacgggacctatgcctgttttgtctctaacttggctactggccgcaataattccatagtcaagagcatcacagtctctgcatctggaacttctcctggtctctcagctggggccactgtcggcatcatgattggagtgctggttggggttgctctgatatagcagccctggtgtagtttcttcatttcaggaagactgacagttgttttgcttcttccttaaagcatttgcaacagctacagtctaaaattgcttctttaccaaggatatttacagaaaagactctgaccagagatcgagaccatcctagccaacatcgtgaaaccccatctctactaaaaatacaaaaatgagctgggcttggtggcgcgcacctgtagtcccagttactcgggaggctgaggcaggagaatcgcttgaacccgggaggtggagattgcagtgagcccagatcgcaccactgcactccagtctggcaacagagcaagactccatctcaaaaagaaaagaaaagaagactctgacctgtactcttgaatacaagtttctgataccactgcactgtctgagaatttccaaaactttaatgaactaactgacagcttcatgaaactgtccaccaagatcaagcagagaaaataattaatttcatgggactaaatgaactaatgaggataatattttcataattttttatttgaaattttgctgattctttaaatgtcttgtttcccagatttcaggaaactttttttcttttaagctatccacagcttacagcaatttgataaaatatacttttgtgaacaaaaattgagacatttacattttctccctatgtggtcgctccagacttgggaaactattcatgaatatttatattgtatggtaatatagttattgcacaagttcaataaaaatctgctctttgtataacagaatacatttgaaaacattggttatattaccaagactttgactagaatgtcgtatttgaggatataaacccataggtaataaacccacaggtactacaaacaaagtctgaagtcagccttggtttggcttcctagtgtcaattaaacttctaaaagtttaatctgagattccttataaaaacttccagcaaagcaactttaaaaaagtctgtgtgggccgggcgcggtggctcacgcctgtaatcccagcactttgatccgccgaggcgggcggatcacgaggtcaggagatccagaccatcctggctaacacagtgaaaccccgtctctactaaaaatacaaaaaaagttagccgggcgtggtggtgggggcctgtagtcccagctactcaggaggctgaggcaggagaacggcatgaacccgggaggcagggcttgcagtgagccaagatcatgccgctgcactccagcctgggagacaaagt

SEQ ID NO: 732039 - DNA, 2199 bp, Homo sapiens
  misc_feature (12)..(12): n is a, c, g, or t
  misc_feature (24)..(24): n is a, c, g, or t
tgacccagtcancctgaatgtccnctatggcccagacgagcccatccattaccacctctcatatcgcctgattagcgtccaggggatgaacctcacctctgaacctctcctgccacgcagcctctaacccacctgcacagtactcttggtttgtcaatgggactttccagcaatccacccaagagctctttatccccaacatcactgtgaataatagtggatcctatacgtgccaagcccataactcagacactggcctcaataggaccacagtcacgacgatcacagtctatgcagagccacccaaacccttcatcaccagcaacaactccaaccccgtggaggatgaggatgctgtagccttaacctgtgaacctgagattcagaacacaacctacctgtggtgggtaaataatcagagcctcccggtcagtcccaggctgcagctgtccaatgacaacaggaccctcactctactcagtgtcacaaggaatgatgtaggaccctatgagtgtggaatccagaacgaattaagtgttgaccacagcatggcccagacgaccccaccatttccccctcatacacctattaccgtccaggggtgaacctcagcctctcctgccatgcagcctctaacccacctgcacagtattcttggctgattgatgggaacatccagcaacacacacaagagctctttatctccaacatcactgagaagaacagcggactctatacctgccaggccaataactcagccagtggccacagcaggactacagtcaagacaatcacagtctctgcggagctgcccaagccctccatctccagcaacaactccaaacccgtggaggacaaggatgctgtggccttcacctgtgaacctgaggctcagaacacaacctacctgtggtgggtaaatggtcagagcctcccagtcagtcccaggctgcagctgtccaatggcaacaggaccctcactctattcaatgtcacaagaaatgacgcaagagcctatgtatgtggaatccagaactcagtgagtgcaaaccgcagtgacccagtcaccctggatgtcctctatgggccggacacccccatcatttcccccccagactcgtcttacctttcgggagcgaacctcaacctctcctgccactcggcctctaacccatccccgcagtattcttggcgtatcaatgggataccgcagcaacacacacaagttctctttatcgccaaaatcacgccaaataataacgggacctatgcctgttttgtctctaacttggctactggccgcaataattccatagtcaagagcatcacagtctctgcatctggaacttctcctggtctctcagctggggccactgtcggcatcatgattggagtgctggttggggttgctctgatatagcagccctggtgtagtttcttcatttcaggaagactgacagttgttttgcttcttccttaaagcatttgcaacagctacagtctaaaattgcttctttaccaaggatatttacagaaaagactctgaccagagatcgagaccatcctagccaacatcgtgaaaccccatctctactaaaaatacaaaaatgagctgggcttggtggcgcgcacctgtagtcccagttactcgggaggctgaggcaggagaatcgcttgaacccgggaggtggagattgcagtgagcccagatcgcaccactgcactccagtctggcaacagagcaagactccatctcaaaaagaaaagaaaagaagactctgacctgtactcttgaatacaagtttctgataccactgcactgtctgagaatttccaaaactttaatgaactaactgacagcttcatgaaactgtccaccaagatcaagcagagaaaataattaatttcatgggactaaatgaactaatgaggataatattttcataattttttatttgaaattttgctgattctttaaatgtcttgtttcccagatttcaggaaactttttttcttttaagctatccacagcttacagcaatttgataaaatatacttttgtgaacaaaaattgagacatttacattttctccctatgtggtcgctccagacttgggaaactattcatgaatatttatattgtatggtaatatagttattgcacaagttcaataaaaatctgctctttgtataacagaa

SEQ ID NO: 732040 - DNA, 2626 bp, Homo sapiens
  misc_feature (12)..(12): n is a, c, g, or t
  misc_feature (24)..(24): n is a, c, g, or t
tgacccagtcancctgaatgtccnctatggcccagacgagcccatccattaccacctctcatatcgcctgattagcgtccaggggatgaacctcacctctgaacctctcctgccacgcagcctctaacccacctgcacagtactcttggtttgtcaatgggactttccagcaatccacccaagagctctttatccccaacatcactgtgaataatagtggatcctatacgtgccaagcccataactcagacactggcctcaataggaccacagtcacgacgatcacagtctatgcagagccacccaaacccttcatcaccagcaacaactccaaccccgtggaggatgaggatgctgtagccttaacctgtgaacctgagattcagaacacaacctacctgtggtgggtaaataatcagagcctcccggtcagtcccaggctgcagctgtccaatgacaacaggaccctcactctactcagtgtcacaaggaatgatgtaggaccctatgagtgtggaatccagaacgaattaagtgttgaccacagcatggcccagacgaccccaccatttccccctcatacacctattaccgtccaggggtgaacctcagcctctcctgccatgcagcctctaacccacctgcacagtattcttggctgattgatgggaacatccagcaacacacacaagagctctttatctccaacatcactgagaagaacagcggactctatacctgccaggccaataactcagccagtggccacagcaggactacagtcaagacaatcacagtctctgcggagctgcccaagccctccatctccagcaacaactccaaacccgtggaggacaaggatgctgtggccttcacctgtgaacctgaggctcagaacacaacctacctgtggtgggtaaatggtcagagcctcccagtcagtcccaggctgcagctgtccaatggcaacaggaccctcactctattcaatgtcacaagaaatgacgcaagagcctatgtatgtggaatccagaactcagtgagtgcaaaccgcagtgacccagtcaccctggatgtcctctatgggccggacacccccatcatttcccccccagactcgtcttacctttcgggagcgaacctcaacctctcctgccactcggcctctaacccatccccgcagtattcttggcgtatcaatgggataccgcagcaacacacacaagttctctttatcgccaaaatcacgccaaataataacgggacctatgcctgttttgtctctaacttggctactggccgcaataattccatagtcaagagcatcacagtctctgcatctggaacttctcctggtctctcagctggggccactgtcggcatcatgattggagtgctggttggggttgctctgatatagcagccctggtgtagtttcttcatttcaggaagactgacagttgttttgcttcttccttaaagcatttgcaacagctacagtctaaaattgcttctttaccaaggatatttacagaaaagactctgaccagagatcgagaccatcctagccaacatcgctgtagtcccagttactcgggaggctgaggcaggagaatcgcttgaacccgggaggtggagattgcagtgagcccagatcgcaccactgcactccagtctggcaacagagcaagactccatctcaaaaagaaaagaaaagaagactctgacctgtactcttgaatacaagtttctgataccactgcactgtctgagaatttccaaaactttaatgaactaactgacagcttcatgaaactgtccaccaagatcaagcagagaaaataattaatttcatgggactaaatgaactaatgaggataatattttcataattttttatttgaaattttgctgattctttaaatgtcttgtttcccagatttcaggaaactttttttcttttaagctatccacagcttacagcaatttgataaaatatacttttgtgaacaaaaattgagacatttacattttctccctatgtggtcgctccagacttgggaaactattcatgaatatttatattgtatggtaatatagttattgcacaagttcaataaaaatctgctctttgtataacagaatacatttgaaaacattggttatattaccaagactttgactagaatgtcgtatttgaggatataaacccataggtaataaacccacaggtactacaaacaaagtctgaagtcagccttggtttggcttcctagtgtcaattaaacttctaaaagtttaatctgagattccttataaaaacttccagcaaagcaactttaaaaaagtctgtgtgggccgggcgcggtggctcacgcctgtaatcccagcactttgatccgccgaggcgggcggatcacgaggtcaggagatccagaccatcctggctaacacagtgaaaccccgtctctactaaaaatacaaaaaaagttagccgggcgtggtggtgggggcctgtagtcccagctactcaggaggctgaggcaggagaacggcatgaacccgggaggcagggcttgcagtgagccaagatcatgccgctgcactccagcctgggagacaaagt

SEQ ID NO: 732041 - DNA, 2144 bp, Homo sapiens
  misc_feature (12)..(12): n is a, c, g, or t
  misc_feature (24)..(24): n is a, c, g, or t
tgacccagtcancctgaatgtccnctatggcccagacgagcccatccattaccacctctcatatcgcctgattagcgtccaggggatgaacctcacctctgaacctctcctgccacgcagcctctaacccacctgcacagtactcttggtttgtcaatgggactttccagcaatccacccaagagctctttatccccaacatcactgtgaataatagtggatcctatacgtgccaagcccataactcagacactggcctcaataggaccacagtcacgacgatcacagtctatgcagagccacccaaacccttcatcaccagcaacaactccaaccccgtggaggatgaggatgctgtagccttaacctgtgaacctgagattcagaacacaacctacctgtggtgggtaaataatcagagcctcccggtcagtcccaggctgcagctgtccaatgacaacaggaccctcactctactcagtgtcacaaggaatgatgtaggaccctatgagtgtggaatccagaacgaattaagtgttgaccacagcatggcccagacgaccccaccatttccccctcatacacctattaccgtccaggggtgaacctcagcctctcctgccatgcagcctctaacccacctgcacagtattcttggctgattgatgggaacatccagcaacacacacaagagctctttatctccaacatcactgagaagaacagcggactctatacctgccaggccaataactcagccagtggccacagcaggactacagtcaagacaatcacagtctctgcggagctgcccaagccctccatctccagcaacaactccaaacccgtggaggacaaggatgctgtggccttcacctgtgaacctgaggctcagaacacaacctacctgtggtgggtaaatggtcagagcctcccagtcagtcccaggctgcagctgtccaatggcaacaggaccctcactctattcaatgtcacaagaaatgacgcaagagcctatgtatgtggaatccagaactcagtgagtgcaaaccgcagtgacccagtcaccctggatgtcctctatgggccggacacccccatcatttcccccccagactcgtcttacctttcgggagcgaacctcaacctctcctgccactcggcctctaacccatccccgcagtattcttggcgtatcaatgggataccgcagcaacacacacaagttctctttatcgccaaaatcacgccaaataataacgggacctatgcctgttttgtctctaacttggctactggccgcaataattccatagtcaagagcatcacagtctctgcatctggaacttctcctggtctctcagctggggccactgtcggcatcatgattggagtgctggttggggttgctctgatatagcagccctggtgtagtttcttcatttcaggaagactgacagttgttttgcttcttccttaaagcatttgcaacagctacagtctaaaattgcttctttaccaaggatatttacagaaaagactctgaccagagatcgagaccatcctagccaacatcgctgtagtcccagttactcgggaggctgaggcaggagaatcgcttgaacccgggaggtggagattgcagtgagcccagatcgcaccactgcactccagtctggcaacagagcaagactccatctcaaaaagaaaagaaaagaagactctgacctgtactcttgaatacaagtttctgataccactgcactgtctgagaatttccaaaactttaatgaactaactgacagcttcatgaaactgtccaccaagatcaagcagagaaaataattaatttcatgggactaaatgaactaatgaggataatattttcataattttttatttgaaattttgctgattctttaaatgtcttgtttcccagatttcaggaaactttttttcttttaagctatccacagcttacagcaatttgataaaatatacttttgtgaacaaaaattgagacatttacattttctccctatgtggtcgctccagacttgggaaactattcatgaatatttatattgtatggtaatatagttattgcacaagttcaataaaaatctgctctttgtataacagaa

SEQ ID NO: 732042 - DNA, 1747 bp, Homo sapiens
  misc_feature (12)..(12): n is a, c, g, or t
  misc_feature (24)..(24): n is a, c, g, or t
tgacccagtcancctgaatgtccnctatggcccagacgagcccatccattaccacctctcatatcgcctgattagcgtccaggggatgaacctcacctctgaacctctcctgccacgcagcctctaacccacctgcacagtactcttggtttgtcaatgggactttccagcaatccacccaagagctctttatccccaacatcactgtgaataatagtggatcctatacgtgccaagcccataactcagacactggcctcaataggaccacagtcacgacgatcacagtctatgcagagccacccaaacccttcatcaccagcaacaactccaaccccgtggaggatgaggatgctgtagccttaacctgtgaacctgagattcagaacacaacctacctgtggtgggtaaataatcagagcctcccggtcagtcccaggctgcagctgtccaatgacaacaggaccctcactctactcagtgtcacaaggaatgatgtaggaccctatgagtgtggaatccagaacgaattaagtgttgaccacagcatggcccagacgaccccaccatttccccctcatacacctattaccgtccaggggtgaacctcagcctctcctgccatgcagcctctaacccacctgcacagtattcttggctgattgatgggaacatccagcaacacacacaagagctctttatctccaacatcactgagaagaacagcggactctatacctgccaggccaataactcagccagtggccacagcaggactacagtcaagacaatcacagtctctgcggagctgcccaagccctccatctccagcaacaactccaaacccgtggaggacaaggatgctgtggccttcacctgtgaacctgaggctcagaacacaacctacctgtggtgggtaaatggtcagagcctcccagtcagtcccaggctgcagctgtccaatggcaacaggaccctcactctattcaatgtcacaagaaatgacgcaagagcctatgtatgtggaatccagaactcagtgagtgcaaaccgcagtgacccagtcaccctggatgtcctctatgggccggacacccccatcatttcccccccagactcgtcttacctttcgggagcgaacctcaacctctcctgccactcggcctctaacccatccccgcagtattcttggcgtatcaatgggataccgcagcaacacacacaagttctctttatcgccaaaatcacgccaaataataacgggacctatgcctgttttgtctctaacttggctactggccgcaataattccatagtcaagagcatcacagtctctggtaagtggctccctggagcatcagcatcatattctggggtggagtctatctggttctcaccaaagagccaagaagacattttctttcccagtctgtgttccatgggcacaaggaaatcccaaattctatcctgagccccctcactccatctcggccaactctctcctccccggcttctctgatatctcacggctgacctcgggtccagcctggaatgtggggaggggcctcccttagccccagaaggcccccaatagtgaaagggacttcatagtccagaagaaagaagggtccttaaggtcgagttgctcctctctatcaccaatatgtccctttctgtcacctctttgtgttttttcacctactctgtgagctacaaggaacaaggaggctttgaaaccagcccacac

SEQ ID NO: 732043 - DNA, 1310 bp, Homo sapiens
  misc_feature (12)..(12): n is a, c, g, or t
  misc_feature (24)..(24): n is a, c, g, or t
  misc_feature (1243)..(1243): n is a, c, g, or t
  misc_feature (1265)..(1265): n is a, c, g, or t
  misc_feature (1275)..(1275): n is a, c, g, or t
tgacccagtcancctgaatgtccnctatggcccagacgagcccatccattaccacctctcatatcgcctgattagcgtccaggggatgaacctcacctctgaacctctcctgccacgcagcctctaacccacctgcacagtactcttggtttgtcaatgggactttccagcaatccacccaagagctctttatccccaacatcactgtgaataatagtggatcctatacgtgccaagcccataactcagacactggcctcaataggaccacagtcacgacgatcacagtctatgcagagccacccaaacccttcatcaccagcaacaactccaaccccgtggaggatgaggatgctgtagccttaacctgtgaacctgagattcagaacacaacctacctgtggtgggtaaataatcagagcctcccggtcagtcccaggctgcagctgtccaatgacaacaggaccctcactctactcagtgtcacaaggaatgatgtaggaccctatgagtgtggaatccagaacgaattaagtgttgaccacagcatggcccagacgaccccaccatttccccctcatacacctattaccgtccaggggtgaacctcagcctctcctgccatgcagcctctaacccacctgcacagtattcttggctgattgatgggaacatccagcaacacacacaagagctctttatctccaacatcactgagaagaacagcggactctatacctgccaggccaataactcagccagtggccacagcaggactacagtcaagacaatcacagtctctgcggagctgcccaagccctccatctccagcaacaactccaaacccgtggaggacaaggatgctgtggccttcacctgtgaacctgaggctcagaacacaacctacctgtggtgggtaaatggtcagagcctcccagtcagtcccaggctgcagctgtccaatggcaacaggaccctcactctattcaatgtcacaagaaatgacgcaagagcctatgtatgtggaatccagaactcagtgagtgcaaaccgcagtgacccagtcaccctggatgtcctctatgggccggacacccccatcatttcccccccagactcgtcttacctgatgggagcaagactgatcttctcccatcagcattttgtaaatcaatgtgaaatttgcaaacaagctaagatacattttcttgaaaattgtcctaatttttgattgtatagtttngtcttctgtgattctatctgtncaggcatatnagcataaatttttcatatcgatcacaacatatcac

SEQ ID NO: 732044 - DNA, 3429 bp, Homo sapiens
ctcagggcagagggaggaaggacagcagaccagacagtcacagcagccttgacaaaacgttcctggaactcaagctcttctccacagaggaggacagagcagacagcagagaccatggagtctccctcggcccctccccacagatggtgcatcccctggcagaggctcctgctcacagcctcacttctaaccttctggaacccgcccaccactgccaagctcactattgaatccacgccgttcaatgtcgcagaggggaaggaggtgcttctacttgtccacaatctgccccagcatctttttggctacagctggtacaaaggtgaaagagtggatggcaaccgtcaaattataggatatgtaataggaactcaacaagctaccccagggcccgcatacagtggtcgagagataatataccccaatgcatccctgctgatccagaacatcatccagaatgacacaggattctacaccctacacgtcataaagtcagatcttgtgaatgaagaagcaactggccagttccgggtatacccggagctgcccaagccctccatctccagcaacaactccaaacccgtggaggacaaggatgctgtggccttcacctgtgaacctgagactcaggacgcaacctacctgtggtgggtaaacaatcagagcctcccggtcagtcccaggctgcagctgtccaatggcaacaggaccctcactctattcaatgtcacaagaaatgacacagcaagctacaaatgtgaaacccagaacccagtgagtgccaggcgcagtgattcagtcatcctgaatgtcctctatggcccggatgcccccaccatttcccctctaaacacatcttacagatcaggggaaaatctgaacctctcctgccacgcagcctctaacccacctgcacagtactcttggtttgtcaatgggactttccagcaatccacccaagagctctttatccccaacatcactgtgaataatagtggatcctatacgtgccaagcccataactcagacactggcctcaataggaccacagtcacgacgatcacagtctatgcagagccacccaaacccttcatcaccagcaacaactccaaccccgtggaggatgaggatgctgtagccttaacctgtgaacctgagattcagaacacaacctacctgtggtgggtaaataatcagagcctcccggtcagtcccaggctgcagctgtccaatgacaacaggaccctcactctactcagtgtcacaaggaatgatgtaggaccctatgagtgtggaatccagaacgaattaagtgttgaccacagcgacccagtcatcctgaatgtcctctatggcccagacgaccccaccatttccccctcatacacctattaccgtccaggggtgaacctcagcctctcctgccatgcagcctctaacccacctgcacagtattcttggctgattgatgggaacatccagcaacacacacaagagctctttatctccaacatcactgagaagaacagcggactctatacctgccaggccaataactcagccagtggccacagcaggactacagtcaagacaatcacagtctctgcggagctgcccaagccctccatctccagcaacaactccaaacccgtggaggacaaggatgctgtggccttcacctgtgaacctgaggctcagaacacaacctacctgtggtgggtaaatggtcagagcctcccagtcagtcccaggctgcagctgtccaatggcaacaggaccctcactctattcaatgtcacaagaaatgacgcaagagcctatgtatgtggaatccagaactcagtgagtgcaaaccgcagtgacccagtcaccctggatgtcctctatgggccggacacccccatcatttcccccccagactcgtcttacctttcgggagcgaacctcaacctctcctgccactcggcctctaacccatccccgcagtattcttggcgtatcaatgggataccgcagcaacacacacaagttctctttatcgccaaaatcacgccaaataataacgggacctatgcctgttttgtctctaacttggctactggccgcaataattccatagtcaagagcatcacagtctctgcatctggaacttctcctggtctctcagctggggccactgtcggcatcatgattggagtgctggttggggttgctctgatatagcagccctggtgtagtttcttcatttcaggaagactgacagttgttttgcttcttccttaaagcatttgcaacagctacagtctaaaattgcttctttaccaaggatatttacagaaaagactctgaccagagatcgagaccatcctagccaacatcgctgtagtcccagttactcgggaggctgaggcaggagaatcgcttgaacccgggaggtggagattgcagtgagcccagatcgcaccactgcactccagtctggcaacagagcaagactccatctcaaaaagaaaagaaaagaagactctgacctgtactcttgaatacaagtttctgataccactgcactgtctgagaatttccaaaactttaatgaactaactgacagcttcatgaaactgtccaccaagatcaagcagagaaaataattaatttcatgggactaaatgaactaatgaggataatattttcataattttttatttgaaattttgctgattctttaaatgtcttgtttcccagatttcaggaaactttttttcttttaagctatccacagcttacagcaatttgataaaatatacttttgtgaacaaaaattgagacatttacattttctccctatgtggtcgctccagacttgggaaactattcatgaatatttatattgtatggtaatatagttattgcacaagttcaataaaaatctgctctttgtataacagaatacatttgaaaacattggttatattaccaagactttgactagaatgtcgtatttgaggatataaacccataggtaataaacccacaggtactacaaacaaagtctgaagtcagccttggtttggcttcctagtgtcaattaaacttctaaaagtttaatctgagattccttataaaaacttccagcaaagcaactttaaaaaagtctgtgtgggccgggcgcggtggctcacgcctgtaatcccagcactttgatccgccgaggcgggcggatcacgaggtcaggagatccagaccatcctggctaacacagtgaaaccccgtctctactaaaaatacaaaaaaagttagccgggcgtggtggtgggggcctgtagtcccagctactcaggaggctgaggcaggagaacggcatgaacccgggaggcagggcttgcagtgagccaagatcatgccgctgcactccagcctgggagacaaagt

SEQ ID NO: 732045 - DNA, 2947 bp, Homo sapiens
ctcagggcagagggaggaaggacagcagaccagacagtcacagcagccttgacaaaacgttcctggaactcaagctcttctccacagaggaggacagagcagacagcagagaccatggagtctccctcggcccctccccacagatggtgcatcccctggcagaggctcctgctcacagcctcacttctaaccttctggaacccgcccaccactgccaagctcactattgaatccacgccgttcaatgtcgcagaggggaaggaggtgcttctacttgtccacaatctgccccagcatctttttggctacagctggtacaaaggtgaaagagtggatggcaaccgtcaaattataggatatgtaataggaactcaacaagctaccccagggcccgcatacagtggtcgagagataatataccccaatgcatccctgctgatccagaacatcatccagaatgacacaggattctacaccctacacgtcataaagtcagatcttgtgaatgaagaagcaactggccagttccgggtatacccggagctgcccaagccctccatctccagcaacaactccaaacccgtggaggacaaggatgctgtggccttcacctgtgaacctgagactcaggacgcaacctacctgtggtgggtaaacaatcagagcctcccggtcagtcccaggctgcagctgtccaatggcaacaggaccctcactctattcaatgtcacaagaaatgacacagcaagctacaaatgtgaaacccagaacccagtgagtgccaggcgcagtgattcagtcatcctgaatgtcctctatggcccggatgcccccaccatttcccctctaaacacatcttacagatcaggggaaaatctgaacctctcctgccacgcagcctctaacccacctgcacagtactcttggtttgtcaatgggactttccagcaatccacccaagagctctttatccccaacatcactgtgaataatagtggatcctatacgtgccaagcccataactcagacactggcctcaataggaccacagtcacgacgatcacagtctatgcagagccacccaaacccttcatcaccagcaacaactccaaccccgtggaggatgaggatgctgtagccttaacctgtgaacctgagattcagaacacaacctacctgtggtgggtaaataatcagagcctcccggtcagtcccaggctgcagctgtccaatgacaacaggaccctcactctactcagtgtcacaaggaatgatgtaggaccctatgagtgtggaatccagaacgaattaagtgttgaccacagcgacccagtcatcctgaatgtcctctatggcccagacgaccccaccatttccccctcatacacctattaccgtccaggggtgaacctcagcctctcctgccatgcagcctctaacccacctgcacagtattcttggctgattgatgggaacatccagcaacacacacaagagctctttatctccaacatcactgagaagaacagcggactctatacctgccaggccaataactcagccagtggccacagcaggactacagtcaagacaatcacagtctctgcggagctgcccaagccctccatctccagcaacaactccaaacccgtggaggacaaggatgctgtggccttcacctgtgaacctgaggctcagaacacaacctacctgtggtgggtaaatggtcagagcctcccagtcagtcccaggctgcagctgtccaatggcaacaggaccctcactctattcaatgtcacaagaaatgacgcaagagcctatgtatgtggaatccagaactcagtgagtgcaaaccgcagtgacccagtcaccctggatgtcctctatgggccggacacccccatcatttcccccccagactcgtcttacctttcgggagcgaacctcaacctctcctgccactcggcctctaacccatccccgcagtattcttggcgtatcaatgggataccgcagcaacacacacaagttctctttatcgccaaaatcacgccaaataataacgggacctatgcctgttttgtctctaacttggctactggccgcaataattccatagtcaagagcatcacagtctctgcatctggaacttctcctggtctctcagctggggccactgtcggcatcatgattggagtgctggttggggttgctctgatatagcagccctggtgtagtttcttcatttcaggaagactgacagttgttttgcttcttccttaaagcatttgcaacagctacagtctaaaattgcttctttaccaaggatatttacagaaaagactctgaccagagatcgagaccatcctagccaacatcgctgtagtcccagttactcgggaggctgaggcaggagaatcgcttgaacccgggaggtggagattgcagtgagcccagatcgcaccactgcactccagtctggcaacagagcaagactccatctcaaaaagaaaagaaaagaagactctgacctgtactcttgaatacaagtttctgataccactgcactgtctgagaatttccaaaactttaatgaactaactgacagcttcatgaaactgtccaccaagatcaagcagagaaaataattaatttcatgggactaaatgaactaatgaggataatattttcataattttttatttgaaattttgctgattctttaaatgtcttgtttcccagatttcaggaaactttttttcttttaagctatccacagcttacagcaatttgataaaatatacttttgtgaacaaaaattgagacatttacattttctccctatgtggtcgctccagacttgggaaactattcatgaatatttatattgtatggtaatatagttattgcacaagttcaataaaaatctgctctttgtataacagaa

SEQ ID NO: 732046 - DNA, 6140 bp, Homo sapiens; identical to SEQ ID NO: 355084

SEQ ID NO: 732047 - DNA, 880 bp, Homo sapiens
gcaggagtccaattttcactcatcttgttacaagcttaaaaggactatggacacttcgtgccttcggacggcagccttactttgaaactctgttccacaaagctctgaatttacatactgccaactggttcttgtacctgtcaacactgcgctggttccaaatgagaatagaaatgatttttgtcatcttcttcattgctgttaccttcatttccattttaacaacaggagaaggagaaggaagagttggtattatcctgactttagccatgaatatcatgagtacattgcagtgggctgtaaactccagcatagatgtggatagcttgatgcgatctgtgagccgagtctttaagttcattgacatgccaacagaaggtaaacctaccaagtcaaccaaaccatacaagaatggccaactctcgaaagttatgattattgagaattcacacgtgaagaaagatgacatctggccctcagggggccaaatgactgtcaaagatctcacagcaaaatacacagaaggtggaaatgccatattagagaacatttccttctcaataagtcctggccagagggtgagatttgaacactgcttgctttgttagactgtgttcagtaagtgaatcccagtagcctgaagcaatgtgttagcagaatctatttgtaacattattattgtacagtagaatcaatattaaacacacatgttttattatatggagtcattatttttaatatgaaatttaatttgcagagtcctgaacctatataatgggtttattttaaatgtgattgtacttgcagaatatctaattaattgctaggttaataactaaagaagccattaaataaatcaaaattgtaacatgttttagat

SEQ ID NO: 732048 - DNA, 997 bp, Homo sapiens
ctgtgtctgtaaactgatggctaacaaaactaggattttggtcacttctaaaatggaacatttaaagaaagctgacaaaatattaattttgaatgaaggtagcagctatttttatgggacattttcagaactccaaaatctacagccagactttagctcaaaactcatgggatgtgattctttcgaccaatttagtgcagaaagaagaaattcaatcctaactgagaccttacaccgtttctcattagaaggagatgctcctgtctcctggacagaaacaaaaaaacaatcttttaaacagactggagagtttggggaaaaaaggaagaattctattctcaatccaatcaactctatacgaaaattttccattgtgcaaaagactcccttacaaatgaatggcatcgaagaggattctgatgagcctttagagagaaggctgtccttagtaccagattctgagcagggagaggcgatactgcctcgcatcagcgtgatcagcactggccccacgcttcaggcacgaaggaggcagtctgtcctgaacctgatgacacactcagttaaccaaggtcagaacattcaccgaaagacaacagcatccacacgaaaagtgtcactggcccctcaggcaaacttcgatatattactgtccacaagagcttaatttttgtgctaatttggtgcttagtaatttttctggcagaggtggctgcttctttggttgtgctgtggctccttggaaacactcctcttcaagacaaagggaatagtactcatagtagaaataacagctatgcagtgattatcaccagcaccagttcgtattatgtgttttacatttacgtgggagtagccgacactttgcttgctatgggattcttcagaggtctaccactggtgcatactctaatcacagtgtcgaaaattttacaccacaaaatgttacattctgttcttcaagcacctatgtcaaccctcaacacgttgaaagcag

SEQ ID NO: 732049 - DNA, 1991 bp, Homo sapiens
gttgggctcagatctgtgatagaacagtttcctgggaagcttgactttgtccttgtggatgggggctgtgtcctaagccatggccacaagcagttgatgtgcttggctagatctgttctcagtaaggcgaagatcttgctgcttgatgaacccagtgctcatttggatccagtaacataccaaataattagaagaactctaaaacaagcatttgctgattgcacagtaattctctgtgaacacaggatagaagcaatgctggaatgccaacaatttttggtcatagaagagaacaaagtgcggcagtacgattccatccagaaactgctgaacgagaggagcctcttccggcaagccatcagcccctccgacagggtgaagctctttccccaccggaactcaagcaagtgcaagtctaagccccagattgctgctctgaaagaggagacagaagaagaggtgcaagatacaaggctttagagagcagcataaatgttgacatgggacatttgctcatggaattggagctcgtgggacagtcacctcatggaattggagctcgtggaacagttacctctgcctcagaaaacaaggatgaattaagtttttttttaaaaaagaaacatttggtaaggggaattgaggacactgatatgggtcttgataaatggcttcctggcaatagtcaaattgtgtgaaaggtacttcaaatccttgaagatttaccacttgtgttttgcaagccagattttcctgaaaacccttgccatgtgctagtaattggaaaggcagctctaaatgtcaatcagcctagttgatcagcttattgtctagtgaaactcgttaatttgtagtgttggagaagaactgaaatcatacttcttagggttatgattaagtaatgataactggaaacttcagcggtttatataagcttgtattcctttttctctcctctccccatgatgtttagaaacacaactatattgtttgctaagcattccaactatctcatttccaagcaagtattagaataccacaggaaccacaagactgcacatcaaaatatgccccattcaacatctagtgagcagtcaggaaagagaacttccagatcctggaaatcagggttagtattgtccaggtctaccaaaaatctcaatatttcagataatcacaatacatcccttacctgggaaagggctgttataatctttcacaggggacaggatggttcccttgatgaagaagttgatatgccttttcccaactccagaaagtgacaagctcacagacctttgaactagagtttagctggaaaagtatgttagtgcaaattgtcacaggacagcccttctttccacagaagctccaggtagagggtgtgtaagtagataggccatgggcactgtgggtagacacacatgaagtccaagcatttagatgtataggttgatggtggtatgttttcaggctagatgtatgtacttcatgctgtctacactaagagagaatgagagacacactgaagaagcaccaatcatgaattagttttatatgcttctgttttataattttgtgaagcaaaattttttctctaggaaatatttattttaataatgtttcaaacatatataacaatgctgtattttaaaagaatgattatgaattacatttgtataaaataatttttatatttgaaatattgactttttatggcactagtatttctatgaaatattatgttcttttggtctggagggaagccttggggctgatgcagttgttgcccacagctgtatgattcccagccagcacagcctcttagatgcagttctgaagaagatggtaccaccagtctgactgtttccatcaagggtacactgccttctcaactccaaactgactcttaagaagactgcattatatttattactgtaagaaaatatcacttgtcaataaaatccatacatttgtgtgaaaaaaaaaag

SEQ ID NO: 732050 - DNA, 467 bp, Homo sapiens; identical to SEQ ID NO: 355087

SEQ ID NO: 732051 - DNA, 411 bp, Homo sapiens
aaaatgttgttatttttatttcagatgcgatctgtgagccgagtctttaagttcattgacatgccaacagaaggtaaacctaccaagtcaaccaaaccatacaagaatggccaactctcgaaagttatgattattgagaattcacacgtgaagaaagatgacatctggccctcagggggccaaatgactgtcaaagatctcacagcaaaatacacagaaggtggaaatgccatattagagaacatttccttctcaataagtcctggccagagggtgagatttgaacactgcttgctttgttagactgtgttcagtaagtgaatcccagtagcctgaagcaatgtgttagcagaatctatttgtaacattattattgtacagtagaatcaatattaaacacacatgttttat

SEQ ID NO: 732052 - DNA, 935 bp, Homo sapiens; identical to SEQ ID NO: 54800

SEQ ID NO: 732053 - DNA, 366 bp, Homo sapiens; identical to SEQ ID NO: 54797

SEQ ID NO: 732054 - DNA, 435 bp, Homo sapiens
gaggttggactgtggtgcaggaaagcctcaagtagaggagggttgaggcttcagtccagcacctttctcgggtcacggcctcctcctggctcccaggaccccaccataggcagaggcaggccttcctacaccctactccctgtgcctccagcctcgactagtccctagcactcgacgactgagtctctgaggtcacttcaccgtggtctccgcctcacccttggcgctggaccagtgagaggagagggctggggcgctccgctgagccactcctgcgcccccctggccttgtctacctcttgccccccgagggtttagtgtcgagctcaccccagcatcctatcaacctcctggtggccttgccgcccccacaaccccgaggtataaagccaggtacacgaggcaggggacacaccaaggatggagatgttccag

SEQ ID NO: 732055 - DNA, 870 bp, Homo sapiens; identical to SEQ ID NO: 54798

SEQ ID NO: 732056 - DNA, 246 bp, Homo sapiens; identical to SEQ ID NO: 54799

SEQ ID NO: 732057 - DNA, 2424 bp, Homo sapiens
  misc_feature (642)..(642): n is a, c, g, or t
  misc_feature (2420)..(2424): n is a, c, g, or t
accttctgtatcagttaagtgtcaagatggaaggaacagcagtctcaagataatgcaaagagtttattcatcacccagaggctgatgctcaccatggggcgcctgcaactggttgtgttgggcctcacctgctgctgggcagtggcgagtgccgcgaagctgggcgccgtgtacacagaaggtgggttcgtggaaggcgtcaataagaagctcggcctcctgggtgactctgtggacatcttcaagggcatccccttcgcagctcccaccaaggccctggaaaatcctcagccacatcctggctggcaagggaccctgaaggccaagaacttcaagaagagatgcctgcaggccaccatcacccaggacagcacctacggggatgaagactgcctgtacctcaacatttgggtgccccagggcaggaagcaagtctcccgggacctgcccgttatgatctggatctatggaggcgccttcctcatggggtccggccatggggccaacttcctcaacaactacctgtatgacggcgaggagatcgccacacgcggaaacgtcatcgtggtcaccttcaactaccgtgtcggcccccttgggttcctcagcactggggacgccaatctgccaggtaactatggncttcgggatcagcacatggccattgcttgggtgaagaggaatatcgcggccttcgggggggaccccaacaacatcacgctcttcggggagtctgctggaggtgccagcgtctctctgcagaccctctccccctacaacaagggcctcatccggcgagccatcagccagagcggcgtggccctgagtccctgggtcatccagaaaaacccactcttctgggccaaaaaggtggctgagaaggtgggttgccctgtgggtgatgccgccaggatggcccagtgtctgaaggttactgatccccgagccctgacgctggcctataaggtgccgctggcaggcctggagtaccccatgctgcactatgtgggcttcgtccctgtcattgatggagacttcatccccgctgacccgatcaacctgtacgccaacgccgccgacatcgactatatagcaggcaccaacaacatggacggccacatcttcgccagcatcgacatgcctgccatcaacaagggcaacaagaaagtcacggaggaggacttctacaagctggtcagtgagttcacaatcaccaaggggctcagaggcgccaagacgacctttgatgtctacaccgagtcctgggcccaggacccatcccaggagaataagaagaagactgtggtggactttgagaccgatgtcctcttcctggtgcccaccgagattgccctagcccagcacagagccaatgccaagagtgccaagacctacgcctacctgttttcccatccctctcggatgcccgtctaccccaaatgggtgggggccgaccatgcagatgacattcagtacgttttcgggaagcccttcgccacccccacgggctaccggccccaagacaggacagtctctaaggccatgatcgcctactggaccaactttgccaaaacaggggaccccaacatgggcgactcggctgtgcccacacactgggaaccctacactacggaaaacagcggctacctggagatcaccaagaagatgggcagcagctccatgaagcggagcctgagaaccaacttcctgcgctactggaccctcacctatctggcgctgcccacagtgaccgaccaggaggccacccctgtgccccccacaggggactccgaggccactcccgtgccccccacgggtgactccgagaccgcccccgtgccgcccacgggtgactccggggccccccccgtgccgcccacgggtgactccggggccccccccgtgccgcccacgggtgactccggggccccccccgtgccgcccacgggtgactccggggccccccccgtgccgcccacgggtgactccggggccccccccgtgccgcccacgggtgactccggggccccccccgtgccgcccacgggtgactccggcgccccccccgtgccgcccacgggtgacgccgggcccccccccgtgccgcccacgggtgactccggcgccccccccgtgccgcccacgggtgactccggggccccccccgtgacccccacgggtgactccgagaccgcccccgtgccgcccacgggtgactccggggccccccctgtgccccccacgggtgactctgaggctgcccctgtgccccccacagatgactccaaggaagctcagatgcctgcagtcattaggttttagcgtcccatgagccttggtatcaagaggccacaagagtgggaccccaggggctcccctcccatcttgagctcttcctgaataaagcctcatacccctgnnnnn

SEQ ID NO: 732058 - DNA, 3006 bp, Homo sapiens
  misc_feature (1224)..(1224): n is a, c, g, or t
  misc_feature (3002)..(3006): n is a, c, g, or t
ctcaattggaggatcaaagttgagaaaagtaatattcgacatttttcgattcaacggagtggccaccaagacgatgtcatagaagtctgaacgagtctcagttccaatttggtagaccacttcatacatctttgttggatttcctgtgtacttggtctttgttttctcctcgatgtacattactgagccagatataagattgcttttggatgcctgcagaagccctgagcaaacaagtttattgccaccttctactgcccaaaggccagaatcagaacaggacagtgacaccgcccccacaaaggcattgatgtccgtgctttggccataattgaccctcataacaggagcaatcatttcattgaggaacttctcagaaaagccggccttttgcaaggtttcaagaagtgttcgattaagcattccaaggaagtcatctcctcctagagcatgaagtaatttttcgacactactgaaggcatagtcatgagactggtagcggtagatcctcatgaacttgtctaacacgtcctctacccacatgtgcatacggagggattgaaatccatagcgccaaactaatttaatcacgttaattatgaaccagttgctctcctcaaataccagagtctctccattatatatccccagtacacccagaggctgatgctcaccatggggcgcctgcaactggttgtgttgggcctcacctgctgctgggcagtggcgagtgccgcgaagctgggcgccgtgtacacagaaggtgggttcgtggaaggcgtcaataagaagctcggcctcctgggtgactctgtggacatcttcaagggcatccccttcgcagctcccaccaaggccctggaaaatcctcagccacatcctggctggcaagggaccctgaaggccaagaacttcaagaagagatgcctgcaggccaccatcacccaggacagcacctacggggatgaagactgcctgtacctcaacatttgggtgccccagggcaggaagcaagtctcccgggacctgcccgttatgatctggatctatggaggcgccttcctcatggggtccggccatggggccaacttcctcaacaactacctgtatgacggcgaggagatcgccacacgcggaaacgtcatcgtggtcaccttcaactaccgtgtcggcccccttgggttcctcagcactggggacgccaatctgccaggtaactatggncttcgggatcagcacatggccattgcttgggtgaagaggaatatcgcggccttcgggggggaccccaacaacatcacgctcttcggggagtctgctggaggtgccagcgtctctctgcagaccctctccccctacaacaagggcctcatccggcgagccatcagccagagcggcgtggccctgagtccctgggtcatccagaaaaacccactcttctgggccaaaaaggtggctgagaaggtgggttgccctgtgggtgatgccgccaggatggcccagtgtctgaaggttactgatccccgagccctgacgctggcctataaggtgccgctggcaggcctggagtaccccatgctgcactatgtgggcttcgtccctgtcattgatggagacttcatccccgctgacccgatcaacctgtacgccaacgccgccgacatcgactatatagcaggcaccaacaacatggacggccacatcttcgccagcatcgacatgcctgccatcaacaagggcaacaagaaagtcacggaggaggacttctacaagctggtcagtgagttcacaatcaccaaggggctcagaggcgccaagacgacctttgatgtctacaccgagtcctgggcccaggacccatcccaggagaataagaagaagactgtggtggactttgagaccgatgtcctcttcctggtgcccaccgagattgccctagcccagcacagagccaatgccaagagtgccaagacctacgcctacctgttttcccatccctctcggatgcccgtctaccccaaatgggtgggggccgaccatgcagatgacattcagtacgttttcgggaagcccttcgccacccccacgggctaccggccccaagacaggacagtctctaaggccatgatcgcctactggaccaactttgccaaaacaggggaccccaacatgggcgactcggctgtgcccacacactgggaaccctacactacggaaaacagcggctacctggagatcaccaagaagatgggcagcagctccatgaagcggagcctgagaaccaacttcctgcgctactggaccctcacctatctggcgctgcccacagtgaccgaccaggaggccacccctgtgccccccacaggggactccgaggccactcccgtgccccccacgggtgactccgagaccgcccccgtgccgcccacgggtgactccggggccccccccgtgccgcccacgggtgactccggggccccccccgtgccgcccacgggtgactccggggccccccccgtgccgcccacgggtgactccggggccccccccgtgccgcccacgggtgactccggggccccccccgtgccgcccacgggtgactccggggccccccccgtgccgcccacgggtgactccggcgccccccccgtgccgcccacgggtgacgccgggcccccccccgtgccgcccacgggtgactccggcgccccccccgtgccgcccacgggtgactccggggccccccccgtgacccccacgggtgactccgagaccgcccccgtgccgcccacgggtgactccggggccccccctgtgccccccacgggtgactctgaggctgcccctgtgccccccacagatgactccaaggaagctcagatgcctgcagtcattaggttttagcgtcccatgagccttggtatcaagaggccacaagagtgggaccccaggggctcccctcccatcttgagctcttcctgaataaagcctcatacccctgnnnnn

SEQ ID NO: 732059 - DNA, 1559 bp, Homo sapiens
ggggggtcagtgtcacctccaggatacagacagccccccttcagcccagcccagccaggtctcctacaccgccaccatgccattcggtaacacccacaacaagttcaagctgaattacaagcctgaggaggagtaccccgacctcagcaaacataacaaccacatggccaaggtactgacccttgaactctacaagaagctgcgggacaaggagactccatctggcttcactgtagacgatgtcatccagacaggagtggacaacccaggtcaccccttcatcatgaccgtgggctgcgtggctggtgatgaggagtcctacgaagttttcaaggaactctttgaccccatcatctcggatcgccacgggggctacaaacccactgacaagcacaagactgacctcaaccatgaaaacctcaagggtggagacgacctggaccccaactacgtgctcagcagccgcgtccgcactggccgcagcatcaagggctacacgttgcccccacactgctcccgtggcgagcgccgggcggtggagaagctctctgtggaagctctcaacagcctgacgggcgagttcaaagggaagtactaccctctgaagagcatgacggagaaggagcagcagcagctcatcgatgaccacttcctgttcgacaagcccgtgtccccgctgctgctggcctcaggcatggcccgcgactggcccgacgcccgtggcatctggcacaatgacaacaagagcttcctggtgtgggtgaacgaggaggatcacctccgggtcatctccatggagaaggggggcaacatgaaggaggttttccgccgcttctgcgtagggctgcagaagattgaggagatctttaagaaagctggccaccccttcatgtggaaccagcacctgggctacgtgctcacctgcccatccaacctgggcactgggctgcgtggaggcgtgcatgtgaagctggcgcacctgagcaagcaccccaagttcgaggagatcctcacccgcctgcgtctgcagaagaggggtacaggtggcgtggacacagctgccgtgggctcagtatttgacgtgtccaacgctgatcggctgggctcgtccgaagtagaacaggtgcagctggtggtggatggtgtgaagctcatggtggaaatggagaagaagttggagaaaggccagtccatcgacgacatgatccccgcccagaagtaggcgcctgcccacctgccaccgactgctggaacccagccagtgggagggcctggcccaccagagtcctgctccctcactcctcgccccgccccctgtcccagagtcccacctgggggctctctccacccttctcagagttccagtttcaaccagagttccaaccaatgggctccatcctctggattctggccaatgaaatatctccctggcagggtcctcttcttttcccagagctccaccccaaccaggagctctagttaatggagagctcccagcacactcggagcttgtgctttgtctccacgcaaagcgataaataaaagcattggtggcctta

SEQ ID NO: 732060 - DNA, 872 bp, Homo sapiens
  misc_feature (709)..(709): n is a, c, g, or t
  misc_feature (714)..(714): n is a, c, g, or t
  misc_feature (717)..(717): n is a, c, g, or t
  misc_feature (722)..(722): n is a, c, g, or t
  misc_feature (725)..(725): n is a, c, g, or t
ggggggtcagtgtcacctccaggatacagacagccccccttcagcccagcccagccaggtctcctacaccgccaccatgccattcggtaacacccacaacaagttcaagctgaattacaagcctgaggaggagtaccccgacctcagcaaacataacaaccacatggccaaggtactgacccttgaactctacaagaagctgcgggacaaggagactccatctggcttcactgtagacgatgtcatccagacaggagtggacaacccaggtcaccccttcatcatgaccgtgggctgcgtggctggtgatgaggagtcctacgaagttttcaaggaactctttgaccccatcatctcggatcgccacgggggctacaaacccactgacaagcacaagactgacctcaaccatgaaaacctcaagggtggagacgacctggaccccaactacgtgctcagcagccgcgtccgcactggccgcagcatcaagggctacacgttgcccccacactgctcccgtggcgagcgccgggcggtggagaagctctctgtggaagctctcaacagcctgacgggcgagttcaaagggaagtactaccctctgaagagcatgacggagaaggagcagcagcagctcatcgatgaccacttcctgttcgacaagcccgtgtccccgctgctgctggcctcaggcatggccggatggccnagccnggntctgncangaccagagtctgggtggggccggggatcccgggcctcccgggaggggcctggggttcccgttggggggcaatggggtctaaggccccctttggcccggtggccctccctcgggggggggtttgccacccgtcccctcttcggggtct

SEQ ID NO: 732061 - DNA, 522 bp, Homo sapiens
ggggggtcagtgtcacctccaggatacagacagccccccttcagcccagcccagccaggtctcctacaccgccaccatgccattcggtaacacccacaacaagttcaagctgaattacaagcctgaggaggagtaccccgacctcagcaaacataacaaccacatggccaaggtactgacccttgaactctacaagaagctgcgggacaaggagactccatctggcttcactgtagacgatgtcatccagacaggagtggacaacccaggtcaccccttcatcatgaccgtgggctgcgtggctggtgatgaggagtcctacgaagttttcaaggaactctttgaccccatcatctcggatcgccacgggggctacaaacccactgacaagcacaagactgacctcaaccatgaaaacctcaagcccaaccaggagctctagttaatggagagctcccagcacactcggagcttgtgctttgtctccacgcaaagcgataaataaaagcattggtggcctta

SEQ ID NO: 732062 - DNA, 1461 bp, Homo sapiens
ggggggtcagtgtcacctccaggatacagacagccccccttcagcccagcccagccaggtctcctacaccgccaccatgccattcggtaacacccacaacaagttcaagctgaattacaagcctgaggaggagtaccccgacctcagcaaacataacaaccacatggccaaggtactgacccttgaactctacaagaagctgcgggacaaggagactccatctggcttcactgtagacgatgtcatccagacaggagtggacaacccaggtcaccccttcatcatgaccgtgggctgcgtggctggtgatgaggagtcctacgaagttttcaaggaactctttgaccccatcatctcggatcgccacgggggctacaaacccactgacaagcacaagactgacctcaaccatgaaaacctcaagggtggagacgacctggaccccaactacgtgctcagcagccgcgtccgcactggccgcagcatcaagggctacacgttgcccccacactgctcccgtggcgagcgccgggcggtggagaagctctctgtggaagctctcaacagcctgacgggcgagttcaaagggaagtactaccctctgaagagcatgacggagaaggagcagcagcagctcatcgatgaccacttcctgttcgacaagcccgtgtccccgctgctgctggcctcaggcatggcccgcgactggcccgacgcccgtggcatctggcacaatgacaacaagagcttcctggtgtgggtgaacgaggaggatcacctccgggtcatctccatggagaaggggggcaacatgaaggaggttttccgccgcttctgcgtagggctgcagaagattgaggagatctttaagaaagctggccaccccttcatgtggaaccagcacctgggctacgtgctcacctgcccatccaacctgggcactgggctgcgtggaggcgtgcatgtgaagctggcgcacctgagcaagcaccccaagttcgaggagatcctcacccgcctgcgtctgcagaagaggggtacaggtggcgtggacacagctgccgtgggctcagtatttgacgtgtccaacgctgatcggctgggctcgtccgaagtagaacaggtgcagctggtggtggatggtgtgaagctcatggtggaaatggagaagaagttggagaaaggccagtccatcgacgacatgatccccgcccagaagtaggcgcctgcccacctgccaccgactgctggaacccagccagtgggagggcctggcccaccagagtcctgctccctcactcctcgccccgccccctgtcccagagtcccacctgggggctctctccacccttctcagagttccagtttcaaccagagttccaaccaatgggctccatcctctggattctggccaatgaaatatctccctggcagggtcctcttcttttcccagagctccac

SEQ ID NO: 732063 - DNA, 742 bp, Homo sapiens
cctccattaggcgcgttctgcgtagggctgcagaagattgaggagatctttaagaaagctggccaccccttcatgtggaaccagcacctgggctacgtgctcacctgcccatccaacctgggcactgggctgcgtggaggcgtgcatgtgaagctggcgcacctgagcaagcaccccaagttcgaggagatcctcacccgcctgcgtctgcagaagaggggtacaggtggcgtggacacagctgccgtgggctcagtatttgacgtgtccaacgctgatcggctgggctcgtccgaagtagaacaggtgcagctggtggtggatggtgtgaagctcatggtggaaatggagaagaagttggagaaaggccagtccatcgacgacatgatccccgcccagaagtaggcgcctgcccacctgccaccgactgctggaacccagccagtgggagggcctggcccaccagagtcctgctccctcactcctcgccccgccccctgtcccagagtcccacctgggggctctctccacccttctcagagttccagtttcaaccagagttccaaccaatgggctccatcctctggattctggccaatgaaatatctccctggcagggtcctcttcttttcccagagctccaccccaaccaggagctctagttaatggagagctcccagcacactcggagcttgtgctttgtctccacgcaaagcgataaataaaagcattggtggcctta

SEQ ID NO: 732064 - DNA, 644 bp, Homo sapiens
cctccattaggcgcgttctgcgtagggctgcagaagattgaggagatctttaagaaagctggccaccccttcatgtggaaccagcacctgggctacgtgctcacctgcccatccaacctgggcactgggctgcgtggaggcgtgcatgtgaagctggcgcacctgagcaagcaccccaagttcgaggagatcctcacccgcctgcgtctgcagaagaggggtacaggtggcgtggacacagctgccgtgggctcagtatttgacgtgtccaacgctgatcggctgggctcgtccgaagtagaacaggtgcagctggtggtggatggtgtgaagctcatggtggaaatggagaagaagttggagaaaggccagtccatcgacgacatgatccccgcccagaagtaggcgcctgcccacctgccaccgactgctggaacccagccagtgggagggcctggcccaccagagtcctgctccctcactcctcgccccgccccctgtcccagagtcccacctgggggctctctccacccttctcagagttccagtttcaaccagagttccaaccaatgggctccatcctctggattctggccaatgaaatatctccctggcagggtcctcttcttttcccagagctccac

SEQ ID NO: 732065 - DNA, 599 bp, Homo sapiens
ggggggtcagtgtcacctccaggatacagacagccccccttcagcccagcccagccaggtctcctacaccgccaccatgccattcggtaacacccacaacaagttcaagctgaattacaagcctgaggaggagtaccccgacctcagcaaacataacaaccacatggccaaggtactgacccttgaactctacaagaagctgcgggacaaggagactccatctggcttcactgtagacgatgtcatccagacaggagtggacaacccaggtcaccccttcatcatgaccgtgggctgcgtggctggtgatgaggagtcctacgaagttttcaaggaactctttgaccccatcatctcggatcgccacgggggctacaaacccactgacaagcacaagactgacctcaaccatgaaaacctcaagcaatgggctccatcctctggattctggccaatgaaatatctccctggcagggtcctcttcttttcccagagctccaccccaaccaggagctctagttaatggagagctcccagcacactcggagcttgtgctttgtctccacgcaaagcgataaataaaagcattggtggcctta

SEQ ID NO: 732066 - DNA, 1205 bp, Homo sapiens
ggggggtcagtgtcacctccaggatacagacagccccccttcagcccagcccagccaggtctcctacaccgccaccatgccattcggtaacacccacaacaagttcaagctgaattacaagcctgaggaggagtaccccgacctcagcaaacataacaaccacatggccaagcgccgggcggtggagaagctctctgtggaagctctcaacagcctgacgggcgagttcaaagggaagtactaccctctgaagagcatgacggagaaggagcagcagcagctcatcgatgaccacttcctgttcgacaagcccgtgtccccgctgctgctggcctcaggcatggcccgcgactggcccgacgcccgtggcatctggcacaatgacaacaagagcttcctggtgtgggtgaacgaggaggatcacctccgggtcatctccatggagaaggggggcaacatgaaggaggttttccgccgcttctgcgtagggctgcagaagattgaggagatctttaagaaagctggccaccccttcatgtggaaccagcacctgggctacgtgctcacctgcccatccaacctgggcactgggctgcgtggaggcgtgcatgtgaagctggcgcacctgagcaagcaccccaagttcgaggagatcctcacccgcctgcgtctgcagaagaggggtacaggtggcgtggacacagctgccgtgggctcagtatttgacgtgtccaacgctgatcggctgggctcgtccgaagtagaacaggtgcagctggtggtggatggtgtgaagctcatggtggaaatggagaagaagttggagaaaggccagtccatcgacgacatgatccccgcccagaagtaggcgcctgcccacctgccaccgactgctggaacccagccagtgggagggcctggcccaccagagtcctgctccctcactcctcgccccgccccctgtcccagagtcccacctgggggctctctccacccttctcagagttccagtttcaaccagagttccaaccaatgggctccatcctctggattctggccaatgaaatatctccctggcagggtcctcttcttttcccagagctccaccccaaccaggagctctagttaatggagagctcccagcacactcggagcttgtgctttgtctccacgcaaagcgataaataaaagcattggtggcctta

SEQ ID NO: 732067 - DNA, 1107 bp, Homo sapiens
ggggggtcagtgtcacctccaggatacagacagccccccttcagcccagcccagccaggtctcctacaccgccaccatgccattcggtaacacccacaacaagttcaagctgaattacaagcctgaggaggagtaccccgacctcagcaaacataacaaccacatggccaagcgccgggcggtggagaagctctctgtggaagctctcaacagcctgacgggcgagttcaaagggaagtactaccctctgaagagcatgacggagaaggagcagcagcagctcatcgatgaccacttcctgttcgacaagcccgtgtccccgctgctgctggcctcaggcatggcccgcgactggcccgacgcccgtggcatctggcacaatgacaacaagagcttcctggtgtgggtgaacgaggaggatcacctccgggtcatctccatggagaaggggggcaacatgaaggaggttttccgccgcttctgcgtagggctgcagaagattgaggagatctttaagaaagctggccaccccttcatgtggaaccagcacctgggctacgtgctcacctgcccatccaacctgggcactgggctgcgtggaggcgtgcatgtgaagctggcgcacctgagcaagcaccccaagttcgaggagatcctcacccgcctgcgtctgcagaagaggggtacaggtggcgtggacacagctgccgtgggctcagtatttgacgtgtccaacgctgatcggctgggctcgtccgaagtagaacaggtgcagctggtggtggatggtgtgaagctcatggtggaaatggagaagaagttggagaaaggccagtccatcgacgacatgatccccgcccagaagtaggcgcctgcccacctgccaccgactgctggaacccagccagtgggagggcctggcccaccagagtcctgctccctcactcctcgccccgccccctgtcccagagtcccacctgggggctctctccacccttctcagagttccagtttcaaccagagttccaaccaatgggctccatcctctggattctggccaatgaaatatctccctggcagggtcctcttcttttcccagagctccac

SEQ ID NO: 732068 - DNA, 1081 bp, Homo sapiens
ggggggtcagtgtcacctccaggatacagacagccccccttcagcccagcccagccaggtctcctacaccgccaccatgccattcggtaacacccacaacaattcaaagggaagtactaccctctgaagagcatgacggagaaggagcagcagcagctcatcgatgaccacttcctgttcgacaagcccgtgtccccgctgctgctggcctcaggcatggcccgcgactggcccgacgcccgtggcatctggcacaatgacaacaagagcttcctggtgtgggtgaacgaggaggatcacctccgggtcatctccatggagaaggggggcaacatgaaggaggttttccgccgcttctgcgtagggctgcagaagattgaggagatctttaagaaagctggccaccccttcatgtggaaccagcacctgggctacgtgctcacctgcccatccaacctgggcactgggctgcgtggaggcgtgcatgtgaagctggcgcacctgagcaagcaccccaagttcgaggagatcctcacccgcctgcgtctgcagaagaggggtacaggtggcgtggacacagctgccgtgggctcagtatttgacgtgtccaacgctgatcggctgggctcgtccgaagtagaacaggtgcagctggtggtggatggtgtgaagctcatggtggaaatggagaagaagttggagaaaggccagtccatcgacgacatgatccccgcccagaagtaggcgcctgcccacctgccaccgactgctggaacccagccagtgggagggcctggcccaccagagtcctgctccctcactcctcgccccgccccctgtcccagagtcccacctgggggctctctccacccttctcagagttccagtttcaaccagagttccaaccaatgggctccatcctctggattctggccaatgaaatatctccctggcagggtcctcttcttttcccagagctccaccccaaccaggagctctagttaatggagagctcccagcacactcggagcttgtgctttgtctccacgcaaagcgataaataaaagcattggtggcctta

SEQ ID NO: 732069 - DNA, 983 bp, Homo sapiens
ggggggtcagtgtcacctccaggatacagacagccccccttcagcccagcccagccaggtctcctacaccgccaccatgccattcggtaacacccacaacaattcaaagggaagtactaccctctgaagagcatgacggagaaggagcagcagcagctcatcgatgaccacttcctgttcgacaagcccgtgtccccgctgctgctggcctcaggcatggcccgcgactggcccgacgcccgtggcatctggcacaatgacaacaagagcttcctggtgtgggtgaacgaggaggatcacctccgggtcatctccatggagaaggggggcaacatgaaggaggttttccgccgcttctgcgtagggctgcagaagattgaggagatctttaagaaagctggccaccccttcatgtggaaccagcacctgggctacgtgctcacctgcccatccaacctgggcactgggctgcgtggaggcgtgcatgtgaagctggcgcacctgagcaagcaccccaagttcgaggagatcctcacccgcctgcgtctgcagaagaggggtacaggtggcgtggacacagctgccgtgggctcagtatttgacgtgtccaacgctgatcggctgggctcgtccgaagtagaacaggtgcagctggtggtggatggtgtgaagctcatggtggaaatggagaagaagttggagaaaggccagtccatcgacgacatgatccccgcccagaagtaggcgcctgcccacctgccaccgactgctggaacccagccagtgggagggcctggcccaccagagtcctgctccctcactcctcgccccgccccctgtcccagagtcccacctgggggctctctccacccttctcagagttccagtttcaaccagagttccaaccaatgggctccatcctctggattctggccaatgaaatatctccctggcagggtcctcttcttttcccagagctccac

SEQ ID NO: 732070 - DNA, 1531 bp, Homo sapiens
ggggggtcagtgtcacctccaggatacagacagccccccttcagcccagcccagccaggtctcctacaccgccaccatgccattcggtaacacccacaacaagttcaagctgaattacaagcctgaggaggagtaccccgacctcagcaaacataacaaccacatggccaaggtactgacccttgaactctacaagaagctgcgggacaaggagactccatctggcttcactgtagacgatgtcaccccttcatcatgaccgtgggctgcgtggctggtgatgaggagtcctacgaagttttcaaggaactctttgaccccatcatctcggatcgccacgggggctacaaacccactgacaagcacaagactgacctcaaccatgaaaacctcaagggtggagacgacctggaccccaactacgtgctcagcagccgcgtccgcactggccgcagcatcaagggctacacgttgcccccacactgctcccgtggcgagcgccgggcggtggagaagctctctgtggaagctctcaacagcctgacgggcgagttcaaagggaagtactaccctctgaagagcatgacggagaaggagcagcagcagctcatcgatgaccacttcctgttcgacaagcccgtgtccccgctgctgctggcctcaggcatggcccgcgactggcccgacgcccgtggcatctggcacaatgacaacaagagcttcctggtgtgggtgaacgaggaggatcacctccgggtcatctccatggagaaggggggcaacatgaaggaggttttccgccgcttctgcgtagggctgcagaagattgaggagatctttaagaaagctggccaccccttcatgtggaaccagcacctgggctacgtgctcacctgcccatccaacctgggcactgggctgcgtggaggcgtgcatgtgaagctggcgcacctgagcaagcaccccaagttcgaggagatcctcacccgcctgcgtctgcagaagaggggtacaggtggcgtggacacagctgccgtgggctcagtatttgacgtgtccaacgctgatcggctgggctcgtccgaagtagaacaggtgcagctggtggtggatggtgtgaagctcatggtggaaatggagaagaagttggagaaaggccagtccatcgacgacatgatccccgcccagaagtaggcgcctgcccacctgccaccgactgctggaacccagccagtgggagggcctggcccaccagagtcctgctccctcactcctcgccccgccccctgtcccagagtcccacctgggggctctctccacccttctcagagttccagtttcaaccagagttccaaccaatgggctccatcctctggattctggccaatgaaatatctccctggcagggtcctcttcttttcccagagctccaccccaaccaggagctctagttaatggagagctcccagcacactcggagcttgtgctttgtctccacgcaaagcgataaataaaagcattggtggcctta

SEQ ID NO: 732071 - DNA, 1433 bp, Homo sapiens
ggggggtcagtgtcacctccaggatacagacagccccccttcagcccagcccagccaggtctcctacaccgccaccatgccattcggtaacacccacaacaagttcaagctgaattacaagcctgaggaggagtaccccgacctcagcaaacataacaaccacatggccaaggtactgacccttgaactctacaagaagctgcgggacaaggagactccatctggcttcactgtagacgatgtcaccccttcatcatgaccgtgggctgcgtggctggtgatgaggagtcctacgaagttttcaaggaactctttgaccccatcatctcggatcgccacgggggctacaaacccactgacaagcacaagactgacctcaaccatgaaaacctcaagggtggagacgacctggaccccaactacgtgctcagcagccgcgtccgcactggccgcagcatcaagggctacacgttgcccccacactgctcccgtggcgagcgccgggcggtggagaagctctctgtggaagctctcaacagcctgacgggcgagttcaaagggaagtactaccctctgaagagcatgacggagaaggagcagcagcagctcatcgatgaccacttcctgttcgacaagcccgtgtccccgctgctgctggcctcaggcatggcccgcgactggcccgacgcccgtggcatctggcacaatgacaacaagagcttcctggtgtgggtgaacgaggaggatcacctccgggtcatctccatggagaaggggggcaacatgaaggaggttttccgccgcttctgcgtagggctgcagaagattgaggagatctttaagaaagctggccaccccttcatgtggaaccagcacctgggctacgtgctcacctgcccatccaacctgggcactgggctgcgtggaggcgtgcatgtgaagctggcgcacctgagcaagcaccccaagttcgaggagatcctcacccgcctgcgtctgcagaagaggggtacaggtggcgtggacacagctgccgtgggctcagtatttgacgtgtccaacgctgatcggctgggctcgtccgaagtagaacaggtgcagctggtggtggatggtgtgaagctcatggtggaaatggagaagaagttggagaaaggccagtccatcgacgacatgatccccgcccagaagtaggcgcctgcccacctgccaccgactgctggaacccagccagtgggagggcctggcccaccagagtcctgctccctcactcctcgccccgccccctgtcccagagtcccacctgggggctctctccacccttctcagagttccagtttcaaccagagttccaaccaatgggctccatcctctggattctggccaatgaaatatctccctggcagggtcctcttcttttcccagagctccac

SEQ ID NO: 732072 - DNA, 199 bp, Homo sapiens; identical to SEQ ID NO: 346077

SEQ ID NO: 732073 - DNA, 1677 bp, Homo sapiens
ggcctcacggtcctgctgatatgtgacatcacccccggaggcccagctgtaaattcctctctttgtactctttctctttatttctcagaccagccgacacttagggaaaatagaacctacgctgaaattttgggggcaggttctcttgctaggttttgaggttttgctgaagatattcctgaagaatcatcccaggtgccacactaaaaaaatgatccagttgacagctacccctgtgagtgcacttgttgatgagccagtgcatatccaagctacaggcctgattccctttcagatggtgagttttcaggcatcactggaagatgaaaacggagacatgttttattctcaagcccactatagggccaatgaattcggtgaggtggacctgaatcatgcttcttcacttggaggggattatatgggagtccaccccatgggtctcttctggtctctgaaacctgaaaagctattaacaagactgttgaaaagagatgtgatgaataggcctttccaggtccaagtaaaactttatgacttagagttaatagtgaacaataaagttgccagtgctccaaaggccagcctgactttggagaggtggtatgtggcacctggtgtcacacgaattaaggttcgagaaggccgccttcgaggagctctctttctccctccaggagagggtctcttcccaggggtaattgatttgtttggtggtttgggtgggctgcttgaatttcgggccagcctcctagccagtcgtggcttcgcctccttggccttggcttaccataactatgaagacctgccccgcaaaccagaagtaacagatttggaatattttgaggaggctgccaactttctcctgagacatccaaaggtctttggctcaggcgttggggtagtctctgtatgtcaaggagtacagattggactatctatggctatttacctaaagcaagtcacagccacggtacttattaatgggaccaactttccttttggcattccacaggtatatcatggtcagatccatcagccccttccccattctgcacaattaatatccaccaatgccttggggttactagagctctatcgcacttttgagacaactcaagttggggccagtcaatatttgtttcctattgaagaggcccaggggcaattcctcttcattgtaggagaaggtgataagactatcaacagcaaagcacacgctgaacaagccataggacagctgaagagacatgggaagaacaactggaccctgctatcttaccctggggcaggccacctgatagaacctccctattctcctctgtgctgtgcctcaacgacccacgatttgaggttacactggggaggagaggtgatcccacacgcagctgcacaggaacatgcttggaaggagatccagagatttctcaggaagcacctcattccagatgtgaccagtcaactctaagaagactagatattcctagaaaataaagaagcaaatctctttaccaggaccttctctcaattttcatggcggaatgtctcccccagctgccacacacacattttgtattaattttaatgattaaaaagagcatagggtaaaaacctgatatttcacttatactgcataacaagctaaccaaactggacatggtgaataaatcataaaac

SEQ ID NO: 732074 - DNA, 2186 bp, Homo sapiens
ggcctcacggtcctgctgatatgtgacatcacccccggaggcccagctgtaaattcctctctttgtactctttctctttatttctcagacgcagctgcacaggaacatgcttggaaggagatccagagatttctcaggaagcacctcattccagatgtgaccagtcaactctaagaagactagatattcctagaaaataaagaagcaaatctctttaccaggaccttctctcaattttcatggcggaatgtctcccccagctgccacacacacattttgtattaattttaatgattaaaaagagcatagggtaaaaacctgatatttcacttatactgcataacaagctaaccaaactggacatggtgaataaatcataaaacaaatcattttacttattatttacatgacttttctttccatcaggtcttctaaataggactgaggtatagtacactggcaaaaataagaaaaggcaaacaagaatagcaccaaagtaacagatataaaaccaaataccatgtcagaaaacactatatagtaagaatttatcagattagagcagcaggagaaaattaatactaaattataatcattttagtgatatttttcaacttcaccacagtaactttgcaacatcatttttcatttgtggggtagtaaaattcatgtcaaaaaggaaagaaggaatggaggaggtcagttagttcattgcaataaattacctcttcagttcttaaaaacatgcccattggcacataactgagacataataactaagactggaagagccttggtttaagttatgaagcaaattaaaatggaaaatacaagaaaatagaaccaattaggttgaaaatgccccttactgaaaatctgtattaaaaataaaattaataaaagtaaaaaataaaaatagaaacacaactctactagtacaggctagcctggggagtttgataaactgagtgattgggtcaactatcactgtacttccataatgaatttcttcagtcatgttagagtagcacatgaatgtgagctctataaggacaggtactatatttccgtaagacccaatagttactgtacatcccataaataaaaaatactttagtttgctaaccaactgaatatatgaggactgcatgtaattcaaccacatggttgtttgctgtacagtcctttgcaaatattaaaaattttttttgctataaggctttgatcatatagtcctcatagcaacataactaccatctagcatgtaccacattttgcaagactttaagttcaacattccaaactgccaatttgtattatgtccaaatgcagtatccttgaggaatatagtgggtcagttaaatatctagagacatacaaacatctgctaattcatctcattgagatggatcattctgatctccatcatccacccacttttcatcagcttctcctacttcattctcctcatagtctttatcatgagggattctgtatcctgtctctcatctacacttgctggccttcctggttgtgatttattggaacagtctacacaaaaaccatagggtcaagatccatgtcttactccaacactggctgctaacatgatcttacataccatacatttgcatttttatccttcttgtgcaccaagaaatgttttcttacatgttttctccaagtgtaaaaagtcacagctaaatgatctcactcctgtatgaataagcaagtgcttttttagtgtttgtttgcatttggctgcatagctacaatgatggcattttaacttattcatgattagagatgatgatatggtttggatatttgttgtgcccaaatttcatgctgaaatgtaatccctagtgttggaggtgaggcctggtgggagttgtttgggtcatgggggtggaccctcatggcttggtactgtcctcatgagagtatgatagtgagtgagttctcaagagatatgactgtttaaaagtgtgtggcacctcctccccatcctcacactctttcttgcctcctctctcgccatgtgagatgcctcctcgctgttcacctgctgccatgattgtaaacttcctgaggcctccccagaagccaagtagatgcaagcattatgcttctgtaaagcctgcaggaccatgatccaattaaatctcttttctttataaattaac

SEQ ID NO: 732075 - DNA, 3426 bp, Homo sapiens; identical to SEQ ID NO: 413981

SEQ ID NO: 732076 - DNA, 3480 bp, Homo sapiens; identical to SEQ ID NO: 413978

SEQ ID NO: 732077 - DNA, 3101 bp, Homo sapiens; identical to SEQ ID NO: 413980

SEQ ID NO: 732078 - DNA, 3047 bp, Homo sapiens; identical to SEQ ID NO: 413982

SEQ ID NO: 732079 - DNA, 539 bp, Homo sapiens; identical to SEQ ID NO: 315284

SEQ ID NO: 732080 - DNA, 416 bp, Homo sapiens; identical to SEQ ID NO: 315290

SEQ ID NO: 732081 - DNA, 712 bp, Homo sapiens
  misc_feature (544)..(546): n is a, c, g, or t
ctgtctcccgccacccacaccagctgtcccactcaccatggagaagatcctgatcctcctgcttgtcgccctctctgtggcctatgcagctcctggcccccgggggatcattatcaacctggagaacggtgagctctgcatgaatagtgcccagtgtaagagcaattgctgccagcattcaagtgcgctgggcctggcccgctgcacatccatggccagcgagaacagcgagtgctctgtcaagacgctctatgggatttactacaagtgtccctgtgagcgtggcctgacctgtgagggagacaagaccatcgtgggctccatcaccaacaccaactttggcatctgccatgacgctggacgctccaagcagtgagactgcccacccactcccacacctagcccagaatgctgtaggccactaggcgcaggggcatctctcccctgctccagcgcatctcccgggctggccacctccttgaccagcatatctgttttctgattgcgctcttcacaattaaaggcctcctgcaaaccttaaaannnaaaaaaaaggaaaagcccacaggccccccaaccaaaaaagctattttttgagttgcccctgtttgaatggaataaggattgaagggatatgagggggttttttttgggggggggctcggtccccaaaatccccattttggaggtcttattcccccctttattgggg

SEQ ID NO: 732082 - DNA, 2439 bp, Homo sapiens
ccacccagctccccgccaccgccatggtccccgacaccgcctgcgttcttctgctcaccctggctgccctcggcgcgtccggacagggccagagcccgttgggctcagacctgggcccgcagatgcttcgggaactgcaggaaaccaacgcggcgctgcaggacgtgcgggagctgctgcggcagcaggtcagggagatcacgttcctgaaaaacacggtgatggagtgtgacgcgtgcgggatgcagcagtcagtacgcaccggcctacccagcgtgcggcccctgctccactgcgcgcccggcttctgcttccccggcgtggcctgcatccagacggagagcggcgcgcgctgcggcccctgccccgcgggcttcacgggcaacggctcgcactgcaccgacgtcaacgagtgcaacgcccacccctgcttcccccgagtccgctgtatcaacaccagcccggggttccgctgcgaggcttgcccgccggggtacagcggccccacccaccagggcgtggggctggctttcgccaaggccaacaagcaggtttgcacggacatcaacgagtgtgagaccgggcaacataactgcgtccccaactccgtgtgcatcaacacccggggctccttccagtgcggcccgtgccagcccggcttcgtgggcgaccaggcgtccggctgccagcggcgcgcacagcgcttctgccccgacggctcgcccagcgagtgccacgagcatgcagactgcgtcctagagcgcgatggctcgcggtcgtgcgtgtgtgccgttggctgggccggcaacgggatcctctgtggtcgcgacactgacctagacggcttcccggacgagaagctgcgctgcccggagcgccagtgccgtaaggacaactgcgtgactgtgcccaactcagggcaggaggatgtggaccgcgatggcatcggagacgcctgcgatccggatgccgacggggacggggtccccaatgaaaaggacaactgcccgctggtgcggaacccagaccagcgcaacacggacgaggacaagtggggcgatgcgtgcgacaactgccggtcccagaagaacgacgaccaaaaggacacagaccaggacggccggggcgatgcgtgcgacgacgacatcgacggcgaccggatccgcaaccaggccgacaactgccctagggtacccaactcagaccagaaggacagtgatggcgatggtataggggatgcctgtgacaactgtccccagaagagcaacccggatcaggcggatgtggaccacgactttgtgggagatgcttgtgacagcgatcaagaccaggatggagacggacatcaggactctcgggacaactgtcccacggtgcctaacagtgcccaggaggactcagaccacgatggccagggtgatgcctgcgacgacgacgacgacaatgacggagtccctgacagtcgggacaactgccgcctggtgcctaaccccggccaggaggacgcggacagggacggcgtgggcgacgtgtgccaggacgactttgatgcagacaaggtggtagacaagatcgacgtgtgtccggagaacgctgaagtcacgctcaccgacttcagggccttccagacagtcgtgctggacccggagggtgacgcgcagattgaccccaactgggtggtgctcaaccagggaagggagatcgtgcagacaatgaacagcgacccaggcctggctgtgggttacactgccttcaatggcgtggacttcgagggcacgttccatgtgaacacggtcacggatgacgactatgcgggcttcatctttggctaccaggacagctccagcttctacgtggtcatgtggaagcagatggagcaaacgtattggcaggcgaaccccttccgtgctgtggccgagcctggcatccaactcaaggctgtgaagtcttccacaggccccggggaacagctgcggaacgctctgtggcatacaggagacacagagtcccaggtgcggctgctgtggaaggacccgcgaaacgtgggttggaaggacaagaagtcctatcgttggttcctgcagcaccggccccaagtgggctacatcagggtgcgattctatgagggccctgagctggtggccgacagcaacgtggtcttggacacaaccatgcggggtggccgcctgggggtcttctgcttctcccaggagaacatcatctgggccaacctgcgttaccgctgcaatgacaccatcccagaggactatgagacccatcagctgcggcaagcctagggaccagggtgaggacccgccggatgacagccaccctcaccgcggctggatgggggctctgcacccagccccaaggggtggccgtcctgagggggaagtgagaagggctcagagaggacaaaataaagtgtgtgtgcaggga

SEQ ID NO: 732083 - DNA, 1613 bp, Homo sapiens
  misc_feature (11)..(11): n is a, c, g, or t
  misc_feature (17)..(17): n is a, c, g, or t
  misc_feature (28)..(28): n is a, c, g, or t
  misc_feature (30)..(30): n is a, c, g, or t
gcggtaccggncctganttcccgggtcnanccacgcgtccggcccggagcgccagtgccgtaaggacaactgcgtgactgtgcccaactcagggcaggaggatgtggaccgcgatggcatcggagacgcctgcgatccggatgccgacggggacggggtccccaatgaaaaggacaactgcccgctggtgcggaacccagaccagcgcaacacggacgaggacaagtggggcgatgcgtgcgacaactgccggtcccagaagaacgacgaccaaaaggacacagaccaggacggccggggcgatgcgtgcgacgacgacatcgacggcgaccggatccgcaaccaggccgacaactgccctagggtacccaactcagaccagaaggacagtgatggcgatggtataggggatgcctgtgacaactgtccccagaagagcaacccggatcaggcggatgtggaccacgactttgtgggagatgcttgtgacagcgatcaagaccaggatggagacggacatcaggactctcgggacaactgtcccacggtgcctaacagtgcccaggaggactcagaccacgatggccagggtgatgcctgcgacgacgacgacgacaatgacggagtccctgacagtcgggacaactgccgcctggtgcctaaccccggccaggaggacgcggacagggacggcgtgggcgacgtgtgccaggacgactttgatgcagacaaggtggtagacaagatcgacgtgtgtccggagaacgctgaagtcacgctcaccgacttcagggccttccagacagtcgtgctggacccggagggtgacgcgcagattgaccccaactgggtggtgctcaaccagggaagggagatcgtgcagacaatgaacagcgacccaggcctggctgtgggttacactgccttcaatggcgtggacttcgagggcacgttccatgtgaacacggtcacggatgacgactatgcgggcttcatctttggctaccaggacagctccagcttctacgtggtcatgtggaagcagatggagcaaacgtattggcaggcgaaccccttccgtgctgtggccgagcctggcatccaactcaaggctgtgaagtcttccacaggccccggggaacagctgcggaacgctctgtggcatacaggagacacagagtcccaggtgcggctgctgtggaaggacccgcgaaacgtgggttggaaggacaagaagtcctatcgttggttcctgcagcaccggccccaagtgggctacatcagggtgcgattctatgagggccctgagctggtggccgacagcaacgtggtcttggacacaaccatgcggggtggccgcctgggggtcttctgcttctcccaggagaacatcatctgggccaacctgcgttaccgctgcaatgacaccatcccagaggactatgagacccatcagctgcggcaagcctagggaccagggtgaggacccgccggatgacagccaccctcaccgcggctggatgggggctctgcacccagccccaaggggtggccgtcctgagggggaagtgagaagggctcagagaggacaaaataaagtgtgtgtgcaggga

SEQ ID NO: 732084 - DNA, 1014 bp, Homo sapiens
  misc_feature (11)..(11): n is a, c, g, or t
  misc_feature (17)..(17): n is a, c, g, or t
  misc_feature (28)..(28): n is a, c, g, or t
  misc_feature (30)..(30): n is a, c, g, or t
gcggtaccggncctganttcccgggtcnanccacgcgtcgggacaactgccgcctggtgcctaaccccggccaggaggacgcggacagggacggcgtgggcgacgtgtgccaggacgactttgatgcagacaaggtggtagacaagatcgacgtgtgtccggagaacgctgaagtcacgctcaccgacttcagggccttccagacagtcgtgctggacccggagggtgacgcgcagattgaccccaactgggtggtgctcaaccagggaagggagatcgtgcagacaatgaacagcgacccaggcctggctgtgggttacactgccttcaatggcgtggacttcgagggcacgttccatgtgaacacggtcacggatgacgactatgcgggcttcatctttggctaccaggacagctccagcttctacgtggtcatgtggaagcagatggagcaaacgtattggcaggcgaaccccttccgtgctgtggccgagcctggcatccaactcaaggctgtgaagtcttccacaggccccggggaacagctgcggaacgctctgtggcatacaggagacacagagtcccaggtgcggctgctgtggaaggacccgcgaaacgtgggttggaaggacaagaagtcctatcgttggttcctgcagcaccggccccaagtgggctacatcagggtgcgattctatgagggccctgagctggtggccgacagcaacgtggtcttggacacaaccatgcggggtggccgcctgggggtcttctgcttctcccaggagaacatcatctgggccaacctgcgttaccgctgcaatgacaccatcccagaggactatgagacccatcagctgcggcaagcctagggaccagggtgaggacccgccggatgacagccaccctcaccgcggctggatgggggctctgcacccagccccaaggggtggccgtcctgagggggaagtgagaagggctcagagaggacaaaataaagtgtgtgtgcaggga

SEQ ID NO: 732085 - DNA, 672 bp, Homo sapiens
ttaattcattctacaaatatttattaaagcccaactgtgtgccagccaccaggcatagaatagggaacaaaatagtttccctgcaactatataaaaagaatggcatattgtacttaaatgcctccttgccaaaataagaggcacaggacaacagctgtctggagatgacctcaagccagtcaggccccattttaaatatagaaacccctaagaatagccgccagtgctccagactcaacaggtgattggcccagagaggggaggtgaccccaggccccaggaaagggagcgaggacagcgctggttcccggctccccgcaccatcatggctttgcctctgaggcccctgacccggggcttggccagcgctgccaaaggaggccacggaggagcaggagctcgtacctggcgtctgctgaccttcgtgctggcgctgcccagcgtggccctctgcaccttcaactcctatctccactcgggccaccgcccgcgccccgagttccgtccctaccaacacctccgcatccgcaccaagccctacccctggggggacggcaaccacactctgttccacaatagccacgtgaaccctctgcccacgggctacgaacacccctgaggccccggacgcccccggacacaataaaggtgtgaagcttcgaaaaaaaaaaa

SEQ ID NO: 732086 - DNA, 774 bp, Homo sapiens
ttaattcattctacaaatatttattaaagcccaactgtgtgccagccaccaggcatagaatagggaacaaaatagtttccctgcaactatataaaaagaatggcatattgtacttaaatgcctccttgccaaaataagaggcacaggacaacagctgtctggagatgacctcaagccagtcaggccccattttaaatatagaaacccctaagaatagccgccagtgctccagactcaacaggtgattggcccagagaggggaggtgaccccaggccccaggaaagggagcgaggacagcgctggttcccggctccccgcaccatcatggctttgcctctgaggcccctgacccggggcttggccagcgctgccaaaggaggccacggaggagcaggaggtgagtggggaacgggcggatccgggggctcccctaccctgcccacctgttcacaggcccgccgccccaggaccgccgcgctcaccccgctccgaacgcaacctcgtacctggcgtctgctgaccttcgtgctggcgctgcccagcgtggccctctgcaccttcaactcctatctccactcgggccaccgcccgcgccccgagttccgtccctaccaacacctccgcatccgcaccaagccctacccctggggggacggcaaccacactctgttccacaatagccacgtgaaccctctgcccacgggctacgaacacccctgaggccccggacgcccccggacacaataaaggtgtgaagcttcgaaaaaaaaaaa

SEQ ID NO: 732087 - DNA, 771 bp, Homo sapiens
gcgagcggcccgcaggggctggtgtcactggtcattcctgcacaggacagtccaccatggcctcagatcaccagacccaggcgggcaagccacagtccctcaaccccaagatcatcatctttgagcaggaaaactttcaaggccactcgcatgagctcaatgggccctgccccaacctgaaggaaactggcgtggagaaggcaggttctgtcctagtgcaggctggaccctgggtgggctatgaacaggccaactgcaagggcgagcagtttgtgtttgagaagggtgagtacccccgctgggactcatggaccagcagccgaaggacggactccctcagctccctgaggcccatcaaagtggacagccaagagcacaagatcatcctctatgaaaaccccaacttcaccgggaagaagatggaaatcatagatgacgatgtacccagcttccacgcccatggctaccaggagaaggtgtcatctgtgcgggtgcagagtggcacgtgggttggctaccagtaccccggctaccgtgggctgcagtacctgctggagaagggagactacaaggacagcagcgactttggggcccctcacccccaggtgcagtccgtgcgccgtatccgcgacatgcagtggcaccaacgtggtgccttccacccctccaactagtgccctccccaccatgcctccttcccaggacccaggtctgctgcccaggaaccctccagacctcccagagagtgaataaagtgtgacttgcaacttg

SEQ ID NO: 732088 - DNA, 821 bp, Homo sapiens
caccggcacttctggggaaggtataaatgccacctcccgctggccgagcttcacggcactcgcaggggctggtgtcactggtcattcctgcacaggacagtccaccatggcctcagatcaccagacccaggcgggcaagccacagtccctcaaccccaagatcatcatctttgagcaggaaaactttcaaggccactcgcatgagctcaatgggccctgccccaacctgaaggaaactggcgtggagaaggcaggttctgtcctagtgcaggctggaccctgggtgggctatgaacaggccaactgcaagggcgagcagtttgtgtttgagaagggtgagtacccccgctgggactcatggaccagcagccgaaggacggactccctcagctccctgaggcccatcaaagtggacagccaagagcacaagatcatcctctatgaaaaccccaacttcaccgggaagaagatggaaatcatagatgacgatgtacccagcttccacgcccatggctaccaggagaaggtgtcatctgtgcgggtgcagagtggcacgtgggttggctaccagtaccccggctaccgtgggctgcagtacctgctggagaagggagactacaaggacagcagcgactttggggcccctcacccccaggtgcagtccgtgcgccgtatccgcgacatgcagtggcaccaacgtggtgccttccacccctccaactagtgccctccccaccatgcctccttcccaggacccaggtctgctgcccaggaaccctccagacctcccagagagtgaataaagtgtgacttgcaacttg

SEQ ID NO: 732089 - DNA, 649 bp, Homo sapiens
ggcacgaggaagatggcggaggtgcaggtcctggtgcttgatggtcgaggccatctcctgggccgcctggcggccatcgtggctaaacaggtactgctgggccggaaggtggtggtcgtacgctgtgaaggcatcaacatttctggcaatttctacagaaacaagttgaagtacctggctttcctccgcaagcggatgaacaccaacccttcccgaggcccctaccacttccgggcccccagccgcatcttctggcggaccgtgcgaggtatgctgccccacaaaaccaagcgaggccaggccgctctggaccgtctcaaggtgtttgacggcatcccaccgccctacgacaagaaaaagcggatggtggttcctgctgccctcaaggtcgtgcgtctgaagcctacaagaaagtttgcctatctggggcgcctggctcacgaggttggctggaagtaccaggcagtgacagccaccctggaggagaagaggaaagagaaagccaagatccactaccggaagaagaaacagctcatgaggctacggaaacaggccgagaagaacgtggagaagaaaattgacaaatacacagaggtcctcaagacccacggactcctggtctgagcccaataaagactgttaattcctc

SEQ ID NO: 732090 - DNA, 1114 bp, Homo sapiens
ggcacgaggaagatggcggaggtgcaggtcctggtgcttgatggtcgaggccatctcctgggccgcctggcggccatcgtggctaaacaggtactgctgggccggaaggtggtggtcgtacgctgtgaaggcatcaacatttctggcaatttctacagaaacaagttgaagtacctggctttcctccgcaagcggatgaacaccaacccttcccgaggcccctaccacttccgggcccccagccgcatcttctggcggaccgtgcgaggtatgctgccccacaaaaccaagcgaggccaggccgctctggaccgtctcaaggtgtttgacggcatcccaccgccctacgacaagaaaaagcggatggtggttcctgctgccctcaaggtcgtgcgtctgaagcctacaagaaagtttgcctatctggggcgcctggctcacgaggttggctggaagtaccaggcagtgacagccaccctggaggagaagaggaaagagaaagccaagatccactaccggaagaagaaacagctcatgaggctacggaaacaggccgagaagaacgtggagaagaaaattgacaaatacacagaggtcctcaagacccacggactcctggtctgagcccaataaagactgttaattcctcatgcgttgcctgcccttcctccattgttgccctggaatgtacgggacccaggggcagcagcagtccaggtgccacaggcagccctgggacataggaagctgggagcaaggaaagggtcttagtcactgcctcccgaagttgcttgaaagcactcggagaattgtgcaggtgtcatttatctatgaccaataggaagagcaaccagttactatgagtgaaagggagccagaagactgattggagggccctatcttgtgagtggggcatctgttggactttccacctggtcatatactctgcagctgttagaatgtgcaagcacttggggacagcatgagcttgctgttgtacacagggtatttctagaagcagaaatagactgggaagatgcacaaccaaggggttacaggcatcgcccatgctcctcacctgtattttgtaatcagaaataaattgcttttaaag

SEQ ID NO: 732091 - DNA, 1741 bp, Homo sapiens; identical to SEQ ID NO: 55424

SEQ ID NO: 732092 - DNA, 997 bp, Homo sapiens
tatgcctatgccctggccaacttcattcagtcccagggcatcagctccctgaaggtgtggaccagtcacatgaagaggaccatccagacagctgaggccctgggtgtcccctatgagcagtggaaggccctgaatgagattgatgcgggtgtctgtgaggagatgacctatgaagaaatccaggaacattaccctgaagaatttgcactgcgagaccaagataaatatcgctaccgctatcccaagggagagtcctatgaggatctggttcagcgtctggagccagtgataatggagctagaacgacaggagaatgtactggtgatctgccaccaggctgtcatgcggtgcctcctggcctatttcctggataaaagttcaggtactaccctcatctctgctttgggaatgtttgatggtatttgagacactgacaccaacaattagatatctatatcttagtagttaagagaagagtatctagaacaaggatgcctaggttcagattctttctctttcacatactagctgtactgcctttcacaaatttctttaacttctctggcctcagtgtcctcatctgtaaaatggggagaataatgatgaattttaaataacataagtaaaaagtttagaacagttcatgacacattgtgtgggctatatattaactgctattattagtatagtattattcttagctaacattttcaaagccaacgttaacagtctgcctcaatctggaaaagatgagctagtatttctgtgaagcatgctaccatcaggtgatagtagggcctttcatagcttcatgatcctgattacaagtttctgtccttgctataggggtaatttccccaagatagtgatgttttcattttaaattgtttttcaaatgataatttatttttaaaaaaatatgtaggcattgcatttacagagtatttacacactgactgcataggctgaactgcaaactggggcagctggcctggca

SEQ ID NO: 732093 - DNA, 1505 bp, Homo sapiens; identical to SEQ ID NO: 381845

SEQ ID NO: 732094 - DNA, 1284 bp, Homo sapiens
gcaaaggccaaggccagccaggacaccccctgggatcacactgagcttgccacatccccaaggcggccgaaccctccgcaaccaccagcccaggttaatccccagaggctccatggagttccctggcctggggtccctggggacctcagagcccctcccccagtttgtggatcctgctctggtgtcctccacaccagaatcaggggttttcttcccctctgggcctgagggcttggatgcagcagcttcctccactgccccgagcacagccaccgctgcagctgcggcactggcctactacagggacgctgaggcctacagacactccccagtctttcaggtgtacccattgctcaactgtatggaggggatcccagggggctcaccatatgccggctgggcctacggcaagacggggctctaccctgcctcaactgtgtgtcccacccgcgaggactctcctccccaggccgtggaagatctggatggaaaaggcagcaccagcttcctggagactttgaagacagagcggctgagcccagacctcctgaccctgggacctgcactgccttcatcactccctgtccccaatagtgcttatgggggccctgacttttccagtaccttcttttctcccaccgggagccccctcaattcagcagcctattcctctcccaagcttcgtggaactctccccctgcctccctgtgaggccagggagtgtgtgaactgcggagcaacagccactccactgtggcggagggacaggacaggccactacctatgcaacgcctgcggcctctatcacaagatgaatgggcagaacaggcccctcatccggcccaagaagcgcctgattgtcagtaaacgggcaggtactcagtgcaccaactgccagacgaccaccacgacactgtggcggagaaatgccagtggggatcccgtgtgcaatgcctgcggcctctactacaagctacaccaggtgaaccggccactgaccatgcggaaggatggtattcagactcgaaaccgcaaggcatctggaaaagggaaaaagaaacggggctccagtctgggaggcacaggagcagccgaaggaccacactactgtggtggctccgctcagctcatgagggcacagagcatggcctccagaggaggggtggtgtccttctcctcttgtagccagaattctggacaacccaagtctctgggccccaggcaccccctggcttgaaccttcaaagcttttgtaaaataaaaccaccaaagtcctgaaaaaat

SEQ ID NO: 732095 - DNA, 1109 bp, Homo sapiens
cgtcgacacggctgcgagagacgacagaaggggaaggatcccaaggcccaactccccgaaccactcagggtcctgtggacagctcacctagctgcaatggctacaggctcccggacgtccctgctcctggcttttggcctgctctgcctgccctggcttcaagagggcagtgccttcccaaccattcccttatccaggctttttgacaacgctatgctccgcgcccatcgtctgcaccagctggcctttgacacctaccaggagtttgaagaagcctatatcccaaaggaacagaagtattcattcctgcagaacccccagacctccctctgtttctcagagtctattccgacaccctccaacagggaggaaacacaacagaaatccaacctagagctgctccgcatctccctgctgctcatccagtcgtggctggagcccgtgcagttcctcaggagtgtcttcgccaacagcctggtgtacggcgcctctgacagcaacgtctatgacctcctaaaggacctagaggaaggcatccaaacgctgatgggggtgagggtggcaccagggatccccaatcctggggccccactggcttccagggactggggagagaaacactgctgccctctttttagcagtcaggcgctgacccaagagaactcaccgtattcttcatttcccctcgtgaatcctccaggcctttctctacaacctggaggggagggaggaaaatggatgaatgagagagggagggaacagtgcccaagcgcttggcctctccttctcttccttcactttgcagaggctggaagatggcagcccccggactgggcagatcttcaagcagacctacagcaagttcgacacaaactcacacaacgatgacgcactactcaagaactacgggctgctctactgcttcaggaaggacatggacaaggtcgagacattcctgcgcatcgtgcagtgccgctctgtggagggcagctgtggcttctagctgcccgggtggcatccctgtgacccctccccagtgcctctcctggccctggaagttgccactccagtgcccaccagccttgtcctaataaaattaagttgcatca

SEQ ID NO: 732096 - DNA, 775 bp, Homo sapiens
gatcccaaggcccaactccccgaaccactcagggtcctgtggacagctcacctagctgcaatggctacaggctcccggacgtccctgctcctggcttttggcctgctctgcctgccctggcttcaagagggcagtgccttcccaaccattcccttatccaggctttttgacaacgctatgctccgcgcccatcgtctgcaccagctggcctttgacacctaccaggagtttaacccccagacctccctctgtttctcagagtctattccgacaccctccaacagggaggaaacacaacagaaatccaacctagagctgctccgcatctccctgctgctcatccagtcgtggctggagcccgtgcagttcctcaggagtgtcttcgccaacagcctggtgtacggcgcctctgacagcaacgtctatgacctcctaaaggacctagaggaaggcatccaaacgctgatggggaggctggaagatggcagcccccggactgggcagatcttcaagcagacctacagcaagttcgacacaaactcacacaacgatgacgcactactcaagaactacgggctgctctactgcttcaggaaggacatggacaaggtcgagacattcctgcgcatcgtgcagtgccgctctgtggagggcagctgtggcttctagctgcccgggtggcatccctgtgacccctccccagtgcctctcctggccctggaagttgccactccagtgcccaccagccttgtcctaataaaattaagttgcatca

SEQ ID NO: 732097 - DNA, 856 bp, Homo sapiens
cgtcgacacggctgcgagagacgacagaaggggaaggatcccaaggcccaactccccgaaccactcagggtcctgtggacagctcacctagctgcaatggctacaggctcccggacgtccctgctcctggcttttggcctgctctgcctgccctggcttcaagagggcagtgccttcccaaccattcccttatccaggctttttgacaacgctatgctccgcgcccatcgtctgcaccagctggcctttgacacctaccaggagtttgaagaagcctatatcccaaaggaacagaagtattcattcctgcagaacccccagacctccctctgtttctcagagtctattccgacaccctccaacagggaggaaacacaacagaaatccaacctagagctgctccgcatctccctgctgctcatccagtcgtggctggagcccgtgcagttcctcaggagtgtcttcgccaacagcctggtgtacggcgcctctgacagcaacgtctatgacctcctaaaggacctagaggaaggcatccaaacgctgatggggaggctggaagatggcagcccccggactgggcagatcttcaagcagacctacagcaagttcgacacaaactcacacaacgatgacgcactactcaagaactacgggctgctctactgcttcaggaaggacatggacaaggtcgagacattcctgcgcatcgtgcagtgccgctctgtggagggcagctgtggcttctagctgcccgggtggcatccctgtgacccctccccagtgcctctcctggccctggaagttgccactccagtgcccaccagccttgtcctaataaaattaagttgcatca

SEQ ID NO: 732098 - DNA, 700 bp, Homo sapiens
gatcccaaggcccaactccccgaaccactcagggtcctgtggacagctcacctagctgcaatggctacaggctcccggacgtccctgctcctggcttttggcctgctctgcctgccctggcttcaagagggcagtgccttcccaaccattcccttatccaggctttttgacaacgctatgctccgcgcccatcgtctgcaccagctggcctttgacacctaccaggagtttaacctagagctgctccgcatctccctgctgctcatccagtcgtggctggagcccgtgcagttcctcaggagtgtcttcgccaacagcctggtgtacggcgcctctgacagcaacgtctatgacctcctaaaggacctagaggaaggcatccaaacgctgatggggaggctggaagatggcagcccccggactgggcagatcttcaagcagacctacagcaagttcgacacaaactcacacaacgatgacgcactactcaagaactacgggctgctctactgcttcaggaaggacatggacaaggtcgagacattcctgcgcatcgtgcagtgccgctctgtggagggcagctgtggcttctagctgcccgggtggcatccctgtgacccctccccagtgcctctcctggccctggaagttgccactccagtgcccaccagccttgtcctaataaaattaagttgcatca

SEQ ID NO: 732099 - DNA, 1099 bp, Homo sapiens
  misc_feature (900)..(900): n is a, c, g, or t
  misc_feature (902)..(902): n is a, c, g, or t
  misc_feature (918)..(918): n is a, c, g, or t
  misc_feature (927)..(927): n is a, c, g, or t
cgtcgacacggctgcgagagacgacagaaggggaaggatcccaaggcccaactccccgaaccactcagggtcctgtggacagctcacctagctgcaatggctacaggctcccggacgtccctgctcctggcttttggcctgctctgcctgccctggcttcaagagggcagtgccttcccaaccattcccttatccaggctttttgacaacgctatgctccgcgcccatcgtctgcaccagctggcctttgacacctaccaggagtttgaagaagcctatatcccaaaggaacagaagtattcattcctgcagaacccccagacctccctctgtttctcagagtctattccgacaccctccaacagggaggaaacacaacagaaatccaacctagagctgctccgcatctccctgctgctcatccagtcgtggctggagcccgtgcagttcctcaggagtgtcttcgccaacagcctggtgtacggcgcctctgacagcaacgtctatgacctcctaaaggacctagaggaaggcatccaaacgctgatggggaggctggaagatggcagcccccggactgggcagatcttcaagcagacctacagcaagttcgacacaaactcacacaacgatgacgcactactcaagaactacgggctgctctactgcttcaggaaggacatggacaaggtcgagacattcctgcgcatcgtgcagtgccgctctgtggagggcagctgtggcttctagctgcccgggtggcatccctgtgacccctccccagtgcctctcctggccctggaagttgccactccagtgcccaccagccttgtcctaataaaattaagttgcatcaccaaaaaaaaaaaagagagtcgtattacaattacttggccgcgntntacaacgtcgtgactngggcctggnggtcccaacttaatcgcttggcagccatccccctttcgcagatgtcgtaaagcgaagagggccgcaacgatcgccttcccaacaatgcgcaactgcatggcacatgcaaatgtaccggtgaccttgggtcacatcggtaaattgttaaatagtccatttaccaggcgactgc

SEQ ID NO: 732100 - DNA, 1018 bp, Homo sapiens
  misc_feature (819)..(819): n is a, c, g, or t
  misc_feature (821)..(821): n is a, c, g, or t
  misc_feature (837)..(837): n is a, c, g, or t
  misc_feature (846)..(846): n is a, c, g, or t
gatcccaaggcccaactccccgaaccactcagggtcctgtggacagctcacctagctgcaatggctacaggctcccggacgtccctgctcctggcttttggcctgctctgcctgccctggcttcaagagggcagtgccttcccaaccattcccttatccaggctttttgacaacgctatgctccgcgcccatcgtctgcaccagctggcctttgacacctaccaggagtttaacccccagacctccctctgtttctcagagtctattccgacaccctccaacagggaggaaacacaacagaaatccaacctagagctgctccgcatctccctgctgctcatccagtcgtggctggagcccgtgcagttcctcaggagtgtcttcgccaacagcctggtgtacggcgcctctgacagcaacgtctatgacctcctaaaggacctagaggaaggcatccaaacgctgatggggaggctggaagatggcagcccccggactgggcagatcttcaagcagacctacagcaagttcgacacaaactcacacaacgatgacgcactactcaagaactacgggctgctctactgcttcaggaaggacatggacaaggtcgagacattcctgcgcatcgtgcagtgccgctctgtggagggcagctgtggcttctagctgcccgggtggcatccctgtgacccctccccagtgcctctcctggccctggaagttgccactccagtgcccaccagccttgtcctaataaaattaagttgcatcaccaaaaaaaaaaaagagagtcgtattacaattacttggccgcgntntacaacgtcgtgactngggcctggnggtcccaacttaatcgcttggcagccatccccctttcgcagatgtcgtaaagcgaagagggccgcaacgatcgccttcccaacaatgcgcaactgcatggcacatgcaaatgtaccggtgaccttgggtcacatcggtaaattgttaaatagtccatttaccaggcgactgc

SEQ ID NO: 732101 - DNA, 943 bp, Homo sapiens
  misc_feature (744)..(744): n is a, c, g, or t
  misc_feature (746)..(746): n is a, c, g, or t
  misc_feature (762)..(762): n is a, c, g, or t
  misc_feature (771)..(771): n is a, c, g, or t
gatcccaaggcccaactccccgaaccactcagggtcctgtggacagctcacctagctgcaatggctacaggctcccggacgtccctgctcctggcttttggcctgctctgcctgccctggcttcaagagggcagtgccttcccaaccattcccttatccaggctttttgacaacgctatgctccgcgcccatcgtctgcaccagctggcctttgacacctaccaggagtttaacctagagctgctccgcatctccctgctgctcatccagtcgtggctggagcccgtgcagttcctcaggagtgtcttcgccaacagcctggtgtacggcgcctctgacagcaacgtctatgacctcctaaaggacctagaggaaggcatccaaacgctgatggggaggctggaagatggcagcccccggactgggcagatcttcaagcagacctacagcaagttcgacacaaactcacacaacgatgacgcactactcaagaactacgggctgctctactgcttcaggaaggacatggacaaggtcgagacattcctgcgcatcgtgcagtgccgctctgtggagggcagctgtggcttctagctgcccgggtggcatccctgtgacccctccccagtgcctctcctggccctggaagttgccactccagtgcccaccagccttgtcctaataaaattaagttgcatcaccaaaaaaaaaaaagagagtcgtattacaattacttggccgcgntntacaacgtcgtgactngggcctggnggtcccaacttaatcgcttggcagccatccccctttcgcagatgtcgtaaagcgaagagggccgcaacgatcgccttcccaacaatgcgcaactgcatggcacatgcaaatgtaccggtgaccttgggtcacatcggtaaattgttaaatagtccatttaccaggcgactgc

SEQ ID NO: 732102 - DNA, 881 bp, Homo sapiens
cgtcgacacggctgcgagagacgacagaaggggaaggatcccaaggcccaactccccgaaccactcagggtcctgtggacagctcacctagctgcaatggctacaggctcccggacgtccctgctcctggcttttggcctgctctgcctgccctggcttcaagagggcagtgccttcccaaccattcccttatccaggctttttgacaacgctatgctccgcgcccatcgtctgcaccagctggcctttgacacctaccaggagtttgaagaagcctatatcccaaaggaacagaagtattcattcctgcagaacccccagacctccctctgtttctcagagtctattccgacaccctccaacagggaggaaacacaacagaaatccaacctagagctgctccgcatctccctgctgctcatccagtcgtggctggagcccgtgcagttcctcaggagtgtcttcgccaacagcctggtgtacggcgcctctgacagcaacgtctatgacctcctaaaggacctagaggaaggcatccaaacgctgatggggaggctggaagatggcagcccccggactgggcagatcttcaagcagacctacagcaagttcgacacaaactcacacaacgatgacgcactactcaagaactacgggctgctctactgcttcaggaaggacatggacaaggtcgagacattcctgcgcatcgtgcagtgccgctctgtggagggcagctgtggcttctagctgcccgggtggcatccctgtgacccctccccagtgcctctcctggccctggaagttgccactccagtgcccaccagccttgtcctaataaaattaagttgcatcaaaaaaaaaaaaaaaaaaaaaaaaaa

SEQ ID NO: 732103 - DNA, 800 bp, Homo sapiens
gatcccaaggcccaactccccgaaccactcagggtcctgtggacagctcacctagctgcaatggctacaggctcccggacgtccctgctcctggcttttggcctgctctgcctgccctggcttcaagagggcagtgccttcccaaccattcccttatccaggctttttgacaacgctatgctccgcgcccatcgtctgcaccagctggcctttgacacctaccaggagtttaacccccagacctccctctgtttctcagagtctattccgacaccctccaacagggaggaaacacaacagaaatccaacctagagctgctccgcatctccctgctgctcatccagtcgtggctggagcccgtgcagttcctcaggagtgtcttcgccaacagcctggtgtacggcgcctctgacagcaacgtctatgacctcctaaaggacctagaggaaggcatccaaacgctgatggggaggctggaagatggcagcccccggactgggcagatcttcaagcagacctacagcaagttcgacacaaactcacacaacgatgacgcactactcaagaactacgggctgctctactgcttcaggaaggacatggacaaggtcgagacattcctgcgcatcgtgcagtgccgctctgtggagggcagctgtggcttctagctgcccgggtggcatccctgtgacccctccccagtgcctctcctggccctggaagttgccactccagtgcccaccagccttgtcctaataaaattaagttgcatcaaaaaaaaaaaaaaaaaaaaaaaaaa

SEQ ID NO: 732104 - DNA, 725 bp, Homo sapiens
gatcccaaggcccaactccccgaaccactcagggtcctgtggacagctcacctagctgcaatggctacaggctcccggacgtccctgctcctggcttttggcctgctctgcctgccctggcttcaagagggcagtgccttcccaaccattcccttatccaggctttttgacaacgctatgctccgcgcccatcgtctgcaccagctggcctttgacacctaccaggagtttaacctagagctgctccgcatctccctgctgctcatccagtcgtggctggagcccgtgcagttcctcaggagtgtcttcgccaacagcctggtgtacggcgcctctgacagcaacgtctatgacctcctaaaggacctagaggaaggcatccaaacgctgatggggaggctggaagatggcagcccccggactgggcagatcttcaagcagacctacagcaagttcgacacaaactcacacaacgatgacgcactactcaagaactacgggctgctctactgcttcaggaaggacatggacaaggtcgagacattcctgcgcatcgtgcagtgccgctctgtggagggcagctgtggcttctagctgcccgggtggcatccctgtgacccctccccagtgcctctcctggccctggaagttgccactccagtgcccaccagccttgtcctaataaaattaagttgcatcaaaaaaaaaaaaaaaaaaaaaaaaaa

SEQ ID NO: 732105 - DNA, 1030 bp, Homo sapiens
gatcccaaggcccaactccccgaaccactcagggtcctgtggacagctcacctagctgcaatggctacaggctcccggacgtccctgctcctggcttttggcctgctctgcctgccctggcttcaagagggcagtgccttcccaaccattcccttatccaggctttttgacaacgctatgctccgcgcccatcgtctgcaccagctggcctttgacacctaccaggagttttgtaagctcttggggaatgggtgcgcatcaggggtggcaggaaggggtgactttcccccgctgggaaataagaggaggagactaaggagctcagggtttttcccgaagcgaaaatgcaggcagatgagcacacgctgagtgaggttcccagaaaagtaacaatgggagctggtctccagcgtagaccttggtgggcggtccttctcctaggaagaagcctatatcccaaaggaacagaagtattcattcctgcagaacccccagacctccctctgtttctcagagtctattccgacaccctccaacagggaggaaacacaacagaaatccaacctagagctgctccgcatctccctgctgctcatccagtcgtggctggagcccgtgcagttcctcaggagtgtcttcgccaacagcctggtgtacggcgcctctgacagcaacgtctatgacctcctaaaggacctagaggaaggcatccaaacgctgatggggaggctggaagatggcagcccccggactgggcagatcttcaagcagacctacagcaagttcgacacaaactcacacaacgatgacgcactactcaagaactacgggctgctctactgcttcaggaaggacatggacaaggtcgagacattcctgcgcatcgtgcagtgccgctctgtggagggcagctgtggcttctagctgcccgggtggcatccctgtgacccctccccagtgcctctcctggccctggaagttgccactccagtgcccaccagccttgtcctaataaaattaagttgcatca

SEQ ID NO: 732106 - DNA, 1273 bp, Homo sapiens
  misc_feature (1074)..(1074): n is a, c, g, or t
  misc_feature (1076)..(1076): n is a, c, g, or t
  misc_feature (1092)..(1092): n is a, c, g, or t
  misc_feature (1101)..(1101): n is a, c, g, or t
gatcccaaggcccaactccccgaaccactcagggtcctgtggacagctcacctagctgcaatggctacaggctcccggacgtccctgctcctggcttttggcctgctctgcctgccctggcttcaagagggcagtgccttcccaaccattcccttatccaggctttttgacaacgctatgctccgcgcccatcgtctgcaccagctggcctttgacacctaccaggagttttgtaagctcttggggaatgggtgcgcatcaggggtggcaggaaggggtgactttcccccgctgggaaataagaggaggagactaaggagctcagggtttttcccgaagcgaaaatgcaggcagatgagcacacgctgagtgaggttcccagaaaagtaacaatgggagctggtctccagcgtagaccttggtgggcggtccttctcctaggaagaagcctatatcccaaaggaacagaagtattcattcctgcagaacccccagacctccctctgtttctcagagtctattccgacaccctccaacagggaggaaacacaacagaaatccaacctagagctgctccgcatctccctgctgctcatccagtcgtggctggagcccgtgcagttcctcaggagtgtcttcgccaacagcctggtgtacggcgcctctgacagcaacgtctatgacctcctaaaggacctagaggaaggcatccaaacgctgatggggaggctggaagatggcagcccccggactgggcagatcttcaagcagacctacagcaagttcgacacaaactcacacaacgatgacgcactactcaagaactacgggctgctctactgcttcaggaaggacatggacaaggtcgagacattcctgcgcatcgtgcagtgccgctctgtggagggcagctgtggcttctagctgcccgggtggcatccctgtgacccctccccagtgcctctcctggccctggaagttgccactccagtgcccaccagccttgtcctaataaaattaagttgcatcaccaaaaaaaaaaaagagagtcgtattacaattacttggccgcgntntacaacgtcgtgactngggcctggnggtcccaacttaatcgcttggcagccatccccctttcgcagatgtcgtaaagcgaagagggccgcaacgatcgccttcccaacaatgcgcaactgcatggcacatgcaaatgtaccggtgaccttgggtcacatcggtaaattgttaaatagtccatttaccaggcgactgc

SEQ ID NO: 732107 - DNA, 1055 bp, Homo sapiens
gatcccaaggcccaactccccgaaccactcagggtcctgtggacagctcacctagctgcaatggctacaggctcccggacgtccctgctcctggcttttggcctgctctgcctgccctggcttcaagagggcagtgccttcccaaccattcccttatccaggctttttgacaacgctatgctccgcgcccatcgtctgcaccagctggcctttgacacctaccaggagttttgtaagctcttggggaatgggtgcgcatcaggggtggcaggaaggggtgactttcccccgctgggaaataagaggaggagactaaggagctcagggtttttcccgaagcgaaaatgcaggcagatgagcacacgctgagtgaggttcccagaaaagtaacaatgggagctggtctccagcgtagaccttggtgggcggtccttctcctaggaagaagcctatatcccaaaggaacagaagtattcattcctgcagaacccccagacctccctctgtttctcagagtctattccgacaccctccaacagggaggaaacacaacagaaatccaacctagagctgctccgcatctccctgctgctcatccagtcgtggctggagcccgtgcagttcctcaggagtgtcttcgccaacagcctggtgtacggcgcctctgacagcaacgtctatgacctcctaaaggacctagaggaaggcatccaaacgctgatggggaggctggaagatggcagcccccggactgggcagatcttcaagcagacctacagcaagttcgacacaaactcacacaacgatgacgcactactcaagaactacgggctgctctactgcttcaggaaggacatggacaaggtcgagacattcctgcgcatcgtgcagtgccgctctgtggagggcagctgtggcttctagctgcccgggtggcatccctgtgacccctccccagtgcctctcctggccctggaagttgccactccagtgcccaccagccttgtcctaataaaattaagttgcatcaaaaaaaaaaaaaaaaaaaaaaaaaa

SEQ ID NO: 732108 - DNA, 1073 bp, Homo sapiens
gatcccaaggcccaactccccgaaccactcagggtcctgtggacagctcacctagctgcaatggctacaggtaagcgcccctaaaatccctttgggcacaatgtgtcctgaggggagaggcagcgacctgtagatgggacgggggcactaaccctcaggtttggggcttctgaatgtgagtatcgccatgtaagcccagtatttggccaatctcagaaagctcctggtccctggagggatggagagagaccagctcctggagcagggagagtgctggcctcttgctctccggctccctctgttgccctctggtttctccccaggctcccggacgtccctgctcctggcttttggcctgctctgcctgccctggcttcaagagggcagtgccttcccaaccattcccttatccaggctttttgacaacgctatgctccgcgcccatcgtctgcaccagctggcctttgacacctaccaggagtttgaagaagcctatatcccaaaggaacagaagtattcattcctgcagaacccccagacctccctctgtttctcagagtctattccgacaccctccaacagggaggaaacacaacagaaatccaacctagagctgctccgcatctccctgctgctcatccagtcgtggctggagcccgtgcagttcctcaggagtgtcttcgccaacagcctggtgtacggcgcctctgacagcaacgtctatgacctcctaaaggacctagaggaaggcatccaaacgctgatggggaggctggaagatggcagcccccggactgggcagatcttcaagcagacctacagcaagttcgacacaaactcacacaacgatgacgcactactcaagaactacgggctgctctactgcttcaggaaggacatggacaaggtcgagacattcctgcgcatcgtgcagtgccgctctgtggagggcagctgtggcttctagctgcccgggtggcatccctgtgacccctccccagtgcctctcctggccctggaagttgccactccagtgcccaccagccttgtcctaataaaattaagttgcatca

SEQ ID NO: 732109 - DNA, 1316 bp, Homo sapiens
  misc_feature (1117)..(1117): n is a, c, g, or t
  misc_feature (1119)..(1119): n is a, c, g, or t
  misc_feature (1135)..(1135): n is a, c, g, or t
  misc_feature (1144)..(1144): n is a, c, g, or t
gatcccaaggcccaactccccgaaccactcagggtcctgtggacagctcacctagctgcaatggctacaggtaagcgcccctaaaatccctttgggcacaatgtgtcctgaggggagaggcagcgacctgtagatgggacgggggcactaaccctcaggtttggggcttctgaatgtgagtatcgccatgtaagcccagtatttggccaatctcagaaagctcctggtccctggagggatggagagagaccagctcctggagcagggagagtgctggcctcttgctctccggctccctctgttgccctctggtttctccccaggctcccggacgtccctgctcctggcttttggcctgctctgcctgccctggcttcaagagggcagtgccttcccaaccattcccttatccaggctttttgacaacgctatgctccgcgcccatcgtctgcaccagctggcctttgacacctaccaggagtttgaagaagcctatatcccaaaggaacagaagtattcattcctgcagaacccccagacctccctctgtttctcagagtctattccgacaccctccaacagggaggaaacacaacagaaatccaacctagagctgctccgcatctccctgctgctcatccagtcgtggctggagcccgtgcagttcctcaggagtgtcttcgccaacagcctggtgtacggcgcctctgacagcaacgtctatgacctcctaaaggacctagaggaaggcatccaaacgctgatggggaggctggaagatggcagcccccggactgggcagatcttcaagcagacctacagcaagttcgacacaaactcacacaacgatgacgcactactcaagaactacgggctgctctactgcttcaggaaggacatggacaaggtcgagacattcctgcgcatcgtgcagtgccgctctgtggagggcagctgtggcttctagctgcccgggtggcatccctgtgacccctccccagtgcctctcctggccctggaagttgccactccagtgcccaccagccttgtcctaataaaattaagttgcatcaccaaaaaaaaaaaagagagtcgtattacaattacttggccgcgntntacaacgtcgtgactngggcctggnggtcccaacttaatcgcttggcagccatccccctttcgcagatgtcgtaaagcgaagagggccgcaacgatcgccttcccaacaatgcgcaactgcatggcacatgcaaatgtaccggtgaccttgggtcacatcggtaaattgttaaatagtccatttaccaggcgactgc

SEQ ID NO: 732110 - DNA, 1098 bp, Homo sapiens
gatcccaaggcccaactccccgaaccactcagggtcctgtggacagctcacctagctgcaatggctacaggtaagcgcccctaaaatccctttgggcacaatgtgtcctgaggggagaggcagcgacctgtagatgggacgggggcactaaccctcaggtttggggcttctgaatgtgagtatcgccatgtaagcccagtatttggccaatctcagaaagctcctggtccctggagggatggagagagaccagctcctggagcagggagagtgctggcctcttgctctccggctccctctgttgccctctggtttctccccaggctcccggacgtccctgctcctggcttttggcctgctctgcctgccctggcttcaagagggcagtgccttcccaaccattcccttatccaggctttttgacaacgctatgctccgcgcccatcgtctgcaccagctggcctttgacacctaccaggagtttgaagaagcctatatcccaaaggaacagaagtattcattcctgcagaacccccagacctccctctgtttctcagagtctattccgacaccctccaacagggaggaaacacaacagaaatccaacctagagctgctccgcatctccctgctgctcatccagtcgtggctggagcccgtgcagttcctcaggagtgtcttcgccaacagcctggtgtacggcgcctctgacagcaacgtctatgacctcctaaaggacctagaggaaggcatccaaacgctgatggggaggctggaagatggcagcccccggactgggcagatcttcaagcagacctacagcaagttcgacacaaactcacacaacgatgacgcactactcaagaactacgggctgctctactgcttcaggaaggacatggacaaggtcgagacattcctgcgcatcgtgcagtgccgctctgtggagggcagctgtggcttctagctgcccgggtggcatccctgtgacccctccccagtgcctctcctggccctggaagttgccactccagtgcccaccagccttgtcctaataaaattaagttgcatcaaaaaaaaaaaaaaaaaaaaaaaaaa

SEQ ID NO: 732111 - DNA, 1283 bp, Homo sapiens
gatcccaaggcccaactccccgaaccactcagggtcctgtggacagctcacctagctgcaatggctacaggtaagcgcccctaaaatccctttgggcacaatgtgtcctgaggggagaggcagcgacctgtagatgggacgggggcactaaccctcaggtttggggcttctgaatgtgagtatcgccatgtaagcccagtatttggccaatctcagaaagctcctggtccctggagggatggagagagaccagctcctggagcagggagagtgctggcctcttgctctccggctccctctgttgccctctggtttctccccaggctcccggacgtccctgctcctggcttttggcctgctctgcctgccctggcttcaagagggcagtgccttcccaaccattcccttatccaggctttttgacaacgctatgctccgcgcccatcgtctgcaccagctggcctttgacacctaccaggagttttgtaagctcttggggaatgggtgcgcatcaggggtggcaggaaggggtgactttcccccgctgggaaataagaggaggagactaaggagctcagggtttttcccgaagcgaaaatgcaggcagatgagcacacgctgagtgaggttcccagaaaagtaacaatgggagctggtctccagcgtagaccttggtgggcggtccttctcctaggaagaagcctatatcccaaaggaacagaagtattcattcctgcagaacccccagacctccctctgtttctcagagtctattccgacaccctccaacagggaggaaacacaacagaaatccaacctagagctgctccgcatctccctgctgctcatccagtcgtggctggagcccgtgcagttcctcaggagtgtcttcgccaacagcctggtgtacggcgcctctgacagcaacgtctatgacctcctaaaggacctagaggaaggcatccaaacgctgatggggaggctggaagatggcagcccccggactgggcagatcttcaagcagacctacagcaagttcgacacaaactcacacaacgatgacgcactactcaagaactacgggctgctctactgcttcaggaaggacatggacaaggtcgagacattcctgcgcatcgtgcagtgccgctctgtggagggcagctgtggcttctagctgcccgggtggcatccctgtgacccctccccagtgcctctcctggccctggaagttgccactccagtgcccaccagccttgtcctaataaaattaagttgcatca

SEQ ID NO: 732112 - DNA, 1526 bp, Homo sapiens
  misc_feature (1327)..(1327): n is a, c, g, or t
  misc_feature (1329)..(1329): n is a, c, g, or t
  misc_feature (1345)..(1345): n is a, c, g, or t
  misc_feature (1354)..(1354): n is a, c, g, or t
gatcccaaggcccaactccccgaaccactcagggtcctgtggacagctcacctagctgcaatggctacaggtaagcgcccctaaaatccctttgggcacaatgtgtcctgaggggagaggcagcgacctgtagatgggacgggggcactaaccctcaggtttggggcttctgaatgtgagtatcgccatgtaagcccagtatttggccaatctcagaaagctcctggtccctggagggatggagagagaccagctcctggagcagggagagtgctggcctcttgctctccggctccctctgttgccctctggtttctccccaggctcccggacgtccctgctcctggcttttggcctgctctgcctgccctggcttcaagagggcagtgccttcccaaccattcccttatccaggctttttgacaacgctatgctccgcgcccatcgtctgcaccagctggcctttgacacctaccaggagttttgtaagctcttggggaatgggtgcgcatcaggggtggcaggaaggggtgactttcccccgctgggaaataagaggaggagactaaggagctcagggtttttcccgaagcgaaaatgcaggcagatgagcacacgctgagtgaggttcccagaaaagtaacaatgggagctggtctccagcgtagaccttggtgggcggtccttctcctaggaagaagcctatatcccaaaggaacagaagtattcattcctgcagaacccccagacctccctctgtttctcagagtctattccgacaccctccaacagggaggaaacacaacagaaatccaacctagagctgctccgcatctccctgctgctcatccagtcgtggctggagcccgtgcagttcctcaggagtgtcttcgccaacagcctggtgtacggcgcctctgacagcaacgtctatgacctcctaaaggacctagaggaaggcatccaaacgctgatggggaggctggaagatggcagcccccggactgggcagatcttcaagcagacctacagcaagttcgacacaaactcacacaacgatgacgcactactcaagaactacgggctgctctactgcttcaggaaggacatggacaaggtcgagacattcctgcgcatcgtgcagtgccgctctgtggagggcagctgtggcttctagctgcccgggtggcatccctgtgacccctccccagtgcctctcctggccctggaagttgccactccagtgcccaccagccttgtcctaataaaattaagttgcatcaccaaaaaaaaaaaagagagtcgtattacaattacttggccgcgntntacaacgtcgtgactngggcctggnggtcccaacttaatcgcttggcagccatccccctttcgcagatgtcgtaaagcgaagagggccgcaacgatcgccttcccaacaatgcgcaactgcatggcacatgcaaatgtaccggtgaccttgggtcacatcggtaaattgttaaatagtccatttaccaggcgactgc

SEQ ID NO: 732113 - DNA, 1308 bp, Homo sapiens
gatcccaaggcccaactccccgaaccactcagggtcctgtggacagctcacctagctgcaatggctacaggtaagcgcccctaaaatccctttgggcacaatgtgtcctgaggggagaggcagcgacctgtagatgggacgggggcactaaccctcaggtttggggcttctgaatgtgagtatcgccatgtaagcccagtatttggccaatctcagaaagctcctggtccctggagggatggagagagaccagctcctggagcagggagagtgctggcctcttgctctccggctccctctgttgccctctggtttctccccaggctcccggacgtccctgctcctggcttttggcctgctctgcctgccctggcttcaagagggcagtgccttcccaaccattcccttatccaggctttttgacaacgctatgctccgcgcccatcgtctgcaccagctggcctttgacacctaccaggagttttgtaagctcttggggaatgggtgcgcatcaggggtggcaggaaggggtgactttcccccgctgggaaataagaggaggagactaaggagctcagggtttttcccgaagcgaaaatgcaggcagatgagcacacgctgagtgaggttcccagaaaagtaacaatgggagctggtctccagcgtagaccttggtgggcggtccttctcctaggaagaagcctatatcccaaaggaacagaagtattcattcctgcagaacccccagacctccctctgtttctcagagtctattccgacaccctccaacagggaggaaacacaacagaaatccaacctagagctgctccgcatctccctgctgctcatccagtcgtggctggagcccgtgcagttcctcaggagtgtcttcgccaacagcctggtgtacggcgcctctgacagcaacgtctatgacctcctaaaggacctagaggaaggcatccaaacgctgatggggaggctggaagatggcagcccccggactgggcagatcttcaagcagacctacagcaagttcgacacaaactcacacaacgatgacgcactactcaagaactacgggctgctctactgcttcaggaaggacatggacaaggtcgagacattcctgcgcatcgtgcagtgccgctctgtggagggcagctgtggcttctagctgcccgggtggcatccctgtgacccctccccagtgcctctcctggccctggaagttgccactccagtgcccaccagccttgtcctaataaaattaagttgcatcaaaaaaaaaaaaaaaaaaaaaaaaaa

SEQ ID NO: 732114 - DNA, 1028 bp, Homo sapiens
gatcccaaggcccaactccccgaaccactcagggtcctgtggacagctcacctagctgcaatggctacaggtaagcgcccctaaaatccctttgggcacaatgtgtcctgaggggagaggcagcgacctgtagatgggacgggggcactaaccctcaggtttggggcttctgaatgtgagtatcgccatgtaagcccagtatttggccaatctcagaaagctcctggtccctggagggatggagagagaccagctcctggagcagggagagtgctggcctcttgctctccggctccctctgttgccctctggtttctccccaggctcccggacgtccctgctcctggcttttggcctgctctgcctgccctggcttcaagagggcagtgccttcccaaccattcccttatccaggctttttgacaacgctatgctccgcgcccatcgtctgcaccagctggcctttgacacctaccaggagtttaacccccagacctccctctgtttctcagagtctattccgacaccctccaacagggaggaaacacaacagaaatccaacctagagctgctccgcatctccctgctgctcatccagtcgtggctggagcccgtgcagttcctcaggagtgtcttcgccaacagcctggtgtacggcgcctctgacagcaacgtctatgacctcctaaaggacctagaggaaggcatccaaacgctgatggggaggctggaagatggcagcccccggactgggcagatcttcaagcagacctacagcaagttcgacacaaactcacacaacgatgacgcactactcaagaactacgggctgctctactgcttcaggaaggacatggacaaggtcgagacattcctgcgcatcgtgcagtgccgctctgtggagggcagctgtggcttctagctgcccgggtggcatccctgtgacccctccccagtgcctctcctggccctggaagttgccactccagtgcccaccagccttgtcctaataaaattaagttgcatca

SEQ ID NO: 732115 - DNA, 953 bp, Homo sapiens
gatcccaaggcccaactccccgaaccactcagggtcctgtggacagctcacctagctgcaatggctacaggtaagcgcccctaaaatccctttgggcacaatgtgtcctgaggggagaggcagcgacctgtagatgggacgggggcactaaccctcaggtttggggcttctgaatgtgagtatcgccatgtaagcccagtatttggccaatctcagaaagctcctggtccctggagggatggagagagaccagctcctggagcagggagagtgctggcctcttgctctccggctccctctgttgccctctggtttctccccaggctcccggacgtccctgctcctggcttttggcctgctctgcctgccctggcttcaagagggcagtgccttcccaaccattcccttatccaggctttttgacaacgctatgctccgcgcccatcgtctgcaccagctggcctttgacacctaccaggagtttaacctagagctgctccgcatctccctgctgctcatccagtcgtggctggagcccgtgcagttcctcaggagtgtcttcgccaacagcctggtgtacggcgcctctgacagcaacgtctatgacctcctaaaggacctagaggaaggcatccaaacgctgatggggaggctggaagatggcagcccccggactgggcagatcttcaagcagacctacagcaagttcgacacaaactcacacaacgatgacgcactactcaagaactacgggctgctctactgcttcaggaaggacatggacaaggtcgagacattcctgcgcatcgtgcagtgccgctctgtggagggcagctgtggcttctagctgcccgggtggcatccctgtgacccctccccagtgcctctcctggccctggaagttgccactccagtgcccaccagccttgtcctaataaaattaagttgcatca

SEQ ID NO: 732116 - DNA, 1196 bp, Homo sapiens
  misc_feature (997)..(997): n is a, c, g, or t
  misc_feature (999)..(999): n is a, c, g, or t
  misc_feature (1015)..(1015): n is a, c, g, or t
  misc_feature (1024)..(1024): n is a, c, g, or t
gatcccaaggcccaactccccgaaccactcagggtcctgtggacagctcacctagctgcaatggctacaggtaagcgcccctaaaatccctttgggcacaatgtgtcctgaggggagaggcagcgacctgtagatgggacgggggcactaaccctcaggtttggggcttctgaatgtgagtatcgccatgtaagcccagtatttggccaatctcagaaagctcctggtccctggagggatggagagagaccagctcctggagcagggagagtgctggcctcttgctctccggctccctctgttgccctctggtttctccccaggctcccggacgtccctgctcctggcttttggcctgctctgcctgccctggcttcaagagggcagtgccttcccaaccattcccttatccaggctttttgacaacgctatgctccgcgcccatcgtctgcaccagctggcctttgacacctaccaggagtttaacctagagctgctccgcatctccctgctgctcatccagtcgtggctggagcccgtgcagttcctcaggagtgtcttcgccaacagcctggtgtacggcgcctctgacagcaacgtctatgacctcctaaaggacctagaggaaggcatccaaacgctgatggggaggctggaagatggcagcccccggactgggcagatcttcaagcagacctacagcaagttcgacacaaactcacacaacgatgacgcactactcaagaactacgggctgctctactgcttcaggaaggacatggacaaggtcgagacattcctgcgcatcgtgcagtgccgctctgtggagggcagctgtggcttctagctgcccgggtggcatccctgtgacccctccccagtgcctctcctggccctggaagttgccactccagtgcccaccagccttgtcctaataaaattaagttgcatcaccaaaaaaaaaaaagagagtcgtattacaattacttggccgcgntntacaacgtcgtgactngggcctggnggtcccaacttaatcgcttggcagccatccccctttcgcagatgtcgtaaagcgaagagggccgcaacgatcgccttcccaacaatgcgcaactgcatggcacatgcaaatgtaccggtgaccttgggtcacatcggtaaattgttaaatagtccatttaccaggcgactgc

SEQ ID NO: 732117 - DNA, 978 bp, Homo sapiens
gatcccaaggcccaactccccgaaccactcagggtcctgtggacagctcacctagctgcaatggctacaggtaagcgcccctaaaatccctttgggcacaatgtgtcctgaggggagaggcagcgacctgtagatgggacgggggcactaaccctcaggtttggggcttctgaatgtgagtatcgccatgtaagcccagtatttggccaatctcagaaagctcctggtccctggagggatggagagagaccagctcctggagcagggagagtgctggcctcttgctctccggctccctctgttgccctctggtttctccccaggctcccggacgtccctgctcctggcttttggcctgctctgcctgccctggcttcaagagggcagtgccttcccaaccattcccttatccaggctttttgacaacgctatgctccgcgcccatcgtctgcaccagctggcctttgacacctaccaggagtttaacctagagctgctccgcatctccctgctgctcatccagtcgtggctggagcccgtgcagttcctcaggagtgtcttcgccaacagcctggtgtacggcgcctctgacagcaacgtctatgacctcctaaaggacctagaggaaggcatccaaacgctgatggggaggctggaagatggcagcccccggactgggcagatcttcaagcagacctacagcaagttcgacacaaactcacacaacgatgacgcactactcaagaactacgggctgctctactgcttcaggaaggacatggacaaggtcgagacattcctgcgcatcgtgcagtgccgctctgtggagggcagctgtggcttctagctgcccgggtggcatccctgtgacccctccccagtgcctctcctggccctggaagttgccactccagtgcccaccagccttgtcctaataaaattaagttgcatcaaaaaaaaaaaaaaaaaaaaaaaaaa

SEQ ID NO: 732118 - DNA, 1271 bp, Homo sapiens
  misc_feature (1072)..(1072): n is a, c, g, or t
  misc_feature (1074)..(1074): n is a, c, g, or t
  misc_feature (1090)..(1090): n is a, c, g, or t
  misc_feature (1099)..(1099): n is a, c, g, or t
gatcccaaggcccaactccccgaaccactcagggtcctgtggacagctcacctagctgcaatggctacaggtaagcgcccctaaaatccctttgggcacaatgtgtcctgaggggagaggcagcgacctgtagatgggacgggggcactaaccctcaggtttggggcttctgaatgtgagtatcgccatgtaagcccagtatttggccaatctcagaaagctcctggtccctggagggatggagagagaccagctcctggagcagggagagtgctggcctcttgctctccggctccctctgttgccctctggtttctccccaggctcccggacgtccctgctcctggcttttggcctgctctgcctgccctggcttcaagagggcagtgccttcccaaccattcccttatccaggctttttgacaacgctatgctccgcgcccatcgtctgcaccagctggcctttgacacctaccaggagtttaacccccagacctccctctgtttctcagagtctattccgacaccctccaacagggaggaaacacaacagaaatccaacctagagctgctccgcatctccctgctgctcatccagtcgtggctggagcccgtgcagttcctcaggagtgtcttcgccaacagcctggtgtacggcgcctctgacagcaacgtctatgacctcctaaaggacctagaggaaggcatccaaacgctgatggggaggctggaagatggcagcccccggactgggcagatcttcaagcagacctacagcaagttcgacacaaactcacacaacgatgacgcactactcaagaactacgggctgctctactgcttcaggaaggacatggacaaggtcgagacattcctgcgcatcgtgcagtgccgctctgtggagggcagctgtggcttctagctgcccgggtggcatccctgtgacccctccccagtgcctctcctggccctggaagttgccactccagtgcccaccagccttgtcctaataaaattaagttgcatcaccaaaaaaaaaaaagagagtcgtattacaattacttggccgcgntntacaacgtcgtgactngggcctggnggtcccaacttaatcgcttggcagccatccccctttcgcagatgtcgtaaagcgaagagggccgcaacgatcgccttcccaacaatgcgcaactgcatggcacatgcaaatgtaccggtgaccttgggtcacatcggtaaattgttaaatagtccatttaccaggcgactgc

SEQ ID NO: 732119 - DNA, 1053 bp, Homo sapiens
gatcccaaggcccaactccccgaaccactcagggtcctgtggacagctcacctagctgcaatggctacaggtaagcgcccctaaaatccctttgggcacaatgtgtcctgaggggagaggcagcgacctgtagatgggacgggggcactaaccctcaggtttggggcttctgaatgtgagtatcgccatgtaagcccagtatttggccaatctcagaaagctcctggtccctggagggatggagagagaccagctcctggagcagggagagtgctggcctcttgctctccggctccctctgttgccctctggtttctccccaggctcccggacgtccctgctcctggcttttggcctgctctgcctgccctggcttcaagagggcagtgccttcccaaccattcccttatccaggctttttgacaacgctatgctccgcgcccatcgtctgcaccagctggcctttgacacctaccaggagtttaacccccagacctccctctgtttctcagagtctattccgacaccctccaacagggaggaaacacaacagaaatccaacctagagctgctccgcatctccctgctgctcatccagtcgtggctggagcccgtgcagttcctcaggagtgtcttcgccaacagcctggtgtacggcgcctctgacagcaacgtctatgacctcctaaaggacctagaggaaggcatccaaacgctgatggggaggctggaagatggcagcccccggactgggcagatcttcaagcagacctacagcaagttcgacacaaactcacacaacgatgacgcactactcaagaactacgggctgctctactgcttcaggaaggacatggacaaggtcgagacattcctgcgcatcgtgcagtgccgctctgtggagggcagctgtggcttctagctgcccgggtggcatccctgtgacccctccccagtgcctctcctggccctggaagttgccactccagtgcccaccagccttgtcctaataaaattaagttgcatcaaaaaaaaaaaaaaaaaaaaaaaaaa

SEQ ID NO: 732120 - DNA, 887 bp, Homo sapiens
cgtcgacacggctgcgagagacgacagaaggggaaggatcccaaggcccaactccccgaaccactcagggtcctgtggacagctcacctagctgcaatggctacaggctcccggacgtccctgctcctggcttttggcctgctctgcctgccctggcttcaagagggcagtgccttcccaaccattcccttatccaggctttttgacaacgctatgctccgcgcccatcgtctgcaccagctggcctttgacacctaccaggagtttgaagaagcctatatcccaaaggaacagaagtattcattcctgcagaacccccagacctccctctgtttctcagagtctattccgacaccctccaacagggaggaaacacaacagaaatccaacctagagctgctccgcatctccctgctgctcatccagtcgtggctggagcccgtgcagttcctcaggagtgtcttcgccaacagcctggtgtacggcgcctctgacagcaacgtctatgacctcctaaaggacctagaggaaggcatccaaacgctgatggggaggctggaagatggcagcccccggactgggcagatcttcaagcagacctacagcaagttcgacacaaactcacacaacgatgacgcactactcaagaactacgggctgctctactgcttcaggaaggacatggacaaggtcgagacattcctgcgcatcgtgcagtgccgctctgtggagggcagctgtggcttctagctgcccgggtggcatccctgtgacccctccccagtgcctctcctggccctggaagttgccactccagtgcccaccagccttgtcctaataaaattaagttgcatcaaaattccagtgtgcctgtatgagtggtgtgt

SEQ ID NO: 732121 - DNA, 721 bp, Homo sapiens
cgtcgacacggctgcgagagacgacagaaggggaaggatcccaaggcccaactccccgaaccactcagggtcctgtggacagctcacctagctgcaatggctacaggctcccggacgtccctgctcctggcttttggcctgctctgcctgccctggcttcaagagggcagtgccttcccaaccattcccttatccaggctttttgacaacgctatgctccgcgcccatcgtctgcaccagctggcctttgacacctaccaggagtttgaagaagcctatatcccaaaggaacagaagtattcattcctgcagaacccccagacctccctctgtttctcagagtctattccgacaccctccaacagggaggaaacacaacagaaatccaacctagagctgctccgcatctccctgctgctcatccagtcgtggctggagcccgctgggcagatcttcaagcagacctacagcaagttcgacacaaactcacacaacgatgacgcactactcaagaactacgggctgctctactgcttcaggaaggacatggacaaggtcgagacattcctgcgcatcgtgcagtgccgctctgtggagggcagctgtggcttctagctgcccgggtggcatccctgtgacccctccccagtgcctctcctggccctggaagttgccactccagtgcccaccagccttgtcctaataaaattaagttgcatca

SEQ ID NO: 732122 - DNA, 974 bp, Homo sapiens
  misc_feature (807)..(807): n is a, c, g, or t
  misc_feature (810)..(810): n is a, c, g, or t
  misc_feature (812)..(812): n is a, c, g, or t
cgtcgacacggctgcgagagacgacagaaggggaaggatcccaaggcccaactccccgaaccactcagggtcctgtggacagctcacctagctgcaatggctacaggctcccggacgtccctgctcctggcttttggcctgctctgcctgccctggcttcaagagggcagtgccttcccaaccattcccttatccaggctttttgacaacgctatgctccgcgcccatcgtctgcaccagctggcctttgacacctaccaggagtttgaagaagcctatatcccaaaggaacagaagtattcattcctgcagaacccccagacctccctctgtttctcagagtctattccgacaccctccaacagggaggaaacacaacagaaatccaacctagagctgctccgcatctccctgctgctcatccagtcgtggctggagcccgtgcagttcctcaggagtgtcttcgccaacagcctggtgtacggcgcctctgacagcaacgtctatgacctcctaaaggacctagaggaaggcatccaaacgctgatggggaggctggaagatggcagcccccggactgggcagatcttcaagcagacctacagcaagttcgacacaaactcacacaacgatgacgcactactcaagaactacgggctgctctactgcttcaggaaggacatggacaaggtcgagacattcctgcgcatcgtgcagtgccgctctgtggagggcagctgtggcttctagctgcccgggtggcatccctgtgacccctccccagtgcctctcctggccctgggccancancnggcctataaatcagtggctccaacacccacaaaacccgggggggcgcacccataccaaggacctaaaaccgagccgacaaaacggcgggaccgcgtgcacaaacggtcgaacccgcgcgagacagcgcgccaccagacgcagaggcacggggcaccacgcac

SEQ ID NO: 732123 - DNA, 806 bp, Homo sapiens
gatcccaaggcccaactccccgaaccactcagggtcctgtggacagctcacctagctgcaatggctacaggctcccggacgtccctgctcctggcttttggcctgctctgcctgccctggcttcaagagggcagtgccttcccaaccattcccttatccaggctttttgacaacgctatgctccgcgcccatcgtctgcaccagctggcctttgacacctaccaggagtttaacccccagacctccctctgtttctcagagtctattccgacaccctccaacagggaggaaacacaacagaaatccaacctagagctgctccgcatctccctgctgctcatccagtcgtggctggagcccgtgcagttcctcaggagtgtcttcgccaacagcctggtgtacggcgcctctgacagcaacgtctatgacctcctaaaggacctagaggaaggcatccaaacgctgatggggaggctggaagatggcagcccccggactgggcagatcttcaagcagacctacagcaagttcgacacaaactcacacaacgatgacgcactactcaagaactacgggctgctctactgcttcaggaaggacatggacaaggtcgagacattcctgcgcatcgtgcagtgccgctctgtggagggcagctgtggcttctagctgcccgggtggcatccctgtgacccctccccagtgcctctcctggccctggaagttgccactccagtgcccaccagccttgtcctaataaaattaagttgcatcaaaattccagtgtgcctgtatgagtggtgtgt

SEQ ID NO: 732124 - DNA, 731 bp, Homo sapiens
gatcccaaggcccaactccccgaaccactcagggtcctgtggacagctcacctagctgcaatggctacaggctcccggacgtccctgctcctggcttttggcctgctctgcctgccctggcttcaagagggcagtgccttcccaaccattcccttatccaggctttttgacaacgctatgctccgcgcccatcgtctgcaccagctggcctttgacacctaccaggagtttaacctagagctgctccgcatctccctgctgctcatccagtcgtggctggagcccgtgcagttcctcaggagtgtcttcgccaacagcctggtgtacggcgcctctgacagcaacgtctatgacctcctaaaggacctagaggaaggcatccaaacgctgatggggaggctggaagatggcagcccccggactgggcagatcttcaagcagacctacagcaagttcgacacaaactcacacaacgatgacgcactactcaagaactacgggctgctctactgcttcaggaaggacatggacaaggtcgagacattcctgcgcatcgtgcagtgccgctctgtggagggcagctgtggcttctagctgcccgggtggcatccctgtgacccctccccagtgcctctcctggccctggaagttgccactccagtgcccaccagccttgtcctaataaaattaagttgcatcaaaattccagtgtgcctgtatgagtggtgtgt

SEQ ID NO: 732125 - DNA, 1061 bp, Homo sapiens
gatcccaaggcccaactccccgaaccactcagggtcctgtggacagctcacctagctgcaatggctacaggctcccggacgtccctgctcctggcttttggcctgctctgcctgccctggcttcaagagggcagtgccttcccaaccattcccttatccaggctttttgacaacgctatgctccgcgcccatcgtctgcaccagctggcctttgacacctaccaggagttttgtaagctcttggggaatgggtgcgcatcaggggtggcaggaaggggtgactttcccccgctgggaaataagaggaggagactaaggagctcagggtttttcccgaagcgaaaatgcaggcagatgagcacacgctgagtgaggttcccagaaaagtaacaatgggagctggtctccagcgtagaccttggtgggcggtccttctcctaggaagaagcctatatcccaaaggaacagaagtattcattcctgcagaacccccagacctccctctgtttctcagagtctattccgacaccctccaacagggaggaaacacaacagaaatccaacctagagctgctccgcatctccctgctgctcatccagtcgtggctggagcccgtgcagttcctcaggagtgtcttcgccaacagcctggtgtacggcgcctctgacagcaacgtctatgacctcctaaaggacctagaggaaggcatccaaacgctgatggggaggctggaagatggcagcccccggactgggcagatcttcaagcagacctacagcaagttcgacacaaactcacacaacgatgacgcactactcaagaactacgggctgctctactgcttcaggaaggacatggacaaggtcgagacattcctgcgcatcgtgcagtgccgctctgtggagggcagctgtggcttctagctgcccgggtggcatccctgtgacccctccccagtgcctctcctggccctggaagttgccactccagtgcccaccagccttgtcctaataaaattaagttgcatcaaaattccagtgtgcctgtatgagtggtgtgt

SEQ ID NO: 732126 - DNA, 963 bp, Homo sapiens
gatcccaaggcccaactccccgaaccactcagggtcctgtggacagctcacctagctgcaatggctacaggtaagcgcccctaaaatccctttgggcacaatgtgtcctgaggggagaggcagcgacctgtagatgggacgggggcactaaccctcaggtttggggcttctgaatgtgagtatcgccatgtaagcccagtatttggccaatctcagaaagctcctggtccctggagggatggagagagaccagctcctggagcagggagagtgctggcctcttgctctccggctccctctgttgccctctggtttctccccaggctcccggacgtccctgctcctggcttttggcctgctctgcctgccctggcttcaagagggcagtgccttcccaaccattcccttatccaggctttttgacaacgctatgctccgcgcccatcgtctgcaccagctggcctttgacacctaccaggagtttgaagaagcctatatcccaaaggaacagaagtattcattcctgcagaacccccagacctccctctgtttctcagagtctattccgacaccctccaacagggaggaaacacaacagaaatccaacctagagctgctccgcatctccctgctgctcatccagtcgtggctggagcccgctgggcagatcttcaagcagacctacagcaagttcgacacaaactcacacaacgatgacgcactactcaagaactacgggctgctctactgcttcaggaaggacatggacaaggtcgagacattcctgcgcatcgtgcagtgccgctctgtggagggcagctgtggcttctagctgcccgggtggcatccctgtgacccctccccagtgcctctcctggccctggaagttgccactccagtgcccaccagccttgtcctaataaaattaagttgcatcaaaaaaaaaaaaaaaaaaaaaaaaaa

SEQ ID NO: 732127 - DNA, 1104 bp, Homo sapiens
gatcccaaggcccaactccccgaaccactcagggtcctgtggacagctcacctagctgcaatggctacaggtaagcgcccctaaaatccctttgggcacaatgtgtcctgaggggagaggcagcgacctgtagatgggacgggggcactaaccctcaggtttggggcttctgaatgtgagtatcgccatgtaagcccagtatttggccaatctcagaaagctcctggtccctggagggatggagagagaccagctcctggagcagggagagtgctggcctcttgctctccggctccctctgttgccctctggtttctccccaggctcccggacgtccctgctcctggcttttggcctgctctgcctgccctggcttcaagagggcagtgccttcccaaccattcccttatccaggctttttgacaacgctatgctccgcgcccatcgtctgcaccagctggcctttgacacctaccaggagtttgaagaagcctatatcccaaaggaacagaagtattcattcctgcagaacccccagacctccctctgtttctcagagtctattccgacaccctccaacagggaggaaacacaacagaaatccaacctagagctgctccgcatctccctgctgctcatccagtcgtggctggagcccgtgcagttcctcaggagtgtcttcgccaacagcctggtgtacggcgcctctgacagcaacgtctatgacctcctaaaggacctagaggaaggcatccaaacgctgatggggaggctggaagatggcagcccccggactgggcagatcttcaagcagacctacagcaagttcgacacaaactcacacaacgatgacgcactactcaagaactacgggctgctctactgcttcaggaaggacatggacaaggtcgagacattcctgcgcatcgtgcagtgccgctctgtggagggcagctgtggcttctagctgcccgggtggcatccctgtgacccctccccagtgcctctcctggccctggaagttgccactccagtgcccaccagccttgtcctaataaaattaagttgcatcaaaattccagtgtgcctgtatgagtggtgtgt

SEQ ID NO: 732128 - DNA, 1191 bp, Homo sapiens
  misc_feature (1024)..(1024): n is a, c, g, or t
  misc_feature (1027)..(1027): n is a, c, g, or t
  misc_feature (1029)..(1029): n is a, c, g, or t
gatcccaaggcccaactccccgaaccactcagggtcctgtggacagctcacctagctgcaatggctacaggtaagcgcccctaaaatccctttgggcacaatgtgtcctgaggggagaggcagcgacctgtagatgggacgggggcactaaccctcaggtttggggcttctgaatgtgagtatcgccatgtaagcccagtatttggccaatctcagaaagctcctggtccctggagggatggagagagaccagctcctggagcagggagagtgctggcctcttgctctccggctccctctgttgccctctggtttctccccaggctcccggacgtccctgctcctggcttttggcctgctctgcctgccctggcttcaagagggcagtgccttcccaaccattcccttatccaggctttttgacaacgctatgctccgcgcccatcgtctgcaccagctggcctttgacacctaccaggagtttgaagaagcctatatcccaaaggaacagaagtattcattcctgcagaacccccagacctccctctgtttctcagagtctattccgacaccctccaacagggaggaaacacaacagaaatccaacctagagctgctccgcatctccctgctgctcatccagtcgtggctggagcccgtgcagttcctcaggagtgtcttcgccaacagcctggtgtacggcgcctctgacagcaacgtctatgacctcctaaaggacctagaggaaggcatccaaacgctgatggggaggctggaagatggcagcccccggactgggcagatcttcaagcagacctacagcaagttcgacacaaactcacacaacgatgacgcactactcaagaactacgggctgctctactgcttcaggaaggacatggacaaggtcgagacattcctgcgcatcgtgcagtgccgctctgtggagggcagctgtggcttctagctgcccgggtggcatccctgtgacccctccccagtgcctctcctggccctgggccancancnggcctataaatcagtggctccaacacccacaaaacccgggggggcgcacccataccaaggacctaaaaccgagccgacaaaacggcgggaccgcgtgcacaaacggtcgaacccgcgcgagacagcgcgccaccagacgcagaggcacggggcaccacgcac

SEQ ID NO: 732129 - DNA, 1314 bp, Homo sapiens
gatcccaaggcccaactccccgaaccactcagggtcctgtggacagctcacctagctgcaatggctacaggtaagcgcccctaaaatccctttgggcacaatgtgtcctgaggggagaggcagcgacctgtagatgggacgggggcactaaccctcaggtttggggcttctgaatgtgagtatcgccatgtaagcccagtatttggccaatctcagaaagctcctggtccctggagggatggagagagaccagctcctggagcagggagagtgctggcctcttgctctccggctccctctgttgccctctggtttctccccaggctcccggacgtccctgctcctggcttttggcctgctctgcctgccctggcttcaagagggcagtgccttcccaaccattcccttatccaggctttttgacaacgctatgctccgcgcccatcgtctgcaccagctggcctttgacacctaccaggagttttgtaagctcttggggaatgggtgcgcatcaggggtggcaggaaggggtgactttcccccgctgggaaataagaggaggagactaaggagctcagggtttttcccgaagcgaaaatgcaggcagatgagcacacgctgagtgaggttcccagaaaagtaacaatgggagctggtctccagcgtagaccttggtgggcggtccttctcctaggaagaagcctatatcccaaaggaacagaagtattcattcctgcagaacccccagacctccctctgtttctcagagtctattccgacaccctccaacagggaggaaacacaacagaaatccaacctagagctgctccgcatctccctgctgctcatccagtcgtggctggagcccgtgcagttcctcaggagtgtcttcgccaacagcctggtgtacggcgcctctgacagcaacgtctatgacctcctaaaggacctagaggaaggcatccaaacgctgatggggaggctggaagatggcagcccccggactgggcagatcttcaagcagacctacagcaagttcgacacaaactcacacaacgatgacgcactactcaagaactacgggctgctctactgcttcaggaaggacatggacaaggtcgagacattcctgcgcatcgtgcagtgccgctctgtggagggcagctgtggcttctagctgcccgggtggcatccctgtgacccctccccagtgcctctcctggccctggaagttgccactccagtgcccaccagccttgtcctaataaaattaagttgcatcaaaattccagtgtgcctgtatgagtggtgtgt

SEQ ID NO: 732130 - DNA, 938 bp, Homo sapiens
gatcccaaggcccaactccccgaaccactcagggtcctgtggacagctcacctagctgcaatggctacaggtaagcgcccctaaaatccctttgggcacaatgtgtcctgaggggagaggcagcgacctgtagatgggacgggggcactaaccctcaggtttggggcttctgaatgtgagtatcgccatgtaagcccagtatttggccaatctcagaaagctcctggtccctggagggatggagagagaccagctcctggagcagggagagtgctggcctcttgctctccggctccctctgttgccctctggtttctccccaggctcccggacgtccctgctcctggcttttggcctgctctgcctgccctggcttcaagagggcagtgccttcccaaccattcccttatccaggctttttgacaacgctatgctccgcgcccatcgtctgcaccagctggcctttgacacctaccaggagtttgaagaagcctatatcccaaaggaacagaagtattcattcctgcagaacccccagacctccctctgtttctcagagtctattccgacaccctccaacagggaggaaacacaacagaaatccaacctagagctgctccgcatctccctgctgctcatccagtcgtggctggagcccgctgggcagatcttcaagcagacctacagcaagttcgacacaaactcacacaacgatgacgcactactcaagaactacgggctgctctactgcttcaggaaggacatggacaaggtcgagacattcctgcgcatcgtgcagtgccgctctgtggagggcagctgtggcttctagctgcccgggtggcatccctgtgacccctccccagtgcctctcctggccctggaagttgccactccagtgcccaccagccttgtcctaataaaattaagttgcatca

SEQ ID NO: 732131 - DNA, 984 bp, Homo sapiens
gatcccaaggcccaactccccgaaccactcagggtcctgtggacagctcacctagctgcaatggctacaggtaagcgcccctaaaatccctttgggcacaatgtgtcctgaggggagaggcagcgacctgtagatgggacgggggcactaaccctcaggtttggggcttctgaatgtgagtatcgccatgtaagcccagtatttggccaatctcagaaagctcctggtccctggagggatggagagagaccagctcctggagcagggagagtgctggcctcttgctctccggctccctctgttgccctctggtttctccccaggctcccggacgtccctgctcctggcttttggcctgctctgcctgccctggcttcaagagggcagtgccttcccaaccattcccttatccaggctttttgacaacgctatgctccgcgcccatcgtctgcaccagctggcctttgacacctaccaggagtttaacctagagctgctccgcatctccctgctgctcatccagtcgtggctggagcccgtgcagttcctcaggagtgtcttcgccaacagcctggtgtacggcgcctctgacagcaacgtctatgacctcctaaaggacctagaggaaggcatccaaacgctgatggggaggctggaagatggcagcccccggactgggcagatcttcaagcagacctacagcaagttcgacacaaactcacacaacgatgacgcactactcaagaactacgggctgctctactgcttcaggaaggacatggacaaggtcgagacattcctgcgcatcgtgcagtgccgctctgtggagggcagctgtggcttctagctgcccgggtggcatccctgtgacccctccccagtgcctctcctggccctggaagttgccactccagtgcccaccagccttgtcctaataaaattaagttgcatcaaaattccagtgtgcctgtatgagtggtgtgt

SEQ ID NO: 732132 - DNA, 1059 bp, Homo sapiens
gatcccaaggcccaactccccgaaccactcagggtcctgtggacagctcacctagctgcaatggctacaggtaagcgcccctaaaatccctttgggcacaatgtgtcctgaggggagaggcagcgacctgtagatgggacgggggcactaaccctcaggtttggggcttctgaatgtgagtatcgccatgtaagcccagtatttggccaatctcagaaagctcctggtccctggagggatggagagagaccagctcctggagcagggagagtgctggcctcttgctctccggctccctctgttgccctctggtttctccccaggctcccggacgtccctgctcctggcttttggcctgctctgcctgccctggcttcaagagggcagtgccttcccaaccattcccttatccaggctttttgacaacgctatgctccgcgcccatcgtctgcaccagctggcctttgacacctaccaggagtttaacccccagacctccctctgtttctcagagtctattccgacaccctccaacagggaggaaacacaacagaaatccaacctagagctgctccgcatctccctgctgctcatccagtcgtggctggagcccgtgcagttcctcaggagtgtcttcgccaacagcctggtgtacggcgcctctgacagcaacgtctatgacctcctaaaggacctagaggaaggcatccaaacgctgatggggaggctggaagatggcagcccccggactgggcagatcttcaagcagacctacagcaagttcgacacaaactcacacaacgatgacgcactactcaagaactacgggctgctctactgcttcaggaaggacatggacaaggtcgagacattcctgcgcatcgtgcagtgccgctctgtggagggcagctgtggcttctagctgcccgggtggcatccctgtgacccctccccagtgcctctcctggccctggaagttgccactccagtgcccaccagccttgtcctaataaaattaagttgcatcaaaattccagtgtgcctgtatgagtggtgtgt

SEQ ID NO: 732133 - DNA, 374 bp, Homo sapiens
gatcccaaggcccaactccccgaaccactcagggtcctgtggacagctcacctagctgcaatggctacagaggctggaagatggcagcccccggactgggcagatcttcaagcagacctacagcaagttcgacacaaactcacacaacgatgacgcactactcaagaactacgggctgctctactgcttcaggaaggacatggacaaggtcgagacattcctgcgcatcgtgcagtgccgctctgtggagggcagctgtggcttctagctgcccgggtggcatccctgtgacccctccccagtgcctctcctggccctggaagttgccactccagtgcccaccagccttgtcctaataaaattaagttgcatca

SEQ ID NO: 732134 - DNA, 746 bp, Homo sapiens
cgtcgacacggctgcgagagacgacagaaggggaaggatcccaaggcccaactccccgaaccactcagggtcctgtggacagctcacctagctgcaatggctacaggctcccggacgtccctgctcctggcttttggcctgctctgcctgccctggcttcaagagggcagtgccttcccaaccattcccttatccaggctttttgacaacgctatgctccgcgcccatcgtctgcaccagctggcctttgacacctaccaggagtttgaagaagcctatatcccaaaggaacagaagtattcattcctgcagaacccccagacctccctctgtttctcagagtctattccgacaccctccaacagggaggaaacacaacagaaatccaacctagagctgctccgcatctccctgctgctcatccagtcgtggctggagcccgaggctggaagatggcagcccccggactgggcagatcttcaagcagacctacagcaagttcgacacaaactcacacaacgatgacgcactactcaagaactacgggctgctctactgcttcaggaaggacatggacaaggtcgagacattcctgcgcatcgtgcagtgccgctctgtggagggcagctgtggcttctagctgcccgggtggcatccctgtgacccctccccagtgcctctcctggccctggaagttgccactccagtgcccaccagccttgtcctaataaaattaagttgcatca

SEQ ID NO: 732135 - DNA, 831 bp, Homo sapiens
  misc_feature (808)..(808): n is a, c, g, or t
cgtcgacacggctgcgagagacgacagaaggggaaggatcccaaggcccaactccccgaaccactcagggtcctgtggacagctcacctagctgcaatggctacaggctcccggacgtccctgctcctggcttttggcctgctctgcctgccctggcttcaagagggcagtgccttcccaaccattcccttatccaggctttttgacaacgctatgctccgcgcccatcgtctgcaccagctggcctttgacacctaccaggagtttgaagaagcctatatcccaaaggaacagaagtattcattcctgcagaacccccagacctccctctgtttctcagagtctattccgacaccctccaacagggaggaaacacaacagaaatccaacctagagctgctccgcatctccctgctgctcatccagtcgtggctggagcccgtgcagttcctcaggagtgtcttcgccaacagcctggtgtacggcgcctctgacagcaacgtctatgacctcctaaaggacctagaggaaggcatccaaacgctgatggggaggctggaagatggcagcccccggactgggcagatcttcaagcagacctacagcaagttcgacacaaactcacacaacgatgacgcactactcaagaactacgggctgctctactgcttcaggaaggacatggacaaggtcgagacattcctgcgcatcgtgcagtgccgctctgtggagggcagctgtggcttctagctgcccgggtggcatccctgtgacccctccccagtgcctctcctggccctggatcagngcacagctgtctataaatagtgc

SEQ ID NO: 732136 - DNA, 851 bp, Homo sapiens
  misc_feature (828)..(828): n is a, c, g, or t
cgtcgacacggctgcgagagacgacagaaggggaaggatcccaaggcccaactccccgaaccactcagggtcctgtggacagctcacctagctgcaatggctacaggctcccggacgtccctgctcctggcttttggcctgctctgcctgccctggcttcaagagggcagtgccttcccaaccattcccttatccaggctttttgacaacgctatgctccgcgcccatcgtctgcaccagctggcctttgacacctaccaggagtttgaagaagcctatatcccaaaggaacagaagtattcattcctgcagaacccccagacctccctctgtttctcagagtctattccgacaccctccaacagggaggaaacacaacagaaatccaacctagagctgctccgcatctccctgctgctcatccagtcgtggctggagcccgtgcagttcctcaggagtgtcttcgccaacagcctggtgtacggcgcctctgacagcaacgtctatgacctcctaaaggacctagaggaaggcatccaaacgctgatggggaggctggaagatggcagcccccggactgggcagatcttcaagcagacctacagcaagttcgacacaaactcacacaacgatgacgcactactcaagaactacgggctgctctactgcttcaggaaggacatggacaaggtcgagacattcctgcgcatcgtgcagtgccgctctgtggagggcagctgtggcttctagctgcccgggtggcatccctgtgacccctccccagtgcctctcctggccctgggggttcctggcggaagatgcatcagngcacagctgtctataaatagtgc

SEQ ID NO: 732137 - DNA, 779 bp, Homo sapiens
cgtcgacacggctgcgagagacgacagaaggggaaggatcccaaggcccaactccccgaaccactcagggtcctgtggacagctcacctagctgcaatggctacaggctcccggacgtccctgctcctggcttttggcctgctctgcctgccctggcttcaagagggcagtgccttcccaaccattcccttatccaggctttttgacaacgctatgctccgcgcccatcgtctgcaccagctggcctttgacacctaccaggagtttgaagaagcctatatcccaaaggaacagaagtattcattcctgcagaacccccagacctccctctgtttctcagagtctattccgacaccctccaacagggaggaaacacaacagaaatccaacctagagctgctccgcatctccctgctgctcatccagtcgtggctggagcccgtgcagttcctcaggagtgtcttcgccaacagcctggtgtacggcgcctctgacagcaacgtctatgacctcctaaaggacctagaggaaggcatccaaacgctgatggggaggctggaagatggcagcccccggactgggcagatcttcaagcagacctacagcaagttcgacacaaactcacacaacgatgacgcactactcaagaactacgggctgctctactgcttcaggaaggacatggacaaggtcgagacattcctgcgcatcgtgcagtgccgctcaagttgccactccagtgcccaccagccttgtcctaataaaattaagttgcatca

SEQ ID NO: 732138 - DNA, 760 bp, Homo sapiens
cgtcgacacggctgcgagagacgacagaaggggaaggatcccaaggcccaactccccgaaccactcagggtcctgtggacagctcacctagctgcaatggctacaggctcccggacgtccctgctcctggcttttggcctgctctgcctgccctggcttcaagagggcagtgccttcccaaccattcccttatccaggctttttgacaacgctatgctccgcgcccatcgtctgcaccagctggcctttgacacctaccaggagtttgaagaagcctatatcccaaaggaacagaagtattcattcctgcagaacccccagacctccctctgtttctcagagtctattccgacaccctccaacagggaggaaacacaacagaaatccaacctagagctgctccgcatctccctgctgctcatccagtcgtggctggagcccgtgcagttcctcaggagtgtcttcgccaacagcctggtgtctgggcagatcttcaagcagacctacagcaagttcgacacaaactcacacaacgatgacgcactactcaagaactacgggctgctctactgcttcaggaaggacatggacaaggtcgagacattcctgcgcatcgtgcagtgccgctctgtggagggcagctgtggcttctagctgcccgggtggcatccctgtgacccctccccagtgcctctcctggccctggaagttgccactccagtgcccaccagccttgtcctaataaaattaagttgcatca

SEQ ID NO: 732139 - DNA, 785 bp, Homo sapiens
cgtcgacacggctgcgagagacgacagaaggggaaggatcccaaggcccaactccccgaaccactcagggtcctgtggacagctcacctagctgcaatggctacaggctcccggacgtccctgctcctggcttttggcctgctctgcctgccctggcttcaagagggcagtgccttcccaaccattcccttatccaggctttttgacaacgctatgctccgcgcccatcgtctgcaccagctggcctttgacacctaccaggagtttgaagaagcctatatcccaaaggaacagaagtattcattcctgcagaacccccagacctccctctgtttctcagagtctattccgacaccctccaacagggaggaaacacaacagaaatccaacctagagctgctccgcatctccctgctgctcatccagtcgtggctggagcccgtgcagttcctcaggagtgtcttcgccaacagcctggtgtctgggcagatcttcaagcagacctacagcaagttcgacacaaactcacacaacgatgacgcactactcaagaactacgggctgctctactgcttcaggaaggacatggacaaggtcgagacattcctgcgcatcgtgcagtgccgctctgtggagggcagctgtggcttctagctgcccgggtggcatccctgtgacccctccccagtgcctctcctggccctggaagttgccactccagtgcccaccagccttgtcctaataaaattaagttgcatcaaaaaaaaaaaaaaaaaaaaaaaaaa

SEQ ID NO: 732140 - DNA, 535 bp, Homo sapiens
gatcccaaggcccaactccccgaaccactcagggtcctgtggacagctcacctagctgcaatggctacaggctcccggacgtccctgctcctggcttttggcctgctctgcctgccctggcttcaagagggcagtgccttcccaaccattcccttatccaggctttttgacaacgctatgctccgcgcccatcgtctgcaccagctggcctttgacacctaccaggagtttaggctggaagatggcagcccccggactgggcagatcttcaagcagacctacagcaagttcgacacaaactcacacaacgatgacgcactactcaagaactacgggctgctctactgcttcaggaaggacatggacaaggtcgagacattcctgcgcatcgtgcagtgccgctctgtggagggcagctgtggcttctagctgcccgggtggcatccctgtgacccctccccagtgcctctcctggccctggaagttgccactccagtgcccaccagccttgtcctaataaaattaagttgcatca

SEQ ID NO: 732141 - DNA, 623 bp, Homo sapiens
gatcccaaggcccaactccccgaaccactcagggtcctgtggacagctcacctagctgcaatggctacaggctcccggacgtccctgctcctggcttttggcctgctctgcctgccctggcttcaagagggcagtgccttcccaaccattcccttatccaggctttttgacaacgctatgctccgcgcccatcgtctgcaccagctggcctttgacacctaccaggagtttaacctagagctgctccgcatctccctgctgctcatccagtcgtggctggagcccgtgcagttcctcaggagtgtcttcgccaacagcctggtgtacggcgcctctgacagcaacgtctatgacctcctaaaggacctagaggaaggcatccaaacgctgatggggaggctggaagatggcagcccccggactgggcagatcttcaagcagacctacagcaagttcgacacaaactcacacaacgatgacgcactactcaagaactacgggctgctctactgcttcaggaaggacatggacaaggtcgagacattcctgcgcatcgtgcagtgccgctcaagttgccactccagtgcccaccagccttgtcctaataaaattaagttgcatca

SEQ ID NO: 732142 - DNA, 698 bp, Homo sapiens
gatcccaaggcccaactccccgaaccactcagggtcctgtggacagctcacctagctgcaatggctacaggctcccggacgtccctgctcctggcttttggcctgctctgcctgccctggcttcaagagggcagtgccttcccaaccattcccttatccaggctttttgacaacgctatgctccgcgcccatcgtctgcaccagctggcctttgacacctaccaggagtttaacccccagacctccctctgtttctcagagtctattccgacaccctccaacagggaggaaacacaacagaaatccaacctagagctgctccgcatctccctgctgctcatccagtcgtggctggagcccgtgcagttcctcaggagtgtcttcgccaacagcctggtgtacggcgcctctgacagcaacgtctatgacctcctaaaggacctagaggaaggcatccaaacgctgatggggaggctggaagatggcagcccccggactgggcagatcttcaagcagacctacagcaagttcgacacaaactcacacaacgatgacgcactactcaagaactacgggctgctctactgcttcaggaaggacatggacaaggtcgagacattcctgcgcatcgtgcagtgccgctcaagttgccactccagtgcccaccagccttgtcctaataaaattaagttgcatca

SEQ ID NO: 732143 - DNA, 732 bp, Homo sapiens
gatcccaaggcccaactccccgaaccactcagggtcctgtggacagctcacctagctgcaatggctacaggctcccggacgtccctgctcctggcttttggcctgctctgcctgccctggcttcaagagggcagtgccttcccaaccattcccttatccaggctttttgacaacgctatgctccgcgcccatcgtctgcaccagctggcctttgacacctaccaggagtttcctccaacagggaggaaacacaacagaaatccaacctagagctgctccgcatctccctgctgctcatccagtcgtggctggagcccgtgcagttcctcaggagtgtcttcgccaacagcctggtgtacggcgcctctgacagcaacgtctatgacctcctaaaggacctagaggaaggcatccaaacgctgatggggaggctggaagatggcagcccccggactgggcagatcttcaagcagacctacagcaagttcgacacaaactcacacaacgatgacgcactactcaagaactacgggctgctctactgcttcaggaaggacatggacaaggtcgagacattcctgcgcatcgtgcagtgccgctctgtggagggcagctgtggcttctagctgcccgggtggcatccctgtgacccctccccagtgcctctcctggccctggaagttgccactccagtgcccaccagccttgtcctaataaaattaagttgcatca

SEQ ID NO: 732144 - DNA, 655 bp, Homo sapiens
gatcccaaggcccaactccccgaaccactcagggtcctgtggacagctcacctagctgcaatggctacaggctcccggacgtccctgctcctggcttttggcctgctctgcctgccctggcttcaagagggcagtgccttcccaaccattcccttatccaggctttttgacaacgctatgctccgcgcccatcgtctgcaccagctggcctttgacacctaccaggagtttcctccaacagggaggaaacacaacagaaatccaacctagagctgctccgcatctccctgctgctcatccagtcgtggctggagcccgtgcagttcctcaggagtgtcttcgccaacagcctggtgtacggcgcctctgacagcaacgtctatgacctcctaaaggacctagaggaaggcatccaaacgctgatggggaggctggaagatggcagcccccggactgggcagatcttcaagcagacctacagcaagttcgacacaaactcacacaacgatgacgcactactcaagaactacgggctgctctactgcttcaggaaggacatggacaaggtcgagacattcctgcgcatcgtgcagtgccgctcaagttgccactccagtgcccaccagccttgtcctaataaaattaagttgcatca

SEQ ID NO: 732145 - DNA, 763 bp, Homo sapiens
gatcccaaggcccaactccccgaaccactcagggtcctgtggacagctcacctagctgcaatggctacaggctcccggacgtccctgctcctggcttttggcctgctctgcctgccctggcttcaagagggcagtgccttcccaaccattcccttatccaggctttttgacaacgctatgctccgcgcccatcgtctgcaccagctggcctttgacacctaccaggagtttcctccaacagggaggaaacacaacagaaatccaacctagagctgctccgcatctccctgctgctcatccagtcgtggctggagcccgtgcagttcctcaggagtgtcttcgccaacagcctggtgtacggcgcctctgacagcaacgtctatgacctcctaaaggacctagaggaaggcatccaaacgctgatggggaggctggaagatggcagcccccggactgggcagatcttcaagcagacctacagcaagttcgacacaaactcacacaacgatgacgcactactcaagaactacgggctgctctactgcttcaggaaggacatggacaaggtcgagacattcctgcgcatcgtgcagtgccgctctgtggagggcagctgtggcttctagctgcccgggtggcatccctgtgacccctccccagtgcctctcctggccctggaagttgccactccagtgcccaccagccttgtcctaataaaattaagttgcatcaaaattccagtgtgcctgtatgagtggtgtgt

SEQ ID NO: 732146 - DNA, 975 bp, Homo sapiens
  misc_feature (776)..(776): n is a, c, g, or t
  misc_feature (778)..(778): n is a, c, g, or t
  misc_feature (794)..(794): n is a, c, g, or t
  misc_feature (803)..(803): n is a, c, g, or t
gatcccaaggcccaactccccgaaccactcagggtcctgtggacagctcacctagctgcaatggctacaggctcccggacgtccctgctcctggcttttggcctgctctgcctgccctggcttcaagagggcagtgccttcccaaccattcccttatccaggctttttgacaacgctatgctccgcgcccatcgtctgcaccagctggcctttgacacctaccaggagtttcctccaacagggaggaaacacaacagaaatccaacctagagctgctccgcatctccctgctgctcatccagtcgtggctggagcccgtgcagttcctcaggagtgtcttcgccaacagcctggtgtacggcgcctctgacagcaacgtctatgacctcctaaaggacctagaggaaggcatccaaacgctgatggggaggctggaagatggcagcccccggactgggcagatcttcaagcagacctacagcaagttcgacacaaactcacacaacgatgacgcactactcaagaactacgggctgctctactgcttcaggaaggacatggacaaggtcgagacattcctgcgcatcgtgcagtgccgctctgtggagggcagctgtggcttctagctgcccgggtggcatccctgtgacccctccccagtgcctctcctggccctggaagttgccactccagtgcccaccagccttgtcctaataaaattaagttgcatcaccaaaaaaaaaaaagagagtcgtattacaattacttggccgcgntntacaacgtcgtgactngggcctggnggtcccaacttaatcgcttggcagccatccccctttcgcagatgtcgtaaagcgaagagggccgcaacgatcgccttcccaacaatgcgcaactgcatggcacatgcaaatgtaccggtgaccttgggtcacatcggtaaattgttaaatagtccatttaccaggcgactgc

SEQ ID NO: 732147 - DNA, 757 bp, Homo sapiens
gatcccaaggcccaactccccgaaccactcagggtcctgtggacagctcacctagctgcaatggctacaggctcccggacgtccctgctcctggcttttggcctgctctgcctgccctggcttcaagagggcagtgccttcccaaccattcccttatccaggctttttgacaacgctatgctccgcgcccatcgtctgcaccagctggcctttgacacctaccaggagtttcctccaacagggaggaaacacaacagaaatccaacctagagctgctccgcatctccctgctgctcatccagtcgtggctggagcccgtgcagttcctcaggagtgtcttcgccaacagcctggtgtacggcgcctctgacagcaacgtctatgacctcctaaaggacctagaggaaggcatccaaacgctgatggggaggctggaagatggcagcccccggactgggcagatcttcaagcagacctacagcaagttcgacacaaactcacacaacgatgacgcactactcaagaactacgggctgctctactgcttcaggaaggacatggacaaggtcgagacattcctgcgcatcgtgcagtgccgctctgtggagggcagctgtggcttctagctgcccgggtggcatccctgtgacccctccccagtgcctctcctggccctggaagttgccactccagtgcccaccagccttgtcctaataaaattaagttgcatcaaaaaaaaaaaaaaaaaaaaaaaaaa

SEQ ID NO: 732148 - DNA, 953 bp, Homo sapiens
gatcccaaggcccaactccccgaaccactcagggtcctgtggacagctcacctagctgcaatggctacaggctcccggacgtccctgctcctggcttttggcctgctctgcctgccctggcttcaagagggcagtgccttcccaaccattcccttatccaggctttttgacaacgctatgctccgcgcccatcgtctgcaccagctggcctttgacacctaccaggagttttgtaagctcttggggaatgggtgcgcatcaggggtggcaggaaggggtgactttcccccgctgggaaataagaggaggagactaaggagctcagggtttttcccgaagcgaaaatgcaggcagatgagcacacgctgagtgaggttcccagaaaagtaacaatgggagctggtctccagcgtagaccttggtgggcggtccttctcctaggaagaagcctatatcccaaaggaacagaagtattcattcctgcagaacccccagacctccctctgtttctcagagtctattccgacaccctccaacagggaggaaacacaacagaaatccaacctagagctgctccgcatctccctgctgctcatccagtcgtggctggagcccgtgcagttcctcaggagtgtcttcgccaacagcctggtgtacggcgcctctgacagcaacgtctatgacctcctaaaggacctagaggaaggcatccaaacgctgatggggaggctggaagatggcagcccccggactgggcagatcttcaagcagacctacagcaagttcgacacaaactcacacaacgatgacgcactactcaagaactacgggctgctctactgcttcaggaaggacatggacaaggtcgagacattcctgcgcatcgtgcagtgccgctcaagttgccactccagtgcccaccagccttgtcctaataaaattaagttgcatca

SEQ ID NO: 732149 - DNA, 679 bp, Homo sapiens
gatcccaaggcccaactccccgaaccactcagggtcctgtggacagctcacctagctgcaatggctacaggctcccggacgtccctgctcctggcttttggcctgctctgcctgccctggcttcaagagggcagtgccttcccaaccattcccttatccaggctttttgacaacgctatgctccgcgcccatcgtctgcaccagctggcctttgacacctaccaggagtttaacccccagacctccctctgtttctcagagtctattccgacaccctccaacagggaggaaacacaacagaaatccaacctagagctgctccgcatctccctgctgctcatccagtcgtggctggagcccgtgcagttcctcaggagtgtcttcgccaacagcctggtgtctgggcagatcttcaagcagacctacagcaagttcgacacaaactcacacaacgatgacgcactactcaagaactacgggctgctctactgcttcaggaaggacatggacaaggtcgagacattcctgcgcatcgtgcagtgccgctctgtggagggcagctgtggcttctagctgcccgggtggcatccctgtgacccctccccagtgcctctcctggccctggaagttgccactccagtgcccaccagccttgtcctaataaaattaagttgcatca

SEQ ID NO: 732150 - DNA, 704 bp, Homo sapiens
gatcccaaggcccaactccccgaaccactcagggtcctgtggacagctcacctagctgcaatggctacaggctcccggacgtccctgctcctggcttttggcctgctctgcctgccctggcttcaagagggcagtgccttcccaaccattcccttatccaggctttttgacaacgctatgctccgcgcccatcgtctgcaccagctggcctttgacacctaccaggagtttaacccccagacctccctctgtttctcagagtctattccgacaccctccaacagggaggaaacacaacagaaatccaacctagagctgctccgcatctccctgctgctcatccagtcgtggctggagcccgtgcagttcctcaggagtgtcttcgccaacagcctggtgtctgggcagatcttcaagcagacctacagcaagttcgacacaaactcacacaacgatgacgcactactcaagaactacgggctgctctactgcttcaggaaggacatggacaaggtcgagacattcctgcgcatcgtgcagtgccgctctgtggagggcagctgtggcttctagctgcccgggtggcatccctgtgacccctccccagtgcctctcctggccctggaagttgccactccagtgcccaccagccttgtcctaataaaattaagttgcatcaaaaaaaaaaaaaaaaaaaaaaaaaa

SEQ ID NO: 732151 - DNA, 604 bp, Homo sapiens
gatcccaaggcccaactccccgaaccactcagggtcctgtggacagctcacctagctgcaatggctacaggctcccggacgtccctgctcctggcttttggcctgctctgcctgccctggcttcaagagggcagtgccttcccaaccattcccttatccaggctttttgacaacgctatgctccgcgcccatcgtctgcaccagctggcctttgacacctaccaggagtttaacctagagctgctccgcatctccctgctgctcatccagtcgtggctggagcccgtgcagttcctcaggagtgtcttcgccaacagcctggtgtctgggcagatcttcaagcagacctacagcaagttcgacacaaactcacacaacgatgacgcactactcaagaactacgggctgctctactgcttcaggaaggacatggacaaggtcgagacattcctgcgcatcgtgcagtgccgctctgtggagggcagctgtggcttctagctgcccgggtggcatccctgtgacccctccccagtgcctctcctggccctggaagttgccactccagtgcccaccagccttgtcctaataaaattaagttgcatca

SEQ ID NO: 732152 - DNA, 629 bp, Homo sapiens
gatcccaaggcccaactccccgaaccactcagggtcctgtggacagctcacctagctgcaatggctacaggctcccggacgtccctgctcctggcttttggcctgctctgcctgccctggcttcaagagggcagtgccttcccaaccattcccttatccaggctttttgacaacgctatgctccgcgcccatcgtctgcaccagctggcctttgacacctaccaggagtttaacctagagctgctccgcatctccctgctgctcatccagtcgtggctggagcccgtgcagttcctcaggagtgtcttcgccaacagcctggtgtctgggcagatcttcaagcagacctacagcaagttcgacacaaactcacacaacgatgacgcactactcaagaactacgggctgctctactgcttcaggaaggacatggacaaggtcgagacattcctgcgcatcgtgcagtgccgctctgtggagggcagctgtggcttctagctgcccgggtggcatccctgtgacccctccccagtgcctctcctggccctggaagttgccactccagtgcccaccagccttgtcctaataaaattaagttgcatcaaaaaaaaaaaaaaaaaaaaaaaaaa

SEQ ID NO: 732153 - DNA, 996 bp, Homo sapiens
gatcccaaggcccaactccccgaaccactcagggtcctgtggacagctcacctagctgcaatggctacaggtaagcgcccctaaaatccctttgggcacaatgtgtcctgaggggagaggcagcgacctgtagatgggacgggggcactaaccctcaggtttggggcttctgaatgtgagtatcgccatgtaagcccagtatttggccaatctcagaaagctcctggtccctggagggatggagagagaccagctcctggagcagggagagtgctggcctcttgctctccggctccctctgttgccctctggtttctccccaggctcccggacgtccctgctcctggcttttggcctgctctgcctgccctggcttcaagagggcagtgccttcccaaccattcccttatccaggctttttgacaacgctatgctccgcgcccatcgtctgcaccagctggcctttgacacctaccaggagtttgaagaagcctatatcccaaaggaacagaagtattcattcctgcagaacccccagacctccctctgtttctcagagtctattccgacaccctccaacagggaggaaacacaacagaaatccaacctagagctgctccgcatctccctgctgctcatccagtcgtggctggagcccgtgcagttcctcaggagtgtcttcgccaacagcctggtgtacggcgcctctgacagcaacgtctatgacctcctaaaggacctagaggaaggcatccaaacgctgatggggaggctggaagatggcagcccccggactgggcagatcttcaagcagacctacagcaagttcgacacaaactcacacaacgatgacgcactactcaagaactacgggctgctctactgcttcaggaaggacatggacaaggtcgagacattcctgcgcatcgtgcagtgccgctcaagttgccactccagtgcccaccagccttgtcctaataaaattaagttgcatca

SEQ ID NO: 732154 - DNA, 1048 bp, Homo sapiens
  misc_feature (1025)..(1025): n is a, c, g, or t
gatcccaaggcccaactccccgaaccactcagggtcctgtggacagctcacctagctgcaatggctacaggtaagcgcccctaaaatccctttgggcacaatgtgtcctgaggggagaggcagcgacctgtagatgggacgggggcactaaccctcaggtttggggcttctgaatgtgagtatcgccatgtaagcccagtatttggccaatctcagaaagctcctggtccctggagggatggagagagaccagctcctggagcagggagagtgctggcctcttgctctccggctccctctgttgccctctggtttctccccaggctcccggacgtccctgctcctggcttttggcctgctctgcctgccctggcttcaagagggcagtgccttcccaaccattcccttatccaggctttttgacaacgctatgctccgcgcccatcgtctgcaccagctggcctttgacacctaccaggagtttgaagaagcctatatcccaaaggaacagaagtattcattcctgcagaacccccagacctccctctgtttctcagagtctattccgacaccctccaacagggaggaaacacaacagaaatccaacctagagctgctccgcatctccctgctgctcatccagtcgtggctggagcccgtgcagttcctcaggagtgtcttcgccaacagcctggtgtacggcgcctctgacagcaacgtctatgacctcctaaaggacctagaggaaggcatccaaacgctgatggggaggctggaagatggcagcccccggactgggcagatcttcaagcagacctacagcaagttcgacacaaactcacacaacgatgacgcactactcaagaactacgggctgctctactgcttcaggaaggacatggacaaggtcgagacattcctgcgcatcgtgcagtgccgctctgtggagggcagctgtggcttctagctgcccgggtggcatccctgtgacccctccccagtgcctctcctggccctggatcagngcacagctgtctataaatagtgc

SEQ ID NO: 732155 - DNA, 1068 bp, Homo sapiens
  misc_feature (1045)..(1045): n is a, c, g, or t
gatcccaaggcccaactccccgaaccactcagggtcctgtggacagctcacctagctgcaatggctacaggtaagcgcccctaaaatccctttgggcacaatgtgtcctgaggggagaggcagcgacctgtagatgggacgggggcactaaccctcaggtttggggcttctgaatgtgagtatcgccatgtaagcccagtatttggccaatctcagaaagctcctggtccctggagggatggagagagaccagctcctggagcagggagagtgctggcctcttgctctccggctccctctgttgccctctggtttctccccaggctcccggacgtccctgctcctggcttttggcctgctctgcctgccctggcttcaagagggcagtgccttcccaaccattcccttatccaggctttttgacaacgctatgctccgcgcccatcgtctgcaccagctggcctttgacacctaccaggagtttgaagaagcctatatcccaaaggaacagaagtattcattcctgcagaacccccagacctccctctgtttctcagagtctattccgacaccctccaacagggaggaaacacaacagaaatccaacctagagctgctccgcatctccctgctgctcatccagtcgtggctggagcccgtgcagttcctcaggagtgtcttcgccaacagcctggtgtacggcgcctctgacagcaacgtctatgacctcctaaaggacctagaggaaggcatccaaacgctgatggggaggctggaagatggcagcccccggactgggcagatcttcaagcagacctacagcaagttcgacacaaactcacacaacgatgacgcactactcaagaactacgggctgctctactgcttcaggaaggacatggacaaggtcgagacattcctgcgcatcgtgcagtgccgctctgtggagggcagctgtggcttctagctgcccgggtggcatccctgtgacccctccccagtgcctctcctggccctgggggttcctggcggaagatgcatcagngcacagctgtctataaatagtgc

SEQ ID NO: 732156 - DNA, 1206 bp, Homo sapiens
gatcccaaggcccaactccccgaaccactcagggtcctgtggacagctcacctagctgcaatggctacaggtaagcgcccctaaaatccctttgggcacaatgtgtcctgaggggagaggcagcgacctgtagatgggacgggggcactaaccctcaggtttggggcttctgaatgtgagtatcgccatgtaagcccagtatttggccaatctcagaaagctcctggtccctggagggatggagagagaccagctcctggagcagggagagtgctggcctcttgctctccggctccctctgttgccctctggtttctccccaggctcccggacgtccctgctcctggcttttggcctgctctgcctgccctggcttcaagagggcagtgccttcccaaccattcccttatccaggctttttgacaacgctatgctccgcgcccatcgtctgcaccagctggcctttgacacctaccaggagttttgtaagctcttggggaatgggtgcgcatcaggggtggcaggaaggggtgactttcccccgctgggaaataagaggaggagactaaggagctcagggtttttcccgaagcgaaaatgcaggcagatgagcacacgctgagtgaggttcccagaaaagtaacaatgggagctggtctccagcgtagaccttggtgggcggtccttctcctaggaagaagcctatatcccaaaggaacagaagtattcattcctgcagaacccccagacctccctctgtttctcagagtctattccgacaccctccaacagggaggaaacacaacagaaatccaacctagagctgctccgcatctccctgctgctcatccagtcgtggctggagcccgtgcagttcctcaggagtgtcttcgccaacagcctggtgtacggcgcctctgacagcaacgtctatgacctcctaaaggacctagaggaaggcatccaaacgctgatggggaggctggaagatggcagcccccggactgggcagatcttcaagcagacctacagcaagttcgacacaaactcacacaacgatgacgcactactcaagaactacgggctgctctactgcttcaggaaggacatggacaaggtcgagacattcctgcgcatcgtgcagtgccgctcaagttgccactccagtgcccaccagccttgtcctaataaaattaagttgcatca

SEQ ID NO: 732157 - DNA, 876 bp, Homo sapiens
gatcccaaggcccaactccccgaaccactcagggtcctgtggacagctcacctagctgcaatggctacaggtaagcgcccctaaaatccctttgggcacaatgtgtcctgaggggagaggcagcgacctgtagatgggacgggggcactaaccctcaggtttggggcttctgaatgtgagtatcgccatgtaagcccagtatttggccaatctcagaaagctcctggtccctggagggatggagagagaccagctcctggagcagggagagtgctggcctcttgctctccggctccctctgttgccctctggtttctccccaggctcccggacgtccctgctcctggcttttggcctgctctgcctgccctggcttcaagagggcagtgccttcccaaccattcccttatccaggctttttgacaacgctatgctccgcgcccatcgtctgcaccagctggcctttgacacctaccaggagtttaacctagagctgctccgcatctccctgctgctcatccagtcgtggctggagcccgtgcagttcctcaggagtgtcttcgccaacagcctggtgtacggcgcctctgacagcaacgtctatgacctcctaaaggacctagaggaaggcatccaaacgctgatggggaggctggaagatggcagcccccggactgggcagatcttcaagcagacctacagcaagttcgacacaaactcacacaacgatgacgcactactcaagaactacgggctgctctactgcttcaggaaggacatggacaaggtcgagacattcctgcgcatcgtgcagtgccgctcaagttgccactccagtgcccaccagccttgtcctaataaaattaagttgcatca

SEQ ID NO: 732158 - DNA, 951 bp, Homo sapiens
gatcccaaggcccaactccccgaaccactcagggtcctgtggacagctcacctagctgcaatggctacaggtaagcgcccctaaaatccctttgggcacaatgtgtcctgaggggagaggcagcgacctgtagatgggacgggggcactaaccctcaggtttggggcttctgaatgtgagtatcgccatgtaagcccagtatttggccaatctcagaaagctcctggtccctggagggatggagagagaccagctcctggagcagggagagtgctggcctcttgctctccggctccctctgttgccctctggtttctccccaggctcccggacgtccctgctcctggcttttggcctgctctgcctgccctggcttcaagagggcagtgccttcccaaccattcccttatccaggctttttgacaacgctatgctccgcgcccatcgtctgcaccagctggcctttgacacctaccaggagtttaacccccagacctccctctgtttctcagagtctattccgacaccctccaacagggaggaaacacaacagaaatccaacctagagctgctccgcatctccctgctgctcatccagtcgtggctggagcccgtgcagttcctcaggagtgtcttcgccaacagcctggtgtacggcgcctctgacagcaacgtctatgacctcctaaaggacctagaggaaggcatccaaacgctgatggggaggctggaagatggcagcccccggactgggcagatcttcaagcagacctacagcaagttcgacacaaactcacacaacgatgacgcactactcaagaactacgggctgctctactgcttcaggaaggacatggacaaggtcgagacattcctgcgcatcgtgcagtgccgctcaagttgccactccagtgcccaccagccttgtcctaataaaattaagttgcatca

SEQ ID NO: 732159 - DNA, 977 bp, Homo sapiens
gatcccaaggcccaactccccgaaccactcagggtcctgtggacagctcacctagctgcaatggctacaggtaagcgcccctaaaatccctttgggcacaatgtgtcctgaggggagaggcagcgacctgtagatgggacgggggcactaaccctcaggtttggggcttctgaatgtgagtatcgccatgtaagcccagtatttggccaatctcagaaagctcctggtccctggagggatggagagagaccagctcctggagcagggagagtgctggcctcttgctctccggctccctctgttgccctctggtttctccccaggctcccggacgtccctgctcctggcttttggcctgctctgcctgccctggcttcaagagggcagtgccttcccaaccattcccttatccaggctttttgacaacgctatgctccgcgcccatcgtctgcaccagctggcctttgacacctaccaggagtttgaagaagcctatatcccaaaggaacagaagtattcattcctgcagaacccccagacctccctctgtttctcagagtctattccgacaccctccaacagggaggaaacacaacagaaatccaacctagagctgctccgcatctccctgctgctcatccagtcgtggctggagcccgtgcagttcctcaggagtgtcttcgccaacagcctggtgtctgggcagatcttcaagcagacctacagcaagttcgacacaaactcacacaacgatgacgcactactcaagaactacgggctgctctactgcttcaggaaggacatggacaaggtcgagacattcctgcgcatcgtgcagtgccgctctgtggagggcagctgtggcttctagctgcccgggtggcatccctgtgacccctccccagtgcctctcctggccctggaagttgccactccagtgcccaccagccttgtcctaataaaattaagttgcatca

SEQ ID NO: 732160 - DNA, 1002 bp, Homo sapiens
gatcccaaggcccaactccccgaaccactcagggtcctgtggacagctcacctagctgcaatggctacaggtaagcgcccctaaaatccctttgggcacaatgtgtcctgaggggagaggcagcgacctgtagatgggacgggggcactaaccctcaggtttggggcttctgaatgtgagtatcgccatgtaagcccagtatttggccaatctcagaaagctcctggtccctggagggatggagagagaccagctcctggagcagggagagtgctggcctcttgctctccggctccctctgttgccctctggtttctccccaggctcccggacgtccctgctcctggcttttggcctgctctgcctgccctggcttcaagagggcagtgccttcccaaccattcccttatccaggctttttgacaacgctatgctccgcgcccatcgtctgcaccagctggcctttgacacctaccaggagtttgaagaagcctatatcccaaaggaacagaagtattcattcctgcagaacccccagacctccctctgtttctcagagtctattccgacaccctccaacagggaggaaacacaacagaaatccaacctagagctgctccgcatctccctgctgctcatccagtcgtggctggagcccgtgcagttcctcaggagtgtcttcgccaacagcctggtgtctgggcagatcttcaagcagacctacagcaagttcgacacaaactcacacaacgatgacgcactactcaagaactacgggctgctctactgcttcaggaaggacatggacaaggtcgagacattcctgcgcatcgtgcagtgccgctctgtggagggcagctgtggcttctagctgcccgggtggcatccctgtgacccctccccagtgcctctcctggccctggaagttgccactccagtgcccaccagccttgtcctaataaaattaagttgcatcaaaaaaaaaaaaaaaaaaaaaaaaaa

SEQ ID NO: 732161 - DNA, 932 bp, Homo sapiens
gatcccaaggcccaactccccgaaccactcagggtcctgtggacagctcacctagctgcaatggctacaggtaagcgcccctaaaatccctttgggcacaatgtgtcctgaggggagaggcagcgacctgtagatgggacgggggcactaaccctcaggtttggggcttctgaatgtgagtatcgccatgtaagcccagtatttggccaatctcagaaagctcctggtccctggagggatggagagagaccagctcctggagcagggagagtgctggcctcttgctctccggctccctctgttgccctctggtttctccccaggctcccggacgtccctgctcctggcttttggcctgctctgcctgccctggcttcaagagggcagtgccttcccaaccattcccttatccaggctttttgacaacgctatgctccgcgcccatcgtctgcaccagctggcctttgacacctaccaggagtttaacccccagacctccctctgtttctcagagtctattccgacaccctccaacagggaggaaacacaacagaaatccaacctagagctgctccgcatctccctgctgctcatccagtcgtggctggagcccgtgcagttcctcaggagtgtcttcgccaacagcctggtgtctgggcagatcttcaagcagacctacagcaagttcgacacaaactcacacaacgatgacgcactactcaagaactacgggctgctctactgcttcaggaaggacatggacaaggtcgagacattcctgcgcatcgtgcagtgccgctctgtggagggcagctgtggcttctagctgcccgggtggcatccctgtgacccctccccagtgcctctcctggccctggaagttgccactccagtgcccaccagccttgtcctaataaaattaagttgcatca

SEQ ID NO: 732162 - DNA, 957 bp, Homo sapiens
gatcccaaggcccaactccccgaaccactcagggtcctgtggacagctcacctagctgcaatggctacaggtaagcgcccctaaaatccctttgggcacaatgtgtcctgaggggagaggcagcgacctgtagatgggacgggggcactaaccctcaggtttggggcttctgaatgtgagtatcgccatgtaagcccagtatttggccaatctcagaaagctcctggtccctggagggatggagagagaccagctcctggagcagggagagtgctggcctcttgctctccggctccctctgttgccctctggtttctccccaggctcccggacgtccctgctcctggcttttggcctgctctgcctgccctggcttcaagagggcagtgccttcccaaccattcccttatccaggctttttgacaacgctatgctccgcgcccatcgtctgcaccagctggcctttgacacctaccaggagtttaacccccagacctccctctgtttctcagagtctattccgacaccctccaacagggaggaaacacaacagaaatccaacctagagctgctccgcatctccctgctgctcatccagtcgtggctggagcccgtgcagttcctcaggagtgtcttcgccaacagcctggtgtctgggcagatcttcaagcagacctacagcaagttcgacacaaactcacacaacgatgacgcactactcaagaactacgggctgctctactgcttcaggaaggacatggacaaggtcgagacattcctgcgcatcgtgcagtgccgctctgtggagggcagctgtggcttctagctgcccgggtggcatccctgtgacccctccccagtgcctctcctggccctggaagttgccactccagtgcccaccagccttgtcctaataaaattaagttgcatcaaaaaaaaaaaaaaaaaaaaaaaaaa

SEQ ID NO: 732163 - DNA, 985 bp, Homo sapiens
gatcccaaggcccaactccccgaaccactcagggtcctgtggacagctcacctagctgcaatggctacaggtaagcgcccctaaaatccctttgggcacaatgtgtcctgaggggagaggcagcgacctgtagatgggacgggggcactaaccctcaggtttggggcttctgaatgtgagtatcgccatgtaagcccagtatttggccaatctcagaaagctcctggtccctggagggatggagagagaccagctcctggagcagggagagtgctggcctcttgctctccggctccctctgttgccctctggtttctccccaggctcccggacgtccctgctcctggcttttggcctgctctgcctgccctggcttcaagagggcagtgccttcccaaccattcccttatccaggctttttgacaacgctatgctccgcgcccatcgtctgcaccagctggcctttgacacctaccaggagtttcctccaacagggaggaaacacaacagaaatccaacctagagctgctccgcatctccctgctgctcatccagtcgtggctggagcccgtgcagttcctcaggagtgtcttcgccaacagcctggtgtacggcgcctctgacagcaacgtctatgacctcctaaaggacctagaggaaggcatccaaacgctgatggggaggctggaagatggcagcccccggactgggcagatcttcaagcagacctacagcaagttcgacacaaactcacacaacgatgacgcactactcaagaactacgggctgctctactgcttcaggaaggacatggacaaggtcgagacattcctgcgcatcgtgcagtgccgctctgtggagggcagctgtggcttctagctgcccgggtggcatccctgtgacccctccccagtgcctctcctggccctggaagttgccactccagtgcccaccagccttgtcctaataaaattaagttgcatca

SEQ ID NO: 732164 - DNA, 908 bp, Homo sapiens
gatcccaaggcccaactccccgaaccactcagggtcctgtggacagctcacctagctgcaatggctacaggtaagcgcccctaaaatccctttgggcacaatgtgtcctgaggggagaggcagcgacctgtagatgggacgggggcactaaccctcaggtttggggcttctgaatgtgagtatcgccatgtaagcccagtatttggccaatctcagaaagctcctggtccctggagggatggagagagaccagctcctggagcagggagagtgctggcctcttgctctccggctccctctgttgccctctggtttctccccaggctcccggacgtccctgctcctggcttttggcctgctctgcctgccctggcttcaagagggcagtgccttcccaaccattcccttatccaggctttttgacaacgctatgctccgcgcccatcgtctgcaccagctggcctttgacacctaccaggagtttcctccaacagggaggaaacacaacagaaatccaacctagagctgctccgcatctccctgctgctcatccagtcgtggctggagcccgtgcagttcctcaggagtgtcttcgccaacagcctggtgtacggcgcctctgacagcaacgtctatgacctcctaaaggacctagaggaaggcatccaaacgctgatggggaggctggaagatggcagcccccggactgggcagatcttcaagcagacctacagcaagttcgacacaaactcacacaacgatgacgcactactcaagaactacgggctgctctactgcttcaggaaggacatggacaaggtcgagacattcctgcgcatcgtgcagtgccgctcaagttgccactccagtgcccaccagccttgtcctaataaaattaagttgcatca

SEQ ID NO: 732165 - DNA, 1016 bp, Homo sapiens
gatcccaaggcccaactccccgaaccactcagggtcctgtggacagctcacctagctgcaatggctacaggtaagcgcccctaaaatccctttgggcacaatgtgtcctgaggggagaggcagcgacctgtagatgggacgggggcactaaccctcaggtttggggcttctgaatgtgagtatcgccatgtaagcccagtatttggccaatctcagaaagctcctggtccctggagggatggagagagaccagctcctggagcagggagagtgctggcctcttgctctccggctccctctgttgccctctggtttctccccaggctcccggacgtccctgctcctggcttttggcctgctctgcctgccctggcttcaagagggcagtgccttcccaaccattcccttatccaggctttttgacaacgctatgctccgcgcccatcgtctgcaccagctggcctttgacacctaccaggagtttcctccaacagggaggaaacacaacagaaatccaacctagagctgctccgcatctccctgctgctcatccagtcgtggctggagcccgtgcagttcctcaggagtgtcttcgccaacagcctggtgtacggcgcctctgacagcaacgtctatgacctcctaaaggacctagaggaaggcatccaaacgctgatggggaggctggaagatggcagcccccggactgggcagatcttcaagcagacctacagcaagttcgacacaaactcacacaacgatgacgcactactcaagaactacgggctgctctactgcttcaggaaggacatggacaaggtcgagacattcctgcgcatcgtgcagtgccgctctgtggagggcagctgtggcttctagctgcccgggtggcatccctgtgacccctccccagtgcctctcctggccctggaagttgccactccagtgcccaccagccttgtcctaataaaattaagttgcatcaaaattccagtgtgcctgtatgagtggtgtgt

SEQ ID NO: 732166 - DNA, 1228 bp, Homo sapiens
  misc_feature (1029)..(1029): n is a, c, g, or t
  misc_feature (1031)..(1031): n is a, c, g, or t
  misc_feature (1047)..(1047): n is a, c, g, or t
  misc_feature (1056)..(1056): n is a, c, g, or t
gatcccaaggcccaactccccgaaccactcagggtcctgtggacagctcacctagctgcaatggctacaggtaagcgcccctaaaatccctttgggcacaatgtgtcctgaggggagaggcagcgacctgtagatgggacgggggcactaaccctcaggtttggggcttctgaatgtgagtatcgccatgtaagcccagtatttggccaatctcagaaagctcctggtccctggagggatggagagagaccagctcctggagcagggagagtgctggcctcttgctctccggctccctctgttgccctctggtttctccccaggctcccggacgtccctgctcctggcttttggcctgctctgcctgccctggcttcaagagggcagtgccttcccaaccattcccttatccaggctttttgacaacgctatgctccgcgcccatcgtctgcaccagctggcctttgacacctaccaggagtttcctccaacagggaggaaacacaacagaaatccaacctagagctgctccgcatctccctgctgctcatccagtcgtggctggagcccgtgcagttcctcaggagtgtcttcgccaacagcctggtgtacggcgcctctgacagcaacgtctatgacctcctaaaggacctagaggaaggcatccaaacgctgatggggaggctggaagatggcagcccccggactgggcagatcttcaagcagacctacagcaagttcgacacaaactcacacaacgatgacgcactactcaagaactacgggctgctctactgcttcaggaaggacatggacaaggtcgagacattcctgcgcatcgtgcagtgccgctctgtggagggcagctgtggcttctagctgcccgggtggcatccctgtgacccctccccagtgcctctcctggccctggaagttgccactccagtgcccaccagccttgtcctaataaaattaagttgcatcaccaaaaaaaaaaaagagagtcgtattacaattacttggccgcgntntacaacgtcgtgactngggcctggnggtcccaacttaatcgcttggcagccatccccctttcgcagatgtcgtaaagcgaagagggccgcaacgatcgccttcccaacaatgcgcaactgcatggcacatgcaaatgtaccggtgaccttgggtcacatcggtaaattgttaaatagtccatttaccaggcgactgc

SEQ ID NO: 732167 - DNA, 1010 bp, Homo sapiens
gatcccaaggcccaactccccgaaccactcagggtcctgtggacagctcacctagctgcaatggctacaggtaagcgcccctaaaatccctttgggcacaatgtgtcctgaggggagaggcagcgacctgtagatgggacgggggcactaaccctcaggtttggggcttctgaatgtgagtatcgccatgtaagcccagtatttggccaatctcagaaagctcctggtccctggagggatggagagagaccagctcctggagcagggagagtgctggcctcttgctctccggctccctctgttgccctctggtttctccccaggctcccggacgtccctgctcctggcttttggcctgctctgcctgccctggcttcaagagggcagtgccttcccaaccattcccttatccaggctttttgacaacgctatgctccgcgcccatcgtctgcaccagctggcctttgacacctaccaggagtttcctccaacagggaggaaacacaacagaaatccaacctagagctgctccgcatctccctgctgctcatccagtcgtggctggagcccgtgcagttcctcaggagtgtcttcgccaacagcctggtgtacggcgcctctgacagcaacgtctatgacctcctaaaggacctagaggaaggcatccaaacgctgatggggaggctggaagatggcagcccccggactgggcagatcttcaagcagacctacagcaagttcgacacaaactcacacaacgatgacgcactactcaagaactacgggctgctctactgcttcaggaaggacatggacaaggtcgagacattcctgcgcatcgtgcagtgccgctctgtggagggcagctgtggcttctagctgcccgggtggcatccctgtgacccctccccagtgcctctcctggccctggaagttgccactccagtgcccaccagccttgtcctaataaaattaagttgcatcaaaaaaaaaaaaaaaaaaaaaaaaaa

SEQ ID NO: 732168 - DNA, 645 bp, Homo sapiens; identical to SEQ ID NO: 62061

SEQ ID NO: 732169 - DNA, 3880 bp, Homo sapiens
cgagacactgggaccacagcggcagctccgctgaaaactgcattcagccagtcctccggacttctggagcggggacagggcgcagggcatcagcagccaccagcaggacctgggaaatagggattcttctgcctccacttcaggttttagcagcttggtgctaaattgctgtctcaaaatgcagaggatctaatttgcagaggaaaacagccaaagaaggaagaggaggaaaaggaaaaaaaaaggggtatattgtggatgctctacttttcttggaaatgcaaaagattatgcatatttctgtcctcctttctcctgttttatggggactgatttttggtgtctcttctaacagcatacagataggggggctatttcctaggggcgccgatcaagaatacagtgcatttcgagtagggatggttcagttttccacttcggagttcagactgacaccccacatcgacaatttggaggtggcaaacagcttcgcagtcactaatgctttctgctcccagttttcgagaggagtctatgctatttttggattttatgacaagaagtctgtaaataccatcacatcattttgcggaacactccacgtctccttcatcactcccagcttcccaacagatggcacacatccatttgtcattcagatgagacccgacctcaaaggagctctccttagcttgattgaatactatcaatgggacaagtttgcatacctctatgacagtgacagaggcttatcaacactgcaagctgtgctggattctgctgctgaaaagaaatggcaagtgactgctatcaatgtgggaaacattaacaatgacaagaaagatgagatgtaccgatcactttttcaagatctggagttaaaaaaggaacggcgtgtaattctggactgtgaaagggataaagtaaacgacattgtagaccaggttattaccattggaaaacacgttaaagggtaccactacatcattgcaaatctgggatttactgatggagacctattaaaaatccagtttggaggtgcaaatgtctctggatttcagatagtggactatgatgattcgttggtatctaaatttatagaaagatggtcaacactggaagaaaaagaataccctggagctcacacaacaacaattaagtatacttctgctctgacctatgatgccgttcaagtgatgactgaagccttccgcaacctaaggaagcaaagaattgaaatctcccgaagggggaatgcaggagactgtctggcaaacccagcagtgccctggggacaaggtgtagaaatagaaagggccctcaaacaggttcaggttgaaggtctctcaggaaatataaagtttgaccagaatggaaaaagaataaactatacaattaacatcatggagctcaaaactaatgggccccggaagattggctactggagtgaagtggacaaaatggttgttacccttactgagctcccttctggaaatgacacctctgggcttgagaataagactgttgttgtcaccacaattttggaatctccgtatgttatgatgaagaaaaatcatgaaatgcttgaaggcaatgagcgctatgagggctactgtgttgacctggctgcagaaatcgccaaacattgtgggttcaagtacaagttgacaattgttggtgatggcaagtatggggccagggatgcagacacgaaaatttggaatgggatggttggagaacttgtatatgggaaagctgatattgcaattgctccattaactattacccttgtgagagaagaggtgattgacttctcaaagcccttcatgagcctcgggatatctatcatgatcaagaagcctcagaagtccaaaccaggagtgttttcctttcttgatcctttagcctatgagatctggatgtgcattgtttttgcctacattggggtcagtgtagttttattcctggtcagcagatttagcccctacgagtggcacactgaggagtttgaagatggaagagaaacacaaagtagtgaatcaactaatgaatttgggatttttaatagtctctggttttccttgggtgcctttatgcggcaaggatgcgatatttcgccaagatccctctctgggcgcattgttggaggtgtgtggtggttctttaccctgatcataatctcctcctacacggctaacttagctgccttcctgactgtagagaggatggtgtctcccatcgaaagtgctgaggatctttctaagcaaacagaaattgcttatggaacattagactctggctccactaaagagtttttcaggagatctaaaattgcagtgtttgataaaatgtggacctacatgcggagtgcggagccctctgtgtttgtgaggactacggccgaaggggtggctagagtgcggaagtccaaagggaaatatgcctacttgttggagtccacgatgaacgagtacattgagcaaaggaagccttgcgacaccatgaaagttggtggaaacctggattccaaaggctatggcatcgcaacacctaaaggatcctcattaggaaccccagtaaatcttgcagtattgaaactcagtgagcaaggcgtcttagacaagctgaaaaacaaatggtggtacgataaaggtgaatgtggagccaaggactctggaagtaaggaaaagaccagtgccctcagtctgagcaacgttgctggagtattctacatccttgtcgggggccttggtttggcaatgctggtggctttgattgagttctgttacaagtcaagggccgaggcgaaacgaatgaaggtggcaaagaatgcacagaatattaacccatcttcctcgcagaattcacagaattttgcaacttataaggaaggttacaacgtatatggcatcgaaagtgttaaaatttaggggatgaccttgaatgatgccatgaggaacaaggcaaggctgtcaattacaggaagtactggagaaaatggacgtgttatgactccagaatttcccaaagcagtgcatgctgtcccttacgtgagtcctggcatgggaatgaatgtcagtgtgactgatctctcgtgattgataagaaccttttgagtgccttacacaatggttttcttgtgtgtttattgtcaaagtggtgagaggcatccagtatcttgaagacttttctttcagccaagaattcttaaatatgtggagttcatcttgaattgtaaggaatgattaattaaaacacaacatctttttctactcgagttacagacaaagcgtggtggacatgcacagctaacatggaagtactataatttacctgaagtctttgtacagacaacaaacctgtttctgcagccactattgttagtctcttgattcataatgacttaagcacacttgacatcaactgcatcaagatgtgacatgttttataaaaaaaggaaaaaaaacatttaaaactaaaaaatatttttaggtattttcacaaacaaactggcttttaaataaatttgcttccatattggttgaataagacaaaaacaattaaactgagtgggaagtgaataaaaaaaggctttaggtatcgattccatatttttcaaagccaaatatgtaaatgctaaggaaagtaaacaaagaggagattccaatcttgtaatttaatattgttattaaaactttaatgtatcctattctttaacatttggtgttaatataaaattacttggcaatgcttgacatttgaaataaacatttttctattgttttattgcaagtggtccaattaattttgcttagctacagtttggtcataaatcaagtgagtttaaagacactaccaagttgttaggtgcccagagaaa

SEQ ID NO: 732170 - DNA, 993 bp, Homo sapiens
gaatctccgtatgttatgatgaagaaaaatcatgaaatgcttgaaggcaatgagcgctatgagggctactgtgttgacctggctgcagaaatcgccaaacattgtgggttcaagtacaagttgacaattgttggtgatggcaagtatggggccagggatgcagacacgaaaatttggaatgggatggttggagaacttgtatatgggaaagctgatattgcaattgctccattaactattacccttgtgagagaagaggtgattgacttctcaaagcccttcatgagcctcgggatatctatcatgatcaagaagcctcagaagtccaaaccaggagtgttttcctttcttgatcctttagcctatgagatctggatgtgcattgtttttgcctacattggggtcagtgtagttttattcctggtcagcagatttagcccctacgagtggcacactgaggagtttgaagatggaagagaaacacaaagtagtgaatcaactaatgaatttgggatttttaatagtctctggttttccttgggtgcctttatgcggcaaggatgcgatatttcgccaaggttggttactcacctgcttcaactttgtgcatttcaggtctcaagtggacattcatggtgtttatggattcaccctaaagaagttaccagctgccgacttcctgtccaagcagtttaagactcttgaaggacatcctcttagcttcggcataagtctgtgaaatatttgaacaatgttctttgaatgttgctcatctatttctctggtgaaattatacacaccatgaagaggctataaaatgcataaggttcctatcattccatgccttcttggaggggtaccgtgtttttgctgcatattctcattttacagtcatctgtgtgttgatccacagacctgtatatgggaaaatgggcaacattatttattaactgcaaagtaacaccttgttagataaaacttcgttggcacaca

SEQ ID NO: 732171 - DNA, 531 bp, Homo sapiens
acatcatgagtggataaacttttatgagtatttgtaaatttcttgaaattgctttcttatgggattcatgtcataaactatttgggcattacaattatgaaagtattccagaaatcagaagttttgacctgtgtgtatgttattaaatttagctactctgtactccttgcccaaaatgtttaatgatttccagtttcattaactagtagatacattgaaaaatataaaattaaatattcccctataagtcaatatttgcataatactgctaacttgtttttttattaggtcattcatttcactttacaaatccatttcatacttgttattagatccctctctgggcgcattgttggaggtgtgtggtggttctttaccctgatcataatctcctcctacacggctaacttagctgccttcctgactgtagagaggatggtgtctcccatcgaaagtgctgaggatctttctaagcaaacagaaattgcttatggaacattagactctggctccactaaagagtttttcagg

SEQ ID NO: 732172 - DNA, 369 bp, Homo sapiens; identical to SEQ ID NO: 62063

SEQ ID NO: 732173 - DNA, 692 bp, Homo sapiens; identical to SEQ ID NO: 62064

SEQ ID NO: 732174 - DNA, 7724 bp, Homo sapiens
  misc_feature (7233)..(7235): n is a, c, g, or t
  misc_feature (7294)..(7294): n is a, c, g, or t
  misc_feature (7308)..(7309): n is a, c, g, or t
  misc_feature (7485)..(7486): n is a, c, g, or t
  misc_feature (7546)..(7546): n is a, c, g, or t
gccgctgagcctgcgcccagtgccccgagccccgcgccgagccgagtccgcgccaagcagcagccgcccaccccggggcccggccgggggaccagcagcttccccacaggcaacgtgaggagagcctgtgcccagaagcaggatgagaagatggcaaacttcctattacctcggggcaccagcagcttccgcaggttcacacgggagtccctggcagccatcgagaagcgcatggcggagaagcaagcccgcggctcaaccaccttgcaggagagccgagaggggctgcccgaggaggaggctccccggccccagctggacctgcaggcctccaaaaagctgccagatctctatggcaatccaccccaagagctcatcggagagcccctggaggacctggaccccttctatagcacccaaaagactttcatcgtactgaataaaggcaagaccatcttccggttcagtgccaccaacgccttgtatgtcctcagtcccttccacccagttcggagagcggctgtgaagattctggttcactcgctcttcaacatgctcatcatgtgcaccatcctcaccaactgcgtgttcatggcccagcacgaccctccaccctggaccaagtatgtcgagtacaccttcaccgccatttacacctttgagtctctggtcaagattctggctcgagctttctgcctgcacgcgttcactttccttcgggacccatggaactggctggactttagtgtgattatcatggcatacacaactgaatttgtggacctgggcaatgtctcagccttacgcaccttccgagtcctccgggccctgaaaactatatcagtcatttcagggctgaagaccatcgtgggggccctgatccagtctgtgaagaagctggctgatgtgatggtcctcacagtcttctgcctcagcgtctttgccctcatcggcctgcagctcttcatgggcaacctaaggcacaagtgtgtgcgcaacttcacagcgctcaacggcaccaacggctccgtggaggccgacggcttggtctgggaatccctggacctttacctcagtgatccagaaaattacctgctcaagaacggcacctctgatgtgttactgtgtgggaacagctctgacgctgggacatgtccggagggctaccggtgcctaaaggcaggcgagaaccccgaccacggctacaccagcttcgattcctttgcctgggcctttcttgcactcttccgcctgatgacgcaggactgctgggagcgcctctatcagcagaccctcaggtccgcagggaagatctacatgatcttcttcatgcttgtcatcttcctggggtccttctacctggtgaacctgatcctggccgtggtcgcaatggcctatgaggagcaaaaccaagccaccatcgctgagaccgaggagaaggaaaagcgcttccaggaggccatggaaatgctcaagaaagaacacgaggccctcaccatcaggggtgtggataccgtgtcccgtagctccttggagatgtcccctttggccccagtaaacagccatgagagaagaagcaagaggagaaaacggatgtcttcaggaactgaggagtgtggggaggacaggctccccaagtctgactcagaagatggtcccagagcaatgaatcatctcagcctcacccgtggcctcagcaggacttctatgaagccacgttccagccgcgggagcattttcacctttcgcaggcgagacctgggttctgaagcagattttgcagatgatgaaaacagcacagcgcgggagagcgagagccaccacacatcactgctggtgccctggcccctgcgccggaccagtgcccagggacagcccagtcccggaacctcggctcctggccacgccctccatggcaaaaagaacagcactgtggactgcaatggggtggtctcattactgggggcaggcgacccagaggccacatccccaggaagccacctcctccgccctgtgatgctagagcacccgccagacacgaccacgccatcggaggagccaggcggcccccagatgctgacctcccaggctccgtgtgtagatggcttcgaggagccaggagcacggcagcgggccctcagcgcagtcagcgtcctcacaagcgcactggaagagttagaggagtctcgccacaagtgtccaccatgctggaaccgtctcgcccagcgctacctgatctgggagtgctgcccgctgtggatgtccatcaagcagggagtgaagttggtggtcatggacccgtttactgacctcaccatcactatgtgcatcgtactcaacacactcttcatggcgctggagcactacaacatgacaagtgaattcgaggagatgctgcaggtcggaaacctggtcttcacagggattttcacagcagagatgaccttcaagatcattgccctcgacccctactactacttccaacagggctggaacatcttcgacagcatcatcgtcatccttagcctcatggagctgggcctgtcccgcatgagcaacttgtcggtgctgcgctccttccgcctgctgcgggtcttcaagctggccaaatcatggcccaccctgaacacactcatcaagatcatcgggaactcagtgggggcactggggaacctgacactggtgctagccatcatcgtgttcatctttgctgtggtgggcatgcagctctttggcaagaactactcggagctgagggacagcgactcaggcctgctgcctcgctggcacatgatggacttctttcatgccttcctaatcatcttccgcatcctctgtggagagtggatcgagaccatgtgggactgcatggaggtgtcggggcagtcattatgcctgctggtcttcttgcttgttatggtcattggcaaccttgtggtcctgaatctcttcctggccttgctgctcagctccttcagtgcagacaacctcacagcccctgatgaggacagagagatgaacaacctccagctggccctggcccgcatccagaggggcctgcgctttgtcaagcggaccacctgggatttctgctgtggtctcctgcggcaccggcctcagaagcccgcagcccttgccgcccagggccagctgcccagctgcattgccaccccctactccccgccacccccagagacggagaaggtgcctcccacccgcaaggaaacacagtttgaggaaggcgagcaaccaggccagggcacccccggggatccagagcccgtgtgtgtgcccatcgctgtggccgagtcagacacagatgaccaagaagaggatgaggagaacagcctgggcacggaggaggagtccagcaagcagcaggaatcccagcctgtgtccggctggcccagaggccctccggattccaggacctggagccaggtgtcagcgactgcctcctctgaggccgaggccagtgcatctcaggccgactggcggcagcagtggaaagcggaaccccaggccccagggtgcggtgagaccccagaggacagttgctccgagggcagcacagcagacatgaccaacaccgctgagctcctggagcagatccctgacctcggccaggatgtcaaggacccagaggactgcttcactgaaggctgtgtccggcgctgtccctgctgtgcggtggacaccacacaggccccagggaaggtctggtggcggttgcgcaagacctgctaccacatcgtggagcacagctggttcgagacattcatcatcttcatgatcctactcagcagtggagcgctggccttcgaggacatctacctagaggagcggaagaccatcaaggttctgcttgagtatgccgacaagatgttcacatatgtcttcgtgctggagatgctgctcaagtgggtggcctacggcttcaagaagtacttcaccaatgcctggtgctggctcgacttcctcatcgtagacgtctctctggtcagcctggtggccaacaccctgggctttgccgagatgggccccatcaagtcactgcggacgctgcgtgcactccgtcctctgagagctctgtcacgatttgagggcatgagggtggtggtcaatgccctggtgggcgccatcccgtccatcatgaacgtcctcctcgtctgcctcatcttctggctcatcttcagcatcatgggcgtgaacctctttgcggggaagtttgggaggtgcatcaaccagacagagggagacttgcctttgaactacaccatcgtgaacaacaagagccagtgtgagtccttgaacttgaccggagaattgtactggaccaaggtgaaagtcaactttgacaacgtgggggccgggtacctggcccttctgcaggtggcaacatttaaaggctggatggacattatgtatgcagctgtggactccagggggtatgaagagcagcctcagtgggaatacaacctctacatgtacatctattttgtcattttcatcatctttgggtctttcttcaccctgaacctctttattggtgtcatcattgacaacttcaaccaacagaagaaaaagttagggggccaggacatcttcatgacagaggagcagaagaagtactacaatgccatgaagaagctgggctccaagaagccccagaagcccatcccacggcccctgaacaagtaccagggcttcatattcgacattgtgaccaagcaggcctttgacgtcaccatcatgtttctgatctgcttgaatatggtgaccatgatggtggagacagatgaccaaagtcctgagaaaatcaacatcttggccaagatcaacctgctctttgtggccatcttcacaggcgagtgtattgtcaagctggctgccctgcgccactactacttcaccaacagctggaatatcttcgacttcgtggttgtcatcctctccatcgtgggcactgtgctctcggacatcatccagaagtacttcttctccccgacgctcttccgagtcatccgcctggcccgaataggccgcatcctcagactgatccgaggggccaaggggatccgcacgctgctctttgccctcatgatgtccctgcctgccctcttcaacatcgggctgctgctcttcctcgtcatgttcatctactccatctttggcatggccaacttcgcttatgtcaagtgggaggctggcatcgacgacatgttcaacttccagaccttcgccaacagcatgctgtgcctcttccagatcaccacgtcggccggctgggatggcctcctcagccccatcctcaacactgggccgccctactgcgaccccactctgcccaacagcaatggctctcggggggactgcgggagcccagccgtgggcatcctcttcttcaccacctacatcatcatctccttcctcatcgtggtcaacatgtacattgccatcatcctggagaacttcagcgtggccacggaggagagcaccgagcccctgagtgaggacgacttcgatatgttctatgagatctgggagaaatttgacccagaggccactcagtttattgagtattcggtcctgtctgactttgccgacgccctgtctgagccactccgtatcgccaagcccaaccagataagcctcatcaacatggacctgcccatggtgagtggggaccgcatccattgcatggacattctctttgccttcaccaaaagggtcctgggggagtctggggagatggacgccctgaagatccagatggaggagaagttcatggcagccaacccatccaagatctcctacgagcccatcaccaccacactccggcgcaagcacgaagaggtgtcggccatggttatccagagagccttccgcaggcacctgctgcaacgctctttgaagcatgcctccttcctcttccgtcagcaggcgggcagcggcctctccgaagaggatgcccctgagcgagagggcctcatcgcctacgtgatgagtgagaacttctcccgaccccttggcccaccctccagctcctccatctcctccacttccttcccaccctcctatgacagtgtcactagagccaccagcgataacctccaggtgcgggggtctgactacagccacagtgaagatctcgccgacttccccccttctccggacagggaccgtgagtccatcgtgtgagcctcggcctggctggccaggacacactgaaaagcagcctttttcaccatggcaaacctaaatgcagtcagtcacaaaccagcctggggccttcctggctttgggagtaagaaatgggcctcggccccgcggatcaaccaggcagagttctgtggcgccgcgtggacagccggagcagttggcctgtgcttggaggcctcagatagacctgtgacctggtctggtcaggcaatgcccctgcggctctggaaagcaacttcatcccagctgctgaggcgaaatataaaactgagactgtatatgttgtgaatgggctttcataaatttattatatttgatatttttttacttgagcaaagaactaaggatttttccatggacatgggcagcaattcacgctgtctcttcttaaccctgaacaagagtgtctatggagcagccggaagtctgttctcaaagcagaagtggaatccagtgtggctcccacaggtcttcactgcccaggggtcgaatggggtccccctcccacttgacctgagatgctgggagggctgaacccccactcacacaagcacacacacacacagtcctcacacacggaggccagacacaggccgtgggacccaggctcccagcctaagggagacaggcctttccctgccggccccccaaggatggggttcttgtccacggggctcactctggccccctattgtctcccaaggtcccattttcccccttgtgttttcacgcaggtcatattgtcagtcctacaaaaataaaaggcttccagaggagagtggcctggggtcccagggctgggccctaggcactgatagttgccttttcttcccctcctgtaagagtattaacaaaaccaaaggacacaagggtgcaagccccattcacggcctggcatgcagcttgtccttgctcctggaacctggcaggccctgccagccagccaatggaagagaggggctgagccatgggggtttggggctaagaagttcaccagccctgagccatggnnnccctcagcctgcctgaagagaggaaactggcgatctcccagggctctctggaccatacncggaggagttttcnngtgtggtctccagctcctctccagacacagagacatgggagtggggagcggacgttggccctggccctgtgcagggaaagggatggtcaggcccagttctcgtgccccttagaggggaatgaaccatggcacctttgagagagggggcactgtggtcaggcccagcctctctggcnnagtcccgggatcctgatggcacccacacagaggacctctttggggcaagatccaggtggntcccataggtcttgtgaaaaggctttttcagggaaaaatattttactagtccaatcacccccaggacctcttcagctgctgacaatcctatttagcatatgcaaatcttttaacatagagaactgtcaccctgaggtaacagggtcaactggcgaagagcaggccagggggcttggct

SEQ ID NO: 732175 - DNA, 1381 bp, Homo sapiens
  misc_feature (888)..(888): n is a, c, g, or t
gccgctgagcctgcgcccagtgccccgagccccgcgccgagccgagtccgcgccaagcagcagccgcccaccccggggcccggccgggggaccagcagcttccccacaggcaacgtgaggagagcctgtgcccagaagcaggatgagaagatggcaaacttcctattacctcggggcaccagcagcttccgcaggttcacacgggagtccctggcagccatcgagaagcgcatggcggagaagcaagcccgcggctcaaccaccttgcaggagagccgagaggggctgcccgaggaggaggctccccggccccagctggacctgcaggcctccaaaaagctgccagatctctatggcaatccaccccaagagctcatcggagagcccctggaggacctggaccccttctatagcacccaaaagactttcatcgtactgaataaaggcaagaccatcttccggttcagtgccaccaacgccttgtatgtcctcagtcccttccacccagttcggagagcggctgtgaagattctggttcactcatatcctttgcagttaatacctgctgagtaccccctgggggcccacgctggggatgtgcacgtgctgcccccgacccacctccattctagtttaggagtgagagtagcgctgattccctgctggtcctaagacaaatgcatggtcatgacctgggagctggttggaaatgaagaacctctgaccctcctccagacctgccaagtcagcacctgcattttcatttgatccccaggggattcttgggcacatgaaagtttgagaaaccctcttctgattcttcagaacattctagaagctaagctactgaggatcccagaagaaatgacgtctgtcgggctctgatantggtccaaatattccgtgccccgacagacgtcccttgggtccggcgtactccagagcatagcaggaacctgctaggaggtcatcagaagctggtccaggaacaacatttcccaataaaggaggcgtaggtcatcgcaaatgcacgatgcagacacagcccggggcagcagaacggggcggaaaacaagttcggacaggccatggtcaatacgagtctgagccaagtgcttagcagaaagtgggagattggcgggtcccaaatagaagggagttgagtgggaaaccgtcacttcattgctcgaacaaaaggagcaacggactaacgaaggattagtcgacagatcacgggcgaggtgacaacacggtccagtagatgaacacagctagctatctcacaacacatcgacttgaacagactactatcaagtatatacaactacacgtacacatgtcgtctcacagctgttcttacctataccataccaccaacgag

SEQ ID NO: 732176 - DNA, 538 bp, Homo sapiens
tcttgagacttcacttcagcttcactgacttcttgactctcctcttgagtaaaaggactcagccaactatgaagttttttgtctttgctttagtcttggctctcatgatttccatgattagcgctgattcacatgaaaagagacatcatgggtatagaagaaaattccatgaaaagcatcattcacatcgagaatttccattttatggggactatggatcaaattatctatatgacaattgatatccttagtaatcatggggcatgattatagaggtttgactggcaaattcactttttactcatttattctcattcatcataccgcatcacactaccactgctttttgaagaattatcataaggcaatggagaataaaagaaagaccatgatttagtgaattctgtgtttcatgatacttcccttcctaattatcatttgattagatacttgcaatttaaactgttaagctgttttcactgctgtttctgagtaatagaaattcattcctctccaaaagcaataaatttctagcaca

SEQ ID NO: 732177 - DNA, 427 bp, Homo sapiens; identical to SEQ ID NO: 448076

SEQ ID NO: 732178 - DNA, 811 bp, Homo sapiens
ggactgctcttccagaggcaagaccaaccaagatgagtgccctgggagctgtcattgccctcctgctctggggacagctttttgcagtggactcaggcaatgatgtcacggatatcgcagatgacggctgcccgaagccccccgagattgcacatggctatgtggagcactcggttcgctaccagtgtaagaactactacaaactgcgcacagaaggagatgagtgcctttgccgttcacgacctggaggaggacacctggtatgcgactgggatcttaagctttgataagagctgtgctgtggctgagtatggtgtgtatgtgaaggtgacttccatccaggactgggttcagaagaccatagctgagaactaatgcaaggctggccggaagcccttgcctgaaagcaagatttcagcctggaagagggcaaagtggacgggagtggacaggagtggatgcgataagatgtggtttgaagctgatgggtgccagccctgcattgctgagtcaatcaataaagagctttcttttgacccataaaaaaaaaaccacaacaaaaacttttggcccccttgggccccggaaaagtttcaaaacattcgttggggcggggcgcaaggggaacgggaaccgggcaaagcggtccaaggaaacccgtgcgccagagaaaagagcggagagatttcccaccatgtaaaaaaagcccggggggaacaccggcgcgttctggaacacactccgagagggccctcagaggcacaaaacgggacgcatccagagggtgccagaggaaaccgcaataaaaccg

SEQ ID NO: 732179 - DNA, 798 bp, Homo sapiens
  misc_feature (714)..(714): n is a, c, g, or t
  misc_feature (724)..(724): n is a, c, g, or t
  misc_feature (727)..(727): n is a, c, g, or t
  misc_feature (738)..(738): n is a, c, g, or t
  misc_feature (743)..(743): n is a, c, g, or t
  misc_feature (749)..(750): n is a, c, g, or t
  misc_feature (752)..(752): n is a, c, g, or t
  misc_feature (767)..(767): n is a, c, g, or t
ggactgctcttccagaggcaagaccaaccaagatgagtgccctgggagctgtcattgccctcctgctctggggacagctttttgcagtggactcaggcaatgatgtcacggatatcgcagatgacggctgcccgaagccccccgagattgcacatggctatgtggagcactcggttcgctaccagtgtaagaactactacaaactgcgcacagaaggagatgatgaacacaccttctgtgctggcatgtctaagtaccaagaagacacctgctatggcgatgcgggcagtgcctttgccgttcacgacctggaggctgagtatggtgtgtatgtgaaggtgacttccatccaggactgggttcagaagaccatagctgagaactaatgcaaggctggccggaagcccttgcctgaaagcaagatttcagcctggaagagggcaaagtggacgggagtggacaggagtggatgcgataagatgtggtttgaagctgatgggtgccagccctgcattgctgagtcaatcaataaagagctttcttttgacccaaaaaaaaaaaaaaaaaaaaaaacaaaaaacccttttgggcggccttgggccctggaaaagtttttaaaacccttcggttggggcgcgcggcccccttgggttcggtgaacatgggccaaagcgcggtccccaggaaacaccgggcgcacgaccagggccgggnattcctcccnatnaaaaacgcccnggggncacacnnangttctggaaaaatcncgaaggagtccggggccacacgcggaccagc

SEQ ID NO: 732180 - DNA, 674 bp, Homo sapiens
  misc_feature (590)..(590): n is a, c, g, or t
  misc_feature (600)..(600): n is a, c, g, or t
  misc_feature (603)..(603): n is a, c, g, or t
  misc_feature (614)..(614): n is a, c, g, or t
  misc_feature (619)..(619): n is a, c, g, or t
  misc_feature (625)..(626): n is a, c, g, or t
  misc_feature (628)..(628): n is a, c, g, or t
  misc_feature (643)..(643): n is a, c, g, or t
ggactgctcttccagaggcaagaccaaccaagatgagtgccctgggagctgtcattgccctcctgctctggggacagctttttgcagtggactcaggcaatgatgtcacggatatcgcagatgacggctgcccgaagccccccgagattgcacatctgagtatggtgtgtatgtgaaggtgacttccatccaggactgggttcagaagaccatagctgagaactaatgcaaggctggccggaagcccttgcctgaaagcaagatttcagcctggaagagggcaaagtggacgggagtggacaggagtggatgcgataagatgtggtttgaagctgatgggtgccagccctgcattgctgagtcaatcaataaagagctttcttttgacccaaaaaaaaaaggaacaaaaaacaaaaaaaaaacctttttggggccgcgtgggccccttggaagaaacttttttcataaaaaccacctttcgtttgtgtagcgccgggggccccatagagtgatataggtcgaccacgtggtcaacacagatggtgttccctaaggagaaactgggggacaagtacacaatgcgcctgggnattcctcccnatnaaaaacgcccnggggncacacnnangttctggaaaaatcncgaaggagtccggggccacacgcggaccagc

SEQ ID NO: 732181 - DNA, 513 bp, Homo sapiens
gaattcttcagagatgtaagaataggatactatcagagaacaagatagaccttggaatttaaaaacaaaaatgggaaaacaaattcaataaatggatgataaagtcaaggaaatctttcaaaaagcgagtgtgtgtgtatgcatgtgtgtgtgtgcgtgtgtgtgtgtgtgtacatgcctgtgtgtgtggatgcatgcatgtgctgtgaagcagggagaccagctttccgctccttcttgttttctctctgcagtgacctgggagctgtcatttccctcctgctctggggacgacagctttttgcactgtactcaggcaatgatgtcacggatatttcaggtcagtctttgagttgggtaggagcatgcatccctggcactgccacatcccactctgactctctcgggtctgcattctttctttgagaacacacagttccccattcttatcctgacctctgggctttcaggactgccaagaacattggggatcctgccagaaatgaggggagc

SEQ ID NO: 732182 - DNA, 1460 bp, Homo sapiens
gaattcttcagagatgtaagaataggatactatcagagaacaagatagaccttggaatttaaaaacaaaaatgggaaaacaaattcaataaatggatgataaagtcaaggaaatctttcaaaaagcgagtgtgtgtgtatgcatgtgtgtgtgtgcgtgtgtgtgtgtgtgtacatgcctgtgtgtgtggatgcatgcatgtgctgtgaagcagggagaccagctttccgctccttcttgttttctctctgcagtgacctgggagctgtcatttccctcctgctctggggacgacagctttttgcactgtactcaggcaatgatgtcacggatatttcagatgaccgcttcccgaagccccctgagattgcaaatggctatgtggagcacttgtttcgctaccagtgtaagaactactacagactgcgcacagaaggagatggagtatacaccttaaatgataagaagcagtggataaataaggctgttggagataaacttcctgaatgtgaagcagtatgtgggaagcccaagaatccggcaaacccagtgcagcggatcctgggtggacacctggatgccaaaggcagctttccctggcaggctaagatggtttcccaccataatctcaccacaggggccacgctgatcaatgaacaatggctgctgaccacggctaaaaatctcttcctgaaccattcagaaaatgcaacagcgaaagacattgcccctactttaacactctatgtggggaaaaagcagcttgtagagattgagaaggtggttctacaccctaactaccaccaggtagatattgggctcatcaaactcaaacagaaggtgcttgttaatgagagagtgatgcccatctgcctaccttcaaagaattatgcagaagtagggcgtgtgggttacgtgtctggctggggacaaagtgacaactttaaacttactgaccatctgaagtatgtcatgctgcctgtggctgaccaatacgattgcataacgcattatgaaggcagcacatgccccaaatggaaggcaccgaagagccctgtaggggtgcagcccatactgaacgaacacaccttctgtgtcggcatgtctaagtaccaggaagacacctgctatggcgatgcgggcagtgcctttgccgttcacgacctggaggaggacacctggtacgcggctgggatcctaagctttgataagagctgtgctgtggctgagtatggtgtgtatgtgaaggtgacttccatccagcactgggttcagaagaccatagctgagaactaatgcaaggctggccggaagcccttgcctgaaagcaagatttcagcctggaagagggcaaagtggacgggagtggacaggagtggatgcgataagatgtggtttgaagctgatgggtgccagccctgcattgctgagtcaatcaataaagagctttcttttgaccc

SEQ ID NO: 732183 - DNA, 2135 bp, Homo sapiens
  misc_feature (2039)..(2039): n is a, c, g, or t
ggactgctcttccagaggcaagaccaaccaagatgagtgccctgggagctgtcattgccctcctgctctggggacagctttttgcagtggactcaggcaatgatgtcacggatatcgcagatgacggctgcccgaagccccccgagattgcacatggctatgtggagcactcggttcgctaccagtgtaagaactactacaaactgcgcacagaaggagatgagatggtaagatgtggacaactgtctccatgccctacatacaacccccttctctgacatttccatgatgggtggtgctgaggtgattcgccagaaagttcgttgctctccttggagccaggagatttagattctaataagcgttttgtcgccagtagccatggccctttgggcagactaacttttgtcagcctcaagttttctgttttgttaaggggaggcgatgccatgcagcctacctcatgtaaatctcagagtcagatttacatctccagcagatgtgggaaaagaaggaatgctgatgatgatgtcaccctcacctagtgagtcttgctgtcctggcactgctctaagggctttatacttatttgctcacttagtcctcacagtatccctctgaacagagtttattgttttcactttgctgataaggaaactgaggcacagacaggttgagtatcttgcccaaattcaggcagcctgtaagaggcagagtcaggatttgaaccctgagccctccctgtactgcttggctgtgaccgccatgaccacagtgtgttctgctgggcttaactggcatccaggcacttggcttccagcacagcactctttcccttcctccttctcatatactctctccttttccccttcctttttgtccccttttcctcttccttttagttcttctctttaaatgccttctcactctgcacggggtctagacttgacttctcctttggctcacttcttgccttttgtttcaggagtgtacaccttaaacaatgggaagcagtggataaataaggctgttggagataaacttcctgaatgtgaagcagtatgtgggaagcccaagaatccggcaaacccagtgcagcggatcctgggtggacacctggatgccaaaggcagctttccctggcaggctaagatggtttcccaccataatctcaccacaggtgccacgctgatcaatgaacaatggctgctgaccacggctaaaaatctcttcctgaaccattcagaaaatgcaacagcgaaagacattgcccctactttaacactctatgtggggaaaaagcagcttgtagagattgagaaggttgttctacaccctaactactcccaggtagatattgggctcatcaaactcaaacagaaggtgtctgttaatgagagagtgatgcccatctgcctaccttcaaaggattatgcagaagtagggcgtgtgggttatgtttctggctgggggcgaaatgccaattttaaatttactgaccatctgaagtatgtcatgctgcctgtggctgaccaagaccaatgcataaggcattatgaaggcagcacagtccccgaaaagaagacaccgaagagccctgtaggggtgcagcccatactgaatgaacacaccttctgtgctggcatgtctaagtaccaagaagacacctgctatggcgatgcgggcagtgcctttgccgttcacgacctggaggaggacacctggtatgcgactgggatcttaagctttgataagagctgtgctgtggctgagtatggtgtgtatgtgaaggtgacttccatccaggactgggttcagaagaccatagctgagaactaatgcaaggctggccggaagcccttgcctgaaagcaagatttcagcctggaagagggcaaagtggacgggagtggacaggagtggatgcgataagatgtggtttgaagctgatgggtgccagccctgcattgctgagtcaatcaataaagagctttcttttgacccaaaaaaaaaaaaaaaaaaaaaaaattttggggcgcntgggccgaaaatttttaaacccttttggggcggcggcctgtttgtgaccgggccaaggggtcccagagaaccggcgaagtggcgtggttcccccaa

SEQ ID NO: 732184 - DNA, 2198 bp, Homo sapiens
  misc_feature (2198)..(2198): n is a, c, g, or t
ggactgctcttccagaggcaagaccaaccaagatgagtgccctgggagctgtcattgccctcctgctctggggacagctttttgcagtggactcaggcaatgatgtcacggatatcgcagatgacggctgcccgaagccccccgagattgcacatggctatgtggagcactcggttcgctaccagtgtaagaactactacaaactgcgcacagaaggagatgagatggtaagatgtggacaactgtctccatgccctacatacaacccccttctctgacatttccatgatgggtggtgctgaggtgattcgccagaaagttcgttgctctccttggagccaggagatttagattctaataagcgttttgtcgccagtagccatggccctttgggcagactaacttttgtcagcctcaagttttctgttttgttaaggggaggcgatgccatgcagcctacctcatgtaaatctcagagtcagatttacatctccagcagatgtgggaaaagaaggaatgctgatgatgatgtcaccctcacctagtgagtcttgctgtcctggcactgctctaagggctttatacttatttgctcacttagtcctcacagtatccctctgaacagagtttattgttttcactttgctgataaggaaactgaggcacagacaggttgagtatcttgcccaaattcaggcagcctgtaagaggcagagtcaggatttgaaccctgagccctccctgtactgcttggctgtgaccgccatgaccacagtgtgttctgctgggcttaactggcatccaggcacttggcttccagcacagcactctttcccttcctccttctcatatactctctccttttccccttcctttttgtccccttttcctcttccttttagttcttctctttaaatgccttctcactctgcacggggtctagacttgacttctcctttggctcacttcttgccttttgtttcaggagtgtacaccttaaacaatgggaagcagtggataaataaggctgttggagataaacttcctgaatgtgaagcagtatgtgggaagcccaagaatccggcaaacccagtgcagcggatcctgggtggacacctggatgccaaaggcagctttccctggcaggctaagatggtttcccaccataatctcaccacaggtgccacgctgatcaatgaacaatggctgctgaccacggctaaaaatctcttcctgaaccattcagaaaatgcaacagcgaaagacattgcccctactttaacactctatgtggggaaaaagcagcttgtagagattgagaaggttgttctacaccctaactactcccaggtagatattgggctcatcaaactcaaacagaaggtgtctgttaatgagagagtgatgcccatctgcctaccttcaaaggattatgcagaagtagggcgtgtgggttatgtttctggctgggggcgaaatgccaattttaaatttactgaccatctgaagtatgtcatgctgcctgtggctgaccaagaccaatgcataaggcattatgaaggcagcacagtccccgaaaagaagacaccgaagagccctgtaggggtgcagcccatactgaatgaacacaccttctgtgctggcatgtctaagtaccaagaagacacctgctatggcgatgcgggcagtgcctttgccgttcacgacctggaggaggacacctggtatgcgactgggatcttaagctttgataagagctgtgctgtggctgagtatggtgtgtatgtgaaggtgacttccatccaggactgggttcagaagaccatagctgagaactaatgcaaggctggccggaagcccttgcctgaaagcaagatttcagcctggaagagggcaaagtggacgggagtggacaggagtggatgcgataagatgtggtttgaagctgatgggtgccagccctgcattgctgagtcaatcaataaagagctttcttttgacccaaaaaaaaaaaaaaaaaaaaaaaattttggtggggggattgggcccttgaaaagggttttgaaaacattctgggtgggagcccgggggccaagatgggataggtggaccatgggacaaaaggggttcccaaggaaaaccggggaccaagaaacaaagggcgagggatttctccacaagttaaaaaaggcccggan

SEQ ID NO: 732185 - DNA, 2162 bp, Homo sapiens
  misc_feature (2066)..(2066): n is a, c, g, or t
ggactgctcttccagaggcaagaccaaccaagatgagtgccctgggagctgtcattgccctcctgctctggggacagctttttgcagtggactcaggcaatgatgtcacggatatcgcagatgacggctgcccgaagccccccgagattgcacatggctatgtggagcactcggttcgctaccagtgtaagaactactacaaactgcgcacagaaggagatgagatggtaagatgtggacaactgtctccatgccctacatacaacccccttctctgacatttccatgatgggtggtgctgaggtgattcgccagaaagttcgttgctctccttggagccaggagatttagattctaataagcgttttgtcgccagtagccatggccctttgggcagactaacttttgtcagcctcaagttttctgttttgttaaggggaggcgatgccatgcagcctacctcatgtaaatctcagagtcagatttacatctccagcagatgtgggaaaagaaggaatgctgatgatgatgtcaccctcacctagtgagtcttgctgtcctggcactgctctaagggctttatacttatttgctcacttagtcctcacagtatccctctgaacagagtttattgttttcactttgctgataaggaaactgaggcacagacaggttgagtatcttgcccaaattcaggcagcctgtaagaggcagagtcaggatttgaaccctgagccctccctgtactgcttggctgtgaccgccatgaccacagtgtgttctgctgggcttaactggcatccaggcacttggcttccagcacagcactctttcccttcctccttctcatatactctctccttttccccttcctttttgtccccttttcctcttccttttagttcttctctttaaatgccttctcactctgcacggggtctagacttgacttctcctttggctcacttcttgccttttgtttcaggagtgtacaccttaaacaatgggaagcagtggataaataaggctgttggagataaacttcctgaatgtgaagcagtatgtgggaagcccaagaatccggcaaacccagtgcagcggatcctgggtggacacctggatgccaaaggcagctttccctggcaggctaagatggtttcccaccataatctcaccacaggtgccacgctgatcaatgaacaatggctgctgaccacggctaaaaatctcttcctgaaccattcagaaaatgcaacagcgaaagacattgcccctactttaacactctatgtggggaaaaagcagcttgtagagattgagaaggttgttctacaccctaactactcccaggtagatattgggctcatcaaactcaaacagaaggtgtctgttaatgagagagtgatgcccatctgcctaccttcaaaggattatgcagaagtagggcgtgtgggttatgtttctggctgggggcgaaatgccaattttaaatttactgaccatctgaagtatgtcatgctgcctgtggctgaccaagaccaatgcataaggcattatgaaggcagcacagtccccgaaaagaagacaccgaagagccctgtaggggtgcagcccatactgaatgaacacaccttctgtgctggcatgtctaagtaccaagaagacacctgctatggcgatgcgggcagtgcctttgccgttcacgacctggaggaggacacctggtatgcgactgggatcttaagctttgataagagctgtgctgtggctgagtatggtgtgtatgtgaaggtgacttccatccaggactgggttcagaagaccatagctgagaactaatgcaaggctggccggaagcccttgcctgaaagcaagatttcagcctggaagagggcaaagtggacgggagtggacaggagtggatgcgataagatgtggtttgaagctgatgggtgccagccctgcattgctgagtcaatcaataaagagctttcttttgacccaaaaaaaaaaaaaaaaaaaaaaacaaaaaaaaaaaaaaaaaaaaaaaaaaattttggggcgcntgggccgaaaatttttaaacccttttggggcggcggcctgtttgtgaccgggccaaggggtcccagagaaccggcgaagtggcgtggttcccccaa

SEQ ID NO: 732186 - DNA, 2225 bp, Homo sapiens
  misc_feature (2225)..(2225): n is a, c, g, or t
ggactgctcttccagaggcaagaccaaccaagatgagtgccctgggagctgtcattgccctcctgctctggggacagctttttgcagtggactcaggcaatgatgtcacggatatcgcagatgacggctgcccgaagccccccgagattgcacatggctatgtggagcactcggttcgctaccagtgtaagaactactacaaactgcgcacagaaggagatgagatggtaagatgtggacaactgtctccatgccctacatacaacccccttctctgacatttccatgatgggtggtgctgaggtgattcgccagaaagttcgttgctctccttggagccaggagatttagattctaataagcgttttgtcgccagtagccatggccctttgggcagactaacttttgtcagcctcaagttttctgttttgttaaggggaggcgatgccatgcagcctacctcatgtaaatctcagagtcagatttacatctccagcagatgtgggaaaagaaggaatgctgatgatgatgtcaccctcacctagtgagtcttgctgtcctggcactgctctaagggctttatacttatttgctcacttagtcctcacagtatccctctgaacagagtttattgttttcactttgctgataaggaaactgaggcacagacaggttgagtatcttgcccaaattcaggcagcctgtaagaggcagagtcaggatttgaaccctgagccctccctgtactgcttggctgtgaccgccatgaccacagtgtgttctgctgggcttaactggcatccaggcacttggcttccagcacagcactctttcccttcctccttctcatatactctctccttttccccttcctttttgtccccttttcctcttccttttagttcttctctttaaatgccttctcactctgcacggggtctagacttgacttctcctttggctcacttcttgccttttgtttcaggagtgtacaccttaaacaatgggaagcagtggataaataaggctgttggagataaacttcctgaatgtgaagcagtatgtgggaagcccaagaatccggcaaacccagtgcagcggatcctgggtggacacctggatgccaaaggcagctttccctggcaggctaagatggtttcccaccataatctcaccacaggtgccacgctgatcaatgaacaatggctgctgaccacggctaaaaatctcttcctgaaccattcagaaaatgcaacagcgaaagacattgcccctactttaacactctatgtggggaaaaagcagcttgtagagattgagaaggttgttctacaccctaactactcccaggtagatattgggctcatcaaactcaaacagaaggtgtctgttaatgagagagtgatgcccatctgcctaccttcaaaggattatgcagaagtagggcgtgtgggttatgtttctggctgggggcgaaatgccaattttaaatttactgaccatctgaagtatgtcatgctgcctgtggctgaccaagaccaatgcataaggcattatgaaggcagcacagtccccgaaaagaagacaccgaagagccctgtaggggtgcagcccatactgaatgaacacaccttctgtgctggcatgtctaagtaccaagaagacacctgctatggcgatgcgggcagtgcctttgccgttcacgacctggaggaggacacctggtatgcgactgggatcttaagctttgataagagctgtgctgtggctgagtatggtgtgtatgtgaaggtgacttccatccaggactgggttcagaagaccatagctgagaactaatgcaaggctggccggaagcccttgcctgaaagcaagatttcagcctggaagagggcaaagtggacgggagtggacaggagtggatgcgataagatgtggtttgaagctgatgggtgccagccctgcattgctgagtcaatcaataaagagctttcttttgacccaaaaaaaaaaaaaaaaaaaaaaacaaaaaaaaaaaaaaaaaaaaaaaaaaattttggtggggggattgggcccttgaaaagggttttgaaaacattctgggtgggagcccgggggccaagatgggataggtggaccatgggacaaaaggggttcccaaggaaaaccggggaccaagaaacaaagggcgagggatttctccacaagttaaaaaaggcccggan

SEQ ID NO: 732187 - DNA, 2251 bp, Homo sapiens
  misc_feature (2167)..(2167): n is a, c, g, or t
  misc_feature (2177)..(2177): n is a, c, g, or t
  misc_feature (2180)..(2180): n is a, c, g, or t
  misc_feature (2191)..(2191): n is a, c, g, or t
  misc_feature (2196)..(2196): n is a, c, g, or t
  misc_feature (2202)..(2203): n is a, c, g, or t
  misc_feature (2205)..(2205): n is a, c, g, or t
  misc_feature (2220)..(2220): n is a, c, g, or t
ggactgctcttccagaggcaagaccaaccaagatgagtgccctgggagctgtcattgccctcctgctctggggacagctttttgcagtggactcaggcaatgatgtcacggatatcgcagatgacggctgcccgaagccccccgagattgcacatggctatgtggagcactcggttcgctaccagtgtaagaactactacaaactgcgcacagaaggagatgagatggtaagatgtggacaactgtctccatgccctacatacaacccccttctctgacatttccatgatgggtggtgctgaggtgattcgccagaaagttcgttgctctccttggagccaggagatttagattctaataagcgttttgtcgccagtagccatggccctttgggcagactaacttttgtcagcctcaagttttctgttttgttaaggggaggcgatgccatgcagcctacctcatgtaaatctcagagtcagatttacatctccagcagatgtgggaaaagaaggaatgctgatgatgatgtcaccctcacctagtgagtcttgctgtcctggcactgctctaagggctttatacttatttgctcacttagtcctcacagtatccctctgaacagagtttattgttttcactttgctgataaggaaactgaggcacagacaggttgagtatcttgcccaaattcaggcagcctgtaagaggcagagtcaggatttgaaccctgagccctccctgtactgcttggctgtgaccgccatgaccacagtgtgttctgctgggcttaactggcatccaggcacttggcttccagcacagcactctttcccttcctccttctcatatactctctccttttccccttcctttttgtccccttttcctcttccttttagttcttctctttaaatgccttctcactctgcacggggtctagacttgacttctcctttggctcacttcttgccttttgtttcaggagtgtacaccttaaacaatgggaagcagtggataaataaggctgttggagataaacttcctgaatgtgaagcagtatgtgggaagcccaagaatccggcaaacccagtgcagcggatcctgggtggacacctggatgccaaaggcagctttccctggcaggctaagatggtttcccaccataatctcaccacaggtgccacgctgatcaatgaacaatggctgctgaccacggctaaaaatctcttcctgaaccattcagaaaatgcaacagcgaaagacattgcccctactttaacactctatgtggggaaaaagcagcttgtagagattgagaaggttgttctacaccctaactactcccaggtagatattgggctcatcaaactcaaacagaaggtgtctgttaatgagagagtgatgcccatctgcctaccttcaaaggattatgcagaagtagggcgtgtgggttatgtttctggctgggggcgaaatgccaattttaaatttactgaccatctgaagtatgtcatgctgcctgtggctgaccaagaccaatgcataaggcattatgaaggcagcacagtccccgaaaagaagacaccgaagagccctgtaggggtgcagcccatactgaatgaacacaccttctgtgctggcatgtctaagtaccaagaagacacctgctatggcgatgcgggcagtgcctttgccgttcacgacctggaggaggacacctggtatgcgactgggatcttaagctttgataagagctgtgctgtggctgagtatggtgtgtatgtgaaggtgacttccatccaggactgggttcagaagaccatagctgagaactaatgcaaggctggccggaagcccttgcctgaaagcaagatttcagcctggaagagggcaaagtggacgggagtggacaggagtggatgcgataagatgtggtttgaagctgatgggtgccagccctgcattgctgagtcaatcaataaagagctttcttttgacccaaaaaaaaaaaaaaaaaaaaaaacaaaaaacccttttgggcggccttgggccctggaaaagtttttaaaacccttcggttggggcgcgcggcccccttgggttcggtgaacatgggccaaagcgcggtccccaggaaacaccgggcgcacgaccagggccgggnattcctcccnatnaaaaacgcccnggggncacacnnangttctggaaaaatcncgaaggagtccggggccacacgcggaccagc

SEQ ID NO: 732188 - DNA, 2150 bp, Homo sapiens
ggactgctcttccagaggcaagaccaaccaagatgagtgccctgggagctgtcattgccctcctgctctggggacagctttttgcagtggactcaggcaatgatgtcacggatatcgcagatgacggctgcccgaagccccccgagattgcacatggctatgtggagcactcggttcgctaccagtgtaagaactactacaaactgcgcacagaaggagatgagatggtaagatgtggacaactgtctccatgccctacatacaacccccttctctgacatttccatgatgggtggtgctgaggtgattcgccagaaagttcgttgctctccttggagccaggagatttagattctaataagcgttttgtcgccagtagccatggccctttgggcagactaacttttgtcagcctcaagttttctgttttgttaaggggaggcgatgccatgcagcctacctcatgtaaatctcagagtcagatttacatctccagcagatgtgggaaaagaaggaatgctgatgatgatgtcaccctcacctagtgagtcttgctgtcctggcactgctctaagggctttatacttatttgctcacttagtcctcacagtatccctctgaacagagtttattgttttcactttgctgataaggaaactgaggcacagacaggttgagtatcttgcccaaattcaggcagcctgtaagaggcagagtcaggatttgaaccctgagccctccctgtactgcttggctgtgaccgccatgaccacagtgtgttctgctgggcttaactggcatccaggcacttggcttccagcacagcactctttcccttcctccttctcatatactctctccttttccccttcctttttgtccccttttcctcttccttttagttcttctctttaaatgccttctcactctgcacggggtctagacttgacttctcctttggctcacttcttgccttttgtttcaggagtgtacaccttaaacaatgggaagcagtggataaataaggctgttggagataaacttcctgaatgtgaagcagtatgtgggaagcccaagaatccggcaaacccagtgcagcggatcctgggtggacacctggatgccaaaggcagctttccctggcaggctaagatggtttcccaccataatctcaccacaggtgccacgctgatcaatgaacaatggctgctgaccacggctaaaaatctcttcctgaaccattcagaaaatgcaacagcgaaagacattgcccctactttaacactctatgtggggaaaaagcagcttgtagagattgagaaggttgttctacaccctaactactcccaggtagatattgggctcatcaaactcaaacagaaggtgtctgttaatgagagagtgatgcccatctgcctaccttcaaaggattatgcagaagtagggcgtgtgggttatgtttctggctgggggcgaaatgccaattttaaatttactgaccatctgaagtatgtcatgctgcctgtggctgaccaagaccaatgcataaggcattatgaaggcagcacagtccccgaaaagaagacaccgaagagccctgtaggggtgcagcccatactgaatgaacacaccttctgtgctggcatgtctaagtaccaagaagacacctgctatggcgatgcgggcagtgcctttgccgttcacgacctggaggaggacacctggtatgcgactgggatcttaagctttgataagagctgtgctgtggctgagtatggtgtgtatgtgaaggtgacttccatccaggactgggttcagaagaccatagctgagaactaatgcaaggctggccggaagcccttgcctgaaagcaagatttcagcctggaagagggcaaagtggacgggagtggacaggagtggatgcgataagatgtggtttgaagctgatgggtgccagccctgcattgctgagtcaatcaataaagagctttcttttgacccagtaacaaaaacaaacgaaaaaacacaaaaaagggtgagacgccgggcaccagaaagattctaaacacaccgggggcacgggcccaagagaaggcacacgggcaagaggtgcccaggaaccggacgacaagaggggtccacaaaaag

SEQ ID NO: 732189 - DNA, 2155 bp, Homo sapiens
  misc_feature (2006)..(2006): n is a, c, g, or t
  misc_feature (2059)..(2059): n is a, c, g, or t
ggactgctcttccagaggcaagaccaaccaagatgagtgccctgggagctgtcattgccctcctgctctggggacagctttttgcagtggactcaggcaatgatgtcacggatatcgcagatgacggctgcccgaagccccccgagattgcacatggctatgtggagcactcggttcgctaccagtgtaagaactactacaaactgcgcacagaaggagatgagatggtaagatgtggacaactgtctccatgccctacatacaacccccttctctgacatttccatgatgggtggtgctgaggtgattcgccagaaagttcgttgctctccttggagccaggagatttagattctaataagcgttttgtcgccagtagccatggccctttgggcagactaacttttgtcagcctcaagttttctgttttgttaaggggaggcgatgccatgcagcctacctcatgtaaatctcagagtcagatttacatctccagcagatgtgggaaaagaaggaatgctgatgatgatgtcaccctcacctagtgagtcttgctgtcctggcactgctctaagggctttatacttatttgctcacttagtcctcacagtatccctctgaacagagtttattgttttcactttgctgataaggaaactgaggcacagacaggttgagtatcttgcccaaattcaggcagcctgtaagaggcagagtcaggatttgaaccctgagccctccctgtactgcttggctgtgaccgccatgaccacagtgtgttctgctgggcttaactggcatccaggcacttggcttccagcacagcactctttcccttcctccttctcatatactctctccttttccccttcctttttgtccccttttcctcttccttttagttcttctctttaaatgccttctcactctgcacggggtctagacttgacttctcctttggctcacttcttgccttttgtttcaggagtgtacaccttaaacaatgggaagcagtggataaataaggctgttggagataaacttcctgaatgtgaagcagtatgtgggaagcccaagaatccggcaaacccagtgcagcggatcctgggtggacacctggatgccaaaggcagctttccctggcaggctaagatggtttcccaccataatctcaccacaggtgccacgctgatcaatgaacaatggctgctgaccacggctaaaaatctcttcctgaaccattcagaaaatgcaacagcgaaagacattgcccctactttaacactctatgtggggaaaaagcagcttgtagagattgagaaggttgttctacaccctaactactcccaggtagatattgggctcatcaaactcaaacagaaggtgtctgttaatgagagagtgatgcccatctgcctaccttcaaaggattatgcagaagtagggcgtgtgggttatgtttctggctgggggcgaaatgccaattttaaatttactgaccatctgaagtatgtcatgctgcctgtggctgaccaagaccaatgcataaggcattatgaaggcagcacagtccccgaaaagaagacaccgaagagccctgtaggggtgcagcccatactgaatgaacacaccttctgtgctggcatgtctaagtaccaagaagacacctgctatggcgatgcgggcagtgcctttgccgttcacgacctggaggaggacacctggtatgcgactgggatcttaagctttgataagagctgtgctgtggctgagtatggtgtgtatgtgaaggtgacttccatccaggactgggttcagaagaccatagctgagaactaatgcaaggctggccggaagcccttgcctgaaagcaagatttcagcctggaagagggcaaagtggacgggagtggacaggagtggatgcgataagatgtggtttgaagctgatgggtgccagccctgcattgctgagtcaatcaataaagagctttcttttgacccaangattgacccacaaaaaaaaaaaaaaaaaaaaaaaaaaaaaattttggggcgcntgggccgaaaatttttaaacccttttggggcggcggcctgtttgtgaccgggccaaggggtcccagagaaccggcgaagtggcgtggttcccccaa

SEQ ID NO: 732190 - DNA, 2218 bp, Homo sapiens
  misc_feature (2006)..(2006): n is a, c, g, or t
  misc_feature (2218)..(2218): n is a, c, g, or t
ggactgctcttccagaggcaagaccaaccaagatgagtgccctgggagctgtcattgccctcctgctctggggacagctttttgcagtggactcaggcaatgatgtcacggatatcgcagatgacggctgcccgaagccccccgagattgcacatggctatgtggagcactcggttcgctaccagtgtaagaactactacaaactgcgcacagaaggagatgagatggtaagatgtggacaactgtctccatgccctacatacaacccccttctctgacatttccatgatgggtggtgctgaggtgattcgccagaaagttcgttgctctccttggagccaggagatttagattctaataagcgttttgtcgccagtagccatggccctttgggcagactaacttttgtcagcctcaagttttctgttttgttaaggggaggcgatgccatgcagcctacctcatgtaaatctcagagtcagatttacatctccagcagatgtgggaaaagaaggaatgctgatgatgatgtcaccctcacctagtgagtcttgctgtcctggcactgctctaagggctttatacttatttgctcacttagtcctcacagtatccctctgaacagagtttattgttttcactttgctgataaggaaactgaggcacagacaggttgagtatcttgcccaaattcaggcagcctgtaagaggcagagtcaggatttgaaccctgagccctccctgtactgcttggctgtgaccgccatgaccacagtgtgttctgctgggcttaactggcatccaggcacttggcttccagcacagcactctttcccttcctccttctcatatactctctccttttccccttcctttttgtccccttttcctcttccttttagttcttctctttaaatgccttctcactctgcacggggtctagacttgacttctcctttggctcacttcttgccttttgtttcaggagtgtacaccttaaacaatgggaagcagtggataaataaggctgttggagataaacttcctgaatgtgaagcagtatgtgggaagcccaagaatccggcaaacccagtgcagcggatcctgggtggacacctggatgccaaaggcagctttccctggcaggctaagatggtttcccaccataatctcaccacaggtgccacgctgatcaatgaacaatggctgctgaccacggctaaaaatctcttcctgaaccattcagaaaatgcaacagcgaaagacattgcccctactttaacactctatgtggggaaaaagcagcttgtagagattgagaaggttgttctacaccctaactactcccaggtagatattgggctcatcaaactcaaacagaaggtgtctgttaatgagagagtgatgcccatctgcctaccttcaaaggattatgcagaagtagggcgtgtgggttatgtttctggctgggggcgaaatgccaattttaaatttactgaccatctgaagtatgtcatgctgcctgtggctgaccaagaccaatgcataaggcattatgaaggcagcacagtccccgaaaagaagacaccgaagagccctgtaggggtgcagcccatactgaatgaacacaccttctgtgctggcatgtctaagtaccaagaagacacctgctatggcgatgcgggcagtgcctttgccgttcacgacctggaggaggacacctggtatgcgactgggatcttaagctttgataagagctgtgctgtggctgagtatggtgtgtatgtgaaggtgacttccatccaggactgggttcagaagaccatagctgagaactaatgcaaggctggccggaagcccttgcctgaaagcaagatttcagcctggaagagggcaaagtggacgggagtggacaggagtggatgcgataagatgtggtttgaagctgatgggtgccagccctgcattgctgagtcaatcaataaagagctttcttttgacccaangattgacccacaaaaaaaaaaaaaaaaaaaaaaaaaaaaaattttggtggggggattgggcccttgaaaagggttttgaaaacattctgggtgggagcccgggggccaagatgggataggtggaccatgggacaaaaggggttcccaaggaaaaccggggaccaagaaacaaagggcgagggatttctccacaagttaaaaaaggcccggan

SEQ ID NO: 732191 - DNA, 2175 bp, Homo sapiens
ggactgctcttccagaggcaagaccaaccaagatgagtgccctgggagctgtcattgccctcctgctctggggacagctttttgcagtggactcaggcaatgatgtcacggatatcgcagatgacggctgcccgaagccccccgagattgcacatggctatgtggagcactcggttcgctaccagtgtaagaactactacaaactgcgcacagaaggagatgagatggtaagatgtggacaactgtctccatgccctacatacaacccccttctctgacatttccatgatgggtggtgctgaggtgattcgccagaaagttcgttgctctccttggagccaggagatttagattctaataagcgttttgtcgccagtagccatggccctttgggcagactaacttttgtcagcctcaagttttctgttttgttaaggggaggcgatgccatgcagcctacctcatgtaaatctcagagtcagatttacatctccagcagatgtgggaaaagaaggaatgctgatgatgatgtcaccctcacctagtgagtcttgctgtcctggcactgctctaagggctttatacttatttgctcacttagtcctcacagtatccctctgaacagagtttattgttttcactttgctgataaggaaactgaggcacagacaggttgagtatcttgcccaaattcaggcagcctgtaagaggcagagtcaggatttgaaccctgagccctccctgtactgcttggctgtgaccgccatgaccacagtgtgttctgctgggcttaactggcatccaggcacttggcttccagcacagcactctttcccttcctccttctcatatactctctccttttccccttcctttttgtccccttttcctcttccttttagttcttctctttaaatgccttctcactctgcacggggtctagacttgacttctcctttggctcacttcttgccttttgtttcaggagtgtacaccttaaacaatgggaagcagtggataaataaggctgttggagataaacttcctgaatgtgaagcagtatgtgggaagcccaagaatccggcaaacccagtgcagcggatcctgggtggacacctggatgccaaaggcagctttccctggcaggctaagatggtttcccaccataatctcaccacaggtgccacgctgatcaatgaacaatggctgctgaccacggctaaaaatctcttcctgaaccattcagaaaatgcaacagcgaaagacattgcccctactttaacactctatgtggggaaaaagcagcttgtagagattgagaaggttgttctacaccctaactactcccaggtagatattgggctcatcaaactcaaacagaaggtgtctgttaatgagagagtgatgcccatctgcctaccttcaaaggattatgcagaagtagggcgtgtgggttatgtttctggctgggggcgaaatgccaattttaaatttactgaccatctgaagtatgtcatgctgcctgtggctgaccaagaccaatgcataaggcattatgaaggcagcacagtccccgaaaagaagacaccgaagagccctgtaggggtgcagcccatactgaatgaacacaccttctgtgctggcatgtctaagtaccaagaagacacctgctatggcgatgcgggcagtgcctttgccgttcacgacctggaggaggacacctggtatgcgactgggatcttaagctttgataagagctgtgctgtggctgagtatggtgtgtatgtgaaggtgacttccatccaggactgggttcagaagaccatagctgagaactaatgcaaggctggccggaagcccttgcctgaaagcaagatttcagcctggaagagggcaaagtggacgggagtggacaggagtggatgcgataagatgtggtttgaagctgatgggtgccagccctgcattgctgagtcaatcaataaagagctttcttttgacccaaccccatagaacaacaccaacacaacacaatcataaccaaacaactcacacccccacaacaaacaaaaactaattcaacctcactcacaaaaataccacaaaacaaagaaaacagacacaaaaaaaaaccacaagacacacagacctataatgcacaaaaacacaaaagag

SEQ ID NO: 732192 - DNA, 2186 bp, Homo sapiens
  misc_feature (2015)..(2015): n is a, c, g, or t
  misc_feature (2186)..(2186): n is a, c, g, or t
ggactgctcttccagaggcaagaccaaccaagatgagtgccctgggagctgtcattgccctcctgctctggggacagctttttgcagtggactcaggcaatgatgtcacggatatcgcagatgacggctgcccgaagccccccgagattgcacatggctatgtggagcactcggttcgctaccagtgtaagaactactacaaactgcgcacagaaggagatgagatggtaagatgtggacaactgtctccatgccctacatacaacccccttctctgacatttccatgatgggtggtgctgaggtgattcgccagaaagttcgttgctctccttggagccaggagatttagattctaataagcgttttgtcgccagtagccatggccctttgggcagactaacttttgtcagcctcaagttttctgttttgttaaggggaggcgatgccatgcagcctacctcatgtaaatctcagagtcagatttacatctccagcagatgtgggaaaagaaggaatgctgatgatgatgtcaccctcacctagtgagtcttgctgtcctggcactgctctaagggctttatacttatttgctcacttagtcctcacagtatccctctgaacagagtttattgttttcactttgctgataaggaaactgaggcacagacaggttgagtatcttgcccaaattcaggcagcctgtaagaggcagagtcaggatttgaaccctgagccctccctgtactgcttggctgtgaccgccatgaccacagtgtgttctgctgggcttaactggcatccaggcacttggcttccagcacagcactctttcccttcctccttctcatatactctctccttttccccttcctttttgtccccttttcctcttccttttagttcttctctttaaatgccttctcactctgcacggggtctagacttgacttctcctttggctcacttcttgccttttgtttcaggagtgtacaccttaaacaatgggaagcagtggataaataaggctgttggagataaacttcctgaatgtgaagcagtatgtgggaagcccaagaatccggcaaacccagtgcagcggatcctgggtggacacctggatgccaaaggcagctttccctggcaggctaagatggtttcccaccataatctcaccacaggtgccacgctgatcaatgaacaatggctgctgaccacggctaaaaatctcttcctgaaccattcagaaaatgcaacagcgaaagacattgcccctactttaacactctatgtggggaaaaagcagcttgtagagattgagaaggttgttctacaccctaactactcccaggtagatattgggctcatcaaactcaaacagaaggtgtctgttaatgagagagtgatgcccatctgcctaccttcaaaggattatgcagaagtagggcgtgtgggttatgtttctggctgggggcgaaatgccaattttaaatttactgaccatctgaagtatgtcatgctgcctgtggctgaccaagaccaatgcataaggcattatgaaggcagcacagtccccgaaaagaagacaccgaagagccctgtaggggtgcagcccatactgaatgaacacaccttctgtgctggcatgtctaagtaccaagaagacacctgctatggcgatgcgggcagtgcctttgccgttcacgacctggaggaggacacctggtatgcgactgggatcttaagctttgataagagctgtgctgtggctgagtatggtgtgtatgtgaaggtgacttccatccaggactgggttcagaagaccatagctgagaactaatgcaaggctggccggaagcccttgcctgaaagcaagatttcagcctggaagagggcaaagtggacgggagtggacaggagtggatgcgataagatgtggtttgaagctgatgggtgccagccctgcattgctgagtcaatcaataaagagctttcttttgacccaaaaaaaaaaanaagagaaaaaagacacacaacacgtggtggcacggcatcaggagcccgaggaaagcgtggcgagaaacatggagatgggagacgcgcgggcaccggaggtatagaggacacacgggcgacagaggagggccctaggaaaaccggggagagaacaagggccgggaattccan

SEQ ID NO: 732193 - DNA, 2275 bp, Homo sapiens
ggactgctcttccagaggcaagaccaaccaagatgagtgccctgggagctgtcattgccctcctgctctggggacagctttttgcagtggactcaggcaatgatgtcacggatatcgcagatgacggctgcccgaagccccccgagattgcacatggctatgtggagcactcggttcgctaccagtgtaagaactactacaaactgcgcacagaaggagatgagatggtaagatgtggacaactgtctccatgccctacatacaacccccttctctgacatttccatgatgggtggtgctgaggtgattcgccagaaagttcgttgctctccttggagccaggagatttagattctaataagcgttttgtcgccagtagccatggccctttgggcagactaacttttgtcagcctcaagttttctgttttgttaaggggaggcgatgccatgcagcctacctcatgtaaatctcagagtcagatttacatctccagcagatgtgggaaaagaaggaatgctgatgatgatgtcaccctcacctagtgagtcttgctgtcctggcactgctctaagggctttatacttatttgctcacttagtcctcacagtatccctctgaacagagtttattgttttcactttgctgataaggaaactgaggcacagacaggttgagtatcttgcccaaattcaggcagcctgtaagaggcagagtcaggatttgaaccctgagccctccctgtactgcttggctgtgaccgccatgaccacagtgtgttctgctgggcttaactggcatccaggcacttggcttccagcacagcactctttcccttcctccttctcatatactctctccttttccccttcctttttgtccccttttcctcttccttttagttcttctctttaaatgccttctcactctgcacggggtctagacttgacttctcctttggctcacttcttgccttttgtttcaggagtgtacaccttaaacaatgggaagcagtggataaataaggctgttggagataaacttcctgaatgtgaagcagtatgtgggaagcccaagaatccggcaaacccagtgcagcggatcctgggtggacacctggatgccaaaggcagctttccctggcaggctaagatggtttcccaccataatctcaccacaggtgccacgctgatcaatgaacaatggctgctgaccacggctaaaaatctcttcctgaaccattcagaaaatgcaacagcgaaagacattgcccctactttaacactctatgtggggaaaaagcagcttgtagagattgagaaggttgttctacaccctaactactcccaggtagatattgggctcatcaaactcaaacagaaggtgtctgttaatgagagagtgatgcccatctgcctaccttcaaaggattatgcagaagtagggcgtgtgggttatgtttctggctgggggcgaaatgccaattttaaatttactgaccatctgaagtatgtcatgctgcctgtggctgaccaagaccaatgcataaggcattatgaaggcagcacagtccccgaaaagaagacaccgaagagccctgtaggggtgcagcccatactgaatgaacacaccttctgtgctggcatgtctaagtaccaagaagacacctgctatggcgatgcgggcagtgcctttgccgttcacgacctggaggaggacacctggtatgcgactgggatcttaagctttgataagagctgtgctgtggctgagtatggtgtgtatgtgaaggtgacttccatccaggactgggttcagaagaccatagctgagaactaatgcaaggctggccggaagcccttgcctgaaagcaagatttcagcctggaagagggcaaagtggacgggagtggacaggagtggatgcgataagatgtggtttgaagctgatgggtgccagccctgcattgctgagtcaatcaataaagagctttcttttgacccataaaaaaaaaaccacaacaaaaacttttggcccccttgggccccggaaaagtttcaaaacattcgttggggcggggcgcaaggggaacgggaaccgggcaaagcggtccaaggaaacccgtgcgccagagaaaagagcggagagatttcccaccatgtaaaaaaagcccggggggaacaccggcgcgttctggaacacactccgagagggccctcagaggcacaaaacgggacgcatccagagggtgccagaggaaaccgcaataaaaccg

SEQ ID NO: 732194 - DNA, 2287 bp, Homo sapiens
  misc_feature (2203)..(2203): n is a, c, g, or t
  misc_feature (2213)..(2213): n is a, c, g, or t
  misc_feature (2216)..(2216): n is a, c, g, or t
  misc_feature (2227)..(2227): n is a, c, g, or t
  misc_feature (2232)..(2232): n is a, c, g, or t
  misc_feature (2238)..(2239): n is a, c, g, or t
  misc_feature (2241)..(2241): n is a, c, g, or t
  misc_feature (2256)..(2256): n is a, c, g, or t
ggactgctcttccagaggcaagaccaaccaagatgagtgccctgggagctgtcattgccctcctgctctggggacagctttttgcagtggactcaggcaatgatgtcacggatatcgcagatgacggctgcccgaagccccccgagattgcacatggctatgtggagcactcggttcgctaccagtgtaagaactactacaaactgcgcacagaaggagatgagatggtaagatgtggacaactgtctccatgccctacatacaacccccttctctgacatttccatgatgggtggtgctgaggtgattcgccagaaagttcgttgctctccttggagccaggagatttagattctaataagcgttttgtcgccagtagccatggccctttgggcagactaacttttgtcagcctcaagttttctgttttgttaaggggaggcgatgccatgcagcctacctcatgtaaatctcagagtcagatttacatctccagcagatgtgggaaaagaaggaatgctgatgatgatgtcaccctcacctagtgagtcttgctgtcctggcactgctctaagggctttatacttatttgctcacttagtcctcacagtatccctctgaacagagtttattgttttcactttgctgataaggaaactgaggcacagacaggttgagtatcttgcccaaattcaggcagcctgtaagaggcagagtcaggatttgaaccctgagccctccctgtactgcttggctgtgaccgccatgaccacagtgtgttctgctgggcttaactggcatccaggcacttggcttccagcacagcactctttcccttcctccttctcatatactctctccttttccccttcctttttgtccccttttcctcttccttttagttcttctctttaaatgccttctcactctgcacggggtctagacttgacttctcctttggctcacttcttgccttttgtttcaggagtgtacaccttaaacaatgggaagcagtggataaataaggctgttggagataaacttcctgaatgtgaagcagtatgtgggaagcccaagaatccggcaaacccagtgcagcggatcctgggtggacacctggatgccaaaggcagctttccctggcaggctaagatggtttcccaccataatctcaccacaggtgccacgctgatcaatgaacaatggctgctgaccacggctaaaaatctcttcctgaaccattcagaaaatgcaacagcgaaagacattgcccctactttaacactctatgtggggaaaaagcagcttgtagagattgagaaggttgttctacaccctaactactcccaggtagatattgggctcatcaaactcaaacagaaggtgtctgttaatgagagagtgatgcccatctgcctaccttcaaaggattatgcagaagtagggcgtgtgggttatgtttctggctgggggcgaaatgccaattttaaatttactgaccatctgaagtatgtcatgctgcctgtggctgaccaagaccaatgcataaggcattatgaaggcagcacagtccccgaaaagaagacaccgaagagccctgtaggggtgcagcccatactgaatgaacacaccttctgtgctggcatgtctaagtaccaagaagacacctgctatggcgatgcgggcagtgcctttgccgttcacgacctggaggaggacacctggtatgcgactgggatcttaagctttgataagagctgtgctgtggctgagtatggtgtgtatgtgaaggtgacttccatccaggactgggttcagaagaccatagctgagaactaatgcaaggctggccggaagcccttgcctgaaagcaagatttcagcctggaagagggcaaagtggacgggagtggacaggagtggatgcgataagatgtggtttgaagctgatgggtgccagccctgcattgctgagtcaatcaataaagagctttcttttgacccaaaaaaaaaaggaacaaaaaacaaaaaaaaaacctttttggggccgcgtgggccccttggaagaaacttttttcataaaaaccacctttcgtttgtgtagcgccgggggccccatagagtgatataggtcgaccacgtggtcaacacagatggtgttccctaaggagaaactgggggacaagtacacaatgcgcctgggnattcctcccnatnaaaaacgcccnggggncacacnnangttctggaaaaatcncgaaggagtccggggccacacgcggaccagc

SEQ ID NO: 732195 - DNA, 2071 bp, Homo sapiens
  misc_feature (1975)..(1975): n is a, c, g, or t
ggactgctcttccagaggcaagaccaaccaagatgagtgccctgggagctgtcattgccctcctgctctggggacagctttttgcagtggactcaggcaatgatgtcacggatatcgcagatgacggctgcccgaagccccccgagattgcacatggctatgtggagcactcggttcgctaccagtgtaagaactactacaaactgcgcacagaaggagatgagatggtaagatgtggacaactgtctccatgccctacatacaacccccttctctgacatttccatgatgggtggtgctgaggtgattcgccagaaagttcgttgctctccttggagccaggagatttagattctaataagcgttttgtcgccagtagccatggccctttgggcagactaacttttgtcagcctcaagttttctgttttgttaaggggaggcgatgccatgcagcctacctcatgtaaatctcagagtcagatttacatctccagcagatgtgggaaaagaaggaatgctgatgatgatgtcaccctcacctagtgagtcttgctgtcctggcactgctctaagggctttatacttatttgctcacttagtcctcacagtatccctctgaacagagtttattgttttcactttgctgataaggaaactgaggcacagacaggttgagtatcttgcccaaattcaggcagcctgtaagaggcagagtcaggatttgaaccctgagccctccctgtactgcttggctgtgaccgccatgaccacagtgtgttctgctgggcttaactggcatccaggcacttggcttccagcacagcactctttcccttcctccttctcatatactctctccttttccccttcctttttgtccccttttcctcttccttttagttcttctctttaaatgccttctcactctgcacggggtctagacttgacttctcctttggctcacttcttgccttttgtttcaggagtgtacaccttaaacaatgggaagcagtggataaataaggctgttggagataaacttcctgaatgtgaagcagtatgtgggaagcccaagaatccggcaaacccagtgcagcggatcctgggtggacacctggatgccaaaggcagctttccctggcaggctaagatggtttcccaccataatctcaccacaggtgccacgctgatcaatgaacaatggctgctgaccacggctaaaaatctcttcctgaaccattcagaaaatgcaacagcgaaagacattgcccctactttaacactctatgtggggaaaaagcagcttgtagagattgagaaggttgttctacaccctaactactcccaggtagatattgggctcatcaaactcaaacagaaggtgtctgttaatgagagagtgatgcccatctgcctaccttcaaaggattatgcagaagtagggcgtgtgggttatgtttctggctgggggcgaaatgccaattttaaatttactgaccatctgaagtatgtcatgctgcctgtggctgaccaagaccaatgcataaggcattatgaaggcagcacagtccccgaaaagaagacaccgaagagccctgtaggggtgcagcccatactgaatgaacacaccttctgtgctggcatgtctaagtaccaagaagacacctgctatggcgatgcgggcagtgcctttgccgttcacgacctggaggaggacacctggtatgcgactgggatcttaagctttgataagagctgtgctgtggctgagtatggtgtgtatgtgaaggtgacttccatccaggactgggttcagcctggaagagggcaaagtggacgggagtggacaggagtggatgcgataagatgtggtttgaagctgatgggtgccagccctgcattgctgagtcaatcaataaagagctttcttttgacccaaaaaaaaaaaaaaaaaaaaaaaattttggggcgcntgggccgaaaatttttaaacccttttggggcggcggcctgtttgtgaccgggccaaggggtcccagagaaccggcgaagtggcgtggttcccccaa

SEQ ID NO: 732196 - DNA, 2134 bp, Homo sapiens
  misc_feature (2134)..(2134): n is a, c, g, or t
ggactgctcttccagaggcaagaccaaccaagatgagtgccctgggagctgtcattgccctcctgctctggggacagctttttgcagtggactcaggcaatgatgtcacggatatcgcagatgacggctgcccgaagccccccgagattgcacatggctatgtggagcactcggttcgctaccagtgtaagaactactacaaactgcgcacagaaggagatgagatggtaagatgtggacaactgtctccatgccctacatacaacccccttctctgacatttccatgatgggtggtgctgaggtgattcgccagaaagttcgttgctctccttggagccaggagatttagattctaataagcgttttgtcgccagtagccatggccctttgggcagactaacttttgtcagcctcaagttttctgttttgttaaggggaggcgatgccatgcagcctacctcatgtaaatctcagagtcagatttacatctccagcagatgtgggaaaagaaggaatgctgatgatgatgtcaccctcacctagtgagtcttgctgtcctggcactgctctaagggctttatacttatttgctcacttagtcctcacagtatccctctgaacagagtttattgttttcactttgctgataaggaaactgaggcacagacaggttgagtatcttgcccaaattcaggcagcctgtaagaggcagagtcaggatttgaaccctgagccctccctgtactgcttggctgtgaccgccatgaccacagtgtgttctgctgggcttaactggcatccaggcacttggcttccagcacagcactctttcccttcctccttctcatatactctctccttttccccttcctttttgtccccttttcctcttccttttagttcttctctttaaatgccttctcactctgcacggggtctagacttgacttctcctttggctcacttcttgccttttgtttcaggagtgtacaccttaaacaatgggaagcagtggataaataaggctgttggagataaacttcctgaatgtgaagcagtatgtgggaagcccaagaatccggcaaacccagtgcagcggatcctgggtggacacctggatgccaaaggcagctttccctggcaggctaagatggtttcccaccataatctcaccacaggtgccacgctgatcaatgaacaatggctgctgaccacggctaaaaatctcttcctgaaccattcagaaaatgcaacagcgaaagacattgcccctactttaacactctatgtggggaaaaagcagcttgtagagattgagaaggttgttctacaccctaactactcccaggtagatattgggctcatcaaactcaaacagaaggtgtctgttaatgagagagtgatgcccatctgcctaccttcaaaggattatgcagaagtagggcgtgtgggttatgtttctggctgggggcgaaatgccaattttaaatttactgaccatctgaagtatgtcatgctgcctgtggctgaccaagaccaatgcataaggcattatgaaggcagcacagtccccgaaaagaagacaccgaagagccctgtaggggtgcagcccatactgaatgaacacaccttctgtgctggcatgtctaagtaccaagaagacacctgctatggcgatgcgggcagtgcctttgccgttcacgacctggaggaggacacctggtatgcgactgggatcttaagctttgataagagctgtgctgtggctgagtatggtgtgtatgtgaaggtgacttccatccaggactgggttcagcctggaagagggcaaagtggacgggagtggacaggagtggatgcgataagatgtggtttgaagctgatgggtgccagccctgcattgctgagtcaatcaataaagagctttcttttgacccaaaaaaaaaaaaaaaaaaaaaaaattttggtggggggattgggcccttgaaaagggttttgaaaacattctgggtgggagcccgggggccaagatgggataggtggaccatgggacaaaaggggttcccaaggaaaaccggggaccaagaaacaaagggcgagggatttctccacaagttaaaaaaggcccggan

SEQ ID NO: 732197 - DNA, 2098 bp, Homo sapiens
  misc_feature (2002)..(2002): n is a, c, g, or t
ggactgctcttccagaggcaagaccaaccaagatgagtgccctgggagctgtcattgccctcctgctctggggacagctttttgcagtggactcaggcaatgatgtcacggatatcgcagatgacggctgcccgaagccccccgagattgcacatggctatgtggagcactcggttcgctaccagtgtaagaactactacaaactgcgcacagaaggagatgagatggtaagatgtggacaactgtctccatgccctacatacaacccccttctctgacatttccatgatgggtggtgctgaggtgattcgccagaaagttcgttgctctccttggagccaggagatttagattctaataagcgttttgtcgccagtagccatggccctttgggcagactaacttttgtcagcctcaagttttctgttttgttaaggggaggcgatgccatgcagcctacctcatgtaaatctcagagtcagatttacatctccagcagatgtgggaaaagaaggaatgctgatgatgatgtcaccctcacctagtgagtcttgctgtcctggcactgctctaagggctttatacttatttgctcacttagtcctcacagtatccctctgaacagagtttattgttttcactttgctgataaggaaactgaggcacagacaggttgagtatcttgcccaaattcaggcagcctgtaagaggcagagtcaggatttgaaccctgagccctccctgtactgcttggctgtgaccgccatgaccacagtgtgttctgctgggcttaactggcatccaggcacttggcttccagcacagcactctttcccttcctccttctcatatactctctccttttccccttcctttttgtccccttttcctcttccttttagttcttctctttaaatgccttctcactctgcacggggtctagacttgacttctcctttggctcacttcttgccttttgtttcaggagtgtacaccttaaacaatgggaagcagtggataaataaggctgttggagataaacttcctgaatgtgaagcagtatgtgggaagcccaagaatccggcaaacccagtgcagcggatcctgggtggacacctggatgccaaaggcagctttccctggcaggctaagatggtttcccaccataatctcaccacaggtgccacgctgatcaatgaacaatggctgctgaccacggctaaaaatctcttcctgaaccattcagaaaatgcaacagcgaaagacattgcccctactttaacactctatgtggggaaaaagcagcttgtagagattgagaaggttgttctacaccctaactactcccaggtagatattgggctcatcaaactcaaacagaaggtgtctgttaatgagagagtgatgcccatctgcctaccttcaaaggattatgcagaagtagggcgtgtgggttatgtttctggctgggggcgaaatgccaattttaaatttactgaccatctgaagtatgtcatgctgcctgtggctgaccaagaccaatgcataaggcattatgaaggcagcacagtccccgaaaagaagacaccgaagagccctgtaggggtgcagcccatactgaatgaacacaccttctgtgctggcatgtctaagtaccaagaagacacctgctatggcgatgcgggcagtgcctttgccgttcacgacctggaggaggacacctggtatgcgactgggatcttaagctttgataagagctgtgctgtggctgagtatggtgtgtatgtgaaggtgacttccatccaggactgggttcagcctggaagagggcaaagtggacgggagtggacaggagtggatgcgataagatgtggtttgaagctgatgggtgccagccctgcattgctgagtcaatcaataaagagctttcttttgacccaaaaaaaaaaaaaaaaaaaaaaacaaaaaaaaaaaaaaaaaaaaaaaaaaattttggggcgcntgggccgaaaatttttaaacccttttggggcggcggcctgtttgtgaccgggccaaggggtcccagagaaccggcgaagtggcgtggttcccccaa

SEQ ID NO: 732198 - DNA, 2161 bp, Homo sapiens
  misc_feature (2161)..(2161): n is a, c, g, or t
ggactgctcttccagaggcaagaccaaccaagatgagtgccctgggagctgtcattgccctcctgctctggggacagctttttgcagtggactcaggcaatgatgtcacggatatcgcagatgacggctgcccgaagccccccgagattgcacatggctatgtggagcactcggttcgctaccagtgtaagaactactacaaactgcgcacagaaggagatgagatggtaagatgtggacaactgtctccatgccctacatacaacccccttctctgacatttccatgatgggtggtgctgaggtgattcgccagaaagttcgttgctctccttggagccaggagatttagattctaataagcgttttgtcgccagtagccatggccctttgggcagactaacttttgtcagcctcaagttttctgttttgttaaggggaggcgatgccatgcagcctacctcatgtaaatctcagagtcagatttacatctccagcagatgtgggaaaagaaggaatgctgatgatgatgtcaccctcacctagtgagtcttgctgtcctggcactgctctaagggctttatacttatttgctcacttagtcctcacagtatccctctgaacagagtttattgttttcactttgctgataaggaaactgaggcacagacaggttgagtatcttgcccaaattcaggcagcctgtaagaggcagagtcaggatttgaaccctgagccctccctgtactgcttggctgtgaccgccatgaccacagtgtgttctgctgggcttaactggcatccaggcacttggcttccagcacagcactctttcccttcctccttctcatatactctctccttttccccttcctttttgtccccttttcctcttccttttagttcttctctttaaatgccttctcactctgcacggggtctagacttgacttctcctttggctcacttcttgccttttgtttcaggagtgtacaccttaaacaatgggaagcagtggataaataaggctgttggagataaacttcctgaatgtgaagcagtatgtgggaagcccaagaatccggcaaacccagtgcagcggatcctgggtggacacctggatgccaaaggcagctttccctggcaggctaagatggtttcccaccataatctcaccacaggtgccacgctgatcaatgaacaatggctgctgaccacggctaaaaatctcttcctgaaccattcagaaaatgcaacagcgaaagacattgcccctactttaacactctatgtggggaaaaagcagcttgtagagattgagaaggttgttctacaccctaactactcccaggtagatattgggctcatcaaactcaaacagaaggtgtctgttaatgagagagtgatgcccatctgcctaccttcaaaggattatgcagaagtagggcgtgtgggttatgtttctggctgggggcgaaatgccaattttaaatttactgaccatctgaagtatgtcatgctgcctgtggctgaccaagaccaatgcataaggcattatgaaggcagcacagtccccgaaaagaagacaccgaagagccctgtaggggtgcagcccatactgaatgaacacaccttctgtgctggcatgtctaagtaccaagaagacacctgctatggcgatgcgggcagtgcctttgccgttcacgacctggaggaggacacctggtatgcgactgggatcttaagctttgataagagctgtgctgtggctgagtatggtgtgtatgtgaaggtgacttccatccaggactgggttcagcctggaagagggcaaagtggacgggagtggacaggagtggatgcgataagatgtggtttgaagctgatgggtgccagccctgcattgctgagtcaatcaataaagagctttcttttgacccaaaaaaaaaaaaaaaaaaaaaaacaaaaaaaaaaaaaaaaaaaaaaaaaaattttggtggggggattgggcccttgaaaagggttttgaaaacattctgggtgggagcccgggggccaagatgggataggtggaccatgggacaaaaggggttcccaaggaaaaccggggaccaagaaacaaagggcgagggatttctccacaagttaaaaaaggcccggan

SEQ ID NO: 732199 - DNA, 2187 bp, Homo sapiens
  misc_feature (2103)..(2103): n is a, c, g, or t
  misc_feature (2113)..(2113): n is a, c, g, or t
  misc_feature (2116)..(2116): n is a, c, g, or t
  misc_feature (2127)..(2127): n is a, c, g, or t
  misc_feature (2132)..(2132): n is a, c, g, or t
  misc_feature (2138)..(2139): n is a, c, g, or t
  misc_feature (2141)..(2141): n is a, c, g, or t
  misc_feature (2156)..(2156): n is a, c, g, or t
ggactgctcttccagaggcaagaccaaccaagatgagtgccctgggagctgtcattgccctcctgctctggggacagctttttgcagtggactcaggcaatgatgtcacggatatcgcagatgacggctgcccgaagccccccgagattgcacatggctatgtggagcactcggttcgctaccagtgtaagaactactacaaactgcgcacagaaggagatgagatggtaagatgtggacaactgtctccatgccctacatacaacccccttctctgacatttccatgatgggtggtgctgaggtgattcgccagaaagttcgttgctctccttggagccaggagatttagattctaataagcgttttgtcgccagtagccatggccctttgggcagactaacttttgtcagcctcaagttttctgttttgttaaggggaggcgatgccatgcagcctacctcatgtaaatctcagagtcagatttacatctccagcagatgtgggaaaagaaggaatgctgatgatgatgtcaccctcacctagtgagtcttgctgtcctggcactgctctaagggctttatacttatttgctcacttagtcctcacagtatccctctgaacagagtttattgttttcactttgctgataaggaaactgaggcacagacaggttgagtatcttgcccaaattcaggcagcctgtaagaggcagagtcaggatttgaaccctgagccctccctgtactgcttggctgtgaccgccatgaccacagtgtgttctgctgggcttaactggcatccaggcacttggcttccagcacagcactctttcccttcctccttctcatatactctctccttttccccttcctttttgtccccttttcctcttccttttagttcttctctttaaatgccttctcactctgcacggggtctagacttgacttctcctttggctcacttcttgccttttgtttcaggagtgtacaccttaaacaatgggaagcagtggataaataaggctgttggagataaacttcctgaatgtgaagcagtatgtgggaagcccaagaatccggcaaacccagtgcagcggatcctgggtggacacctggatgccaaaggcagctttccctggcaggctaagatggtttcccaccataatctcaccacaggtgccacgctgatcaatgaacaatggctgctgaccacggctaaaaatctcttcctgaaccattcagaaaatgcaacagcgaaagacattgcccctactttaacactctatgtggggaaaaagcagcttgtagagattgagaaggttgttctacaccctaactactcccaggtagatattgggctcatcaaactcaaacagaaggtgtctgttaatgagagagtgatgcccatctgcctaccttcaaaggattatgcagaagtagggcgtgtgggttatgtttctggctgggggcgaaatgccaattttaaatttactgaccatctgaagtatgtcatgctgcctgtggctgaccaagaccaatgcataaggcattatgaaggcagcacagtccccgaaaagaagacaccgaagagccctgtaggggtgcagcccatactgaatgaacacaccttctgtgctggcatgtctaagtaccaagaagacacctgctatggcgatgcgggcagtgcctttgccgttcacgacctggaggaggacacctggtatgcgactgggatcttaagctttgataagagctgtgctgtggctgagtatggtgtgtatgtgaaggtgacttccatccaggactgggttcagcctggaagagggcaaagtggacgggagtggacaggagtggatgcgataagatgtggtttgaagctgatgggtgccagccctgcattgctgagtcaatcaataaagagctttcttttgacccaaaaaaaaaaaaaaaaaaaaaaacaaaaaacccttttgggcggccttgggccctggaaaagtttttaaaacccttcggttggggcgcgcggcccccttgggttcggtgaacatgggccaaagcgcggtccccaggaaacaccgggcgcacgaccagggccgggnattcctcccnatnaaaaacgcccnggggncacacnnangttctggaaaaatcncgaaggagtccggggccacacgcggaccagc

SEQ ID NO: 732200 - DNA, 2086 bp, Homo sapiens
ggactgctcttccagaggcaagaccaaccaagatgagtgccctgggagctgtcattgccctcctgctctggggacagctttttgcagtggactcaggcaatgatgtcacggatatcgcagatgacggctgcccgaagccccccgagattgcacatggctatgtggagcactcggttcgctaccagtgtaagaactactacaaactgcgcacagaaggagatgagatggtaagatgtggacaactgtctccatgccctacatacaacccccttctctgacatttccatgatgggtggtgctgaggtgattcgccagaaagttcgttgctctccttggagccaggagatttagattctaataagcgttttgtcgccagtagccatggccctttgggcagactaacttttgtcagcctcaagttttctgttttgttaaggggaggcgatgccatgcagcctacctcatgtaaatctcagagtcagatttacatctccagcagatgtgggaaaagaaggaatgctgatgatgatgtcaccctcacctagtgagtcttgctgtcctggcactgctctaagggctttatacttatttgctcacttagtcctcacagtatccctctgaacagagtttattgttttcactttgctgataaggaaactgaggcacagacaggttgagtatcttgcccaaattcaggcagcctgtaagaggcagagtcaggatttgaaccctgagccctccctgtactgcttggctgtgaccgccatgaccacagtgtgttctgctgggcttaactggcatccaggcacttggcttccagcacagcactctttcccttcctccttctcatatactctctccttttccccttcctttttgtccccttttcctcttccttttagttcttctctttaaatgccttctcactctgcacggggtctagacttgacttctcctttggctcacttcttgccttttgtttcaggagtgtacaccttaaacaatgggaagcagtggataaataaggctgttggagataaacttcctgaatgtgaagcagtatgtgggaagcccaagaatccggcaaacccagtgcagcggatcctgggtggacacctggatgccaaaggcagctttccctggcaggctaagatggtttcccaccataatctcaccacaggtgccacgctgatcaatgaacaatggctgctgaccacggctaaaaatctcttcctgaaccattcagaaaatgcaacagcgaaagacattgcccctactttaacactctatgtggggaaaaagcagcttgtagagattgagaaggttgttctacaccctaactactcccaggtagatattgggctcatcaaactcaaacagaaggtgtctgttaatgagagagtgatgcccatctgcctaccttcaaaggattatgcagaagtagggcgtgtgggttatgtttctggctgggggcgaaatgccaattttaaatttactgaccatctgaagtatgtcatgctgcctgtggctgaccaagaccaatgcataaggcattatgaaggcagcacagtccccgaaaagaagacaccgaagagccctgtaggggtgcagcccatactgaatgaacacaccttctgtgctggcatgtctaagtaccaagaagacacctgctatggcgatgcgggcagtgcctttgccgttcacgacctggaggaggacacctggtatgcgactgggatcttaagctttgataagagctgtgctgtggctgagtatggtgtgtatgtgaaggtgacttccatccaggactgggttcagcctggaagagggcaaagtggacgggagtggacaggagtggatgcgataagatgtggtttgaagctgatgggtgccagccctgcattgctgagtcaatcaataaagagctttcttttgacccagtaacaaaaacaaacgaaaaaacacaaaaaagggtgagacgccgggcaccagaaagattctaaacacaccgggggcacgggcccaagagaaggcacacgggcaagaggtgcccaggaaccggacgacaagaggggtccacaaaaag

SEQ ID NO: 732201 - DNA, 2091 bp, Homo sapiens
  misc_feature (1942)..(1942): n is a, c, g, or t
  misc_feature (1995)..(1995): n is a, c, g, or t
ggactgctcttccagaggcaagaccaaccaagatgagtgccctgggagctgtcattgccctcctgctctggggacagctttttgcagtggactcaggcaatgatgtcacggatatcgcagatgacggctgcccgaagccccccgagattgcacatggctatgtggagcactcggttcgctaccagtgtaagaactactacaaactgcgcacagaaggagatgagatggtaagatgtggacaactgtctccatgccctacatacaacccccttctctgacatttccatgatgggtggtgctgaggtgattcgccagaaagttcgttgctctccttggagccaggagatttagattctaataagcgttttgtcgccagtagccatggccctttgggcagactaacttttgtcagcctcaagttttctgttttgttaaggggaggcgatgccatgcagcctacctcatgtaaatctcagagtcagatttacatctccagcagatgtgggaaaagaaggaatgctgatgatgatgtcaccctcacctagtgagtcttgctgtcctggcactgctctaagggctttatacttatttgctcacttagtcctcacagtatccctctgaacagagtttattgttttcactttgctgataaggaaactgaggcacagacaggttgagtatcttgcccaaattcaggcagcctgtaagaggcagagtcaggatttgaaccctgagccctccctgtactgcttggctgtgaccgccatgaccacagtgtgttctgctgggcttaactggcatccaggcacttggcttccagcacagcactctttcccttcctccttctcatatactctctccttttccccttcctttttgtccccttttcctcttccttttagttcttctctttaaatgccttctcactctgcacggggtctagacttgacttctcctttggctcacttcttgccttttgtttcaggagtgtacaccttaaacaatgggaagcagtggataaataaggctgttggagataaacttcctgaatgtgaagcagtatgtgggaagcccaagaatccggcaaacccagtgcagcggatcctgggtggacacctggatgccaaaggcagctttccctggcaggctaagatggtttcccaccataatctcaccacaggtgccacgctgatcaatgaacaatggctgctgaccacggctaaaaatctcttcctgaaccattcagaaaatgcaacagcgaaagacattgcccctactttaacactctatgtggggaaaaagcagcttgtagagattgagaaggttgttctacaccctaactactcccaggtagatattgggctcatcaaactcaaacagaaggtgtctgttaatgagagagtgatgcccatctgcctaccttcaaaggattatgcagaagtagggcgtgtgggttatgtttctggctgggggcgaaatgccaattttaaatttactgaccatctgaagtatgtcatgctgcctgtggctgaccaagaccaatgcataaggcattatgaaggcagcacagtccccgaaaagaagacaccgaagagccctgtaggggtgcagcccatactgaatgaacacaccttctgtgctggcatgtctaagtaccaagaagacacctgctatggcgatgcgggcagtgcctttgccgttcacgacctggaggaggacacctggtatgcgactgggatcttaagctttgataagagctgtgctgtggctgagtatggtgtgtatgtgaaggtgacttccatccaggactgggttcagcctggaagagggcaaagtggacgggagtggacaggagtggatgcgataagatgtggtttgaagctgatgggtgccagccctgcattgctgagtcaatcaataaagagctttcttttgacccaangattgacccacaaaaaaaaaaaaaaaaaaaaaaaaaaaaaattttggggcgcntgggccgaaaatttttaaacccttttggggcggcggcctgtttgtgaccgggccaaggggtcccagagaaccggcgaagtggcgtggttcccccaa

SEQ ID NO: 732202 - DNA, 2154 bp, Homo sapiens
  misc_feature (1942)..(1942): n is a, c, g, or t
  misc_feature (2154)..(2154): n is a, c, g, or t
ggactgctcttccagaggcaagaccaaccaagatgagtgccctgggagctgtcattgccctcctgctctggggacagctttttgcagtggactcaggcaatgatgtcacggatatcgcagatgacggctgcccgaagccccccgagattgcacatggctatgtggagcactcggttcgctaccagtgtaagaactactacaaactgcgcacagaaggagatgagatggtaagatgtggacaactgtctccatgccctacatacaacccccttctctgacatttccatgatgggtggtgctgaggtgattcgccagaaagttcgttgctctccttggagccaggagatttagattctaataagcgttttgtcgccagtagccatggccctttgggcagactaacttttgtcagcctcaagttttctgttttgttaaggggaggcgatgccatgcagcctacctcatgtaaatctcagagtcagatttacatctccagcagatgtgggaaaagaaggaatgctgatgatgatgtcaccctcacctagtgagtcttgctgtcctggcactgctctaagggctttatacttatttgctcacttagtcctcacagtatccctctgaacagagtttattgttttcactttgctgataaggaaactgaggcacagacaggttgagtatcttgcccaaattcaggcagcctgtaagaggcagagtcaggatttgaaccctgagccctccctgtactgcttggctgtgaccgccatgaccacagtgtgttctgctgggcttaactggcatccaggcacttggcttccagcacagcactctttcccttcctccttctcatatactctctccttttccccttcctttttgtccccttttcctcttccttttagttcttctctttaaatgccttctcactctgcacggggtctagacttgacttctcctttggctcacttcttgccttttgtttcaggagtgtacaccttaaacaatgggaagcagtggataaataaggctgttggagataaacttcctgaatgtgaagcagtatgtgggaagcccaagaatccggcaaacccagtgcagcggatcctgggtggacacctggatgccaaaggcagctttccctggcaggctaagatggtttcccaccataatctcaccacaggtgccacgctgatcaatgaacaatggctgctgaccacggctaaaaatctcttcctgaaccattcagaaaatgcaacagcgaaagacattgcccctactttaacactctatgtggggaaaaagcagcttgtagagattgagaaggttgttctacaccctaactactcccaggtagatattgggctcatcaaactcaaacagaaggtgtctgttaatgagagagtgatgcccatctgcctaccttcaaaggattatgcagaagtagggcgtgtgggttatgtttctggctgggggcgaaatgccaattttaaatttactgaccatctgaagtatgtcatgctgcctgtggctgaccaagaccaatgcataaggcattatgaaggcagcacagtccccgaaaagaagacaccgaagagccctgtaggggtgcagcccatactgaatgaacacaccttctgtgctggcatgtctaagtaccaagaagacacctgctatggcgatgcgggcagtgcctttgccgttcacgacctggaggaggacacctggtatgcgactgggatcttaagctttgataagagctgtgctgtggctgagtatggtgtgtatgtgaaggtgacttccatccaggactgggttcagcctggaagagggcaaagtggacgggagtggacaggagtggatgcgataagatgtggtttgaagctgatgggtgccagccctgcattgctgagtcaatcaataaagagctttcttttgacccaangattgacccacaaaaaaaaaaaaaaaaaaaaaaaaaaaaaattttggtggggggattgggcccttgaaaagggttttgaaaacattctgggtgggagcccgggggccaagatgggataggtggaccatgggacaaaaggggttcccaaggaaaaccggggaccaagaaacaaagggcgagggatttctccacaagttaaaaaaggcccggan

SEQ ID NO: 732203 - DNA, 2111 bp, Homo sapiens
ggactgctcttccagaggcaagaccaaccaagatgagtgccctgggagctgtcattgccctcctgctctggggacagctttttgcagtggactcaggcaatgatgtcacggatatcgcagatgacggctgcccgaagccccccgagattgcacatggctatgtggagcactcggttcgctaccagtgtaagaactactacaaactgcgcacagaaggagatgagatggtaagatgtggacaactgtctccatgccctacatacaacccccttctctgacatttccatgatgggtggtgctgaggtgattcgccagaaagttcgttgctctccttggagccaggagatttagattctaataagcgttttgtcgccagtagccatggccctttgggcagactaacttttgtcagcctcaagttttctgttttgttaaggggaggcgatgccatgcagcctacctcatgtaaatctcagagtcagatttacatctccagcagatgtgggaaaagaaggaatgctgatgatgatgtcaccctcacctagtgagtcttgctgtcctggcactgctctaagggctttatacttatttgctcacttagtcctcacagtatccctctgaacagagtttattgttttcactttgctgataaggaaactgaggcacagacaggttgagtatcttgcccaaattcaggcagcctgtaagaggcagagtcaggatttgaaccctgagccctccctgtactgcttggctgtgaccgccatgaccacagtgtgttctgctgggcttaactggcatccaggcacttggcttccagcacagcactctttcccttcctccttctcatatactctctccttttccccttcctttttgtccccttttcctcttccttttagttcttctctttaaatgccttctcactctgcacggggtctagacttgacttctcctttggctcacttcttgccttttgtttcaggagtgtacaccttaaacaatgggaagcagtggataaataaggctgttggagataaacttcctgaatgtgaagcagtatgtgggaagcccaagaatccggcaaacccagtgcagcggatcctgggtggacacctggatgccaaaggcagctttccctggcaggctaagatggtttcccaccataatctcaccacaggtgccacgctgatcaatgaacaatggctgctgaccacggctaaaaatctcttcctgaaccattcagaaaatgcaacagcgaaagacattgcccctactttaacactctatgtggggaaaaagcagcttgtagagattgagaaggttgttctacaccctaactactcccaggtagatattgggctcatcaaactcaaacagaaggtgtctgttaatgagagagtgatgcccatctgcctaccttcaaaggattatgcagaagtagggcgtgtgggttatgtttctggctgggggcgaaatgccaattttaaatttactgaccatctgaagtatgtcatgctgcctgtggctgaccaagaccaatgcataaggcattatgaaggcagcacagtccccgaaaagaagacaccgaagagccctgtaggggtgcagcccatactgaatgaacacaccttctgtgctggcatgtctaagtaccaagaagacacctgctatggcgatgcgggcagtgcctttgccgttcacgacctggaggaggacacctggtatgcgactgggatcttaagctttgataagagctgtgctgtggctgagtatggtgtgtatgtgaaggtgacttccatccaggactgggttcagcctggaagagggcaaagtggacgggagtggacaggagtggatgcgataagatgtggtttgaagctgatgggtgccagccctgcattgctgagtcaatcaataaagagctttcttttgacccaaccccatagaacaacaccaacacaacacaatcataaccaaacaactcacacccccacaacaaacaaaaactaattcaacctcactcacaaaaataccacaaaacaaagaaaacagacacaaaaaaaaaccacaagacacacagacctataatgcacaaaaacacaaaagag

SEQ ID NO: 732204 - DNA, 2122 bp, Homo sapiens
  misc_feature (1951)..(1951): n is a, c, g, or t
  misc_feature (2122)..(2122): n is a, c, g, or t
ggactgctcttccagaggcaagaccaaccaagatgagtgccctgggagctgtcattgccctcctgctctggggacagctttttgcagtggactcaggcaatgatgtcacggatatcgcagatgacggctgcccgaagccccccgagattgcacatggctatgtggagcactcggttcgctaccagtgtaagaactactacaaactgcgcacagaaggagatgagatggtaagatgtggacaactgtctccatgccctacatacaacccccttctctgacatttccatgatgggtggtgctgaggtgattcgccagaaagttcgttgctctccttggagccaggagatttagattctaataagcgttttgtcgccagtagccatggccctttgggcagactaacttttgtcagcctcaagttttctgttttgttaaggggaggcgatgccatgcagcctacctcatgtaaatctcagagtcagatttacatctccagcagatgtgggaaaagaaggaatgctgatgatgatgtcaccctcacctagtgagtcttgctgtcctggcactgctctaagggctttatacttatttgctcacttagtcctcacagtatccctctgaacagagtttattgttttcactttgctgataaggaaactgaggcacagacaggttgagtatcttgcccaaattcaggcagcctgtaagaggcagagtcaggatttgaaccctgagccctccctgtactgcttggctgtgaccgccatgaccacagtgtgttctgctgggcttaactggcatccaggcacttggcttccagcacagcactctttcccttcctccttctcatatactctctccttttccccttcctttttgtccccttttcctcttccttttagttcttctctttaaatgccttctcactctgcacggggtctagacttgacttctcctttggctcacttcttgccttttgtttcaggagtgtacaccttaaacaatgggaagcagtggataaataaggctgttggagataaacttcctgaatgtgaagcagtatgtgggaagcccaagaatccggcaaacccagtgcagcggatcctgggtggacacctggatgccaaaggcagctttccctggcaggctaagatggtttcccaccataatctcaccacaggtgccacgctgatcaatgaacaatggctgctgaccacggctaaaaatctcttcctgaaccattcagaaaatgcaacagcgaaagacattgcccctactttaacactctatgtggggaaaaagcagcttgtagagattgagaaggttgttctacaccctaactactcccaggtagatattgggctcatcaaactcaaacagaaggtgtctgttaatgagagagtgatgcccatctgcctaccttcaaaggattatgcagaagtagggcgtgtgggttatgtttctggctgggggcgaaatgccaattttaaatttactgaccatctgaagtatgtcatgctgcctgtggctgaccaagaccaatgcataaggcattatgaaggcagcacagtccccgaaaagaagacaccgaagagccctgtaggggtgcagcccatactgaatgaacacaccttctgtgctggcatgtctaagtaccaagaagacacctgctatggcgatgcgggcagtgcctttgccgttcacgacctggaggaggacacctggtatgcgactgggatcttaagctttgataagagctgtgctgtggctgagtatggtgtgtatgtgaaggtgacttccatccaggactgggttcagcctggaagagggcaaagtggacgggagtggacaggagtggatgcgataagatgtggtttgaagctgatgggtgccagccctgcattgctgagtcaatcaataaagagctttcttttgacccaaaaaaaaaaanaagagaaaaaagacacacaacacgtggtggcacggcatcaggagcccgaggaaagcgtggcgagaaacatggagatgggagacgcgcgggcaccggaggtatagaggacacacgggcgacagaggagggccctaggaaaaccggggagagaacaagggccgggaattccan

SEQ ID NO: 732205 - DNA, 2211 bp, Homo sapiens
ggactgctcttccagaggcaagaccaaccaagatgagtgccctgggagctgtcattgccctcctgctctggggacagctttttgcagtggactcaggcaatgatgtcacggatatcgcagatgacggctgcccgaagccccccgagattgcacatggctatgtggagcactcggttcgctaccagtgtaagaactactacaaactgcgcacagaaggagatgagatggtaagatgtggacaactgtctccatgccctacatacaacccccttctctgacatttccatgatgggtggtgctgaggtgattcgccagaaagttcgttgctctccttggagccaggagatttagattctaataagcgttttgtcgccagtagccatggccctttgggcagactaacttttgtcagcctcaagttttctgttttgttaaggggaggcgatgccatgcagcctacctcatgtaaatctcagagtcagatttacatctccagcagatgtgggaaaagaaggaatgctgatgatgatgtcaccctcacctagtgagtcttgctgtcctggcactgctctaagggctttatacttatttgctcacttagtcctcacagtatccctctgaacagagtttattgttttcactttgctgataaggaaactgaggcacagacaggttgagtatcttgcccaaattcaggcagcctgtaagaggcagagtcaggatttgaaccctgagccctccctgtactgcttggctgtgaccgccatgaccacagtgtgttctgctgggcttaactggcatccaggcacttggcttccagcacagcactctttcccttcctccttctcatatactctctccttttccccttcctttttgtccccttttcctcttccttttagttcttctctttaaatgccttctcactctgcacggggtctagacttgacttctcctttggctcacttcttgccttttgtttcaggagtgtacaccttaaacaatgggaagcagtggataaataaggctgttggagataaacttcctgaatgtgaagcagtatgtgggaagcccaagaatccggcaaacccagtgcagcggatcctgggtggacacctggatgccaaaggcagctttccctggcaggctaagatggtttcccaccataatctcaccacaggtgccacgctgatcaatgaacaatggctgctgaccacggctaaaaatctcttcctgaaccattcagaaaatgcaacagcgaaagacattgcccctactttaacactctatgtggggaaaaagcagcttgtagagattgagaaggttgttctacaccctaactactcccaggtagatattgggctcatcaaactcaaacagaaggtgtctgttaatgagagagtgatgcccatctgcctaccttcaaaggattatgcagaagtagggcgtgtgggttatgtttctggctgggggcgaaatgccaattttaaatttactgaccatctgaagtatgtcatgctgcctgtggctgaccaagaccaatgcataaggcattatgaaggcagcacagtccccgaaaagaagacaccgaagagccctgtaggggtgcagcccatactgaatgaacacaccttctgtgctggcatgtctaagtaccaagaagacacctgctatggcgatgcgggcagtgcctttgccgttcacgacctggaggaggacacctggtatgcgactgggatcttaagctttgataagagctgtgctgtggctgagtatggtgtgtatgtgaaggtgacttccatccaggactgggttcagcctggaagagggcaaagtggacgggagtggacaggagtggatgcgataagatgtggtttgaagctgatgggtgccagccctgcattgctgagtcaatcaataaagagctttcttttgacccataaaaaaaaaaccacaacaaaaacttttggcccccttgggccccggaaaagtttcaaaacattcgttggggcggggcgcaaggggaacgggaaccgggcaaagcggtccaaggaaacccgtgcgccagagaaaagagcggagagatttcccaccatgtaaaaaaagcccggggggaacaccggcgcgttctggaacacactccgagagggccctcagaggcacaaaacgggacgcatccagagggtgccagaggaaaccgcaataaaaccg

SEQ ID NO: 732206 - DNA, 2223 bp, Homo sapiens
  misc_feature (2139)..(2139): n is a, c, g, or t
  misc_feature (2149)..(2149): n is a, c, g, or t
  misc_feature (2152)..(2152): n is a, c, g, or t
  misc_feature (2163)..(2163): n is a, c, g, or t
  misc_feature (2168)..(2168): n is a, c, g, or t
  misc_feature (2174)..(2175): n is a, c, g, or t
  misc_feature (2177)..(2177): n is a, c, g, or t
  misc_feature (2192)..(2192): n is a, c, g, or t
ggactgctcttccagaggcaagaccaaccaagatgagtgccctgggagctgtcattgccctcctgctctggggacagctttttgcagtggactcaggcaatgatgtcacggatatcgcagatgacggctgcccgaagccccccgagattgcacatggctatgtggagcactcggttcgctaccagtgtaagaactactacaaactgcgcacagaaggagatgagatggtaagatgtggacaactgtctccatgccctacatacaacccccttctctgacatttccatgatgggtggtgctgaggtgattcgccagaaagttcgttgctctccttggagccaggagatttagattctaataagcgttttgtcgccagtagccatggccctttgggcagactaacttttgtcagcctcaagttttctgttttgttaaggggaggcgatgccatgcagcctacctcatgtaaatctcagagtcagatttacatctccagcagatgtgggaaaagaaggaatgctgatgatgatgtcaccctcacctagtgagtcttgctgtcctggcactgctctaagggctttatacttatttgctcacttagtcctcacagtatccctctgaacagagtttattgttttcactttgctgataaggaaactgaggcacagacaggttgagtatcttgcccaaattcaggcagcctgtaagaggcagagtcaggatttgaaccctgagccctccctgtactgcttggctgtgaccgccatgaccacagtgtgttctgctgggcttaactggcatccaggcacttggcttccagcacagcactctttcccttcctccttctcatatactctctccttttccccttcctttttgtccccttttcctcttccttttagttcttctctttaaatgccttctcactctgcacggggtctagacttgacttctcctttggctcacttcttgccttttgtttcaggagtgtacaccttaaacaatgggaagcagtggataaataaggctgttggagataaacttcctgaatgtgaagcagtatgtgggaagcccaagaatccggcaaacccagtgcagcggatcctgggtggacacctggatgccaaaggcagctttccctggcaggctaagatggtttcccaccataatctcaccacaggtgccacgctgatcaatgaacaatggctgctgaccacggctaaaaatctcttcctgaaccattcagaaaatgcaacagcgaaagacattgcccctactttaacactctatgtggggaaaaagcagcttgtagagattgagaaggttgttctacaccctaactactcccaggtagatattgggctcatcaaactcaaacagaaggtgtctgttaatgagagagtgatgcccatctgcctaccttcaaaggattatgcagaagtagggcgtgtgggttatgtttctggctgggggcgaaatgccaattttaaatttactgaccatctgaagtatgtcatgctgcctgtggctgaccaagaccaatgcataaggcattatgaaggcagcacagtccccgaaaagaagacaccgaagagccctgtaggggtgcagcccatactgaatgaacacaccttctgtgctggcatgtctaagtaccaagaagacacctgctatggcgatgcgggcagtgcctttgccgttcacgacctggaggaggacacctggtatgcgactgggatcttaagctttgataagagctgtgctgtggctgagtatggtgtgtatgtgaaggtgacttccatccaggactgggttcagcctggaagagggcaaagtggacgggagtggacaggagtggatgcgataagatgtggtttgaagctgatgggtgccagccctgcattgctgagtcaatcaataaagagctttcttttgacccaaaaaaaaaaggaacaaaaaacaaaaaaaaaacctttttggggccgcgtgggccccttggaagaaacttttttcataaaaaccacctttcgtttgtgtagcgccgggggccccatagagtgatataggtcgaccacgtggtcaacacagatggtgttccctaaggagaaactgggggacaagtacacaatgcgcctgggnattcctcccnatnaaaaacgcccnggggncacacnnangttctggaaaaatcncgaaggagtccggggccacacgcggaccagc

SEQ ID NO: 732207 - DNA, 2081 bp, Homo sapiens
  misc_feature (1985)..(1985): n is a, c, g, or t
ggactgctcttccagaggcaagaccaaccaagatgagtgccctgggagctgtcattgccctcctgctctggggacagctttttgcagtggactcaggcaatgatgtcacggatatcgcagatgacggctgcccgaagccccccgagattgcacatggctatgtggagcactcggttcgctaccagtgtaagaactactacaaactgcgcacagaaggagatgagatggtaagatgtggacaactgtctccatgccctacatacaacccccttctctgacatttccatgatgggtggtgctgaggtgattcgccagaaagttcgttgctctccttggagccaggagatttagattctaataagcgttttgtcgccagtagccatggccctttgggcagactaacttttgtcagcctcaagttttctgttttgttaaggggaggcgatgccatgcagcctacctcatgtaaatctcagagtcagatttacatctccagcagatgtgggaaaagaaggaatgctgatgatgatgtcaccctcacctagtgagtcttgctgtcctggcactgctctaagggctttatacttatttgctcacttagtcctcacagtatccctctgaacagagtttattgttttcactttgctgataaggaaactgaggcacagacaggttgagtatcttgcccaaattcaggcagcctgtaagaggcagagtcaggatttgaaccctgagccctccctgtactgcttggctgtgaccgccatgaccacagtgtgttctgctgggcttaactggcatccaggcacttggcttccagcacagcactctttcccttcctccttctcatatactctctccttttccccttcctttttgtccccttttcctcttccttttagttcttctctttaaatgccttctcactctgcacggggtctagacttgacttctcctttggctcacttcttgccttttgtttcaggagtgtacaccttaaacaatgggaagcagtggataaataaggctgttggagataaacttcctgaatgtgaagcagtatgtgggaagcccaagaatccggcaaacccagtgcagcggatcctgggtggacacctggatgccaaaggcagctttccctggcaggctaagatggtttcccaccataatctcaccacaggtgccacgctgatcaatgaacaatggctgctgaccacggctaaaaatctcttcctgaaccattcagaaaatgcaacagcgaaagacattgcccctactttaacactctatgtggggaaaaagcagcttgtagagattgagaaggttgttctacaccctaactactcccaggtagatattgggctcatcaaactcaaacagaaggtgtctgttaatgagagagtgatgcccatctgcctaccttcaaaggattatgcagaagtagggcgtgtgggttatgtttctggctgggggcgaaatgccaattttaaatttactgaccatctgaagtatgtcatgctgcctgtggctgaccaagaccaatgcataaggcattatgaaggcagcacagtccccgaaaagaagacaccgaagagccctgtaggggtgcagcccatactgaatgaacacaccttctgtgctggcatgtctaagtaccaagaagacacctgctatggcgatgcgggcagtgcctttgccgttcacgacctggaggctgagtatggtgtgtatgtgaaggtgacttccatccaggactgggttcagaagaccatagctgagaactaatgcaaggctggccggaagcccttgcctgaaagcaagatttcagcctggaagagggcaaagtggacgggagtggacaggagtggatgcgataagatgtggtttgaagctgatgggtgccagccctgcattgctgagtcaatcaataaagagctttcttttgacccaaaaaaaaaaaaaaaaaaaaaaaattttggggcgcntgggccgaaaatttttaaacccttttggggcggcggcctgtttgtgaccgggccaaggggtcccagagaaccggcgaagtggcgtggttcccccaa

SEQ ID NO: 732208 - DNA, 2144 bp, Homo sapiens
  misc_feature (2144)..(2144): n is a, c, g, or t
ggactgctcttccagaggcaagaccaaccaagatgagtgccctgggagctgtcattgccctcctgctctggggacagctttttgcagtggactcaggcaatgatgtcacggatatcgcagatgacggctgcccgaagccccccgagattgcacatggctatgtggagcactcggttcgctaccagtgtaagaactactacaaactgcgcacagaaggagatgagatggtaagatgtggacaactgtctccatgccctacatacaacccccttctctgacatttccatgatgggtggtgctgaggtgattcgccagaaagttcgttgctctccttggagccaggagatttagattctaataagcgttttgtcgccagtagccatggccctttgggcagactaacttttgtcagcctcaagttttctgttttgttaaggggaggcgatgccatgcagcctacctcatgtaaatctcagagtcagatttacatctccagcagatgtgggaaaagaaggaatgctgatgatgatgtcaccctcacctagtgagtcttgctgtcctggcactgctctaagggctttatacttatttgctcacttagtcctcacagtatccctctgaacagagtttattgttttcactttgctgataaggaaactgaggcacagacaggttgagtatcttgcccaaattcaggcagcctgtaagaggcagagtcaggatttgaaccctgagccctccctgtactgcttggctgtgaccgccatgaccacagtgtgttctgctgggcttaactggcatccaggcacttggcttccagcacagcactctttcccttcctccttctcatatactctctccttttccccttcctttttgtccccttttcctcttccttttagttcttctctttaaatgccttctcactctgcacggggtctagacttgacttctcctttggctcacttcttgccttttgtttcaggagtgtacaccttaaacaatgggaagcagtggataaataaggctgttggagataaacttcctgaatgtgaagcagtatgtgggaagcccaagaatccggcaaacccagtgcagcggatcctgggtggacacctggatgccaaaggcagctttccctggcaggctaagatggtttcccaccataatctcaccacaggtgccacgctgatcaatgaacaatggctgctgaccacggctaaaaatctcttcctgaaccattcagaaaatgcaacagcgaaagacattgcccctactttaacactctatgtggggaaaaagcagcttgtagagattgagaaggttgttctacaccctaactactcccaggtagatattgggctcatcaaactcaaacagaaggtgtctgttaatgagagagtgatgcccatctgcctaccttcaaaggattatgcagaagtagggcgtgtgggttatgtttctggctgggggcgaaatgccaattttaaatttactgaccatctgaagtatgtcatgctgcctgtggctgaccaagaccaatgcataaggcattatgaaggcagcacagtccccgaaaagaagacaccgaagagccctgtaggggtgcagcccatactgaatgaacacaccttctgtgctggcatgtctaagtaccaagaagacacctgctatggcgatgcgggcagtgcctttgccgttcacgacctggaggctgagtatggtgtgtatgtgaaggtgacttccatccaggactgggttcagaagaccatagctgagaactaatgcaaggctggccggaagcccttgcctgaaagcaagatttcagcctggaagagggcaaagtggacgggagtggacaggagtggatgcgataagatgtggtttgaagctgatgggtgccagccctgcattgctgagtcaatcaataaagagctttcttttgacccaaaaaaaaaaaaaaaaaaaaaaaattttggtggggggattgggcccttgaaaagggttttgaaaacattctgggtgggagcccgggggccaagatgggataggtggaccatgggacaaaaggggttcccaaggaaaaccggggaccaagaaacaaagggcgagggatttctccacaagttaaaaaaggcccggan

SEQ ID NO: 732209 - DNA, 2108 bp, Homo sapiens
  misc_feature (2012)..(2012): n is a, c, g, or t
ggactgctcttccagaggcaagaccaaccaagatgagtgccctgggagctgtcattgccctcctgctctggggacagctttttgcagtggactcaggcaatgatgtcacggatatcgcagatgacggctgcccgaagccccccgagattgcacatggctatgtggagcactcggttcgctaccagtgtaagaactactacaaactgcgcacagaaggagatgagatggtaagatgtggacaactgtctccatgccctacatacaacccccttctctgacatttccatgatgggtggtgctgaggtgattcgccagaaagttcgttgctctccttggagccaggagatttagattctaataagcgttttgtcgccagtagccatggccctttgggcagactaacttttgtcagcctcaagttttctgttttgttaaggggaggcgatgccatgcagcctacctcatgtaaatctcagagtcagatttacatctccagcagatgtgggaaaagaaggaatgctgatgatgatgtcaccctcacctagtgagtcttgctgtcctggcactgctctaagggctttatacttatttgctcacttagtcctcacagtatccctctgaacagagtttattgttttcactttgctgataaggaaactgaggcacagacaggttgagtatcttgcccaaattcaggcagcctgtaagaggcagagtcaggatttgaaccctgagccctccctgtactgcttggctgtgaccgccatgaccacagtgtgttctgctgggcttaactggcatccaggcacttggcttccagcacagcactctttcccttcctccttctcatatactctctccttttccccttcctttttgtccccttttcctcttccttttagttcttctctttaaatgccttctcactctgcacggggtctagacttgacttctcctttggctcacttcttgccttttgtttcaggagtgtacaccttaaacaatgggaagcagtggataaataaggctgttggagataaacttcctgaatgtgaagcagtatgtgggaagcccaagaatccggcaaacccagtgcagcggatcctgggtggacacctggatgccaaaggcagctttccctggcaggctaagatggtttcccaccataatctcaccacaggtgccacgctgatcaatgaacaatggctgctgaccacggctaaaaatctcttcctgaaccattcagaaaatgcaacagcgaaagacattgcccctactttaacactctatgtggggaaaaagcagcttgtagagattgagaaggttgttctacaccctaactactcccaggtagatattgggctcatcaaactcaaacagaaggtgtctgttaatgagagagtgatgcccatctgcctaccttcaaaggattatgcagaagtagggcgtgtgggttatgtttctggctgggggcgaaatgccaattttaaatttactgaccatctgaagtatgtcatgctgcctgtggctgaccaagaccaatgcataaggcattatgaaggcagcacagtccccgaaaagaagacaccgaagagccctgtaggggtgcagcccatactgaatgaacacaccttctgtgctggcatgtctaagtaccaagaagacacctgctatggcgatgcgggcagtgcctttgccgttcacgacctggaggctgagtatggtgtgtatgtgaaggtgacttccatccaggactgggttcagaagaccatagctgagaactaatgcaaggctggccggaagcccttgcctgaaagcaagatttcagcctggaagagggcaaagtggacgggagtggacaggagtggatgcgataagatgtggtttgaagctgatgggtgccagccctgcattgctgagtcaatcaataaagagctttcttttgacccaaaaaaaaaaaaaaaaaaaaaaacaaaaaaaaaaaaaaaaaaaaaaaaaaattttggggcgcntgggccgaaaatttttaaacccttttggggcggcggcctgtttgtgaccgggccaaggggtcccagagaaccggcgaagtggcgtggttcccccaa

SEQ ID NO: 732210 - DNA, 2171 bp, Homo sapiens
  misc_feature (2171)..(2171): n is a, c, g, or t
ggactgctcttccagaggcaagaccaaccaagatgagtgccctgggagctgtcattgccctcctgctctggggacagctttttgcagtggactcaggcaatgatgtcacggatatcgcagatgacggctgcccgaagccccccgagattgcacatggctatgtggagcactcggttcgctaccagtgtaagaactactacaaactgcgcacagaaggagatgagatggtaagatgtggacaactgtctccatgccctacatacaacccccttctctgacatttccatgatgggtggtgctgaggtgattcgccagaaagttcgttgctctccttggagccaggagatttagattctaataagcgttttgtcgccagtagccatggccctttgggcagactaacttttgtcagcctcaagttttctgttttgttaaggggaggcgatgccatgcagcctacctcatgtaaatctcagagtcagatttacatctccagcagatgtgggaaaagaaggaatgctgatgatgatgtcaccctcacctagtgagtcttgctgtcctggcactgctctaagggctttatacttatttgctcacttagtcctcacagtatccctctgaacagagtttattgttttcactttgctgataaggaaactgaggcacagacaggttgagtatcttgcccaaattcaggcagcctgtaagaggcagagtcaggatttgaaccctgagccctccctgtactgcttggctgtgaccgccatgaccacagtgtgttctgctgggcttaactggcatccaggcacttggcttccagcacagcactctttcccttcctccttctcatatactctctccttttccccttcctttttgtccccttttcctcttccttttagttcttctctttaaatgccttctcactctgcacggggtctagacttgacttctcctttggctcacttcttgccttttgtttcaggagtgtacaccttaaacaatgggaagcagtggataaataaggctgttggagataaacttcctgaatgtgaagcagtatgtgggaagcccaagaatccggcaaacccagtgcagcggatcctgggtggacacctggatgccaaaggcagctttccctggcaggctaagatggtttcccaccataatctcaccacaggtgccacgctgatcaatgaacaatggctgctgaccacggctaaaaatctcttcctgaaccattcagaaaatgcaacagcgaaagacattgcccctactttaacactctatgtggggaaaaagcagcttgtagagattgagaaggttgttctacaccctaactactcccaggtagatattgggctcatcaaactcaaacagaaggtgtctgttaatgagagagtgatgcccatctgcctaccttcaaaggattatgcagaagtagggcgtgtgggttatgtttctggctgggggcgaaatgccaattttaaatttactgaccatctgaagtatgtcatgctgcctgtggctgaccaagaccaatgcataaggcattatgaaggcagcacagtccccgaaaagaagacaccgaagagccctgtaggggtgcagcccatactgaatgaacacaccttctgtgctggcatgtctaagtaccaagaagacacctgctatggcgatgcgggcagtgcctttgccgttcacgacctggaggctgagtatggtgtgtatgtgaaggtgacttccatccaggactgggttcagaagaccatagctgagaactaatgcaaggctggccggaagcccttgcctgaaagcaagatttcagcctggaagagggcaaagtggacgggagtggacaggagtggatgcgataagatgtggtttgaagctgatgggtgccagccctgcattgctgagtcaatcaataaagagctttcttttgacccaaaaaaaaaaaaaaaaaaaaaaacaaaaaaaaaaaaaaaaaaaaaaaaaaattttggtggggggattgggcccttgaaaagggttttgaaaacattctgggtgggagcccgggggccaagatgggataggtggaccatgggacaaaaggggttcccaaggaaaaccggggaccaagaaacaaagggcgagggatttctccacaagttaaaaaaggcccggan

SEQ ID NO: 732211 - DNA, 2197 bp, Homo sapiens
  misc_feature (2113)..(2113): n is a, c, g, or t
  misc_feature (2123)..(2123): n is a, c, g, or t
  misc_feature (2126)..(2126): n is a, c, g, or t
  misc_feature (2137)..(2137): n is a, c, g, or t
  misc_feature (2142)..(2142): n is a, c, g, or t
  misc_feature (2148)..(2149): n is a, c, g, or t
  misc_feature (2151)..(2151): n is a, c, g, or t
  misc_feature (2166)..(2166): n is a, c, g, or t
ggactgctcttccagaggcaagaccaaccaagatgagtgccctgggagctgtcattgccctcctgctctggggacagctttttgcagtggactcaggcaatgatgtcacggatatcgcagatgacggctgcccgaagccccccgagattgcacatggctatgtggagcactcggttcgctaccagtgtaagaactactacaaactgcgcacagaaggagatgagatggtaagatgtggacaactgtctccatgccctacatacaacccccttctctgacatttccatgatgggtggtgctgaggtgattcgccagaaagttcgttgctctccttggagccaggagatttagattctaataagcgttttgtcgccagtagccatggccctttgggcagactaacttttgtcagcctcaagttttctgttttgttaaggggaggcgatgccatgcagcctacctcatgtaaatctcagagtcagatttacatctccagcagatgtgggaaaagaaggaatgctgatgatgatgtcaccctcacctagtgagtcttgctgtcctggcactgctctaagggctttatacttatttgctcacttagtcctcacagtatccctctgaacagagtttattgttttcactttgctgataaggaaactgaggcacagacaggttgagtatcttgcccaaattcaggcagcctgtaagaggcagagtcaggatttgaaccctgagccctccctgtactgcttggctgtgaccgccatgaccacagtgtgttctgctgggcttaactggcatccaggcacttggcttccagcacagcactctttcccttcctccttctcatatactctctccttttccccttcctttttgtccccttttcctcttccttttagttcttctctttaaatgccttctcactctgcacggggtctagacttgacttctcctttggctcacttcttgccttttgtttcaggagtgtacaccttaaacaatgggaagcagtggataaataaggctgttggagataaacttcctgaatgtgaagcagtatgtgggaagcccaagaatccggcaaacccagtgcagcggatcctgggtggacacctggatgccaaaggcagctttccctggcaggctaagatggtttcccaccataatctcaccacaggtgccacgctgatcaatgaacaatggctgctgaccacggctaaaaatctcttcctgaaccattcagaaaatgcaacagcgaaagacattgcccctactttaacactctatgtggggaaaaagcagcttgtagagattgagaaggttgttctacaccctaactactcccaggtagatattgggctcatcaaactcaaacagaaggtgtctgttaatgagagagtgatgcccatctgcctaccttcaaaggattatgcagaagtagggcgtgtgggttatgtttctggctgggggcgaaatgccaattttaaatttactgaccatctgaagtatgtcatgctgcctgtggctgaccaagaccaatgcataaggcattatgaaggcagcacagtccccgaaaagaagacaccgaagagccctgtaggggtgcagcccatactgaatgaacacaccttctgtgctggcatgtctaagtaccaagaagacacctgctatggcgatgcgggcagtgcctttgccgttcacgacctggaggctgagtatggtgtgtatgtgaaggtgacttccatccaggactgggttcagaagaccatagctgagaactaatgcaaggctggccggaagcccttgcctgaaagcaagatttcagcctggaagagggcaaagtggacgggagtggacaggagtggatgcgataagatgtggtttgaagctgatgggtgccagccctgcattgctgagtcaatcaataaagagctttcttttgacccaaaaaaaaaaaaaaaaaaaaaaacaaaaaacccttttgggcggccttgggccctggaaaagtttttaaaacccttcggttggggcgcgcggcccccttgggttcggtgaacatgggccaaagcgcggtccccaggaaacaccgggcgcacgaccagggccgggnattcctcccnatnaaaaacgcccnggggncacacnnangttctggaaaaatcncgaaggagtccggggccacacgcggaccagc

SEQ ID NO: 732212 - DNA, 2096 bp, Homo sapiens
ggactgctcttccagaggcaagaccaaccaagatgagtgccctgggagctgtcattgccctcctgctctggggacagctttttgcagtggactcaggcaatgatgtcacggatatcgcagatgacggctgcccgaagccccccgagattgcacatggctatgtggagcactcggttcgctaccagtgtaagaactactacaaactgcgcacagaaggagatgagatggtaagatgtggacaactgtctccatgccctacatacaacccccttctctgacatttccatgatgggtggtgctgaggtgattcgccagaaagttcgttgctctccttggagccaggagatttagattctaataagcgttttgtcgccagtagccatggccctttgggcagactaacttttgtcagcctcaagttttctgttttgttaaggggaggcgatgccatgcagcctacctcatgtaaatctcagagtcagatttacatctccagcagatgtgggaaaagaaggaatgctgatgatgatgtcaccctcacctagtgagtcttgctgtcctggcactgctctaagggctttatacttatttgctcacttagtcctcacagtatccctctgaacagagtttattgttttcactttgctgataaggaaactgaggcacagacaggttgagtatcttgcccaaattcaggcagcctgtaagaggcagagtcaggatttgaaccctgagccctccctgtactgcttggctgtgaccgccatgaccacagtgtgttctgctgggcttaactggcatccaggcacttggcttccagcacagcactctttcccttcctccttctcatatactctctccttttccccttcctttttgtccccttttcctcttccttttagttcttctctttaaatgccttctcactctgcacggggtctagacttgacttctcctttggctcacttcttgccttttgtttcaggagtgtacaccttaaacaatgggaagcagtggataaataaggctgttggagataaacttcctgaatgtgaagcagtatgtgggaagcccaagaatccggcaaacccagtgcagcggatcctgggtggacacctggatgccaaaggcagctttccctggcaggctaagatggtttcccaccataatctcaccacaggtgccacgctgatcaatgaacaatggctgctgaccacggctaaaaatctcttcctgaaccattcagaaaatgcaacagcgaaagacattgcccctactttaacactctatgtggggaaaaagcagcttgtagagattgagaaggttgttctacaccctaactactcccaggtagatattgggctcatcaaactcaaacagaaggtgtctgttaatgagagagtgatgcccatctgcctaccttcaaaggattatgcagaagtagggcgtgtgggttatgtttctggctgggggcgaaatgccaattttaaatttactgaccatctgaagtatgtcatgctgcctgtggctgaccaagaccaatgcataaggcattatgaaggcagcacagtccccgaaaagaagacaccgaagagccctgtaggggtgcagcccatactgaatgaacacaccttctgtgctggcatgtctaagtaccaagaagacacctgctatggcgatgcgggcagtgcctttgccgttcacgacctggaggctgagtatggtgtgtatgtgaaggtgacttccatccaggactgggttcagaagaccatagctgagaactaatgcaaggctggccggaagcccttgcctgaaagcaagatttcagcctggaagagggcaaagtggacgggagtggacaggagtggatgcgataagatgtggtttgaagctgatgggtgccagccctgcattgctgagtcaatcaataaagagctttcttttgacccagtaacaaaaacaaacgaaaaaacacaaaaaagggtgagacgccgggcaccagaaagattctaaacacaccgggggcacgggcccaagagaaggcacacgggcaagaggtgcccaggaaccggacgacaagaggggtccacaaaaag

SEQ ID NO: 732213 - DNA, 2101 bp, Homo sapiens
  misc_feature (1952)..(1952): n is a, c, g, or t
  misc_feature (2005)..(2005): n is a, c, g, or t
ggactgctcttccagaggcaagaccaaccaagatgagtgccctgggagctgtcattgccctcctgctctggggacagctttttgcagtggactcaggcaatgatgtcacggatatcgcagatgacggctgcccgaagccccccgagattgcacatggctatgtggagcactcggttcgctaccagtgtaagaactactacaaactgcgcacagaaggagatgagatggtaagatgtggacaactgtctccatgccctacatacaacccccttctctgacatttccatgatgggtggtgctgaggtgattcgccagaaagttcgttgctctccttggagccaggagatttagattctaataagcgttttgtcgccagtagccatggccctttgggcagactaacttttgtcagcctcaagttttctgttttgttaaggggaggcgatgccatgcagcctacctcatgtaaatctcagagtcagatttacatctccagcagatgtgggaaaagaaggaatgctgatgatgatgtcaccctcacctagtgagtcttgctgtcctggcactgctctaagggctttatacttatttgctcacttagtcctcacagtatccctctgaacagagtttattgttttcactttgctgataaggaaactgaggcacagacaggttgagtatcttgcccaaattcaggcagcctgtaagaggcagagtcaggatttgaaccctgagccctccctgtactgcttggctgtgaccgccatgaccacagtgtgttctgctgggcttaactggcatccaggcacttggcttccagcacagcactctttcccttcctccttctcatatactctctccttttccccttcctttttgtccccttttcctcttccttttagttcttctctttaaatgccttctcactctgcacggggtctagacttgacttctcctttggctcacttcttgccttttgtttcaggagtgtacaccttaaacaatgggaagcagtggataaataaggctgttggagataaacttcctgaatgtgaagcagtatgtgggaagcccaagaatccggcaaacccagtgcagcggatcctgggtggacacctggatgccaaaggcagctttccctggcaggctaagatggtttcccaccataatctcaccacaggtgccacgctgatcaatgaacaatggctgctgaccacggctaaaaatctcttcctgaaccattcagaaaatgcaacagcgaaagacattgcccctactttaacactctatgtggggaaaaagcagcttgtagagattgagaaggttgttctacaccctaactactcccaggtagatattgggctcatcaaactcaaacagaaggtgtctgttaatgagagagtgatgcccatctgcctaccttcaaaggattatgcagaagtagggcgtgtgggttatgtttctggctgggggcgaaatgccaattttaaatttactgaccatctgaagtatgtcatgctgcctgtggctgaccaagaccaatgcataaggcattatgaaggcagcacagtccccgaaaagaagacaccgaagagccctgtaggggtgcagcccatactgaatgaacacaccttctgtgctggcatgtctaagtaccaagaagacacctgctatggcgatgcgggcagtgcctttgccgttcacgacctggaggctgagtatggtgtgtatgtgaaggtgacttccatccaggactgggttcagaagaccatagctgagaactaatgcaaggctggccggaagcccttgcctgaaagcaagatttcagcctggaagagggcaaagtggacgggagtggacaggagtggatgcgataagatgtggtttgaagctgatgggtgccagccctgcattgctgagtcaatcaataaagagctttcttttgacccaangattgacccacaaaaaaaaaaaaaaaaaaaaaaaaaaaaaattttggggcgcntgggccgaaaatttttaaacccttttggggcggcggcctgtttgtgaccgggccaaggggtcccagagaaccggcgaagtggcgtggttcccccaa

SEQ ID NO: 732214 - DNA, 2164 bp, Homo sapiens
  misc_feature (1952)..(1952): n is a, c, g, or t
  misc_feature (2164)..(2164): n is a, c, g, or t
ggactgctcttccagaggcaagaccaaccaagatgagtgccctgggagctgtcattgccctcctgctctggggacagctttttgcagtggactcaggcaatgatgtcacggatatcgcagatgacggctgcccgaagccccccgagattgcacatggctatgtggagcactcggttcgctaccagtgtaagaactactacaaactgcgcacagaaggagatgagatggtaagatgtggacaactgtctccatgccctacatacaacccccttctctgacatttccatgatgggtggtgctgaggtgattcgccagaaagttcgttgctctccttggagccaggagatttagattctaataagcgttttgtcgccagtagccatggccctttgggcagactaacttttgtcagcctcaagttttctgttttgttaaggggaggcgatgccatgcagcctacctcatgtaaatctcagagtcagatttacatctccagcagatgtgggaaaagaaggaatgctgatgatgatgtcaccctcacctagtgagtcttgctgtcctggcactgctctaagggctttatacttatttgctcacttagtcctcacagtatccctctgaacagagtttattgttttcactttgctgataaggaaactgaggcacagacaggttgagtatcttgcccaaattcaggcagcctgtaagaggcagagtcaggatttgaaccctgagccctccctgtactgcttggctgtgaccgccatgaccacagtgtgttctgctgggcttaactggcatccaggcacttggcttccagcacagcactctttcccttcctccttctcatatactctctccttttccccttcctttttgtccccttttcctcttccttttagttcttctctttaaatgccttctcactctgcacggggtctagacttgacttctcctttggctcacttcttgccttttgtttcaggagtgtacaccttaaacaatgggaagcagtggataaataaggctgttggagataaacttcctgaatgtgaagcagtatgtgggaagcccaagaatccggcaaacccagtgcagcggatcctgggtggacacctggatgccaaaggcagctttccctggcaggctaagatggtttcccaccataatctcaccacaggtgccacgctgatcaatgaacaatggctgctgaccacggctaaaaatctcttcctgaaccattcagaaaatgcaacagcgaaagacattgcccctactttaacactctatgtggggaaaaagcagcttgtagagattgagaaggttgttctacaccctaactactcccaggtagatattgggctcatcaaactcaaacagaaggtgtctgttaatgagagagtgatgcccatctgcctaccttcaaaggattatgcagaagtagggcgtgtgggttatgtttctggctgggggcgaaatgccaattttaaatttactgaccatctgaagtatgtcatgctgcctgtggctgaccaagaccaatgcataaggcattatgaaggcagcacagtccccgaaaagaagacaccgaagagccctgtaggggtgcagcccatactgaatgaacacaccttctgtgctggcatgtctaagtaccaagaagacacctgctatggcgatgcgggcagtgcctttgccgttcacgacctggaggctgagtatggtgtgtatgtgaaggtgacttccatccaggactgggttcagaagaccatagctgagaactaatgcaaggctggccggaagcccttgcctgaaagcaagatttcagcctggaagagggcaaagtggacgggagtggacaggagtggatgcgataagatgtggtttgaagctgatgggtgccagccctgcattgctgagtcaatcaataaagagctttcttttgacccaangattgacccacaaaaaaaaaaaaaaaaaaaaaaaaaaaaaattttggtggggggattgggcccttgaaaagggttttgaaaacattctgggtgggagcccgggggccaagatgggataggtggaccatgggacaaaaggggttcccaaggaaaaccggggaccaagaaacaaagggcgagggatttctccacaagttaaaaaaggcccggan

SEQ ID NO: 732215 - DNA, 2121 bp, Homo sapiens
ggactgctcttccagaggcaagaccaaccaagatgagtgccctgggagctgtcattgccctcctgctctggggacagctttttgcagtggactcaggcaatgatgtcacggatatcgcagatgacggctgcccgaagccccccgagattgcacatggctatgtggagcactcggttcgctaccagtgtaagaactactacaaactgcgcacagaaggagatgagatggtaagatgtggacaactgtctccatgccctacatacaacccccttctctgacatttccatgatgggtggtgctgaggtgattcgccagaaagttcgttgctctccttggagccaggagatttagattctaataagcgttttgtcgccagtagccatggccctttgggcagactaacttttgtcagcctcaagttttctgttttgttaaggggaggcgatgccatgcagcctacctcatgtaaatctcagagtcagatttacatctccagcagatgtgggaaaagaaggaatgctgatgatgatgtcaccctcacctagtgagtcttgctgtcctggcactgctctaagggctttatacttatttgctcacttagtcctcacagtatccctctgaacagagtttattgttttcactttgctgataaggaaactgaggcacagacaggttgagtatcttgcccaaattcaggcagcctgtaagaggcagagtcaggatttgaaccctgagccctccctgtactgcttggctgtgaccgccatgaccacagtgtgttctgctgggcttaactggcatccaggcacttggcttccagcacagcactctttcccttcctccttctcatatactctctccttttccccttcctttttgtccccttttcctcttccttttagttcttctctttaaatgccttctcactctgcacggggtctagacttgacttctcctttggctcacttcttgccttttgtttcaggagtgtacaccttaaacaatgggaagcagtggataaataaggctgttggagataaacttcctgaatgtgaagcagtatgtgggaagcccaagaatccggcaaacccagtgcagcggatcctgggtggacacctggatgccaaaggcagctttccctggcaggctaagatggtttcccaccataatctcaccacaggtgccacgctgatcaatgaacaatggctgctgaccacggctaaaaatctcttcctgaaccattcagaaaatgcaacagcgaaagacattgcccctactttaacactctatgtggggaaaaagcagcttgtagagattgagaaggttgttctacaccctaactactcccaggtagatattgggctcatcaaactcaaacagaaggtgtctgttaatgagagagtgatgcccatctgcctaccttcaaaggattatgcagaagtagggcgtgtgggttatgtttctggctgggggcgaaatgccaattttaaatttactgaccatctgaagtatgtcatgctgcctgtggctgaccaagaccaatgcataaggcattatgaaggcagcacagtccccgaaaagaagacaccgaagagccctgtaggggtgcagcccatactgaatgaacacaccttctgtgctggcatgtctaagtaccaagaagacacctgctatggcgatgcgggcagtgcctttgccgttcacgacctggaggctgagtatggtgtgtatgtgaaggtgacttccatccaggactgggttcagaagaccatagctgagaactaatgcaaggctggccggaagcccttgcctgaaagcaagatttcagcctggaagagggcaaagtggacgggagtggacaggagtggatgcgataagatgtggtttgaagctgatgggtgccagccctgcattgctgagtcaatcaataaagagctttcttttgacccaaccccatagaacaacaccaacacaacacaatcataaccaaacaactcacacccccacaacaaacaaaaactaattcaacctcactcacaaaaataccacaaaacaaagaaaacagacacaaaaaaaaaccacaagacacacagacctataatgcacaaaaacacaaaagag

SEQ ID NO: 732216 - DNA, 2132 bp, Homo sapiens
  misc_feature (1961)..(1961): n is a, c, g, or t
  misc_feature (2132)..(2132): n is a, c, g, or t
ggactgctcttccagaggcaagaccaaccaagatgagtgccctgggagctgtcattgccctcctgctctggggacagctttttgcagtggactcaggcaatgatgtcacggatatcgcagatgacggctgcccgaagccccccgagattgcacatggctatgtggagcactcggttcgctaccagtgtaagaactactacaaactgcgcacagaaggagatgagatggtaagatgtggacaactgtctccatgccctacatacaacccccttctctgacatttccatgatgggtggtgctgaggtgattcgccagaaagttcgttgctctccttggagccaggagatttagattctaataagcgttttgtcgccagtagccatggccctttgggcagactaacttttgtcagcctcaagttttctgttttgttaaggggaggcgatgccatgcagcctacctcatgtaaatctcagagtcagatttacatctccagcagatgtgggaaaagaaggaatgctgatgatgatgtcaccctcacctagtgagtcttgctgtcctggcactgctctaagggctttatacttatttgctcacttagtcctcacagtatccctctgaacagagtttattgttttcactttgctgataaggaaactgaggcacagacaggttgagtatcttgcccaaattcaggcagcctgtaagaggcagagtcaggatttgaaccctgagccctccctgtactgcttggctgtgaccgccatgaccacagtgtgttctgctgggcttaactggcatccaggcacttggcttccagcacagcactctttcccttcctccttctcatatactctctccttttccccttcctttttgtccccttttcctcttccttttagttcttctctttaaatgccttctcactctgcacggggtctagacttgacttctcctttggctcacttcttgccttttgtttcaggagtgtacaccttaaacaatgggaagcagtggataaataaggctgttggagataaacttcctgaatgtgaagcagtatgtgggaagcccaagaatccggcaaacccagtgcagcggatcctgggtggacacctggatgccaaaggcagctttccctggcaggctaagatggtttcccaccataatctcaccacaggtgccacgctgatcaatgaacaatggctgctgaccacggctaaaaatctcttcctgaaccattcagaaaatgcaacagcgaaagacattgcccctactttaacactctatgtggggaaaaagcagcttgtagagattgagaaggttgttctacaccctaactactcccaggtagatattgggctcatcaaactcaaacagaaggtgtctgttaatgagagagtgatgcccatctgcctaccttcaaaggattatgcagaagtagggcgtgtgggttatgtttctggctgggggcgaaatgccaattttaaatttactgaccatctgaagtatgtcatgctgcctgtggctgaccaagaccaatgcataaggcattatgaaggcagcacagtccccgaaaagaagacaccgaagagccctgtaggggtgcagcccatactgaatgaacacaccttctgtgctggcatgtctaagtaccaagaagacacctgctatggcgatgcgggcagtgcctttgccgttcacgacctggaggctgagtatggtgtgtatgtgaaggtgacttccatccaggactgggttcagaagaccatagctgagaactaatgcaaggctggccggaagcccttgcctgaaagcaagatttcagcctggaagagggcaaagtggacgggagtggacaggagtggatgcgataagatgtggtttgaagctgatgggtgccagccctgcattgctgagtcaatcaataaagagctttcttttgacccaaaaaaaaaaanaagagaaaaaagacacacaacacgtggtggcacggcatcaggagcccgaggaaagcgtggcgagaaacatggagatgggagacgcgcgggcaccggaggtatagaggacacacgggcgacagaggagggccctaggaaaaccggggagagaacaagggccgggaattccan

SEQ ID NO: 732217 - DNA, 2221 bp, Homo sapiens
ggactgctcttccagaggcaagaccaaccaagatgagtgccctgggagctgtcattgccctcctgctctggggacagctttttgcagtggactcaggcaatgatgtcacggatatcgcagatgacggctgcccgaagccccccgagattgcacatggctatgtggagcactcggttcgctaccagtgtaagaactactacaaactgcgcacagaaggagatgagatggtaagatgtggacaactgtctccatgccctacatacaacccccttctctgacatttccatgatgggtggtgctgaggtgattcgccagaaagttcgttgctctccttggagccaggagatttagattctaataagcgttttgtcgccagtagccatggccctttgggcagactaacttttgtcagcctcaagttttctgttttgttaaggggaggcgatgccatgcagcctacctcatgtaaatctcagagtcagatttacatctccagcagatgtgggaaaagaaggaatgctgatgatgatgtcaccctcacctagtgagtcttgctgtcctggcactgctctaagggctttatacttatttgctcacttagtcctcacagtatccctctgaacagagtttattgttttcactttgctgataaggaaactgaggcacagacaggttgagtatcttgcccaaattcaggcagcctgtaagaggcagagtcaggatttgaaccctgagccctccctgtactgcttggctgtgaccgccatgaccacagtgtgttctgctgggcttaactggcatccaggcacttggcttccagcacagcactctttcccttcctccttctcatatactctctccttttccccttcctttttgtccccttttcctcttccttttagttcttctctttaaatgccttctcactctgcacggggtctagacttgacttctcctttggctcacttcttgccttttgtttcaggagtgtacaccttaaacaatgggaagcagtggataaataaggctgttggagataaacttcctgaatgtgaagcagtatgtgggaagcccaagaatccggcaaacccagtgcagcggatcctgggtggacacctggatgccaaaggcagctttccctggcaggctaagatggtttcccaccataatctcaccacaggtgccacgctgatcaatgaacaatggctgctgaccacggctaaaaatctcttcctgaaccattcagaaaatgcaacagcgaaagacattgcccctactttaacactctatgtggggaaaaagcagcttgtagagattgagaaggttgttctacaccctaactactcccaggtagatattgggctcatcaaactcaaacagaaggtgtctgttaatgagagagtgatgcccatctgcctaccttcaaaggattatgcagaagtagggcgtgtgggttatgtttctggctgggggcgaaatgccaattttaaatttactgaccatctgaagtatgtcatgctgcctgtggctgaccaagaccaatgcataaggcattatgaaggcagcacagtccccgaaaagaagacaccgaagagccctgtaggggtgcagcccatactgaatgaacacaccttctgtgctggcatgtctaagtaccaagaagacacctgctatggcgatgcgggcagtgcctttgccgttcacgacctggaggctgagtatggtgtgtatgtgaaggtgacttccatccaggactgggttcagaagaccatagctgagaactaatgcaaggctggccggaagcccttgcctgaaagcaagatttcagcctggaagagggcaaagtggacgggagtggacaggagtggatgcgataagatgtggtttgaagctgatgggtgccagccctgcattgctgagtcaatcaataaagagctttcttttgacccataaaaaaaaaaccacaacaaaaacttttggcccccttgggccccggaaaagtttcaaaacattcgttggggcggggcgcaaggggaacgggaaccgggcaaagcggtccaaggaaacccgtgcgccagagaaaagagcggagagatttcccaccatgtaaaaaaagcccggggggaacaccggcgcgttctggaacacactccgagagggccctcagaggcacaaaacgggacgcatccagagggtgccagaggaaaccgcaataaaaccg

SEQ ID NO: 732218 - DNA, 2233 bp, Homo sapiens
  misc_feature (2149)..(2149): n is a, c, g, or t
  misc_feature (2159)..(2159): n is a, c, g, or t
  misc_feature (2162)..(2162): n is a, c, g, or t
  misc_feature (2173)..(2173): n is a, c, g, or t
  misc_feature (2178)..(2178): n is a, c, g, or t
  misc_feature (2184)..(2185): n is a, c, g, or t
  misc_feature (2187)..(2187): n is a, c, g, or t
  misc_feature (2202)..(2202): n is a, c, g, or t
ggactgctcttccagaggcaagaccaaccaagatgagtgccctgggagctgtcattgccctcctgctctggggacagctttttgcagtggactcaggcaatgatgtcacggatatcgcagatgacggctgcccgaagccccccgagattgcacatggctatgtggagcactcggttcgctaccagtgtaagaactactacaaactgcgcacagaaggagatgagatggtaagatgtggacaactgtctccatgccctacatacaacccccttctctgacatttccatgatgggtggtgctgaggtgattcgccagaaagttcgttgctctccttggagccaggagatttagattctaataagcgttttgtcgccagtagccatggccctttgggcagactaacttttgtcagcctcaagttttctgttttgttaaggggaggcgatgccatgcagcctacctcatgtaaatctcagagtcagatttacatctccagcagatgtgggaaaagaaggaatgctgatgatgatgtcaccctcacctagtgagtcttgctgtcctggcactgctctaagggctttatacttatttgctcacttagtcctcacagtatccctctgaacagagtttattgttttcactttgctgataaggaaactgaggcacagacaggttgagtatcttgcccaaattcaggcagcctgtaagaggcagagtcaggatttgaaccctgagccctccctgtactgcttggctgtgaccgccatgaccacagtgtgttctgctgggcttaactggcatccaggcacttggcttccagcacagcactctttcccttcctccttctcatatactctctccttttccccttcctttttgtccccttttcctcttccttttagttcttctctttaaatgccttctcactctgcacggggtctagacttgacttctcctttggctcacttcttgccttttgtttcaggagtgtacaccttaaacaatgggaagcagtggataaataaggctgttggagataaacttcctgaatgtgaagcagtatgtgggaagcccaagaatccggcaaacccagtgcagcggatcctgggtggacacctggatgccaaaggcagctttccctggcaggctaagatggtttcccaccataatctcaccacaggtgccacgctgatcaatgaacaatggctgctgaccacggctaaaaatctcttcctgaaccattcagaaaatgcaacagcgaaagacattgcccctactttaacactctatgtggggaaaaagcagcttgtagagattgagaaggttgttctacaccctaactactcccaggtagatattgggctcatcaaactcaaacagaaggtgtctgttaatgagagagtgatgcccatctgcctaccttcaaaggattatgcagaagtagggcgtgtgggttatgtttctggctgggggcgaaatgccaattttaaatttactgaccatctgaagtatgtcatgctgcctgtggctgaccaagaccaatgcataaggcattatgaaggcagcacagtccccgaaaagaagacaccgaagagccctgtaggggtgcagcccatactgaatgaacacaccttctgtgctggcatgtctaagtaccaagaagacacctgctatggcgatgcgggcagtgcctttgccgttcacgacctggaggctgagtatggtgtgtatgtgaaggtgacttccatccaggactgggttcagaagaccatagctgagaactaatgcaaggctggccggaagcccttgcctgaaagcaagatttcagcctggaagagggcaaagtggacgggagtggacaggagtggatgcgataagatgtggtttgaagctgatgggtgccagccctgcattgctgagtcaatcaataaagagctttcttttgacccaaaaaaaaaaggaacaaaaaacaaaaaaaaaacctttttggggccgcgtgggccccttggaagaaacttttttcataaaaaccacctttcgtttgtgtagcgccgggggccccatagagtgatataggtcgaccacgtggtcaacacagatggtgttccctaaggagaaactgggggacaagtacacaatgcgcctgggnattcctcccnatnaaaaacgcccnggggncacacnnangttctggaaaaatcncgaaggagtccggggccacacgcggaccagc

SEQ ID NO: 732219 - DNA, 2017 bp, Homo sapiens
  misc_feature (1921)..(1921): n is a, c, g, or t
ggactgctcttccagaggcaagaccaaccaagatgagtgccctgggagctgtcattgccctcctgctctggggacagctttttgcagtggactcaggcaatgatgtcacggatatcgcagatgacggctgcccgaagccccccgagattgcacatggctatgtggagcactcggttcgctaccagtgtaagaactactacaaactgcgcacagaaggagatgagatggtaagatgtggacaactgtctccatgccctacatacaacccccttctctgacatttccatgatgggtggtgctgaggtgattcgccagaaagttcgttgctctccttggagccaggagatttagattctaataagcgttttgtcgccagtagccatggccctttgggcagactaacttttgtcagcctcaagttttctgttttgttaaggggaggcgatgccatgcagcctacctcatgtaaatctcagagtcagatttacatctccagcagatgtgggaaaagaaggaatgctgatgatgatgtcaccctcacctagtgagtcttgctgtcctggcactgctctaagggctttatacttatttgctcacttagtcctcacagtatccctctgaacagagtttattgttttcactttgctgataaggaaactgaggcacagacaggttgagtatcttgcccaaattcaggcagcctgtaagaggcagagtcaggatttgaaccctgagccctccctgtactgcttggctgtgaccgccatgaccacagtgtgttctgctgggcttaactggcatccaggcacttggcttccagcacagcactctttcccttcctccttctcatatactctctccttttccccttcctttttgtccccttttcctcttccttttagttcttctctttaaatgccttctcactctgcacggggtctagacttgacttctcctttggctcacttcttgccttttgtttcaggagtgtacaccttaaacaatgggaagcagtggataaataaggctgttggagataaacttcctgaatgtgaagcagtatgtgggaagcccaagaatccggcaaacccagtgcagcggatcctgggtggacacctggatgccaaaggcagctttccctggcaggctaagatggtttcccaccataatctcaccacaggtgccacgctgatcaatgaacaatggctgctgaccacggctaaaaatctcttcctgaaccattcagaaaatgcaacagcgaaagacattgcccctactttaacactctatgtggggaaaaagcagcttgtagagattgagaaggttgttctacaccctaactactcccaggtagatattgggctcatcaaactcaaacagaaggtgtctgttaatgagagagtgatgcccatctgcctaccttcaaaggattatgcagaagtagggcgtgtgggttatgtttctggctgggggcgaaatgccaattttaaatttactgaccatctgaagtatgtcatgctgcctgtggctgaccaagaccaatgcataaggcattatgaaggcagcacagtccccgaaaagaagacaccgaagagccctgtaggggtgcagcccatactgaatgaacacaccttctgtgctggcatgtctaagtaccaagaagacacctgctatggcgatgcgggcagtgcctttgccgttcacgacctggaggctgagtatggtgtgtatgtgaaggtgacttccatccaggactgggttcagcctggaagagggcaaagtggacgggagtggacaggagtggatgcgataagatgtggtttgaagctgatgggtgccagccctgcattgctgagtcaatcaataaagagctttcttttgacccaaaaaaaaaaaaaaaaaaaaaaaattttggggcgcntgggccgaaaatttttaaacccttttggggcggcggcctgtttgtgaccgggccaaggggtcccagagaaccggcgaagtggcgtggttcccccaa

SEQ ID NO: 732220 - DNA, 2080 bp, Homo sapiens
  misc_feature (2080)..(2080): n is a, c, g, or t
ggactgctcttccagaggcaagaccaaccaagatgagtgccctgggagctgtcattgccctcctgctctggggacagctttttgcagtggactcaggcaatgatgtcacggatatcgcagatgacggctgcccgaagccccccgagattgcacatggctatgtggagcactcggttcgctaccagtgtaagaactactacaaactgcgcacagaaggagatgagatggtaagatgtggacaactgtctccatgccctacatacaacccccttctctgacatttccatgatgggtggtgctgaggtgattcgccagaaagttcgttgctctccttggagccaggagatttagattctaataagcgttttgtcgccagtagccatggccctttgggcagactaacttttgtcagcctcaagttttctgttttgttaaggggaggcgatgccatgcagcctacctcatgtaaatctcagagtcagatttacatctccagcagatgtgggaaaagaaggaatgctgatgatgatgtcaccctcacctagtgagtcttgctgtcctggcactgctctaagggctttatacttatttgctcacttagtcctcacagtatccctctgaacagagtttattgttttcactttgctgataaggaaactgaggcacagacaggttgagtatcttgcccaaattcaggcagcctgtaagaggcagagtcaggatttgaaccctgagccctccctgtactgcttggctgtgaccgccatgaccacagtgtgttctgctgggcttaactggcatccaggcacttggcttccagcacagcactctttcccttcctccttctcatatactctctccttttccccttcctttttgtccccttttcctcttccttttagttcttctctttaaatgccttctcactctgcacggggtctagacttgacttctcctttggctcacttcttgccttttgtttcaggagtgtacaccttaaacaatgggaagcagtggataaataaggctgttggagataaacttcctgaatgtgaagcagtatgtgggaagcccaagaatccggcaaacccagtgcagcggatcctgggtggacacctggatgccaaaggcagctttccctggcaggctaagatggtttcccaccataatctcaccacaggtgccacgctgatcaatgaacaatggctgctgaccacggctaaaaatctcttcctgaaccattcagaaaatgcaacagcgaaagacattgcccctactttaacactctatgtggggaaaaagcagcttgtagagattgagaaggttgttctacaccctaactactcccaggtagatattgggctcatcaaactcaaacagaaggtgtctgttaatgagagagtgatgcccatctgcctaccttcaaaggattatgcagaagtagggcgtgtgggttatgtttctggctgggggcgaaatgccaattttaaatttactgaccatctgaagtatgtcatgctgcctgtggctgaccaagaccaatgcataaggcattatgaaggcagcacagtccccgaaaagaagacaccgaagagccctgtaggggtgcagcccatactgaatgaacacaccttctgtgctggcatgtctaagtaccaagaagacacctgctatggcgatgcgggcagtgcctttgccgttcacgacctggaggctgagtatggtgtgtatgtgaaggtgacttccatccaggactgggttcagcctggaagagggcaaagtggacgggagtggacaggagtggatgcgataagatgtggtttgaagctgatgggtgccagccctgcattgctgagtcaatcaataaagagctttcttttgacccaaaaaaaaaaaaaaaaaaaaaaaattttggtggggggattgggcccttgaaaagggttttgaaaacattctgggtgggagcccgggggccaagatgggataggtggaccatgggacaaaaggggttcccaaggaaaaccggggaccaagaaacaaagggcgagggatttctccacaagttaaaaaaggcccggan

SEQ ID NO: 732221 - DNA, 2044 bp, Homo sapiens
  misc_feature (1948)..(1948): n is a, c, g, or t
ggactgctcttccagaggcaagaccaaccaagatgagtgccctgggagctgtcattgccctcctgctctggggacagctttttgcagtggactcaggcaatgatgtcacggatatcgcagatgacggctgcccgaagccccccgagattgcacatggctatgtggagcactcggttcgctaccagtgtaagaactactacaaactgcgcacagaaggagatgagatggtaagatgtggacaactgtctccatgccctacatacaacccccttctctgacatttccatgatgggtggtgctgaggtgattcgccagaaagttcgttgctctccttggagccaggagatttagattctaataagcgttttgtcgccagtagccatggccctttgggcagactaacttttgtcagcctcaagttttctgttttgttaaggggaggcgatgccatgcagcctacctcatgtaaatctcagagtcagatttacatctccagcagatgtgggaaaagaaggaatgctgatgatgatgtcaccctcacctagtgagtcttgctgtcctggcactgctctaagggctttatacttatttgctcacttagtcctcacagtatccctctgaacagagtttattgttttcactttgctgataaggaaactgaggcacagacaggttgagtatcttgcccaaattcaggcagcctgtaagaggcagagtcaggatttgaaccctgagccctccctgtactgcttggctgtgaccgccatgaccacagtgtgttctgctgggcttaactggcatccaggcacttggcttccagcacagcactctttcccttcctccttctcatatactctctccttttccccttcctttttgtccccttttcctcttccttttagttcttctctttaaatgccttctcactctgcacggggtctagacttgacttctcctttggctcacttcttgccttttgtttcaggagtgtacaccttaaacaatgggaagcagtggataaataaggctgttggagataaacttcctgaatgtgaagcagtatgtgggaagcccaagaatccggcaaacccagtgcagcggatcctgggtggacacctggatgccaaaggcagctttccctggcaggctaagatggtttcccaccataatctcaccacaggtgccacgctgatcaatgaacaatggctgctgaccacggctaaaaatctcttcctgaaccattcagaaaatgcaacagcgaaagacattgcccctactttaacactctatgtggggaaaaagcagcttgtagagattgagaaggttgttctacaccctaactactcccaggtagatattgggctcatcaaactcaaacagaaggtgtctgttaatgagagagtgatgcccatctgcctaccttcaaaggattatgcagaagtagggcgtgtgggttatgtttctggctgggggcgaaatgccaattttaaatttactgaccatctgaagtatgtcatgctgcctgtggctgaccaagaccaatgcataaggcattatgaaggcagcacagtccccgaaaagaagacaccgaagagccctgtaggggtgcagcccatactgaatgaacacaccttctgtgctggcatgtctaagtaccaagaagacacctgctatggcgatgcgggcagtgcctttgccgttcacgacctggaggctgagtatggtgtgtatgtgaaggtgacttccatccaggactgggttcagcctggaagagggcaaagtggacgggagtggacaggagtggatgcgataagatgtggtttgaagctgatgggtgccagccctgcattgctgagtcaatcaataaagagctttcttttgacccaaaaaaaaaaaaaaaaaaaaaaacaaaaaaaaaaaaaaaaaaaaaaaaaaattttggggcgcntgggccgaaaatttttaaacccttttggggcggcggcctgtttgtgaccgggccaaggggtcccagagaaccggcgaagtggcgtggttcccccaa

SEQ ID NO: 732222 - DNA, 2107 bp, Homo sapiens
  misc_feature (2107)..(2107): n is a, c, g, or t
ggactgctcttccagaggcaagaccaaccaagatgagtgccctgggagctgtcattgccctcctgctctggggacagctttttgcagtggactcaggcaatgatgtcacggatatcgcagatgacggctgcccgaagccccccgagattgcacatggctatgtggagcactcggttcgctaccagtgtaagaactactacaaactgcgcacagaaggagatgagatggtaagatgtggacaactgtctccatgccctacatacaacccccttctctgacatttccatgatgggtggtgctgaggtgattcgccagaaagttcgttgctctccttggagccaggagatttagattctaataagcgttttgtcgccagtagccatggccctttgggcagactaacttttgtcagcctcaagttttctgttttgttaaggggaggcgatgccatgcagcctacctcatgtaaatctcagagtcagatttacatctccagcagatgtgggaaaagaaggaatgctgatgatgatgtcaccctcacctagtgagtcttgctgtcctggcactgctctaagggctttatacttatttgctcacttagtcctcacagtatccctctgaacagagtttattgttttcactttgctgataaggaaactgaggcacagacaggttgagtatcttgcccaaattcaggcagcctgtaagaggcagagtcaggatttgaaccctgagccctccctgtactgcttggctgtgaccgccatgaccacagtgtgttctgctgggcttaactggcatccaggcacttggcttccagcacagcactctttcccttcctccttctcatatactctctccttttccccttcctttttgtccccttttcctcttccttttagttcttctctttaaatgccttctcactctgcacggggtctagacttgacttctcctttggctcacttcttgccttttgtttcaggagtgtacaccttaaacaatgggaagcagtggataaataaggctgttggagataaacttcctgaatgtgaagcagtatgtgggaagcccaagaatccggcaaacccagtgcagcggatcctgggtggacacctggatgccaaaggcagctttccctggcaggctaagatggtttcccaccataatctcaccacaggtgccacgctgatcaatgaacaatggctgctgaccacggctaaaaatctcttcctgaaccattcagaaaatgcaacagcgaaagacattgcccctactttaacactctatgtggggaaaaagcagcttgtagagattgagaaggttgttctacaccctaactactcccaggtagatattgggctcatcaaactcaaacagaaggtgtctgttaatgagagagtgatgcccatctgcctaccttcaaaggattatgcagaagtagggcgtgtgggttatgtttctggctgggggcgaaatgccaattttaaatttactgaccatctgaagtatgtcatgctgcctgtggctgaccaagaccaatgcataaggcattatgaaggcagcacagtccccgaaaagaagacaccgaagagccctgtaggggtgcagcccatactgaatgaacacaccttctgtgctggcatgtctaagtaccaagaagacacctgctatggcgatgcgggcagtgcctttgccgttcacgacctggaggctgagtatggtgtgtatgtgaaggtgacttccatccaggactgggttcagcctggaagagggcaaagtggacgggagtggacaggagtggatgcgataagatgtggtttgaagctgatgggtgccagccctgcattgctgagtcaatcaataaagagctttcttttgacccaaaaaaaaaaaaaaaaaaaaaaacaaaaaaaaaaaaaaaaaaaaaaaaaaattttggtggggggattgggcccttgaaaagggttttgaaaacattctgggtgggagcccgggggccaagatgggataggtggaccatgggacaaaaggggttcccaaggaaaaccggggaccaagaaacaaagggcgagggatttctccacaagttaaaaaaggcccggan

SEQ ID NO: 732223 - DNA, 2133 bp, Homo sapiens
  misc_feature (2049)..(2049): n is a, c, g, or t
  misc_feature (2059)..(2059): n is a, c, g, or t
  misc_feature (2062)..(2062): n is a, c, g, or t
  misc_feature (2073)..(2073): n is a, c, g, or t
  misc_feature (2078)..(2078): n is a, c, g, or t
  misc_feature (2084)..(2085): n is a, c, g, or t
  misc_feature (2087)..(2087): n is a, c, g, or t
  misc_feature (2102)..(2102): n is a, c, g, or t
ggactgctcttccagaggcaagaccaaccaagatgagtgccctgggagctgtcattgccctcctgctctggggacagctttttgcagtggactcaggcaatgatgtcacggatatcgcagatgacggctgcccgaagccccccgagattgcacatggctatgtggagcactcggttcgctaccagtgtaagaactactacaaactgcgcacagaaggagatgagatggtaagatgtggacaactgtctccatgccctacatacaacccccttctctgacatttccatgatgggtggtgctgaggtgattcgccagaaagttcgttgctctccttggagccaggagatttagattctaataagcgttttgtcgccagtagccatggccctttgggcagactaacttttgtcagcctcaagttttctgttttgttaaggggaggcgatgccatgcagcctacctcatgtaaatctcagagtcagatttacatctccagcagatgtgggaaaagaaggaatgctgatgatgatgtcaccctcacctagtgagtcttgctgtcctggcactgctctaagggctttatacttatttgctcacttagtcctcacagtatccctctgaacagagtttattgttttcactttgctgataaggaaactgaggcacagacaggttgagtatcttgcccaaattcaggcagcctgtaagaggcagagtcaggatttgaaccctgagccctccctgtactgcttggctgtgaccgccatgaccacagtgtgttctgctgggcttaactggcatccaggcacttggcttccagcacagcactctttcccttcctccttctcatatactctctccttttccccttcctttttgtccccttttcctcttccttttagttcttctctttaaatgccttctcactctgcacggggtctagacttgacttctcctttggctcacttcttgccttttgtttcaggagtgtacaccttaaacaatgggaagcagtggataaataaggctgttggagataaacttcctgaatgtgaagcagtatgtgggaagcccaagaatccggcaaacccagtgcagcggatcctgggtggacacctggatgccaaaggcagctttccctggcaggctaagatggtttcccaccataatctcaccacaggtgccacgctgatcaatgaacaatggctgctgaccacggctaaaaatctcttcctgaaccattcagaaaatgcaacagcgaaagacattgcccctactttaacactctatgtggggaaaaagcagcttgtagagattgagaaggttgttctacaccctaactactcccaggtagatattgggctcatcaaactcaaacagaaggtgtctgttaatgagagagtgatgcccatctgcctaccttcaaaggattatgcagaagtagggcgtgtgggttatgtttctggctgggggcgaaatgccaattttaaatttactgaccatctgaagtatgtcatgctgcctgtggctgaccaagaccaatgcataaggcattatgaaggcagcacagtccccgaaaagaagacaccgaagagccctgtaggggtgcagcccatactgaatgaacacaccttctgtgctggcatgtctaagtaccaagaagacacctgctatggcgatgcgggcagtgcctttgccgttcacgacctggaggctgagtatggtgtgtatgtgaaggtgacttccatccaggactgggttcagcctggaagagggcaaagtggacgggagtggacaggagtggatgcgataagatgtggtttgaagctgatgggtgccagccctgcattgctgagtcaatcaataaagagctttcttttgacccaaaaaaaaaaaaaaaaaaaaaaacaaaaaacccttttgggcggccttgggccctggaaaagtttttaaaacccttcggttggggcgcgcggcccccttgggttcggtgaacatgggccaaagcgcggtccccaggaaacaccgggcgcacgaccagggccgggnattcctcccnatnaaaaacgcccnggggncacacnnangttctggaaaaatcncgaaggagtccggggccacacgcggaccagc

SEQ ID NO: 732224 - DNA, 2032 bp, Homo sapiens
ggactgctcttccagaggcaagaccaaccaagatgagtgccctgggagctgtcattgccctcctgctctggggacagctttttgcagtggactcaggcaatgatgtcacggatatcgcagatgacggctgcccgaagccccccgagattgcacatggctatgtggagcactcggttcgctaccagtgtaagaactactacaaactgcgcacagaaggagatgagatggtaagatgtggacaactgtctccatgccctacatacaacccccttctctgacatttccatgatgggtggtgctgaggtgattcgccagaaagttcgttgctctccttggagccaggagatttagattctaataagcgttttgtcgccagtagccatggccctttgggcagactaacttttgtcagcctcaagttttctgttttgttaaggggaggcgatgccatgcagcctacctcatgtaaatctcagagtcagatttacatctccagcagatgtgggaaaagaaggaatgctgatgatgatgtcaccctcacctagtgagtcttgctgtcctggcactgctctaagggctttatacttatttgctcacttagtcctcacagtatccctctgaacagagtttattgttttcactttgctgataaggaaactgaggcacagacaggttgagtatcttgcccaaattcaggcagcctgtaagaggcagagtcaggatttgaaccctgagccctccctgtactgcttggctgtgaccgccatgaccacagtgtgttctgctgggcttaactggcatccaggcacttggcttccagcacagcactctttcccttcctccttctcatatactctctccttttccccttcctttttgtccccttttcctcttccttttagttcttctctttaaatgccttctcactctgcacggggtctagacttgacttctcctttggctcacttcttgccttttgtttcaggagtgtacaccttaaacaatgggaagcagtggataaataaggctgttggagataaacttcctgaatgtgaagcagtatgtgggaagcccaagaatccggcaaacccagtgcagcggatcctgggtggacacctggatgccaaaggcagctttccctggcaggctaagatggtttcccaccataatctcaccacaggtgccacgctgatcaatgaacaatggctgctgaccacggctaaaaatctcttcctgaaccattcagaaaatgcaacagcgaaagacattgcccctactttaacactctatgtggggaaaaagcagcttgtagagattgagaaggttgttctacaccctaactactcccaggtagatattgggctcatcaaactcaaacagaaggtgtctgttaatgagagagtgatgcccatctgcctaccttcaaaggattatgcagaagtagggcgtgtgggttatgtttctggctgggggcgaaatgccaattttaaatttactgaccatctgaagtatgtcatgctgcctgtggctgaccaagaccaatgcataaggcattatgaaggcagcacagtccccgaaaagaagacaccgaagagccctgtaggggtgcagcccatactgaatgaacacaccttctgtgctggcatgtctaagtaccaagaagacacctgctatggcgatgcgggcagtgcctttgccgttcacgacctggaggctgagtatggtgtgtatgtgaaggtgacttccatccaggactgggttcagcctggaagagggcaaagtggacgggagtggacaggagtggatgcgataagatgtggtttgaagctgatgggtgccagccctgcattgctgagtcaatcaataaagagctttcttttgacccagtaacaaaaacaaacgaaaaaacacaaaaaagggtgagacgccgggcaccagaaagattctaaacacaccgggggcacgggcccaagagaaggcacacgggcaagaggtgcccaggaaccggacgacaagaggggtccacaaaaag

SEQ ID NO: 732225 - DNA, 2037 bp, Homo sapiens
  misc_feature (1888)..(1888): n is a, c, g, or t
  misc_feature (1941)..(1941): n is a, c, g, or t
ggactgctcttccagaggcaagaccaaccaagatgagtgccctgggagctgtcattgccctcctgctctggggacagctttttgcagtggactcaggcaatgatgtcacggatatcgcagatgacggctgcccgaagccccccgagattgcacatggctatgtggagcactcggttcgctaccagtgtaagaactactacaaactgcgcacagaaggagatgagatggtaagatgtggacaactgtctccatgccctacatacaacccccttctctgacatttccatgatgggtggtgctgaggtgattcgccagaaagttcgttgctctccttggagccaggagatttagattctaataagcgttttgtcgccagtagccatggccctttgggcagactaacttttgtcagcctcaagttttctgttttgttaaggggaggcgatgccatgcagcctacctcatgtaaatctcagagtcagatttacatctccagcagatgtgggaaaagaaggaatgctgatgatgatgtcaccctcacctagtgagtcttgctgtcctggcactgctctaagggctttatacttatttgctcacttagtcctcacagtatccctctgaacagagtttattgttttcactttgctgataaggaaactgaggcacagacaggttgagtatcttgcccaaattcaggcagcctgtaagaggcagagtcaggatttgaaccctgagccctccctgtactgcttggctgtgaccgccatgaccacagtgtgttctgctgggcttaactggcatccaggcacttggcttccagcacagcactctttcccttcctccttctcatatactctctccttttccccttcctttttgtccccttttcctcttccttttagttcttctctttaaatgccttctcactctgcacggggtctagacttgacttctcctttggctcacttcttgccttttgtttcaggagtgtacaccttaaacaatgggaagcagtggataaataaggctgttggagataaacttcctgaatgtgaagcagtatgtgggaagcccaagaatccggcaaacccagtgcagcggatcctgggtggacacctggatgccaaaggcagctttccctggcaggctaagatggtttcccaccataatctcaccacaggtgccacgctgatcaatgaacaatggctgctgaccacggctaaaaatctcttcctgaaccattcagaaaatgcaacagcgaaagacattgcccctactttaacactctatgtggggaaaaagcagcttgtagagattgagaaggttgttctacaccctaactactcccaggtagatattgggctcatcaaactcaaacagaaggtgtctgttaatgagagagtgatgcccatctgcctaccttcaaaggattatgcagaagtagggcgtgtgggttatgtttctggctgggggcgaaatgccaattttaaatttactgaccatctgaagtatgtcatgctgcctgtggctgaccaagaccaatgcataaggcattatgaaggcagcacagtccccgaaaagaagacaccgaagagccctgtaggggtgcagcccatactgaatgaacacaccttctgtgctggcatgtctaagtaccaagaagacacctgctatggcgatgcgggcagtgcctttgccgttcacgacctggaggctgagtatggtgtgtatgtgaaggtgacttccatccaggactgggttcagcctggaagagggcaaagtggacgggagtggacaggagtggatgcgataagatgtggtttgaagctgatgggtgccagccctgcattgctgagtcaatcaataaagagctttcttttgacccaangattgacccacaaaaaaaaaaaaaaaaaaaaaaaaaaaaaattttggggcgcntgggccgaaaatttttaaacccttttggggcggcggcctgtttgtgaccgggccaaggggtcccagagaaccggcgaagtggcgtggttcccccaa

SEQ ID NO: 732226 - DNA, 2100 bp, Homo sapiens
  misc_feature (1888)..(1888): n is a, c, g, or t
  misc_feature (2100)..(2100): n is a, c, g, or t
ggactgctcttccagaggcaagaccaaccaagatgagtgccctgggagctgtcattgccctcctgctctggggacagctttttgcagtggactcaggcaatgatgtcacggatatcgcagatgacggctgcccgaagccccccgagattgcacatggctatgtggagcactcggttcgctaccagtgtaagaactactacaaactgcgcacagaaggagatgagatggtaagatgtggacaactgtctccatgccctacatacaacccccttctctgacatttccatgatgggtggtgctgaggtgattcgccagaaagttcgttgctctccttggagccaggagatttagattctaataagcgttttgtcgccagtagccatggccctttgggcagactaacttttgtcagcctcaagttttctgttttgttaaggggaggcgatgccatgcagcctacctcatgtaaatctcagagtcagatttacatctccagcagatgtgggaaaagaaggaatgctgatgatgatgtcaccctcacctagtgagtcttgctgtcctggcactgctctaagggctttatacttatttgctcacttagtcctcacagtatccctctgaacagagtttattgttttcactttgctgataaggaaactgaggcacagacaggttgagtatcttgcccaaattcaggcagcctgtaagaggcagagtcaggatttgaaccctgagccctccctgtactgcttggctgtgaccgccatgaccacagtgtgttctgctgggcttaactggcatccaggcacttggcttccagcacagcactctttcccttcctccttctcatatactctctccttttccccttcctttttgtccccttttcctcttccttttagttcttctctttaaatgccttctcactctgcacggggtctagacttgacttctcctttggctcacttcttgccttttgtttcaggagtgtacaccttaaacaatgggaagcagtggataaataaggctgttggagataaacttcctgaatgtgaagcagtatgtgggaagcccaagaatccggcaaacccagtgcagcggatcctgggtggacacctggatgccaaaggcagctttccctggcaggctaagatggtttcccaccataatctcaccacaggtgccacgctgatcaatgaacaatggctgctgaccacggctaaaaatctcttcctgaaccattcagaaaatgcaacagcgaaagacattgcccctactttaacactctatgtggggaaaaagcagcttgtagagattgagaaggttgttctacaccctaactactcccaggtagatattgggctcatcaaactcaaacagaaggtgtctgttaatgagagagtgatgcccatctgcctaccttcaaaggattatgcagaagtagggcgtgtgggttatgtttctggctgggggcgaaatgccaattttaaatttactgaccatctgaagtatgtcatgctgcctgtggctgaccaagaccaatgcataaggcattatgaaggcagcacagtccccgaaaagaagacaccgaagagccctgtaggggtgcagcccatactgaatgaacacaccttctgtgctggcatgtctaagtaccaagaagacacctgctatggcgatgcgggcagtgcctttgccgttcacgacctggaggctgagtatggtgtgtatgtgaaggtgacttccatccaggactgggttcagcctggaagagggcaaagtggacgggagtggacaggagtggatgcgataagatgtggtttgaagctgatgggtgccagccctgcattgctgagtcaatcaataaagagctttcttttgacccaangattgacccacaaaaaaaaaaaaaaaaaaaaaaaaaaaaaattttggtggggggattgggcccttgaaaagggttttgaaaacattctgggtgggagcccgggggccaagatgggataggtggaccatgggacaaaaggggttcccaaggaaaaccggggaccaagaaacaaagggcgagggatttctccacaagttaaaaaaggcccggan

SEQ ID NO: 732227 - DNA, 2057 bp, Homo sapiens
ggactgctcttccagaggcaagaccaaccaagatgagtgccctgggagctgtcattgccctcctgctctggggacagctttttgcagtggactcaggcaatgatgtcacggatatcgcagatgacggctgcccgaagccccccgagattgcacatggctatgtggagcactcggttcgctaccagtgtaagaactactacaaactgcgcacagaaggagatgagatggtaagatgtggacaactgtctccatgccctacatacaacccccttctctgacatttccatgatgggtggtgctgaggtgattcgccagaaagttcgttgctctccttggagccaggagatttagattctaataagcgttttgtcgccagtagccatggccctttgggcagactaacttttgtcagcctcaagttttctgttttgttaaggggaggcgatgccatgcagcctacctcatgtaaatctcagagtcagatttacatctccagcagatgtgggaaaagaaggaatgctgatgatgatgtcaccctcacctagtgagtcttgctgtcctggcactgctctaagggctttatacttatttgctcacttagtcctcacagtatccctctgaacagagtttattgttttcactttgctgataaggaaactgaggcacagacaggttgagtatcttgcccaaattcaggcagcctgtaagaggcagagtcaggatttgaaccctgagccctccctgtactgcttggctgtgaccgccatgaccacagtgtgttctgctgggcttaactggcatccaggcacttggcttccagcacagcactctttcccttcctccttctcatatactctctccttttccccttcctttttgtccccttttcctcttccttttagttcttctctttaaatgccttctcactctgcacggggtctagacttgacttctcctttggctcacttcttgccttttgtttcaggagtgtacaccttaaacaatgggaagcagtggataaataaggctgttggagataaacttcctgaatgtgaagcagtatgtgggaagcccaagaatccggcaaacccagtgcagcggatcctgggtggacacctggatgccaaaggcagctttccctggcaggctaagatggtttcccaccataatctcaccacaggtgccacgctgatcaatgaacaatggctgctgaccacggctaaaaatctcttcctgaaccattcagaaaatgcaacagcgaaagacattgcccctactttaacactctatgtggggaaaaagcagcttgtagagattgagaaggttgttctacaccctaactactcccaggtagatattgggctcatcaaactcaaacagaaggtgtctgttaatgagagagtgatgcccatctgcctaccttcaaaggattatgcagaagtagggcgtgtgggttatgtttctggctgggggcgaaatgccaattttaaatttactgaccatctgaagtatgtcatgctgcctgtggctgaccaagaccaatgcataaggcattatgaaggcagcacagtccccgaaaagaagacaccgaagagccctgtaggggtgcagcccatactgaatgaacacaccttctgtgctggcatgtctaagtaccaagaagacacctgctatggcgatgcgggcagtgcctttgccgttcacgacctggaggctgagtatggtgtgtatgtgaaggtgacttccatccaggactgggttcagcctggaagagggcaaagtggacgggagtggacaggagtggatgcgataagatgtggtttgaagctgatgggtgccagccctgcattgctgagtcaatcaataaagagctttcttttgacccaaccccatagaacaacaccaacacaacacaatcataaccaaacaactcacacccccacaacaaacaaaaactaattcaacctcactcacaaaaataccacaaaacaaagaaaacagacacaaaaaaaaaccacaagacacacagacctataatgcacaaaaacacaaaagag

SEQ ID NO: 732228 - DNA, 2068 bp, Homo sapiens
  misc_feature (1897)..(1897): n is a, c, g, or t
  misc_feature (2068)..(2068): n is a, c, g, or t
ggactgctcttccagaggcaagaccaaccaagatgagtgccctgggagctgtcattgccctcctgctctggggacagctttttgcagtggactcaggcaatgatgtcacggatatcgcagatgacggctgcccgaagccccccgagattgcacatggctatgtggagcactcggttcgctaccagtgtaagaactactacaaactgcgcacagaaggagatgagatggtaagatgtggacaactgtctccatgccctacatacaacccccttctctgacatttccatgatgggtggtgctgaggtgattcgccagaaagttcgttgctctccttggagccaggagatttagattctaataagcgttttgtcgccagtagccatggccctttgggcagactaacttttgtcagcctcaagttttctgttttgttaaggggaggcgatgccatgcagcctacctcatgtaaatctcagagtcagatttacatctccagcagatgtgggaaaagaaggaatgctgatgatgatgtcaccctcacctagtgagtcttgctgtcctggcactgctctaagggctttatacttatttgctcacttagtcctcacagtatccctctgaacagagtttattgttttcactttgctgataaggaaactgaggcacagacaggttgagtatcttgcccaaattcaggcagcctgtaagaggcagagtcaggatttgaaccctgagccctccctgtactgcttggctgtgaccgccatgaccacagtgtgttctgctgggcttaactggcatccaggcacttggcttccagcacagcactctttcccttcctccttctcatatactctctccttttccccttcctttttgtccccttttcctcttccttttagttcttctctttaaatgccttctcactctgcacggggtctagacttgacttctcctttggctcacttcttgccttttgtttcaggagtgtacaccttaaacaatgggaagcagtggataaataaggctgttggagataaacttcctgaatgtgaagcagtatgtgggaagcccaagaatccggcaaacccagtgcagcggatcctgggtggacacctggatgccaaaggcagctttccctggcaggctaagatggtttcccaccataatctcaccacaggtgccacgctgatcaatgaacaatggctgctgaccacggctaaaaatctcttcctgaaccattcagaaaatgcaacagcgaaagacattgcccctactttaacactctatgtggggaaaaagcagcttgtagagattgagaaggttgttctacaccctaactactcccaggtagatattgggctcatcaaactcaaacagaaggtgtctgttaatgagagagtgatgcccatctgcctaccttcaaaggattatgcagaagtagggcgtgtgggttatgtttctggctgggggcgaaatgccaattttaaatttactgaccatctgaagtatgtcatgctgcctgtggctgaccaagaccaatgcataaggcattatgaaggcagcacagtccccgaaaagaagacaccgaagagccctgtaggggtgcagcccatactgaatgaacacaccttctgtgctggcatgtctaagtaccaagaagacacctgctatggcgatgcgggcagtgcctttgccgttcacgacctggaggctgagtatggtgtgtatgtgaaggtgacttccatccaggactgggttcagcctggaagagggcaaagtggacgggagtggacaggagtggatgcgataagatgtggtttgaagctgatgggtgccagccctgcattgctgagtcaatcaataaagagctttcttttgacccaaaaaaaaaaanaagagaaaaaagacacacaacacgtggtggcacggcatcaggagcccgaggaaagcgtggcgagaaacatggagatgggagacgcgcgggcaccggaggtatagaggacacacgggcgacagaggagggccctaggaaaaccggggagagaacaagggccgggaattccan

SEQ ID NO: 732229 - DNA, 2157 bp, Homo sapiens
ggactgctcttccagaggcaagaccaaccaagatgagtgccctgggagctgtcattgccctcctgctctggggacagctttttgcagtggactcaggcaatgatgtcacggatatcgcagatgacggctgcccgaagccccccgagattgcacatggctatgtggagcactcggttcgctaccagtgtaagaactactacaaactgcgcacagaaggagatgagatggtaagatgtggacaactgtctccatgccctacatacaacccccttctctgacatttccatgatgggtggtgctgaggtgattcgccagaaagttcgttgctctccttggagccaggagatttagattctaataagcgttttgtcgccagtagccatggccctttgggcagactaacttttgtcagcctcaagttttctgttttgttaaggggaggcgatgccatgcagcctacctcatgtaaatctcagagtcagatttacatctccagcagatgtgggaaaagaaggaatgctgatgatgatgtcaccctcacctagtgagtcttgctgtcctggcactgctctaagggctttatacttatttgctcacttagtcctcacagtatccctctgaacagagtttattgttttcactttgctgataaggaaactgaggcacagacaggttgagtatcttgcccaaattcaggcagcctgtaagaggcagagtcaggatttgaaccctgagccctccctgtactgcttggctgtgaccgccatgaccacagtgtgttctgctgggcttaactggcatccaggcacttggcttccagcacagcactctttcccttcctccttctcatatactctctccttttccccttcctttttgtccccttttcctcttccttttagttcttctctttaaatgccttctcactctgcacggggtctagacttgacttctcctttggctcacttcttgccttttgtttcaggagtgtacaccttaaacaatgggaagcagtggataaataaggctgttggagataaacttcctgaatgtgaagcagtatgtgggaagcccaagaatccggcaaacccagtgcagcggatcctgggtggacacctggatgccaaaggcagctttccctggcaggctaagatggtttcccaccataatctcaccacaggtgccacgctgatcaatgaacaatggctgctgaccacggctaaaaatctcttcctgaaccattcagaaaatgcaacagcgaaagacattgcccctactttaacactctatgtggggaaaaagcagcttgtagagattgagaaggttgttctacaccctaactactcccaggtagatattgggctcatcaaactcaaacagaaggtgtctgttaatgagagagtgatgcccatctgcctaccttcaaaggattatgcagaagtagggcgtgtgggttatgtttctggctgggggcgaaatgccaattttaaatttactgaccatctgaagtatgtcatgctgcctgtggctgaccaagaccaatgcataaggcattatgaaggcagcacagtccccgaaaagaagacaccgaagagccctgtaggggtgcagcccatactgaatgaacacaccttctgtgctggcatgtctaagtaccaagaagacacctgctatggcgatgcgggcagtgcctttgccgttcacgacctggaggctgagtatggtgtgtatgtgaaggtgacttccatccaggactgggttcagcctggaagagggcaaagtggacgggagtggacaggagtggatgcgataagatgtggtttgaagctgatgggtgccagccctgcattgctgagtcaatcaataaagagctttcttttgacccataaaaaaaaaaccacaacaaaaacttttggcccccttgggccccggaaaagtttcaaaacattcgttggggcggggcgcaaggggaacgggaaccgggcaaagcggtccaaggaaacccgtgcgccagagaaaagagcggagagatttcccaccatgtaaaaaaagcccggggggaacaccggcgcgttctggaacacactccgagagggccctcagaggcacaaaacgggacgcatccagagggtgccagaggaaaccgcaataaaaccg

SEQ ID NO: 732230 - DNA, 2169 bp, Homo sapiens
  misc_feature (2085)..(2085): n is a, c, g, or t
  misc_feature (2095)..(2095): n is a, c, g, or t
  misc_feature (2098)..(2098): n is a, c, g, or t
  misc_feature (2109)..(2109): n is a, c, g, or t
  misc_feature (2114)..(2114): n is a, c, g, or t
  misc_feature (2120)..(2121): n is a, c, g, or t
  misc_feature (2123)..(2123): n is a, c, g, or t
  misc_feature (2138)..(2138): n is a, c, g, or t
ggactgctcttccagaggcaagaccaaccaagatgagtgccctgggagctgtcattgccctcctgctctggggacagctttttgcagtggactcaggcaatgatgtcacggatatcgcagatgacggctgcccgaagccccccgagattgcacatggctatgtggagcactcggttcgctaccagtgtaagaactactacaaactgcgcacagaaggagatgagatggtaagatgtggacaactgtctccatgccctacatacaacccccttctctgacatttccatgatgggtggtgctgaggtgattcgccagaaagttcgttgctctccttggagccaggagatttagattctaataagcgttttgtcgccagtagccatggccctttgggcagactaacttttgtcagcctcaagttttctgttttgttaaggggaggcgatgccatgcagcctacctcatgtaaatctcagagtcagatttacatctccagcagatgtgggaaaagaaggaatgctgatgatgatgtcaccctcacctagtgagtcttgctgtcctggcactgctctaagggctttatacttatttgctcacttagtcctcacagtatccctctgaacagagtttattgttttcactttgctgataaggaaactgaggcacagacaggttgagtatcttgcccaaattcaggcagcctgtaagaggcagagtcaggatttgaaccctgagccctccctgtactgcttggctgtgaccgccatgaccacagtgtgttctgctgggcttaactggcatccaggcacttggcttccagcacagcactctttcccttcctccttctcatatactctctccttttccccttcctttttgtccccttttcctcttccttttagttcttctctttaaatgccttctcactctgcacggggtctagacttgacttctcctttggctcacttcttgccttttgtttcaggagtgtacaccttaaacaatgggaagcagtggataaataaggctgttggagataaacttcctgaatgtgaagcagtatgtgggaagcccaagaatccggcaaacccagtgcagcggatcctgggtggacacctggatgccaaaggcagctttccctggcaggctaagatggtttcccaccataatctcaccacaggtgccacgctgatcaatgaacaatggctgctgaccacggctaaaaatctcttcctgaaccattcagaaaatgcaacagcgaaagacattgcccctactttaacactctatgtggggaaaaagcagcttgtagagattgagaaggttgttctacaccctaactactcccaggtagatattgggctcatcaaactcaaacagaaggtgtctgttaatgagagagtgatgcccatctgcctaccttcaaaggattatgcagaagtagggcgtgtgggttatgtttctggctgggggcgaaatgccaattttaaatttactgaccatctgaagtatgtcatgctgcctgtggctgaccaagaccaatgcataaggcattatgaaggcagcacagtccccgaaaagaagacaccgaagagccctgtaggggtgcagcccatactgaatgaacacaccttctgtgctggcatgtctaagtaccaagaagacacctgctatggcgatgcgggcagtgcctttgccgttcacgacctggaggctgagtatggtgtgtatgtgaaggtgacttccatccaggactgggttcagcctggaagagggcaaagtggacgggagtggacaggagtggatgcgataagatgtggtttgaagctgatgggtgccagccctgcattgctgagtcaatcaataaagagctttcttttgacccaaaaaaaaaaggaacaaaaaacaaaaaaaaaacctttttggggccgcgtgggccccttggaagaaacttttttcataaaaaccacctttcgtttgtgtagcgccgggggccccatagagtgatataggtcgaccacgtggtcaacacagatggtgttccctaaggagaaactgggggacaagtacacaatgcgcctgggnattcctcccnatnaaaaacgcccnggggncacacnnangttctggaaaaatcncgaaggagtccggggccacacgcggaccagc

SEQ ID NO: 732231 - DNA, 2086 bp, Homo sapiens
  misc_feature (1990)..(1990): n is a, c, g, or t
ggactgctcttccagaggcaagaccaaccaagatgagtgccctgggagctgtcattgccctcctgctctggggacagctttttgcagtggactcaggcaatgatgtcacggatatcgcagatgacggctgcccgaagccccccgagattgcacatggctatgtggagcactcggttcgctaccagtgtaagaactactacaaactgcgcacagaaggagatgagatggtaagatgtggacaactgtctccatgccctacatacaacccccttctctgacatttccatgatgggtggtgctgaggtgattcgccagaaagttcgttgctctccttggagccaggagatttagattctaataagcgttttgtcgccagtagccatggccctttgggcagactaacttttgtcagcctcaagttttctgttttgttaaggggaggcgatgccatgcagcctacctcatgtaaatctcagagtcagatttacatctccagcagatgtgggaaaagaaggaatgctgatgatgatgtcaccctcacctagtgagtcttgctgtcctggcactgctctaagggctttatacttatttgctcacttagtcctcacagtatccctctgaacagagtttattgttttcactttgctgataaggaaactgaggcacagacaggttgagtatcttgcccaaattcaggcagcctgtaagaggcagagtcaggatttgaaccctgagccctccctgtactgcttggctgtgaccgccatgaccacagtgtgttctgctgggcttaactggcatccaggcacttggcttccagcacagcactctttcccttcctccttctcatatactctctccttttccccttcctttttgtccccttttcctcttccttttagttcttctctttaaatgccttctcactctgcacggggtctagacttgacttctcctttggctcacttcttgccttttgtttcaggagtgtacaccttaaacaatgggaagcagtggataaataaggctgttggagataaacttcctgaatgtgaagcagtatgtgggaagcccaagaatccggcaaacccagtgcagcggatcctgggtggacacctggatgccaaaggcagctttccctggcaggctaagatggtttcccaccataatctcaccacaggtgccacgctgatcaatgaacaatggctgctgaccacggctaaaaatctcttcctgaaccattcagaaaatgcaacagcgaaagacattgcccctactttaacactctatgtggggaaaaagcagcttgtagagattgagaaggttgttctacaccctaactactcccaggtagatattgggctcatcaaactcaaacagaaggtgtctgttaatgagagagtgatgcccatctgcctaccttcaaaggattatgcagaagtagggcgtgtgggttatgtttctggctgggggcgaaatgccaattttaaatttactgaccatctgaagtatgtcatgctgcctgtggctgaccaagaccaatgcataaggcattatgaaggcagcacagtcatgaacacaccttctgtgctggcatgtctaagtaccaagaagacacctgctatggcgatgcgggcagtgcctttgccgttcacgacctggaggaggacacctggtatgcgactgggatcttaagctttgataagagctgtgctgtggctgagtatggtgtgtatgtgaaggtgacttccatccaggactgggttcagaagaccatagctgagaactaatgcaaggctggccggaagcccttgcctgaaagcaagatttcagcctggaagagggcaaagtggacgggagtggacaggagtggatgcgataagatgtggtttgaagctgatgggtgccagccctgcattgctgagtcaatcaataaagagctttcttttgacccaaaaaaaaaaaaaaaaaaaaaaaattttggggcgcntgggccgaaaatttttaaacccttttggggcggcggcctgtttgtgaccgggccaaggggtcccagagaaccggcgaagtggcgtggttcccccaa

SEQ ID NO: 732232 - DNA, 2149 bp, Homo sapiens
  misc_feature (2149)..(2149): n is a, c, g, or t
ggactgctcttccagaggcaagaccaaccaagatgagtgccctgggagctgtcattgccctcctgctctggggacagctttttgcagtggactcaggcaatgatgtcacggatatcgcagatgacggctgcccgaagccccccgagattgcacatggctatgtggagcactcggttcgctaccagtgtaagaactactacaaactgcgcacagaaggagatgagatggtaagatgtggacaactgtctccatgccctacatacaacccccttctctgacatttccatgatgggtggtgctgaggtgattcgccagaaagttcgttgctctccttggagccaggagatttagattctaataagcgttttgtcgccagtagccatggccctttgggcagactaacttttgtcagcctcaagttttctgttttgttaaggggaggcgatgccatgcagcctacctcatgtaaatctcagagtcagatttacatctccagcagatgtgggaaaagaaggaatgctgatgatgatgtcaccctcacctagtgagtcttgctgtcctggcactgctctaagggctttatacttatttgctcacttagtcctcacagtatccctctgaacagagtttattgttttcactttgctgataaggaaactgaggcacagacaggttgagtatcttgcccaaattcaggcagcctgtaagaggcagagtcaggatttgaaccctgagccctccctgtactgcttggctgtgaccgccatgaccacagtgtgttctgctgggcttaactggcatccaggcacttggcttccagcacagcactctttcccttcctccttctcatatactctctccttttccccttcctttttgtccccttttcctcttccttttagttcttctctttaaatgccttctcactctgcacggggtctagacttgacttctcctttggctcacttcttgccttttgtttcaggagtgtacaccttaaacaatgggaagcagtggataaataaggctgttggagataaacttcctgaatgtgaagcagtatgtgggaagcccaagaatccggcaaacccagtgcagcggatcctgggtggacacctggatgccaaaggcagctttccctggcaggctaagatggtttcccaccataatctcaccacaggtgccacgctgatcaatgaacaatggctgctgaccacggctaaaaatctcttcctgaaccattcagaaaatgcaacagcgaaagacattgcccctactttaacactctatgtggggaaaaagcagcttgtagagattgagaaggttgttctacaccctaactactcccaggtagatattgggctcatcaaactcaaacagaaggtgtctgttaatgagagagtgatgcccatctgcctaccttcaaaggattatgcagaagtagggcgtgtgggttatgtttctggctgggggcgaaatgccaattttaaatttactgaccatctgaagtatgtcatgctgcctgtggctgaccaagaccaatgcataaggcattatgaaggcagcacagtcatgaacacaccttctgtgctggcatgtctaagtaccaagaagacacctgctatggcgatgcgggcagtgcctttgccgttcacgacctggaggaggacacctggtatgcgactgggatcttaagctttgataagagctgtgctgtggctgagtatggtgtgtatgtgaaggtgacttccatccaggactgggttcagaagaccatagctgagaactaatgcaaggctggccggaagcccttgcctgaaagcaagatttcagcctggaagagggcaaagtggacgggagtggacaggagtggatgcgataagatgtggtttgaagctgatgggtgccagccctgcattgctgagtcaatcaataaagagctttcttttgacccaaaaaaaaaaaaaaaaaaaaaaaattttggtggggggattgggcccttgaaaagggttttgaaaacattctgggtgggagcccgggggccaagatgggataggtggaccatgggacaaaaggggttcccaaggaaaaccggggaccaagaaacaaagggcgagggatttctccacaagttaaaaaaggcccggan

SEQ ID NO: 732233 - DNA, 2113 bp, Homo sapiens
  misc_feature (2017)..(2017): n is a, c, g, or t
ggactgctcttccagaggcaagaccaaccaagatgagtgccctgggagctgtcattgccctcctgctctggggacagctttttgcagtggactcaggcaatgatgtcacggatatcgcagatgacggctgcccgaagccccccgagattgcacatggctatgtggagcactcggttcgctaccagtgtaagaactactacaaactgcgcacagaaggagatgagatggtaagatgtggacaactgtctccatgccctacatacaacccccttctctgacatttccatgatgggtggtgctgaggtgattcgccagaaagttcgttgctctccttggagccaggagatttagattctaataagcgttttgtcgccagtagccatggccctttgggcagactaacttttgtcagcctcaagttttctgttttgttaaggggaggcgatgccatgcagcctacctcatgtaaatctcagagtcagatttacatctccagcagatgtgggaaaagaaggaatgctgatgatgatgtcaccctcacctagtgagtcttgctgtcctggcactgctctaagggctttatacttatttgctcacttagtcctcacagtatccctctgaacagagtttattgttttcactttgctgataaggaaactgaggcacagacaggttgagtatcttgcccaaattcaggcagcctgtaagaggcagagtcaggatttgaaccctgagccctccctgtactgcttggctgtgaccgccatgaccacagtgtgttctgctgggcttaactggcatccaggcacttggcttccagcacagcactctttcccttcctccttctcatatactctctccttttccccttcctttttgtccccttttcctcttccttttagttcttctctttaaatgccttctcactctgcacggggtctagacttgacttctcctttggctcacttcttgccttttgtttcaggagtgtacaccttaaacaatgggaagcagtggataaataaggctgttggagataaacttcctgaatgtgaagcagtatgtgggaagcccaagaatccggcaaacccagtgcagcggatcctgggtggacacctggatgccaaaggcagctttccctggcaggctaagatggtttcccaccataatctcaccacaggtgccacgctgatcaatgaacaatggctgctgaccacggctaaaaatctcttcctgaaccattcagaaaatgcaacagcgaaagacattgcccctactttaacactctatgtggggaaaaagcagcttgtagagattgagaaggttgttctacaccctaactactcccaggtagatattgggctcatcaaactcaaacagaaggtgtctgttaatgagagagtgatgcccatctgcctaccttcaaaggattatgcagaagtagggcgtgtgggttatgtttctggctgggggcgaaatgccaattttaaatttactgaccatctgaagtatgtcatgctgcctgtggctgaccaagaccaatgcataaggcattatgaaggcagcacagtcatgaacacaccttctgtgctggcatgtctaagtaccaagaagacacctgctatggcgatgcgggcagtgcctttgccgttcacgacctggaggaggacacctggtatgcgactgggatcttaagctttgataagagctgtgctgtggctgagtatggtgtgtatgtgaaggtgacttccatccaggactgggttcagaagaccatagctgagaactaatgcaaggctggccggaagcccttgcctgaaagcaagatttcagcctggaagagggcaaagtggacgggagtggacaggagtggatgcgataagatgtggtttgaagctgatgggtgccagccctgcattgctgagtcaatcaataaagagctttcttttgacccaaaaaaaaaaaaaaaaaaaaaaacaaaaaaaaaaaaaaaaaaaaaaaaaaattttggggcgcntgggccgaaaatttttaaacccttttggggcggcggcctgtttgtgaccgggccaaggggtcccagagaaccggcgaagtggcgtggttcccccaa

SEQ ID NO: 732234 - DNA, 2176 bp, Homo sapiens
  misc_feature (2176)..(2176): n is a, c, g, or t
ggactgctcttccagaggcaagaccaaccaagatgagtgccctgggagctgtcattgccctcctgctctggggacagctttttgcagtggactcaggcaatgatgtcacggatatcgcagatgacggctgcccgaagccccccgagattgcacatggctatgtggagcactcggttcgctaccagtgtaagaactactacaaactgcgcacagaaggagatgagatggtaagatgtggacaactgtctccatgccctacatacaacccccttctctgacatttccatgatgggtggtgctgaggtgattcgccagaaagttcgttgctctccttggagccaggagatttagattctaataagcgttttgtcgccagtagccatggccctttgggcagactaacttttgtcagcctcaagttttctgttttgttaaggggaggcgatgccatgcagcctacctcatgtaaatctcagagtcagatttacatctccagcagatgtgggaaaagaaggaatgctgatgatgatgtcaccctcacctagtgagtcttgctgtcctggcactgctctaagggctttatacttatttgctcacttagtcctcacagtatccctctgaacagagtttattgttttcactttgctgataaggaaactgaggcacagacaggttgagtatcttgcccaaattcaggcagcctgtaagaggcagagtcaggatttgaaccctgagccctccctgtactgcttggctgtgaccgccatgaccacagtgtgttctgctgggcttaactggcatccaggcacttggcttccagcacagcactctttcccttcctccttctcatatactctctccttttccccttcctttttgtccccttttcctcttccttttagttcttctctttaaatgccttctcactctgcacggggtctagacttgacttctcctttggctcacttcttgccttttgtttcaggagtgtacaccttaaacaatgggaagcagtggataaataaggctgttggagataaacttcctgaatgtgaagcagtatgtgggaagcccaagaatccggcaaacccagtgcagcggatcctgggtggacacctggatgccaaaggcagctttccctggcaggctaagatggtttcccaccataatctcaccacaggtgccacgctgatcaatgaacaatggctgctgaccacggctaaaaatctcttcctgaaccattcagaaaatgcaacagcgaaagacattgcccctactttaacactctatgtggggaaaaagcagcttgtagagattgagaaggttgttctacaccctaactactcccaggtagatattgggctcatcaaactcaaacagaaggtgtctgttaatgagagagtgatgcccatctgcctaccttcaaaggattatgcagaagtagggcgtgtgggttatgtttctggctgggggcgaaatgccaattttaaatttactgaccatctgaagtatgtcatgctgcctgtggctgaccaagaccaatgcataaggcattatgaaggcagcacagtcatgaacacaccttctgtgctggcatgtctaagtaccaagaagacacctgctatggcgatgcgggcagtgcctttgccgttcacgacctggaggaggacacctggtatgcgactgggatcttaagctttgataagagctgtgctgtggctgagtatggtgtgtatgtgaaggtgacttccatccaggactgggttcagaagaccatagctgagaactaatgcaaggctggccggaagcccttgcctgaaagcaagatttcagcctggaagagggcaaagtggacgggagtggacaggagtggatgcgataagatgtggtttgaagctgatgggtgccagccctgcattgctgagtcaatcaataaagagctttcttttgacccaaaaaaaaaaaaaaaaaaaaaaacaaaaaaaaaaaaaaaaaaaaaaaaaaattttggtggggggattgggcccttgaaaagggttttgaaaacattctgggtgggagcccgggggccaagatgggataggtggaccatgggacaaaaggggttcccaaggaaaaccggggaccaagaaacaaagggcgagggatttctccacaagttaaaaaaggcccggan

SEQ ID NO: 732235 - DNA, 2202 bp, Homo sapiens
  misc_feature (2118)..(2118): n is a, c, g, or t
  misc_feature (2128)..(2128): n is a, c, g, or t
  misc_feature (2131)..(2131): n is a, c, g, or t
  misc_feature (2142)..(2142): n is a, c, g, or t
  misc_feature (2147)..(2147): n is a, c, g, or t
  misc_feature (2153)..(2154): n is a, c, g, or t
  misc_feature (2156)..(2156): n is a, c, g, or t
  misc_feature (2171)..(2171): n is a, c, g, or t
ggactgctcttccagaggcaagaccaaccaagatgagtgccctgggagctgtcattgccctcctgctctggggacagctttttgcagtggactcaggcaatgatgtcacggatatcgcagatgacggctgcccgaagccccccgagattgcacatggctatgtggagcactcggttcgctaccagtgtaagaactactacaaactgcgcacagaaggagatgagatggtaagatgtggacaactgtctccatgccctacatacaacccccttctctgacatttccatgatgggtggtgctgaggtgattcgccagaaagttcgttgctctccttggagccaggagatttagattctaataagcgttttgtcgccagtagccatggccctttgggcagactaacttttgtcagcctcaagttttctgttttgttaaggggaggcgatgccatgcagcctacctcatgtaaatctcagagtcagatttacatctccagcagatgtgggaaaagaaggaatgctgatgatgatgtcaccctcacctagtgagtcttgctgtcctggcactgctctaagggctttatacttatttgctcacttagtcctcacagtatccctctgaacagagtttattgttttcactttgctgataaggaaactgaggcacagacaggttgagtatcttgcccaaattcaggcagcctgtaagaggcagagtcaggatttgaaccctgagccctccctgtactgcttggctgtgaccgccatgaccacagtgtgttctgctgggcttaactggcatccaggcacttggcttccagcacagcactctttcccttcctccttctcatatactctctccttttccccttcctttttgtccccttttcctcttccttttagttcttctctttaaatgccttctcactctgcacggggtctagacttgacttctcctttggctcacttcttgccttttgtttcaggagtgtacaccttaaacaatgggaagcagtggataaataaggctgttggagataaacttcctgaatgtgaagcagtatgtgggaagcccaagaatccggcaaacccagtgcagcggatcctgggtggacacctggatgccaaaggcagctttccctggcaggctaagatggtttcccaccataatctcaccacaggtgccacgctgatcaatgaacaatggctgctgaccacggctaaaaatctcttcctgaaccattcagaaaatgcaacagcgaaagacattgcccctactttaacactctatgtggggaaaaagcagcttgtagagattgagaaggttgttctacaccctaactactcccaggtagatattgggctcatcaaactcaaacagaaggtgtctgttaatgagagagtgatgcccatctgcctaccttcaaaggattatgcagaagtagggcgtgtgggttatgtttctggctgggggcgaaatgccaattttaaatttactgaccatctgaagtatgtcatgctgcctgtggctgaccaagaccaatgcataaggcattatgaaggcagcacagtcatgaacacaccttctgtgctggcatgtctaagtaccaagaagacacctgctatggcgatgcgggcagtgcctttgccgttcacgacctggaggaggacacctggtatgcgactgggatcttaagctttgataagagctgtgctgtggctgagtatggtgtgtatgtgaaggtgacttccatccaggactgggttcagaagaccatagctgagaactaatgcaaggctggccggaagcccttgcctgaaagcaagatttcagcctggaagagggcaaagtggacgggagtggacaggagtggatgcgataagatgtggtttgaagctgatgggtgccagccctgcattgctgagtcaatcaataaagagctttcttttgacccaaaaaaaaaaaaaaaaaaaaaaacaaaaaacccttttgggcggccttgggccctggaaaagtttttaaaacccttcggttggggcgcgcggcccccttgggttcggtgaacatgggccaaagcgcggtccccaggaaacaccgggcgcacgaccagggccgggnattcctcccnatnaaaaacgcccnggggncacacnnangttctggaaaaatcncgaaggagtccggggccacacgcggaccagc

SEQ ID NO: 732236 - DNA, 2101 bp, Homo sapiens
ggactgctcttccagaggcaagaccaaccaagatgagtgccctgggagctgtcattgccctcctgctctggggacagctttttgcagtggactcaggcaatgatgtcacggatatcgcagatgacggctgcccgaagccccccgagattgcacatggctatgtggagcactcggttcgctaccagtgtaagaactactacaaactgcgcacagaaggagatgagatggtaagatgtggacaactgtctccatgccctacatacaacccccttctctgacatttccatgatgggtggtgctgaggtgattcgccagaaagttcgttgctctccttggagccaggagatttagattctaataagcgttttgtcgccagtagccatggccctttgggcagactaacttttgtcagcctcaagttttctgttttgttaaggggaggcgatgccatgcagcctacctcatgtaaatctcagagtcagatttacatctccagcagatgtgggaaaagaaggaatgctgatgatgatgtcaccctcacctagtgagtcttgctgtcctggcactgctctaagggctttatacttatttgctcacttagtcctcacagtatccctctgaacagagtttattgttttcactttgctgataaggaaactgaggcacagacaggttgagtatcttgcccaaattcaggcagcctgtaagaggcagagtcaggatttgaaccctgagccctccctgtactgcttggctgtgaccgccatgaccacagtgtgttctgctgggcttaactggcatccaggcacttggcttccagcacagcactctttcccttcctccttctcatatactctctccttttccccttcctttttgtccccttttcctcttccttttagttcttctctttaaatgccttctcactctgcacggggtctagacttgacttctcctttggctcacttcttgccttttgtttcaggagtgtacaccttaaacaatgggaagcagtggataaataaggctgttggagataaacttcctgaatgtgaagcagtatgtgggaagcccaagaatccggcaaacccagtgcagcggatcctgggtggacacctggatgccaaaggcagctttccctggcaggctaagatggtttcccaccataatctcaccacaggtgccacgctgatcaatgaacaatggctgctgaccacggctaaaaatctcttcctgaaccattcagaaaatgcaacagcgaaagacattgcccctactttaacactctatgtggggaaaaagcagcttgtagagattgagaaggttgttctacaccctaactactcccaggtagatattgggctcatcaaactcaaacagaaggtgtctgttaatgagagagtgatgcccatctgcctaccttcaaaggattatgcagaagtagggcgtgtgggttatgtttctggctgggggcgaaatgccaattttaaatttactgaccatctgaagtatgtcatgctgcctgtggctgaccaagaccaatgcataaggcattatgaaggcagcacagtcatgaacacaccttctgtgctggcatgtctaagtaccaagaagacacctgctatggcgatgcgggcagtgcctttgccgttcacgacctggaggaggacacctggtatgcgactgggatcttaagctttgataagagctgtgctgtggctgagtatggtgtgtatgtgaaggtgacttccatccaggactgggttcagaagaccatagctgagaactaatgcaaggctggccggaagcccttgcctgaaagcaagatttcagcctggaagagggcaaagtggacgggagtggacaggagtggatgcgataagatgtggtttgaagctgatgggtgccagccctgcattgctgagtcaatcaataaagagctttcttttgacccagtaacaaaaacaaacgaaaaaacacaaaaaagggtgagacgccgggcaccagaaagattctaaacacaccgggggcacgggcccaagagaaggcacacgggcaagaggtgcccaggaaccggacgacaagaggggtccacaaaaag

SEQ ID NO: 732237 - DNA, 2106 bp, Homo sapiens
  misc_feature (1957)..(1957): n is a, c, g, or t
  misc_feature (2010)..(2010): n is a, c, g, or t
ggactgctcttccagaggcaagaccaaccaagatgagtgccctgggagctgtcattgccctcctgctctggggacagctttttgcagtggactcaggcaatgatgtcacggatatcgcagatgacggctgcccgaagccccccgagattgcacatggctatgtggagcactcggttcgctaccagtgtaagaactactacaaactgcgcacagaaggagatgagatggtaagatgtggacaactgtctccatgccctacatacaacccccttctctgacatttccatgatgggtggtgctgaggtgattcgccagaaagttcgttgctctccttggagccaggagatttagattctaataagcgttttgtcgccagtagccatggccctttgggcagactaacttttgtcagcctcaagttttctgttttgttaaggggaggcgatgccatgcagcctacctcatgtaaatctcagagtcagatttacatctccagcagatgtgggaaaagaaggaatgctgatgatgatgtcaccctcacctagtgagtcttgctgtcctggcactgctctaagggctttatacttatttgctcacttagtcctcacagtatccctctgaacagagtttattgttttcactttgctgataaggaaactgaggcacagacaggttgagtatcttgcccaaattcaggcagcctgtaagaggcagagtcaggatttgaaccctgagccctccctgtactgcttggctgtgaccgccatgaccacagtgtgttctgctgggcttaactggcatccaggcacttggcttccagcacagcactctttcccttcctccttctcatatactctctccttttccccttcctttttgtccccttttcctcttccttttagttcttctctttaaatgccttctcactctgcacggggtctagacttgacttctcctttggctcacttcttgccttttgtttcaggagtgtacaccttaaacaatgggaagcagtggataaataaggctgttggagataaacttcctgaatgtgaagcagtatgtgggaagcccaagaatccggcaaacccagtgcagcggatcctgggtggacacctggatgccaaaggcagctttccctggcaggctaagatggtttcccaccataatctcaccacaggtgccacgctgatcaatgaacaatggctgctgaccacggctaaaaatctcttcctgaaccattcagaaaatgcaacagcgaaagacattgcccctactttaacactctatgtggggaaaaagcagcttgtagagattgagaaggttgttctacaccctaactactcccaggtagatattgggctcatcaaactcaaacagaaggtgtctgttaatgagagagtgatgcccatctgcctaccttcaaaggattatgcagaagtagggcgtgtgggttatgtttctggctgggggcgaaatgccaattttaaatttactgaccatctgaagtatgtcatgctgcctgtggctgaccaagaccaatgcataaggcattatgaaggcagcacagtcatgaacacaccttctgtgctggcatgtctaagtaccaagaagacacctgctatggcgatgcgggcagtgcctttgccgttcacgacctggaggaggacacctggtatgcgactgggatcttaagctttgataagagctgtgctgtggctgagtatggtgtgtatgtgaaggtgacttccatccaggactgggttcagaagaccatagctgagaactaatgcaaggctggccggaagcccttgcctgaaagcaagatttcagcctggaagagggcaaagtggacgggagtggacaggagtggatgcgataagatgtggtttgaagctgatgggtgccagccctgcattgctgagtcaatcaataaagagctttcttttgacccaangattgacccacaaaaaaaaaaaaaaaaaaaaaaaaaaaaaattttggggcgcntgggccgaaaatttttaaacccttttggggcggcggcctgtttgtgaccgggccaaggggtcccagagaaccggcgaagtggcgtggttcccccaa

SEQ ID NO: 732238 - DNA, 2169 bp, Homo sapiens
  misc_feature (1957)..(1957): n is a, c, g, or t
  misc_feature (2169)..(2169): n is a, c, g, or t
ggactgctcttccagaggcaagaccaaccaagatgagtgccctgggagctgtcattgccctcctgctctggggacagctttttgcagtggactcaggcaatgatgtcacggatatcgcagatgacggctgcccgaagccccccgagattgcacatggctatgtggagcactcggttcgctaccagtgtaagaactactacaaactgcgcacagaaggagatgagatggtaagatgtggacaactgtctccatgccctacatacaacccccttctctgacatttccatgatgggtggtgctgaggtgattcgccagaaagttcgttgctctccttggagccaggagatttagattctaataagcgttttgtcgccagtagccatggccctttgggcagactaacttttgtcagcctcaagttttctgttttgttaaggggaggcgatgccatgcagcctacctcatgtaaatctcagagtcagatttacatctccagcagatgtgggaaaagaaggaatgctgatgatgatgtcaccctcacctagtgagtcttgctgtcctggcactgctctaagggctttatacttatttgctcacttagtcctcacagtatccctctgaacagagtttattgttttcactttgctgataaggaaactgaggcacagacaggttgagtatcttgcccaaattcaggcagcctgtaagaggcagagtcaggatttgaaccctgagccctccctgtactgcttggctgtgaccgccatgaccacagtgtgttctgctgggcttaactggcatccaggcacttggcttccagcacagcactctttcccttcctccttctcatatactctctccttttccccttcctttttgtccccttttcctcttccttttagttcttctctttaaatgccttctcactctgcacggggtctagacttgacttctcctttggctcacttcttgccttttgtttcaggagtgtacaccttaaacaatgggaagcagtggataaataaggctgttggagataaacttcctgaatgtgaagcagtatgtgggaagcccaagaatccggcaaacccagtgcagcggatcctgggtggacacctggatgccaaaggcagctttccctggcaggctaagatggtttcccaccataatctcaccacaggtgccacgctgatcaatgaacaatggctgctgaccacggctaaaaatctcttcctgaaccattcagaaaatgcaacagcgaaagacattgcccctactttaacactctatgtggggaaaaagcagcttgtagagattgagaaggttgttctacaccctaactactcccaggtagatattgggctcatcaaactcaaacagaaggtgtctgttaatgagagagtgatgcccatctgcctaccttcaaaggattatgcagaagtagggcgtgtgggttatgtttctggctgggggcgaaatgccaattttaaatttactgaccatctgaagtatgtcatgctgcctgtggctgaccaagaccaatgcataaggcattatgaaggcagcacagtcatgaacacaccttctgtgctggcatgtctaagtaccaagaagacacctgctatggcgatgcgggcagtgcctttgccgttcacgacctggaggaggacacctggtatgcgactgggatcttaagctttgataagagctgtgctgtggctgagtatggtgtgtatgtgaaggtgacttccatccaggactgggttcagaagaccatagctgagaactaatgcaaggctggccggaagcccttgcctgaaagcaagatttcagcctggaagagggcaaagtggacgggagtggacaggagtggatgcgataagatgtggtttgaagctgatgggtgccagccctgcattgctgagtcaatcaataaagagctttcttttgacccaangattgacccacaaaaaaaaaaaaaaaaaaaaaaaaaaaaaattttggtggggggattgggcccttgaaaagggttttgaaaacattctgggtgggagcccgggggccaagatgggataggtggaccatgggacaaaaggggttcccaaggaaaaccggggaccaagaaacaaagggcgagggatttctccacaagttaaaaaaggcccggan

SEQ ID NO: 732239 - DNA, 2126 bp, Homo sapiens
ggactgctcttccagaggcaagaccaaccaagatgagtgccctgggagctgtcattgccctcctgctctggggacagctttttgcagtggactcaggcaatgatgtcacggatatcgcagatgacggctgcccgaagccccccgagattgcacatggctatgtggagcactcggttcgctaccagtgtaagaactactacaaactgcgcacagaaggagatgagatggtaagatgtggacaactgtctccatgccctacatacaacccccttctctgacatttccatgatgggtggtgctgaggtgattcgccagaaagttcgttgctctccttggagccaggagatttagattctaataagcgttttgtcgccagtagccatggccctttgggcagactaacttttgtcagcctcaagttttctgttttgttaaggggaggcgatgccatgcagcctacctcatgtaaatctcagagtcagatttacatctccagcagatgtgggaaaagaaggaatgctgatgatgatgtcaccctcacctagtgagtcttgctgtcctggcactgctctaagggctttatacttatttgctcacttagtcctcacagtatccctctgaacagagtttattgttttcactttgctgataaggaaactgaggcacagacaggttgagtatcttgcccaaattcaggcagcctgtaagaggcagagtcaggatttgaaccctgagccctccctgtactgcttggctgtgaccgccatgaccacagtgtgttctgctgggcttaactggcatccaggcacttggcttccagcacagcactctttcccttcctccttctcatatactctctccttttccccttcctttttgtccccttttcctcttccttttagttcttctctttaaatgccttctcactctgcacggggtctagacttgacttctcctttggctcacttcttgccttttgtttcaggagtgtacaccttaaacaatgggaagcagtggataaataaggctgttggagataaacttcctgaatgtgaagcagtatgtgggaagcccaagaatccggcaaacccagtgcagcggatcctgggtggacacctggatgccaaaggcagctttccctggcaggctaagatggtttcccaccataatctcaccacaggtgccacgctgatcaatgaacaatggctgctgaccacggctaaaaatctcttcctgaaccattcagaaaatgcaacagcgaaagacattgcccctactttaacactctatgtggggaaaaagcagcttgtagagattgagaaggttgttctacaccctaactactcccaggtagatattgggctcatcaaactcaaacagaaggtgtctgttaatgagagagtgatgcccatctgcctaccttcaaaggattatgcagaagtagggcgtgtgggttatgtttctggctgggggcgaaatgccaattttaaatttactgaccatctgaagtatgtcatgctgcctgtggctgaccaagaccaatgcataaggcattatgaaggcagcacagtcatgaacacaccttctgtgctggcatgtctaagtaccaagaagacacctgctatggcgatgcgggcagtgcctttgccgttcacgacctggaggaggacacctggtatgcgactgggatcttaagctttgataagagctgtgctgtggctgagtatggtgtgtatgtgaaggtgacttccatccaggactgggttcagaagaccatagctgagaactaatgcaaggctggccggaagcccttgcctgaaagcaagatttcagcctggaagagggcaaagtggacgggagtggacaggagtggatgcgataagatgtggtttgaagctgatgggtgccagccctgcattgctgagtcaatcaataaagagctttcttttgacccaaccccatagaacaacaccaacacaacacaatcataaccaaacaactcacacccccacaacaaacaaaaactaattcaacctcactcacaaaaataccacaaaacaaagaaaacagacacaaaaaaaaaccacaagacacacagacctataatgcacaaaaacacaaaagag

SEQ ID NO: 732240 - DNA, 2137 bp, Homo sapiens
  misc_feature (1966)..(1966): n is a, c, g, or t
  misc_feature (2137)..(2137): n is a, c, g, or t
ggactgctcttccagaggcaagaccaaccaagatgagtgccctgggagctgtcattgccctcctgctctggggacagctttttgcagtggactcaggcaatgatgtcacggatatcgcagatgacggctgcccgaagccccccgagattgcacatggctatgtggagcactcggttcgctaccagtgtaagaactactacaaactgcgcacagaaggagatgagatggtaagatgtggacaactgtctccatgccctacatacaacccccttctctgacatttccatgatgggtggtgctgaggtgattcgccagaaagttcgttgctctccttggagccaggagatttagattctaataagcgttttgtcgccagtagccatggccctttgggcagactaacttttgtcagcctcaagttttctgttttgttaaggggaggcgatgccatgcagcctacctcatgtaaatctcagagtcagatttacatctccagcagatgtgggaaaagaaggaatgctgatgatgatgtcaccctcacctagtgagtcttgctgtcctggcactgctctaagggctttatacttatttgctcacttagtcctcacagtatccctctgaacagagtttattgttttcactttgctgataaggaaactgaggcacagacaggttgagtatcttgcccaaattcaggcagcctgtaagaggcagagtcaggatttgaaccctgagccctccctgtactgcttggctgtgaccgccatgaccacagtgtgttctgctgggcttaactggcatccaggcacttggcttccagcacagcactctttcccttcctccttctcatatactctctccttttccccttcctttttgtccccttttcctcttccttttagttcttctctttaaatgccttctcactctgcacggggtctagacttgacttctcctttggctcacttcttgccttttgtttcaggagtgtacaccttaaacaatgggaagcagtggataaataaggctgttggagataaacttcctgaatgtgaagcagtatgtgggaagcccaagaatccggcaaacccagtgcagcggatcctgggtggacacctggatgccaaaggcagctttccctggcaggctaagatggtttcccaccataatctcaccacaggtgccacgctgatcaatgaacaatggctgctgaccacggctaaaaatctcttcctgaaccattcagaaaatgcaacagcgaaagacattgcccctactttaacactctatgtggggaaaaagcagcttgtagagattgagaaggttgttctacaccctaactactcccaggtagatattgggctcatcaaactcaaacagaaggtgtctgttaatgagagagtgatgcccatctgcctaccttcaaaggattatgcagaagtagggcgtgtgggttatgtttctggctgggggcgaaatgccaattttaaatttactgaccatctgaagtatgtcatgctgcctgtggctgaccaagaccaatgcataaggcattatgaaggcagcacagtcatgaacacaccttctgtgctggcatgtctaagtaccaagaagacacctgctatggcgatgcgggcagtgcctttgccgttcacgacctggaggaggacacctggtatgcgactgggatcttaagctttgataagagctgtgctgtggctgagtatggtgtgtatgtgaaggtgacttccatccaggactgggttcagaagaccatagctgagaactaatgcaaggctggccggaagcccttgcctgaaagcaagatttcagcctggaagagggcaaagtggacgggagtggacaggagtggatgcgataagatgtggtttgaagctgatgggtgccagccctgcattgctgagtcaatcaataaagagctttcttttgacccaaaaaaaaaaanaagagaaaaaagacacacaacacgtggtggcacggcatcaggagcccgaggaaagcgtggcgagaaacatggagatgggagacgcgcgggcaccggaggtatagaggacacacgggcgacagaggagggccctaggaaaaccggggagagaacaagggccgggaattccan

SEQ ID NO: 732241 - DNA, 2226 bp, Homo sapiens
ggactgctcttccagaggcaagaccaaccaagatgagtgccctgggagctgtcattgccctcctgctctggggacagctttttgcagtggactcaggcaatgatgtcacggatatcgcagatgacggctgcccgaagccccccgagattgcacatggctatgtggagcactcggttcgctaccagtgtaagaactactacaaactgcgcacagaaggagatgagatggtaagatgtggacaactgtctccatgccctacatacaacccccttctctgacatttccatgatgggtggtgctgaggtgattcgccagaaagttcgttgctctccttggagccaggagatttagattctaataagcgttttgtcgccagtagccatggccctttgggcagactaacttttgtcagcctcaagttttctgttttgttaaggggaggcgatgccatgcagcctacctcatgtaaatctcagagtcagatttacatctccagcagatgtgggaaaagaaggaatgctgatgatgatgtcaccctcacctagtgagtcttgctgtcctggcactgctctaagggctttatacttatttgctcacttagtcctcacagtatccctctgaacagagtttattgttttcactttgctgataaggaaactgaggcacagacaggttgagtatcttgcccaaattcaggcagcctgtaagaggcagagtcaggatttgaaccctgagccctccctgtactgcttggctgtgaccgccatgaccacagtgtgttctgctgggcttaactggcatccaggcacttggcttccagcacagcactctttcccttcctccttctcatatactctctccttttccccttcctttttgtccccttttcctcttccttttagttcttctctttaaatgccttctcactctgcacggggtctagacttgacttctcctttggctcacttcttgccttttgtttcaggagtgtacaccttaaacaatgggaagcagtggataaataaggctgttggagataaacttcctgaatgtgaagcagtatgtgggaagcccaagaatccggcaaacccagtgcagcggatcctgggtggacacctggatgccaaaggcagctttccctggcaggctaagatggtttcccaccataatctcaccacaggtgccacgctgatcaatgaacaatggctgctgaccacggctaaaaatctcttcctgaaccattcagaaaatgcaacagcgaaagacattgcccctactttaacactctatgtggggaaaaagcagcttgtagagattgagaaggttgttctacaccctaactactcccaggtagatattgggctcatcaaactcaaacagaaggtgtctgttaatgagagagtgatgcccatctgcctaccttcaaaggattatgcagaagtagggcgtgtgggttatgtttctggctgggggcgaaatgccaattttaaatttactgaccatctgaagtatgtcatgctgcctgtggctgaccaagaccaatgcataaggcattatgaaggcagcacagtcatgaacacaccttctgtgctggcatgtctaagtaccaagaagacacctgctatggcgatgcgggcagtgcctttgccgttcacgacctggaggaggacacctggtatgcgactgggatcttaagctttgataagagctgtgctgtggctgagtatggtgtgtatgtgaaggtgacttccatccaggactgggttcagaagaccatagctgagaactaatgcaaggctggccggaagcccttgcctgaaagcaagatttcagcctggaagagggcaaagtggacgggagtggacaggagtggatgcgataagatgtggtttgaagctgatgggtgccagccctgcattgctgagtcaatcaataaagagctttcttttgacccataaaaaaaaaaccacaacaaaaacttttggcccccttgggccccggaaaagtttcaaaacattcgttggggcggggcgcaaggggaacgggaaccgggcaaagcggtccaaggaaacccgtgcgccagagaaaagagcggagagatttcccaccatgtaaaaaaagcccggggggaacaccggcgcgttctggaacacactccgagagggccctcagaggcacaaaacgggacgcatccagagggtgccagaggaaaccgcaataaaaccg

SEQ ID NO: 732242 - DNA, 2238 bp, Homo sapiens
  misc_feature (2154)..(2154): n is a, c, g, or t
  misc_feature (2164)..(2164): n is a, c, g, or t
  misc_feature (2167)..(2167): n is a, c, g, or t
  misc_feature (2178)..(2178): n is a, c, g, or t
  misc_feature (2183)..(2183): n is a, c, g, or t
  misc_feature (2189)..(2190): n is a, c, g, or t
  misc_feature (2192)..(2192): n is a, c, g, or t
  misc_feature (2207)..(2207): n is a, c, g, or t
ggactgctcttccagaggcaagaccaaccaagatgagtgccctgggagctgtcattgccctcctgctctggggacagctttttgcagtggactcaggcaatgatgtcacggatatcgcagatgacggctgcccgaagccccccgagattgcacatggctatgtggagcactcggttcgctaccagtgtaagaactactacaaactgcgcacagaaggagatgagatggtaagatgtggacaactgtctccatgccctacatacaacccccttctctgacatttccatgatgggtggtgctgaggtgattcgccagaaagttcgttgctctccttggagccaggagatttagattctaataagcgttttgtcgccagtagccatggccctttgggcagactaacttttgtcagcctcaagttttctgttttgttaaggggaggcgatgccatgcagcctacctcatgtaaatctcagagtcagatttacatctccagcagatgtgggaaaagaaggaatgctgatgatgatgtcaccctcacctagtgagtcttgctgtcctggcactgctctaagggctttatacttatttgctcacttagtcctcacagtatccctctgaacagagtttattgttttcactttgctgataaggaaactgaggcacagacaggttgagtatcttgcccaaattcaggcagcctgtaagaggcagagtcaggatttgaaccctgagccctccctgtactgcttggctgtgaccgccatgaccacagtgtgttctgctgggcttaactggcatccaggcacttggcttccagcacagcactctttcccttcctccttctcatatactctctccttttccccttcctttttgtccccttttcctcttccttttagttcttctctttaaatgccttctcactctgcacggggtctagacttgacttctcctttggctcacttcttgccttttgtttcaggagtgtacaccttaaacaatgggaagcagtggataaataaggctgttggagataaacttcctgaatgtgaagcagtatgtgggaagcccaagaatccggcaaacccagtgcagcggatcctgggtggacacctggatgccaaaggcagctttccctggcaggctaagatggtttcccaccataatctcaccacaggtgccacgctgatcaatgaacaatggctgctgaccacggctaaaaatctcttcctgaaccattcagaaaatgcaacagcgaaagacattgcccctactttaacactctatgtggggaaaaagcagcttgtagagattgagaaggttgttctacaccctaactactcccaggtagatattgggctcatcaaactcaaacagaaggtgtctgttaatgagagagtgatgcccatctgcctaccttcaaaggattatgcagaagtagggcgtgtgggttatgtttctggctgggggcgaaatgccaattttaaatttactgaccatctgaagtatgtcatgctgcctgtggctgaccaagaccaatgcataaggcattatgaaggcagcacagtcatgaacacaccttctgtgctggcatgtctaagtaccaagaagacacctgctatggcgatgcgggcagtgcctttgccgttcacgacctggaggaggacacctggtatgcgactgggatcttaagctttgataagagctgtgctgtggctgagtatggtgtgtatgtgaaggtgacttccatccaggactgggttcagaagaccatagctgagaactaatgcaaggctggccggaagcccttgcctgaaagcaagatttcagcctggaagagggcaaagtggacgggagtggacaggagtggatgcgataagatgtggtttgaagctgatgggtgccagccctgcattgctgagtcaatcaataaagagctttcttttgacccaaaaaaaaaaggaacaaaaaacaaaaaaaaaacctttttggggccgcgtgggccccttggaagaaacttttttcataaaaaccacctttcgtttgtgtagcgccgggggccccatagagtgatataggtcgaccacgtggtcaacacagatggtgttccctaaggagaaactgggggacaagtacacaatgcgcctgggnattcctcccnatnaaaaacgcccnggggncacacnnangttctggaaaaatcncgaaggagtccggggccacacgcggaccagc

SEQ ID NO: 732243 - DNA, 2022 bp, Homo sapiens
  misc_feature (1926)..(1926): n is a, c, g, or t
ggactgctcttccagaggcaagaccaaccaagatgagtgccctgggagctgtcattgccctcctgctctggggacagctttttgcagtggactcaggcaatgatgtcacggatatcgcagatgacggctgcccgaagccccccgagattgcacatggctatgtggagcactcggttcgctaccagtgtaagaactactacaaactgcgcacagaaggagatgagatggtaagatgtggacaactgtctccatgccctacatacaacccccttctctgacatttccatgatgggtggtgctgaggtgattcgccagaaagttcgttgctctccttggagccaggagatttagattctaataagcgttttgtcgccagtagccatggccctttgggcagactaacttttgtcagcctcaagttttctgttttgttaaggggaggcgatgccatgcagcctacctcatgtaaatctcagagtcagatttacatctccagcagatgtgggaaaagaaggaatgctgatgatgatgtcaccctcacctagtgagtcttgctgtcctggcactgctctaagggctttatacttatttgctcacttagtcctcacagtatccctctgaacagagtttattgttttcactttgctgataaggaaactgaggcacagacaggttgagtatcttgcccaaattcaggcagcctgtaagaggcagagtcaggatttgaaccctgagccctccctgtactgcttggctgtgaccgccatgaccacagtgtgttctgctgggcttaactggcatccaggcacttggcttccagcacagcactctttcccttcctccttctcatatactctctccttttccccttcctttttgtccccttttcctcttccttttagttcttctctttaaatgccttctcactctgcacggggtctagacttgacttctcctttggctcacttcttgccttttgtttcaggagtgtacaccttaaacaatgggaagcagtggataaataaggctgttggagataaacttcctgaatgtgaagcagtatgtgggaagcccaagaatccggcaaacccagtgcagcggatcctgggtggacacctggatgccaaaggcagctttccctggcaggctaagatggtttcccaccataatctcaccacaggtgccacgctgatcaatgaacaatggctgctgaccacggctaaaaatctcttcctgaaccattcagaaaatgcaacagcgaaagacattgcccctactttaacactctatgtggggaaaaagcagcttgtagagattgagaaggttgttctacaccctaactactcccaggtagatattgggctcatcaaactcaaacagaaggtgtctgttaatgagagagtgatgcccatctgcctaccttcaaaggattatgcagaagtagggcgtgtgggttatgtttctggctgggggcgaaatgccaattttaaatttactgaccatctgaagtatgtcatgctgcctgtggctgaccaagaccaatgcataaggcattatgaaggcagcacagtcatgaacacaccttctgtgctggcatgtctaagtaccaagaagacacctgctatggcgatgcgggcagtgcctttgccgttcacgacctggaggaggacacctggtatgcgactgggatcttaagctttgataagagctgtgctgtggctgagtatggtgtgtatgtgaaggtgacttccatccaggactgggttcagcctggaagagggcaaagtggacgggagtggacaggagtggatgcgataagatgtggtttgaagctgatgggtgccagccctgcattgctgagtcaatcaataaagagctttcttttgacccaaaaaaaaaaaaaaaaaaaaaaaattttggggcgcntgggccgaaaatttttaaacccttttggggcggcggcctgtttgtgaccgggccaaggggtcccagagaaccggcgaagtggcgtggttcccccaa

SEQ ID NO: 732244 - DNA, 2085 bp, Homo sapiens
  misc_feature (2085)..(2085): n is a, c, g, or t
ggactgctcttccagaggcaagaccaaccaagatgagtgccctgggagctgtcattgccctcctgctctggggacagctttttgcagtggactcaggcaatgatgtcacggatatcgcagatgacggctgcccgaagccccccgagattgcacatggctatgtggagcactcggttcgctaccagtgtaagaactactacaaactgcgcacagaaggagatgagatggtaagatgtggacaactgtctccatgccctacatacaacccccttctctgacatttccatgatgggtggtgctgaggtgattcgccagaaagttcgttgctctccttggagccaggagatttagattctaataagcgttttgtcgccagtagccatggccctttgggcagactaacttttgtcagcctcaagttttctgttttgttaaggggaggcgatgccatgcagcctacctcatgtaaatctcagagtcagatttacatctccagcagatgtgggaaaagaaggaatgctgatgatgatgtcaccctcacctagtgagtcttgctgtcctggcactgctctaagggctttatacttatttgctcacttagtcctcacagtatccctctgaacagagtttattgttttcactttgctgataaggaaactgaggcacagacaggttgagtatcttgcccaaattcaggcagcctgtaagaggcagagtcaggatttgaaccctgagccctccctgtactgcttggctgtgaccgccatgaccacagtgtgttctgctgggcttaactggcatccaggcacttggcttccagcacagcactctttcccttcctccttctcatatactctctccttttccccttcctttttgtccccttttcctcttccttttagttcttctctttaaatgccttctcactctgcacggggtctagacttgacttctcctttggctcacttcttgccttttgtttcaggagtgtacaccttaaacaatgggaagcagtggataaataaggctgttggagataaacttcctgaatgtgaagcagtatgtgggaagcccaagaatccggcaaacccagtgcagcggatcctgggtggacacctggatgccaaaggcagctttccctggcaggctaagatggtttcccaccataatctcaccacaggtgccacgctgatcaatgaacaatggctgctgaccacggctaaaaatctcttcctgaaccattcagaaaatgcaacagcgaaagacattgcccctactttaacactctatgtggggaaaaagcagcttgtagagattgagaaggttgttctacaccctaactactcccaggtagatattgggctcatcaaactcaaacagaaggtgtctgttaatgagagagtgatgcccatctgcctaccttcaaaggattatgcagaagtagggcgtgtgggttatgtttctggctgggggcgaaatgccaattttaaatttactgaccatctgaagtatgtcatgctgcctgtggctgaccaagaccaatgcataaggcattatgaaggcagcacagtcatgaacacaccttctgtgctggcatgtctaagtaccaagaagacacctgctatggcgatgcgggcagtgcctttgccgttcacgacctggaggaggacacctggtatgcgactgggatcttaagctttgataagagctgtgctgtggctgagtatggtgtgtatgtgaaggtgacttccatccaggactgggttcagcctggaagagggcaaagtggacgggagtggacaggagtggatgcgataagatgtggtttgaagctgatgggtgccagccctgcattgctgagtcaatcaataaagagctttcttttgacccaaaaaaaaaaaaaaaaaaaaaaaattttggtggggggattgggcccttgaaaagggttttgaaaacattctgggtgggagcccgggggccaagatgggataggtggaccatgggacaaaaggggttcccaaggaaaaccggggaccaagaaacaaagggcgagggatttctccacaagttaaaaaaggcccggan

SEQ ID NO: 732245 - DNA, 2049 bp, Homo sapiens
  misc_feature (1953)..(1953): n is a, c, g, or t
ggactgctcttccagaggcaagaccaaccaagatgagtgccctgggagctgtcattgccctcctgctctggggacagctttttgcagtggactcaggcaatgatgtcacggatatcgcagatgacggctgcccgaagccccccgagattgcacatggctatgtggagcactcggttcgctaccagtgtaagaactactacaaactgcgcacagaaggagatgagatggtaagatgtggacaactgtctccatgccctacatacaacccccttctctgacatttccatgatgggtggtgctgaggtgattcgccagaaagttcgttgctctccttggagccaggagatttagattctaataagcgttttgtcgccagtagccatggccctttgggcagactaacttttgtcagcctcaagttttctgttttgttaaggggaggcgatgccatgcagcctacctcatgtaaatctcagagtcagatttacatctccagcagatgtgggaaaagaaggaatgctgatgatgatgtcaccctcacctagtgagtcttgctgtcctggcactgctctaagggctttatacttatttgctcacttagtcctcacagtatccctctgaacagagtttattgttttcactttgctgataaggaaactgaggcacagacaggttgagtatcttgcccaaattcaggcagcctgtaagaggcagagtcaggatttgaaccctgagccctccctgtactgcttggctgtgaccgccatgaccacagtgtgttctgctgggcttaactggcatccaggcacttggcttccagcacagcactctttcccttcctccttctcatatactctctccttttccccttcctttttgtccccttttcctcttccttttagttcttctctttaaatgccttctcactctgcacggggtctagacttgacttctcctttggctcacttcttgccttttgtttcaggagtgtacaccttaaacaatgggaagcagtggataaataaggctgttggagataaacttcctgaatgtgaagcagtatgtgggaagcccaagaatccggcaaacccagtgcagcggatcctgggtggacacctggatgccaaaggcagctttccctggcaggctaagatggtttcccaccataatctcaccacaggtgccacgctgatcaatgaacaatggctgctgaccacggctaaaaatctcttcctgaaccattcagaaaatgcaacagcgaaagacattgcccctactttaacactctatgtggggaaaaagcagcttgtagagattgagaaggttgttctacaccctaactactcccaggtagatattgggctcatcaaactcaaacagaaggtgtctgttaatgagagagtgatgcccatctgcctaccttcaaaggattatgcagaagtagggcgtgtgggttatgtttctggctgggggcgaaatgccaattttaaatttactgaccatctgaagtatgtcatgctgcctgtggctgaccaagaccaatgcataaggcattatgaaggcagcacagtcatgaacacaccttctgtgctggcatgtctaagtaccaagaagacacctgctatggcgatgcgggcagtgcctttgccgttcacgacctggaggaggacacctggtatgcgactgggatcttaagctttgataagagctgtgctgtggctgagtatggtgtgtatgtgaaggtgacttccatccaggactgggttcagcctggaagagggcaaagtggacgggagtggacaggagtggatgcgataagatgtggtttgaagctgatgggtgccagccctgcattgctgagtcaatcaataaagagctttcttttgacccaaaaaaaaaaaaaaaaaaaaaaacaaaaaaaaaaaaaaaaaaaaaaaaaaattttggggcgcntgggccgaaaatttttaaacccttttggggcggcggcctgtttgtgaccgggccaaggggtcccagagaaccggcgaagtggcgtggttcccccaa

SEQ ID NO: 732246 - DNA, 2112 bp, Homo sapiens
  misc_feature (2112)..(2112): n is a, c, g, or t
ggactgctcttccagaggcaagaccaaccaagatgagtgccctgggagctgtcattgccctcctgctctggggacagctttttgcagtggactcaggcaatgatgtcacggatatcgcagatgacggctgcccgaagccccccgagattgcacatggctatgtggagcactcggttcgctaccagtgtaagaactactacaaactgcgcacagaaggagatgagatggtaagatgtggacaactgtctccatgccctacatacaacccccttctctgacatttccatgatgggtggtgctgaggtgattcgccagaaagttcgttgctctccttggagccaggagatttagattctaataagcgttttgtcgccagtagccatggccctttgggcagactaacttttgtcagcctcaagttttctgttttgttaaggggaggcgatgccatgcagcctacctcatgtaaatctcagagtcagatttacatctccagcagatgtgggaaaagaaggaatgctgatgatgatgtcaccctcacctagtgagtcttgctgtcctggcactgctctaagggctttatacttatttgctcacttagtcctcacagtatccctctgaacagagtttattgttttcactttgctgataaggaaactgaggcacagacaggttgagtatcttgcccaaattcaggcagcctgtaagaggcagagtcaggatttgaaccctgagccctccctgtactgcttggctgtgaccgccatgaccacagtgtgttctgctgggcttaactggcatccaggcacttggcttccagcacagcactctttcccttcctccttctcatatactctctccttttccccttcctttttgtccccttttcctcttccttttagttcttctctttaaatgccttctcactctgcacggggtctagacttgacttctcctttggctcacttcttgccttttgtttcaggagtgtacaccttaaacaatgggaagcagtggataaataaggctgttggagataaacttcctgaatgtgaagcagtatgtgggaagcccaagaatccggcaaacccagtgcagcggatcctgggtggacacctggatgccaaaggcagctttccctggcaggctaagatggtttcccaccataatctcaccacaggtgccacgctgatcaatgaacaatggctgctgaccacggctaaaaatctcttcctgaaccattcagaaaatgcaacagcgaaagacattgcccctactttaacactctatgtggggaaaaagcagcttgtagagattgagaaggttgttctacaccctaactactcccaggtagatattgggctcatcaaactcaaacagaaggtgtctgttaatgagagagtgatgcccatctgcctaccttcaaaggattatgcagaagtagggcgtgtgggttatgtttctggctgggggcgaaatgccaattttaaatttactgaccatctgaagtatgtcatgctgcctgtggctgaccaagaccaatgcataaggcattatgaaggcagcacagtcatgaacacaccttctgtgctggcatgtctaagtaccaagaagacacctgctatggcgatgcgggcagtgcctttgccgttcacgacctggaggaggacacctggtatgcgactgggatcttaagctttgataagagctgtgctgtggctgagtatggtgtgtatgtgaaggtgacttccatccaggactgggttcagcctggaagagggcaaagtggacgggagtggacaggagtggatgcgataagatgtggtttgaagctgatgggtgccagccctgcattgctgagtcaatcaataaagagctttcttttgacccaaaaaaaaaaaaaaaaaaaaaaacaaaaaaaaaaaaaaaaaaaaaaaaaaattttggtggggggattgggcccttgaaaagggttttgaaaacattctgggtgggagcccgggggccaagatgggataggtggaccatgggacaaaaggggttcccaaggaaaaccggggaccaagaaacaaagggcgagggatttctccacaagttaaaaaaggcccggan

SEQ ID NO: 732247 - DNA, 2138 bp, Homo sapiens
  misc_feature (2054)..(2054): n is a, c, g, or t
  misc_feature (2064)..(2064): n is a, c, g, or t
  misc_feature (2067)..(2067): n is a, c, g, or t
  misc_feature (2078)..(2078): n is a, c, g, or t
  misc_feature (2083)..(2083): n is a, c, g, or t
  misc_feature (2089)..(2090): n is a, c, g, or t
  misc_feature (2092)..(2092): n is a, c, g, or t
  misc_feature (2107)..(2107): n is a, c, g, or t
ggactgctcttccagaggcaagaccaaccaagatgagtgccctgggagctgtcattgccctcctgctctggggacagctttttgcagtggactcaggcaatgatgtcacggatatcgcagatgacggctgcccgaagccccccgagattgcacatggctatgtggagcactcggttcgctaccagtgtaagaactactacaaactgcgcacagaaggagatgagatggtaagatgtggacaactgtctccatgccctacatacaacccccttctctgacatttccatgatgggtggtgctgaggtgattcgccagaaagttcgttgctctccttggagccaggagatttagattctaataagcgttttgtcgccagtagccatggccctttgggcagactaacttttgtcagcctcaagttttctgttttgttaaggggaggcgatgccatgcagcctacctcatgtaaatctcagagtcagatttacatctccagcagatgtgggaaaagaaggaatgctgatgatgatgtcaccctcacctagtgagtcttgctgtcctggcactgctctaagggctttatacttatttgctcacttagtcctcacagtatccctctgaacagagtttattgttttcactttgctgataaggaaactgaggcacagacaggttgagtatcttgcccaaattcaggcagcctgtaagaggcagagtcaggatttgaaccctgagccctccctgtactgcttggctgtgaccgccatgaccacagtgtgttctgctgggcttaactggcatccaggcacttggcttccagcacagcactctttcccttcctccttctcatatactctctccttttccccttcctttttgtccccttttcctcttccttttagttcttctctttaaatgccttctcactctgcacggggtctagacttgacttctcctttggctcacttcttgccttttgtttcaggagtgtacaccttaaacaatgggaagcagtggataaataaggctgttggagataaacttcctgaatgtgaagcagtatgtgggaagcccaagaatccggcaaacccagtgcagcggatcctgggtggacacctggatgccaaaggcagctttccctggcaggctaagatggtttcccaccataatctcaccacaggtgccacgctgatcaatgaacaatggctgctgaccacggctaaaaatctcttcctgaaccattcagaaaatgcaacagcgaaagacattgcccctactttaacactctatgtggggaaaaagcagcttgtagagattgagaaggttgttctacaccctaactactcccaggtagatattgggctcatcaaactcaaacagaaggtgtctgttaatgagagagtgatgcccatctgcctaccttcaaaggattatgcagaagtagggcgtgtgggttatgtttctggctgggggcgaaatgccaattttaaatttactgaccatctgaagtatgtcatgctgcctgtggctgaccaagaccaatgcataaggcattatgaaggcagcacagtcatgaacacaccttctgtgctggcatgtctaagtaccaagaagacacctgctatggcgatgcgggcagtgcctttgccgttcacgacctggaggaggacacctggtatgcgactgggatcttaagctttgataagagctgtgctgtggctgagtatggtgtgtatgtgaaggtgacttccatccaggactgggttcagcctggaagagggcaaagtggacgggagtggacaggagtggatgcgataagatgtggtttgaagctgatgggtgccagccctgcattgctgagtcaatcaataaagagctttcttttgacccaaaaaaaaaaaaaaaaaaaaaaacaaaaaacccttttgggcggccttgggccctggaaaagtttttaaaacccttcggttggggcgcgcggcccccttgggttcggtgaacatgggccaaagcgcggtccccaggaaacaccgggcgcacgaccagggccgggnattcctcccnatnaaaaacgcccnggggncacacnnangttctggaaaaatcncgaaggagtccggggccacacgcggaccagc

SEQ ID NO: 732248 - DNA, 2037 bp, Homo sapiens
ggactgctcttccagaggcaagaccaaccaagatgagtgccctgggagctgtcattgccctcctgctctggggacagctttttgcagtggactcaggcaatgatgtcacggatatcgcagatgacggctgcccgaagccccccgagattgcacatggctatgtggagcactcggttcgctaccagtgtaagaactactacaaactgcgcacagaaggagatgagatggtaagatgtggacaactgtctccatgccctacatacaacccccttctctgacatttccatgatgggtggtgctgaggtgattcgccagaaagttcgttgctctccttggagccaggagatttagattctaataagcgttttgtcgccagtagccatggccctttgggcagactaacttttgtcagcctcaagttttctgttttgttaaggggaggcgatgccatgcagcctacctcatgtaaatctcagagtcagatttacatctccagcagatgtgggaaaagaaggaatgctgatgatgatgtcaccctcacctagtgagtcttgctgtcctggcactgctctaagggctttatacttatttgctcacttagtcctcacagtatccctctgaacagagtttattgttttcactttgctgataaggaaactgaggcacagacaggttgagtatcttgcccaaattcaggcagcctgtaagaggcagagtcaggatttgaaccctgagccctccctgtactgcttggctgtgaccgccatgaccacagtgtgttctgctgggcttaactggcatccaggcacttggcttccagcacagcactctttcccttcctccttctcatatactctctccttttccccttcctttttgtccccttttcctcttccttttagttcttctctttaaatgccttctcactctgcacggggtctagacttgacttctcctttggctcacttcttgccttttgtttcaggagtgtacaccttaaacaatgggaagcagtggataaataaggctgttggagataaacttcctgaatgtgaagcagtatgtgggaagcccaagaatccggcaaacccagtgcagcggatcctgggtggacacctggatgccaaaggcagctttccctggcaggctaagatggtttcccaccataatctcaccacaggtgccacgctgatcaatgaacaatggctgctgaccacggctaaaaatctcttcctgaaccattcagaaaatgcaacagcgaaagacattgcccctactttaacactctatgtggggaaaaagcagcttgtagagattgagaaggttgttctacaccctaactactcccaggtagatattgggctcatcaaactcaaacagaaggtgtctgttaatgagagagtgatgcccatctgcctaccttcaaaggattatgcagaagtagggcgtgtgggttatgtttctggctgggggcgaaatgccaattttaaatttactgaccatctgaagtatgtcatgctgcctgtggctgaccaagaccaatgcataaggcattatgaaggcagcacagtcatgaacacaccttctgtgctggcatgtctaagtaccaagaagacacctgctatggcgatgcgggcagtgcctttgccgttcacgacctggaggaggacacctggtatgcgactgggatcttaagctttgataagagctgtgctgtggctgagtatggtgtgtatgtgaaggtgacttccatccaggactgggttcagcctggaagagggcaaagtggacgggagtggacaggagtggatgcgataagatgtggtttgaagctgatgggtgccagccctgcattgctgagtcaatcaataaagagctttcttttgacccagtaacaaaaacaaacgaaaaaacacaaaaaagggtgagacgccgggcaccagaaagattctaaacacaccgggggcacgggcccaagagaaggcacacgggcaagaggtgcccaggaaccggacgacaagaggggtccacaaaaag

SEQ ID NO: 732249 - DNA, 2042 bp, Homo sapiens
  misc_feature (1893)..(1893): n is a, c, g, or t
  misc_feature (1946)..(1946): n is a, c, g, or t
ggactgctcttccagaggcaagaccaaccaagatgagtgccctgggagctgtcattgccctcctgctctggggacagctttttgcagtggactcaggcaatgatgtcacggatatcgcagatgacggctgcccgaagccccccgagattgcacatggctatgtggagcactcggttcgctaccagtgtaagaactactacaaactgcgcacagaaggagatgagatggtaagatgtggacaactgtctccatgccctacatacaacccccttctctgacatttccatgatgggtggtgctgaggtgattcgccagaaagttcgttgctctccttggagccaggagatttagattctaataagcgttttgtcgccagtagccatggccctttgggcagactaacttttgtcagcctcaagttttctgttttgttaaggggaggcgatgccatgcagcctacctcatgtaaatctcagagtcagatttacatctccagcagatgtgggaaaagaaggaatgctgatgatgatgtcaccctcacctagtgagtcttgctgtcctggcactgctctaagggctttatacttatttgctcacttagtcctcacagtatccctctgaacagagtttattgttttcactttgctgataaggaaactgaggcacagacaggttgagtatcttgcccaaattcaggcagcctgtaagaggcagagtcaggatttgaaccctgagccctccctgtactgcttggctgtgaccgccatgaccacagtgtgttctgctgggcttaactggcatccaggcacttggcttccagcacagcactctttcccttcctccttctcatatactctctccttttccccttcctttttgtccccttttcctcttccttttagttcttctctttaaatgccttctcactctgcacggggtctagacttgacttctcctttggctcacttcttgccttttgtttcaggagtgtacaccttaaacaatgggaagcagtggataaataaggctgttggagataaacttcctgaatgtgaagcagtatgtgggaagcccaagaatccggcaaacccagtgcagcggatcctgggtggacacctggatgccaaaggcagctttccctggcaggctaagatggtttcccaccataatctcaccacaggtgccacgctgatcaatgaacaatggctgctgaccacggctaaaaatctcttcctgaaccattcagaaaatgcaacagcgaaagacattgcccctactttaacactctatgtggggaaaaagcagcttgtagagattgagaaggttgttctacaccctaactactcccaggtagatattgggctcatcaaactcaaacagaaggtgtctgttaatgagagagtgatgcccatctgcctaccttcaaaggattatgcagaagtagggcgtgtgggttatgtttctggctgggggcgaaatgccaattttaaatttactgaccatctgaagtatgtcatgctgcctgtggctgaccaagaccaatgcataaggcattatgaaggcagcacagtcatgaacacaccttctgtgctggcatgtctaagtaccaagaagacacctgctatggcgatgcgggcagtgcctttgccgttcacgacctggaggaggacacctggtatgcgactgggatcttaagctttgataagagctgtgctgtggctgagtatggtgtgtatgtgaaggtgacttccatccaggactgggttcagcctggaagagggcaaagtggacgggagtggacaggagtggatgcgataagatgtggtttgaagctgatgggtgccagccctgcattgctgagtcaatcaataaagagctttcttttgacccaangattgacccacaaaaaaaaaaaaaaaaaaaaaaaaaaaaaattttggggcgcntgggccgaaaatttttaaacccttttggggcggcggcctgtttgtgaccgggccaaggggtcccagagaaccggcgaagtggcgtggttcccccaa

SEQ ID NO: 732250 - DNA, 2105 bp, Homo sapiens
  misc_feature (1893)..(1893): n is a, c, g, or t
  misc_feature (2105)..(2105): n is a, c, g, or t
ggactgctcttccagaggcaagaccaaccaagatgagtgccctgggagctgtcattgccctcctgctctggggacagctttttgcagtggactcaggcaatgatgtcacggatatcgcagatgacggctgcccgaagccccccgagattgcacatggctatgtggagcactcggttcgctaccagtgtaagaactactacaaactgcgcacagaaggagatgagatggtaagatgtggacaactgtctccatgccctacatacaacccccttctctgacatttccatgatgggtggtgctgaggtgattcgccagaaagttcgttgctctccttggagccaggagatttagattctaataagcgttttgtcgccagtagccatggccctttgggcagactaacttttgtcagcctcaagttttctgttttgttaaggggaggcgatgccatgcagcctacctcatgtaaatctcagagtcagatttacatctccagcagatgtgggaaaagaaggaatgctgatgatgatgtcaccctcacctagtgagtcttgctgtcctggcactgctctaagggctttatacttatttgctcacttagtcctcacagtatccctctgaacagagtttattgttttcactttgctgataaggaaactgaggcacagacaggttgagtatcttgcccaaattcaggcagcctgtaagaggcagagtcaggatttgaaccctgagccctccctgtactgcttggctgtgaccgccatgaccacagtgtgttctgctgggcttaactggcatccaggcacttggcttccagcacagcactctttcccttcctccttctcatatactctctccttttccccttcctttttgtccccttttcctcttccttttagttcttctctttaaatgccttctcactctgcacggggtctagacttgacttctcctttggctcacttcttgccttttgtttcaggagtgtacaccttaaacaatgggaagcagtggataaataaggctgttggagataaacttcctgaatgtgaagcagtatgtgggaagcccaagaatccggcaaacccagtgcagcggatcctgggtggacacctggatgccaaaggcagctttccctggcaggctaagatggtttcccaccataatctcaccacaggtgccacgctgatcaatgaacaatggctgctgaccacggctaaaaatctcttcctgaaccattcagaaaatgcaacagcgaaagacattgcccctactttaacactctatgtggggaaaaagcagcttgtagagattgagaaggttgttctacaccctaactactcccaggtagatattgggctcatcaaactcaaacagaaggtgtctgttaatgagagagtgatgcccatctgcctaccttcaaaggattatgcagaagtagggcgtgtgggttatgtttctggctgggggcgaaatgccaattttaaatttactgaccatctgaagtatgtcatgctgcctgtggctgaccaagaccaatgcataaggcattatgaaggcagcacagtcatgaacacaccttctgtgctggcatgtctaagtaccaagaagacacctgctatggcgatgcgggcagtgcctttgccgttcacgacctggaggaggacacctggtatgcgactgggatcttaagctttgataagagctgtgctgtggctgagtatggtgtgtatgtgaaggtgacttccatccaggactgggttcagcctggaagagggcaaagtggacgggagtggacaggagtggatgcgataagatgtggtttgaagctgatgggtgccagccctgcattgctgagtcaatcaataaagagctttcttttgacccaangattgacccacaaaaaaaaaaaaaaaaaaaaaaaaaaaaaattttggtggggggattgggcccttgaaaagggttttgaaaacattctgggtgggagcccgggggccaagatgggataggtggaccatgggacaaaaggggttcccaaggaaaaccggggaccaagaaacaaagggcgagggatttctccacaagttaaaaaaggcccggan

SEQ ID NO: 732251 - DNA, 2062 bp, Homo sapiens
ggactgctcttccagaggcaagaccaaccaagatgagtgccctgggagctgtcattgccctcctgctctggggacagctttttgcagtggactcaggcaatgatgtcacggatatcgcagatgacggctgcccgaagccccccgagattgcacatggctatgtggagcactcggttcgctaccagtgtaagaactactacaaactgcgcacagaaggagatgagatggtaagatgtggacaactgtctccatgccctacatacaacccccttctctgacatttccatgatgggtggtgctgaggtgattcgccagaaagttcgttgctctccttggagccaggagatttagattctaataagcgttttgtcgccagtagccatggccctttgggcagactaacttttgtcagcctcaagttttctgttttgttaaggggaggcgatgccatgcagcctacctcatgtaaatctcagagtcagatttacatctccagcagatgtgggaaaagaaggaatgctgatgatgatgtcaccctcacctagtgagtcttgctgtcctggcactgctctaagggctttatacttatttgctcacttagtcctcacagtatccctctgaacagagtttattgttttcactttgctgataaggaaactgaggcacagacaggttgagtatcttgcccaaattcaggcagcctgtaagaggcagagtcaggatttgaaccctgagccctccctgtactgcttggctgtgaccgccatgaccacagtgtgttctgctgggcttaactggcatccaggcacttggcttccagcacagcactctttcccttcctccttctcatatactctctccttttccccttcctttttgtccccttttcctcttccttttagttcttctctttaaatgccttctcactctgcacggggtctagacttgacttctcctttggctcacttcttgccttttgtttcaggagtgtacaccttaaacaatgggaagcagtggataaataaggctgttggagataaacttcctgaatgtgaagcagtatgtgggaagcccaagaatccggcaaacccagtgcagcggatcctgggtggacacctggatgccaaaggcagctttccctggcaggctaagatggtttcccaccataatctcaccacaggtgccacgctgatcaatgaacaatggctgctgaccacggctaaaaatctcttcctgaaccattcagaaaatgcaacagcgaaagacattgcccctactttaacactctatgtggggaaaaagcagcttgtagagattgagaaggttgttctacaccctaactactcccaggtagatattgggctcatcaaactcaaacagaaggtgtctgttaatgagagagtgatgcccatctgcctaccttcaaaggattatgcagaagtagggcgtgtgggttatgtttctggctgggggcgaaatgccaattttaaatttactgaccatctgaagtatgtcatgctgcctgtggctgaccaagaccaatgcataaggcattatgaaggcagcacagtcatgaacacaccttctgtgctggcatgtctaagtaccaagaagacacctgctatggcgatgcgggcagtgcctttgccgttcacgacctggaggaggacacctggtatgcgactgggatcttaagctttgataagagctgtgctgtggctgagtatggtgtgtatgtgaaggtgacttccatccaggactgggttcagcctggaagagggcaaagtggacgggagtggacaggagtggatgcgataagatgtggtttgaagctgatgggtgccagccctgcattgctgagtcaatcaataaagagctttcttttgacccaaccccatagaacaacaccaacacaacacaatcataaccaaacaactcacacccccacaacaaacaaaaactaattcaacctcactcacaaaaataccacaaaacaaagaaaacagacacaaaaaaaaaccacaagacacacagacctataatgcacaaaaacacaaaagag

SEQ ID NO: 732252 - DNA, 2073 bp, Homo sapiens
  misc_feature (1902)..(1902): n is a, c, g, or t
  misc_feature (2073)..(2073): n is a, c, g, or t
ggactgctcttccagaggcaagaccaaccaagatgagtgccctgggagctgtcattgccctcctgctctggggacagctttttgcagtggactcaggcaatgatgtcacggatatcgcagatgacggctgcccgaagccccccgagattgcacatggctatgtggagcactcggttcgctaccagtgtaagaactactacaaactgcgcacagaaggagatgagatggtaagatgtggacaactgtctccatgccctacatacaacccccttctctgacatttccatgatgggtggtgctgaggtgattcgccagaaagttcgttgctctccttggagccaggagatttagattctaataagcgttttgtcgccagtagccatggccctttgggcagactaacttttgtcagcctcaagttttctgttttgttaaggggaggcgatgccatgcagcctacctcatgtaaatctcagagtcagatttacatctccagcagatgtgggaaaagaaggaatgctgatgatgatgtcaccctcacctagtgagtcttgctgtcctggcactgctctaagggctttatacttatttgctcacttagtcctcacagtatccctctgaacagagtttattgttttcactttgctgataaggaaactgaggcacagacaggttgagtatcttgcccaaattcaggcagcctgtaagaggcagagtcaggatttgaaccctgagccctccctgtactgcttggctgtgaccgccatgaccacagtgtgttctgctgggcttaactggcatccaggcacttggcttccagcacagcactctttcccttcctccttctcatatactctctccttttccccttcctttttgtccccttttcctcttccttttagttcttctctttaaatgccttctcactctgcacggggtctagacttgacttctcctttggctcacttcttgccttttgtttcaggagtgtacaccttaaacaatgggaagcagtggataaataaggctgttggagataaacttcctgaatgtgaagcagtatgtgggaagcccaagaatccggcaaacccagtgcagcggatcctgggtggacacctggatgccaaaggcagctttccctggcaggctaagatggtttcccaccataatctcaccacaggtgccacgctgatcaatgaacaatggctgctgaccacggctaaaaatctcttcctgaaccattcagaaaatgcaacagcgaaagacattgcccctactttaacactctatgtggggaaaaagcagcttgtagagattgagaaggttgttctacaccctaactactcccaggtagatattgggctcatcaaactcaaacagaaggtgtctgttaatgagagagtgatgcccatctgcctaccttcaaaggattatgcagaagtagggcgtgtgggttatgtttctggctgggggcgaaatgccaattttaaatttactgaccatctgaagtatgtcatgctgcctgtggctgaccaagaccaatgcataaggcattatgaaggcagcacagtcatgaacacaccttctgtgctggcatgtctaagtaccaagaagacacctgctatggcgatgcgggcagtgcctttgccgttcacgacctggaggaggacacctggtatgcgactgggatcttaagctttgataagagctgtgctgtggctgagtatggtgtgtatgtgaaggtgacttccatccaggactgggttcagcctggaagagggcaaagtggacgggagtggacaggagtggatgcgataagatgtggtttgaagctgatgggtgccagccctgcattgctgagtcaatcaataaagagctttcttttgacccaaaaaaaaaaanaagagaaaaaagacacacaacacgtggtggcacggcatcaggagcccgaggaaagcgtggcgagaaacatggagatgggagacgcgcgggcaccggaggtatagaggacacacgggcgacagaggagggccctaggaaaaccggggagagaacaagggccgggaattccan

SEQ ID NO: 732253 - DNA, 2162 bp, Homo sapiens
ggactgctcttccagaggcaagaccaaccaagatgagtgccctgggagctgtcattgccctcctgctctggggacagctttttgcagtggactcaggcaatgatgtcacggatatcgcagatgacggctgcccgaagccccccgagattgcacatggctatgtggagcactcggttcgctaccagtgtaagaactactacaaactgcgcacagaaggagatgagatggtaagatgtggacaactgtctccatgccctacatacaacccccttctctgacatttccatgatgggtggtgctgaggtgattcgccagaaagttcgttgctctccttggagccaggagatttagattctaataagcgttttgtcgccagtagccatggccctttgggcagactaacttttgtcagcctcaagttttctgttttgttaaggggaggcgatgccatgcagcctacctcatgtaaatctcagagtcagatttacatctccagcagatgtgggaaaagaaggaatgctgatgatgatgtcaccctcacctagtgagtcttgctgtcctggcactgctctaagggctttatacttatttgctcacttagtcctcacagtatccctctgaacagagtttattgttttcactttgctgataaggaaactgaggcacagacaggttgagtatcttgcccaaattcaggcagcctgtaagaggcagagtcaggatttgaaccctgagccctccctgtactgcttggctgtgaccgccatgaccacagtgtgttctgctgggcttaactggcatccaggcacttggcttccagcacagcactctttcccttcctccttctcatatactctctccttttccccttcctttttgtccccttttcctcttccttttagttcttctctttaaatgccttctcactctgcacggggtctagacttgacttctcctttggctcacttcttgccttttgtttcaggagtgtacaccttaaacaatgggaagcagtggataaataaggctgttggagataaacttcctgaatgtgaagcagtatgtgggaagcccaagaatccggcaaacccagtgcagcggatcctgggtggacacctggatgccaaaggcagctttccctggcaggctaagatggtttcccaccataatctcaccacaggtgccacgctgatcaatgaacaatggctgctgaccacggctaaaaatctcttcctgaaccattcagaaaatgcaacagcgaaagacattgcccctactttaacactctatgtggggaaaaagcagcttgtagagattgagaaggttgttctacaccctaactactcccaggtagatattgggctcatcaaactcaaacagaaggtgtctgttaatgagagagtgatgcccatctgcctaccttcaaaggattatgcagaagtagggcgtgtgggttatgtttctggctgggggcgaaatgccaattttaaatttactgaccatctgaagtatgtcatgctgcctgtggctgaccaagaccaatgcataaggcattatgaaggcagcacagtcatgaacacaccttctgtgctggcatgtctaagtaccaagaagacacctgctatggcgatgcgggcagtgcctttgccgttcacgacctggaggaggacacctggtatgcgactgggatcttaagctttgataagagctgtgctgtggctgagtatggtgtgtatgtgaaggtgacttccatccaggactgggttcagcctggaagagggcaaagtggacgggagtggacaggagtggatgcgataagatgtggtttgaagctgatgggtgccagccctgcattgctgagtcaatcaataaagagctttcttttgacccataaaaaaaaaaccacaacaaaaacttttggcccccttgggccccggaaaagtttcaaaacattcgttggggcggggcgcaaggggaacgggaaccgggcaaagcggtccaaggaaacccgtgcgccagagaaaagagcggagagatttcccaccatgtaaaaaaagcccggggggaacaccggcgcgttctggaacacactccgagagggccctcagaggcacaaaacgggacgcatccagagggtgccagaggaaaccgcaataaaaccg

SEQ ID NO: 732254 - DNA, 2174 bp, Homo sapiens
  misc_feature (2090)..(2090): n is a, c, g, or t
  misc_feature (2100)..(2100): n is a, c, g, or t
  misc_feature (2103)..(2103): n is a, c, g, or t
  misc_feature (2114)..(2114): n is a, c, g, or t
  misc_feature (2119)..(2119): n is a, c, g, or t
  misc_feature (2125)..(2126): n is a, c, g, or t
  misc_feature (2128)..(2128): n is a, c, g, or t
  misc_feature (2143)..(2143): n is a, c, g, or t
ggactgctcttccagaggcaagaccaaccaagatgagtgccctgggagctgtcattgccctcctgctctggggacagctttttgcagtggactcaggcaatgatgtcacggatatcgcagatgacggctgcccgaagccccccgagattgcacatggctatgtggagcactcggttcgctaccagtgtaagaactactacaaactgcgcacagaaggagatgagatggtaagatgtggacaactgtctccatgccctacatacaacccccttctctgacatttccatgatgggtggtgctgaggtgattcgccagaaagttcgttgctctccttggagccaggagatttagattctaataagcgttttgtcgccagtagccatggccctttgggcagactaacttttgtcagcctcaagttttctgttttgttaaggggaggcgatgccatgcagcctacctcatgtaaatctcagagtcagatttacatctccagcagatgtgggaaaagaaggaatgctgatgatgatgtcaccctcacctagtgagtcttgctgtcctggcactgctctaagggctttatacttatttgctcacttagtcctcacagtatccctctgaacagagtttattgttttcactttgctgataaggaaactgaggcacagacaggttgagtatcttgcccaaattcaggcagcctgtaagaggcagagtcaggatttgaaccctgagccctccctgtactgcttggctgtgaccgccatgaccacagtgtgttctgctgggcttaactggcatccaggcacttggcttccagcacagcactctttcccttcctccttctcatatactctctccttttccccttcctttttgtccccttttcctcttccttttagttcttctctttaaatgccttctcactctgcacggggtctagacttgacttctcctttggctcacttcttgccttttgtttcaggagtgtacaccttaaacaatgggaagcagtggataaataaggctgttggagataaacttcctgaatgtgaagcagtatgtgggaagcccaagaatccggcaaacccagtgcagcggatcctgggtggacacctggatgccaaaggcagctttccctggcaggctaagatggtttcccaccataatctcaccacaggtgccacgctgatcaatgaacaatggctgctgaccacggctaaaaatctcttcctgaaccattcagaaaatgcaacagcgaaagacattgcccctactttaacactctatgtggggaaaaagcagcttgtagagattgagaaggttgttctacaccctaactactcccaggtagatattgggctcatcaaactcaaacagaaggtgtctgttaatgagagagtgatgcccatctgcctaccttcaaaggattatgcagaagtagggcgtgtgggttatgtttctggctgggggcgaaatgccaattttaaatttactgaccatctgaagtatgtcatgctgcctgtggctgaccaagaccaatgcataaggcattatgaaggcagcacagtcatgaacacaccttctgtgctggcatgtctaagtaccaagaagacacctgctatggcgatgcgggcagtgcctttgccgttcacgacctggaggaggacacctggtatgcgactgggatcttaagctttgataagagctgtgctgtggctgagtatggtgtgtatgtgaaggtgacttccatccaggactgggttcagcctggaagagggcaaagtggacgggagtggacaggagtggatgcgataagatgtggtttgaagctgatgggtgccagccctgcattgctgagtcaatcaataaagagctttcttttgacccaaaaaaaaaaggaacaaaaaacaaaaaaaaaacctttttggggccgcgtgggccccttggaagaaacttttttcataaaaaccacctttcgtttgtgtagcgccgggggccccatagagtgatataggtcgaccacgtggtcaacacagatggtgttccctaaggagaaactgggggacaagtacacaatgcgcctgggnattcctcccnatnaaaaacgcccnggggncacacnnangttctggaaaaatcncgaaggagtccggggccacacgcggaccagc

SEQ ID NO: 732255 - DNA, 2032 bp, Homo sapiens
  misc_feature (1936)..(1936): n is a, c, g, or t
ggactgctcttccagaggcaagaccaaccaagatgagtgccctgggagctgtcattgccctcctgctctggggacagctttttgcagtggactcaggcaatgatgtcacggatatcgcagatgacggctgcccgaagccccccgagattgcacatggctatgtggagcactcggttcgctaccagtgtaagaactactacaaactgcgcacagaaggagatgagatggtaagatgtggacaactgtctccatgccctacatacaacccccttctctgacatttccatgatgggtggtgctgaggtgattcgccagaaagttcgttgctctccttggagccaggagatttagattctaataagcgttttgtcgccagtagccatggccctttgggcagactaacttttgtcagcctcaagttttctgttttgttaaggggaggcgatgccatgcagcctacctcatgtaaatctcagagtcagatttacatctccagcagatgtgggaaaagaaggaatgctgatgatgatgtcaccctcacctagtgagtcttgctgtcctggcactgctctaagggctttatacttatttgctcacttagtcctcacagtatccctctgaacagagtttattgttttcactttgctgataaggaaactgaggcacagacaggttgagtatcttgcccaaattcaggcagcctgtaagaggcagagtcaggatttgaaccctgagccctccctgtactgcttggctgtgaccgccatgaccacagtgtgttctgctgggcttaactggcatccaggcacttggcttccagcacagcactctttcccttcctccttctcatatactctctccttttccccttcctttttgtccccttttcctcttccttttagttcttctctttaaatgccttctcactctgcacggggtctagacttgacttctcctttggctcacttcttgccttttgtttcaggagtgtacaccttaaacaatgggaagcagtggataaataaggctgttggagataaacttcctgaatgtgaagcagtatgtgggaagcccaagaatccggcaaacccagtgcagcggatcctgggtggacacctggatgccaaaggcagctttccctggcaggctaagatggtttcccaccataatctcaccacaggtgccacgctgatcaatgaacaatggctgctgaccacggctaaaaatctcttcctgaaccattcagaaaatgcaacagcgaaagacattgcccctactttaacactctatgtggggaaaaagcagcttgtagagattgagaaggttgttctacaccctaactactcccaggtagatattgggctcatcaaactcaaacagaaggtgtctgttaatgagagagtgatgcccatctgcctaccttcaaaggattatgcagaagtagggcgtgtgggttatgtttctggctgggggcgaaatgccaattttaaatttactgaccatctgaagtatgtcatgctgcctgtggctgaccaagaccaatgcataaggcattatgaaggcagcacagtcatgaacacaccttctgtgctggcatgtctaagtaccaagaagacacctgctatggcgatgcgggcagtgcctttgccgttcacgacctggaggctgagtatggtgtgtatgtgaaggtgacttccatccaggactgggttcagaagaccatagctgagaactaatgcaaggctggccggaagcccttgcctgaaagcaagatttcagcctggaagagggcaaagtggacgggagtggacaggagtggatgcgataagatgtggtttgaagctgatgggtgccagccctgcattgctgagtcaatcaataaagagctttcttttgacccaaaaaaaaaaaaaaaaaaaaaaaattttggggcgcntgggccgaaaatttttaaacccttttggggcggcggcctgtttgtgaccgggccaaggggtcccagagaaccggcgaagtggcgtggttcccccaa

SEQ ID NO: 732256 - DNA, 2095 bp, Homo sapiens
  misc_feature (2095)..(2095): n is a, c, g, or t
ggactgctcttccagaggcaagaccaaccaagatgagtgccctgggagctgtcattgccctcctgctctggggacagctttttgcagtggactcaggcaatgatgtcacggatatcgcagatgacggctgcccgaagccccccgagattgcacatggctatgtggagcactcggttcgctaccagtgtaagaactactacaaactgcgcacagaaggagatgagatggtaagatgtggacaactgtctccatgccctacatacaacccccttctctgacatttccatgatgggtggtgctgaggtgattcgccagaaagttcgttgctctccttggagccaggagatttagattctaataagcgttttgtcgccagtagccatggccctttgggcagactaacttttgtcagcctcaagttttctgttttgttaaggggaggcgatgccatgcagcctacctcatgtaaatctcagagtcagatttacatctccagcagatgtgggaaaagaaggaatgctgatgatgatgtcaccctcacctagtgagtcttgctgtcctggcactgctctaagggctttatacttatttgctcacttagtcctcacagtatccctctgaacagagtttattgttttcactttgctgataaggaaactgaggcacagacaggttgagtatcttgcccaaattcaggcagcctgtaagaggcagagtcaggatttgaaccctgagccctccctgtactgcttggctgtgaccgccatgaccacagtgtgttctgctgggcttaactggcatccaggcacttggcttccagcacagcactctttcccttcctccttctcatatactctctccttttccccttcctttttgtccccttttcctcttccttttagttcttctctttaaatgccttctcactctgcacggggtctagacttgacttctcctttggctcacttcttgccttttgtttcaggagtgtacaccttaaacaatgggaagcagtggataaataaggctgttggagataaacttcctgaatgtgaagcagtatgtgggaagcccaagaatccggcaaacccagtgcagcggatcctgggtggacacctggatgccaaaggcagctttccctggcaggctaagatggtttcccaccataatctcaccacaggtgccacgctgatcaatgaacaatggctgctgaccacggctaaaaatctcttcctgaaccattcagaaaatgcaacagcgaaagacattgcccctactttaacactctatgtggggaaaaagcagcttgtagagattgagaaggttgttctacaccctaactactcccaggtagatattgggctcatcaaactcaaacagaaggtgtctgttaatgagagagtgatgcccatctgcctaccttcaaaggattatgcagaagtagggcgtgtgggttatgtttctggctgggggcgaaatgccaattttaaatttactgaccatctgaagtatgtcatgctgcctgtggctgaccaagaccaatgcataaggcattatgaaggcagcacagtcatgaacacaccttctgtgctggcatgtctaagtaccaagaagacacctgctatggcgatgcgggcagtgcctttgccgttcacgacctggaggctgagtatggtgtgtatgtgaaggtgacttccatccaggactgggttcagaagaccatagctgagaactaatgcaaggctggccggaagcccttgcctgaaagcaagatttcagcctggaagagggcaaagtggacgggagtggacaggagtggatgcgataagatgtggtttgaagctgatgggtgccagccctgcattgctgagtcaatcaataaagagctttcttttgacccaaaaaaaaaaaaaaaaaaaaaaaattttggtggggggattgggcccttgaaaagggttttgaaaacattctgggtgggagcccgggggccaagatgggataggtggaccatgggacaaaaggggttcccaaggaaaaccggggaccaagaaacaaagggcgagggatttctccacaagttaaaaaaggcccggan

SEQ ID NO: 732257 - DNA, 2059 bp, Homo sapiens
  misc_feature (1963)..(1963): n is a, c, g, or t
ggactgctcttccagaggcaagaccaaccaagatgagtgccctgggagctgtcattgccctcctgctctggggacagctttttgcagtggactcaggcaatgatgtcacggatatcgcagatgacggctgcccgaagccccccgagattgcacatggctatgtggagcactcggttcgctaccagtgtaagaactactacaaactgcgcacagaaggagatgagatggtaagatgtggacaactgtctccatgccctacatacaacccccttctctgacatttccatgatgggtggtgctgaggtgattcgccagaaagttcgttgctctccttggagccaggagatttagattctaataagcgttttgtcgccagtagccatggccctttgggcagactaacttttgtcagcctcaagttttctgttttgttaaggggaggcgatgccatgcagcctacctcatgtaaatctcagagtcagatttacatctccagcagatgtgggaaaagaaggaatgctgatgatgatgtcaccctcacctagtgagtcttgctgtcctggcactgctctaagggctttatacttatttgctcacttagtcctcacagtatccctctgaacagagtttattgttttcactttgctgataaggaaactgaggcacagacaggttgagtatcttgcccaaattcaggcagcctgtaagaggcagagtcaggatttgaaccctgagccctccctgtactgcttggctgtgaccgccatgaccacagtgtgttctgctgggcttaactggcatccaggcacttggcttccagcacagcactctttcccttcctccttctcatatactctctccttttccccttcctttttgtccccttttcctcttccttttagttcttctctttaaatgccttctcactctgcacggggtctagacttgacttctcctttggctcacttcttgccttttgtttcaggagtgtacaccttaaacaatgggaagcagtggataaataaggctgttggagataaacttcctgaatgtgaagcagtatgtgggaagcccaagaatccggcaaacccagtgcagcggatcctgggtggacacctggatgccaaaggcagctttccctggcaggctaagatggtttcccaccataatctcaccacaggtgccacgctgatcaatgaacaatggctgctgaccacggctaaaaatctcttcctgaaccattcagaaaatgcaacagcgaaagacattgcccctactttaacactctatgtggggaaaaagcagcttgtagagattgagaaggttgttctacaccctaactactcccaggtagatattgggctcatcaaactcaaacagaaggtgtctgttaatgagagagtgatgcccatctgcctaccttcaaaggattatgcagaagtagggcgtgtgggttatgtttctggctgggggcgaaatgccaattttaaatttactgaccatctgaagtatgtcatgctgcctgtggctgaccaagaccaatgcataaggcattatgaaggcagcacagtcatgaacacaccttctgtgctggcatgtctaagtaccaagaagacacctgctatggcgatgcgggcagtgcctttgccgttcacgacctggaggctgagtatggtgtgtatgtgaaggtgacttccatccaggactgggttcagaagaccatagctgagaactaatgcaaggctggccggaagcccttgcctgaaagcaagatttcagcctggaagagggcaaagtggacgggagtggacaggagtggatgcgataagatgtggtttgaagctgatgggtgccagccctgcattgctgagtcaatcaataaagagctttcttttgacccaaaaaaaaaaaaaaaaaaaaaaacaaaaaaaaaaaaaaaaaaaaaaaaaaattttggggcgcntgggccgaaaatttttaaacccttttggggcggcggcctgtttgtgaccgggccaaggggtcccagagaaccggcgaagtggcgtggttcccccaa

SEQ ID NO: 732258 - DNA, 2122 bp, Homo sapiens
  misc_feature (2122)..(2122): n is a, c, g, or t
ggactgctcttccagaggcaagaccaaccaagatgagtgccctgggagctgtcattgccctcctgctctggggacagctttttgcagtggactcaggcaatgatgtcacggatatcgcagatgacggctgcccgaagccccccgagattgcacatggctatgtggagcactcggttcgctaccagtgtaagaactactacaaactgcgcacagaaggagatgagatggtaagatgtggacaactgtctccatgccctacatacaacccccttctctgacatttccatgatgggtggtgctgaggtgattcgccagaaagttcgttgctctccttggagccaggagatttagattctaataagcgttttgtcgccagtagccatggccctttgggcagactaacttttgtcagcctcaagttttctgttttgttaaggggaggcgatgccatgcagcctacctcatgtaaatctcagagtcagatttacatctccagcagatgtgggaaaagaaggaatgctgatgatgatgtcaccctcacctagtgagtcttgctgtcctggcactgctctaagggctttatacttatttgctcacttagtcctcacagtatccctctgaacagagtttattgttttcactttgctgataaggaaactgaggcacagacaggttgagtatcttgcccaaattcaggcagcctgtaagaggcagagtcaggatttgaaccctgagccctccctgtactgcttggctgtgaccgccatgaccacagtgtgttctgctgggcttaactggcatccaggcacttggcttccagcacagcactctttcccttcctccttctcatatactctctccttttccccttcctttttgtccccttttcctcttccttttagttcttctctttaaatgccttctcactctgcacggggtctagacttgacttctcctttggctcacttcttgccttttgtttcaggagtgtacaccttaaacaatgggaagcagtggataaataaggctgttggagataaacttcctgaatgtgaagcagtatgtgggaagcccaagaatccggcaaacccagtgcagcggatcctgggtggacacctggatgccaaaggcagctttccctggcaggctaagatggtttcccaccataatctcaccacaggtgccacgctgatcaatgaacaatggctgctgaccacggctaaaaatctcttcctgaaccattcagaaaatgcaacagcgaaagacattgcccctactttaacactctatgtggggaaaaagcagcttgtagagattgagaaggttgttctacaccctaactactcccaggtagatattgggctcatcaaactcaaacagaaggtgtctgttaatgagagagtgatgcccatctgcctaccttcaaaggattatgcagaagtagggcgtgtgggttatgtttctggctgggggcgaaatgccaattttaaatttactgaccatctgaagtatgtcatgctgcctgtggctgaccaagaccaatgcataaggcattatgaaggcagcacagtcatgaacacaccttctgtgctggcatgtctaagtaccaagaagacacctgctatggcgatgcgggcagtgcctttgccgttcacgacctggaggctgagtatggtgtgtatgtgaaggtgacttccatccaggactgggttcagaagaccatagctgagaactaatgcaaggctggccggaagcccttgcctgaaagcaagatttcagcctggaagagggcaaagtggacgggagtggacaggagtggatgcgataagatgtggtttgaagctgatgggtgccagccctgcattgctgagtcaatcaataaagagctttcttttgacccaaaaaaaaaaaaaaaaaaaaaaacaaaaaaaaaaaaaaaaaaaaaaaaaaattttggtggggggattgggcccttgaaaagggttttgaaaacattctgggtgggagcccgggggccaagatgggataggtggaccatgggacaaaaggggttcccaaggaaaaccggggaccaagaaacaaagggcgagggatttctccacaagttaaaaaaggcccggan

SEQ ID NO: 732259 - DNA, 2148 bp, Homo sapiens
  misc_feature (2064)..(2064): n is a, c, g, or t
  misc_feature (2074)..(2074): n is a, c, g, or t
  misc_feature (2077)..(2077): n is a, c, g, or t
  misc_feature (2088)..(2088): n is a, c, g, or t
  misc_feature (2093)..(2093): n is a, c, g, or t
  misc_feature (2099)..(2100): n is a, c, g, or t
  misc_feature (2102)..(2102): n is a, c, g, or t
  misc_feature (2117)..(2117): n is a, c, g, or t
ggactgctcttccagaggcaagaccaaccaagatgagtgccctgggagctgtcattgccctcctgctctggggacagctttttgcagtggactcaggcaatgatgtcacggatatcgcagatgacggctgcccgaagccccccgagattgcacatggctatgtggagcactcggttcgctaccagtgtaagaactactacaaactgcgcacagaaggagatgagatggtaagatgtggacaactgtctccatgccctacatacaacccccttctctgacatttccatgatgggtggtgctgaggtgattcgccagaaagttcgttgctctccttggagccaggagatttagattctaataagcgttttgtcgccagtagccatggccctttgggcagactaacttttgtcagcctcaagttttctgttttgttaaggggaggcgatgccatgcagcctacctcatgtaaatctcagagtcagatttacatctccagcagatgtgggaaaagaaggaatgctgatgatgatgtcaccctcacctagtgagtcttgctgtcctggcactgctctaagggctttatacttatttgctcacttagtcctcacagtatccctctgaacagagtttattgttttcactttgctgataaggaaactgaggcacagacaggttgagtatcttgcccaaattcaggcagcctgtaagaggcagagtcaggatttgaaccctgagccctccctgtactgcttggctgtgaccgccatgaccacagtgtgttctgctgggcttaactggcatccaggcacttggcttccagcacagcactctttcccttcctccttctcatatactctctccttttccccttcctttttgtccccttttcctcttccttttagttcttctctttaaatgccttctcactctgcacggggtctagacttgacttctcctttggctcacttcttgccttttgtttcaggagtgtacaccttaaacaatgggaagcagtggataaataaggctgttggagataaacttcctgaatgtgaagcagtatgtgggaagcccaagaatccggcaaacccagtgcagcggatcctgggtggacacctggatgccaaaggcagctttccctggcaggctaagatggtttcccaccataatctcaccacaggtgccacgctgatcaatgaacaatggctgctgaccacggctaaaaatctcttcctgaaccattcagaaaatgcaacagcgaaagacattgcccctactttaacactctatgtggggaaaaagcagcttgtagagattgagaaggttgttctacaccctaactactcccaggtagatattgggctcatcaaactcaaacagaaggtgtctgttaatgagagagtgatgcccatctgcctaccttcaaaggattatgcagaagtagggcgtgtgggttatgtttctggctgggggcgaaatgccaattttaaatttactgaccatctgaagtatgtcatgctgcctgtggctgaccaagaccaatgcataaggcattatgaaggcagcacagtcatgaacacaccttctgtgctggcatgtctaagtaccaagaagacacctgctatggcgatgcgggcagtgcctttgccgttcacgacctggaggctgagtatggtgtgtatgtgaaggtgacttccatccaggactgggttcagaagaccatagctgagaactaatgcaaggctggccggaagcccttgcctgaaagcaagatttcagcctggaagagggcaaagtggacgggagtggacaggagtggatgcgataagatgtggtttgaagctgatgggtgccagccctgcattgctgagtcaatcaataaagagctttcttttgacccaaaaaaaaaaaaaaaaaaaaaaacaaaaaacccttttgggcggccttgggccctggaaaagtttttaaaacccttcggttggggcgcgcggcccccttgggttcggtgaacatgggccaaagcgcggtccccaggaaacaccgggcgcacgaccagggccgggnattcctcccnatnaaaaacgcccnggggncacacnnangttctggaaaaatcncgaaggagtccggggccacacgcggaccagc

SEQ ID NO: 732260 - DNA, 2047 bp, Homo sapiens
ggactgctcttccagaggcaagaccaaccaagatgagtgccctgggagctgtcattgccctcctgctctggggacagctttttgcagtggactcaggcaatgatgtcacggatatcgcagatgacggctgcccgaagccccccgagattgcacatggctatgtggagcactcggttcgctaccagtgtaagaactactacaaactgcgcacagaaggagatgagatggtaagatgtggacaactgtctccatgccctacatacaacccccttctctgacatttccatgatgggtggtgctgaggtgattcgccagaaagttcgttgctctccttggagccaggagatttagattctaataagcgttttgtcgccagtagccatggccctttgggcagactaacttttgtcagcctcaagttttctgttttgttaaggggaggcgatgccatgcagcctacctcatgtaaatctcagagtcagatttacatctccagcagatgtgggaaaagaaggaatgctgatgatgatgtcaccctcacctagtgagtcttgctgtcctggcactgctctaagggctttatacttatttgctcacttagtcctcacagtatccctctgaacagagtttattgttttcactttgctgataaggaaactgaggcacagacaggttgagtatcttgcccaaattcaggcagcctgtaagaggcagagtcaggatttgaaccctgagccctccctgtactgcttggctgtgaccgccatgaccacagtgtgttctgctgggcttaactggcatccaggcacttggcttccagcacagcactctttcccttcctccttctcatatactctctccttttccccttcctttttgtccccttttcctcttccttttagttcttctctttaaatgccttctcactctgcacggggtctagacttgacttctcctttggctcacttcttgccttttgtttcaggagtgtacaccttaaacaatgggaagcagtggataaataaggctgttggagataaacttcctgaatgtgaagcagtatgtgggaagcccaagaatccggcaaacccagtgcagcggatcctgggtggacacctggatgccaaaggcagctttccctggcaggctaagatggtttcccaccataatctcaccacaggtgccacgctgatcaatgaacaatggctgctgaccacggctaaaaatctcttcctgaaccattcagaaaatgcaacagcgaaagacattgcccctactttaacactctatgtggggaaaaagcagcttgtagagattgagaaggttgttctacaccctaactactcccaggtagatattgggctcatcaaactcaaacagaaggtgtctgttaatgagagagtgatgcccatctgcctaccttcaaaggattatgcagaagtagggcgtgtgggttatgtttctggctgggggcgaaatgccaattttaaatttactgaccatctgaagtatgtcatgctgcctgtggctgaccaagaccaatgcataaggcattatgaaggcagcacagtcatgaacacaccttctgtgctggcatgtctaagtaccaagaagacacctgctatggcgatgcgggcagtgcctttgccgttcacgacctggaggctgagtatggtgtgtatgtgaaggtgacttccatccaggactgggttcagaagaccatagctgagaactaatgcaaggctggccggaagcccttgcctgaaagcaagatttcagcctggaagagggcaaagtggacgggagtggacaggagtggatgcgataagatgtggtttgaagctgatgggtgccagccctgcattgctgagtcaatcaataaagagctttcttttgacccagtaacaaaaacaaacgaaaaaacacaaaaaagggtgagacgccgggcaccagaaagattctaaacacaccgggggcacgggcccaagagaaggcacacgggcaagaggtgcccaggaaccggacgacaagaggggtccacaaaaag

SEQ ID NO: 732261 - DNA, 2052 bp, Homo sapiens
  misc_feature (1903)..(1903): n is a, c, g, or t
  misc_feature (1956)..(1956): n is a, c, g, or t
ggactgctcttccagaggcaagaccaaccaagatgagtgccctgggagctgtcattgccctcctgctctggggacagctttttgcagtggactcaggcaatgatgtcacggatatcgcagatgacggctgcccgaagccccccgagattgcacatggctatgtggagcactcggttcgctaccagtgtaagaactactacaaactgcgcacagaaggagatgagatggtaagatgtggacaactgtctccatgccctacatacaacccccttctctgacatttccatgatgggtggtgctgaggtgattcgccagaaagttcgttgctctccttggagccaggagatttagattctaataagcgttttgtcgccagtagccatggccctttgggcagactaacttttgtcagcctcaagttttctgttttgttaaggggaggcgatgccatgcagcctacctcatgtaaatctcagagtcagatttacatctccagcagatgtgggaaaagaaggaatgctgatgatgatgtcaccctcacctagtgagtcttgctgtcctggcactgctctaagggctttatacttatttgctcacttagtcctcacagtatccctctgaacagagtttattgttttcactttgctgataaggaaactgaggcacagacaggttgagtatcttgcccaaattcaggcagcctgtaagaggcagagtcaggatttgaaccctgagccctccctgtactgcttggctgtgaccgccatgaccacagtgtgttctgctgggcttaactggcatccaggcacttggcttccagcacagcactctttcccttcctccttctcatatactctctccttttccccttcctttttgtccccttttcctcttccttttagttcttctctttaaatgccttctcactctgcacggggtctagacttgacttctcctttggctcacttcttgccttttgtttcaggagtgtacaccttaaacaatgggaagcagtggataaataaggctgttggagataaacttcctgaatgtgaagcagtatgtgggaagcccaagaatccggcaaacccagtgcagcggatcctgggtggacacctggatgccaaaggcagctttccctggcaggctaagatggtttcccaccataatctcaccacaggtgccacgctgatcaatgaacaatggctgctgaccacggctaaaaatctcttcctgaaccattcagaaaatgcaacagcgaaagacattgcccctactttaacactctatgtggggaaaaagcagcttgtagagattgagaaggttgttctacaccctaactactcccaggtagatattgggctcatcaaactcaaacagaaggtgtctgttaatgagagagtgatgcccatctgcctaccttcaaaggattatgcagaagtagggcgtgtgggttatgtttctggctgggggcgaaatgccaattttaaatttactgaccatctgaagtatgtcatgctgcctgtggctgaccaagaccaatgcataaggcattatgaaggcagcacagtcatgaacacaccttctgtgctggcatgtctaagtaccaagaagacacctgctatggcgatgcgggcagtgcctttgccgttcacgacctggaggctgagtatggtgtgtatgtgaaggtgacttccatccaggactgggttcagaagaccatagctgagaactaatgcaaggctggccggaagcccttgcctgaaagcaagatttcagcctggaagagggcaaagtggacgggagtggacaggagtggatgcgataagatgtggtttgaagctgatgggtgccagccctgcattgctgagtcaatcaataaagagctttcttttgacccaangattgacccacaaaaaaaaaaaaaaaaaaaaaaaaaaaaaattttggggcgcntgggccgaaaatttttaaacccttttggggcggcggcctgtttgtgaccgggccaaggggtcccagagaaccggcgaagtggcgtggttcccccaa

SEQ ID NO: 732262 - DNA, 2115 bp, Homo sapiens
  misc_feature (1903)..(1903): n is a, c, g, or t
  misc_feature (2115)..(2115): n is a, c, g, or t
ggactgctcttccagaggcaagaccaaccaagatgagtgccctgggagctgtcattgccctcctgctctggggacagctttttgcagtggactcaggcaatgatgtcacggatatcgcagatgacggctgcccgaagccccccgagattgcacatggctatgtggagcactcggttcgctaccagtgtaagaactactacaaactgcgcacagaaggagatgagatggtaagatgtggacaactgtctccatgccctacatacaacccccttctctgacatttccatgatgggtggtgctgaggtgattcgccagaaagttcgttgctctccttggagccaggagatttagattctaataagcgttttgtcgccagtagccatggccctttgggcagactaacttttgtcagcctcaagttttctgttttgttaaggggaggcgatgccatgcagcctacctcatgtaaatctcagagtcagatttacatctccagcagatgtgggaaaagaaggaatgctgatgatgatgtcaccctcacctagtgagtcttgctgtcctggcactgctctaagggctttatacttatttgctcacttagtcctcacagtatccctctgaacagagtttattgttttcactttgctgataaggaaactgaggcacagacaggttgagtatcttgcccaaattcaggcagcctgtaagaggcagagtcaggatttgaaccctgagccctccctgtactgcttggctgtgaccgccatgaccacagtgtgttctgctgggcttaactggcatccaggcacttggcttccagcacagcactctttcccttcctccttctcatatactctctccttttccccttcctttttgtccccttttcctcttccttttagttcttctctttaaatgccttctcactctgcacggggtctagacttgacttctcctttggctcacttcttgccttttgtttcaggagtgtacaccttaaacaatgggaagcagtggataaataaggctgttggagataaacttcctgaatgtgaagcagtatgtgggaagcccaagaatccggcaaacccagtgcagcggatcctgggtggacacctggatgccaaaggcagctttccctggcaggctaagatggtttcccaccataatctcaccacaggtgccacgctgatcaatgaacaatggctgctgaccacggctaaaaatctcttcctgaaccattcagaaaatgcaacagcgaaagacattgcccctactttaacactctatgtggggaaaaagcagcttgtagagattgagaaggttgttctacaccctaactactcccaggtagatattgggctcatcaaactcaaacagaaggtgtctgttaatgagagagtgatgcccatctgcctaccttcaaaggattatgcagaagtagggcgtgtgggttatgtttctggctgggggcgaaatgccaattttaaatttactgaccatctgaagtatgtcatgctgcctgtggctgaccaagaccaatgcataaggcattatgaaggcagcacagtcatgaacacaccttctgtgctggcatgtctaagtaccaagaagacacctgctatggcgatgcgggcagtgcctttgccgttcacgacctggaggctgagtatggtgtgtatgtgaaggtgacttccatccaggactgggttcagaagaccatagctgagaactaatgcaaggctggccggaagcccttgcctgaaagcaagatttcagcctggaagagggcaaagtggacgggagtggacaggagtggatgcgataagatgtggtttgaagctgatgggtgccagccctgcattgctgagtcaatcaataaagagctttcttttgacccaangattgacccacaaaaaaaaaaaaaaaaaaaaaaaaaaaaaattttggtggggggattgggcccttgaaaagggttttgaaaacattctgggtgggagcccgggggccaagatgggataggtggaccatgggacaaaaggggttcccaaggaaaaccggggaccaagaaacaaagggcgagggatttctccacaagttaaaaaaggcccggan

SEQ ID NO: 732263 - DNA, 1731 bp, Homo sapiens
gtaataagggctgagacacaagccacagagcataaagctccagtccttcctccagggatgagggcagtaaggacttggactcctctgtccagcttttaacaatctaagttacgccctcttctgggtcacgctagaatcagatctgctctccagcatcttctgtttcctggcaagtgtttcctgctactttggattggccacgatgggctggagctgccttgtgacaggagcaggagggcttctgggtcagaggatcgtccgcctgttggtggaagagaaggaactgaaggagatcagggccttggacaaggccttcagaccagaattgagagaggaattttctaagctccagaacaggaccaagctgactgtacttgaaggagacattctggatgagccattcctgaaaagagcctgccaggacgtctcggtcgtcatccacaccgcctgtatcattgatgtctttggtgtcactcacagagagtccatcatgaatgtcaatgtgaaaggtacccagctactgttggaggcctgtgtccaagccagtgtgccagtcttcatctacaccagtagcatagaggtagccgggcccaactcctacaaggaaatcatccagaacggccacgaagaagagcctctggaaaacacatggcccactccatacccgtacagcaaaaagcttgctgagaaggctgtgctggcggctaatgggtggaatctaaaaaaatggtgataccttgtacacttgtgcgttaagacccacatatatctatggggaagggaggcccattcctttctgccagtataaatgaggccctgaacaacaatgggatcctgtcaagtgttggaaagttctctacagtcaacccagtctatgttggcaacgtggcctgggcccacattctggccttgagggctctgcgggaccccaagaaggccccaagtgtccgaggtcaattctattacatctcagatgacacgcctcaccaaagctatgataaccttaattacatcctgagcaaagagtttggcctccgccttgattccagatggagccttcctttaaccctgatgtactggattggcttcctgctggaagtagtgagcttcctactcagcccaatttactcctatcaaccccccttcaaccgccacacagtcacattatcaaatagtgtgttcaccttctcttacaagaaggctcagcgagatctggcgtataagccactctacagctgggaggaagccaagcagaaaaccgtggagtgggttggttcccttgtggaccggcacaaggagaccctgaagtccaagactcagtgatttaaggatgacagagatgtgcatgtgggtattgttaggaaatgtcatcaaactccacccacctggcttcatacagaaggcaacaggggcacaagcccaggtcctgctgcctctctttcacacaatgcccaacttactgtcttcttcatgtcatcaaaatctgcacagtcactggcccaaccagaactttctgtcctaatcatacaccagaagacaaacaatatgatttgctgttaccaaatctcagtggctgattctgaacaattgtggtctctcttaacttgaggttctcttttgactaatagagctccatttcccctcttaaatgagaaagcatttcttttctctttaatctcctattccttcacacagttcaacataaagagcaataaatgttttaatgcttaa

SEQ ID NO: 732264 - DNA, 1621 bp, Homo sapiens
gtaataagggctgagacacaagccacagagcataaagctccagtccttcctccagggatgagggcagtaaggacttggactcctctgtccagcttttaacaatctaagttacgccctcttctgggtcacgctagaatcagatctgctctccagcatcttctgtttcctggcaagtgtttcctgctactttggattggccacgatgggctggagctgccttgtgacaggagcaggagggcttctgggtcagaggatcgtccgcctgttggtggaagagaaggaactgaaggagatcagggccttggacaaggccttcagaccagaattgagagaggaattttctaagctccagaacaggaccaagctgactgtacttgaaggagacattctggatgagccattcctggtctttggtgtcactcacagagagtccatcatgaatgtcaatgtgaaaggtacccagctactgttggaggcctgtgtccaagccagtgtgccagtcttcatctacaccagtagcatagaggtagccgggcccaactcctacaaggaaatcatccagaacggccacgaagaagagcctctggaaaacacatggcccactccatacccgtacagcaaaaagcttgctgagaaggctgtgctggcggctaatgggtggaatctaaaaggaggcccattcctttctgccagtataaatgaggccctgaacaacaatgggatcctgtcaagtgttggaaagttctctacagtcaacccagtctatgttggcaacgtggcctgggcccacattctggccttgagggctctgcgggaccccaagaaggccccaagtgtccgaggtcaattctattacatctcagatgacacgcctcaccaaagctatgataaccttaattacatcctgagcaaagagtttggcctccgccttgattccagatggagccttcctttaaccctgatgtactggattggcttcctgctggaagtagtgagcttcctactcagcccaatttactcctatcaaccccccttcaaccgccacacagtcacattatcaaatagtgtgttcaccttctcttacaagaaggctcagcgagatctggcgtataagccactctacagctgggaggaagccaagcagaaaaccgtggagtgggttggttcccttgtggaccggcacaaggagaccctgaagtccaagactcagtgatttaaggatgacagagatgtgcatgtgggtattgttaggaaatgtcatcaaactccacccacctggcttcatacagaaggcaacaggggcacaagcccaggtcctgctgcctctctttcacacaatgcccaacttactgtcttcttcatgtcatcaaaatctgcacagtcactggcccaaccagaactttctgtcctaatcatacaccagaagacaaacaatatgatttgctgttaccaaatctcagtggctgattctgaacaattgtggtctctcttaacttgaggttctcttttgactaatagagctccatttcccctcttaaatgagaaagcatttcttttctctttaatctcctattccttcacacagttcaacataaagagcaataaatgttttaatgcttaa

SEQ ID NO: 732265 - DNA, 1677 bp, Homo sapiens
gtaataagggctgagacacaagccacagagcataaagctccagtccttcctccagggatgagggcagtaaggacttggactcctctgtccagcttttaacaatctaagttacgccctcttctgggtcacgctagaatcagatctgctctccagcatcttctgtttcctggcaagtgtttcctgctactttggattggccacgatgggctggagctgccttgtgacaggagcaggagggcttctgggtcagaggatcgtccgcctgttggtggaagagaaggaactgaaggagatcagggccttggacaaggccttcagaccagaattgagagaggaattttctaagctccagaacaggaccaagctgactgtacttgaaggagacattctggatgagccattcctggtctttggtgtcactcacagagagtccatcatgaatgtcaatgtgaaaggtacccagctactgttggaggcctgtgtccaagccagtgtgccagtcttcatctacaccagtagcatagaggtagccgggcccaactcctacaaggaaatcatccagaacggccacgaagaagagcctctggaaaacacatggcccactccatacccgtacagcaaaaagcttgctgagaaggctgtgctggcggctaatgggtggaatctaaaaaaatggtgataccttgtacacttgtgcgttaagacccacatatatctatggggaagggaggcccattcctttctgccagtataaatgaggccctgaacaacaatgggatcctgtcaagtgttggaaagttctctacagtcaacccagtctatgttggcaacgtggcctgggcccacattctggccttgagggctctgcgggaccccaagaaggccccaagtgtccgaggtcaattctattacatctcagatgacacgcctcaccaaagctatgataaccttaattacatcctgagcaaagagtttggcctccgccttgattccagatggagccttcctttaaccctgatgtactggattggcttcctgctggaagtagtgagcttcctactcagcccaatttactcctatcaaccccccttcaaccgccacacagtcacattatcaaatagtgtgttcaccttctcttacaagaaggctcagcgagatctggcgtataagccactctacagctgggaggaagccaagcagaaaaccgtggagtgggttggttcccttgtggaccggcacaaggagaccctgaagtccaagactcagtgatttaaggatgacagagatgtgcatgtgggtattgttaggaaatgtcatcaaactccacccacctggcttcatacagaaggcaacaggggcacaagcccaggtcctgctgcctctctttcacacaatgcccaacttactgtcttcttcatgtcatcaaaatctgcacagtcactggcccaaccagaactttctgtcctaatcatacaccagaagacaaacaatatgatttgctgttaccaaatctcagtggctgattctgaacaattgtggtctctcttaacttgaggttctcttttgactaatagagctccatttcccctcttaaatgagaaagcatttcttttctctttaatctcctattccttcacacagttcaacataaagagcaataaatgttttaatgcttaa

SEQ ID NO: 732266 - DNA, 1675 bp, Homo sapiens
gtaataagggctgagacacaagccacagagcataaagctccagtccttcctccagggatgagggcagtaaggacttggactcctctgtccagcttttaacaatctaagttacgccctcttctgggtcacgctagaatcagatctgctctccagcatcttctgtttcctggcaagtgtttcctgctactttggattggccacgatgggctggagctgccttgtgacaggagcaggagggcttctgggtcagaggatcgtccgcctgttggtggaagagaaggaactgaaggagatcagggccttggacaaggccttcagaccagaattgagagaggaattttctaagctccagaacaggaccaagctgactgtacttgaaggagacattctggatgagccattcctgaaaagagcctgccaggacgtctcggtcgtcatccacaccgcctgtatcattgatgtctttggtgtcactcacagagagtccatcatgaatgtcaatgtgaaaggtacccagctactgttggaggcctgtgtccaagccagtgtgccagtcttcatctacaccagtagcatagaggtagccgggcccaactcctacaaggaaatcatccagaacggccacgaagaagagcctctggaaaacacatggcccactccatacccgtacagcaaaaagcttgctgagaaggctgtgctggcggctaatgggtggaatctaaaaggaggcccattcctttctgccagtataaatgaggccctgaacaacaatgggatcctgtcaagtgttggaaagttctctacagtcaacccagtctatgttggcaacgtggcctgggcccacattctggccttgagggctctgcgggaccccaagaaggccccaagtgtccgaggtcaattctattacatctcagatgacacgcctcaccaaagctatgataaccttaattacatcctgagcaaagagtttggcctccgccttgattccagatggagccttcctttaaccctgatgtactggattggcttcctgctggaagtagtgagcttcctactcagcccaatttactcctatcaaccccccttcaaccgccacacagtcacattatcaaatagtgtgttcaccttctcttacaagaaggctcagcgagatctggcgtataagccactctacagctgggaggaagccaagcagaaaaccgtggagtgggttggttcccttgtggaccggcacaaggagaccctgaagtccaagactcagtgatttaaggatgacagagatgtgcatgtgggtattgttaggaaatgtcatcaaactccacccacctggcttcatacagaaggcaacaggggcacaagcccaggtcctgctgcctctctttcacacaatgcccaacttactgtcttcttcatgtcatcaaaatctgcacagtcactggcccaaccagaactttctgtcctaatcatacaccagaagacaaacaatatgatttgctgttaccaaatctcagtggctgattctgaacaattgtggtctctcttaacttgaggttctcttttgactaatagagctccatttcccctcttaaatgagaaagcatttcttttctctttaatctcctattccttcacacagttcaacataaagagcaataaatgttttaatgcttaa

SEQ ID NO: 732267 - DNA, 1639 bp, Homo sapiens
cgaattcggccattatggccgggggaggcagtaaggacttggactcctctgtccagcttttaacaatctaagttacgccctcttctgggtcacgctagaatcagatctgctctccagcatcttctgtttcctggcaagtgtttcctgctactttggattggccacgatgggctggagctgccttgtgacaggagcaggagggcttctgggtcagaggatcgtccgcctgttggtggaagagaaggaactgaaggagatcagggccttggacaaggccttcagaccagaattgagagaggaattttctaagctccagaacaggaccaagctgactgtacttgaaggagacattctggatgagccattcctgaaaagagcctgccaggacgtctcggtcgtcatccacaccgcctgtatcattgatgtctttggtgtcactcacagagagtccatcatgaatgtcaatgtgaaaggtacccagctactgttggaggcctgtgtccaagccagtgtgccagtcttcatctacaccagtagcatagaggtagccgggcccaactcctacaaggaaatcatccagaacggccacgaagaagagcctctggaaaacacatggcccactccatacccgtacagcaaaaagcttgctgagaaggctgtgctggcggctaatgggtggaatctaaaaggaggcccattcctttctgccagtataaatgaggccctgaacaacaatgggatcctgtcaagtgttggaaagttctctacagtcaacccagtctatgttggcaacgtggcctgggcccacattctggccttgagggctctgcgggaccccaagaaggccccaagtgtccgaggtcaattctattacatctcagatgacacgcctcaccaaagctatgataaccttaattacatcctgagcaaagagtttggcctccgccttgattccagatggagccttcctttaaccctgatgtactggattggcttcctgctggaagtagtgagcttcctactcagcccaatttactcctatcaaccccccttcaaccgccacacagtcacattatcaaatagtgtgttcaccttctcttacaagaaggctcagcgagatctggcgtataagccactctacagctgggaggaagccaagcagaaaaccgtggagtgggttggttcccttgtggaccggcacaaggagaccctgaagtccaagactcagtgatttaaggatgacagagatgtgcatgtgggtattgttaggaaatgtcatcaaactccacccacctggcttcatacagaaggcaacaggggcacaagcccaggtcctgctgcctctctttcacacaatgcccaacttactgtcttcttcatgtcatcaaaatctgcacagtcactggcccaaccagaactttctgtcctaatcatacaccagaagacaaacaatatgatttgctgttaccaaatctcagtggctgattctgaacaattgtggtctctcttaacttgaggttctcttttgactaatagagctccatttcccctcttaaatgagaaagcatttcttttctctttaatctcctattccttcacacagttcaacataaagagcaataaatgttttaatgcttaa

SEQ ID NO: 732268 - DNA, 1695 bp, Homo sapiens
cgaattcggccattatggccgggggaggcagtaaggacttggactcctctgtccagcttttaacaatctaagttacgccctcttctgggtcacgctagaatcagatctgctctccagcatcttctgtttcctggcaagtgtttcctgctactttggattggccacgatgggctggagctgccttgtgacaggagcaggagggcttctgggtcagaggatcgtccgcctgttggtggaagagaaggaactgaaggagatcagggccttggacaaggccttcagaccagaattgagagaggaattttctaagctccagaacaggaccaagctgactgtacttgaaggagacattctggatgagccattcctgaaaagagcctgccaggacgtctcggtcgtcatccacaccgcctgtatcattgatgtctttggtgtcactcacagagagtccatcatgaatgtcaatgtgaaaggtacccagctactgttggaggcctgtgtccaagccagtgtgccagtcttcatctacaccagtagcatagaggtagccgggcccaactcctacaaggaaatcatccagaacggccacgaagaagagcctctggaaaacacatggcccactccatacccgtacagcaaaaagcttgctgagaaggctgtgctggcggctaatgggtggaatctaaaaaaatggtgataccttgtacacttgtgcgttaagacccacatatatctatggggaagggaggcccattcctttctgccagtataaatgaggccctgaacaacaatgggatcctgtcaagtgttggaaagttctctacagtcaacccagtctatgttggcaacgtggcctgggcccacattctggccttgagggctctgcgggaccccaagaaggccccaagtgtccgaggtcaattctattacatctcagatgacacgcctcaccaaagctatgataaccttaattacatcctgagcaaagagtttggcctccgccttgattccagatggagccttcctttaaccctgatgtactggattggcttcctgctggaagtagtgagcttcctactcagcccaatttactcctatcaaccccccttcaaccgccacacagtcacattatcaaatagtgtgttcaccttctcttacaagaaggctcagcgagatctggcgtataagccactctacagctgggaggaagccaagcagaaaaccgtggagtgggttggttcccttgtggaccggcacaaggagaccctgaagtccaagactcagtgatttaaggatgacagagatgtgcatgtgggtattgttaggaaatgtcatcaaactccacccacctggcttcatacagaaggcaacaggggcacaagcccaggtcctgctgcctctctttcacacaatgcccaacttactgtcttcttcatgtcatcaaaatctgcacagtcactggcccaaccagaactttctgtcctaatcatacaccagaagacaaacaatatgatttgctgttaccaaatctcagtggctgattctgaacaattgtggtctctcttaacttgaggttctcttttgactaatagagctccatttcccctcttaaatgagaaagcatttcttttctctttaatctcctattccttcacacagttcaacataaagagcaataaatgttttaatgcttaa

SEQ ID NO: 732269 - DNA, 1677 bp, Homo sapiens
gtaataagggctgagacacaagccacagagcataaagctccagtccttcctccagggatgagggcagtaaggacttggactcctctgtccagcttttaacaatctaagttacgccctcttctgggtcacgctagaatcagatctgctctccagcatcttctgtttcctggcaagtgtttcctgctactttggattggccacgatgggctggagctgccttgtgacaggagcaggagggcttctgggtcagaggatcgtccgcctgttggtggaagagaaggaactgaaggagatcagggccttggacaaggccttcagaccagaattgagagaggaattttctaagctccagaacaggaccaagctgactgtacttgaaggagacattctggatgagccattcctgaaaagagcctgccaggacgtctcggtcgtcatccacaccgcctgtatcattgatgtctttggtgtcactcacagagagtccatcatgaatgtcaatgtgaaaggtacccagctactgttggaggcctgtgtccaagccagtgtgccagtcttcatctacaccagtagcatagaggtagccgggcccaactcctacaaggaaatcatccagaacggccacgaagaagagcctgctgtgctggcggctaatgggtggaatctaaaaaaatggtgataccttgtacacttgtgcgttaagacccacatatatctatggggaagggaggcccattcctttctgccagtataaatgaggccctgaacaacaatgggatcctgtcaagtgttggaaagttctctacagtcaacccagtctatgttggcaacgtggcctgggcccacattctggccttgagggctctgcgggaccccaagaaggccccaagtgtccgaggtcaattctattacatctcagatgacacgcctcaccaaagctatgataaccttaattacatcctgagcaaagagtttggcctccgccttgattccagatggagccttcctttaaccctgatgtactggattggcttcctgctggaagtagtgagcttcctactcagcccaatttactcctatcaaccccccttcaaccgccacacagtcacattatcaaatagtgtgttcaccttctcttacaagaaggctcagcgagatctggcgtataagccactctacagctgggaggaagccaagcagaaaaccgtggagtgggttggttcccttgtggaccggcacaaggagaccctgaagtccaagactcagtgatttaaggatgacagagatgtgcatgtgggtattgttaggaaatgtcatcaaactccacccacctggcttcatacagaaggcaacaggggcacaagcccaggtcctgctgcctctctttcacacaatgcccaacttactgtcttcttcatgtcatcaaaatctgcacagtcactggcccaaccagaactttctgtcctaatcatacaccagaagacaaacaatatgatttgctgttaccaaatctcagtggctgattctgaacaattgtggtctctcttaacttgaggttctcttttgactaatagagctccatttcccctcttaaatgagaaagcatttcttttctctttaatctcctattccttcacacagttcaacataaagagcaataaatgttttaatgcttaa

SEQ ID NO: 732270 - DNA, 1567 bp, Homo sapiens
gtaataagggctgagacacaagccacagagcataaagctccagtccttcctccagggatgagggcagtaaggacttggactcctctgtccagcttttaacaatctaagttacgccctcttctgggtcacgctagaatcagatctgctctccagcatcttctgtttcctggcaagtgtttcctgctactttggattggccacgatgggctggagctgccttgtgacaggagcaggagggcttctgggtcagaggatcgtccgcctgttggtggaagagaaggaactgaaggagatcagggccttggacaaggccttcagaccagaattgagagaggaattttctaagctccagaacaggaccaagctgactgtacttgaaggagacattctggatgagccattcctggtctttggtgtcactcacagagagtccatcatgaatgtcaatgtgaaaggtacccagctactgttggaggcctgtgtccaagccagtgtgccagtcttcatctacaccagtagcatagaggtagccgggcccaactcctacaaggaaatcatccagaacggccacgaagaagagcctctggaaaacacatggcccactccatacccgtacagcaaaaagcttgctgagaaggctgtgctggcggctaatgggtggaatctaaaaggaggcccattcctttctgccagtataaatgaggccctgaacaacaatgggatcctgtcaagtgttggaaagttctctacagtcaacccagtctatgttggcaacgtggcctgggcccacattctggccttgagggctctgcgggaccccaagaaggccccaagtgtccgaggtcaattctattacatctcagatgacacgcctcaccaaagctatgataaccttaattacatcctgagcaaagagtttggcctccgccttgattccagatggagccttcctttaaccctgatgtactggattggcttcctgctggaagtagtgagcttcctactcagcccaatttactcctatcaaccccccttcaaccgccacacagtcacattatcaaatagtgtgttcaccttctcttacaagaaggctcagcgagatctggcgtataagccactctacagctgggaggaagccaagcagaaaaccgtggagtgggttggttcccttgtggaccggcacaaggagaccctgaagtccaagactcagtgatttaaggatgacagagatgtgcatgtgggtattgttaggaaatgtcatcaaactccacccacctggcttcatacagaaggcaacaggggcacaagcccaggtcctgctgcctctctttcacacaatgcccaacttactgtcttcttcatgtcatcgaagacaaacaatatgatttgctgttaccaaatctcagtggctgattctgaacaattgtggtctctcttaacttgaggttctcttttgactaatagagctccatttcccctcttaaatgagaaagcatttcttttctctttaatctcctattccttcacacagttcaacataaagagcaataaatgttttaatgcttaa

SEQ ID NO: 732271 - DNA, 1792 bp, Homo sapiens
  misc_feature (1630)..(1630): n is a, c, g, or t
  misc_feature (1635)..(1635): n is a, c, g, or t
  misc_feature (1656)..(1656): n is a, c, g, or t
  misc_feature (1665)..(1665): n is a, c, g, or t
  misc_feature (1677)..(1677): n is a, c, g, or t
  misc_feature (1682)..(1683): n is a, c, g, or t
  misc_feature (1687)..(1687): n is a, c, g, or t
  misc_feature (1690)..(1690): n is a, c, g, or t
  misc_feature (1694)..(1694): n is a, c, g, or t
  misc_feature (1710)..(1710): n is a, c, g, or t
  misc_feature (1717)..(1717): n is a, c, g, or t
  misc_feature (1723)..(1723): n is a, c, g, or t
  misc_feature (1728)..(1728): n is a, c, g, or t
gtaataagggctgagacacaagccacagagcataaagctccagtccttcctccagggatgagggcagtaaggacttggactcctctgtccagcttttaacaatctaagttacgccctcttctgggtcacgctagaatcagatctgctctccagcatcttctgtttcctggcaagtgtttcctgctactttggattggccacgatgggctggagctgccttgtgacaggagcaggagggcttctgggtcagaggatcgtccgcctgttggtggaagagaaggaactgaaggagatcagggccttggacaaggccttcagaccagaattgagagaggaattttctaagctccagaacaggaccaagctgactgtacttgaaggagacattctggatgagccattcctggtctttggtgtcactcacagagagtccatcatgaatgtcaatgtgaaaggtacccagctactgttggaggcctgtgtccaagccagtgtgccagtcttcatctacaccagtagcatagaggtagccgggcccaactcctacaaggaaatcatccagaacggccacgaagaagagcctctggaaaacacatggcccactccatacccgtacagcaaaaagcttgctgagaaggctgtgctggcggctaatgggtggaatctaaaaggaggcccattcctttctgccagtataaatgaggccctgaacaacaatgggatcctgtcaagtgttggaaagttctctacagtcaacccagtctatgttggcaacgtggcctgggcccacattctggccttgagggctctgcgggaccccaagaaggccccaagtgtccgaggtcaattctattacatctcagatgacacgcctcaccaaagctatgataaccttaattacatcctgagcaaagagtttggcctccgccttgattccagatggagccttcctttaaccctgatgtactggattggcttcctgctggaagtagtgagcttcctactcagcccaatttactcctatcaaccccccttcaaccgccacacagtcacattatcaaatagtgtgttcaccttctcttacaagaaggctcagcgagatctggcgtataagccactctacagctgggaggaagccaagcagaaaaccgtggagtgggttggttcccttgtggaccggcacaaggagaccctgaagtccaagactcagtgatttaaggatgacagagatgtgcatgtgggtattgttaggaaatgtcatcaaactccacccacctggcttcatacagaaggcaacaggggcacaagcccaggtcctgctgcctctctttcacacaatgcccaacttactgtcttcttcatgtcatcaaaatctgcacagtcactggcccaaccagaactttctgtcctaatcatacaccagaagacaaacaatatgatttgctgttaccaaatctcagtggctgattctgaacaattgtggtctctcttaacttgaggttctcttttgactaatagagctccatttcccctcttaaatgagaaagcatttcttttctctttaatctcctattccttcacacagttcaacataaagagcaataaatgttttaatgcttaaaaaaaaaanaacanaccaaaaaaaaaaaaactcgnggggggccngtacccatttgncctanngggngcngttnacattaattggccggngtttaanacgggngactnggaaaaccttggcttgacccaacttaaatggctttgagcctttaccaacagttgggcaacctta

SEQ ID NO: 732272 - DNA, 1848 bp, Homo sapiens
  misc_feature (1686)..(1686): n is a, c, g, or t
  misc_feature (1691)..(1691): n is a, c, g, or t
  misc_feature (1712)..(1712): n is a, c, g, or t
  misc_feature (1721)..(1721): n is a, c, g, or t
  misc_feature (1733)..(1733): n is a, c, g, or t
  misc_feature (1738)..(1739): n is a, c, g, or t
  misc_feature (1743)..(1743): n is a, c, g, or t
  misc_feature (1746)..(1746): n is a, c, g, or t
  misc_feature (1750)..(1750): n is a, c, g, or t
  misc_feature (1766)..(1766): n is a, c, g, or t
  misc_feature (1773)..(1773): n is a, c, g, or t
  misc_feature (1779)..(1779): n is a, c, g, or t
  misc_feature (1784)..(1784): n is a, c, g, or t
gtaataagggctgagacacaagccacagagcataaagctccagtccttcctccagggatgagggcagtaaggacttggactcctctgtccagcttttaacaatctaagttacgccctcttctgggtcacgctagaatcagatctgctctccagcatcttctgtttcctggcaagtgtttcctgctactttggattggccacgatgggctggagctgccttgtgacaggagcaggagggcttctgggtcagaggatcgtccgcctgttggtggaagagaaggaactgaaggagatcagggccttggacaaggccttcagaccagaattgagagaggaattttctaagctccagaacaggaccaagctgactgtacttgaaggagacattctggatgagccattcctggtctttggtgtcactcacagagagtccatcatgaatgtcaatgtgaaaggtacccagctactgttggaggcctgtgtccaagccagtgtgccagtcttcatctacaccagtagcatagaggtagccgggcccaactcctacaaggaaatcatccagaacggccacgaagaagagcctctggaaaacacatggcccactccatacccgtacagcaaaaagcttgctgagaaggctgtgctggcggctaatgggtggaatctaaaaaaatggtgataccttgtacacttgtgcgttaagacccacatatatctatggggaagggaggcccattcctttctgccagtataaatgaggccctgaacaacaatgggatcctgtcaagtgttggaaagttctctacagtcaacccagtctatgttggcaacgtggcctgggcccacattctggccttgagggctctgcgggaccccaagaaggccccaagtgtccgaggtcaattctattacatctcagatgacacgcctcaccaaagctatgataaccttaattacatcctgagcaaagagtttggcctccgccttgattccagatggagccttcctttaaccctgatgtactggattggcttcctgctggaagtagtgagcttcctactcagcccaatttactcctatcaaccccccttcaaccgccacacagtcacattatcaaatagtgtgttcaccttctcttacaagaaggctcagcgagatctggcgtataagccactctacagctgggaggaagccaagcagaaaaccgtggagtgggttggttcccttgtggaccggcacaaggagaccctgaagtccaagactcagtgatttaaggatgacagagatgtgcatgtgggtattgttaggaaatgtcatcaaactccacccacctggcttcatacagaaggcaacaggggcacaagcccaggtcctgctgcctctctttcacacaatgcccaacttactgtcttcttcatgtcatcaaaatctgcacagtcactggcccaaccagaactttctgtcctaatcatacaccagaagacaaacaatatgatttgctgttaccaaatctcagtggctgattctgaacaattgtggtctctcttaacttgaggttctcttttgactaatagagctccatttcccctcttaaatgagaaagcatttcttttctctttaatctcctattccttcacacagttcaacataaagagcaataaatgttttaatgcttaaaaaaaaaanaacanaccaaaaaaaaaaaaactcgnggggggccngtacccatttgncctanngggngcngttnacattaattggccggngtttaanacgggngactnggaaaaccttggcttgacccaacttaaatggctttgagcctttaccaacagttgggcaacctta

SEQ ID NO: 732273 - DNA, 1623 bp, Homo sapiens
gtaataagggctgagacacaagccacagagcataaagctccagtccttcctccagggatgagggcagtaaggacttggactcctctgtccagcttttaacaatctaagttacgccctcttctgggtcacgctagaatcagatctgctctccagcatcttctgtttcctggcaagtgtttcctgctactttggattggccacgatgggctggagctgccttgtgacaggagcaggagggcttctgggtcagaggatcgtccgcctgttggtggaagagaaggaactgaaggagatcagggccttggacaaggccttcagaccagaattgagagaggaattttctaagctccagaacaggaccaagctgactgtacttgaaggagacattctggatgagccattcctggtctttggtgtcactcacagagagtccatcatgaatgtcaatgtgaaaggtacccagctactgttggaggcctgtgtccaagccagtgtgccagtcttcatctacaccagtagcatagaggtagccgggcccaactcctacaaggaaatcatccagaacggccacgaagaagagcctctggaaaacacatggcccactccatacccgtacagcaaaaagcttgctgagaaggctgtgctggcggctaatgggtggaatctaaaaaaatggtgataccttgtacacttgtgcgttaagacccacatatatctatggggaagggaggcccattcctttctgccagtataaatgaggccctgaacaacaatgggatcctgtcaagtgttggaaagttctctacagtcaacccagtctatgttggcaacgtggcctgggcccacattctggccttgagggctctgcgggaccccaagaaggccccaagtgtccgaggtcaattctattacatctcagatgacacgcctcaccaaagctatgataaccttaattacatcctgagcaaagagtttggcctccgccttgattccagatggagccttcctttaaccctgatgtactggattggcttcctgctggaagtagtgagcttcctactcagcccaatttactcctatcaaccccccttcaaccgccacacagtcacattatcaaatagtgtgttcaccttctcttacaagaaggctcagcgagatctggcgtataagccactctacagctgggaggaagccaagcagaaaaccgtggagtgggttggttcccttgtggaccggcacaaggagaccctgaagtccaagactcagtgatttaaggatgacagagatgtgcatgtgggtattgttaggaaatgtcatcaaactccacccacctggcttcatacagaaggcaacaggggcacaagcccaggtcctgctgcctctctttcacacaatgcccaacttactgtcttcttcatgtcatcgaagacaaacaatatgatttgctgttaccaaatctcagtggctgattctgaacaattgtggtctctcttaacttgaggttctcttttgactaatagagctccatttcccctcttaaatgagaaagcatttcttttctctttaatctcctattccttcacacagttcaacataaagagcaataaatgttttaatgcttaa

SEQ ID NO: 732274 - DNA, 1621 bp, Homo sapiens
gtaataagggctgagacacaagccacagagcataaagctccagtccttcctccagggatgagggcagtaaggacttggactcctctgtccagcttttaacaatctaagttacgccctcttctgggtcacgctagaatcagatctgctctccagcatcttctgtttcctggcaagtgtttcctgctactttggattggccacgatgggctggagctgccttgtgacaggagcaggagggcttctgggtcagaggatcgtccgcctgttggtggaagagaaggaactgaaggagatcagggccttggacaaggccttcagaccagaattgagagaggaattttctaagctccagaacaggaccaagctgactgtacttgaaggagacattctggatgagccattcctgaaaagagcctgccaggacgtctcggtcgtcatccacaccgcctgtatcattgatgtctttggtgtcactcacagagagtccatcatgaatgtcaatgtgaaaggtacccagctactgttggaggcctgtgtccaagccagtgtgccagtcttcatctacaccagtagcatagaggtagccgggcccaactcctacaaggaaatcatccagaacggccacgaagaagagcctctggaaaacacatggcccactccatacccgtacagcaaaaagcttgctgagaaggctgtgctggcggctaatgggtggaatctaaaaggaggcccattcctttctgccagtataaatgaggccctgaacaacaatgggatcctgtcaagtgttggaaagttctctacagtcaacccagtctatgttggcaacgtggcctgggcccacattctggccttgagggctctgcgggaccccaagaaggccccaagtgtccgaggtcaattctattacatctcagatgacacgcctcaccaaagctatgataaccttaattacatcctgagcaaagagtttggcctccgccttgattccagatggagccttcctttaaccctgatgtactggattggcttcctgctggaagtagtgagcttcctactcagcccaatttactcctatcaaccccccttcaaccgccacacagtcacattatcaaatagtgtgttcaccttctcttacaagaaggctcagcgagatctggcgtataagccactctacagctgggaggaagccaagcagaaaaccgtggagtgggttggttcccttgtggaccggcacaaggagaccctgaagtccaagactcagtgatttaaggatgacagagatgtgcatgtgggtattgttaggaaatgtcatcaaactccacccacctggcttcatacagaaggcaacaggggcacaagcccaggtcctgctgcctctctttcacacaatgcccaacttactgtcttcttcatgtcatcgaagacaaacaatatgatttgctgttaccaaatctcagtggctgattctgaacaattgtggtctctcttaacttgaggttctcttttgactaatagagctccatttcccctcttaaatgagaaagcatttcttttctctttaatctcctattccttcacacagttcaacataaagagcaataaatgttttaatgcttaa

SEQ ID NO: 732275 - DNA, 1846 bp, Homo sapiens
  misc_feature (1684)..(1684): n is a, c, g, or t
  misc_feature (1689)..(1689): n is a, c, g, or t
  misc_feature (1710)..(1710): n is a, c, g, or t
  misc_feature (1719)..(1719): n is a, c, g, or t
  misc_feature (1731)..(1731): n is a, c, g, or t
  misc_feature (1736)..(1737): n is a, c, g, or t
  misc_feature (1741)..(1741): n is a, c, g, or t
  misc_feature (1744)..(1744): n is a, c, g, or t
  misc_feature (1748)..(1748): n is a, c, g, or t
  misc_feature (1764)..(1764): n is a, c, g, or t
  misc_feature (1771)..(1771): n is a, c, g, or t
  misc_feature (1777)..(1777): n is a, c, g, or t
  misc_feature (1782)..(1782): n is a, c, g, or t
gtaataagggctgagacacaagccacagagcataaagctccagtccttcctccagggatgagggcagtaaggacttggactcctctgtccagcttttaacaatctaagttacgccctcttctgggtcacgctagaatcagatctgctctccagcatcttctgtttcctggcaagtgtttcctgctactttggattggccacgatgggctggagctgccttgtgacaggagcaggagggcttctgggtcagaggatcgtccgcctgttggtggaagagaaggaactgaaggagatcagggccttggacaaggccttcagaccagaattgagagaggaattttctaagctccagaacaggaccaagctgactgtacttgaaggagacattctggatgagccattcctgaaaagagcctgccaggacgtctcggtcgtcatccacaccgcctgtatcattgatgtctttggtgtcactcacagagagtccatcatgaatgtcaatgtgaaaggtacccagctactgttggaggcctgtgtccaagccagtgtgccagtcttcatctacaccagtagcatagaggtagccgggcccaactcctacaaggaaatcatccagaacggccacgaagaagagcctctggaaaacacatggcccactccatacccgtacagcaaaaagcttgctgagaaggctgtgctggcggctaatgggtggaatctaaaaggaggcccattcctttctgccagtataaatgaggccctgaacaacaatgggatcctgtcaagtgttggaaagttctctacagtcaacccagtctatgttggcaacgtggcctgggcccacattctggccttgagggctctgcgggaccccaagaaggccccaagtgtccgaggtcaattctattacatctcagatgacacgcctcaccaaagctatgataaccttaattacatcctgagcaaagagtttggcctccgccttgattccagatggagccttcctttaaccctgatgtactggattggcttcctgctggaagtagtgagcttcctactcagcccaatttactcctatcaaccccccttcaaccgccacacagtcacattatcaaatagtgtgttcaccttctcttacaagaaggctcagcgagatctggcgtataagccactctacagctgggaggaagccaagcagaaaaccgtggagtgggttggttcccttgtggaccggcacaaggagaccctgaagtccaagactcagtgatttaaggatgacagagatgtgcatgtgggtattgttaggaaatgtcatcaaactccacccacctggcttcatacagaaggcaacaggggcacaagcccaggtcctgctgcctctctttcacacaatgcccaacttactgtcttcttcatgtcatcaaaatctgcacagtcactggcccaaccagaactttctgtcctaatcatacaccagaagacaaacaatatgatttgctgttaccaaatctcagtggctgattctgaacaattgtggtctctcttaacttgaggttctcttttgactaatagagctccatttcccctcttaaatgagaaagcatttcttttctctttaatctcctattccttcacacagttcaacataaagagcaataaatgttttaatgcttaaaaaaaaaanaacanaccaaaaaaaaaaaaactcgnggggggccngtacccatttgncctanngggngcngttnacattaattggccggngtttaanacgggngactnggaaaaccttggcttgacccaacttaaatggctttgagcctttaccaacagttgggcaacctta

SEQ ID NO: 732276 - DNA, 1902 bp, Homo sapiens
  misc_feature (1740)..(1740): n is a, c, g, or t
  misc_feature (1745)..(1745): n is a, c, g, or t
  misc_feature (1766)..(1766): n is a, c, g, or t
  misc_feature (1775)..(1775): n is a, c, g, or t
  misc_feature (1787)..(1787): n is a, c, g, or t
  misc_feature (1792)..(1793): n is a, c, g, or t
  misc_feature (1797)..(1797): n is a, c, g, or t
  misc_feature (1800)..(1800): n is a, c, g, or t
  misc_feature (1804)..(1804): n is a, c, g, or t
  misc_feature (1820)..(1820): n is a, c, g, or t
  misc_feature (1827)..(1827): n is a, c, g, or t
  misc_feature (1833)..(1833): n is a, c, g, or t
  misc_feature (1838)..(1838): n is a, c, g, or t
gtaataagggctgagacacaagccacagagcataaagctccagtccttcctccagggatgagggcagtaaggacttggactcctctgtccagcttttaacaatctaagttacgccctcttctgggtcacgctagaatcagatctgctctccagcatcttctgtttcctggcaagtgtttcctgctactttggattggccacgatgggctggagctgccttgtgacaggagcaggagggcttctgggtcagaggatcgtccgcctgttggtggaagagaaggaactgaaggagatcagggccttggacaaggccttcagaccagaattgagagaggaattttctaagctccagaacaggaccaagctgactgtacttgaaggagacattctggatgagccattcctgaaaagagcctgccaggacgtctcggtcgtcatccacaccgcctgtatcattgatgtctttggtgtcactcacagagagtccatcatgaatgtcaatgtgaaaggtacccagctactgttggaggcctgtgtccaagccagtgtgccagtcttcatctacaccagtagcatagaggtagccgggcccaactcctacaaggaaatcatccagaacggccacgaagaagagcctctggaaaacacatggcccactccatacccgtacagcaaaaagcttgctgagaaggctgtgctggcggctaatgggtggaatctaaaaaaatggtgataccttgtacacttgtgcgttaagacccacatatatctatggggaagggaggcccattcctttctgccagtataaatgaggccctgaacaacaatgggatcctgtcaagtgttggaaagttctctacagtcaacccagtctatgttggcaacgtggcctgggcccacattctggccttgagggctctgcgggaccccaagaaggccccaagtgtccgaggtcaattctattacatctcagatgacacgcctcaccaaagctatgataaccttaattacatcctgagcaaagagtttggcctccgccttgattccagatggagccttcctttaaccctgatgtactggattggcttcctgctggaagtagtgagcttcctactcagcccaatttactcctatcaaccccccttcaaccgccacacagtcacattatcaaatagtgtgttcaccttctcttacaagaaggctcagcgagatctggcgtataagccactctacagctgggaggaagccaagcagaaaaccgtggagtgggttggttcccttgtggaccggcacaaggagaccctgaagtccaagactcagtgatttaaggatgacagagatgtgcatgtgggtattgttaggaaatgtcatcaaactccacccacctggcttcatacagaaggcaacaggggcacaagcccaggtcctgctgcctctctttcacacaatgcccaacttactgtcttcttcatgtcatcaaaatctgcacagtcactggcccaaccagaactttctgtcctaatcatacaccagaagacaaacaatatgatttgctgttaccaaatctcagtggctgattctgaacaattgtggtctctcttaacttgaggttctcttttgactaatagagctccatttcccctcttaaatgagaaagcatttcttttctctttaatctcctattccttcacacagttcaacataaagagcaataaatgttttaatgcttaaaaaaaaaanaacanaccaaaaaaaaaaaaactcgnggggggccngtacccatttgncctanngggngcngttnacattaattggccggngtttaanacgggngactnggaaaaccttggcttgacccaacttaaatggctttgagcctttaccaacagttgggcaacctta

SEQ ID NO: 732277 - DNA, 1677 bp, Homo sapiens
gtaataagggctgagacacaagccacagagcataaagctccagtccttcctccagggatgagggcagtaaggacttggactcctctgtccagcttttaacaatctaagttacgccctcttctgggtcacgctagaatcagatctgctctccagcatcttctgtttcctggcaagtgtttcctgctactttggattggccacgatgggctggagctgccttgtgacaggagcaggagggcttctgggtcagaggatcgtccgcctgttggtggaagagaaggaactgaaggagatcagggccttggacaaggccttcagaccagaattgagagaggaattttctaagctccagaacaggaccaagctgactgtacttgaaggagacattctggatgagccattcctgaaaagagcctgccaggacgtctcggtcgtcatccacaccgcctgtatcattgatgtctttggtgtcactcacagagagtccatcatgaatgtcaatgtgaaaggtacccagctactgttggaggcctgtgtccaagccagtgtgccagtcttcatctacaccagtagcatagaggtagccgggcccaactcctacaaggaaatcatccagaacggccacgaagaagagcctctggaaaacacatggcccactccatacccgtacagcaaaaagcttgctgagaaggctgtgctggcggctaatgggtggaatctaaaaaaatggtgataccttgtacacttgtgcgttaagacccacatatatctatggggaagggaggcccattcctttctgccagtataaatgaggccctgaacaacaatgggatcctgtcaagtgttggaaagttctctacagtcaacccagtctatgttggcaacgtggcctgggcccacattctggccttgagggctctgcgggaccccaagaaggccccaagtgtccgaggtcaattctattacatctcagatgacacgcctcaccaaagctatgataaccttaattacatcctgagcaaagagtttggcctccgccttgattccagatggagccttcctttaaccctgatgtactggattggcttcctgctggaagtagtgagcttcctactcagcccaatttactcctatcaaccccccttcaaccgccacacagtcacattatcaaatagtgtgttcaccttctcttacaagaaggctcagcgagatctggcgtataagccactctacagctgggaggaagccaagcagaaaaccgtggagtgggttggttcccttgtggaccggcacaaggagaccctgaagtccaagactcagtgatttaaggatgacagagatgtgcatgtgggtattgttaggaaatgtcatcaaactccacccacctggcttcatacagaaggcaacaggggcacaagcccaggtcctgctgcctctctttcacacaatgcccaacttactgtcttcttcatgtcatcgaagacaaacaatatgatttgctgttaccaaatctcagtggctgattctgaacaattgtggtctctcttaacttgaggttctcttttgactaatagagctccatttcccctcttaaatgagaaagcatttcttttctctttaatctcctattccttcacacagttcaacataaagagcaataaatgttttaatgcttaa

SEQ ID NO: 732278 - DNA, 1848 bp, Homo sapiens
  misc_feature (1686)..(1686): n is a, c, g, or t
  misc_feature (1691)..(1691): n is a, c, g, or t
  misc_feature (1712)..(1712): n is a, c, g, or t
  misc_feature (1721)..(1721): n is a, c, g, or t
  misc_feature (1733)..(1733): n is a, c, g, or t
  misc_feature (1738)..(1739): n is a, c, g, or t
  misc_feature (1743)..(1743): n is a, c, g, or t
  misc_feature (1746)..(1746): n is a, c, g, or t
  misc_feature (1750)..(1750): n is a, c, g, or t
  misc_feature (1766)..(1766): n is a, c, g, or t
  misc_feature (1773)..(1773): n is a, c, g, or t
  misc_feature (1779)..(1779): n is a, c, g, or t
  misc_feature (1784)..(1784): n is a, c, g, or t
gtaataagggctgagacacaagccacagagcataaagctccagtccttcctccagggatgagggcagtaaggacttggactcctctgtccagcttttaacaatctaagttacgccctcttctgggtcacgctagaatcagatctgctctccagcatcttctgtttcctggcaagtgtttcctgctactttggattggccacgatgggctggagctgccttgtgacaggagcaggagggcttctgggtcagaggatcgtccgcctgttggtggaagagaaggaactgaaggagatcagggccttggacaaggccttcagaccagaattgagagaggaattttctaagctccagaacaggaccaagctgactgtacttgaaggagacattctggatgagccattcctgaaaagagcctgccaggacgtctcggtcgtcatccacaccgcctgtatcattgatgtctttggtgtcactcacagagagtccatcatgaatgtcaatgtgaaaggtacccagctactgttggaggcctgtgtccaagccagtgtgccagtcttcatctacaccagtagcatagaggtagccgggcccaactcctacaaggaaatcatccagaacggccacgaagaagagcctgctgtgctggcggctaatgggtggaatctaaaaaaatggtgataccttgtacacttgtgcgttaagacccacatatatctatggggaagggaggcccattcctttctgccagtataaatgaggccctgaacaacaatgggatcctgtcaagtgttggaaagttctctacagtcaacccagtctatgttggcaacgtggcctgggcccacattctggccttgagggctctgcgggaccccaagaaggccccaagtgtccgaggtcaattctattacatctcagatgacacgcctcaccaaagctatgataaccttaattacatcctgagcaaagagtttggcctccgccttgattccagatggagccttcctttaaccctgatgtactggattggcttcctgctggaagtagtgagcttcctactcagcccaatttactcctatcaaccccccttcaaccgccacacagtcacattatcaaatagtgtgttcaccttctcttacaagaaggctcagcgagatctggcgtataagccactctacagctgggaggaagccaagcagaaaaccgtggagtgggttggttcccttgtggaccggcacaaggagaccctgaagtccaagactcagtgatttaaggatgacagagatgtgcatgtgggtattgttaggaaatgtcatcaaactccacccacctggcttcatacagaaggcaacaggggcacaagcccaggtcctgctgcctctctttcacacaatgcccaacttactgtcttcttcatgtcatcaaaatctgcacagtcactggcccaaccagaactttctgtcctaatcatacaccagaagacaaacaatatgatttgctgttaccaaatctcagtggctgattctgaacaattgtggtctctcttaacttgaggttctcttttgactaatagagctccatttcccctcttaaatgagaaagcatttcttttctctttaatctcctattccttcacacagttcaacataaagagcaataaatgttttaatgcttaaaaaaaaaanaacanaccaaaaaaaaaaaaactcgnggggggccngtacccatttgncctanngggngcngttnacattaattggccggngtttaanacgggngactnggaaaaccttggcttgacccaacttaaatggctttgagcctttaccaacagttgggcaacctta

SEQ ID NO: 732279 - DNA, 1623 bp, Homo sapiens
gtaataagggctgagacacaagccacagagcataaagctccagtccttcctccagggatgagggcagtaaggacttggactcctctgtccagcttttaacaatctaagttacgccctcttctgggtcacgctagaatcagatctgctctccagcatcttctgtttcctggcaagtgtttcctgctactttggattggccacgatgggctggagctgccttgtgacaggagcaggagggcttctgggtcagaggatcgtccgcctgttggtggaagagaaggaactgaaggagatcagggccttggacaaggccttcagaccagaattgagagaggaattttctaagctccagaacaggaccaagctgactgtacttgaaggagacattctggatgagccattcctgaaaagagcctgccaggacgtctcggtcgtcatccacaccgcctgtatcattgatgtctttggtgtcactcacagagagtccatcatgaatgtcaatgtgaaaggtacccagctactgttggaggcctgtgtccaagccagtgtgccagtcttcatctacaccagtagcatagaggtagccgggcccaactcctacaaggaaatcatccagaacggccacgaagaagagcctgctgtgctggcggctaatgggtggaatctaaaaaaatggtgataccttgtacacttgtgcgttaagacccacatatatctatggggaagggaggcccattcctttctgccagtataaatgaggccctgaacaacaatgggatcctgtcaagtgttggaaagttctctacagtcaacccagtctatgttggcaacgtggcctgggcccacattctggccttgagggctctgcgggaccccaagaaggccccaagtgtccgaggtcaattctattacatctcagatgacacgcctcaccaaagctatgataaccttaattacatcctgagcaaagagtttggcctccgccttgattccagatggagccttcctttaaccctgatgtactggattggcttcctgctggaagtagtgagcttcctactcagcccaatttactcctatcaaccccccttcaaccgccacacagtcacattatcaaatagtgtgttcaccttctcttacaagaaggctcagcgagatctggcgtataagccactctacagctgggaggaagccaagcagaaaaccgtggagtgggttggttcccttgtggaccggcacaaggagaccctgaagtccaagactcagtgatttaaggatgacagagatgtgcatgtgggtattgttaggaaatgtcatcaaactccacccacctggcttcatacagaaggcaacaggggcacaagcccaggtcctgctgcctctctttcacacaatgcccaacttactgtcttcttcatgtcatcgaagacaaacaatatgatttgctgttaccaaatctcagtggctgattctgaacaattgtggtctctcttaacttgaggttctcttttgactaatagagctccatttcccctcttaaatgagaaagcatttcttttctctttaatctcctattccttcacacagttcaacataaagagcaataaatgttttaatgcttaa

SEQ ID NO: 732280 - DNA, 1585 bp, Homo sapiens
cgaattcggccattatggccgggggaggcagtaaggacttggactcctctgtccagcttttaacaatctaagttacgccctcttctgggtcacgctagaatcagatctgctctccagcatcttctgtttcctggcaagtgtttcctgctactttggattggccacgatgggctggagctgccttgtgacaggagcaggagggcttctgggtcagaggatcgtccgcctgttggtggaagagaaggaactgaaggagatcagggccttggacaaggccttcagaccagaattgagagaggaattttctaagctccagaacaggaccaagctgactgtacttgaaggagacattctggatgagccattcctgaaaagagcctgccaggacgtctcggtcgtcatccacaccgcctgtatcattgatgtctttggtgtcactcacagagagtccatcatgaatgtcaatgtgaaaggtacccagctactgttggaggcctgtgtccaagccagtgtgccagtcttcatctacaccagtagcatagaggtagccgggcccaactcctacaaggaaatcatccagaacggccacgaagaagagcctctggaaaacacatggcccactccatacccgtacagcaaaaagcttgctgagaaggctgtgctggcggctaatgggtggaatctaaaaggaggcccattcctttctgccagtataaatgaggccctgaacaacaatgggatcctgtcaagtgttggaaagttctctacagtcaacccagtctatgttggcaacgtggcctgggcccacattctggccttgagggctctgcgggaccccaagaaggccccaagtgtccgaggtcaattctattacatctcagatgacacgcctcaccaaagctatgataaccttaattacatcctgagcaaagagtttggcctccgccttgattccagatggagccttcctttaaccctgatgtactggattggcttcctgctggaagtagtgagcttcctactcagcccaatttactcctatcaaccccccttcaaccgccacacagtcacattatcaaatagtgtgttcaccttctcttacaagaaggctcagcgagatctggcgtataagccactctacagctgggaggaagccaagcagaaaaccgtggagtgggttggttcccttgtggaccggcacaaggagaccctgaagtccaagactcagtgatttaaggatgacagagatgtgcatgtgggtattgttaggaaatgtcatcaaactccacccacctggcttcatacagaaggcaacaggggcacaagcccaggtcctgctgcctctctttcacacaatgcccaacttactgtcttcttcatgtcatcgaagacaaacaatatgatttgctgttaccaaatctcagtggctgattctgaacaattgtggtctctcttaacttgaggttctcttttgactaatagagctccatttcccctcttaaatgagaaagcatttcttttctctttaatctcctattccttcacacagttcaacataaagagcaataaatgttttaatgcttaa

SEQ ID NO: 732281 - DNA, 1810 bp, Homo sapiens
  misc_feature (1648)..(1648): n is a, c, g, or t
  misc_feature (1653)..(1653): n is a, c, g, or t
  misc_feature (1674)..(1674): n is a, c, g, or t
  misc_feature (1683)..(1683): n is a, c, g, or t
  misc_feature (1695)..(1695): n is a, c, g, or t
  misc_feature (1700)..(1701): n is a, c, g, or t
  misc_feature (1705)..(1705): n is a, c, g, or t
  misc_feature (1708)..(1708): n is a, c, g, or t
  misc_feature (1712)..(1712): n is a, c, g, or t
  misc_feature (1728)..(1728): n is a, c, g, or t
  misc_feature (1735)..(1735): n is a, c, g, or t
  misc_feature (1741)..(1741): n is a, c, g, or t
  misc_feature (1746)..(1746): n is a, c, g, or t
cgaattcggccattatggccgggggaggcagtaaggacttggactcctctgtccagcttttaacaatctaagttacgccctcttctgggtcacgctagaatcagatctgctctccagcatcttctgtttcctggcaagtgtttcctgctactttggattggccacgatgggctggagctgccttgtgacaggagcaggagggcttctgggtcagaggatcgtccgcctgttggtggaagagaaggaactgaaggagatcagggccttggacaaggccttcagaccagaattgagagaggaattttctaagctccagaacaggaccaagctgactgtacttgaaggagacattctggatgagccattcctgaaaagagcctgccaggacgtctcggtcgtcatccacaccgcctgtatcattgatgtctttggtgtcactcacagagagtccatcatgaatgtcaatgtgaaaggtacccagctactgttggaggcctgtgtccaagccagtgtgccagtcttcatctacaccagtagcatagaggtagccgggcccaactcctacaaggaaatcatccagaacggccacgaagaagagcctctggaaaacacatggcccactccatacccgtacagcaaaaagcttgctgagaaggctgtgctggcggctaatgggtggaatctaaaaggaggcccattcctttctgccagtataaatgaggccctgaacaacaatgggatcctgtcaagtgttggaaagttctctacagtcaacccagtctatgttggcaacgtggcctgggcccacattctggccttgagggctctgcgggaccccaagaaggccccaagtgtccgaggtcaattctattacatctcagatgacacgcctcaccaaagctatgataaccttaattacatcctgagcaaagagtttggcctccgccttgattccagatggagccttcctttaaccctgatgtactggattggcttcctgctggaagtagtgagcttcctactcagcccaatttactcctatcaaccccccttcaaccgccacacagtcacattatcaaatagtgtgttcaccttctcttacaagaaggctcagcgagatctggcgtataagccactctacagctgggaggaagccaagcagaaaaccgtggagtgggttggttcccttgtggaccggcacaaggagaccctgaagtccaagactcagtgatttaaggatgacagagatgtgcatgtgggtattgttaggaaatgtcatcaaactccacccacctggcttcatacagaaggcaacaggggcacaagcccaggtcctgctgcctctctttcacacaatgcccaacttactgtcttcttcatgtcatcaaaatctgcacagtcactggcccaaccagaactttctgtcctaatcatacaccagaagacaaacaatatgatttgctgttaccaaatctcagtggctgattctgaacaattgtggtctctcttaacttgaggttctcttttgactaatagagctccatttcccctcttaaatgagaaagcatttcttttctctttaatctcctattccttcacacagttcaacataaagagcaataaatgttttaatgcttaaaaaaaaaanaacanaccaaaaaaaaaaaaactcgnggggggccngtacccatttgncctanngggngcngttnacattaattggccggngtttaanacgggngactnggaaaaccttggcttgacccaacttaaatggctttgagcctttaccaacagttgggcaacctta

SEQ ID NO: 732282 - DNA, 1866 bp, Homo sapiens
  misc_feature (1704)..(1704): n is a, c, g, or t
  misc_feature (1709)..(1709): n is a, c, g, or t
  misc_feature (1730)..(1730): n is a, c, g, or t
  misc_feature (1739)..(1739): n is a, c, g, or t
  misc_feature (1751)..(1751): n is a, c, g, or t
  misc_feature (1756)..(1757): n is a, c, g, or t
  misc_feature (1761)..(1761): n is a, c, g, or t
  misc_feature (1764)..(1764): n is a, c, g, or t
  misc_feature (1768)..(1768): n is a, c, g, or t
  misc_feature (1784)..(1784): n is a, c, g, or t
  misc_feature (1791)..(1791): n is a, c, g, or t
  misc_feature (1797)..(1797): n is a, c, g, or t
  misc_feature (1802)..(1802): n is a, c, g, or t
cgaattcggccattatggccgggggaggcagtaaggacttggactcctctgtccagcttttaacaatctaagttacgccctcttctgggtcacgctagaatcagatctgctctccagcatcttctgtttcctggcaagtgtttcctgctactttggattggccacgatgggctggagctgccttgtgacaggagcaggagggcttctgggtcagaggatcgtccgcctgttggtggaagagaaggaactgaaggagatcagggccttggacaaggccttcagaccagaattgagagaggaattttctaagctccagaacaggaccaagctgactgtacttgaaggagacattctggatgagccattcctgaaaagagcctgccaggacgtctcggtcgtcatccacaccgcctgtatcattgatgtctttggtgtcactcacagagagtccatcatgaatgtcaatgtgaaaggtacccagctactgttggaggcctgtgtccaagccagtgtgccagtcttcatctacaccagtagcatagaggtagccgggcccaactcctacaaggaaatcatccagaacggccacgaagaagagcctctggaaaacacatggcccactccatacccgtacagcaaaaagcttgctgagaaggctgtgctggcggctaatgggtggaatctaaaaaaatggtgataccttgtacacttgtgcgttaagacccacatatatctatggggaagggaggcccattcctttctgccagtataaatgaggccctgaacaacaatgggatcctgtcaagtgttggaaagttctctacagtcaacccagtctatgttggcaacgtggcctgggcccacattctggccttgagggctctgcgggaccccaagaaggccccaagtgtccgaggtcaattctattacatctcagatgacacgcctcaccaaagctatgataaccttaattacatcctgagcaaagagtttggcctccgccttgattccagatggagccttcctttaaccctgatgtactggattggcttcctgctggaagtagtgagcttcctactcagcccaatttactcctatcaaccccccttcaaccgccacacagtcacattatcaaatagtgtgttcaccttctcttacaagaaggctcagcgagatctggcgtataagccactctacagctgggaggaagccaagcagaaaaccgtggagtgggttggttcccttgtggaccggcacaaggagaccctgaagtccaagactcagtgatttaaggatgacagagatgtgcatgtgggtattgttaggaaatgtcatcaaactccacccacctggcttcatacagaaggcaacaggggcacaagcccaggtcctgctgcctctctttcacacaatgcccaacttactgtcttcttcatgtcatcaaaatctgcacagtcactggcccaaccagaactttctgtcctaatcatacaccagaagacaaacaatatgatttgctgttaccaaatctcagtggctgattctgaacaattgtggtctctcttaacttgaggttctcttttgactaatagagctccatttcccctcttaaatgagaaagcatttcttttctctttaatctcctattccttcacacagttcaacataaagagcaataaatgttttaatgcttaaaaaaaaaanaacanaccaaaaaaaaaaaaactcgnggggggccngtacccatttgncctanngggngcngttnacattaattggccggngtttaanacgggngactnggaaaaccttggcttgacccaacttaaatggctttgagcctttaccaacagttgggcaacctta

SEQ ID NO: 732283 - DNA, 1641 bp, Homo sapiens
cgaattcggccattatggccgggggaggcagtaaggacttggactcctctgtccagcttttaacaatctaagttacgccctcttctgggtcacgctagaatcagatctgctctccagcatcttctgtttcctggcaagtgtttcctgctactttggattggccacgatgggctggagctgccttgtgacaggagcaggagggcttctgggtcagaggatcgtccgcctgttggtggaagagaaggaactgaaggagatcagggccttggacaaggccttcagaccagaattgagagaggaattttctaagctccagaacaggaccaagctgactgtacttgaaggagacattctggatgagccattcctgaaaagagcctgccaggacgtctcggtcgtcatccacaccgcctgtatcattgatgtctttggtgtcactcacagagagtccatcatgaatgtcaatgtgaaaggtacccagctactgttggaggcctgtgtccaagccagtgtgccagtcttcatctacaccagtagcatagaggtagccgggcccaactcctacaaggaaatcatccagaacggccacgaagaagagcctctggaaaacacatggcccactccatacccgtacagcaaaaagcttgctgagaaggctgtgctggcggctaatgggtggaatctaaaaaaatggtgataccttgtacacttgtgcgttaagacccacatatatctatggggaagggaggcccattcctttctgccagtataaatgaggccctgaacaacaatgggatcctgtcaagtgttggaaagttctctacagtcaacccagtctatgttggcaacgtggcctgggcccacattctggccttgagggctctgcgggaccccaagaaggccccaagtgtccgaggtcaattctattacatctcagatgacacgcctcaccaaagctatgataaccttaattacatcctgagcaaagagtttggcctccgccttgattccagatggagccttcctttaaccctgatgtactggattggcttcctgctggaagtagtgagcttcctactcagcccaatttactcctatcaaccccccttcaaccgccacacagtcacattatcaaatagtgtgttcaccttctcttacaagaaggctcagcgagatctggcgtataagccactctacagctgggaggaagccaagcagaaaaccgtggagtgggttggttcccttgtggaccggcacaaggagaccctgaagtccaagactcagtgatttaaggatgacagagatgtgcatgtgggtattgttaggaaatgtcatcaaactccacccacctggcttcatacagaaggcaacaggggcacaagcccaggtcctgctgcctctctttcacacaatgcccaacttactgtcttcttcatgtcatcgaagacaaacaatatgatttgctgttaccaaatctcagtggctgattctgaacaattgtggtctctcttaacttgaggttctcttttgactaatagagctccatttcccctcttaaatgagaaagcatttcttttctctttaatctcctattccttcacacagttcaacataaagagcaataaatgttttaatgcttaa

SEQ ID NO: 732284 - DNA, 1565 bp, Homo sapiens
gtaataagggctgagacacaagccacagagcataaagctccagtccttcctccagggatgagggcagtaaggacttggactcctctgtccagcttttaacaatctaagttacgccctcttctgggtcacgctagaatcagatctgctctccagcatcttctgtttcctggcaagtgtttcctgctactttggattggccacgatgggctggagctgccttgtgacaggagcaggagggcttctgggtcagaggatcgtccgcctgttggtggaagagaaggaactgaaggagatcagggccttggacaaggccttcagaccagaattgagagaggaattttctaagctccagaacaggaccaagctgactgtacttgaaggagacattctggatgagccattcctggtctttggtgtcactcacagagagtccatcatgaatgtcaatgtgaaaggtacccagctactgttggaggcctgtgtccaagccagtgtgccagtcttcatctacaccagtagcatagaggtagccgggcccaactcctacaaggaaatcatccagaacggccacgaagaagagcctctggaaaacacatggcccactccatacccgtacagcaaaaagcttgctgagaaggctgtgctggcggctaatgggtggaatctaaaaggaggcccattcctttctgccagtataaatgaggccctgaacaacaatgggatcctgtcaagtgttggaaagttctctacagtcaacccagtctatgttggcaacgtggcctgggcccacattctggccttgagggctctgcgggaccccaagaaggccccaagtgtccgaggtcaattctattacatctcagatgacacgcctcaccaaagctatgataaccttaattacatcctgagcaaagagtttggcctccgccttgattccagatggagccttcctttaaccctgatgtactggattggcttcctgctggaagtagtgagcttcctactcagcccaatttactcctatcaaccccccttcaaccgccacacagtcacattatcaaatagtgtgttcaccttctcttacaagaaggctcagcgagatctggcgtataagccactctacagctgggaggaagccaagcagaaaaccgtggagtgggttggttcccttgtggaccggcacaaggagaccctgaagtccaagactcagtgatttaaggatgacagagatgtgcatgtgggtattgttaggaaatgtcatcaaactccacccacctggcttcatacagaaggcaacaggggcacaagcccaggtcctgctgcctctctttcacacaatgcccaacttactgtcttcttcatgtcatcaaaatctgcacagtcactggcccaaccagaactttctgtcctaatcatacaccagaagacaaacaatatgatttgctgttaccaaatctaatagagctccatttcccctcttaaatgagaaagcatttcttttctctttaatctcctattccttcacacagttcaacataaagagcaataaatgttttaatgcttaa

SEQ ID NO: 732285 - DNA, 1621 bp, Homo sapiens
gtaataagggctgagacacaagccacagagcataaagctccagtccttcctccagggatgagggcagtaaggacttggactcctctgtccagcttttaacaatctaagttacgccctcttctgggtcacgctagaatcagatctgctctccagcatcttctgtttcctggcaagtgtttcctgctactttggattggccacgatgggctggagctgccttgtgacaggagcaggagggcttctgggtcagaggatcgtccgcctgttggtggaagagaaggaactgaaggagatcagggccttggacaaggccttcagaccagaattgagagaggaattttctaagctccagaacaggaccaagctgactgtacttgaaggagacattctggatgagccattcctggtctttggtgtcactcacagagagtccatcatgaatgtcaatgtgaaaggtacccagctactgttggaggcctgtgtccaagccagtgtgccagtcttcatctacaccagtagcatagaggtagccgggcccaactcctacaaggaaatcatccagaacggccacgaagaagagcctctggaaaacacatggcccactccatacccgtacagcaaaaagcttgctgagaaggctgtgctggcggctaatgggtggaatctaaaaaaatggtgataccttgtacacttgtgcgttaagacccacatatatctatggggaagggaggcccattcctttctgccagtataaatgaggccctgaacaacaatgggatcctgtcaagtgttggaaagttctctacagtcaacccagtctatgttggcaacgtggcctgggcccacattctggccttgagggctctgcgggaccccaagaaggccccaagtgtccgaggtcaattctattacatctcagatgacacgcctcaccaaagctatgataaccttaattacatcctgagcaaagagtttggcctccgccttgattccagatggagccttcctttaaccctgatgtactggattggcttcctgctggaagtagtgagcttcctactcagcccaatttactcctatcaaccccccttcaaccgccacacagtcacattatcaaatagtgtgttcaccttctcttacaagaaggctcagcgagatctggcgtataagccactctacagctgggaggaagccaagcagaaaaccgtggagtgggttggttcccttgtggaccggcacaaggagaccctgaagtccaagactcagtgatttaaggatgacagagatgtgcatgtgggtattgttaggaaatgtcatcaaactccacccacctggcttcatacagaaggcaacaggggcacaagcccaggtcctgctgcctctctttcacacaatgcccaacttactgtcttcttcatgtcatcaaaatctgcacagtcactggcccaaccagaactttctgtcctaatcatacaccagaagacaaacaatatgatttgctgttaccaaatctaatagagctccatttcccctcttaaatgagaaagcatttcttttctctttaatctcctattccttcacacagttcaacataaagagcaataaatgttttaatgcttaa

SEQ ID NO: 732286 - DNA, 1619 bp, Homo sapiens
gtaataagggctgagacacaagccacagagcataaagctccagtccttcctccagggatgagggcagtaaggacttggactcctctgtccagcttttaacaatctaagttacgccctcttctgggtcacgctagaatcagatctgctctccagcatcttctgtttcctggcaagtgtttcctgctactttggattggccacgatgggctggagctgccttgtgacaggagcaggagggcttctgggtcagaggatcgtccgcctgttggtggaagagaaggaactgaaggagatcagggccttggacaaggccttcagaccagaattgagagaggaattttctaagctccagaacaggaccaagctgactgtacttgaaggagacattctggatgagccattcctgaaaagagcctgccaggacgtctcggtcgtcatccacaccgcctgtatcattgatgtctttggtgtcactcacagagagtccatcatgaatgtcaatgtgaaaggtacccagctactgttggaggcctgtgtccaagccagtgtgccagtcttcatctacaccagtagcatagaggtagccgggcccaactcctacaaggaaatcatccagaacggccacgaagaagagcctctggaaaacacatggcccactccatacccgtacagcaaaaagcttgctgagaaggctgtgctggcggctaatgggtggaatctaaaaggaggcccattcctttctgccagtataaatgaggccctgaacaacaatgggatcctgtcaagtgttggaaagttctctacagtcaacccagtctatgttggcaacgtggcctgggcccacattctggccttgagggctctgcgggaccccaagaaggccccaagtgtccgaggtcaattctattacatctcagatgacacgcctcaccaaagctatgataaccttaattacatcctgagcaaagagtttggcctccgccttgattccagatggagccttcctttaaccctgatgtactggattggcttcctgctggaagtagtgagcttcctactcagcccaatttactcctatcaaccccccttcaaccgccacacagtcacattatcaaatagtgtgttcaccttctcttacaagaaggctcagcgagatctggcgtataagccactctacagctgggaggaagccaagcagaaaaccgtggagtgggttggttcccttgtggaccggcacaaggagaccctgaagtccaagactcagtgatttaaggatgacagagatgtgcatgtgggtattgttaggaaatgtcatcaaactccacccacctggcttcatacagaaggcaacaggggcacaagcccaggtcctgctgcctctctttcacacaatgcccaacttactgtcttcttcatgtcatcaaaatctgcacagtcactggcccaaccagaactttctgtcctaatcatacaccagaagacaaacaatatgatttgctgttaccaaatctaatagagctccatttcccctcttaaatgagaaagcatttcttttctctttaatctcctattccttcacacagttcaacataaagagcaataaatgttttaatgcttaa

SEQ ID NO: 732287 - DNA, 1675 bp, Homo sapiens
gtaataagggctgagacacaagccacagagcataaagctccagtccttcctccagggatgagggcagtaaggacttggactcctctgtccagcttttaacaatctaagttacgccctcttctgggtcacgctagaatcagatctgctctccagcatcttctgtttcctggcaagtgtttcctgctactttggattggccacgatgggctggagctgccttgtgacaggagcaggagggcttctgggtcagaggatcgtccgcctgttggtggaagagaaggaactgaaggagatcagggccttggacaaggccttcagaccagaattgagagaggaattttctaagctccagaacaggaccaagctgactgtacttgaaggagacattctggatgagccattcctgaaaagagcctgccaggacgtctcggtcgtcatccacaccgcctgtatcattgatgtctttggtgtcactcacagagagtccatcatgaatgtcaatgtgaaaggtacccagctactgttggaggcctgtgtccaagccagtgtgccagtcttcatctacaccagtagcatagaggtagccgggcccaactcctacaaggaaatcatccagaacggccacgaagaagagcctctggaaaacacatggcccactccatacccgtacagcaaaaagcttgctgagaaggctgtgctggcggctaatgggtggaatctaaaaaaatggtgataccttgtacacttgtgcgttaagacccacatatatctatggggaagggaggcccattcctttctgccagtataaatgaggccctgaacaacaatgggatcctgtcaagtgttggaaagttctctacagtcaacccagtctatgttggcaacgtggcctgggcccacattctggccttgagggctctgcgggaccccaagaaggccccaagtgtccgaggtcaattctattacatctcagatgacacgcctcaccaaagctatgataaccttaattacatcctgagcaaagagtttggcctccgccttgattccagatggagccttcctttaaccctgatgtactggattggcttcctgctggaagtagtgagcttcctactcagcccaatttactcctatcaaccccccttcaaccgccacacagtcacattatcaaatagtgtgttcaccttctcttacaagaaggctcagcgagatctggcgtataagccactctacagctgggaggaagccaagcagaaaaccgtggagtgggttggttcccttgtggaccggcacaaggagaccctgaagtccaagactcagtgatttaaggatgacagagatgtgcatgtgggtattgttaggaaatgtcatcaaactccacccacctggcttcatacagaaggcaacaggggcacaagcccaggtcctgctgcctctctttcacacaatgcccaacttactgtcttcttcatgtcatcaaaatctgcacagtcactggcccaaccagaactttctgtcctaatcatacaccagaagacaaacaatatgatttgctgttaccaaatctaatagagctccatttcccctcttaaatgagaaagcatttcttttctctttaatctcctattccttcacacagttcaacataaagagcaataaatgttttaatgcttaa

SEQ ID NO: 732288 - DNA, 814 bp, Homo sapiens
  misc_feature (731)..(731): n is a, c, g, or t
  misc_feature (750)..(750): n is a, c, g, or t
  misc_feature (756)..(756): n is a, c, g, or t
gtaataagggctgagacacaagccacagagcataaagctccagtccttcctccagggatgagggcagtaaggacttggactcctctgtccagcttttaacaatctaagttacgccctcttctgggtcacgctagaatcagatctgctctccagcatcttctgtttcctggcaagtgtttcctgctactttggattggccacgatgggctggagctgccttgtgacaggagcaggagggcttctgggtcagaggatcgtccgcctgttggtggaagagaaggaactgaaggagatcagggccttggacaaggccttcagaccagaattgagagaggaattttctaagctccagaacaggaccaagctgactgtacttgaaggagacattctggatgagccattcctgaaaagagcctgccaggacgtctcggtcgtcatccacaccgcctgtatcattgatgtctttggtgtcactcacagagagtccatcatgaatgtcaatgtgaaaggtacccagctactgttggaggcctgtgtccaagccagtgtgccagtcttcatctacaccagtagcatagaggtagccgggcccaactcctacaaggaaatcatccagaacggccacgaagaagagcctctggaaaacacatggcccactccatacccgtacagcaaaaagcttgctgagaaggctgtgctggcggctaatgggtggaatctaaaaggggccnttccttttgccgttaaatnaggccngacacaaagggatccctcaaggggggaaagcttcccccaccacccttttgggacggga

SEQ ID NO: 732289 - DNA, 804 bp, Homo sapiens
  misc_feature (756)..(756): n is a, c, g, or t
  misc_feature (782)..(782): n is a, c, g, or t
gtaataagggctgagacacaagccacagagcataaagctccagtccttcctccagggatgagggcagtaaggacttggactcctctgtccagcttttaacaatctaagttacgccctcttctgggtcacgctagaatcagatctgctctccagcatcttctgtttcctggcaagtgtttcctgctactttggattggccacgatgggctggagctgccttgtgacaggagcaggagggcttctgggtcagaggatcgtccgcctgttggtggaagagaaggaactgaaggagatcagggccttggacaaggccttcagaccagaattgagagaggaattttctaagctccagaacaggaccaagctgactgtacttgaaggagacattctggatgagccattcctgaaaagagcctgccaggacgtctcggtcgtcatccacaccgcctgtatcattgatgtctttggtgtcactcacagagagtccatcatgaatgtcaatgtgaaaggtacccagctactgttggaggcctgtgtccaagccagtgtgccagtcttcatctacaccagtagcatagaggtagccgggcccaactcctacaaggaaatcatccagaacggccacgaagaagagcctctggaaaacacatggcccactccatacccgtacagcaaaaagcttgctgagaaggctgtgctggcggctaatgggtggaatctaaaaccattcctttctgcgttaatgaggcctgacancatggatctggcaggttggaagtctntcagcaccagcatgtgcacgga

SEQ ID NO: 732290 - DNA, 1621 bp, Homo sapiens
gtaataagggctgagacacaagccacagagcataaagctccagtccttcctccagggatgagggcagtaaggacttggactcctctgtccagcttttaacaatctaagttacgccctcttctgggtcacgctagaatcagatctgctctccagcatcttctgtttcctggcaagtgtttcctgctactttggattggccacgatgggctggagctgccttgtgacaggagcaggagggcttctgggtcagaggatcgtccgcctgttggtggaagagaaggaactgaaggagatcagggccttggacaaggccttcagaccagaattgagagaggaattttctaagctccagaacaggaccaagctgactgtacttgaaggagacattctggatgagccattcctgaaaagagcctgccaggacgtctcggtcgtcatccacaccgcctgtatcattgatgtctttggtgtcactcacagagagtccatcatgaatgtcaatgtgaaaggtacccagctactgttggaggcctgtgtccaagccagtgtgccagtcttcatctacaccagtagcatagaggtagccgggcccaactcctacaaggaaatcatccagaacggccacgaagaagagcctgctgtgctggcggctaatgggtggaatctaaaaaaatggtgataccttgtacacttgtgcgttaagacccacatatatctatggggaagggaggcccattcctttctgccagtataaatgaggccctgaacaacaatgggatcctgtcaagtgttggaaagttctctacagtcaacccagtctatgttggcaacgtggcctgggcccacattctggccttgagggctctgcgggaccccaagaaggccccaagtgtccgaggtcaattctattacatctcagatgacacgcctcaccaaagctatgataaccttaattacatcctgagcaaagagtttggcctccgccttgattccagatggagccttcctttaaccctgatgtactggattggcttcctgctggaagtagtgagcttcctactcagcccaatttactcctatcaaccccccttcaaccgccacacagtcacattatcaaatagtgtgttcaccttctcttacaagaaggctcagcgagatctggcgtataagccactctacagctgggaggaagccaagcagaaaaccgtggagtgggttggttcccttgtggaccggcacaaggagaccctgaagtccaagactcagtgatttaaggatgacagagatgtgcatgtgggtattgttaggaaatgtcatcaaactccacccacctggcttcatacagaaggcaacaggggcacaagcccaggtcctgctgcctctctttcacacaatgcccaacttactgtcttcttcatgtcatcaaaatctgcacagtcactggcccaaccagaactttctgtcctaatcatacaccagaagacaaacaatatgatttgctgttaccaaatctaatagagctccatttcccctcttaaatgagaaagcatttcttttctctttaatctcctattccttcacacagttcaacataaagagcaataaatgttttaatgcttaa

SEQ ID NO: 732291 - DNA, 1583 bp, Homo sapiens
cgaattcggccattatggccgggggaggcagtaaggacttggactcctctgtccagcttttaacaatctaagttacgccctcttctgggtcacgctagaatcagatctgctctccagcatcttctgtttcctggcaagtgtttcctgctactttggattggccacgatgggctggagctgccttgtgacaggagcaggagggcttctgggtcagaggatcgtccgcctgttggtggaagagaaggaactgaaggagatcagggccttggacaaggccttcagaccagaattgagagaggaattttctaagctccagaacaggaccaagctgactgtacttgaaggagacattctggatgagccattcctgaaaagagcctgccaggacgtctcggtcgtcatccacaccgcctgtatcattgatgtctttggtgtcactcacagagagtccatcatgaatgtcaatgtgaaaggtacccagctactgttggaggcctgtgtccaagccagtgtgccagtcttcatctacaccagtagcatagaggtagccgggcccaactcctacaaggaaatcatccagaacggccacgaagaagagcctctggaaaacacatggcccactccatacccgtacagcaaaaagcttgctgagaaggctgtgctggcggctaatgggtggaatctaaaaggaggcccattcctttctgccagtataaatgaggccctgaacaacaatgggatcctgtcaagtgttggaaagttctctacagtcaacccagtctatgttggcaacgtggcctgggcccacattctggccttgagggctctgcgggaccccaagaaggccccaagtgtccgaggtcaattctattacatctcagatgacacgcctcaccaaagctatgataaccttaattacatcctgagcaaagagtttggcctccgccttgattccagatggagccttcctttaaccctgatgtactggattggcttcctgctggaagtagtgagcttcctactcagcccaatttactcctatcaaccccccttcaaccgccacacagtcacattatcaaatagtgtgttcaccttctcttacaagaaggctcagcgagatctggcgtataagccactctacagctgggaggaagccaagcagaaaaccgtggagtgggttggttcccttgtggaccggcacaaggagaccctgaagtccaagactcagtgatttaaggatgacagagatgtgcatgtgggtattgttaggaaatgtcatcaaactccacccacctggcttcatacagaaggcaacaggggcacaagcccaggtcctgctgcctctctttcacacaatgcccaacttactgtcttcttcatgtcatcaaaatctgcacagtcactggcccaaccagaactttctgtcctaatcatacaccagaagacaaacaatatgatttgctgttaccaaatctaatagagctccatttcccctcttaaatgagaaagcatttcttttctctttaatctcctattccttcacacagttcaacataaagagcaataaatgttttaatgcttaa

SEQ ID NO: 732292 - DNA, 1639 bp, Homo sapiens
cgaattcggccattatggccgggggaggcagtaaggacttggactcctctgtccagcttttaacaatctaagttacgccctcttctgggtcacgctagaatcagatctgctctccagcatcttctgtttcctggcaagtgtttcctgctactttggattggccacgatgggctggagctgccttgtgacaggagcaggagggcttctgggtcagaggatcgtccgcctgttggtggaagagaaggaactgaaggagatcagggccttggacaaggccttcagaccagaattgagagaggaattttctaagctccagaacaggaccaagctgactgtacttgaaggagacattctggatgagccattcctgaaaagagcctgccaggacgtctcggtcgtcatccacaccgcctgtatcattgatgtctttggtgtcactcacagagagtccatcatgaatgtcaatgtgaaaggtacccagctactgttggaggcctgtgtccaagccagtgtgccagtcttcatctacaccagtagcatagaggtagccgggcccaactcctacaaggaaatcatccagaacggccacgaagaagagcctctggaaaacacatggcccactccatacccgtacagcaaaaagcttgctgagaaggctgtgctggcggctaatgggtggaatctaaaaaaatggtgataccttgtacacttgtgcgttaagacccacatatatctatggggaagggaggcccattcctttctgccagtataaatgaggccctgaacaacaatgggatcctgtcaagtgttggaaagttctctacagtcaacccagtctatgttggcaacgtggcctgggcccacattctggccttgagggctctgcgggaccccaagaaggccccaagtgtccgaggtcaattctattacatctcagatgacacgcctcaccaaagctatgataaccttaattacatcctgagcaaagagtttggcctccgccttgattccagatggagccttcctttaaccctgatgtactggattggcttcctgctggaagtagtgagcttcctactcagcccaatttactcctatcaaccccccttcaaccgccacacagtcacattatcaaatagtgtgttcaccttctcttacaagaaggctcagcgagatctggcgtataagccactctacagctgggaggaagccaagcagaaaaccgtggagtgggttggttcccttgtggaccggcacaaggagaccctgaagtccaagactcagtgatttaaggatgacagagatgtgcatgtgggtattgttaggaaatgtcatcaaactccacccacctggcttcatacagaaggcaacaggggcacaagcccaggtcctgctgcctctctttcacacaatgcccaacttactgtcttcttcatgtcatcaaaatctgcacagtcactggcccaaccagaactttctgtcctaatcatacaccagaagacaaacaatatgatttgctgttaccaaatctaatagagctccatttcccctcttaaatgagaaagcatttcttttctctttaatctcctattccttcacacagttcaacataaagagcaataaatgttttaatgcttaa

SEQ ID NO: 732293 - DNA, 778 bp, Homo sapiens
  misc_feature (695)..(695): n is a, c, g, or t
  misc_feature (714)..(714): n is a, c, g, or t
  misc_feature (720)..(720): n is a, c, g, or t
cgaattcggccattatggccgggggaggcagtaaggacttggactcctctgtccagcttttaacaatctaagttacgccctcttctgggtcacgctagaatcagatctgctctccagcatcttctgtttcctggcaagtgtttcctgctactttggattggccacgatgggctggagctgccttgtgacaggagcaggagggcttctgggtcagaggatcgtccgcctgttggtggaagagaaggaactgaaggagatcagggccttggacaaggccttcagaccagaattgagagaggaattttctaagctccagaacaggaccaagctgactgtacttgaaggagacattctggatgagccattcctgaaaagagcctgccaggacgtctcggtcgtcatccacaccgcctgtatcattgatgtctttggtgtcactcacagagagtccatcatgaatgtcaatgtgaaaggtacccagctactgttggaggcctgtgtccaagccagtgtgccagtcttcatctacaccagtagcatagaggtagccgggcccaactcctacaaggaaatcatccagaacggccacgaagaagagcctctggaaaacacatggcccactccatacccgtacagcaaaaagcttgctgagaaggctgtgctggcggctaatgggtggaatctaaaaggggccnttccttttgccgttaaatnaggccngacacaaagggatccctcaaggggggaaagcttcccccaccacccttttgggacggga

SEQ ID NO: 732294 - DNA, 768 bp, Homo sapiens
  misc_feature (720)..(720): n is a, c, g, or t
  misc_feature (746)..(746): n is a, c, g, or t
cgaattcggccattatggccgggggaggcagtaaggacttggactcctctgtccagcttttaacaatctaagttacgccctcttctgggtcacgctagaatcagatctgctctccagcatcttctgtttcctggcaagtgtttcctgctactttggattggccacgatgggctggagctgccttgtgacaggagcaggagggcttctgggtcagaggatcgtccgcctgttggtggaagagaaggaactgaaggagatcagggccttggacaaggccttcagaccagaattgagagaggaattttctaagctccagaacaggaccaagctgactgtacttgaaggagacattctggatgagccattcctgaaaagagcctgccaggacgtctcggtcgtcatccacaccgcctgtatcattgatgtctttggtgtcactcacagagagtccatcatgaatgtcaatgtgaaaggtacccagctactgttggaggcctgtgtccaagccagtgtgccagtcttcatctacaccagtagcatagaggtagccgggcccaactcctacaaggaaatcatccagaacggccacgaagaagagcctctggaaaacacatggcccactccatacccgtacagcaaaaagcttgctgagaaggctgtgctggcggctaatgggtggaatctaaaaccattcctttctgcgttaatgaggcctgacancatggatctggcaggttggaagtctntcagcaccagcatgtgcacgga

SEQ ID NO: 732295 - DNA, 657 bp, Homo sapiens
attgcacagagactttaaaagtggctaagaatacaaaataagtaaataaaaatgatcctttgcctaggaaattccttccttcttcgagggaagacactccagatacctccatgagctttgcttccacacagctcaggtgatgctgacaggtcttcccagcgcaggtgttatcagcagagggcacactccctccccagtcctccaccaggctccacaggaaatgccagggcaggatttaaaggaaggtttatcacccccactttatataactgggtaacagagtcatagccagaattggaagcagcttttccagggaacacacaatcaggaaaggagtgtgggtttccagcatctccccacaacccactgtttgctcgatgactccagggatggtctttgtgacaaagttttattaatccattgcaaaatgagaaaaataccagcaattctatgtatatctaagagtgtatattgcctatattcaactgtgaatttgtgtgtgtaacacaaattcttccactgccctttcttgcctaaggactgattgggactgttcatattctcagagtatagcctcctgattttttagattttaaatgatctgtctttaattgtattgatgacaaatcatactttttcaatatccttacttggcaa

SEQ ID NO: 732296 - DNA, 1140 bp, Homo sapiens
gcagtaaggacttggactcctctgtccagcttttaacaatctaagttacgccctcttctgggtcacgctagaatcagatctgctctccagcatcttctgtttcctggcaagtgtttcctgctactttggattggccacgatgggctggagctgccttgtgacaggaagcccagtctcttcaaaacacagctccccactgctggcctgaccctccacattcagactacccaaactccttttataaagcaactaattgcttttgagtctccagcactgtctaaaaaaacaaacaaaaaaaaaacctttccagtttctacatagccatacccctaagtaccgctatagttcaaggagtgtgctaagagtgaatagttttttgttttaattttgactttccacagctcccaaaaacaagggataagaaatgacaaggggagtgttagaggcgtctgtttcttaaaaccattatcactcccgggcttagaaaatacttcacaatgatggccatttcatgaggctgtctctccagaaactcaaattgcacagagactttaaaagtggctaagaatacaaaataagtaaataatacctccatgagctttgcttccacacagctcaggtgatgctgacaggtcttcccagcgcaggtgttatcagcagagggcacactccctccccagtcctccaccaggctccacaggaaatgccagggcaggatttaaaggaaggtttatcacccccactttatataactgggtaacagagtcatagccagaattggaagcagcttttccagggaacacacaatcaggaaaggagtgtgggtttccagcatctccccacaacccactgtttgctcgatgactccagggatggtctttgtgacaaagttttattaatccattgcaaaatgagaaaaataccagcaattctatgtatatctaagagtgtatattgcctatattcaactgtgaatttgtgtgtgtaacacaaattcttccactgccctttcttgcctaaggactgattgggactgttcatattctcagagtatagcctcctgattttttagattttaaatgatctgtctttaattgtattgatgacaaatcatactttttcaatatccttacttggcaa

SEQ ID NO: 732297 - DNA, 1278 bp, Homo sapiens
gtaataagggctgagacacaagccacagagcataaagctccagtccttcctccagggatgagggcagtaaggacttggactcctctgtccagcttttaacaatctaagttacgccctcttctgggtcacgctagaatcagatctgctctccagcatcttctgtttcctggcaagtgtttcctgctactttggattggccacgatgggctggagctgccttgtgacaggagcaggagggcttctgggtcagaggatcgtccgcctgttggtggaagagaaggaactgaaggagatcagggccttggacaaggccttcagaccagaattgagagaggaattttctaagctccagaacaggaccaagctgactgtacttgaaggagacattctggatgagccattcctgaaaagagcctgccaggacgtctcggtcgtcatccacaccgcctgtatcattgatgtctttggtgtcactcacagagagtccatcatgaatgtcaatgtgaaaggtacagtagcctggggaggagataaaacaagttggttaaatgaggatcagaaagaaggacaagaaagggaagagaagtcactccattgaacacctgctgagctcttggccaagtgcctttgctgatcactactgactggggagttcaaggctggtaacctcagttttttagatgagaaaactagggctgagagacagcaagtaacttgtccaaggccccaaaagtaagtaagtaagtaggagagttagactttaaactcactcctgtgtgactccaaaggctgtggaagctctttctactgtggccccaatcccccgggccagaatcagaccttccaggtgccaccatagtcatcattttgaaccttgtgtgtaggctgatgagaacattcagagtctttctgcccacctcaaagaagtcctctcaagagaactagcaaagctggttcacagaggtctgtcaggacagaattatccagcacatgccttcccataatattttcttaacaaaaagagtttcccagtgtccagaatacaatctcttcagctcaccacagggtctactattacagagccatttcctgccaggtgcccaaagtgcaccctcatttgatccacattttttaaaggaatcttgccatgcagtctcaccctctgattcccagagcccagtctcttcaaaacacagctccccactgctggcctgaccctccacattcagactacccaaactccttttataaagcaactaattgcttttgagtctccag

SEQ ID NO: 732298 - DNA, 1605 bp, Homo sapiens
tggaggaggagggagcaatgagtatgtggcaggagttcaagccctcttctgggtcacgctagaatcagatctgctctccagcatcttctgtttcctggcaagtgtttcctgctactttggattggccacgatgggctggagctgccttgtgacaggagcaggagggcttctgggtcagaggatcgtccgcctgttggtggaagagaaggaactgaaggagatcagggccttggacaaggccttcagaccagaattgagagaggaattttctaagctccagaacaggaccaagctgactgtacttgaaggagacattctggatgagccattcctgaaaagagcctgccaggacgtctcggtcgtcatccacaccgcctgtatcattgatgtctttggtgtcactcacagagagtccatcatgaatgtcaatgtgaaaggtacccagctactgttggaggcctgtgtccaagccagtgtgccagtcttcatctacaccagtagcatagaggtagccgggcccaactcctacaaggaaatcatccagaacggccacgaagaagagcctgctgtgctggcggctaatgggtggaatctaaaaaaatggtgataccttgtacacttgtgcgttaagacccacatatatctatggggaagggaggcccattcctttctgccagtataaatgaggccctgaacaacaatgggatcctgtcaagtgttggaaagttctctacagtcaacccagtctatgttggcaacgtggcctgggcccacattctggccttgagggctctgcgggaccccaagaaggccccaagtgtccgaggtcaattctattacatctcagatgacacgcctcaccaaagctatgataaccttaattacatcctgagcaaagagtttggcctccgccttgattccagatggagccttcctttaaccctgatgtactggattggcttcctgctggaagtagtgagcttcctactcagcccaatttactcctatcaaccccccttcaaccgccacacagtcacattatcaaatagtgtgttcaccttctcttacaagaaggctcagcgagatctggcgtataagccactctacagctgggaggaagccaagcagaaaaccgtggagtgggttggttcccttgtggaccggcacaaggagaccctgaagtccaagactcagtgatttaaggatgacagagatgtgcatgtgggtattgttaggaaatgtcatcaaactccacccacctggcttcatacagaaggcaacaggggcacaagcccaggtcctgctgcctctctttcacacaatgcccaacttactgtcttcttcatgtcatcaaaatctgcacagtcactggcccaaccagaactttctgtcctaatcatacaccagaagacaaacaatatgatttgctgttaccaaatctcagtggctgattctgaacaattgtggtctctcttaacttgaggttctcttttgactaatagagctccatttcccctcttaaatgagaaagcatttcttttctctttaatctcctattccttcacacagttcaacataaagagcaataaatgttttaatgcttaa

SEQ ID NO: 732299 - DNA, 1776 bp, Homo sapiens
  misc_feature (1614)..(1614): n is a, c, g, or t
  misc_feature (1619)..(1619): n is a, c, g, or t
  misc_feature (1640)..(1640): n is a, c, g, or t
  misc_feature (1649)..(1649): n is a, c, g, or t
  misc_feature (1661)..(1661): n is a, c, g, or t
  misc_feature (1666)..(1667): n is a, c, g, or t
  misc_feature (1671)..(1671): n is a, c, g, or t
  misc_feature (1674)..(1674): n is a, c, g, or t
  misc_feature (1678)..(1678): n is a, c, g, or t
  misc_feature (1694)..(1694): n is a, c, g, or t
  misc_feature (1701)..(1701): n is a, c, g, or t
  misc_feature (1707)..(1707): n is a, c, g, or t
  misc_feature (1712)..(1712): n is a, c, g, or t
tggaggaggagggagcaatgagtatgtggcaggagttcaagccctcttctgggtcacgctagaatcagatctgctctccagcatcttctgtttcctggcaagtgtttcctgctactttggattggccacgatgggctggagctgccttgtgacaggagcaggagggcttctgggtcagaggatcgtccgcctgttggtggaagagaaggaactgaaggagatcagggccttggacaaggccttcagaccagaattgagagaggaattttctaagctccagaacaggaccaagctgactgtacttgaaggagacattctggatgagccattcctgaaaagagcctgccaggacgtctcggtcgtcatccacaccgcctgtatcattgatgtctttggtgtcactcacagagagtccatcatgaatgtcaatgtgaaaggtacccagctactgttggaggcctgtgtccaagccagtgtgccagtcttcatctacaccagtagcatagaggtagccgggcccaactcctacaaggaaatcatccagaacggccacgaagaagagcctgctgtgctggcggctaatgggtggaatctaaaaaaatggtgataccttgtacacttgtgcgttaagacccacatatatctatggggaagggaggcccattcctttctgccagtataaatgaggccctgaacaacaatgggatcctgtcaagtgttggaaagttctctacagtcaacccagtctatgttggcaacgtggcctgggcccacattctggccttgagggctctgcgggaccccaagaaggccccaagtgtccgaggtcaattctattacatctcagatgacacgcctcaccaaagctatgataaccttaattacatcctgagcaaagagtttggcctccgccttgattccagatggagccttcctttaaccctgatgtactggattggcttcctgctggaagtagtgagcttcctactcagcccaatttactcctatcaaccccccttcaaccgccacacagtcacattatcaaatagtgtgttcaccttctcttacaagaaggctcagcgagatctggcgtataagccactctacagctgggaggaagccaagcagaaaaccgtggagtgggttggttcccttgtggaccggcacaaggagaccctgaagtccaagactcagtgatttaaggatgacagagatgtgcatgtgggtattgttaggaaatgtcatcaaactccacccacctggcttcatacagaaggcaacaggggcacaagcccaggtcctgctgcctctctttcacacaatgcccaacttactgtcttcttcatgtcatcaaaatctgcacagtcactggcccaaccagaactttctgtcctaatcatacaccagaagacaaacaatatgatttgctgttaccaaatctcagtggctgattctgaacaattgtggtctctcttaacttgaggttctcttttgactaatagagctccatttcccctcttaaatgagaaagcatttcttttctctttaatctcctattccttcacacagttcaacataaagagcaataaatgttttaatgcttaaaaaaaaaanaacanaccaaaaaaaaaaaaactcgnggggggccngtacccatttgncctanngggngcngttnacattaattggccggngtttaanacgggngactnggaaaaccttggcttgacccaacttaaatggctttgagcctttaccaacagttgggcaacctta

SEQ ID NO: 732300 - DNA, 1551 bp, Homo sapiens
tggaggaggagggagcaatgagtatgtggcaggagttcaagccctcttctgggtcacgctagaatcagatctgctctccagcatcttctgtttcctggcaagtgtttcctgctactttggattggccacgatgggctggagctgccttgtgacaggagcaggagggcttctgggtcagaggatcgtccgcctgttggtggaagagaaggaactgaaggagatcagggccttggacaaggccttcagaccagaattgagagaggaattttctaagctccagaacaggaccaagctgactgtacttgaaggagacattctggatgagccattcctgaaaagagcctgccaggacgtctcggtcgtcatccacaccgcctgtatcattgatgtctttggtgtcactcacagagagtccatcatgaatgtcaatgtgaaaggtacccagctactgttggaggcctgtgtccaagccagtgtgccagtcttcatctacaccagtagcatagaggtagccgggcccaactcctacaaggaaatcatccagaacggccacgaagaagagcctgctgtgctggcggctaatgggtggaatctaaaaaaatggtgataccttgtacacttgtgcgttaagacccacatatatctatggggaagggaggcccattcctttctgccagtataaatgaggccctgaacaacaatgggatcctgtcaagtgttggaaagttctctacagtcaacccagtctatgttggcaacgtggcctgggcccacattctggccttgagggctctgcgggaccccaagaaggccccaagtgtccgaggtcaattctattacatctcagatgacacgcctcaccaaagctatgataaccttaattacatcctgagcaaagagtttggcctccgccttgattccagatggagccttcctttaaccctgatgtactggattggcttcctgctggaagtagtgagcttcctactcagcccaatttactcctatcaaccccccttcaaccgccacacagtcacattatcaaatagtgtgttcaccttctcttacaagaaggctcagcgagatctggcgtataagccactctacagctgggaggaagccaagcagaaaaccgtggagtgggttggttcccttgtggaccggcacaaggagaccctgaagtccaagactcagtgatttaaggatgacagagatgtgcatgtgggtattgttaggaaatgtcatcaaactccacccacctggcttcatacagaaggcaacaggggcacaagcccaggtcctgctgcctctctttcacacaatgcccaacttactgtcttcttcatgtcatcgaagacaaacaatatgatttgctgttaccaaatctcagtggctgattctgaacaattgtggtctctcttaacttgaggttctcttttgactaatagagctccatttcccctcttaaatgagaaagcatttcttttctctttaatctcctattccttcacacagttcaacataaagagcaataaatgttttaatgcttaa

SEQ ID NO: 732301 - DNA, 1549 bp, Homo sapiens
tggaggaggagggagcaatgagtatgtggcaggagttcaagccctcttctgggtcacgctagaatcagatctgctctccagcatcttctgtttcctggcaagtgtttcctgctactttggattggccacgatgggctggagctgccttgtgacaggagcaggagggcttctgggtcagaggatcgtccgcctgttggtggaagagaaggaactgaaggagatcagggccttggacaaggccttcagaccagaattgagagaggaattttctaagctccagaacaggaccaagctgactgtacttgaaggagacattctggatgagccattcctgaaaagagcctgccaggacgtctcggtcgtcatccacaccgcctgtatcattgatgtctttggtgtcactcacagagagtccatcatgaatgtcaatgtgaaaggtacccagctactgttggaggcctgtgtccaagccagtgtgccagtcttcatctacaccagtagcatagaggtagccgggcccaactcctacaaggaaatcatccagaacggccacgaagaagagcctgctgtgctggcggctaatgggtggaatctaaaaaaatggtgataccttgtacacttgtgcgttaagacccacatatatctatggggaagggaggcccattcctttctgccagtataaatgaggccctgaacaacaatgggatcctgtcaagtgttggaaagttctctacagtcaacccagtctatgttggcaacgtggcctgggcccacattctggccttgagggctctgcgggaccccaagaaggccccaagtgtccgaggtcaattctattacatctcagatgacacgcctcaccaaagctatgataaccttaattacatcctgagcaaagagtttggcctccgccttgattccagatggagccttcctttaaccctgatgtactggattggcttcctgctggaagtagtgagcttcctactcagcccaatttactcctatcaaccccccttcaaccgccacacagtcacattatcaaatagtgtgttcaccttctcttacaagaaggctcagcgagatctggcgtataagccactctacagctgggaggaagccaagcagaaaaccgtggagtgggttggttcccttgtggaccggcacaaggagaccctgaagtccaagactcagtgatttaaggatgacagagatgtgcatgtgggtattgttaggaaatgtcatcaaactccacccacctggcttcatacagaaggcaacaggggcacaagcccaggtcctgctgcctctctttcacacaatgcccaacttactgtcttcttcatgtcatcaaaatctgcacagtcactggcccaaccagaactttctgtcctaatcatacaccagaagacaaacaatatgatttgctgttaccaaatctaatagagctccatttcccctcttaaatgagaaagcatttcttttctctttaatctcctattccttcacacagttcaacataaagagcaataaatgttttaatgcttaa

SEQ ID NO: 732302 - DNA, 1659 bp, Homo sapiens
tggaggaggagggagcaatgagtatgtggcaggagttcaagccctcttctgggtcacgctagaatcagatctgctctccagcatcttctgtttcctggcaagtgtttcctgctactttggattggccacgatgggctggagctgccttgtgacaggagcaggagggcttctgggtcagaggatcgtccgcctgttggtggaagagaaggaactgaaggagatcagggccttggacaaggccttcagaccagaattgagagaggaattttctaagctccagaacaggaccaagctgactgtacttgaaggagacattctggatgagccattcctgaaaagagcctgccaggacgtctcggtcgtcatccacaccgcctgtatcattgatgtctttggtgtcactcacagagagtccatcatgaatgtcaatgtgaaaggtacccagctactgttggaggcctgtgtccaagccagtgtgccagtcttcatctacaccagtagcatagaggtagccgggcccaactcctacaaggaaatcatccagaacggccacgaagaagagcctctggaaaacacatggcccactccatacccgtacagcaaaaagcttgctgagaaggctgtgctggcggctaatgggtggaatctaaaaaaatggtgataccttgtacacttgtgcgttaagacccacatatatctatggggaagggaggcccattcctttctgccagtataaatgaggccctgaacaacaatgggatcctgtcaagtgttggaaagttctctacagtcaacccagtctatgttggcaacgtggcctgggcccacattctggccttgagggctctgcgggaccccaagaaggccccaagtgtccgaggtcaattctattacatctcagatgacacgcctcaccaaagctatgataaccttaattacatcctgagcaaagagtttggcctccgccttgattccagatggagccttcctttaaccctgatgtactggattggcttcctgctggaagtagtgagcttcctactcagcccaatttactcctatcaaccccccttcaaccgccacacagtcacattatcaaatagtgtgttcaccttctcttacaagaaggctcagcgagatctggcgtataagccactctacagctgggaggaagccaagcagaaaaccgtggagtgggttggttcccttgtggaccggcacaaggagaccctgaagtccaagactcagtgatttaaggatgacagagatgtgcatgtgggtattgttaggaaatgtcatcaaactccacccacctggcttcatacagaaggcaacaggggcacaagcccaggtcctgctgcctctctttcacacaatgcccaacttactgtcttcttcatgtcatcaaaatctgcacagtcactggcccaaccagaactttctgtcctaatcatacaccagaagacaaacaatatgatttgctgttaccaaatctcagtggctgattctgaacaattgtggtctctcttaacttgaggttctcttttgactaatagagctccatttcccctcttaaatgagaaagcatttcttttctctttaatctcctattccttcacacagttcaacataaagagcaataaatgttttaatgcttaa

SEQ ID NO: 732303 - DNA, 1830 bp, Homo sapiens
  misc_feature (1668)..(1668): n is a, c, g, or t
  misc_feature (1673)..(1673): n is a, c, g, or t
  misc_feature (1694)..(1694): n is a, c, g, or t
  misc_feature (1703)..(1703): n is a, c, g, or t
  misc_feature (1715)..(1715): n is a, c, g, or t
  misc_feature (1720)..(1721): n is a, c, g, or t
  misc_feature (1725)..(1725): n is a, c, g, or t
  misc_feature (1728)..(1728): n is a, c, g, or t
  misc_feature (1732)..(1732): n is a, c, g, or t
  misc_feature (1748)..(1748): n is a, c, g, or t
  misc_feature (1755)..(1755): n is a, c, g, or t
  misc_feature (1761)..(1761): n is a, c, g, or t
  misc_feature (1766)..(1766): n is a, c, g, or t
tggaggaggagggagcaatgagtatgtggcaggagttcaagccctcttctgggtcacgctagaatcagatctgctctccagcatcttctgtttcctggcaagtgtttcctgctactttggattggccacgatgggctggagctgccttgtgacaggagcaggagggcttctgggtcagaggatcgtccgcctgttggtggaagagaaggaactgaaggagatcagggccttggacaaggccttcagaccagaattgagagaggaattttctaagctccagaacaggaccaagctgactgtacttgaaggagacattctggatgagccattcctgaaaagagcctgccaggacgtctcggtcgtcatccacaccgcctgtatcattgatgtctttggtgtcactcacagagagtccatcatgaatgtcaatgtgaaaggtacccagctactgttggaggcctgtgtccaagccagtgtgccagtcttcatctacaccagtagcatagaggtagccgggcccaactcctacaaggaaatcatccagaacggccacgaagaagagcctctggaaaacacatggcccactccatacccgtacagcaaaaagcttgctgagaaggctgtgctggcggctaatgggtggaatctaaaaaaatggtgataccttgtacacttgtgcgttaagacccacatatatctatggggaagggaggcccattcctttctgccagtataaatgaggccctgaacaacaatgggatcctgtcaagtgttggaaagttctctacagtcaacccagtctatgttggcaacgtggcctgggcccacattctggccttgagggctctgcgggaccccaagaaggccccaagtgtccgaggtcaattctattacatctcagatgacacgcctcaccaaagctatgataaccttaattacatcctgagcaaagagtttggcctccgccttgattccagatggagccttcctttaaccctgatgtactggattggcttcctgctggaagtagtgagcttcctactcagcccaatttactcctatcaaccccccttcaaccgccacacagtcacattatcaaatagtgtgttcaccttctcttacaagaaggctcagcgagatctggcgtataagccactctacagctgggaggaagccaagcagaaaaccgtggagtgggttggttcccttgtggaccggcacaaggagaccctgaagtccaagactcagtgatttaaggatgacagagatgtgcatgtgggtattgttaggaaatgtcatcaaactccacccacctggcttcatacagaaggcaacaggggcacaagcccaggtcctgctgcctctctttcacacaatgcccaacttactgtcttcttcatgtcatcaaaatctgcacagtcactggcccaaccagaactttctgtcctaatcatacaccagaagacaaacaatatgatttgctgttaccaaatctcagtggctgattctgaacaattgtggtctctcttaacttgaggttctcttttgactaatagagctccatttcccctcttaaatgagaaagcatttcttttctctttaatctcctattccttcacacagttcaacataaagagcaataaatgttttaatgcttaaaaaaaaaanaacanaccaaaaaaaaaaaaactcgnggggggccngtacccatttgncctanngggngcngttnacattaattggccggngtttaanacgggngactnggaaaaccttggcttgacccaacttaaatggctttgagcctttaccaacagttgggcaacctta

SEQ ID NO: 732304 - DNA, 1605 bp, Homo sapiens
tggaggaggagggagcaatgagtatgtggcaggagttcaagccctcttctgggtcacgctagaatcagatctgctctccagcatcttctgtttcctggcaagtgtttcctgctactttggattggccacgatgggctggagctgccttgtgacaggagcaggagggcttctgggtcagaggatcgtccgcctgttggtggaagagaaggaactgaaggagatcagggccttggacaaggccttcagaccagaattgagagaggaattttctaagctccagaacaggaccaagctgactgtacttgaaggagacattctggatgagccattcctgaaaagagcctgccaggacgtctcggtcgtcatccacaccgcctgtatcattgatgtctttggtgtcactcacagagagtccatcatgaatgtcaatgtgaaaggtacccagctactgttggaggcctgtgtccaagccagtgtgccagtcttcatctacaccagtagcatagaggtagccgggcccaactcctacaaggaaatcatccagaacggccacgaagaagagcctctggaaaacacatggcccactccatacccgtacagcaaaaagcttgctgagaaggctgtgctggcggctaatgggtggaatctaaaaaaatggtgataccttgtacacttgtgcgttaagacccacatatatctatggggaagggaggcccattcctttctgccagtataaatgaggccctgaacaacaatgggatcctgtcaagtgttggaaagttctctacagtcaacccagtctatgttggcaacgtggcctgggcccacattctggccttgagggctctgcgggaccccaagaaggccccaagtgtccgaggtcaattctattacatctcagatgacacgcctcaccaaagctatgataaccttaattacatcctgagcaaagagtttggcctccgccttgattccagatggagccttcctttaaccctgatgtactggattggcttcctgctggaagtagtgagcttcctactcagcccaatttactcctatcaaccccccttcaaccgccacacagtcacattatcaaatagtgtgttcaccttctcttacaagaaggctcagcgagatctggcgtataagccactctacagctgggaggaagccaagcagaaaaccgtggagtgggttggttcccttgtggaccggcacaaggagaccctgaagtccaagactcagtgatttaaggatgacagagatgtgcatgtgggtattgttaggaaatgtcatcaaactccacccacctggcttcatacagaaggcaacaggggcacaagcccaggtcctgctgcctctctttcacacaatgcccaacttactgtcttcttcatgtcatcgaagacaaacaatatgatttgctgttaccaaatctcagtggctgattctgaacaattgtggtctctcttaacttgaggttctcttttgactaatagagctccatttcccctcttaaatgagaaagcatttcttttctctttaatctcctattccttcacacagttcaacataaagagcaataaatgttttaatgcttaa

SEQ ID NO: 732305 - DNA, 1603 bp, Homo sapiens
tggaggaggagggagcaatgagtatgtggcaggagttcaagccctcttctgggtcacgctagaatcagatctgctctccagcatcttctgtttcctggcaagtgtttcctgctactttggattggccacgatgggctggagctgccttgtgacaggagcaggagggcttctgggtcagaggatcgtccgcctgttggtggaagagaaggaactgaaggagatcagggccttggacaaggccttcagaccagaattgagagaggaattttctaagctccagaacaggaccaagctgactgtacttgaaggagacattctggatgagccattcctgaaaagagcctgccaggacgtctcggtcgtcatccacaccgcctgtatcattgatgtctttggtgtcactcacagagagtccatcatgaatgtcaatgtgaaaggtacccagctactgttggaggcctgtgtccaagccagtgtgccagtcttcatctacaccagtagcatagaggtagccgggcccaactcctacaaggaaatcatccagaacggccacgaagaagagcctctggaaaacacatggcccactccatacccgtacagcaaaaagcttgctgagaaggctgtgctggcggctaatgggtggaatctaaaaaaatggtgataccttgtacacttgtgcgttaagacccacatatatctatggggaagggaggcccattcctttctgccagtataaatgaggccctgaacaacaatgggatcctgtcaagtgttggaaagttctctacagtcaacccagtctatgttggcaacgtggcctgggcccacattctggccttgagggctctgcgggaccccaagaaggccccaagtgtccgaggtcaattctattacatctcagatgacacgcctcaccaaagctatgataaccttaattacatcctgagcaaagagtttggcctccgccttgattccagatggagccttcctttaaccctgatgtactggattggcttcctgctggaagtagtgagcttcctactcagcccaatttactcctatcaaccccccttcaaccgccacacagtcacattatcaaatagtgtgttcaccttctcttacaagaaggctcagcgagatctggcgtataagccactctacagctgggaggaagccaagcagaaaaccgtggagtgggttggttcccttgtggaccggcacaaggagaccctgaagtccaagactcagtgatttaaggatgacagagatgtgcatgtgggtattgttaggaaatgtcatcaaactccacccacctggcttcatacagaaggcaacaggggcacaagcccaggtcctgctgcctctctttcacacaatgcccaacttactgtcttcttcatgtcatcaaaatctgcacagtcactggcccaaccagaactttctgtcctaatcatacaccagaagacaaacaatatgatttgctgttaccaaatctaatagagctccatttcccctcttaaatgagaaagcatttcttttctctttaatctcctattccttcacacagttcaacataaagagcaataaatgttttaatgcttaa

SEQ ID NO: 732306 - DNA, 1503 bp, Homo sapiens
aaaataaggcatctgctgagtgtataaccattttacctcttgtttttagccctcttctgggtcacgctagaatcagatctgctctccagcatcttctgtttcctggcaagtgtttcctgctactttggattggccacgatgggctggagctgccttgtgacaggagcaggagggcttctgggtcagaggatcgtccgcctgttggtggaagagaaggaactgaaggagatcagggccttggacaaggccttcagaccagaattgagagaggaattttctaagctccagaacaggaccaagctgactgtacttgaaggagacattctggatgagccattcctggtctttggtgtcactcacagagagtccatcatgaatgtcaatgtgaaaggtacccagctactgttggaggcctgtgtccaagccagtgtgccagtcttcatctacaccagtagcatagaggtagccgggcccaactcctacaaggaaatcatccagaacggccacgaagaagagcctctggaaaacacatggcccactccatacccgtacagcaaaaagcttgctgagaaggctgtgctggcggctaatgggtggaatctaaaaggaggcccattcctttctgccagtataaatgaggccctgaacaacaatgggatcctgtcaagtgttggaaagttctctacagtcaacccagtctatgttggcaacgtggcctgggcccacattctggccttgagggctctgcgggaccccaagaaggccccaagtgtccgaggtcaattctattacatctcagatgacacgcctcaccaaagctatgataaccttaattacatcctgagcaaagagtttggcctccgccttgattccagatggagccttcctttaaccctgatgtactggattggcttcctgctggaagtagtgagcttcctactcagcccaatttactcctatcaaccccccttcaaccgccacacagtcacattatcaaatagtgtgttcaccttctcttacaagaaggctcagcgagatctggcgtataagccactctacagctgggaggaagccaagcagaaaaccgtggagtgggttggttcccttgtggaccggcacaaggagaccctgaagtccaagactcagtgatttaaggatgacagagatgtgcatgtgggtattgttaggaaatgtcatcaaactccacccacctggcttcatacagaaggcaacaggggcacaagcccaggtcctgctgcctctctttcacacaatgcccaacttactgtcttcttcatgtcatcgaagacaaacaatatgatttgctgttaccaaatctcagtggctgattctgaacaattgtggtctctcttaacttgaggttctcttttgactaatagagctccatttcccctcttaaatgagaaagcatttcttttctctttaatctcctattccttcacacagttcaacataaagagcaataaatgttttaatgcttaa

SEQ ID NO: 732307 - DNA, 1557 bp, Homo sapiens
aaaataaggcatctgctgagtgtataaccattttacctcttgtttttagccctcttctgggtcacgctagaatcagatctgctctccagcatcttctgtttcctggcaagtgtttcctgctactttggattggccacgatgggctggagctgccttgtgacaggagcaggagggcttctgggtcagaggatcgtccgcctgttggtggaagagaaggaactgaaggagatcagggccttggacaaggccttcagaccagaattgagagaggaattttctaagctccagaacaggaccaagctgactgtacttgaaggagacattctggatgagccattcctggtctttggtgtcactcacagagagtccatcatgaatgtcaatgtgaaaggtacccagctactgttggaggcctgtgtccaagccagtgtgccagtcttcatctacaccagtagcatagaggtagccgggcccaactcctacaaggaaatcatccagaacggccacgaagaagagcctctggaaaacacatggcccactccatacccgtacagcaaaaagcttgctgagaaggctgtgctggcggctaatgggtggaatctaaaaggaggcccattcctttctgccagtataaatgaggccctgaacaacaatgggatcctgtcaagtgttggaaagttctctacagtcaacccagtctatgttggcaacgtggcctgggcccacattctggccttgagggctctgcgggaccccaagaaggccccaagtgtccgaggtcaattctattacatctcagatgacacgcctcaccaaagctatgataaccttaattacatcctgagcaaagagtttggcctccgccttgattccagatggagccttcctttaaccctgatgtactggattggcttcctgctggaagtagtgagcttcctactcagcccaatttactcctatcaaccccccttcaaccgccacacagtcacattatcaaatagtgtgttcaccttctcttacaagaaggctcagcgagatctggcgtataagccactctacagctgggaggaagccaagcagaaaaccgtggagtgggttggttcccttgtggaccggcacaaggagaccctgaagtccaagactcagtgatttaaggatgacagagatgtgcatgtgggtattgttaggaaatgtcatcaaactccacccacctggcttcatacagaaggcaacaggggcacaagcccaggtcctgctgcctctctttcacacaatgcccaacttactgtcttcttcatgtcatcaaaatctgcacagtcactggcccaaccagaactttctgtcctaatcatacaccagaagacaaacaatatgatttgctgttaccaaatctcagtggctgattctgaacaattgtggtctctcttaacttgaggttctcttttgactaatagagctccatttcccctcttaaatgagaaagcatttcttttctctttaatctcctattccttcacacagttcaacataaagagcaataaatgttttaatgcttaa

SEQ ID NO: 732308 - DNA, 1728 bp, Homo sapiens
  misc_feature (1566)..(1566): n is a, c, g, or t
  misc_feature (1571)..(1571): n is a, c, g, or t
  misc_feature (1592)..(1592): n is a, c, g, or t
  misc_feature (1601)..(1601): n is a, c, g, or t
  misc_feature (1613)..(1613): n is a, c, g, or t
  misc_feature (1618)..(1619): n is a, c, g, or t
  misc_feature (1623)..(1623): n is a, c, g, or t
  misc_feature (1626)..(1626): n is a, c, g, or t
  misc_feature (1630)..(1630): n is a, c, g, or t
  misc_feature (1646)..(1646): n is a, c, g, or t
  misc_feature (1653)..(1653): n is a, c, g, or t
  misc_feature (1659)..(1659): n is a, c, g, or t
  misc_feature (1664)..(1664): n is a, c, g, or t
aaaataaggcatctgctgagtgtataaccattttacctcttgtttttagccctcttctgggtcacgctagaatcagatctgctctccagcatcttctgtttcctggcaagtgtttcctgctactttggattggccacgatgggctggagctgccttgtgacaggagcaggagggcttctgggtcagaggatcgtccgcctgttggtggaagagaaggaactgaaggagatcagggccttggacaaggccttcagaccagaattgagagaggaattttctaagctccagaacaggaccaagctgactgtacttgaaggagacattctggatgagccattcctggtctttggtgtcactcacagagagtccatcatgaatgtcaatgtgaaaggtacccagctactgttggaggcctgtgtccaagccagtgtgccagtcttcatctacaccagtagcatagaggtagccgggcccaactcctacaaggaaatcatccagaacggccacgaagaagagcctctggaaaacacatggcccactccatacccgtacagcaaaaagcttgctgagaaggctgtgctggcggctaatgggtggaatctaaaaggaggcccattcctttctgccagtataaatgaggccctgaacaacaatgggatcctgtcaagtgttggaaagttctctacagtcaacccagtctatgttggcaacgtggcctgggcccacattctggccttgagggctctgcgggaccccaagaaggccccaagtgtccgaggtcaattctattacatctcagatgacacgcctcaccaaagctatgataaccttaattacatcctgagcaaagagtttggcctccgccttgattccagatggagccttcctttaaccctgatgtactggattggcttcctgctggaagtagtgagcttcctactcagcccaatttactcctatcaaccccccttcaaccgccacacagtcacattatcaaatagtgtgttcaccttctcttacaagaaggctcagcgagatctggcgtataagccactctacagctgggaggaagccaagcagaaaaccgtggagtgggttggttcccttgtggaccggcacaaggagaccctgaagtccaagactcagtgatttaaggatgacagagatgtgcatgtgggtattgttaggaaatgtcatcaaactccacccacctggcttcatacagaaggcaacaggggcacaagcccaggtcctgctgcctctctttcacacaatgcccaacttactgtcttcttcatgtcatcaaaatctgcacagtcactggcccaaccagaactttctgtcctaatcatacaccagaagacaaacaatatgatttgctgttaccaaatctcagtggctgattctgaacaattgtggtctctcttaacttgaggttctcttttgactaatagagctccatttcccctcttaaatgagaaagcatttcttttctctttaatctcctattccttcacacagttcaacataaagagcaataaatgttttaatgcttaaaaaaaaaanaacanaccaaaaaaaaaaaaactcgnggggggccngtacccatttgncctanngggngcngttnacattaattggccggngtttaanacgggngactnggaaaaccttggcttgacccaacttaaatggctttgagcctttaccaacagttgggcaacctta

SEQ ID NO: 732309 - DNA, 1501 bp, Homo sapiens
aaaataaggcatctgctgagtgtataaccattttacctcttgtttttagccctcttctgggtcacgctagaatcagatctgctctccagcatcttctgtttcctggcaagtgtttcctgctactttggattggccacgatgggctggagctgccttgtgacaggagcaggagggcttctgggtcagaggatcgtccgcctgttggtggaagagaaggaactgaaggagatcagggccttggacaaggccttcagaccagaattgagagaggaattttctaagctccagaacaggaccaagctgactgtacttgaaggagacattctggatgagccattcctggtctttggtgtcactcacagagagtccatcatgaatgtcaatgtgaaaggtacccagctactgttggaggcctgtgtccaagccagtgtgccagtcttcatctacaccagtagcatagaggtagccgggcccaactcctacaaggaaatcatccagaacggccacgaagaagagcctctggaaaacacatggcccactccatacccgtacagcaaaaagcttgctgagaaggctgtgctggcggctaatgggtggaatctaaaaggaggcccattcctttctgccagtataaatgaggccctgaacaacaatgggatcctgtcaagtgttggaaagttctctacagtcaacccagtctatgttggcaacgtggcctgggcccacattctggccttgagggctctgcgggaccccaagaaggccccaagtgtccgaggtcaattctattacatctcagatgacacgcctcaccaaagctatgataaccttaattacatcctgagcaaagagtttggcctccgccttgattccagatggagccttcctttaaccctgatgtactggattggcttcctgctggaagtagtgagcttcctactcagcccaatttactcctatcaaccccccttcaaccgccacacagtcacattatcaaatagtgtgttcaccttctcttacaagaaggctcagcgagatctggcgtataagccactctacagctgggaggaagccaagcagaaaaccgtggagtgggttggttcccttgtggaccggcacaaggagaccctgaagtccaagactcagtgatttaaggatgacagagatgtgcatgtgggtattgttaggaaatgtcatcaaactccacccacctggcttcatacagaaggcaacaggggcacaagcccaggtcctgctgcctctctttcacacaatgcccaacttactgtcttcttcatgtcatcaaaatctgcacagtcactggcccaaccagaactttctgtcctaatcatacaccagaagacaaacaatatgatttgctgttaccaaatctaatagagctccatttcccctcttaaatgagaaagcatttcttttctctttaatctcctattccttcacacagttcaacataaagagcaataaatgttttaatgcttaa

SEQ ID NO: 732310 - DNA, 1613 bp, Homo sapiens
aaaataaggcatctgctgagtgtataaccattttacctcttgtttttagccctcttctgggtcacgctagaatcagatctgctctccagcatcttctgtttcctggcaagtgtttcctgctactttggattggccacgatgggctggagctgccttgtgacaggagcaggagggcttctgggtcagaggatcgtccgcctgttggtggaagagaaggaactgaaggagatcagggccttggacaaggccttcagaccagaattgagagaggaattttctaagctccagaacaggaccaagctgactgtacttgaaggagacattctggatgagccattcctggtctttggtgtcactcacagagagtccatcatgaatgtcaatgtgaaaggtacccagctactgttggaggcctgtgtccaagccagtgtgccagtcttcatctacaccagtagcatagaggtagccgggcccaactcctacaaggaaatcatccagaacggccacgaagaagagcctctggaaaacacatggcccactccatacccgtacagcaaaaagcttgctgagaaggctgtgctggcggctaatgggtggaatctaaaaaaatggtgataccttgtacacttgtgcgttaagacccacatatatctatggggaagggaggcccattcctttctgccagtataaatgaggccctgaacaacaatgggatcctgtcaagtgttggaaagttctctacagtcaacccagtctatgttggcaacgtggcctgggcccacattctggccttgagggctctgcgggaccccaagaaggccccaagtgtccgaggtcaattctattacatctcagatgacacgcctcaccaaagctatgataaccttaattacatcctgagcaaagagtttggcctccgccttgattccagatggagccttcctttaaccctgatgtactggattggcttcctgctggaagtagtgagcttcctactcagcccaatttactcctatcaaccccccttcaaccgccacacagtcacattatcaaatagtgtgttcaccttctcttacaagaaggctcagcgagatctggcgtataagccactctacagctgggaggaagccaagcagaaaaccgtggagtgggttggttcccttgtggaccggcacaaggagaccctgaagtccaagactcagtgatttaaggatgacagagatgtgcatgtgggtattgttaggaaatgtcatcaaactccacccacctggcttcatacagaaggcaacaggggcacaagcccaggtcctgctgcctctctttcacacaatgcccaacttactgtcttcttcatgtcatcaaaatctgcacagtcactggcccaaccagaactttctgtcctaatcatacaccagaagacaaacaatatgatttgctgttaccaaatctcagtggctgattctgaacaattgtggtctctcttaacttgaggttctcttttgactaatagagctccatttcccctcttaaatgagaaagcatttcttttctctttaatctcctattccttcacacagttcaacataaagagcaataaatgttttaatgcttaa

SEQ ID NO: 732311 - DNA, 1784 bp, Homo sapiens
  misc_feature (1622)..(1622): n is a, c, g, or t
  misc_feature (1627)..(1627): n is a, c, g, or t
  misc_feature (1648)..(1648): n is a, c, g, or t
  misc_feature (1657)..(1657): n is a, c, g, or t
  misc_feature (1669)..(1669): n is a, c, g, or t
  misc_feature (1674)..(1675): n is a, c, g, or t
  misc_feature (1679)..(1679): n is a, c, g, or t
  misc_feature (1682)..(1682): n is a, c, g, or t
  misc_feature (1686)..(1686): n is a, c, g, or t
  misc_feature (1702)..(1702): n is a, c, g, or t
  misc_feature (1709)..(1709): n is a, c, g, or t
  misc_feature (1715)..(1715): n is a, c, g, or t
  misc_feature (1720)..(1720): n is a, c, g, or t
aaaataaggcatctgctgagtgtataaccattttacctcttgtttttagccctcttctgggtcacgctagaatcagatctgctctccagcatcttctgtttcctggcaagtgtttcctgctactttggattggccacgatgggctggagctgccttgtgacaggagcaggagggcttctgggtcagaggatcgtccgcctgttggtggaagagaaggaactgaaggagatcagggccttggacaaggccttcagaccagaattgagagaggaattttctaagctccagaacaggaccaagctgactgtacttgaaggagacattctggatgagccattcctggtctttggtgtcactcacagagagtccatcatgaatgtcaatgtgaaaggtacccagctactgttggaggcctgtgtccaagccagtgtgccagtcttcatctacaccagtagcatagaggtagccgggcccaactcctacaaggaaatcatccagaacggccacgaagaagagcctctggaaaacacatggcccactccatacccgtacagcaaaaagcttgctgagaaggctgtgctggcggctaatgggtggaatctaaaaaaatggtgataccttgtacacttgtgcgttaagacccacatatatctatggggaagggaggcccattcctttctgccagtataaatgaggccctgaacaacaatgggatcctgtcaagtgttggaaagttctctacagtcaacccagtctatgttggcaacgtggcctgggcccacattctggccttgagggctctgcgggaccccaagaaggccccaagtgtccgaggtcaattctattacatctcagatgacacgcctcaccaaagctatgataaccttaattacatcctgagcaaagagtttggcctccgccttgattccagatggagccttcctttaaccctgatgtactggattggcttcctgctggaagtagtgagcttcctactcagcccaatttactcctatcaaccccccttcaaccgccacacagtcacattatcaaatagtgtgttcaccttctcttacaagaaggctcagcgagatctggcgtataagccactctacagctgggaggaagccaagcagaaaaccgtggagtgggttggttcccttgtggaccggcacaaggagaccctgaagtccaagactcagtgatttaaggatgacagagatgtgcatgtgggtattgttaggaaatgtcatcaaactccacccacctggcttcatacagaaggcaacaggggcacaagcccaggtcctgctgcctctctttcacacaatgcccaacttactgtcttcttcatgtcatcaaaatctgcacagtcactggcccaaccagaactttctgtcctaatcatacaccagaagacaaacaatatgatttgctgttaccaaatctcagtggctgattctgaacaattgtggtctctcttaacttgaggttctcttttgactaatagagctccatttcccctcttaaatgagaaagcatttcttttctctttaatctcctattccttcacacagttcaacataaagagcaataaatgttttaatgcttaaaaaaaaaanaacanaccaaaaaaaaaaaaactcgnggggggccngtacccatttgncctanngggngcngttnacattaattggccggngtttaanacgggngactnggaaaaccttggcttgacccaacttaaatggctttgagcctttaccaacagttgggcaacctta

SEQ ID NO: 732312 - DNA, 1559 bp, Homo sapiens
aaaataaggcatctgctgagtgtataaccattttacctcttgtttttagccctcttctgggtcacgctagaatcagatctgctctccagcatcttctgtttcctggcaagtgtttcctgctactttggattggccacgatgggctggagctgccttgtgacaggagcaggagggcttctgggtcagaggatcgtccgcctgttggtggaagagaaggaactgaaggagatcagggccttggacaaggccttcagaccagaattgagagaggaattttctaagctccagaacaggaccaagctgactgtacttgaaggagacattctggatgagccattcctggtctttggtgtcactcacagagagtccatcatgaatgtcaatgtgaaaggtacccagctactgttggaggcctgtgtccaagccagtgtgccagtcttcatctacaccagtagcatagaggtagccgggcccaactcctacaaggaaatcatccagaacggccacgaagaagagcctctggaaaacacatggcccactccatacccgtacagcaaaaagcttgctgagaaggctgtgctggcggctaatgggtggaatctaaaaaaatggtgataccttgtacacttgtgcgttaagacccacatatatctatggggaagggaggcccattcctttctgccagtataaatgaggccctgaacaacaatgggatcctgtcaagtgttggaaagttctctacagtcaacccagtctatgttggcaacgtggcctgggcccacattctggccttgagggctctgcgggaccccaagaaggccccaagtgtccgaggtcaattctattacatctcagatgacacgcctcaccaaagctatgataaccttaattacatcctgagcaaagagtttggcctccgccttgattccagatggagccttcctttaaccctgatgtactggattggcttcctgctggaagtagtgagcttcctactcagcccaatttactcctatcaaccccccttcaaccgccacacagtcacattatcaaatagtgtgttcaccttctcttacaagaaggctcagcgagatctggcgtataagccactctacagctgggaggaagccaagcagaaaaccgtggagtgggttggttcccttgtggaccggcacaaggagaccctgaagtccaagactcagtgatttaaggatgacagagatgtgcatgtgggtattgttaggaaatgtcatcaaactccacccacctggcttcatacagaaggcaacaggggcacaagcccaggtcctgctgcctctctttcacacaatgcccaacttactgtcttcttcatgtcatcgaagacaaacaatatgatttgctgttaccaaatctcagtggctgattctgaacaattgtggtctctcttaacttgaggttctcttttgactaatagagctccatttcccctcttaaatgagaaagcatttcttttctctttaatctcctattccttcacacagttcaacataaagagcaataaatgttttaatgcttaa

SEQ ID NO: 732313 - DNA, 1557 bp, Homo sapiens
aaaataaggcatctgctgagtgtataaccattttacctcttgtttttagccctcttctgggtcacgctagaatcagatctgctctccagcatcttctgtttcctggcaagtgtttcctgctactttggattggccacgatgggctggagctgccttgtgacaggagcaggagggcttctgggtcagaggatcgtccgcctgttggtggaagagaaggaactgaaggagatcagggccttggacaaggccttcagaccagaattgagagaggaattttctaagctccagaacaggaccaagctgactgtacttgaaggagacattctggatgagccattcctggtctttggtgtcactcacagagagtccatcatgaatgtcaatgtgaaaggtacccagctactgttggaggcctgtgtccaagccagtgtgccagtcttcatctacaccagtagcatagaggtagccgggcccaactcctacaaggaaatcatccagaacggccacgaagaagagcctctggaaaacacatggcccactccatacccgtacagcaaaaagcttgctgagaaggctgtgctggcggctaatgggtggaatctaaaaaaatggtgataccttgtacacttgtgcgttaagacccacatatatctatggggaagggaggcccattcctttctgccagtataaatgaggccctgaacaacaatgggatcctgtcaagtgttggaaagttctctacagtcaacccagtctatgttggcaacgtggcctgggcccacattctggccttgagggctctgcgggaccccaagaaggccccaagtgtccgaggtcaattctattacatctcagatgacacgcctcaccaaagctatgataaccttaattacatcctgagcaaagagtttggcctccgccttgattccagatggagccttcctttaaccctgatgtactggattggcttcctgctggaagtagtgagcttcctactcagcccaatttactcctatcaaccccccttcaaccgccacacagtcacattatcaaatagtgtgttcaccttctcttacaagaaggctcagcgagatctggcgtataagccactctacagctgggaggaagccaagcagaaaaccgtggagtgggttggttcccttgtggaccggcacaaggagaccctgaagtccaagactcagtgatttaaggatgacagagatgtgcatgtgggtattgttaggaaatgtcatcaaactccacccacctggcttcatacagaaggcaacaggggcacaagcccaggtcctgctgcctctctttcacacaatgcccaacttactgtcttcttcatgtcatcaaaatctgcacagtcactggcccaaccagaactttctgtcctaatcatacaccagaagacaaacaatatgatttgctgttaccaaatctaatagagctccatttcccctcttaaatgagaaagcatttcttttctctttaatctcctattccttcacacagttcaacataaagagcaataaatgttttaatgcttaa

SEQ ID NO: 732314 - DNA, 1408 bp, Homo sapiens
atccatggaaactcaccggggaagagtcattttctatcggctttggacttctgctatgaaatggcaattcctttgagccagtctgtctaaagtcggcagcaaaggagaagcagatgaagggagtagaaaagagctccagaacaggaccaagctgactgtacttgaaggagacattctggatgagccattcctgaaaagagcctgccaggacgtctcggtcgtcatccacaccgcctgtatcattgatgtctttggtgtcactcacagagagtccatcatgaatgtcaatgtgaaaggtacccagctactgttggaggcctgtgtccaagccagtgtgccagtcttcatctacaccagtagcatagaggtagccgggcccaactcctacaaggaaatcatccagaacggccacgaagaagagcctctggaaaacacatggcccactccatacccgtacagcaaaaagcttgctgagaaggctgtgctggcggctaatgggtggaatctaaaaggaggcccattcctttctgccagtataaatgaggccctgaacaacaatgggatcctgtcaagtgttggaaagttctctacagtcaacccagtctatgttggcaacgtggcctgggcccacattctggccttgagggctctgcgggaccccaagaaggccccaagtgtccgaggtcaattctattacatctcagatgacacgcctcaccaaagctatgataaccttaattacatcctgagcaaagagtttggcctccgccttgattccagatggagccttcctttaaccctgatgtactggattggcttcctgctggaagtagtgagcttcctactcagcccaatttactcctatcaaccccccttcaaccgccacacagtcacattatcaaatagtgtgttcaccttctcttacaagaaggctcagcgagatctggcgtataagccactctacagctgggaggaagccaagcagaaaaccgtggagtgggttggttcccttgtggaccggcacaaggagaccctgaagtccaagactcagtgatttaaggatgacagagatgtgcatgtgggtattgttaggaaatgtcatcaaactccacccacctggcttcatacagaaggcaacaggggcacaagcccaggtcctgctgcctctctttcacacaatgcccaacttactgtcttcttcatgtcatcgaagacaaacaatatgatttgctgttaccaaatctcagtggctgattctgaacaattgtggtctctcttaacttgaggttctcttttgactaatagagctccatttcccctcttaaatgagaaagcatttcttttctctttaatctcctattccttcacacagttcaacataaagagcaataaatgttttaatgcttaa

SEQ ID NO: 732315 - DNA, 1462 bp, Homo sapiens
atccatggaaactcaccggggaagagtcattttctatcggctttggacttctgctatgaaatggcaattcctttgagccagtctgtctaaagtcggcagcaaaggagaagcagatgaagggagtagaaaagagctccagaacaggaccaagctgactgtacttgaaggagacattctggatgagccattcctgaaaagagcctgccaggacgtctcggtcgtcatccacaccgcctgtatcattgatgtctttggtgtcactcacagagagtccatcatgaatgtcaatgtgaaaggtacccagctactgttggaggcctgtgtccaagccagtgtgccagtcttcatctacaccagtagcatagaggtagccgggcccaactcctacaaggaaatcatccagaacggccacgaagaagagcctctggaaaacacatggcccactccatacccgtacagcaaaaagcttgctgagaaggctgtgctggcggctaatgggtggaatctaaaaggaggcccattcctttctgccagtataaatgaggccctgaacaacaatgggatcctgtcaagtgttggaaagttctctacagtcaacccagtctatgttggcaacgtggcctgggcccacattctggccttgagggctctgcgggaccccaagaaggccccaagtgtccgaggtcaattctattacatctcagatgacacgcctcaccaaagctatgataaccttaattacatcctgagcaaagagtttggcctccgccttgattccagatggagccttcctttaaccctgatgtactggattggcttcctgctggaagtagtgagcttcctactcagcccaatttactcctatcaaccccccttcaaccgccacacagtcacattatcaaatagtgtgttcaccttctcttacaagaaggctcagcgagatctggcgtataagccactctacagctgggaggaagccaagcagaaaaccgtggagtgggttggttcccttgtggaccggcacaaggagaccctgaagtccaagactcagtgatttaaggatgacagagatgtgcatgtgggtattgttaggaaatgtcatcaaactccacccacctggcttcatacagaaggcaacaggggcacaagcccaggtcctgctgcctctctttcacacaatgcccaacttactgtcttcttcatgtcatcaaaatctgcacagtcactggcccaaccagaactttctgtcctaatcatacaccagaagacaaacaatatgatttgctgttaccaaatctcagtggctgattctgaacaattgtggtctctcttaacttgaggttctcttttgactaatagagctccatttcccctcttaaatgagaaagcatttcttttctctttaatctcctattccttcacacagttcaacataaagagcaataaatgttttaatgcttaa

SEQ ID NO: 732316 - DNA, 1633 bp, Homo sapiens
  misc_feature (1471)..(1471): n is a, c, g, or t
  misc_feature (1476)..(1476): n is a, c, g, or t
  misc_feature (1497)..(1497): n is a, c, g, or t
  misc_feature (1506)..(1506): n is a, c, g, or t
  misc_feature (1518)..(1518): n is a, c, g, or t
  misc_feature (1523)..(1524): n is a, c, g, or t
  misc_feature (1528)..(1528): n is a, c, g, or t
  misc_feature (1531)..(1531): n is a, c, g, or t
  misc_feature (1535)..(1535): n is a, c, g, or t
  misc_feature (1551)..(1551): n is a, c, g, or t
  misc_feature (1558)..(1558): n is a, c, g, or t
  misc_feature (1564)..(1564): n is a, c, g, or t
  misc_feature (1569)..(1569): n is a, c, g, or t
atccatggaaactcaccggggaagagtcattttctatcggctttggacttctgctatgaaatggcaattcctttgagccagtctgtctaaagtcggcagcaaaggagaagcagatgaagggagtagaaaagagctccagaacaggaccaagctgactgtacttgaaggagacattctggatgagccattcctgaaaagagcctgccaggacgtctcggtcgtcatccacaccgcctgtatcattgatgtctttggtgtcactcacagagagtccatcatgaatgtcaatgtgaaaggtacccagctactgttggaggcctgtgtccaagccagtgtgccagtcttcatctacaccagtagcatagaggtagccgggcccaactcctacaaggaaatcatccagaacggccacgaagaagagcctctggaaaacacatggcccactccatacccgtacagcaaaaagcttgctgagaaggctgtgctggcggctaatgggtggaatctaaaaggaggcccattcctttctgccagtataaatgaggccctgaacaacaatgggatcctgtcaagtgttggaaagttctctacagtcaacccagtctatgttggcaacgtggcctgggcccacattctggccttgagggctctgcgggaccccaagaaggccccaagtgtccgaggtcaattctattacatctcagatgacacgcctcaccaaagctatgataaccttaattacatcctgagcaaagagtttggcctccgccttgattccagatggagccttcctttaaccctgatgtactggattggcttcctgctggaagtagtgagcttcctactcagcccaatttactcctatcaaccccccttcaaccgccacacagtcacattatcaaatagtgtgttcaccttctcttacaagaaggctcagcgagatctggcgtataagccactctacagctgggaggaagccaagcagaaaaccgtggagtgggttggttcccttgtggaccggcacaaggagaccctgaagtccaagactcagtgatttaaggatgacagagatgtgcatgtgggtattgttaggaaatgtcatcaaactccacccacctggcttcatacagaaggcaacaggggcacaagcccaggtcctgctgcctctctttcacacaatgcccaacttactgtcttcttcatgtcatcaaaatctgcacagtcactggcccaaccagaactttctgtcctaatcatacaccagaagacaaacaatatgatttgctgttaccaaatctcagtggctgattctgaacaattgtggtctctcttaacttgaggttctcttttgactaatagagctccatttcccctcttaaatgagaaagcatttcttttctctttaatctcctattccttcacacagttcaacataaagagcaataaatgttttaatgcttaaaaaaaaaanaacanaccaaaaaaaaaaaaactcgnggggggccngtacccatttgncctanngggngcngttnacattaattggccggngtttaanacgggngactnggaaaaccttggcttgacccaacttaaatggctttgagcctttaccaacagttgggcaacctta

SEQ ID NO: 732317 - DNA, 1406 bp, Homo sapiens
atccatggaaactcaccggggaagagtcattttctatcggctttggacttctgctatgaaatggcaattcctttgagccagtctgtctaaagtcggcagcaaaggagaagcagatgaagggagtagaaaagagctccagaacaggaccaagctgactgtacttgaaggagacattctggatgagccattcctgaaaagagcctgccaggacgtctcggtcgtcatccacaccgcctgtatcattgatgtctttggtgtcactcacagagagtccatcatgaatgtcaatgtgaaaggtacccagctactgttggaggcctgtgtccaagccagtgtgccagtcttcatctacaccagtagcatagaggtagccgggcccaactcctacaaggaaatcatccagaacggccacgaagaagagcctctggaaaacacatggcccactccatacccgtacagcaaaaagcttgctgagaaggctgtgctggcggctaatgggtggaatctaaaaggaggcccattcctttctgccagtataaatgaggccctgaacaacaatgggatcctgtcaagtgttggaaagttctctacagtcaacccagtctatgttggcaacgtggcctgggcccacattctggccttgagggctctgcgggaccccaagaaggccccaagtgtccgaggtcaattctattacatctcagatgacacgcctcaccaaagctatgataaccttaattacatcctgagcaaagagtttggcctccgccttgattccagatggagccttcctttaaccctgatgtactggattggcttcctgctggaagtagtgagcttcctactcagcccaatttactcctatcaaccccccttcaaccgccacacagtcacattatcaaatagtgtgttcaccttctcttacaagaaggctcagcgagatctggcgtataagccactctacagctgggaggaagccaagcagaaaaccgtggagtgggttggttcccttgtggaccggcacaaggagaccctgaagtccaagactcagtgatttaaggatgacagagatgtgcatgtgggtattgttaggaaatgtcatcaaactccacccacctggcttcatacagaaggcaacaggggcacaagcccaggtcctgctgcctctctttcacacaatgcccaacttactgtcttcttcatgtcatcaaaatctgcacagtcactggcccaaccagaactttctgtcctaatcatacaccagaagacaaacaatatgatttgctgttaccaaatctaatagagctccatttcccctcttaaatgagaaagcatttcttttctctttaatctcctattccttcacacagttcaacataaagagcaataaatgttttaatgcttaa

SEQ ID NO: 732318 - DNA, 1294 bp, Homo sapiens
gcagtaaggacttggactcctctgtccagcttttaacaatctaagttacggttagagctttctccttttctttcaactactcctggcagttgtggggtcatggaatttttgtaaaaaatggggtggaggccctcttctgggtcacgctagaatcagatctgctctccagcatcttctgtttcctggcaagtgtttcctgctactttggattggccacgatgggctggagctgccttgtgacaggagcaggagggcttctgggtcagaggatcgtccgcctgttggtggaagagaaggaactgaaggagatcagggccttggacaaggccttcagaccagaattgagagaggaattttctaagctccagaacaggaccaagctgactgtacttgaaggagacattctggatgagccattcctgaaaagagcctgccaggacgtctcggtcgtcatccacaccgcctgtatcattgatgtctttggtgtcactcacagagagtccatcatgaatgtcaatgtgaaaggtacagtagcctggggaggagataaaacaagttggttaaatgaggatcagaaagaaggacaagaaagggaagagaagtcactccattgaacacctgctgagctcttggccaagtgcctttgctgatcactactgactggggagttcaaggctggtaacctcagttttttagatgagaaaactagggctgagagacagcaagtaacttgtccaaggccccaaaagtaagtaagtaagtaggagagttagactttaaactcactcctgtgtgactccaaaggctgtggaagctctttctactgtggccccaatcccccgggccagaatcagaccttccaggtgccaccatagtcatcattttgaaccttgtgtgtaggctgatgagaacattcagagtctttctgcccacctcaaagaagtcctctcaagagaactagcaaagctggttcacagaggtctgtcaggacagaattatccagcacatgccttcccataatattttcttaacaaaaagagtttcccagtgtccagaatacaatctcttcagctcaccacagggtctactattacagagccatttcctgccaggtgcccaaagtgcaccctcatttgatccacattttttaaaggaatcttgccatgcagtctcaccctctgattcccagagcccagtctcttcaaaacacagctccccactgctggcctgaccctccacattcagactacccaaactccttttataaagcaactaattgcttttgagtctccag

SEQ ID NO: 732319 - DNA, 1637 bp, Homo sapiens
gcagtaaggacttggactcctctgtccagcttttaacaatctaagttacggttagagctttctccttttctttcaactactcctggcagttgtggggtcatggaatttttgtaaaaaatggggtggaggccctcttctgggtcacgctagaatcagatctgctctccagcatcttctgtttcctggcaagtgtttcctgctactttggattggccacgatgggctggagctgccttgtgacaggagcaggagggcttctgggtcagaggatcgtccgcctgttggtggaagagaaggaactgaaggagatcagggccttggacaaggccttcagaccagaattgagagaggaattttctaagctccagaacaggaccaagctgactgtacttgaaggagacattctggatgagccattcctgaaaagagcctgccaggacgtctcggtcgtcatccacaccgcctgtatcattgatgtctttggtgtcactcacagagagtccatcatgaatgtcaatgtgaaaggtacccagctactgttggaggcctgtgtccaagccagtgtgccagtcttcatctacaccagtagcatagaggtagccgggcccaactcctacaaggaaatcatccagaacggccacgaagaagagcctctggaaaacacatggcccactccatacccgtacagcaaaaagcttgctgagaaggctgtgctggcggctaatgggtggaatctaaaaggaggcccattcctttctgccagtataaatgaggccctgaacaacaatgggatcctgtcaagtgttggaaagttctctacagtcaacccagtctatgttggcaacgtggcctgggcccacattctggccttgagggctctgcgggaccccaagaaggccccaagtgtccgaggtcaattctattacatctcagatgacacgcctcaccaaagctatgataaccttaattacatcctgagcaaagagtttggcctccgccttgattccagatggagccttcctttaaccctgatgtactggattggcttcctgctggaagtagtgagcttcctactcagcccaatttactcctatcaaccccccttcaaccgccacacagtcacattatcaaatagtgtgttcaccttctcttacaagaaggctcagcgagatctggcgtataagccactctacagctgggaggaagccaagcagaaaaccgtggagtgggttggttcccttgtggaccggcacaaggagaccctgaagtccaagactcagtgatttaaggatgacagagatgtgcatgtgggtattgttaggaaatgtcatcaaactccacccacctggcttcatacagaaggcaacaggggcacaagcccaggtcctgctgcctctctttcacacaatgcccaacttactgtcttcttcatgtcatcgaagacaaacaatatgatttgctgttaccaaatctcagtggctgattctgaacaattgtggtctctcttaacttgaggttctcttttgactaatagagctccatttcccctcttaaatgagaaagcatttcttttctctttaatctcctattccttcacacagttcaacataaagagcaataaatgttttaatgcttaa

SEQ ID NO: 732320 - DNA, 1691 bp, Homo sapiens
gcagtaaggacttggactcctctgtccagcttttaacaatctaagttacggttagagctttctccttttctttcaactactcctggcagttgtggggtcatggaatttttgtaaaaaatggggtggaggccctcttctgggtcacgctagaatcagatctgctctccagcatcttctgtttcctggcaagtgtttcctgctactttggattggccacgatgggctggagctgccttgtgacaggagcaggagggcttctgggtcagaggatcgtccgcctgttggtggaagagaaggaactgaaggagatcagggccttggacaaggccttcagaccagaattgagagaggaattttctaagctccagaacaggaccaagctgactgtacttgaaggagacattctggatgagccattcctgaaaagagcctgccaggacgtctcggtcgtcatccacaccgcctgtatcattgatgtctttggtgtcactcacagagagtccatcatgaatgtcaatgtgaaaggtacccagctactgttggaggcctgtgtccaagccagtgtgccagtcttcatctacaccagtagcatagaggtagccgggcccaactcctacaaggaaatcatccagaacggccacgaagaagagcctctggaaaacacatggcccactccatacccgtacagcaaaaagcttgctgagaaggctgtgctggcggctaatgggtggaatctaaaaggaggcccattcctttctgccagtataaatgaggccctgaacaacaatgggatcctgtcaagtgttggaaagttctctacagtcaacccagtctatgttggcaacgtggcctgggcccacattctggccttgagggctctgcgggaccccaagaaggccccaagtgtccgaggtcaattctattacatctcagatgacacgcctcaccaaagctatgataaccttaattacatcctgagcaaagagtttggcctccgccttgattccagatggagccttcctttaaccctgatgtactggattggcttcctgctggaagtagtgagcttcctactcagcccaatttactcctatcaaccccccttcaaccgccacacagtcacattatcaaatagtgtgttcaccttctcttacaagaaggctcagcgagatctggcgtataagccactctacagctgggaggaagccaagcagaaaaccgtggagtgggttggttcccttgtggaccggcacaaggagaccctgaagtccaagactcagtgatttaaggatgacagagatgtgcatgtgggtattgttaggaaatgtcatcaaactccacccacctggcttcatacagaaggcaacaggggcacaagcccaggtcctgctgcctctctttcacacaatgcccaacttactgtcttcttcatgtcatcaaaatctgcacagtcactggcccaaccagaactttctgtcctaatcatacaccagaagacaaacaatatgatttgctgttaccaaatctcagtggctgattctgaacaattgtggtctctcttaacttgaggttctcttttgactaatagagctccatttcccctcttaaatgagaaagcatttcttttctctttaatctcctattccttcacacagttcaacataaagagcaataaatgttttaatgcttaa

SEQ ID NO: 732321 - DNA, 1862 bp, Homo sapiens
  misc_feature (1700)..(1700): n is a, c, g, or t
  misc_feature (1705)..(1705): n is a, c, g, or t
  misc_feature (1726)..(1726): n is a, c, g, or t
  misc_feature (1735)..(1735): n is a, c, g, or t
  misc_feature (1747)..(1747): n is a, c, g, or t
  misc_feature (1752)..(1753): n is a, c, g, or t
  misc_feature (1757)..(1757): n is a, c, g, or t
  misc_feature (1760)..(1760): n is a, c, g, or t
  misc_feature (1764)..(1764): n is a, c, g, or t
  misc_feature (1780)..(1780): n is a, c, g, or t
  misc_feature (1787)..(1787): n is a, c, g, or t
  misc_feature (1793)..(1793): n is a, c, g, or t
  misc_feature (1798)..(1798): n is a, c, g, or t
gcagtaaggacttggactcctctgtccagcttttaacaatctaagttacggttagagctttctccttttctttcaactactcctggcagttgtggggtcatggaatttttgtaaaaaatggggtggaggccctcttctgggtcacgctagaatcagatctgctctccagcatcttctgtttcctggcaagtgtttcctgctactttggattggccacgatgggctggagctgccttgtgacaggagcaggagggcttctgggtcagaggatcgtccgcctgttggtggaagagaaggaactgaaggagatcagggccttggacaaggccttcagaccagaattgagagaggaattttctaagctccagaacaggaccaagctgactgtacttgaaggagacattctggatgagccattcctgaaaagagcctgccaggacgtctcggtcgtcatccacaccgcctgtatcattgatgtctttggtgtcactcacagagagtccatcatgaatgtcaatgtgaaaggtacccagctactgttggaggcctgtgtccaagccagtgtgccagtcttcatctacaccagtagcatagaggtagccgggcccaactcctacaaggaaatcatccagaacggccacgaagaagagcctctggaaaacacatggcccactccatacccgtacagcaaaaagcttgctgagaaggctgtgctggcggctaatgggtggaatctaaaaggaggcccattcctttctgccagtataaatgaggccctgaacaacaatgggatcctgtcaagtgttggaaagttctctacagtcaacccagtctatgttggcaacgtggcctgggcccacattctggccttgagggctctgcgggaccccaagaaggccccaagtgtccgaggtcaattctattacatctcagatgacacgcctcaccaaagctatgataaccttaattacatcctgagcaaagagtttggcctccgccttgattccagatggagccttcctttaaccctgatgtactggattggcttcctgctggaagtagtgagcttcctactcagcccaatttactcctatcaaccccccttcaaccgccacacagtcacattatcaaatagtgtgttcaccttctcttacaagaaggctcagcgagatctggcgtataagccactctacagctgggaggaagccaagcagaaaaccgtggagtgggttggttcccttgtggaccggcacaaggagaccctgaagtccaagactcagtgatttaaggatgacagagatgtgcatgtgggtattgttaggaaatgtcatcaaactccacccacctggcttcatacagaaggcaacaggggcacaagcccaggtcctgctgcctctctttcacacaatgcccaacttactgtcttcttcatgtcatcaaaatctgcacagtcactggcccaaccagaactttctgtcctaatcatacaccagaagacaaacaatatgatttgctgttaccaaatctcagtggctgattctgaacaattgtggtctctcttaacttgaggttctcttttgactaatagagctccatttcccctcttaaatgagaaagcatttcttttctctttaatctcctattccttcacacagttcaacataaagagcaataaatgttttaatgcttaaaaaaaaaanaacanaccaaaaaaaaaaaaactcgnggggggccngtacccatttgncctanngggngcngttnacattaattggccggngtttaanacgggngactnggaaaaccttggcttgacccaacttaaatggctttgagcctttaccaacagttgggcaacctta

SEQ ID NO: 732322 - DNA, 1927 bp, Homo sapiens
  misc_feature (1713)..(1713): n is a, c, g, or t
  misc_feature (1718)..(1718): n is a, c, g, or t
  misc_feature (1765)..(1765): n is a, c, g, or t
  misc_feature (1770)..(1770): n is a, c, g, or t
  misc_feature (1791)..(1791): n is a, c, g, or t
  misc_feature (1800)..(1800): n is a, c, g, or t
  misc_feature (1812)..(1812): n is a, c, g, or t
  misc_feature (1817)..(1818): n is a, c, g, or t
  misc_feature (1822)..(1822): n is a, c, g, or t
  misc_feature (1825)..(1825): n is a, c, g, or t
  misc_feature (1829)..(1829): n is a, c, g, or t
  misc_feature (1845)..(1845): n is a, c, g, or t
  misc_feature (1852)..(1852): n is a, c, g, or t
  misc_feature (1858)..(1858): n is a, c, g, or t
  misc_feature (1863)..(1863): n is a, c, g, or t
gcagtaaggacttggactcctctgtccagcttttaacaatctaagttacggttagagctttctccttttctttcaactactcctggcagttgtggggtcatggaatttttgtaaaaaatggggtggaggccctcttctgggtcacgctagaatcagatctgctctccagcatcttctgtttcctggcaagtgtttcctgctactttggattggccacgatgggctggagctgccttgtgacaggagcaggagggcttctgggtcagaggatcgtccgcctgttggtggaagagaaggaactgaaggagatcagggccttggacaaggccttcagaccagaattgagagaggaattttctaagctccagaacaggaccaagctgactgtacttgaaggagacattctggatgagccattcctgaaaagagcctgccaggacgtctcggtcgtcatccacaccgcctgtatcattgatgtctttggtgtcactcacagagagtccatcatgaatgtcaatgtgaaaggtacccagctactgttggaggcctgtgtccaagccagtgtgccagtcttcatctacaccagtagcatagaggtagccgggcccaactcctacaaggaaatcatccagaacggccacgaagaagagcctctggaaaacacatggcccactccatacccgtacagcaaaaagcttgctgagaaggctgtgctggcggctaatgggtggaatctaaaaggaggcccattcctttctgccagtataaatgaggccctgaacaacaatgggatcctgtcaagtgttggaaagttctctacagtcaacccagtctatgttggcaacgtggcctgggcccacattctggccttgagggctctgcgggaccccaagaaggccccaagtgtccgaggtcaattctattacatctcagatgacacgcctcaccaaagctatgataaccttaattacatcctgagcaaagagtttggcctccgccttgattccagatggagccttcctttaaccctgatgtactggattggcttcctgctggaagtagtgagcttcctactcagcccaatttactcctatcaaccccccttcaaccgccacacagtcacattatcaaatagtgtgttcaccttctcttacaagaaggctcagcgagatctggcgtataagccactctacagctgggaggaagccaagcagaaaaccgtggagtgggttggttcccttgtggaccggcacaaggagaccctgaagtccaagactcagtgatttaaggatgacagagatgtgcatgtgggtattgttaggaaatgtcatcaaactccacccacctggcttcatacagaaggcaacaggggcacaagcccaggtcctgctgcctctctttcacacaatgcccaacttactgtcttcttcatgtcatcaaaatctgcacagtcactggcccaaccagaactttctgtcctaatcatacaccagaagacaaacaatatgatttgctgttaccaaatctcagtggctgattctgaacaattgtggtctctcttaacttgaggttctcttttgactaatagagctccatttcccctcttaaatgagaaagcatttcttttctctttaatctcctattccttcacacagttcaacataaagagcaataaatgttttaatgcttaaaacaaaaaaaaaaaaaaaaaanaaaanaaaaaaaaaaaaaaaaaaaaaaaaaaaaaaaaaaaaaaaaaaaaaanaacanaccaaaaaaaaaaaaactcgnggggggccngtacccatttgncctanngggngcngttnacattaattggccggngtttaanacgggngactnggaaaaccttggcttgacccaacttaaatggctttgagcctttaccaacagttgggcaacctta

SEQ ID NO: 732323 - DNA, 1638 bp, Homo sapiens
gcagtaaggacttggactcctctgtccagcttttaacaatctaagttacggttagagctttctccttttctttcaactactcctggcagttgtggggtcatggaatttttgtaaaaaatggggtggaggccctcttctgggtcacgctagaatcagatctgctctccagcatcttctgtttcctggcaagtgtttcctgctactttggattggccacgatgggctggagctgccttgtgacaggagcaggagggcttctgggtcagaggatcgtccgcctgttggtggaagagaaggaactgaaggagatcagggccttggacaaggccttcagaccagaattgagagaggaattttctaagctccagaacaggaccaagctgactgtacttgaaggagacattctggatgagccattcctgaaaagagcctgccaggacgtctcggtcgtcatccacaccgcctgtatcattgatgtctttggtgtcactcacagagagtccatcatgaatgtcaatgtgaaaggtacccagctactgttggaggcctgtgtccaagccagtgtgccagtcttcatctacaccagtagcatagaggtagccgggcccaactcctacaaggaaatcatccagaacggccacgaagaagagcctctggaaaacacatggcccactccatacccgtacagcaaaaagcttgctgagaaggctgtgctggcggctaatgggtggaatctaaaaggaggcccattcctttctgccagtataaatgaggccctgaacaacaatgggatcctgtcaagtgttggaaagttctctacagtcaacccagtctatgttggcaacgtggcctgggcccacattctggccttgagggctctgcgggaccccaagaaggccccaagtgtccgaggtcaattctattacatctcagatgacacgcctcaccaaagctatgataaccttaattacatcctgagcaaagagtttggcctccgccttgattccagatggagccttcctttaaccctgatgtactggattggcttcctgctggaagtagtgagcttcctactcagcccaatttactcctatcaaccccccttcaaccgccacacagtcacattatcaaatagtgtgttcaccttctcttacaagaaggctcagcgagatctggcgtataagccactctacagctgggaggaagccaagcagaaaaccgtggagtgggttggttcccttgtggaccggcacaaggagaccctgaagtccaagactcagtgatttaaggatgacagagatgtgcatgtgggtattgttaggaaatgtcatcaaactccacccacctggcttcatacagaaggcaacaggggcacaagcccaggtcctgctgcctctctttcacacaatgcccaacttactgtcttcttcatgtcatcaaaatctgcacagtcactggcccaaccagaactttctgtcctaatcatacaccagaagacaaacaatatgatttgctgttaccaaatctcagtggctgattctgaacaattgtggtctctcttaacttgaggttctcttttgaatctcctattccttcacacagttcaacataaagagcaataaatgttttaatgcttaa

SEQ ID NO: 732324 - DNA, 1635 bp, Homo sapiens
gcagtaaggacttggactcctctgtccagcttttaacaatctaagttacggttagagctttctccttttctttcaactactcctggcagttgtggggtcatggaatttttgtaaaaaatggggtggaggccctcttctgggtcacgctagaatcagatctgctctccagcatcttctgtttcctggcaagtgtttcctgctactttggattggccacgatgggctggagctgccttgtgacaggagcaggagggcttctgggtcagaggatcgtccgcctgttggtggaagagaaggaactgaaggagatcagggccttggacaaggccttcagaccagaattgagagaggaattttctaagctccagaacaggaccaagctgactgtacttgaaggagacattctggatgagccattcctgaaaagagcctgccaggacgtctcggtcgtcatccacaccgcctgtatcattgatgtctttggtgtcactcacagagagtccatcatgaatgtcaatgtgaaaggtacccagctactgttggaggcctgtgtccaagccagtgtgccagtcttcatctacaccagtagcatagaggtagccgggcccaactcctacaaggaaatcatccagaacggccacgaagaagagcctctggaaaacacatggcccactccatacccgtacagcaaaaagcttgctgagaaggctgtgctggcggctaatgggtggaatctaaaaggaggcccattcctttctgccagtataaatgaggccctgaacaacaatgggatcctgtcaagtgttggaaagttctctacagtcaacccagtctatgttggcaacgtggcctgggcccacattctggccttgagggctctgcgggaccccaagaaggccccaagtgtccgaggtcaattctattacatctcagatgacacgcctcaccaaagctatgataaccttaattacatcctgagcaaagagtttggcctccgccttgattccagatggagccttcctttaaccctgatgtactggattggcttcctgctggaagtagtgagcttcctactcagcccaatttactcctatcaaccccccttcaaccgccacacagtcacattatcaaatagtgtgttcaccttctcttacaagaaggctcagcgagatctggcgtataagccactctacagctgggaggaagccaagcagaaaaccgtggagtgggttggttcccttgtggaccggcacaaggagaccctgaagtccaagactcagtgatttaaggatgacagagatgtgcatgtgggtattgttaggaaatgtcatcaaactccacccacctggcttcatacagaaggcaacaggggcacaagcccaggtcctgctgcctctctttcacacaatgcccaacttactgtcttcttcatgtcatcaaaatctgcacagtcactggcccaaccagaactttctgtcctaatcatacaccagaagacaaacaatatgatttgctgttaccaaatctaatagagctccatttcccctcttaaatgagaaagcatttcttttctctttaatctcctattccttcacacagttcaacataaagagcaataaatgttttaatgcttaa

SEQ ID NO: 732325 - DNA, 1873 bp, Homo sapiens
  misc_feature (1659)..(1659): n is a, c, g, or t
  misc_feature (1664)..(1664): n is a, c, g, or t
  misc_feature (1711)..(1711): n is a, c, g, or t
  misc_feature (1716)..(1716): n is a, c, g, or t
  misc_feature (1737)..(1737): n is a, c, g, or t
  misc_feature (1746)..(1746): n is a, c, g, or t
  misc_feature (1758)..(1758): n is a, c, g, or t
  misc_feature (1763)..(1764): n is a, c, g, or t
  misc_feature (1768)..(1768): n is a, c, g, or t
  misc_feature (1771)..(1771): n is a, c, g, or t
  misc_feature (1775)..(1775): n is a, c, g, or t
  misc_feature (1791)..(1791): n is a, c, g, or t
  misc_feature (1798)..(1798): n is a, c, g, or t
  misc_feature (1804)..(1804): n is a, c, g, or t
  misc_feature (1809)..(1809): n is a, c, g, or t
gcagtaaggacttggactcctctgtccagcttttaacaatctaagttacggttagagctttctccttttctttcaactactcctggcagttgtggggtcatggaatttttgtaaaaaatggggtggaggccctcttctgggtcacgctagaatcagatctgctctccagcatcttctgtttcctggcaagtgtttcctgctactttggattggccacgatgggctggagctgccttgtgacaggagcaggagggcttctgggtcagaggatcgtccgcctgttggtggaagagaaggaactgaaggagatcagggccttggacaaggccttcagaccagaattgagagaggaattttctaagctccagaacaggaccaagctgactgtacttgaaggagacattctggatgagccattcctgaaaagagcctgccaggacgtctcggtcgtcatccacaccgcctgtatcattgatgtctttggtgtcactcacagagagtccatcatgaatgtcaatgtgaaaggtacccagctactgttggaggcctgtgtccaagccagtgtgccagtcttcatctacaccagtagcatagaggtagccgggcccaactcctacaaggaaatcatccagaacggccacgaagaagagcctctggaaaacacatggcccactccatacccgtacagcaaaaagcttgctgagaaggctgtgctggcggctaatgggtggaatctaaaaggaggcccattcctttctgccagtataaatgaggccctgaacaacaatgggatcctgtcaagtgttggaaagttctctacagtcaacccagtctatgttggcaacgtggcctgggcccacattctggccttgagggctctgcgggaccccaagaaggccccaagtgtccgaggtcaattctattacatctcagatgacacgcctcaccaaagctatgataaccttaattacatcctgagcaaagagtttggcctccgccttgattccagatggagccttcctttaaccctgatgtactggattggcttcctgctggaagtagtgagcttcctactcagcccaatttactcctatcaaccccccttcaaccgccacacagtcacattatcaaatagtgtgttcaccttctcttacaagaaggctcagcgagatctggcgtataagccactctacagctgggaggaagccaagcagtccaagactcagtgatttaaggatgacagagatgtgcatgtgggtattgttaggaaatgtcatcaaactccacccacctggcttcatacagaaggcaacaggggcacaagcccaggtcctgctgcctctctttcacacaatgcccaacttactgtcttcttcatgtcatcaaaatctgcacagtcactggcccaaccagaactttctgtcctaatcatacaccagaagacaaacaatatgatttgctgttaccaaatctcagtggctgattctgaacaattgtggtctctcttaacttgaggttctcttttgactaatagagctccatttcccctcttaaatgagaaagcatttcttttctctttaatctcctattccttcacacagttcaacataaagagcaataaatgttttaatgcttaaaacaaaaaaaaaaaaaaaaaanaaaanaaaaaaaaaaaaaaaaaaaaaaaaaaaaaaaaaaaaaaaaaaaaaanaacanaccaaaaaaaaaaaaactcgnggggggccngtacccatttgncctanngggngcngttnacattaattggccggngtttaanacgggngactnggaaaaccttggcttgacccaacttaaatggctttgagcctttaccaacagttgggcaacctta

SEQ ID NO: 732326 - DNA, 1640 bp, Homo sapiens
gcagtaaggacttggactcctctgtccagcttttaacaatctaagttacggttagagctttctccttttctttcaactactcctggcagttgtggggtcatggaatttttgtaaaaaatggggtggaggccctcttctgggtcacgctagaatcagatctgctctccagcatcttctgtttcctggcaagtgtttcctgctactttggattggccacgatgggctggagctgccttgtgacaggagcaggagggcttctgggtcagaggatcgtccgcctgttggtggaagagaaggaactgaaggagatcagggccttggacaaggccttcagaccagaattgagagaggaattttctaagctccagaacaggaccaagctgactgtacttgaaggagacattctggatgagccattcctgaaaagagcctgccaggacgtctcggtcgtcatccacaccgcctgtatcattgatgtctttggtgtcactcacagagagtccatcatgaatgtcaatgtgaaaggtacccagctactgttggaggcctgtgtccaagccagtgtgccagtcttcatctacaccagtagcatagaggtagccgggcccaactcctacaaggaaatcatccagaacggccacgaagaagagcctctggaaaacacatggcccactccatacccgtacagcaaaaagcttgctgagaaggctgtgctggcggctaatgggtggaatctaaaaaaatggtgataccttgtacacttgtgcgttaagacccacatatatctatggggaagggaggcccattcctttctgccagtataaatgaggccctgaacaacaatgggatcctgtcaagtgttgattctggccttgagggctctgcgggaccccaagaaggccccaagtgtccgaggtcaattctattacatctcagatgacacgcctcaccaaagctatgataaccttaattacatcctgagcaaagagtttggcctccgccttgattccagatggagccttcctttaaccctgatgtactggattggcttcctgctggaagtagtgagcttcctactcagcccaatttactcctatcaaccccccttcaaccgccacacagtcacattatcaaatagtgtgttcaccttctcttacaagaaggctcagcgagatctggcgtataagccactctacagctgggaggaagccaagcagaaaaccgtggagtgggttggttcccttgtggaccggcacaaggagaccctgaagtccaagactcagtgatttaaggatgacagagatgtgcatgtgggtattgttaggaaatgtcatcaaactccacccacctggcttcatacagaaggcaacaggggcacaagcccaggtcctgctgcctctctttcacacaatgcccaacttactgtcttcttcatgtcatcgaagacaaacaatatgatttgctgttaccaaatctcagtggctgattctgaacaattgtggtctctcttaacttgaggttctcttttgactaatagagctccatttcccctcttaaatgagaaagcatttcttttctctttaatctcctattccttcacacagttcaacataaagagcaataaatgttttaatgcttaa

SEQ ID NO: 732327 - DNA, 1876 bp, Homo sapiens
  misc_feature (1662)..(1662): n is a, c, g, or t
  misc_feature (1667)..(1667): n is a, c, g, or t
  misc_feature (1714)..(1714): n is a, c, g, or t
  misc_feature (1719)..(1719): n is a, c, g, or t
  misc_feature (1740)..(1740): n is a, c, g, or t
  misc_feature (1749)..(1749): n is a, c, g, or t
  misc_feature (1761)..(1761): n is a, c, g, or t
  misc_feature (1766)..(1767): n is a, c, g, or t
  misc_feature (1771)..(1771): n is a, c, g, or t
  misc_feature (1774)..(1774): n is a, c, g, or t
  misc_feature (1778)..(1778): n is a, c, g, or t
  misc_feature (1794)..(1794): n is a, c, g, or t
  misc_feature (1801)..(1801): n is a, c, g, or t
  misc_feature (1807)..(1807): n is a, c, g, or t
  misc_feature (1812)..(1812): n is a, c, g, or t
gcagtaaggacttggactcctctgtccagcttttaacaatctaagttacggttagagctttctccttttctttcaactactcctggcagttgtggggtcatggaatttttgtaaaaaatggggtggaggccctcttctgggtcacgctagaatcagatctgctctccagcatcttctgtttcctggcaagtgtttcctgctactttggattggccacgatgggctggagctgccttgtgacaggagcaggagggcttctgggtcagaggatcgtccgcctgttggtggaagagaaggaactgaaggagatcagggccttggacaaggccttcagaccagaattgagagaggaattttctaagctccagaacaggaccaagctgactgtacttgaaggagacattctggatgagccattcctgaaaagagcctgccaggacgtctcggtcgtcatccacaccgcctgtatcattgatgtctttggtgtcactcacagagagtccatcatgaatgtcaatgtgaaaggtacccagctactgttggaggcctgtgtccaagccagtgtgccagtcttcatctacaccagtagcatagaggtagccgggcccaactcctacaaggaaatcatccagaacggccacgaagaagagcctctggaaaacacatggcccactccatacccgtacagcaaaaagcttgctgagaaggctgtgctggcggctaatgggtggaatctaaaaaaatggtgataccttgtacacttgtgcgttaagacccacatatatctatggggaagggaggcccattcctttctgccagtataaatgaggccctgaacaacaatgggatcctgtcaagtgttgattctggccttgagggctctgcgggaccccaagaaggccccaagtgtccgaggtcaattctattacatctcagatgacacgcctcaccaaagctatgataaccttaattacatcctgagcaaagagtttggcctccgccttgattccagatggagccttcctttaaccctgatgtactggattggcttcctgctggaagtagtgagcttcctactcagcccaatttactcctatcaaccccccttcaaccgccacacagtcacattatcaaatagtgtgttcaccttctcttacaagaaggctcagcgagatctggcgtataagccactctacagctgggaggaagccaagcagtccaagactcagtgatttaaggatgacagagatgtgcatgtgggtattgttaggaaatgtcatcaaactccacccacctggcttcatacagaaggcaacaggggcacaagcccaggtcctgctgcctctctttcacacaatgcccaacttactgtcttcttcatgtcatcaaaatctgcacagtcactggcccaaccagaactttctgtcctaatcatacaccagaagacaaacaatatgatttgctgttaccaaatctcagtggctgattctgaacaattgtggtctctcttaacttgaggttctcttttgactaatagagctccatttcccctcttaaatgagaaagcatttcttttctctttaatctcctattccttcacacagttcaacataaagagcaataaatgttttaatgcttaaaacaaaaaaaaaaaaaaaaaanaaaanaaaaaaaaaaaaaaaaaaaaaaaaaaaaaaaaaaaaaaaaaaaaaanaacanaccaaaaaaaaaaaaactcgnggggggccngtacccatttgncctanngggngcngttnacattaattggccggngtttaanacgggngactnggaaaaccttggcttgacccaacttaaatggctttgagcctttaccaacagttgggcaacctta

SEQ ID NO: 732328 - DNA, 1694 bp, Homo sapiens
gcagtaaggacttggactcctctgtccagcttttaacaatctaagttacggttagagctttctccttttctttcaactactcctggcagttgtggggtcatggaatttttgtaaaaaatggggtggaggccctcttctgggtcacgctagaatcagatctgctctccagcatcttctgtttcctggcaagtgtttcctgctactttggattggccacgatgggctggagctgccttgtgacaggagcaggagggcttctgggtcagaggatcgtccgcctgttggtggaagagaaggaactgaaggagatcagggccttggacaaggccttcagaccagaattgagagaggaattttctaagctccagaacaggaccaagctgactgtacttgaaggagacattctggatgagccattcctgaaaagagcctgccaggacgtctcggtcgtcatccacaccgcctgtatcattgatgtctttggtgtcactcacagagagtccatcatgaatgtcaatgtgaaaggtacccagctactgttggaggcctgtgtccaagccagtgtgccagtcttcatctacaccagtagcatagaggtagccgggcccaactcctacaaggaaatcatccagaacggccacgaagaagagcctctggaaaacacatggcccactccatacccgtacagcaaaaagcttgctgagaaggctgtgctggcggctaatgggtggaatctaaaaaaatggtgataccttgtacacttgtgcgttaagacccacatatatctatggggaagggaggcccattcctttctgccagtataaatgaggccctgaacaacaatgggatcctgtcaagtgttgattctggccttgagggctctgcgggaccccaagaaggccccaagtgtccgaggtcaattctattacatctcagatgacacgcctcaccaaagctatgataaccttaattacatcctgagcaaagagtttggcctccgccttgattccagatggagccttcctttaaccctgatgtactggattggcttcctgctggaagtagtgagcttcctactcagcccaatttactcctatcaaccccccttcaaccgccacacagtcacattatcaaatagtgtgttcaccttctcttacaagaaggctcagcgagatctggcgtataagccactctacagctgggaggaagccaagcagaaaaccgtggagtgggttggttcccttgtggaccggcacaaggagaccctgaagtccaagactcagtgatttaaggatgacagagatgtgcatgtgggtattgttaggaaatgtcatcaaactccacccacctggcttcatacagaaggcaacaggggcacaagcccaggtcctgctgcctctctttcacacaatgcccaacttactgtcttcttcatgtcatcaaaatctgcacagtcactggcccaaccagaactttctgtcctaatcatacaccagaagacaaacaatatgatttgctgttaccaaatctcagtggctgattctgaacaattgtggtctctcttaacttgaggttctcttttgactaatagagctccatttcccctcttaaatgagaaagcatttcttttctctttaatctcctattccttcacacagttcaacataaagagcaataaatgttttaatgcttaa

SEQ ID NO: 732329 - DNA, 1865 bp, Homo sapiens
  misc_feature (1703)..(1703): n is a, c, g, or t
  misc_feature (1708)..(1708): n is a, c, g, or t
  misc_feature (1729)..(1729): n is a, c, g, or t
  misc_feature (1738)..(1738): n is a, c, g, or t
  misc_feature (1750)..(1750): n is a, c, g, or t
  misc_feature (1755)..(1756): n is a, c, g, or t
  misc_feature (1760)..(1760): n is a, c, g, or t
  misc_feature (1763)..(1763): n is a, c, g, or t
  misc_feature (1767)..(1767): n is a, c, g, or t
  misc_feature (1783)..(1783): n is a, c, g, or t
  misc_feature (1790)..(1790): n is a, c, g, or t
  misc_feature (1796)..(1796): n is a, c, g, or t
  misc_feature (1801)..(1801): n is a, c, g, or t
gcagtaaggacttggactcctctgtccagcttttaacaatctaagttacggttagagctttctccttttctttcaactactcctggcagttgtggggtcatggaatttttgtaaaaaatggggtggaggccctcttctgggtcacgctagaatcagatctgctctccagcatcttctgtttcctggcaagtgtttcctgctactttggattggccacgatgggctggagctgccttgtgacaggagcaggagggcttctgggtcagaggatcgtccgcctgttggtggaagagaaggaactgaaggagatcagggccttggacaaggccttcagaccagaattgagagaggaattttctaagctccagaacaggaccaagctgactgtacttgaaggagacattctggatgagccattcctgaaaagagcctgccaggacgtctcggtcgtcatccacaccgcctgtatcattgatgtctttggtgtcactcacagagagtccatcatgaatgtcaatgtgaaaggtacccagctactgttggaggcctgtgtccaagccagtgtgccagtcttcatctacaccagtagcatagaggtagccgggcccaactcctacaaggaaatcatccagaacggccacgaagaagagcctctggaaaacacatggcccactccatacccgtacagcaaaaagcttgctgagaaggctgtgctggcggctaatgggtggaatctaaaaaaatggtgataccttgtacacttgtgcgttaagacccacatatatctatggggaagggaggcccattcctttctgccagtataaatgaggccctgaacaacaatgggatcctgtcaagtgttgattctggccttgagggctctgcgggaccccaagaaggccccaagtgtccgaggtcaattctattacatctcagatgacacgcctcaccaaagctatgataaccttaattacatcctgagcaaagagtttggcctccgccttgattccagatggagccttcctttaaccctgatgtactggattggcttcctgctggaagtagtgagcttcctactcagcccaatttactcctatcaaccccccttcaaccgccacacagtcacattatcaaatagtgtgttcaccttctcttacaagaaggctcagcgagatctggcgtataagccactctacagctgggaggaagccaagcagaaaaccgtggagtgggttggttcccttgtggaccggcacaaggagaccctgaagtccaagactcagtgatttaaggatgacagagatgtgcatgtgggtattgttaggaaatgtcatcaaactccacccacctggcttcatacagaaggcaacaggggcacaagcccaggtcctgctgcctctctttcacacaatgcccaacttactgtcttcttcatgtcatcaaaatctgcacagtcactggcccaaccagaactttctgtcctaatcatacaccagaagacaaacaatatgatttgctgttaccaaatctcagtggctgattctgaacaattgtggtctctcttaacttgaggttctcttttgactaatagagctccatttcccctcttaaatgagaaagcatttcttttctctttaatctcctattccttcacacagttcaacataaagagcaataaatgttttaatgcttaaaaaaaaaanaacanaccaaaaaaaaaaaaactcgnggggggccngtacccatttgncctanngggngcngttnacattaattggccggngtttaanacgggngactnggaaaaccttggcttgacccaacttaaatggctttgagcctttaccaacagttgggcaacctta

SEQ ID NO: 732330 - DNA, 1930 bp, Homo sapiens
  misc_feature (1716)..(1716): n is a, c, g, or t
  misc_feature (1721)..(1721): n is a, c, g, or t
  misc_feature (1768)..(1768): n is a, c, g, or t
  misc_feature (1773)..(1773): n is a, c, g, or t
  misc_feature (1794)..(1794): n is a, c, g, or t
  misc_feature (1803)..(1803): n is a, c, g, or t
  misc_feature (1815)..(1815): n is a, c, g, or t
  misc_feature (1820)..(1821): n is a, c, g, or t
  misc_feature (1825)..(1825): n is a, c, g, or t
  misc_feature (1828)..(1828): n is a, c, g, or t
  misc_feature (1832)..(1832): n is a, c, g, or t
  misc_feature (1848)..(1848): n is a, c, g, or t
  misc_feature (1855)..(1855): n is a, c, g, or t
  misc_feature (1861)..(1861): n is a, c, g, or t
  misc_feature (1866)..(1866): n is a, c, g, or t
gcagtaaggacttggactcctctgtccagcttttaacaatctaagttacggttagagctttctccttttctttcaactactcctggcagttgtggggtcatggaatttttgtaaaaaatggggtggaggccctcttctgggtcacgctagaatcagatctgctctccagcatcttctgtttcctggcaagtgtttcctgctactttggattggccacgatgggctggagctgccttgtgacaggagcaggagggcttctgggtcagaggatcgtccgcctgttggtggaagagaaggaactgaaggagatcagggccttggacaaggccttcagaccagaattgagagaggaattttctaagctccagaacaggaccaagctgactgtacttgaaggagacattctggatgagccattcctgaaaagagcctgccaggacgtctcggtcgtcatccacaccgcctgtatcattgatgtctttggtgtcactcacagagagtccatcatgaatgtcaatgtgaaaggtacccagctactgttggaggcctgtgtccaagccagtgtgccagtcttcatctacaccagtagcatagaggtagccgggcccaactcctacaaggaaatcatccagaacggccacgaagaagagcctctggaaaacacatggcccactccatacccgtacagcaaaaagcttgctgagaaggctgtgctggcggctaatgggtggaatctaaaaaaatggtgataccttgtacacttgtgcgttaagacccacatatatctatggggaagggaggcccattcctttctgccagtataaatgaggccctgaacaacaatgggatcctgtcaagtgttgattctggccttgagggctctgcgggaccccaagaaggccccaagtgtccgaggtcaattctattacatctcagatgacacgcctcaccaaagctatgataaccttaattacatcctgagcaaagagtttggcctccgccttgattccagatggagccttcctttaaccctgatgtactggattggcttcctgctggaagtagtgagcttcctactcagcccaatttactcctatcaaccccccttcaaccgccacacagtcacattatcaaatagtgtgttcaccttctcttacaagaaggctcagcgagatctggcgtataagccactctacagctgggaggaagccaagcagaaaaccgtggagtgggttggttcccttgtggaccggcacaaggagaccctgaagtccaagactcagtgatttaaggatgacagagatgtgcatgtgggtattgttaggaaatgtcatcaaactccacccacctggcttcatacagaaggcaacaggggcacaagcccaggtcctgctgcctctctttcacacaatgcccaacttactgtcttcttcatgtcatcaaaatctgcacagtcactggcccaaccagaactttctgtcctaatcatacaccagaagacaaacaatatgatttgctgttaccaaatctcagtggctgattctgaacaattgtggtctctcttaacttgaggttctcttttgactaatagagctccatttcccctcttaaatgagaaagcatttcttttctctttaatctcctattccttcacacagttcaacataaagagcaataaatgttttaatgcttaaaacaaaaaaaaaaaaaaaaaanaaaanaaaaaaaaaaaaaaaaaaaaaaaaaaaaaaaaaaaaaaaaaaaaaanaacanaccaaaaaaaaaaaaactcgnggggggccngtacccatttgncctanngggngcngttnacattaattggccggngtttaanacgggngactnggaaaaccttggcttgacccaacttaaatggctttgagcctttaccaacagttgggcaacctta

SEQ ID NO: 732331 - DNA, 1583 bp, Homo sapiens
gcagtaaggacttggactcctctgtccagcttttaacaatctaagttacggttagagctttctccttttctttcaactactcctggcagttgtggggtcatggaatttttgtaaaaaatggggtggaggccctcttctgggtcacgctagaatcagatctgctctccagcatcttctgtttcctggcaagtgtttcctgctactttggattggccacgatgggctggagctgccttgtgacaggagcaggagggcttctgggtcagaggatcgtccgcctgttggtggaagagaaggaactgaaggagatcagggccttggacaaggccttcagaccagaattgagagaggaattttctaagctccagaacaggaccaagctgactgtacttgaaggagacattctggatgagccattcctggtctttggtgtcactcacagagagtccatcatgaatgtcaatgtgaaaggtacccagctactgttggaggcctgtgtccaagccagtgtgccagtcttcatctacaccagtagcatagaggtagccgggcccaactcctacaaggaaatcatccagaacggccacgaagaagagcctctggaaaacacatggcccactccatacccgtacagcaaaaagcttgctgagaaggctgtgctggcggctaatgggtggaatctaaaaggaggcccattcctttctgccagtataaatgaggccctgaacaacaatgggatcctgtcaagtgttggaaagttctctacagtcaacccagtctatgttggcaacgtggcctgggcccacattctggccttgagggctctgcgggaccccaagaaggccccaagtgtccgaggtcaattctattacatctcagatgacacgcctcaccaaagctatgataaccttaattacatcctgagcaaagagtttggcctccgccttgattccagatggagccttcctttaaccctgatgtactggattggcttcctgctggaagtagtgagcttcctactcagcccaatttactcctatcaaccccccttcaaccgccacacagtcacattatcaaatagtgtgttcaccttctcttacaagaaggctcagcgagatctggcgtataagccactctacagctgggaggaagccaagcagaaaaccgtggagtgggttggttcccttgtggaccggcacaaggagaccctgaagtccaagactcagtgatttaaggatgacagagatgtgcatgtgggtattgttaggaaatgtcatcaaactccacccacctggcttcatacagaaggcaacaggggcacaagcccaggtcctgctgcctctctttcacacaatgcccaacttactgtcttcttcatgtcatcgaagacaaacaatatgatttgctgttaccaaatctcagtggctgattctgaacaattgtggtctctcttaacttgaggttctcttttgactaatagagctccatttcccctcttaaatgagaaagcatttcttttctctttaatctcctattccttcacacagttcaacataaagagcaataaatgttttaatgcttaa

SEQ ID NO: 732332 - DNA, 1637 bp, Homo sapiens
gcagtaaggacttggactcctctgtccagcttttaacaatctaagttacggttagagctttctccttttctttcaactactcctggcagttgtggggtcatggaatttttgtaaaaaatggggtggaggccctcttctgggtcacgctagaatcagatctgctctccagcatcttctgtttcctggcaagtgtttcctgctactttggattggccacgatgggctggagctgccttgtgacaggagcaggagggcttctgggtcagaggatcgtccgcctgttggtggaagagaaggaactgaaggagatcagggccttggacaaggccttcagaccagaattgagagaggaattttctaagctccagaacaggaccaagctgactgtacttgaaggagacattctggatgagccattcctggtctttggtgtcactcacagagagtccatcatgaatgtcaatgtgaaaggtacccagctactgttggaggcctgtgtccaagccagtgtgccagtcttcatctacaccagtagcatagaggtagccgggcccaactcctacaaggaaatcatccagaacggccacgaagaagagcctctggaaaacacatggcccactccatacccgtacagcaaaaagcttgctgagaaggctgtgctggcggctaatgggtggaatctaaaaggaggcccattcctttctgccagtataaatgaggccctgaacaacaatgggatcctgtcaagtgttggaaagttctctacagtcaacccagtctatgttggcaacgtggcctgggcccacattctggccttgagggctctgcgggaccccaagaaggccccaagtgtccgaggtcaattctattacatctcagatgacacgcctcaccaaagctatgataaccttaattacatcctgagcaaagagtttggcctccgccttgattccagatggagccttcctttaaccctgatgtactggattggcttcctgctggaagtagtgagcttcctactcagcccaatttactcctatcaaccccccttcaaccgccacacagtcacattatcaaatagtgtgttcaccttctcttacaagaaggctcagcgagatctggcgtataagccactctacagctgggaggaagccaagcagaaaaccgtggagtgggttggttcccttgtggaccggcacaaggagaccctgaagtccaagactcagtgatttaaggatgacagagatgtgcatgtgggtattgttaggaaatgtcatcaaactccacccacctggcttcatacagaaggcaacaggggcacaagcccaggtcctgctgcctctctttcacacaatgcccaacttactgtcttcttcatgtcatcaaaatctgcacagtcactggcccaaccagaactttctgtcctaatcatacaccagaagacaaacaatatgatttgctgttaccaaatctcagtggctgattctgaacaattgtggtctctcttaacttgaggttctcttttgactaatagagctccatttcccctcttaaatgagaaagcatttcttttctctttaatctcctattccttcacacagttcaacataaagagcaataaatgttttaatgcttaa

SEQ ID NO: 732333 - DNA, 1808 bp, Homo sapiens
  misc_feature (1646)..(1646): n is a, c, g, or t
  misc_feature (1651)..(1651): n is a, c, g, or t
  misc_feature (1672)..(1672): n is a, c, g, or t
  misc_feature (1681)..(1681): n is a, c, g, or t
  misc_feature (1693)..(1693): n is a, c, g, or t
  misc_feature (1698)..(1699): n is a, c, g, or t
  misc_feature (1703)..(1703): n is a, c, g, or t
  misc_feature (1706)..(1706): n is a, c, g, or t
  misc_feature (1710)..(1710): n is a, c, g, or t
  misc_feature (1726)..(1726): n is a, c, g, or t
  misc_feature (1733)..(1733): n is a, c, g, or t
  misc_feature (1739)..(1739): n is a, c, g, or t
  misc_feature (1744)..(1744): n is a, c, g, or t
gcagtaaggacttggactcctctgtccagcttttaacaatctaagttacggttagagctttctccttttctttcaactactcctggcagttgtggggtcatggaatttttgtaaaaaatggggtggaggccctcttctgggtcacgctagaatcagatctgctctccagcatcttctgtttcctggcaagtgtttcctgctactttggattggccacgatgggctggagctgccttgtgacaggagcaggagggcttctgggtcagaggatcgtccgcctgttggtggaagagaaggaactgaaggagatcagggccttggacaaggccttcagaccagaattgagagaggaattttctaagctccagaacaggaccaagctgactgtacttgaaggagacattctggatgagccattcctggtctttggtgtcactcacagagagtccatcatgaatgtcaatgtgaaaggtacccagctactgttggaggcctgtgtccaagccagtgtgccagtcttcatctacaccagtagcatagaggtagccgggcccaactcctacaaggaaatcatccagaacggccacgaagaagagcctctggaaaacacatggcccactccatacccgtacagcaaaaagcttgctgagaaggctgtgctggcggctaatgggtggaatctaaaaggaggcccattcctttctgccagtataaatgaggccctgaacaacaatgggatcctgtcaagtgttggaaagttctctacagtcaacccagtctatgttggcaacgtggcctgggcccacattctggccttgagggctctgcgggaccccaagaaggccccaagtgtccgaggtcaattctattacatctcagatgacacgcctcaccaaagctatgataaccttaattacatcctgagcaaagagtttggcctccgccttgattccagatggagccttcctttaaccctgatgtactggattggcttcctgctggaagtagtgagcttcctactcagcccaatttactcctatcaaccccccttcaaccgccacacagtcacattatcaaatagtgtgttcaccttctcttacaagaaggctcagcgagatctggcgtataagccactctacagctgggaggaagccaagcagaaaaccgtggagtgggttggttcccttgtggaccggcacaaggagaccctgaagtccaagactcagtgatttaaggatgacagagatgtgcatgtgggtattgttaggaaatgtcatcaaactccacccacctggcttcatacagaaggcaacaggggcacaagcccaggtcctgctgcctctctttcacacaatgcccaacttactgtcttcttcatgtcatcaaaatctgcacagtcactggcccaaccagaactttctgtcctaatcatacaccagaagacaaacaatatgatttgctgttaccaaatctcagtggctgattctgaacaattgtggtctctcttaacttgaggttctcttttgactaatagagctccatttcccctcttaaatgagaaagcatttcttttctctttaatctcctattccttcacacagttcaacataaagagcaataaatgttttaatgcttaaaaaaaaaanaacanaccaaaaaaaaaaaaactcgnggggggccngtacccatttgncctanngggngcngttnacattaattggccggngtttaanacgggngactnggaaaaccttggcttgacccaacttaaatggctttgagcctttaccaacagttgggcaacctta

SEQ ID NO: 732334 - DNA, 1873 bp, Homo sapiens
  misc_feature (1659)..(1659): n is a, c, g, or t
  misc_feature (1664)..(1664): n is a, c, g, or t
  misc_feature (1711)..(1711): n is a, c, g, or t
  misc_feature (1716)..(1716): n is a, c, g, or t
  misc_feature (1737)..(1737): n is a, c, g, or t
  misc_feature (1746)..(1746): n is a, c, g, or t
  misc_feature (1758)..(1758): n is a, c, g, or t
  misc_feature (1763)..(1764): n is a, c, g, or t
  misc_feature (1768)..(1768): n is a, c, g, or t
  misc_feature (1771)..(1771): n is a, c, g, or t
  misc_feature (1775)..(1775): n is a, c, g, or t
  misc_feature (1791)..(1791): n is a, c, g, or t
  misc_feature (1798)..(1798): n is a, c, g, or t
  misc_feature (1804)..(1804): n is a, c, g, or t
  misc_feature (1809)..(1809): n is a, c, g, or t
gcagtaaggacttggactcctctgtccagcttttaacaatctaagttacggttagagctttctccttttctttcaactactcctggcagttgtggggtcatggaatttttgtaaaaaatggggtggaggccctcttctgggtcacgctagaatcagatctgctctccagcatcttctgtttcctggcaagtgtttcctgctactttggattggccacgatgggctggagctgccttgtgacaggagcaggagggcttctgggtcagaggatcgtccgcctgttggtggaagagaaggaactgaaggagatcagggccttggacaaggccttcagaccagaattgagagaggaattttctaagctccagaacaggaccaagctgactgtacttgaaggagacattctggatgagccattcctggtctttggtgtcactcacagagagtccatcatgaatgtcaatgtgaaaggtacccagctactgttggaggcctgtgtccaagccagtgtgccagtcttcatctacaccagtagcatagaggtagccgggcccaactcctacaaggaaatcatccagaacggccacgaagaagagcctctggaaaacacatggcccactccatacccgtacagcaaaaagcttgctgagaaggctgtgctggcggctaatgggtggaatctaaaaggaggcccattcctttctgccagtataaatgaggccctgaacaacaatgggatcctgtcaagtgttggaaagttctctacagtcaacccagtctatgttggcaacgtggcctgggcccacattctggccttgagggctctgcgggaccccaagaaggccccaagtgtccgaggtcaattctattacatctcagatgacacgcctcaccaaagctatgataaccttaattacatcctgagcaaagagtttggcctccgccttgattccagatggagccttcctttaaccctgatgtactggattggcttcctgctggaagtagtgagcttcctactcagcccaatttactcctatcaaccccccttcaaccgccacacagtcacattatcaaatagtgtgttcaccttctcttacaagaaggctcagcgagatctggcgtataagccactctacagctgggaggaagccaagcagaaaaccgtggagtgggttggttcccttgtggaccggcacaaggagaccctgaagtccaagactcagtgatttaaggatgacagagatgtgcatgtgggtattgttaggaaatgtcatcaaactccacccacctggcttcatacagaaggcaacaggggcacaagcccaggtcctgctgcctctctttcacacaatgcccaacttactgtcttcttcatgtcatcaaaatctgcacagtcactggcccaaccagaactttctgtcctaatcatacaccagaagacaaacaatatgatttgctgttaccaaatctcagtggctgattctgaacaattgtggtctctcttaacttgaggttctcttttgactaatagagctccatttcccctcttaaatgagaaagcatttcttttctctttaatctcctattccttcacacagttcaacataaagagcaataaatgttttaatgcttaaaacaaaaaaaaaaaaaaaaaanaaaanaaaaaaaaaaaaaaaaaaaaaaaaaaaaaaaaaaaaaaaaaaaaaanaacanaccaaaaaaaaaaaaactcgnggggggccngtacccatttgncctanngggngcngttnacattaattggccggngtttaanacgggngactnggaaaaccttggcttgacccaacttaaatggctttgagcctttaccaacagttgggcaacctta

SEQ ID NO: 732335 - DNA, 1584 bp, Homo sapiens
gcagtaaggacttggactcctctgtccagcttttaacaatctaagttacggttagagctttctccttttctttcaactactcctggcagttgtggggtcatggaatttttgtaaaaaatggggtggaggccctcttctgggtcacgctagaatcagatctgctctccagcatcttctgtttcctggcaagtgtttcctgctactttggattggccacgatgggctggagctgccttgtgacaggagcaggagggcttctgggtcagaggatcgtccgcctgttggtggaagagaaggaactgaaggagatcagggccttggacaaggccttcagaccagaattgagagaggaattttctaagctccagaacaggaccaagctgactgtacttgaaggagacattctggatgagccattcctggtctttggtgtcactcacagagagtccatcatgaatgtcaatgtgaaaggtacccagctactgttggaggcctgtgtccaagccagtgtgccagtcttcatctacaccagtagcatagaggtagccgggcccaactcctacaaggaaatcatccagaacggccacgaagaagagcctctggaaaacacatggcccactccatacccgtacagcaaaaagcttgctgagaaggctgtgctggcggctaatgggtggaatctaaaaggaggcccattcctttctgccagtataaatgaggccctgaacaacaatgggatcctgtcaagtgttggaaagttctctacagtcaacccagtctatgttggcaacgtggcctgggcccacattctggccttgagggctctgcgggaccccaagaaggccccaagtgtccgaggtcaattctattacatctcagatgacacgcctcaccaaagctatgataaccttaattacatcctgagcaaagagtttggcctccgccttgattccagatggagccttcctttaaccctgatgtactggattggcttcctgctggaagtagtgagcttcctactcagcccaatttactcctatcaaccccccttcaaccgccacacagtcacattatcaaatagtgtgttcaccttctcttacaagaaggctcagcgagatctggcgtataagccactctacagctgggaggaagccaagcagaaaaccgtggagtgggttggttcccttgtggaccggcacaaggagaccctgaagtccaagactcagtgatttaaggatgacagagatgtgcatgtgggtattgttaggaaatgtcatcaaactccacccacctggcttcatacagaaggcaacaggggcacaagcccaggtcctgctgcctctctttcacacaatgcccaacttactgtcttcttcatgtcatcaaaatctgcacagtcactggcccaaccagaactttctgtcctaatcatacaccagaagacaaacaatatgatttgctgttaccaaatctcagtggctgattctgaacaattgtggtctctcttaacttgaggttctcttttgaatctcctattccttcacacagttcaacataaagagcaataaatgttttaatgcttaa

SEQ ID NO: 732336 - DNA, 1581 bp, Homo sapiens
gcagtaaggacttggactcctctgtccagcttttaacaatctaagttacggttagagctttctccttttctttcaactactcctggcagttgtggggtcatggaatttttgtaaaaaatggggtggaggccctcttctgggtcacgctagaatcagatctgctctccagcatcttctgtttcctggcaagtgtttcctgctactttggattggccacgatgggctggagctgccttgtgacaggagcaggagggcttctgggtcagaggatcgtccgcctgttggtggaagagaaggaactgaaggagatcagggccttggacaaggccttcagaccagaattgagagaggaattttctaagctccagaacaggaccaagctgactgtacttgaaggagacattctggatgagccattcctggtctttggtgtcactcacagagagtccatcatgaatgtcaatgtgaaaggtacccagctactgttggaggcctgtgtccaagccagtgtgccagtcttcatctacaccagtagcatagaggtagccgggcccaactcctacaaggaaatcatccagaacggccacgaagaagagcctctggaaaacacatggcccactccatacccgtacagcaaaaagcttgctgagaaggctgtgctggcggctaatgggtggaatctaaaaggaggcccattcctttctgccagtataaatgaggccctgaacaacaatgggatcctgtcaagtgttggaaagttctctacagtcaacccagtctatgttggcaacgtggcctgggcccacattctggccttgagggctctgcgggaccccaagaaggccccaagtgtccgaggtcaattctattacatctcagatgacacgcctcaccaaagctatgataaccttaattacatcctgagcaaagagtttggcctccgccttgattccagatggagccttcctttaaccctgatgtactggattggcttcctgctggaagtagtgagcttcctactcagcccaatttactcctatcaaccccccttcaaccgccacacagtcacattatcaaatagtgtgttcaccttctcttacaagaaggctcagcgagatctggcgtataagccactctacagctgggaggaagccaagcagaaaaccgtggagtgggttggttcccttgtggaccggcacaaggagaccctgaagtccaagactcagtgatttaaggatgacagagatgtgcatgtgggtattgttaggaaatgtcatcaaactccacccacctggcttcatacagaaggcaacaggggcacaagcccaggtcctgctgcctctctttcacacaatgcccaacttactgtcttcttcatgtcatcaaaatctgcacagtcactggcccaaccagaactttctgtcctaatcatacaccagaagacaaacaatatgatttgctgttaccaaatctaatagagctccatttcccctcttaaatgagaaagcatttcttttctctttaatctcctattccttcacacagttcaacataaagagcaataaatgttttaatgcttaa

SEQ ID NO: 732337 - DNA, 1819 bp, Homo sapiens
  misc_feature (1605)..(1605): n is a, c, g, or t
  misc_feature (1610)..(1610): n is a, c, g, or t
  misc_feature (1657)..(1657): n is a, c, g, or t
  misc_feature (1662)..(1662): n is a, c, g, or t
  misc_feature (1683)..(1683): n is a, c, g, or t
  misc_feature (1692)..(1692): n is a, c, g, or t
  misc_feature (1704)..(1704): n is a, c, g, or t
  misc_feature (1709)..(1710): n is a, c, g, or t
  misc_feature (1714)..(1714): n is a, c, g, or t
  misc_feature (1717)..(1717): n is a, c, g, or t
  misc_feature (1721)..(1721): n is a, c, g, or t
  misc_feature (1737)..(1737): n is a, c, g, or t
  misc_feature (1744)..(1744): n is a, c, g, or t
  misc_feature (1750)..(1750): n is a, c, g, or t
  misc_feature (1755)..(1755): n is a, c, g, or t
gcagtaaggacttggactcctctgtccagcttttaacaatctaagttacggttagagctttctccttttctttcaactactcctggcagttgtggggtcatggaatttttgtaaaaaatggggtggaggccctcttctgggtcacgctagaatcagatctgctctccagcatcttctgtttcctggcaagtgtttcctgctactttggattggccacgatgggctggagctgccttgtgacaggagcaggagggcttctgggtcagaggatcgtccgcctgttggtggaagagaaggaactgaaggagatcagggccttggacaaggccttcagaccagaattgagagaggaattttctaagctccagaacaggaccaagctgactgtacttgaaggagacattctggatgagccattcctggtctttggtgtcactcacagagagtccatcatgaatgtcaatgtgaaaggtacccagctactgttggaggcctgtgtccaagccagtgtgccagtcttcatctacaccagtagcatagaggtagccgggcccaactcctacaaggaaatcatccagaacggccacgaagaagagcctctggaaaacacatggcccactccatacccgtacagcaaaaagcttgctgagaaggctgtgctggcggctaatgggtggaatctaaaaggaggcccattcctttctgccagtataaatgaggccctgaacaacaatgggatcctgtcaagtgttggaaagttctctacagtcaacccagtctatgttggcaacgtggcctgggcccacattctggccttgagggctctgcgggaccccaagaaggccccaagtgtccgaggtcaattctattacatctcagatgacacgcctcaccaaagctatgataaccttaattacatcctgagcaaagagtttggcctccgccttgattccagatggagccttcctttaaccctgatgtactggattggcttcctgctggaagtagtgagcttcctactcagcccaatttactcctatcaaccccccttcaaccgccacacagtcacattatcaaatagtgtgttcaccttctcttacaagaaggctcagcgagatctggcgtataagccactctacagctgggaggaagccaagcagtccaagactcagtgatttaaggatgacagagatgtgcatgtgggtattgttaggaaatgtcatcaaactccacccacctggcttcatacagaaggcaacaggggcacaagcccaggtcctgctgcctctctttcacacaatgcccaacttactgtcttcttcatgtcatcaaaatctgcacagtcactggcccaaccagaactttctgtcctaatcatacaccagaagacaaacaatatgatttgctgttaccaaatctcagtggctgattctgaacaattgtggtctctcttaacttgaggttctcttttgactaatagagctccatttcccctcttaaatgagaaagcatttcttttctctttaatctcctattccttcacacagttcaacataaagagcaataaatgttttaatgcttaaaacaaaaaaaaaaaaaaaaaanaaaanaaaaaaaaaaaaaaaaaaaaaaaaaaaaaaaaaaaaaaaaaaaaaanaacanaccaaaaaaaaaaaaactcgnggggggccngtacccatttgncctanngggngcngttnacattaattggccggngtttaanacgggngactnggaaaaccttggcttgacccaacttaaatggctttgagcctttaccaacagttgggcaacctta

SEQ ID NO: 732338 - DNA, 1693 bp, Homo sapiens
gcagtaaggacttggactcctctgtccagcttttaacaatctaagttacggttagagctttctccttttctttcaactactcctggcagttgtggggtcatggaatttttgtaaaaaatggggtggaggccctcttctgggtcacgctagaatcagatctgctctccagcatcttctgtttcctggcaagtgtttcctgctactttggattggccacgatgggctggagctgccttgtgacaggagcaggagggcttctgggtcagaggatcgtccgcctgttggtggaagagaaggaactgaaggagatcagggccttggacaaggccttcagaccagaattgagagaggaattttctaagctccagaacaggaccaagctgactgtacttgaaggagacattctggatgagccattcctggtctttggtgtcactcacagagagtccatcatgaatgtcaatgtgaaaggtacccagctactgttggaggcctgtgtccaagccagtgtgccagtcttcatctacaccagtagcatagaggtagccgggcccaactcctacaaggaaatcatccagaacggccacgaagaagagcctctggaaaacacatggcccactccatacccgtacagcaaaaagcttgctgagaaggctgtgctggcggctaatgggtggaatctaaaaaaatggtgataccttgtacacttgtgcgttaagacccacatatatctatggggaagggaggcccattcctttctgccagtataaatgaggccctgaacaacaatgggatcctgtcaagtgttggaaagttctctacagtcaacccagtctatgttggcaacgtggcctgggcccacattctggccttgagggctctgcgggaccccaagaaggccccaagtgtccgaggtcaattctattacatctcagatgacacgcctcaccaaagctatgataaccttaattacatcctgagcaaagagtttggcctccgccttgattccagatggagccttcctttaaccctgatgtactggattggcttcctgctggaagtagtgagcttcctactcagcccaatttactcctatcaaccccccttcaaccgccacacagtcacattatcaaatagtgtgttcaccttctcttacaagaaggctcagcgagatctggcgtataagccactctacagctgggaggaagccaagcagaaaaccgtggagtgggttggttcccttgtggaccggcacaaggagaccctgaagtccaagactcagtgatttaaggatgacagagatgtgcatgtgggtattgttaggaaatgtcatcaaactccacccacctggcttcatacagaaggcaacaggggcacaagcccaggtcctgctgcctctctttcacacaatgcccaacttactgtcttcttcatgtcatcaaaatctgcacagtcactggcccaaccagaactttctgtcctaatcatacaccagaagacaaacaatatgatttgctgttaccaaatctcagtggctgattctgaacaattgtggtctctcttaacttgaggttctcttttgactaatagagctccatttcccctcttaaatgagaaagcatttcttttctctttaatctcctattccttcacacagttcaacataaagagcaataaatgttttaatgcttaa

SEQ ID NO: 732339 - DNA, 1864 bp, Homo sapiens
  misc_feature (1702)..(1702): n is a, c, g, or t
  misc_feature (1707)..(1707): n is a, c, g, or t
  misc_feature (1728)..(1728): n is a, c, g, or t
  misc_feature (1737)..(1737): n is a, c, g, or t
  misc_feature (1749)..(1749): n is a, c, g, or t
  misc_feature (1754)..(1755): n is a, c, g, or t
  misc_feature (1759)..(1759): n is a, c, g, or t
  misc_feature (1762)..(1762): n is a, c, g, or t
  misc_feature (1766)..(1766): n is a, c, g, or t
  misc_feature (1782)..(1782): n is a, c, g, or t
  misc_feature (1789)..(1789): n is a, c, g, or t
  misc_feature (1795)..(1795): n is a, c, g, or t
  misc_feature (1800)..(1800): n is a, c, g, or t
gcagtaaggacttggactcctctgtccagcttttaacaatctaagttacggttagagctttctccttttctttcaactactcctggcagttgtggggtcatggaatttttgtaaaaaatggggtggaggccctcttctgggtcacgctagaatcagatctgctctccagcatcttctgtttcctggcaagtgtttcctgctactttggattggccacgatgggctggagctgccttgtgacaggagcaggagggcttctgggtcagaggatcgtccgcctgttggtggaagagaaggaactgaaggagatcagggccttggacaaggccttcagaccagaattgagagaggaattttctaagctccagaacaggaccaagctgactgtacttgaaggagacattctggatgagccattcctggtctttggtgtcactcacagagagtccatcatgaatgtcaatgtgaaaggtacccagctactgttggaggcctgtgtccaagccagtgtgccagtcttcatctacaccagtagcatagaggtagccgggcccaactcctacaaggaaatcatccagaacggccacgaagaagagcctctggaaaacacatggcccactccatacccgtacagcaaaaagcttgctgagaaggctgtgctggcggctaatgggtggaatctaaaaaaatggtgataccttgtacacttgtgcgttaagacccacatatatctatggggaagggaggcccattcctttctgccagtataaatgaggccctgaacaacaatgggatcctgtcaagtgttggaaagttctctacagtcaacccagtctatgttggcaacgtggcctgggcccacattctggccttgagggctctgcgggaccccaagaaggccccaagtgtccgaggtcaattctattacatctcagatgacacgcctcaccaaagctatgataaccttaattacatcctgagcaaagagtttggcctccgccttgattccagatggagccttcctttaaccctgatgtactggattggcttcctgctggaagtagtgagcttcctactcagcccaatttactcctatcaaccccccttcaaccgccacacagtcacattatcaaatagtgtgttcaccttctcttacaagaaggctcagcgagatctggcgtataagccactctacagctgggaggaagccaagcagaaaaccgtggagtgggttggttcccttgtggaccggcacaaggagaccctgaagtccaagactcagtgatttaaggatgacagagatgtgcatgtgggtattgttaggaaatgtcatcaaactccacccacctggcttcatacagaaggcaacaggggcacaagcccaggtcctgctgcctctctttcacacaatgcccaacttactgtcttcttcatgtcatcaaaatctgcacagtcactggcccaaccagaactttctgtcctaatcatacaccagaagacaaacaatatgatttgctgttaccaaatctcagtggctgattctgaacaattgtggtctctcttaacttgaggttctcttttgactaatagagctccatttcccctcttaaatgagaaagcatttcttttctctttaatctcctattccttcacacagttcaacataaagagcaataaatgttttaatgcttaaaaaaaaaanaacanaccaaaaaaaaaaaaactcgnggggggccngtacccatttgncctanngggngcngttnacattaattggccggngtttaanacgggngactnggaaaaccttggcttgacccaacttaaatggctttgagcctttaccaacagttgggcaacctta

SEQ ID NO: 732340 - DNA, 1929 bp, Homo sapiens
  misc_feature (1715)..(1715): n is a, c, g, or t
  misc_feature (1720)..(1720): n is a, c, g, or t
  misc_feature (1767)..(1767): n is a, c, g, or t
  misc_feature (1772)..(1772): n is a, c, g, or t
  misc_feature (1793)..(1793): n is a, c, g, or t
  misc_feature (1802)..(1802): n is a, c, g, or t
  misc_feature (1814)..(1814): n is a, c, g, or t
  misc_feature (1819)..(1820): n is a, c, g, or t
  misc_feature (1824)..(1824): n is a, c, g, or t
  misc_feature (1827)..(1827): n is a, c, g, or t
  misc_feature (1831)..(1831): n is a, c, g, or t
  misc_feature (1847)..(1847): n is a, c, g, or t
  misc_feature (1854)..(1854): n is a, c, g, or t
  misc_feature (1860)..(1860): n is a, c, g, or t
  misc_feature (1865)..(1865): n is a, c, g, or t
gcagtaaggacttggactcctctgtccagcttttaacaatctaagttacggttagagctttctccttttctttcaactactcctggcagttgtggggtcatggaatttttgtaaaaaatggggtggaggccctcttctgggtcacgctagaatcagatctgctctccagcatcttctgtttcctggcaagtgtttcctgctactttggattggccacgatgggctggagctgccttgtgacaggagcaggagggcttctgggtcagaggatcgtccgcctgttggtggaagagaaggaactgaaggagatcagggccttggacaaggccttcagaccagaattgagagaggaattttctaagctccagaacaggaccaagctgactgtacttgaaggagacattctggatgagccattcctggtctttggtgtcactcacagagagtccatcatgaatgtcaatgtgaaaggtacccagctactgttggaggcctgtgtccaagccagtgtgccagtcttcatctacaccagtagcatagaggtagccgggcccaactcctacaaggaaatcatccagaacggccacgaagaagagcctctggaaaacacatggcccactccatacccgtacagcaaaaagcttgctgagaaggctgtgctggcggctaatgggtggaatctaaaaaaatggtgataccttgtacacttgtgcgttaagacccacatatatctatggggaagggaggcccattcctttctgccagtataaatgaggccctgaacaacaatgggatcctgtcaagtgttggaaagttctctacagtcaacccagtctatgttggcaacgtggcctgggcccacattctggccttgagggctctgcgggaccccaagaaggccccaagtgtccgaggtcaattctattacatctcagatgacacgcctcaccaaagctatgataaccttaattacatcctgagcaaagagtttggcctccgccttgattccagatggagccttcctttaaccctgatgtactggattggcttcctgctggaagtagtgagcttcctactcagcccaatttactcctatcaaccccccttcaaccgccacacagtcacattatcaaatagtgtgttcaccttctcttacaagaaggctcagcgagatctggcgtataagccactctacagctgggaggaagccaagcagaaaaccgtggagtgggttggttcccttgtggaccggcacaaggagaccctgaagtccaagactcagtgatttaaggatgacagagatgtgcatgtgggtattgttaggaaatgtcatcaaactccacccacctggcttcatacagaaggcaacaggggcacaagcccaggtcctgctgcctctctttcacacaatgcccaacttactgtcttcttcatgtcatcaaaatctgcacagtcactggcccaaccagaactttctgtcctaatcatacaccagaagacaaacaatatgatttgctgttaccaaatctcagtggctgattctgaacaattgtggtctctcttaacttgaggttctcttttgactaatagagctccatttcccctcttaaatgagaaagcatttcttttctctttaatctcctattccttcacacagttcaacataaagagcaataaatgttttaatgcttaaaacaaaaaaaaaaaaaaaaaanaaaanaaaaaaaaaaaaaaaaaaaaaaaaaaaaaaaaaaaaaaaaaaaaaanaacanaccaaaaaaaaaaaaactcgnggggggccngtacccatttgncctanngggngcngttnacattaattggccggngtttaanacgggngactnggaaaaccttggcttgacccaacttaaatggctttgagcctttaccaacagttgggcaacctta

SEQ ID NO: 732341 - DNA, 1639 bp, Homo sapiens
gcagtaaggacttggactcctctgtccagcttttaacaatctaagttacggttagagctttctccttttctttcaactactcctggcagttgtggggtcatggaatttttgtaaaaaatggggtggaggccctcttctgggtcacgctagaatcagatctgctctccagcatcttctgtttcctggcaagtgtttcctgctactttggattggccacgatgggctggagctgccttgtgacaggagcaggagggcttctgggtcagaggatcgtccgcctgttggtggaagagaaggaactgaaggagatcagggccttggacaaggccttcagaccagaattgagagaggaattttctaagctccagaacaggaccaagctgactgtacttgaaggagacattctggatgagccattcctggtctttggtgtcactcacagagagtccatcatgaatgtcaatgtgaaaggtacccagctactgttggaggcctgtgtccaagccagtgtgccagtcttcatctacaccagtagcatagaggtagccgggcccaactcctacaaggaaatcatccagaacggccacgaagaagagcctctggaaaacacatggcccactccatacccgtacagcaaaaagcttgctgagaaggctgtgctggcggctaatgggtggaatctaaaaaaatggtgataccttgtacacttgtgcgttaagacccacatatatctatggggaagggaggcccattcctttctgccagtataaatgaggccctgaacaacaatgggatcctgtcaagtgttggaaagttctctacagtcaacccagtctatgttggcaacgtggcctgggcccacattctggccttgagggctctgcgggaccccaagaaggccccaagtgtccgaggtcaattctattacatctcagatgacacgcctcaccaaagctatgataaccttaattacatcctgagcaaagagtttggcctccgccttgattccagatggagccttcctttaaccctgatgtactggattggcttcctgctggaagtagtgagcttcctactcagcccaatttactcctatcaaccccccttcaaccgccacacagtcacattatcaaatagtgtgttcaccttctcttacaagaaggctcagcgagatctggcgtataagccactctacagctgggaggaagccaagcagaaaaccgtggagtgggttggttcccttgtggaccggcacaaggagaccctgaagtccaagactcagtgatttaaggatgacagagatgtgcatgtgggtattgttaggaaatgtcatcaaactccacccacctggcttcatacagaaggcaacaggggcacaagcccaggtcctgctgcctctctttcacacaatgcccaacttactgtcttcttcatgtcatcgaagacaaacaatatgatttgctgttaccaaatctcagtggctgattctgaacaattgtggtctctcttaacttgaggttctcttttgactaatagagctccatttcccctcttaaatgagaaagcatttcttttctctttaatctcctattccttcacacagttcaacataaagagcaataaatgttttaatgcttaa

SEQ ID NO: 732342 - DNA, 1640 bp, Homo sapiens
gcagtaaggacttggactcctctgtccagcttttaacaatctaagttacggttagagctttctccttttctttcaactactcctggcagttgtggggtcatggaatttttgtaaaaaatggggtggaggccctcttctgggtcacgctagaatcagatctgctctccagcatcttctgtttcctggcaagtgtttcctgctactttggattggccacgatgggctggagctgccttgtgacaggagcaggagggcttctgggtcagaggatcgtccgcctgttggtggaagagaaggaactgaaggagatcagggccttggacaaggccttcagaccagaattgagagaggaattttctaagctccagaacaggaccaagctgactgtacttgaaggagacattctggatgagccattcctggtctttggtgtcactcacagagagtccatcatgaatgtcaatgtgaaaggtacccagctactgttggaggcctgtgtccaagccagtgtgccagtcttcatctacaccagtagcatagaggtagccgggcccaactcctacaaggaaatcatccagaacggccacgaagaagagcctctggaaaacacatggcccactccatacccgtacagcaaaaagcttgctgagaaggctgtgctggcggctaatgggtggaatctaaaaaaatggtgataccttgtacacttgtgcgttaagacccacatatatctatggggaagggaggcccattcctttctgccagtataaatgaggccctgaacaacaatgggatcctgtcaagtgttggaaagttctctacagtcaacccagtctatgttggcaacgtggcctgggcccacattctggccttgagggctctgcgggaccccaagaaggccccaagtgtccgaggtcaattctattacatctcagatgacacgcctcaccaaagctatgataaccttaattacatcctgagcaaagagtttggcctccgccttgattccagatggagccttcctttaaccctgatgtactggattggcttcctgctggaagtagtgagcttcctactcagcccaatttactcctatcaaccccccttcaaccgccacacagtcacattatcaaatagtgtgttcaccttctcttacaagaaggctcagcgagatctggcgtataagccactctacagctgggaggaagccaagcagaaaaccgtggagtgggttggttcccttgtggaccggcacaaggagaccctgaagtccaagactcagtgatttaaggatgacagagatgtgcatgtgggtattgttaggaaatgtcatcaaactccacccacctggcttcatacagaaggcaacaggggcacaagcccaggtcctgctgcctctctttcacacaatgcccaacttactgtcttcttcatgtcatcaaaatctgcacagtcactggcccaaccagaactttctgtcctaatcatacaccagaagacaaacaatatgatttgctgttaccaaatctcagtggctgattctgaacaattgtggtctctcttaacttgaggttctcttttgaatctcctattccttcacacagttcaacataaagagcaataaatgttttaatgcttaa

SEQ ID NO: 732343 - DNA, 1637 bp, Homo sapiens
gcagtaaggacttggactcctctgtccagcttttaacaatctaagttacggttagagctttctccttttctttcaactactcctggcagttgtggggtcatggaatttttgtaaaaaatggggtggaggccctcttctgggtcacgctagaatcagatctgctctccagcatcttctgtttcctggcaagtgtttcctgctactttggattggccacgatgggctggagctgccttgtgacaggagcaggagggcttctgggtcagaggatcgtccgcctgttggtggaagagaaggaactgaaggagatcagggccttggacaaggccttcagaccagaattgagagaggaattttctaagctccagaacaggaccaagctgactgtacttgaaggagacattctggatgagccattcctggtctttggtgtcactcacagagagtccatcatgaatgtcaatgtgaaaggtacccagctactgttggaggcctgtgtccaagccagtgtgccagtcttcatctacaccagtagcatagaggtagccgggcccaactcctacaaggaaatcatccagaacggccacgaagaagagcctctggaaaacacatggcccactccatacccgtacagcaaaaagcttgctgagaaggctgtgctggcggctaatgggtggaatctaaaaaaatggtgataccttgtacacttgtgcgttaagacccacatatatctatggggaagggaggcccattcctttctgccagtataaatgaggccctgaacaacaatgggatcctgtcaagtgttggaaagttctctacagtcaacccagtctatgttggcaacgtggcctgggcccacattctggccttgagggctctgcgggaccccaagaaggccccaagtgtccgaggtcaattctattacatctcagatgacacgcctcaccaaagctatgataaccttaattacatcctgagcaaagagtttggcctccgccttgattccagatggagccttcctttaaccctgatgtactggattggcttcctgctggaagtagtgagcttcctactcagcccaatttactcctatcaaccccccttcaaccgccacacagtcacattatcaaatagtgtgttcaccttctcttacaagaaggctcagcgagatctggcgtataagccactctacagctgggaggaagccaagcagaaaaccgtggagtgggttggttcccttgtggaccggcacaaggagaccctgaagtccaagactcagtgatttaaggatgacagagatgtgcatgtgggtattgttaggaaatgtcatcaaactccacccacctggcttcatacagaaggcaacaggggcacaagcccaggtcctgctgcctctctttcacacaatgcccaacttactgtcttcttcatgtcatcaaaatctgcacagtcactggcccaaccagaactttctgtcctaatcatacaccagaagacaaacaatatgatttgctgttaccaaatctaatagagctccatttcccctcttaaatgagaaagcatttcttttctctttaatctcctattccttcacacagttcaacataaagagcaataaatgttttaatgcttaa

SEQ ID NO: 732344 - DNA, 1875 bp, Homo sapiens
  misc_feature (1661)..(1661): n is a, c, g, or t
  misc_feature (1666)..(1666): n is a, c, g, or t
  misc_feature (1713)..(1713): n is a, c, g, or t
  misc_feature (1718)..(1718): n is a, c, g, or t
  misc_feature (1739)..(1739): n is a, c, g, or t
  misc_feature (1748)..(1748): n is a, c, g, or t
  misc_feature (1760)..(1760): n is a, c, g, or t
  misc_feature (1765)..(1766): n is a, c, g, or t
  misc_feature (1770)..(1770): n is a, c, g, or t
  misc_feature (1773)..(1773): n is a, c, g, or t
  misc_feature (1777)..(1777): n is a, c, g, or t
  misc_feature (1793)..(1793): n is a, c, g, or t
  misc_feature (1800)..(1800): n is a, c, g, or t
  misc_feature (1806)..(1806): n is a, c, g, or t
  misc_feature (1811)..(1811): n is a, c, g, or t
gcagtaaggacttggactcctctgtccagcttttaacaatctaagttacggttagagctttctccttttctttcaactactcctggcagttgtggggtcatggaatttttgtaaaaaatggggtggaggccctcttctgggtcacgctagaatcagatctgctctccagcatcttctgtttcctggcaagtgtttcctgctactttggattggccacgatgggctggagctgccttgtgacaggagcaggagggcttctgggtcagaggatcgtccgcctgttggtggaagagaaggaactgaaggagatcagggccttggacaaggccttcagaccagaattgagagaggaattttctaagctccagaacaggaccaagctgactgtacttgaaggagacattctggatgagccattcctggtctttggtgtcactcacagagagtccatcatgaatgtcaatgtgaaaggtacccagctactgttggaggcctgtgtccaagccagtgtgccagtcttcatctacaccagtagcatagaggtagccgggcccaactcctacaaggaaatcatccagaacggccacgaagaagagcctctggaaaacacatggcccactccatacccgtacagcaaaaagcttgctgagaaggctgtgctggcggctaatgggtggaatctaaaaaaatggtgataccttgtacacttgtgcgttaagacccacatatatctatggggaagggaggcccattcctttctgccagtataaatgaggccctgaacaacaatgggatcctgtcaagtgttggaaagttctctacagtcaacccagtctatgttggcaacgtggcctgggcccacattctggccttgagggctctgcgggaccccaagaaggccccaagtgtccgaggtcaattctattacatctcagatgacacgcctcaccaaagctatgataaccttaattacatcctgagcaaagagtttggcctccgccttgattccagatggagccttcctttaaccctgatgtactggattggcttcctgctggaagtagtgagcttcctactcagcccaatttactcctatcaaccccccttcaaccgccacacagtcacattatcaaatagtgtgttcaccttctcttacaagaaggctcagcgagatctggcgtataagccactctacagctgggaggaagccaagcagtccaagactcagtgatttaaggatgacagagatgtgcatgtgggtattgttaggaaatgtcatcaaactccacccacctggcttcatacagaaggcaacaggggcacaagcccaggtcctgctgcctctctttcacacaatgcccaacttactgtcttcttcatgtcatcaaaatctgcacagtcactggcccaaccagaactttctgtcctaatcatacaccagaagacaaacaatatgatttgctgttaccaaatctcagtggctgattctgaacaattgtggtctctcttaacttgaggttctcttttgactaatagagctccatttcccctcttaaatgagaaagcatttcttttctctttaatctcctattccttcacacagttcaacataaagagcaataaatgttttaatgcttaaaacaaaaaaaaaaaaaaaaaanaaaanaaaaaaaaaaaaaaaaaaaaaaaaaaaaaaaaaaaaaaaaaaaaaanaacanaccaaaaaaaaaaaaactcgnggggggccngtacccatttgncctanngggngcngttnacattaattggccggngtttaanacgggngactnggaaaaccttggcttgacccaacttaaatggctttgagcctttaccaacagttgggcaacctta

SEQ ID NO: 732345 - DNA, 1747 bp, Homo sapiens
gcagtaaggacttggactcctctgtccagcttttaacaatctaagttacggttagagctttctccttttctttcaactactcctggcagttgtggggtcatggaatttttgtaaaaaatggggtggaggccctcttctgggtcacgctagaatcagatctgctctccagcatcttctgtttcctggcaagtgtttcctgctactttggattggccacgatgggctggagctgccttgtgacaggagcaggagggcttctgggtcagaggatcgtccgcctgttggtggaagagaaggaactgaaggagatcagggccttggacaaggccttcagaccagaattgagagaggaattttctaagctccagaacaggaccaagctgactgtacttgaaggagacattctggatgagccattcctgaaaagagcctgccaggacgtctcggtcgtcatccacaccgcctgtatcattgatgtctttggtgtcactcacagagagtccatcatgaatgtcaatgtgaaaggtacccagctactgttggaggcctgtgtccaagccagtgtgccagtcttcatctacaccagtagcatagaggtagccgggcccaactcctacaaggaaatcatccagaacggccacgaagaagagcctctggaaaacacatggcccactccatacccgtacagcaaaaagcttgctgagaaggctgtgctggcggctaatgggtggaatctaaaaaaatggtgataccttgtacacttgtgcgttaagacccacatatatctatggggaagggaggcccattcctttctgccagtataaatgaggccctgaacaacaatgggatcctgtcaagtgttggaaagttctctacagtcaacccagtctatgttggcaacgtggcctgggcccacattctggccttgagggctctgcgggaccccaagaaggccccaagtgtccgaggtcaattctattacatctcagatgacacgcctcaccaaagctatgataaccttaattacatcctgagcaaagagtttggcctccgccttgattccagatggagccttcctttaaccctgatgtactggattggcttcctgctggaagtagtgagcttcctactcagcccaatttactcctatcaaccccccttcaaccgccacacagtcacattatcaaatagtgtgttcaccttctcttacaagaaggctcagcgagatctggcgtataagccactctacagctgggaggaagccaagcagaaaaccgtggagtgggttggttcccttgtggaccggcacaaggagaccctgaagtccaagactcagtgatttaaggatgacagagatgtgcatgtgggtattgttaggaaatgtcatcaaactccacccacctggcttcatacagaaggcaacaggggcacaagcccaggtcctgctgcctctctttcacacaatgcccaacttactgtcttcttcatgtcatcaaaatctgcacagtcactggcccaaccagaactttctgtcctaatcatacaccagaagacaaacaatatgatttgctgttaccaaatctcagtggctgattctgaacaattgtggtctctcttaacttgaggttctcttttgactaatagagctccatttcccctcttaaatgagaaagcatttcttttctctttaatctcctattccttcacacagttcaacataaagagcaataaatgttttaatgcttaa

SEQ ID NO: 732346 - DNA, 1918 bp, Homo sapiens
  misc_feature (1756)..(1756): n is a, c, g, or t
  misc_feature (1761)..(1761): n is a, c, g, or t
  misc_feature (1782)..(1782): n is a, c, g, or t
  misc_feature (1791)..(1791): n is a, c, g, or t
  misc_feature (1803)..(1803): n is a, c, g, or t
  misc_feature (1808)..(1809): n is a, c, g, or t
  misc_feature (1813)..(1813): n is a, c, g, or t
  misc_feature (1816)..(1816): n is a, c, g, or t
  misc_feature (1820)..(1820): n is a, c, g, or t
  misc_feature (1836)..(1836): n is a, c, g, or t
  misc_feature (1843)..(1843): n is a, c, g, or t
  misc_feature (1849)..(1849): n is a, c, g, or t
  misc_feature (1854)..(1854): n is a, c, g, or t
gcagtaaggacttggactcctctgtccagcttttaacaatctaagttacggttagagctttctccttttctttcaactactcctggcagttgtggggtcatggaatttttgtaaaaaatggggtggaggccctcttctgggtcacgctagaatcagatctgctctccagcatcttctgtttcctggcaagtgtttcctgctactttggattggccacgatgggctggagctgccttgtgacaggagcaggagggcttctgggtcagaggatcgtccgcctgttggtggaagagaaggaactgaaggagatcagggccttggacaaggccttcagaccagaattgagagaggaattttctaagctccagaacaggaccaagctgactgtacttgaaggagacattctggatgagccattcctgaaaagagcctgccaggacgtctcggtcgtcatccacaccgcctgtatcattgatgtctttggtgtcactcacagagagtccatcatgaatgtcaatgtgaaaggtacccagctactgttggaggcctgtgtccaagccagtgtgccagtcttcatctacaccagtagcatagaggtagccgggcccaactcctacaaggaaatcatccagaacggccacgaagaagagcctctggaaaacacatggcccactccatacccgtacagcaaaaagcttgctgagaaggctgtgctggcggctaatgggtggaatctaaaaaaatggtgataccttgtacacttgtgcgttaagacccacatatatctatggggaagggaggcccattcctttctgccagtataaatgaggccctgaacaacaatgggatcctgtcaagtgttggaaagttctctacagtcaacccagtctatgttggcaacgtggcctgggcccacattctggccttgagggctctgcgggaccccaagaaggccccaagtgtccgaggtcaattctattacatctcagatgacacgcctcaccaaagctatgataaccttaattacatcctgagcaaagagtttggcctccgccttgattccagatggagccttcctttaaccctgatgtactggattggcttcctgctggaagtagtgagcttcctactcagcccaatttactcctatcaaccccccttcaaccgccacacagtcacattatcaaatagtgtgttcaccttctcttacaagaaggctcagcgagatctggcgtataagccactctacagctgggaggaagccaagcagaaaaccgtggagtgggttggttcccttgtggaccggcacaaggagaccctgaagtccaagactcagtgatttaaggatgacagagatgtgcatgtgggtattgttaggaaatgtcatcaaactccacccacctggcttcatacagaaggcaacaggggcacaagcccaggtcctgctgcctctctttcacacaatgcccaacttactgtcttcttcatgtcatcaaaatctgcacagtcactggcccaaccagaactttctgtcctaatcatacaccagaagacaaacaatatgatttgctgttaccaaatctcagtggctgattctgaacaattgtggtctctcttaacttgaggttctcttttgactaatagagctccatttcccctcttaaatgagaaagcatttcttttctctttaatctcctattccttcacacagttcaacataaagagcaataaatgttttaatgcttaaaaaaaaaanaacanaccaaaaaaaaaaaaactcgnggggggccngtacccatttgncctanngggngcngttnacattaattggccggngtttaanacgggngactnggaaaaccttggcttgacccaacttaaatggctttgagcctttaccaacagttgggcaacctta

SEQ ID NO: 732347 - DNA, 1983 bp, Homo sapiens
  misc_feature (1769)..(1769): n is a, c, g, or t
  misc_feature (1774)..(1774): n is a, c, g, or t
  misc_feature (1821)..(1821): n is a, c, g, or t
  misc_feature (1826)..(1826): n is a, c, g, or t
  misc_feature (1847)..(1847): n is a, c, g, or t
  misc_feature (1856)..(1856): n is a, c, g, or t
  misc_feature (1868)..(1868): n is a, c, g, or t
  misc_feature (1873)..(1874): n is a, c, g, or t
  misc_feature (1878)..(1878): n is a, c, g, or t
  misc_feature (1881)..(1881): n is a, c, g, or t
  misc_feature (1885)..(1885): n is a, c, g, or t
  misc_feature (1901)..(1901): n is a, c, g, or t
  misc_feature (1908)..(1908): n is a, c, g, or t
  misc_feature (1914)..(1914): n is a, c, g, or t
  misc_feature (1919)..(1919): n is a, c, g, or t
gcagtaaggacttggactcctctgtccagcttttaacaatctaagttacggttagagctttctccttttctttcaactactcctggcagttgtggggtcatggaatttttgtaaaaaatggggtggaggccctcttctgggtcacgctagaatcagatctgctctccagcatcttctgtttcctggcaagtgtttcctgctactttggattggccacgatgggctggagctgccttgtgacaggagcaggagggcttctgggtcagaggatcgtccgcctgttggtggaagagaaggaactgaaggagatcagggccttggacaaggccttcagaccagaattgagagaggaattttctaagctccagaacaggaccaagctgactgtacttgaaggagacattctggatgagccattcctgaaaagagcctgccaggacgtctcggtcgtcatccacaccgcctgtatcattgatgtctttggtgtcactcacagagagtccatcatgaatgtcaatgtgaaaggtacccagctactgttggaggcctgtgtccaagccagtgtgccagtcttcatctacaccagtagcatagaggtagccgggcccaactcctacaaggaaatcatccagaacggccacgaagaagagcctctggaaaacacatggcccactccatacccgtacagcaaaaagcttgctgagaaggctgtgctggcggctaatgggtggaatctaaaaaaatggtgataccttgtacacttgtgcgttaagacccacatatatctatggggaagggaggcccattcctttctgccagtataaatgaggccctgaacaacaatgggatcctgtcaagtgttggaaagttctctacagtcaacccagtctatgttggcaacgtggcctgggcccacattctggccttgagggctctgcgggaccccaagaaggccccaagtgtccgaggtcaattctattacatctcagatgacacgcctcaccaaagctatgataaccttaattacatcctgagcaaagagtttggcctccgccttgattccagatggagccttcctttaaccctgatgtactggattggcttcctgctggaagtagtgagcttcctactcagcccaatttactcctatcaaccccccttcaaccgccacacagtcacattatcaaatagtgtgttcaccttctcttacaagaaggctcagcgagatctggcgtataagccactctacagctgggaggaagccaagcagaaaaccgtggagtgggttggttcccttgtggaccggcacaaggagaccctgaagtccaagactcagtgatttaaggatgacagagatgtgcatgtgggtattgttaggaaatgtcatcaaactccacccacctggcttcatacagaaggcaacaggggcacaagcccaggtcctgctgcctctctttcacacaatgcccaacttactgtcttcttcatgtcatcaaaatctgcacagtcactggcccaaccagaactttctgtcctaatcatacaccagaagacaaacaatatgatttgctgttaccaaatctcagtggctgattctgaacaattgtggtctctcttaacttgaggttctcttttgactaatagagctccatttcccctcttaaatgagaaagcatttcttttctctttaatctcctattccttcacacagttcaacataaagagcaataaatgttttaatgcttaaaacaaaaaaaaaaaaaaaaaanaaaanaaaaaaaaaaaaaaaaaaaaaaaaaaaaaaaaaaaaaaaaaaaaaanaacanaccaaaaaaaaaaaaactcgnggggggccngtacccatttgncctanngggngcngttnacattaattggccggngtttaanacgggngactnggaaaaccttggcttgacccaacttaaatggctttgagcctttaccaacagttgggcaacctta

SEQ ID NO: 732348 - DNA, 1693 bp, Homo sapiens
gcagtaaggacttggactcctctgtccagcttttaacaatctaagttacggttagagctttctccttttctttcaactactcctggcagttgtggggtcatggaatttttgtaaaaaatggggtggaggccctcttctgggtcacgctagaatcagatctgctctccagcatcttctgtttcctggcaagtgtttcctgctactttggattggccacgatgggctggagctgccttgtgacaggagcaggagggcttctgggtcagaggatcgtccgcctgttggtggaagagaaggaactgaaggagatcagggccttggacaaggccttcagaccagaattgagagaggaattttctaagctccagaacaggaccaagctgactgtacttgaaggagacattctggatgagccattcctgaaaagagcctgccaggacgtctcggtcgtcatccacaccgcctgtatcattgatgtctttggtgtcactcacagagagtccatcatgaatgtcaatgtgaaaggtacccagctactgttggaggcctgtgtccaagccagtgtgccagtcttcatctacaccagtagcatagaggtagccgggcccaactcctacaaggaaatcatccagaacggccacgaagaagagcctctggaaaacacatggcccactccatacccgtacagcaaaaagcttgctgagaaggctgtgctggcggctaatgggtggaatctaaaaaaatggtgataccttgtacacttgtgcgttaagacccacatatatctatggggaagggaggcccattcctttctgccagtataaatgaggccctgaacaacaatgggatcctgtcaagtgttggaaagttctctacagtcaacccagtctatgttggcaacgtggcctgggcccacattctggccttgagggctctgcgggaccccaagaaggccccaagtgtccgaggtcaattctattacatctcagatgacacgcctcaccaaagctatgataaccttaattacatcctgagcaaagagtttggcctccgccttgattccagatggagccttcctttaaccctgatgtactggattggcttcctgctggaagtagtgagcttcctactcagcccaatttactcctatcaaccccccttcaaccgccacacagtcacattatcaaatagtgtgttcaccttctcttacaagaaggctcagcgagatctggcgtataagccactctacagctgggaggaagccaagcagaaaaccgtggagtgggttggttcccttgtggaccggcacaaggagaccctgaagtccaagactcagtgatttaaggatgacagagatgtgcatgtgggtattgttaggaaatgtcatcaaactccacccacctggcttcatacagaaggcaacaggggcacaagcccaggtcctgctgcctctctttcacacaatgcccaacttactgtcttcttcatgtcatcgaagacaaacaatatgatttgctgttaccaaatctcagtggctgattctgaacaattgtggtctctcttaacttgaggttctcttttgactaatagagctccatttcccctcttaaatgagaaagcatttcttttctctttaatctcctattccttcacacagttcaacataaagagcaataaatgttttaatgcttaa

SEQ ID NO: 732349 - DNA, 1694 bp, Homo sapiens
gcagtaaggacttggactcctctgtccagcttttaacaatctaagttacggttagagctttctccttttctttcaactactcctggcagttgtggggtcatggaatttttgtaaaaaatggggtggaggccctcttctgggtcacgctagaatcagatctgctctccagcatcttctgtttcctggcaagtgtttcctgctactttggattggccacgatgggctggagctgccttgtgacaggagcaggagggcttctgggtcagaggatcgtccgcctgttggtggaagagaaggaactgaaggagatcagggccttggacaaggccttcagaccagaattgagagaggaattttctaagctccagaacaggaccaagctgactgtacttgaaggagacattctggatgagccattcctgaaaagagcctgccaggacgtctcggtcgtcatccacaccgcctgtatcattgatgtctttggtgtcactcacagagagtccatcatgaatgtcaatgtgaaaggtacccagctactgttggaggcctgtgtccaagccagtgtgccagtcttcatctacaccagtagcatagaggtagccgggcccaactcctacaaggaaatcatccagaacggccacgaagaagagcctctggaaaacacatggcccactccatacccgtacagcaaaaagcttgctgagaaggctgtgctggcggctaatgggtggaatctaaaaaaatggtgataccttgtacacttgtgcgttaagacccacatatatctatggggaagggaggcccattcctttctgccagtataaatgaggccctgaacaacaatgggatcctgtcaagtgttggaaagttctctacagtcaacccagtctatgttggcaacgtggcctgggcccacattctggccttgagggctctgcgggaccccaagaaggccccaagtgtccgaggtcaattctattacatctcagatgacacgcctcaccaaagctatgataaccttaattacatcctgagcaaagagtttggcctccgccttgattccagatggagccttcctttaaccctgatgtactggattggcttcctgctggaagtagtgagcttcctactcagcccaatttactcctatcaaccccccttcaaccgccacacagtcacattatcaaatagtgtgttcaccttctcttacaagaaggctcagcgagatctggcgtataagccactctacagctgggaggaagccaagcagaaaaccgtggagtgggttggttcccttgtggaccggcacaaggagaccctgaagtccaagactcagtgatttaaggatgacagagatgtgcatgtgggtattgttaggaaatgtcatcaaactccacccacctggcttcatacagaaggcaacaggggcacaagcccaggtcctgctgcctctctttcacacaatgcccaacttactgtcttcttcatgtcatcaaaatctgcacagtcactggcccaaccagaactttctgtcctaatcatacaccagaagacaaacaatatgatttgctgttaccaaatctcagtggctgattctgaacaattgtggtctctcttaacttgaggttctcttttgaatctcctattccttcacacagttcaacataaagagcaataaatgttttaatgcttaa

SEQ ID NO: 732350 - DNA, 1691 bp, Homo sapiens
gcagtaaggacttggactcctctgtccagcttttaacaatctaagttacggttagagctttctccttttctttcaactactcctggcagttgtggggtcatggaatttttgtaaaaaatggggtggaggccctcttctgggtcacgctagaatcagatctgctctccagcatcttctgtttcctggcaagtgtttcctgctactttggattggccacgatgggctggagctgccttgtgacaggagcaggagggcttctgggtcagaggatcgtccgcctgttggtggaagagaaggaactgaaggagatcagggccttggacaaggccttcagaccagaattgagagaggaattttctaagctccagaacaggaccaagctgactgtacttgaaggagacattctggatgagccattcctgaaaagagcctgccaggacgtctcggtcgtcatccacaccgcctgtatcattgatgtctttggtgtcactcacagagagtccatcatgaatgtcaatgtgaaaggtacccagctactgttggaggcctgtgtccaagccagtgtgccagtcttcatctacaccagtagcatagaggtagccgggcccaactcctacaaggaaatcatccagaacggccacgaagaagagcctctggaaaacacatggcccactccatacccgtacagcaaaaagcttgctgagaaggctgtgctggcggctaatgggtggaatctaaaaaaatggtgataccttgtacacttgtgcgttaagacccacatatatctatggggaagggaggcccattcctttctgccagtataaatgaggccctgaacaacaatgggatcctgtcaagtgttggaaagttctctacagtcaacccagtctatgttggcaacgtggcctgggcccacattctggccttgagggctctgcgggaccccaagaaggccccaagtgtccgaggtcaattctattacatctcagatgacacgcctcaccaaagctatgataaccttaattacatcctgagcaaagagtttggcctccgccttgattccagatggagccttcctttaaccctgatgtactggattggcttcctgctggaagtagtgagcttcctactcagcccaatttactcctatcaaccccccttcaaccgccacacagtcacattatcaaatagtgtgttcaccttctcttacaagaaggctcagcgagatctggcgtataagccactctacagctgggaggaagccaagcagaaaaccgtggagtgggttggttcccttgtggaccggcacaaggagaccctgaagtccaagactcagtgatttaaggatgacagagatgtgcatgtgggtattgttaggaaatgtcatcaaactccacccacctggcttcatacagaaggcaacaggggcacaagcccaggtcctgctgcctctctttcacacaatgcccaacttactgtcttcttcatgtcatcaaaatctgcacagtcactggcccaaccagaactttctgtcctaatcatacaccagaagacaaacaatatgatttgctgttaccaaatctaatagagctccatttcccctcttaaatgagaaagcatttcttttctctttaatctcctattccttcacacagttcaacataaagagcaataaatgttttaatgcttaa

SEQ ID NO: 732351 - DNA, 1929 bp, Homo sapiens
  misc_feature (1715)..(1715): n is a, c, g, or t
  misc_feature (1720)..(1720): n is a, c, g, or t
  misc_feature (1767)..(1767): n is a, c, g, or t
  misc_feature (1772)..(1772): n is a, c, g, or t
  misc_feature (1793)..(1793): n is a, c, g, or t
  misc_feature (1802)..(1802): n is a, c, g, or t
  misc_feature (1814)..(1814): n is a, c, g, or t
  misc_feature (1819)..(1820): n is a, c, g, or t
  misc_feature (1824)..(1824): n is a, c, g, or t
  misc_feature (1827)..(1827): n is a, c, g, or t
  misc_feature (1831)..(1831): n is a, c, g, or t
  misc_feature (1847)..(1847): n is a, c, g, or t
  misc_feature (1854)..(1854): n is a, c, g, or t
  misc_feature (1860)..(1860): n is a, c, g, or t
  misc_feature (1865)..(1865): n is a, c, g, or t
gcagtaaggacttggactcctctgtccagcttttaacaatctaagttacggttagagctttctccttttctttcaactactcctggcagttgtggggtcatggaatttttgtaaaaaatggggtggaggccctcttctgggtcacgctagaatcagatctgctctccagcatcttctgtttcctggcaagtgtttcctgctactttggattggccacgatgggctggagctgccttgtgacaggagcaggagggcttctgggtcagaggatcgtccgcctgttggtggaagagaaggaactgaaggagatcagggccttggacaaggccttcagaccagaattgagagaggaattttctaagctccagaacaggaccaagctgactgtacttgaaggagacattctggatgagccattcctgaaaagagcctgccaggacgtctcggtcgtcatccacaccgcctgtatcattgatgtctttggtgtcactcacagagagtccatcatgaatgtcaatgtgaaaggtacccagctactgttggaggcctgtgtccaagccagtgtgccagtcttcatctacaccagtagcatagaggtagccgggcccaactcctacaaggaaatcatccagaacggccacgaagaagagcctctggaaaacacatggcccactccatacccgtacagcaaaaagcttgctgagaaggctgtgctggcggctaatgggtggaatctaaaaaaatggtgataccttgtacacttgtgcgttaagacccacatatatctatggggaagggaggcccattcctttctgccagtataaatgaggccctgaacaacaatgggatcctgtcaagtgttggaaagttctctacagtcaacccagtctatgttggcaacgtggcctgggcccacattctggccttgagggctctgcgggaccccaagaaggccccaagtgtccgaggtcaattctattacatctcagatgacacgcctcaccaaagctatgataaccttaattacatcctgagcaaagagtttggcctccgccttgattccagatggagccttcctttaaccctgatgtactggattggcttcctgctggaagtagtgagcttcctactcagcccaatttactcctatcaaccccccttcaaccgccacacagtcacattatcaaatagtgtgttcaccttctcttacaagaaggctcagcgagatctggcgtataagccactctacagctgggaggaagccaagcagtccaagactcagtgatttaaggatgacagagatgtgcatgtgggtattgttaggaaatgtcatcaaactccacccacctggcttcatacagaaggcaacaggggcacaagcccaggtcctgctgcctctctttcacacaatgcccaacttactgtcttcttcatgtcatcaaaatctgcacagtcactggcccaaccagaactttctgtcctaatcatacaccagaagacaaacaatatgatttgctgttaccaaatctcagtggctgattctgaacaattgtggtctctcttaacttgaggttctcttttgactaatagagctccatttcccctcttaaatgagaaagcatttcttttctctttaatctcctattccttcacacagttcaacataaagagcaataaatgttttaatgcttaaaacaaaaaaaaaaaaaaaaaanaaaanaaaaaaaaaaaaaaaaaaaaaaaaaaaaaaaaaaaaaaaaaaaaaanaacanaccaaaaaaaaaaaaactcgnggggggccngtacccatttgncctanngggngcngttnacattaattggccggngtttaanacgggngactnggaaaaccttggcttgacccaacttaaatggctttgagcctttaccaacagttgggcaacctta

SEQ ID NO: 732352 - DNA, 1857 bp, Homo sapiens
  misc_feature (1643)..(1643): n is a, c, g, or t
  misc_feature (1648)..(1648): n is a, c, g, or t
  misc_feature (1695)..(1695): n is a, c, g, or t
  misc_feature (1700)..(1700): n is a, c, g, or t
  misc_feature (1721)..(1721): n is a, c, g, or t
  misc_feature (1730)..(1730): n is a, c, g, or t
  misc_feature (1742)..(1742): n is a, c, g, or t
  misc_feature (1747)..(1748): n is a, c, g, or t
  misc_feature (1752)..(1752): n is a, c, g, or t
  misc_feature (1755)..(1755): n is a, c, g, or t
  misc_feature (1759)..(1759): n is a, c, g, or t
  misc_feature (1775)..(1775): n is a, c, g, or t
  misc_feature (1782)..(1782): n is a, c, g, or t
  misc_feature (1788)..(1788): n is a, c, g, or t
  misc_feature (1793)..(1793): n is a, c, g, or t
gtaataagggctgagacacaagccacagagcataaagctccagtccttcctccagggatgagggcagtaaggacttggactcctctgtccagcttttaacaatctaagttacgccctcttctgggtcacgctagaatcagatctgctctccagcatcttctgtttcctggcaagtgtttcctgctactttggattggccacgatgggctggagctgccttgtgacaggagcaggagggcttctgggtcagaggatcgtccgcctgttggtggaagagaaggaactgaaggagatcagggccttggacaaggccttcagaccagaattgagagaggaattttctaagctccagaacaggaccaagctgactgtacttgaaggagacattctggatgagccattcctggtctttggtgtcactcacagagagtccatcatgaatgtcaatgtgaaaggtacccagctactgttggaggcctgtgtccaagccagtgtgccagtcttcatctacaccagtagcatagaggtagccgggcccaactcctacaaggaaatcatccagaacggccacgaagaagagcctctggaaaacacatggcccactccatacccgtacagcaaaaagcttgctgagaaggctgtgctggcggctaatgggtggaatctaaaaggaggcccattcctttctgccagtataaatgaggccctgaacaacaatgggatcctgtcaagtgttggaaagttctctacagtcaacccagtctatgttggcaacgtggcctgggcccacattctggccttgagggctctgcgggaccccaagaaggccccaagtgtccgaggtcaattctattacatctcagatgacacgcctcaccaaagctatgataaccttaattacatcctgagcaaagagtttggcctccgccttgattccagatggagccttcctttaaccctgatgtactggattggcttcctgctggaagtagtgagcttcctactcagcccaatttactcctatcaaccccccttcaaccgccacacagtcacattatcaaatagtgtgttcaccttctcttacaagaaggctcagcgagatctggcgtataagccactctacagctgggaggaagccaagcagaaaaccgtggagtgggttggttcccttgtggaccggcacaaggagaccctgaagtccaagactcagtgatttaaggatgacagagatgtgcatgtgggtattgttaggaaatgtcatcaaactccacccacctggcttcatacagaaggcaacaggggcacaagcccaggtcctgctgcctctctttcacacaatgcccaacttactgtcttcttcatgtcatcaaaatctgcacagtcactggcccaaccagaactttctgtcctaatcatacaccagaagacaaacaatatgatttgctgttaccaaatctcagtggctgattctgaacaattgtggtctctcttaacttgaggttctcttttgactaatagagctccatttcccctcttaaatgagaaagcatttcttttctctttaatctcctattccttcacacagttcaacataaagagcaataaatgttttaatgcttaaaacaaaaaaaaaaaaaaaaaanaaaanaaaaaaaaaaaaaaaaaaaaaaaaaaaaaaaaaaaaaaaaaaaaaanaacanaccaaaaaaaaaaaaactcgnggggggccngtacccatttgncctanngggngcngttnacattaattggccggngtttaanacgggngactnggaaaaccttggcttgacccaacttaaatggctttgagcctttaccaacagttgggcaacctta

SEQ ID NO: 732353 - DNA, 1568 bp, Homo sapiens
gtaataagggctgagacacaagccacagagcataaagctccagtccttcctccagggatgagggcagtaaggacttggactcctctgtccagcttttaacaatctaagttacgccctcttctgggtcacgctagaatcagatctgctctccagcatcttctgtttcctggcaagtgtttcctgctactttggattggccacgatgggctggagctgccttgtgacaggagcaggagggcttctgggtcagaggatcgtccgcctgttggtggaagagaaggaactgaaggagatcagggccttggacaaggccttcagaccagaattgagagaggaattttctaagctccagaacaggaccaagctgactgtacttgaaggagacattctggatgagccattcctggtctttggtgtcactcacagagagtccatcatgaatgtcaatgtgaaaggtacccagctactgttggaggcctgtgtccaagccagtgtgccagtcttcatctacaccagtagcatagaggtagccgggcccaactcctacaaggaaatcatccagaacggccacgaagaagagcctctggaaaacacatggcccactccatacccgtacagcaaaaagcttgctgagaaggctgtgctggcggctaatgggtggaatctaaaaggaggcccattcctttctgccagtataaatgaggccctgaacaacaatgggatcctgtcaagtgttggaaagttctctacagtcaacccagtctatgttggcaacgtggcctgggcccacattctggccttgagggctctgcgggaccccaagaaggccccaagtgtccgaggtcaattctattacatctcagatgacacgcctcaccaaagctatgataaccttaattacatcctgagcaaagagtttggcctccgccttgattccagatggagccttcctttaaccctgatgtactggattggcttcctgctggaagtagtgagcttcctactcagcccaatttactcctatcaaccccccttcaaccgccacacagtcacattatcaaatagtgtgttcaccttctcttacaagaaggctcagcgagatctggcgtataagccactctacagctgggaggaagccaagcagaaaaccgtggagtgggttggttcccttgtggaccggcacaaggagaccctgaagtccaagactcagtgatttaaggatgacagagatgtgcatgtgggtattgttaggaaatgtcatcaaactccacccacctggcttcatacagaaggcaacaggggcacaagcccaggtcctgctgcctctctttcacacaatgcccaacttactgtcttcttcatgtcatcaaaatctgcacagtcactggcccaaccagaactttctgtcctaatcatacaccagaagacaaacaatatgatttgctgttaccaaatctcagtggctgattctgaacaattgtggtctctcttaacttgaggttctcttttgaatctcctattccttcacacagttcaacataaagagcaataaatgttttaatgcttaa

SEQ ID NO: 732354 - DNA, 1803 bp, Homo sapiens
  misc_feature (1589)..(1589): n is a, c, g, or t
  misc_feature (1594)..(1594): n is a, c, g, or t
  misc_feature (1641)..(1641): n is a, c, g, or t
  misc_feature (1646)..(1646): n is a, c, g, or t
  misc_feature (1667)..(1667): n is a, c, g, or t
  misc_feature (1676)..(1676): n is a, c, g, or t
  misc_feature (1688)..(1688): n is a, c, g, or t
  misc_feature (1693)..(1694): n is a, c, g, or t
  misc_feature (1698)..(1698): n is a, c, g, or t
  misc_feature (1701)..(1701): n is a, c, g, or t
  misc_feature (1705)..(1705): n is a, c, g, or t
  misc_feature (1721)..(1721): n is a, c, g, or t
  misc_feature (1728)..(1728): n is a, c, g, or t
  misc_feature (1734)..(1734): n is a, c, g, or t
  misc_feature (1739)..(1739): n is a, c, g, or t
gtaataagggctgagacacaagccacagagcataaagctccagtccttcctccagggatgagggcagtaaggacttggactcctctgtccagcttttaacaatctaagttacgccctcttctgggtcacgctagaatcagatctgctctccagcatcttctgtttcctggcaagtgtttcctgctactttggattggccacgatgggctggagctgccttgtgacaggagcaggagggcttctgggtcagaggatcgtccgcctgttggtggaagagaaggaactgaaggagatcagggccttggacaaggccttcagaccagaattgagagaggaattttctaagctccagaacaggaccaagctgactgtacttgaaggagacattctggatgagccattcctggtctttggtgtcactcacagagagtccatcatgaatgtcaatgtgaaaggtacccagctactgttggaggcctgtgtccaagccagtgtgccagtcttcatctacaccagtagcatagaggtagccgggcccaactcctacaaggaaatcatccagaacggccacgaagaagagcctctggaaaacacatggcccactccatacccgtacagcaaaaagcttgctgagaaggctgtgctggcggctaatgggtggaatctaaaaggaggcccattcctttctgccagtataaatgaggccctgaacaacaatgggatcctgtcaagtgttggaaagttctctacagtcaacccagtctatgttggcaacgtggcctgggcccacattctggccttgagggctctgcgggaccccaagaaggccccaagtgtccgaggtcaattctattacatctcagatgacacgcctcaccaaagctatgataaccttaattacatcctgagcaaagagtttggcctccgccttgattccagatggagccttcctttaaccctgatgtactggattggcttcctgctggaagtagtgagcttcctactcagcccaatttactcctatcaaccccccttcaaccgccacacagtcacattatcaaatagtgtgttcaccttctcttacaagaaggctcagcgagatctggcgtataagccactctacagctgggaggaagccaagcagtccaagactcagtgatttaaggatgacagagatgtgcatgtgggtattgttaggaaatgtcatcaaactccacccacctggcttcatacagaaggcaacaggggcacaagcccaggtcctgctgcctctctttcacacaatgcccaacttactgtcttcttcatgtcatcaaaatctgcacagtcactggcccaaccagaactttctgtcctaatcatacaccagaagacaaacaatatgatttgctgttaccaaatctcagtggctgattctgaacaattgtggtctctcttaacttgaggttctcttttgactaatagagctccatttcccctcttaaatgagaaagcatttcttttctctttaatctcctattccttcacacagttcaacataaagagcaataaatgttttaatgcttaaaacaaaaaaaaaaaaaaaaaanaaaanaaaaaaaaaaaaaaaaaaaaaaaaaaaaaaaaaaaaaaaaaaaaaanaacanaccaaaaaaaaaaaaactcgnggggggccngtacccatttgncctanngggngcngttnacattaattggccggngtttaanacgggngactnggaaaaccttggcttgacccaacttaaatggctttgagcctttaccaacagttgggcaacctta

SEQ ID NO: 732355 - DNA, 1913 bp, Homo sapiens
  misc_feature (1699)..(1699): n is a, c, g, or t
  misc_feature (1704)..(1704): n is a, c, g, or t
  misc_feature (1751)..(1751): n is a, c, g, or t
  misc_feature (1756)..(1756): n is a, c, g, or t
  misc_feature (1777)..(1777): n is a, c, g, or t
  misc_feature (1786)..(1786): n is a, c, g, or t
  misc_feature (1798)..(1798): n is a, c, g, or t
  misc_feature (1803)..(1804): n is a, c, g, or t
  misc_feature (1808)..(1808): n is a, c, g, or t
  misc_feature (1811)..(1811): n is a, c, g, or t
  misc_feature (1815)..(1815): n is a, c, g, or t
  misc_feature (1831)..(1831): n is a, c, g, or t
  misc_feature (1838)..(1838): n is a, c, g, or t
  misc_feature (1844)..(1844): n is a, c, g, or t
  misc_feature (1849)..(1849): n is a, c, g, or t
gtaataagggctgagacacaagccacagagcataaagctccagtccttcctccagggatgagggcagtaaggacttggactcctctgtccagcttttaacaatctaagttacgccctcttctgggtcacgctagaatcagatctgctctccagcatcttctgtttcctggcaagtgtttcctgctactttggattggccacgatgggctggagctgccttgtgacaggagcaggagggcttctgggtcagaggatcgtccgcctgttggtggaagagaaggaactgaaggagatcagggccttggacaaggccttcagaccagaattgagagaggaattttctaagctccagaacaggaccaagctgactgtacttgaaggagacattctggatgagccattcctggtctttggtgtcactcacagagagtccatcatgaatgtcaatgtgaaaggtacccagctactgttggaggcctgtgtccaagccagtgtgccagtcttcatctacaccagtagcatagaggtagccgggcccaactcctacaaggaaatcatccagaacggccacgaagaagagcctctggaaaacacatggcccactccatacccgtacagcaaaaagcttgctgagaaggctgtgctggcggctaatgggtggaatctaaaaaaatggtgataccttgtacacttgtgcgttaagacccacatatatctatggggaagggaggcccattcctttctgccagtataaatgaggccctgaacaacaatgggatcctgtcaagtgttggaaagttctctacagtcaacccagtctatgttggcaacgtggcctgggcccacattctggccttgagggctctgcgggaccccaagaaggccccaagtgtccgaggtcaattctattacatctcagatgacacgcctcaccaaagctatgataaccttaattacatcctgagcaaagagtttggcctccgccttgattccagatggagccttcctttaaccctgatgtactggattggcttcctgctggaagtagtgagcttcctactcagcccaatttactcctatcaaccccccttcaaccgccacacagtcacattatcaaatagtgtgttcaccttctcttacaagaaggctcagcgagatctggcgtataagccactctacagctgggaggaagccaagcagaaaaccgtggagtgggttggttcccttgtggaccggcacaaggagaccctgaagtccaagactcagtgatttaaggatgacagagatgtgcatgtgggtattgttaggaaatgtcatcaaactccacccacctggcttcatacagaaggcaacaggggcacaagcccaggtcctgctgcctctctttcacacaatgcccaacttactgtcttcttcatgtcatcaaaatctgcacagtcactggcccaaccagaactttctgtcctaatcatacaccagaagacaaacaatatgatttgctgttaccaaatctcagtggctgattctgaacaattgtggtctctcttaacttgaggttctcttttgactaatagagctccatttcccctcttaaatgagaaagcatttcttttctctttaatctcctattccttcacacagttcaacataaagagcaataaatgttttaatgcttaaaacaaaaaaaaaaaaaaaaaanaaaanaaaaaaaaaaaaaaaaaaaaaaaaaaaaaaaaaaaaaaaaaaaaaanaacanaccaaaaaaaaaaaaactcgnggggggccngtacccatttgncctanngggngcngttnacattaattggccggngtttaanacgggngactnggaaaaccttggcttgacccaacttaaatggctttgagcctttaccaacagttgggcaacctta

SEQ ID NO: 732356 - DNA, 1624 bp, Homo sapiens
gtaataagggctgagacacaagccacagagcataaagctccagtccttcctccagggatgagggcagtaaggacttggactcctctgtccagcttttaacaatctaagttacgccctcttctgggtcacgctagaatcagatctgctctccagcatcttctgtttcctggcaagtgtttcctgctactttggattggccacgatgggctggagctgccttgtgacaggagcaggagggcttctgggtcagaggatcgtccgcctgttggtggaagagaaggaactgaaggagatcagggccttggacaaggccttcagaccagaattgagagaggaattttctaagctccagaacaggaccaagctgactgtacttgaaggagacattctggatgagccattcctggtctttggtgtcactcacagagagtccatcatgaatgtcaatgtgaaaggtacccagctactgttggaggcctgtgtccaagccagtgtgccagtcttcatctacaccagtagcatagaggtagccgggcccaactcctacaaggaaatcatccagaacggccacgaagaagagcctctggaaaacacatggcccactccatacccgtacagcaaaaagcttgctgagaaggctgtgctggcggctaatgggtggaatctaaaaaaatggtgataccttgtacacttgtgcgttaagacccacatatatctatggggaagggaggcccattcctttctgccagtataaatgaggccctgaacaacaatgggatcctgtcaagtgttggaaagttctctacagtcaacccagtctatgttggcaacgtggcctgggcccacattctggccttgagggctctgcgggaccccaagaaggccccaagtgtccgaggtcaattctattacatctcagatgacacgcctcaccaaagctatgataaccttaattacatcctgagcaaagagtttggcctccgccttgattccagatggagccttcctttaaccctgatgtactggattggcttcctgctggaagtagtgagcttcctactcagcccaatttactcctatcaaccccccttcaaccgccacacagtcacattatcaaatagtgtgttcaccttctcttacaagaaggctcagcgagatctggcgtataagccactctacagctgggaggaagccaagcagaaaaccgtggagtgggttggttcccttgtggaccggcacaaggagaccctgaagtccaagactcagtgatttaaggatgacagagatgtgcatgtgggtattgttaggaaatgtcatcaaactccacccacctggcttcatacagaaggcaacaggggcacaagcccaggtcctgctgcctctctttcacacaatgcccaacttactgtcttcttcatgtcatcaaaatctgcacagtcactggcccaaccagaactttctgtcctaatcatacaccagaagacaaacaatatgatttgctgttaccaaatctcagtggctgattctgaacaattgtggtctctcttaacttgaggttctcttttgaatctcctattccttcacacagttcaacataaagagcaataaatgttttaatgcttaa

SEQ ID NO: 732357 - DNA, 1859 bp, Homo sapiens
  misc_feature (1645)..(1645): n is a, c, g, or t
  misc_feature (1650)..(1650): n is a, c, g, or t
  misc_feature (1697)..(1697): n is a, c, g, or t
  misc_feature (1702)..(1702): n is a, c, g, or t
  misc_feature (1723)..(1723): n is a, c, g, or t
  misc_feature (1732)..(1732): n is a, c, g, or t
  misc_feature (1744)..(1744): n is a, c, g, or t
  misc_feature (1749)..(1750): n is a, c, g, or t
  misc_feature (1754)..(1754): n is a, c, g, or t
  misc_feature (1757)..(1757): n is a, c, g, or t
  misc_feature (1761)..(1761): n is a, c, g, or t
  misc_feature (1777)..(1777): n is a, c, g, or t
  misc_feature (1784)..(1784): n is a, c, g, or t
  misc_feature (1790)..(1790): n is a, c, g, or t
  misc_feature (1795)..(1795): n is a, c, g, or t
gtaataagggctgagacacaagccacagagcataaagctccagtccttcctccagggatgagggcagtaaggacttggactcctctgtccagcttttaacaatctaagttacgccctcttctgggtcacgctagaatcagatctgctctccagcatcttctgtttcctggcaagtgtttcctgctactttggattggccacgatgggctggagctgccttgtgacaggagcaggagggcttctgggtcagaggatcgtccgcctgttggtggaagagaaggaactgaaggagatcagggccttggacaaggccttcagaccagaattgagagaggaattttctaagctccagaacaggaccaagctgactgtacttgaaggagacattctggatgagccattcctggtctttggtgtcactcacagagagtccatcatgaatgtcaatgtgaaaggtacccagctactgttggaggcctgtgtccaagccagtgtgccagtcttcatctacaccagtagcatagaggtagccgggcccaactcctacaaggaaatcatccagaacggccacgaagaagagcctctggaaaacacatggcccactccatacccgtacagcaaaaagcttgctgagaaggctgtgctggcggctaatgggtggaatctaaaaaaatggtgataccttgtacacttgtgcgttaagacccacatatatctatggggaagggaggcccattcctttctgccagtataaatgaggccctgaacaacaatgggatcctgtcaagtgttggaaagttctctacagtcaacccagtctatgttggcaacgtggcctgggcccacattctggccttgagggctctgcgggaccccaagaaggccccaagtgtccgaggtcaattctattacatctcagatgacacgcctcaccaaagctatgataaccttaattacatcctgagcaaagagtttggcctccgccttgattccagatggagccttcctttaaccctgatgtactggattggcttcctgctggaagtagtgagcttcctactcagcccaatttactcctatcaaccccccttcaaccgccacacagtcacattatcaaatagtgtgttcaccttctcttacaagaaggctcagcgagatctggcgtataagccactctacagctgggaggaagccaagcagtccaagactcagtgatttaaggatgacagagatgtgcatgtgggtattgttaggaaatgtcatcaaactccacccacctggcttcatacagaaggcaacaggggcacaagcccaggtcctgctgcctctctttcacacaatgcccaacttactgtcttcttcatgtcatcaaaatctgcacagtcactggcccaaccagaactttctgtcctaatcatacaccagaagacaaacaatatgatttgctgttaccaaatctcagtggctgattctgaacaattgtggtctctcttaacttgaggttctcttttgactaatagagctccatttcccctcttaaatgagaaagcatttcttttctctttaatctcctattccttcacacagttcaacataaagagcaataaatgttttaatgcttaaaacaaaaaaaaaaaaaaaaaanaaaanaaaaaaaaaaaaaaaaaaaaaaaaaaaaaaaaaaaaaaaaaaaaaanaacanaccaaaaaaaaaaaaactcgnggggggccngtacccatttgncctanngggngcngttnacattaattggccggngtttaanacgggngactnggaaaaccttggcttgacccaacttaaatggctttgagcctttaccaacagttgggcaacctta

SEQ ID NO: 732358 - DNA, 1911 bp, Homo sapiens
  misc_feature (1697)..(1697): n is a, c, g, or t
  misc_feature (1702)..(1702): n is a, c, g, or t
  misc_feature (1749)..(1749): n is a, c, g, or t
  misc_feature (1754)..(1754): n is a, c, g, or t
  misc_feature (1775)..(1775): n is a, c, g, or t
  misc_feature (1784)..(1784): n is a, c, g, or t
  misc_feature (1796)..(1796): n is a, c, g, or t
  misc_feature (1801)..(1802): n is a, c, g, or t
  misc_feature (1806)..(1806): n is a, c, g, or t
  misc_feature (1809)..(1809): n is a, c, g, or t
  misc_feature (1813)..(1813): n is a, c, g, or t
  misc_feature (1829)..(1829): n is a, c, g, or t
  misc_feature (1836)..(1836): n is a, c, g, or t
  misc_feature (1842)..(1842): n is a, c, g, or t
  misc_feature (1847)..(1847): n is a, c, g, or t
gtaataagggctgagacacaagccacagagcataaagctccagtccttcctccagggatgagggcagtaaggacttggactcctctgtccagcttttaacaatctaagttacgccctcttctgggtcacgctagaatcagatctgctctccagcatcttctgtttcctggcaagtgtttcctgctactttggattggccacgatgggctggagctgccttgtgacaggagcaggagggcttctgggtcagaggatcgtccgcctgttggtggaagagaaggaactgaaggagatcagggccttggacaaggccttcagaccagaattgagagaggaattttctaagctccagaacaggaccaagctgactgtacttgaaggagacattctggatgagccattcctgaaaagagcctgccaggacgtctcggtcgtcatccacaccgcctgtatcattgatgtctttggtgtcactcacagagagtccatcatgaatgtcaatgtgaaaggtacccagctactgttggaggcctgtgtccaagccagtgtgccagtcttcatctacaccagtagcatagaggtagccgggcccaactcctacaaggaaatcatccagaacggccacgaagaagagcctctggaaaacacatggcccactccatacccgtacagcaaaaagcttgctgagaaggctgtgctggcggctaatgggtggaatctaaaaggaggcccattcctttctgccagtataaatgaggccctgaacaacaatgggatcctgtcaagtgttggaaagttctctacagtcaacccagtctatgttggcaacgtggcctgggcccacattctggccttgagggctctgcgggaccccaagaaggccccaagtgtccgaggtcaattctattacatctcagatgacacgcctcaccaaagctatgataaccttaattacatcctgagcaaagagtttggcctccgccttgattccagatggagccttcctttaaccctgatgtactggattggcttcctgctggaagtagtgagcttcctactcagcccaatttactcctatcaaccccccttcaaccgccacacagtcacattatcaaatagtgtgttcaccttctcttacaagaaggctcagcgagatctggcgtataagccactctacagctgggaggaagccaagcagaaaaccgtggagtgggttggttcccttgtggaccggcacaaggagaccctgaagtccaagactcagtgatttaaggatgacagagatgtgcatgtgggtattgttaggaaatgtcatcaaactccacccacctggcttcatacagaaggcaacaggggcacaagcccaggtcctgctgcctctctttcacacaatgcccaacttactgtcttcttcatgtcatcaaaatctgcacagtcactggcccaaccagaactttctgtcctaatcatacaccagaagacaaacaatatgatttgctgttaccaaatctcagtggctgattctgaacaattgtggtctctcttaacttgaggttctcttttgactaatagagctccatttcccctcttaaatgagaaagcatttcttttctctttaatctcctattccttcacacagttcaacataaagagcaataaatgttttaatgcttaaaacaaaaaaaaaaaaaaaaaanaaaanaaaaaaaaaaaaaaaaaaaaaaaaaaaaaaaaaaaaaaaaaaaaaanaacanaccaaaaaaaaaaaaactcgnggggggccngtacccatttgncctanngggngcngttnacattaattggccggngtttaanacgggngactnggaaaaccttggcttgacccaacttaaatggctttgagcctttaccaacagttgggcaacctta

SEQ ID NO: 732359 - DNA, 1622 bp, Homo sapiens
gtaataagggctgagacacaagccacagagcataaagctccagtccttcctccagggatgagggcagtaaggacttggactcctctgtccagcttttaacaatctaagttacgccctcttctgggtcacgctagaatcagatctgctctccagcatcttctgtttcctggcaagtgtttcctgctactttggattggccacgatgggctggagctgccttgtgacaggagcaggagggcttctgggtcagaggatcgtccgcctgttggtggaagagaaggaactgaaggagatcagggccttggacaaggccttcagaccagaattgagagaggaattttctaagctccagaacaggaccaagctgactgtacttgaaggagacattctggatgagccattcctgaaaagagcctgccaggacgtctcggtcgtcatccacaccgcctgtatcattgatgtctttggtgtcactcacagagagtccatcatgaatgtcaatgtgaaaggtacccagctactgttggaggcctgtgtccaagccagtgtgccagtcttcatctacaccagtagcatagaggtagccgggcccaactcctacaaggaaatcatccagaacggccacgaagaagagcctctggaaaacacatggcccactccatacccgtacagcaaaaagcttgctgagaaggctgtgctggcggctaatgggtggaatctaaaaggaggcccattcctttctgccagtataaatgaggccctgaacaacaatgggatcctgtcaagtgttggaaagttctctacagtcaacccagtctatgttggcaacgtggcctgggcccacattctggccttgagggctctgcgggaccccaagaaggccccaagtgtccgaggtcaattctattacatctcagatgacacgcctcaccaaagctatgataaccttaattacatcctgagcaaagagtttggcctccgccttgattccagatggagccttcctttaaccctgatgtactggattggcttcctgctggaagtagtgagcttcctactcagcccaatttactcctatcaaccccccttcaaccgccacacagtcacattatcaaatagtgtgttcaccttctcttacaagaaggctcagcgagatctggcgtataagccactctacagctgggaggaagccaagcagaaaaccgtggagtgggttggttcccttgtggaccggcacaaggagaccctgaagtccaagactcagtgatttaaggatgacagagatgtgcatgtgggtattgttaggaaatgtcatcaaactccacccacctggcttcatacagaaggcaacaggggcacaagcccaggtcctgctgcctctctttcacacaatgcccaacttactgtcttcttcatgtcatcaaaatctgcacagtcactggcccaaccagaactttctgtcctaatcatacaccagaagacaaacaatatgatttgctgttaccaaatctcagtggctgattctgaacaattgtggtctctcttaacttgaggttctcttttgaatctcctattccttcacacagttcaacataaagagcaataaatgttttaatgcttaa

SEQ ID NO: 732360 - DNA, 1857 bp, Homo sapiens
  misc_feature (1643)..(1643): n is a, c, g, or t
  misc_feature (1648)..(1648): n is a, c, g, or t
  misc_feature (1695)..(1695): n is a, c, g, or t
  misc_feature (1700)..(1700): n is a, c, g, or t
  misc_feature (1721)..(1721): n is a, c, g, or t
  misc_feature (1730)..(1730): n is a, c, g, or t
  misc_feature (1742)..(1742): n is a, c, g, or t
  misc_feature (1747)..(1748): n is a, c, g, or t
  misc_feature (1752)..(1752): n is a, c, g, or t
  misc_feature (1755)..(1755): n is a, c, g, or t
  misc_feature (1759)..(1759): n is a, c, g, or t
  misc_feature (1775)..(1775): n is a, c, g, or t
  misc_feature (1782)..(1782): n is a, c, g, or t
  misc_feature (1788)..(1788): n is a, c, g, or t
  misc_feature (1793)..(1793): n is a, c, g, or t
gtaataagggctgagacacaagccacagagcataaagctccagtccttcctccagggatgagggcagtaaggacttggactcctctgtccagcttttaacaatctaagttacgccctcttctgggtcacgctagaatcagatctgctctccagcatcttctgtttcctggcaagtgtttcctgctactttggattggccacgatgggctggagctgccttgtgacaggagcaggagggcttctgggtcagaggatcgtccgcctgttggtggaagagaaggaactgaaggagatcagggccttggacaaggccttcagaccagaattgagagaggaattttctaagctccagaacaggaccaagctgactgtacttgaaggagacattctggatgagccattcctgaaaagagcctgccaggacgtctcggtcgtcatccacaccgcctgtatcattgatgtctttggtgtcactcacagagagtccatcatgaatgtcaatgtgaaaggtacccagctactgttggaggcctgtgtccaagccagtgtgccagtcttcatctacaccagtagcatagaggtagccgggcccaactcctacaaggaaatcatccagaacggccacgaagaagagcctctggaaaacacatggcccactccatacccgtacagcaaaaagcttgctgagaaggctgtgctggcggctaatgggtggaatctaaaaggaggcccattcctttctgccagtataaatgaggccctgaacaacaatgggatcctgtcaagtgttggaaagttctctacagtcaacccagtctatgttggcaacgtggcctgggcccacattctggccttgagggctctgcgggaccccaagaaggccccaagtgtccgaggtcaattctattacatctcagatgacacgcctcaccaaagctatgataaccttaattacatcctgagcaaagagtttggcctccgccttgattccagatggagccttcctttaaccctgatgtactggattggcttcctgctggaagtagtgagcttcctactcagcccaatttactcctatcaaccccccttcaaccgccacacagtcacattatcaaatagtgtgttcaccttctcttacaagaaggctcagcgagatctggcgtataagccactctacagctgggaggaagccaagcagtccaagactcagtgatttaaggatgacagagatgtgcatgtgggtattgttaggaaatgtcatcaaactccacccacctggcttcatacagaaggcaacaggggcacaagcccaggtcctgctgcctctctttcacacaatgcccaacttactgtcttcttcatgtcatcaaaatctgcacagtcactggcccaaccagaactttctgtcctaatcatacaccagaagacaaacaatatgatttgctgttaccaaatctcagtggctgattctgaacaattgtggtctctcttaacttgaggttctcttttgactaatagagctccatttcccctcttaaatgagaaagcatttcttttctctttaatctcctattccttcacacagttcaacataaagagcaataaatgttttaatgcttaaaacaaaaaaaaaaaaaaaaaanaaaanaaaaaaaaaaaaaaaaaaaaaaaaaaaaaaaaaaaaaaaaaaaaaanaacanaccaaaaaaaaaaaaactcgnggggggccngtacccatttgncctanngggngcngttnacattaattggccggngtttaanacgggngactnggaaaaccttggcttgacccaacttaaatggctttgagcctttaccaacagttgggcaacctta

SEQ ID NO: 732361 - DNA, 1967 bp, Homo sapiens
  misc_feature (1753)..(1753): n is a, c, g, or t
  misc_feature (1758)..(1758): n is a, c, g, or t
  misc_feature (1805)..(1805): n is a, c, g, or t
  misc_feature (1810)..(1810): n is a, c, g, or t
  misc_feature (1831)..(1831): n is a, c, g, or t
  misc_feature (1840)..(1840): n is a, c, g, or t
  misc_feature (1852)..(1852): n is a, c, g, or t
  misc_feature (1857)..(1858): n is a, c, g, or t
  misc_feature (1862)..(1862): n is a, c, g, or t
  misc_feature (1865)..(1865): n is a, c, g, or t
  misc_feature (1869)..(1869): n is a, c, g, or t
  misc_feature (1885)..(1885): n is a, c, g, or t
  misc_feature (1892)..(1892): n is a, c, g, or t
  misc_feature (1898)..(1898): n is a, c, g, or t
  misc_feature (1903)..(1903): n is a, c, g, or t
gtaataagggctgagacacaagccacagagcataaagctccagtccttcctccagggatgagggcagtaaggacttggactcctctgtccagcttttaacaatctaagttacgccctcttctgggtcacgctagaatcagatctgctctccagcatcttctgtttcctggcaagtgtttcctgctactttggattggccacgatgggctggagctgccttgtgacaggagcaggagggcttctgggtcagaggatcgtccgcctgttggtggaagagaaggaactgaaggagatcagggccttggacaaggccttcagaccagaattgagagaggaattttctaagctccagaacaggaccaagctgactgtacttgaaggagacattctggatgagccattcctgaaaagagcctgccaggacgtctcggtcgtcatccacaccgcctgtatcattgatgtctttggtgtcactcacagagagtccatcatgaatgtcaatgtgaaaggtacccagctactgttggaggcctgtgtccaagccagtgtgccagtcttcatctacaccagtagcatagaggtagccgggcccaactcctacaaggaaatcatccagaacggccacgaagaagagcctctggaaaacacatggcccactccatacccgtacagcaaaaagcttgctgagaaggctgtgctggcggctaatgggtggaatctaaaaaaatggtgataccttgtacacttgtgcgttaagacccacatatatctatggggaagggaggcccattcctttctgccagtataaatgaggccctgaacaacaatgggatcctgtcaagtgttggaaagttctctacagtcaacccagtctatgttggcaacgtggcctgggcccacattctggccttgagggctctgcgggaccccaagaaggccccaagtgtccgaggtcaattctattacatctcagatgacacgcctcaccaaagctatgataaccttaattacatcctgagcaaagagtttggcctccgccttgattccagatggagccttcctttaaccctgatgtactggattggcttcctgctggaagtagtgagcttcctactcagcccaatttactcctatcaaccccccttcaaccgccacacagtcacattatcaaatagtgtgttcaccttctcttacaagaaggctcagcgagatctggcgtataagccactctacagctgggaggaagccaagcagaaaaccgtggagtgggttggttcccttgtggaccggcacaaggagaccctgaagtccaagactcagtgatttaaggatgacagagatgtgcatgtgggtattgttaggaaatgtcatcaaactccacccacctggcttcatacagaaggcaacaggggcacaagcccaggtcctgctgcctctctttcacacaatgcccaacttactgtcttcttcatgtcatcaaaatctgcacagtcactggcccaaccagaactttctgtcctaatcatacaccagaagacaaacaatatgatttgctgttaccaaatctcagtggctgattctgaacaattgtggtctctcttaacttgaggttctcttttgactaatagagctccatttcccctcttaaatgagaaagcatttcttttctctttaatctcctattccttcacacagttcaacataaagagcaataaatgttttaatgcttaaaacaaaaaaaaaaaaaaaaaanaaaanaaaaaaaaaaaaaaaaaaaaaaaaaaaaaaaaaaaaaaaaaaaaaanaacanaccaaaaaaaaaaaaactcgnggggggccngtacccatttgncctanngggngcngttnacattaattggccggngtttaanacgggngactnggaaaaccttggcttgacccaacttaaatggctttgagcctttaccaacagttgggcaacctta

SEQ ID NO: 732362 - DNA, 1678 bp, Homo sapiens
gtaataagggctgagacacaagccacagagcataaagctccagtccttcctccagggatgagggcagtaaggacttggactcctctgtccagcttttaacaatctaagttacgccctcttctgggtcacgctagaatcagatctgctctccagcatcttctgtttcctggcaagtgtttcctgctactttggattggccacgatgggctggagctgccttgtgacaggagcaggagggcttctgggtcagaggatcgtccgcctgttggtggaagagaaggaactgaaggagatcagggccttggacaaggccttcagaccagaattgagagaggaattttctaagctccagaacaggaccaagctgactgtacttgaaggagacattctggatgagccattcctgaaaagagcctgccaggacgtctcggtcgtcatccacaccgcctgtatcattgatgtctttggtgtcactcacagagagtccatcatgaatgtcaatgtgaaaggtacccagctactgttggaggcctgtgtccaagccagtgtgccagtcttcatctacaccagtagcatagaggtagccgggcccaactcctacaaggaaatcatccagaacggccacgaagaagagcctctggaaaacacatggcccactccatacccgtacagcaaaaagcttgctgagaaggctgtgctggcggctaatgggtggaatctaaaaaaatggtgataccttgtacacttgtgcgttaagacccacatatatctatggggaagggaggcccattcctttctgccagtataaatgaggccctgaacaacaatgggatcctgtcaagtgttggaaagttctctacagtcaacccagtctatgttggcaacgtggcctgggcccacattctggccttgagggctctgcgggaccccaagaaggccccaagtgtccgaggtcaattctattacatctcagatgacacgcctcaccaaagctatgataaccttaattacatcctgagcaaagagtttggcctccgccttgattccagatggagccttcctttaaccctgatgtactggattggcttcctgctggaagtagtgagcttcctactcagcccaatttactcctatcaaccccccttcaaccgccacacagtcacattatcaaatagtgtgttcaccttctcttacaagaaggctcagcgagatctggcgtataagccactctacagctgggaggaagccaagcagaaaaccgtggagtgggttggttcccttgtggaccggcacaaggagaccctgaagtccaagactcagtgatttaaggatgacagagatgtgcatgtgggtattgttaggaaatgtcatcaaactccacccacctggcttcatacagaaggcaacaggggcacaagcccaggtcctgctgcctctctttcacacaatgcccaacttactgtcttcttcatgtcatcaaaatctgcacagtcactggcccaaccagaactttctgtcctaatcatacaccagaagacaaacaatatgatttgctgttaccaaatctcagtggctgattctgaacaattgtggtctctcttaacttgaggttctcttttgaatctcctattccttcacacagttcaacataaagagcaataaatgttttaatgcttaa

SEQ ID NO: 732363 - DNA, 1494 bp, Homo sapiens
gaccccgcgtccgctctggtgcagcatgatgctgcccccttggaccctcggccttctcctgctggccacagtcagaggaaaagaggtctgctacggacaacttggctgcttttctgatgaaaaaccatgggcaggaacccttcagcgacctgtaaaattacttccctggtcccccgaggacattgacacccgctttcttctgtacacaaatgaaaatccaaacaacttccaactaatcactggcacggaaccagacaccattgaggcttcaaacttccaactggaccgcaagacacgcttcatcatccatggcttcttagacaaggcggaggacagctggccatcggacatgtgcaagaaaatgtttgaagtggagaaggtgaactgcatctgtgtggactggaggcacgggtcccgggcaatgtacacccaagccgtgcaaaacattcgggttgttggggcggagacagctttcttaatacaagcactgtcgacgcagctagggtacagccttgaggacgtgcatgtcatcggccacagcctgggcgcgcacacggccgcggaggcgggcaggaggctggggggccgcgtgggcaggatcacagggctggatccagcagggccgtgcttccaggatgaacctgaggaggttcggttggatccatctgacgccgtgtttgtggatgtgattcacacagattcttctcccatagttccttccctaggtttcggaatgagccaaaaggtgggccatctggatttctttccaaatggaggaaaggaaatgcccggatgtaagaaaaatgtcctttcaaccattactgatattgatggaatatgggaaggaattggtggctttgtgtcttgcaatcacctaagaagcttcgagtattactcaagcagcgtcctcaaccctgatggcttcctgggctatccctgtgcctcctacgatgagtttcaggagagtaagtgtttcccttgtccagctgaaggatgccccaaaatggggcactatgctgaccaatttaaggggaaaacaagtgctgtggaacaaacctttttcctgaacacaggagagagtggtaactttactagttggagatataaggtatcagtcacactttctggaaaagagaaagtgaatgggtacatcaggattgctttgtatggaagtaatgaaaactcgaaacaatatgagattttcaaaggatccctcaaaccagatgcaagtcacacgtgtgctattgatgtggattttaatgttggaaaaatacagaaagttaaattcctctggaacaaacgtgggataaatctatctgagcccaaactgggggcttcccaaatcacagtgcaaagtggtgaagatgggactgagtataatttttgtagcagcgacactgtggaagaaaacgtcttgcaatctctttacccttgttaaaaacgtggtgcggctattgcggtaataaaatctttaatgcactcggtttgagggtg

SEQ ID NO: 732364 - DNA, 857 bp, Homo sapiens
tgtgagaggaagcaaagaaggacctgggctttgggaagatctaaagacccaggaaggtctctgggtgggataaagccaagatgaaactccccctacttctggctcttctatttggggcagtttctgctcttcatctaaggtctgagacttccacctttgagacccctttgggtgctaagacgctgcctgaggatgaggagacaccagagcaggagatggaggagaccccttgcagggagctggaggaagaggaggagtggggctctggaagtgaagatgcctccaagaaagatggggctgttgagtctatctcagtgccagatatggtggacaaaaaccttacgtgtcctgaggaagaggacacagtaaaagtggtgggcatccctgggtgccagacctgccgctacctcctggtgagaagtcttcagacgtttagtcaagcttggtttacttgccggaggtgctacaggggcaacctggttttccatccacaacttcaatattaattatcgaatccagtgttctgtcagcgcgctcaaccagggtcaagtctggattggaggcaggatcacaggctcgggtcgctgcagacgctttcagtgggttgacggcagccgctggaactttgcgtactgggctgctcaccagccctggtcccgcggtggtcactgcgtggccctgtgtacccgaggaggctactggcgtcgagcccactgcctcagaagacttcctttcatctgttcctactgagctggtcccagccagcagttcagagctgccctctcctgggcagctgcctcccctcctctgcttgccatccctccctccacctccctgcaataaaatgggttttactg

SEQ ID NO: 732365 - DNA, 1443 bp, Homo sapiens
tgtgagaggaagcaaagaaggacctgggctttgggaagatctaaagacccaggaaggtctctgggtgggataaagccaagatgaaactccccctacttctggctcttctatttggggcagtttctgctcttcatctaaggtctgagacttccacctttgagacccctttgggtgctaagacgctgcctgaggatgaggagacaccagagcaggagatggaggagaccccttgcagggagctggaggaagaggaggagtggggctctggaagtgaagatgcctccaagaaagatggggctgttgagtctatctcagtgccagatatggtggacaaaaaccttacgtgtcctgaggaagaggacacagtaaaagtggtgggcatccctgggtgccagacctgccgctacctcctggtgagaagtcttcagacgtttagtcaagcttggtttacttgccggaggtgctacaggggcaacctggttttccatccacaacttcaatattaattatcgaatccagtgttctgtcagcgcgctcaaccagggtcaagtctggattggaggcaggatcacaggctcgggtcgctgcagacgctttcagtgggttgacggcagccgctggaactttgcgtactgggctgctcaccagccctggtcccgcggtggtcactgcgtggccctgtgtacccgaggaggctactggcgtcgagcccactgcctcagaagacttcctttcatctgttcctactgagctggtcccagccagcagttcagagctgccctctcctgggcagctgcctcccctcctctgcttgccatccctccctccacctccctgcaataaaatgggttttactgaaatggatttattttctcctctgatcgcggatccactctgcttagccctcattgaaacttcttccttatcatctctccccacaccacaactttcatagaagtgtcagaagctactactccttgaggaggaggatggagggtggagttgggtctatggagccttttggagatggaggaatgggctcagctagttctcttcatagaacacctgattactgggcacctgcatagtgctgccaggacctttcaaggttgtaggtagactcccaatggcccagtttgcatctctgtaaccaaaggccttttctctgtctctctccaaccccagaactgtggttggttttatatgtaaggaagttaacatgtccctgggaacagtccacaacattcaggaatgaatgtataagtaccgcaatccccggcccctcaagtggaataaatctaacatgtattgggcaccatttcccagtggcctgctgtggtagttggccttattccatgcatttttatgggctgccttcccttcctcaactgcattctctgctccttcctactctctgcaactcccaaataaacacttgtacgc

SEQ ID NO: 732366 - DNA, 840 bp, Homo sapiens
tgtgagaggaagcaaagaaggacctgggctttgggaagatctaaagacccaggaaggtctctgggtgggataaagccaagatgaaactccccctacttctggctcttctatttggggcagtttctgctcttcatctaaggtctgagacttccacctttgagacccctttgggtgctaagacgctgcctgaggatgaggagacaccagagcaggagatggaggagaccccttgcagggagctggaggaagaggagtgaagatgcctccaagaaagatggggctgttgagtctatctcagtgccagatatggtggacaaaaaccttacgtgtcctgaggaagaggacacagtaaaagtggtgggcatccctgggtgccagacctgccgctacctcctggtgagaagtcttcagacgtttagtcaagcttggtttacttgccggaggtgctacaggggcaacctggttttccatccacaacttcaatattaattatcgaatccagtgttctgtcagcgcgctcaaccagggtcaagtctggattggaggcaggatcacaggctcgggtcgctgcagacgctttcagtgggttgacggcagccgctggaactttgcgtactgggctgctcaccagccctggtcccgcggtggtcactgcgtggccctgtgtacccgaggaggctactggcgtcgagcccactgcctcagaagacttcctttcatctgttcctactgagctggtcccagccagcagttcagagctgccctctcctgggcagctgcctcccctcctctgcttgccatccctccctccacctccctgcaataaaatgggttttactg

SEQ ID NO: 732367 - DNA, 2061 bp, Homo sapiens
  misc_feature (1740)..(1740): n is a, c, g, or t
  misc_feature (1757)..(1757): n is a, c, g, or t
  misc_feature (1762)..(1762): n is a, c, g, or t
  misc_feature (1765)..(1765): n is a, c, g, or t
  misc_feature (1777)..(1777): n is a, c, g, or t
  misc_feature (1792)..(1792): n is a, c, g, or t
  misc_feature (1800)..(1800): n is a, c, g, or t
  misc_feature (1811)..(1811): n is a, c, g, or t
  misc_feature (1815)..(1815): n is a, c, g, or t
  misc_feature (1822)..(1822): n is a, c, g, or t
  misc_feature (1832)..(1833): n is a, c, g, or t
  misc_feature (1838)..(1838): n is a, c, g, or t
  misc_feature (1844)..(1844): n is a, c, g, or t
  misc_feature (1853)..(1853): n is a, c, g, or t
  misc_feature (1859)..(1859): n is a, c, g, or t
  misc_feature (1861)..(1862): n is a, c, g, or t
  misc_feature (1873)..(1873): n is a, c, g, or t
  misc_feature (1880)..(1880): n is a, c, g, or t
  misc_feature (1883)..(1883): n is a, c, g, or t
  misc_feature (1890)..(1890): n is a, c, g, or t
  misc_feature (1892)..(1892): n is a, c, g, or t
  misc_feature (1899)..(1899): n is a, c, g, or t
  misc_feature (1901)..(1902): n is a, c, g, or t
  misc_feature (1906)..(1907): n is a, c, g, or t
  misc_feature (1913)..(1913): n is a, c, g, or t
  misc_feature (1915)..(1916): n is a, c, g, or t
  misc_feature (1923)..(1923): n is a, c, g, or t
  misc_feature (1928)..(1929): n is a, c, g, or t
  misc_feature (1936)..(1936): n is a, c, g, or t
  misc_feature (1938)..(1938): n is a, c, g, or t
  misc_feature (1952)..(1952): n is a, c, g, or t
  misc_feature (1957)..(1957): n is a, c, g, or t
  misc_feature (1969)..(1969): n is a, c, g, or t
  misc_feature (1972)..(1972): n is a, c, g, or t
  misc_feature (1975)..(1975): n is a, c, g, or t
  misc_feature (1980)..(1981): n is a, c, g, or t
  misc_feature (1983)..(1983): n is a, c, g, or t
  misc_feature (1990)..(1990): n is a, c, g, or t
  misc_feature (2013)..(2014): n is a, c, g, or t
  misc_feature (2028)..(2028): n is a, c, g, or t
  misc_feature (2048)..(2048): n is a, c, g, or t
  misc_feature (2050)..(2050): n is a, c, g, or t
  misc_feature (2058)..(2058): n is a, c, g, or t
aatattctgcttttcctgttatgtgtttcagatttttctacaccaccgccacactcatcatagccttcacctctgcaggctcagccgtgctgctcttcctggccatgccaatgctcaccattgggggaatcctgtttctcatcaccaacctgcagattgggaacctatttggccaacaccgttcgaccatcatcactctgtacaatggagcatttgactcttcctcggcagtcttccttattattaagcttctttatgaaaaaggcatcagcctcagggcctccttcatcttcatctctgtctgcagtacctggcatgtagcacgcactttcctcctgatgccccgggggcacatcccatacccactgccccccaactacagcataggcctgtgccctgggaatggcaccacaaaggaagagaaggaaacagctgagcatgaaaacagggagctacagtcaaaggagttcctttcagcgaaggaagagacccaggggcagggcagaagcaggaactccgctccttctggagctacgctttctctcggcgctttgcctggcacctggtgtggctgtctgtgatacagttgtggcactacctcttcattggcactctcaactccttgctgccaacatggccggtgggacatggcacgagtcagcacctacacaaatgcctttgccttcactcagttcggagtgctgtgtgccccctggaatggcctgctcatggaccggcttaaacagaagtaccagaaggaagcaagaaagacagggtcttttaacatccgaggaccacattctttatactttccaaatcatcacctgccccatgcaacttacagggataaagccaagatgaaactccccctacttctggctcttctatttggggcagtttctgctcttcatctaaggtctgagacttccacctttgagacccctttgggtgctaagacgctgcctgaggatgaggagacaccagagcaggagatggaggagaccccttgcagggagctggaggaagaggaggagtggggctctggaagtgaagatgcctccaagaaagatggggctgttgagtctatctcagtgccagatatggtggacaaaaaccttacgtgtcctgaggaagaggacacagtaaaagtggtgggcatccctgggtgccagacctgccgctacctcctggtgagaagtcttcagacgtttagtcaagcttggtttacttgccggaggtgctacaggggcaacctggttttccatccacaacttcaatattaattatcgaatccagtgttctgtcagcgcgctcaaccagggtcaagtctggattggaggcaggatcacaggctcgggtcgctgcagacgctttcagtgggttgacggcagccgctggaactttgcgtactgggctgctcaccagccctggtcccgcggtggtcactgcgtggccctgtgtacccgaggaggctactggcgtcgagcccactgcctcagaagacttcctttcatctgttcctactgagctggtcccagccagcagttcagagctgccctctcctgggcagctgcctcccctcctctgcttgccatccctccctccacctccctgcaataaaatgggttttactgaaaaaaaaaaaaaaaaaaaaaaaaaaaaaaaaaaaaaaaaaaaaaaaaaaaaaaaaaaaaaaaaaaaaaaaaaaaaaaaaaaaaaaacccttgtgggccgcttggnccaagtcaattttaaantgganaangtttatgcttgnggccgaatttggggntaattggnccaattccccntatngggagcngtttaaaatnnatggnccgggntttaacaangtgggnannggaaaaccctnggggtanccnaattaantngcttggnannaaanncccttntnncaagtgnggtannaggaaangncccgaccgacgccnttccnaaagttgccccnctnaanggcanngnaaattgnaaccctaatatttgtaaaaatcnnggtaaattttggtnaacaagctatttttaaccananggccaatnggg

SEQ ID NO: 732368 - DNA, 847 bp, Homo sapiens
aaaactaccaactcacccacgtgggaagatctaaagacccaggaaggtctctgggtgggataaagccaagatgaaactccccctacttctggctcttctatttggggcagtttctgctcttcatctaaggtctgagacttccacctttgagacccctttgggtgctaagacgctgcctgaggatgaggagacaccagagcaggagatggaggagaccccttgcagggagctggaggaagaggaggagtggggctctggaagtgaagatgcctccaagaaagatggggctgttgagtctatctcagtgccagatatggtggacaaaaaccttacgtgtcctgaggaagaggacacagtaaaagtggtgggcatccctgggtgccagacctgccgctacctcctggtgagaagtcttcagacgtttagtcaagcttggtttacttgccggaggtgctacaggggcaacctggttttccatccacaacttcaatattaattatcgaatccagtgttctgtcagcgcgctcaaccagggtcaagtctggattggaggcaggatcacaggctcgggtcgctgcagacgctttcagtgggttgacggcagccgctggaactttgcgtactgggctgctcaccagccctggtcccgcggtggtcactgcgtggccctgtgtacccgaggaggctactggcgtcgagcccactgcctcagaagacttcctttcatctgttcctactgagctggtcccagccagcagttcagagctgccctctcctgggcagctgcctcccctcctctgcttgccatccctccctccacctccctgcaataaaatgggttttactg

SEQ ID NO: 732369 - DNA, 776 bp, Homo sapiens
tgtgagaggaagcaaagaaggacctgggctttgggaagatctaaagacccaggaaggtctctgggtgggataaagccaagatgaaactccccctacttctggctcctgaggatgaggagacaccagagcaggagatggaggagaccccttgcagggagctggaggaagaggaggagtggggctctggaagtgaagatgcctccaagaaagatggggctgttgagtctatctcagtgccagatatggtggacaaaaaccttacgtgtcctgaggaagaggacacagtaaaagtggtgggcatccctgggtgccagacctgccgctacctcctggtgagaagtcttcagacgtttagtcaagcttggtttacttgccggaggtgctacaggggcaacctggttttccatccacaacttcaatattaattatcgaatccagtgttctgtcagcgcgctcaaccagggtcaagtctggattggaggcaggatcacaggctcgggtcgctgcagacgctttcagtgggttgacggcagccgctggaactttgcgtactgggctgctcaccagccctggtcccgcggtggtcactgcgtggccctgtgtacccgaggaggctactggcgtcgagcccactgcctcagaagacttcctttcatctgttcctactgagctggtcccagccagcagttcagagctgccctctcctgggcagctgcctcccctcctctgcttgccatccctccctccacctccctgcaataaaatgggttttactg

SEQ ID NO: 732370 - DNA, 842 bp, Homo sapiens
tgtgagaggaagcaaagaaggacctgggctttgggaagatctaaagacccaggaaggtctctgggtgggataaagccaagatgaaactccccctacttctggctcttctatttggggcagtttctgctcttcatctaaggtctgagacttccacctttgagacccctttgggtgctaagacgctgcctgaggatgaggagacaccagagcaggagatggaggagaccccttgcagggagctggaggaagaggaggagtggggctctggaagtgaagatgcctccaagaaagatggggctgttgagtctatctcagtgccagatatggtggacaaaaaccttacgtgtcctgaggaagaggacacagtaaaagtggtgggcatccctgggtgccagacctgccgctacctcctggtgagaagtcttcagacgtttagtcaagcttggtttacttgccggaggtgctacaggggcaacctggttttccatccacaacttcaatattaattatcgaatccagtgttctgtcagcgcgctcaaccagggtcaagtctggattggaggcaggatcacaggctcgggtcgctgcagacgctttcagtgggttgacggcagccgctggaactttgcgtactgggctgctcaccagccctggtcccgcggtggtcactgcgtggccctgtgtacccgaggaggctactggcgtcgagcccactgcctcagaagacttcctttcatctgttcctactgagctggtcccagccagcagttcagagctgccctctcctgggcagctgcctcccctcctctgcaaggaacccacgcgcgtgggttccttgcaga

SEQ ID NO: 732371 - DNA, 844 bp, Homo sapiens
tgtgagaggaagcaaagaaggacctgggctttgggaagatctaaagacccaggaaggtctctgggtgggataaagccaagatgaaactccccctacttctggctcttctatttggggcagtttctgctcttcatctaaggtctgagacttccacctttgagacccctttgggtgctaagacgctgcctgaggatgaggagacaccagagcaggagatggaggagaccccttgcagggagctggaggaagaggaggagtggggctctggaagtgaagatgcctccaagaaagatggggctgttgagtctatctcagtgccagatatggtggacaaaaaccttacgtgtcctgaggaagaggacacagtaaaagtggtgggcatccctgggtgccagacctgccgctacctcctggtgagaagtcttcagacgtttagtcaagcttggtttacttgccggaggtgctacaggggcaacctggttttccatccacaacttcaatattaattatcgaatccagtgttctgtcagcgcgctcaaccagggtcaagtctggattggaggcaggatcacaggctcgggtcgctgcagacgctttcagtgggttgacggcagccgctggaactttgcgtactgggctgctcaccagccctggtcccgcggtggtcactgcgtggccctgtgtacccgaggaggctactggcgtcgagcccactgcctcagaagacttcctttcatctgttcctactgagctggtcccagccagcagttcagagctgccctctcctgggcagctgcctcccctcctctgcaaggaacccacgcgggatccttagatagaaaca

SEQ ID NO: 732372 - DNA, 889 bp, Homo sapiens
tctctgcaaggaacccacgcgcgtgggtcgctgcagacgctttcagtgggttgacggcagccgctggaactttgcgtactgggctgctcaccagccctggtcccgcggtggtcactgcgtggccctgtgtacccgaggaggctactggcgtcgagcccactgcctcagaagacttcctttcatctgttcctactgagctggtcccagccagcagttcagagctgccctctcctgggcagctgcctcccctcctctgcttgccatccctccctccacctccctgcaataaaatgggttttactgaaatggatttattttctcctctgatcgcggatccactctgcttagccctcattgaaacttcttccttatcatctctccccacaccacaactttcatagaagtgtcagaagctactactccttgaggaggaggatggagggtggagttgggtctatggagccttttggagatggaggaatgggctcagctagttctcttcatagaacacctgattactgggcacctgcatagtgctgccaggacctttcaaggttgtaggtagactcccaatggcccagtttgcatctctgtaaccaaaggccttttctctgtctctctccaaccccagaactgtggttggttttatatgtaaggaagttaacatgtccctgggaacagtccacaacattcaggaatgaatgtataagtaccgcaatccccggcccctcaagtggaataaatctaacatgtattgggcaccatttcccagtggcctgctgtggtagttggccttattccatgcatttttatgggctgccttcccttcctcaactgcattctctgctccttcctactctctgcaactcccaaataaacacttgtacgc

SEQ ID NO: 732373 - DNA, 303 bp, Homo sapiens
tctctgcaaggaacccacgcgcgtgggtcgctgcagacgctttcagtgggttgacggcagccgctggaactttgcgtactgggctgctcaccagccctggtcccgcggtggtcactgcgtggccctgtgtacccgaggaggctactggcgtcgagcccactgcctcagaagacttcctttcatctgttcctactgagctggtcccagccagcagttcagagctgccctctcctgggcagctgcctcccctcctctgcttgccatccctccctccacctccctgcaataaaatgggttttactg

SEQ ID NO: 732374 - DNA, 288 bp, Homo sapiens
tctctgcaaggaacccacgcgcgtgggtcgctgcagacgctttcagtgggttgacggcagccgctggaactttgcgtactgggctgctcaccagccctggtcccgcggtggtcactgcgtggccctgtgtacccgaggaggctactggcgtcgagcccactgcctcagaagacttcctttcatctgttcctactgagctggtcccagccagcagttcagagctgccctctcctgggcagctgcctcccctcctctgcaaggaacccacgcgcgtgggttccttgcaga

SEQ ID NO: 732375 - DNA, 290 bp, Homo sapiens
tctctgcaaggaacccacgcgcgtgggtcgctgcagacgctttcagtgggttgacggcagccgctggaactttgcgtactgggctgctcaccagccctggtcccgcggtggtcactgcgtggccctgtgtacccgaggaggctactggcgtcgagcccactgcctcagaagacttcctttcatctgttcctactgagctggtcccagccagcagttcagagctgccctctcctgggcagctgcctcccctcctctgcaaggaacccacgcgggatccttagatagaaaca

SEQ ID NO: 732376 - DNA, 1284 bp, Homo sapiens
  misc_feature (963)..(963): n is a, c, g, or t
  misc_feature (980)..(980): n is a, c, g, or t
  misc_feature (985)..(985): n is a, c, g, or t
  misc_feature (988)..(988): n is a, c, g, or t
  misc_feature (1000)..(1000): n is a, c, g, or t
  misc_feature (1015)..(1015): n is a, c, g, or t
  misc_feature (1023)..(1023): n is a, c, g, or t
  misc_feature (1034)..(1034): n is a, c, g, or t
  misc_feature (1038)..(1038): n is a, c, g, or t
  misc_feature (1045)..(1045): n is a, c, g, or t
  misc_feature (1055)..(1056): n is a, c, g, or t
  misc_feature (1061)..(1061): n is a, c, g, or t
  misc_feature (1067)..(1067): n is a, c, g, or t
  misc_feature (1076)..(1076): n is a, c, g, or t
  misc_feature (1082)..(1082): n is a, c, g, or t
  misc_feature (1084)..(1085): n is a, c, g, or t
  misc_feature (1096)..(1096): n is a, c, g, or t
  misc_feature (1103)..(1103): n is a, c, g, or t
  misc_feature (1106)..(1106): n is a, c, g, or t
  misc_feature (1113)..(1113): n is a, c, g, or t
  misc_feature (1115)..(1115): n is a, c, g, or t
  misc_feature (1122)..(1122): n is a, c, g, or t
  misc_feature (1124)..(1125): n is a, c, g, or t
  misc_feature (1129)..(1130): n is a, c, g, or t
  misc_feature (1136)..(1136): n is a, c, g, or t
  misc_feature (1138)..(1139): n is a, c, g, or t
  misc_feature (1146)..(1146): n is a, c, g, or t
  misc_feature (1151)..(1152): n is a, c, g, or t
  misc_feature (1159)..(1159): n is a, c, g, or t
  misc_feature (1161)..(1161): n is a, c, g, or t
  misc_feature (1175)..(1175): n is a, c, g, or t
  misc_feature (1180)..(1180): n is a, c, g, or t
  misc_feature (1192)..(1192): n is a, c, g, or t
  misc_feature (1195)..(1195): n is a, c, g, or t
  misc_feature (1198)..(1198): n is a, c, g, or t
  misc_feature (1203)..(1204): n is a, c, g, or t
  misc_feature (1206)..(1206): n is a, c, g, or t
  misc_feature (1213)..(1213): n is a, c, g, or t
  misc_feature (1236)..(1237): n is a, c, g, or t
  misc_feature (1251)..(1251): n is a, c, g, or t
  misc_feature (1271)..(1271): n is a, c, g, or t
  misc_feature (1273)..(1273): n is a, c, g, or t
  misc_feature (1281)..(1281): n is a, c, g, or t
tgtgagaggaagcaaagaaggacctgggctttgggaagatctaaagacccaggaaggtctctgggtgggataaagccaagatgaaactccccctacttctggctcttctatttggggcagtttctgctcttcatctaaggtctgagacttccacctttgagacccctttgggtgctaagacgctgcctgaggatgaggagacaccagagcaggagatggaggagaccccttgcagggagctggaggaagaggaggagtggggctctggaagtgaagatgcctccaagaaagatggggctgttgagtctatctcagtgccagatatggtggacaaaaaccttacgtgtcctgaggaagaggacacagtaaaagtggtgggcatccctgggtgccagacctgccgctacctcctggtgagaagtcttcagacgtttagtcaagcttggtttacttgccggaggtgctacaggggcaacctggttttccatccacaacttcaatattaattatcgaatccagtgttctgtcagcgcgctcaaccagggtcaagtctggattggaggcaggatcacaggctcgggtcgctgcagacgctttcagtgggttgacggcagccgctggaactttgcgtactgggctgctcaccagccctggtcccgcggtggtcactgcgtggccctgtgtacccgaggaggctactggcgtcgagcccactgcctcagaagacttcctttcatctgttcctactgagctggtcccagccagcagttcagagctgccctctcctgggcagctgcctcccctcctctgcttgccatccctccctccacctccctgcaataaaatgggttttactgaaaaaaaaaaaaaaaaaaaaaaaaaaaaaaaaaaaaaaaaaaaaaaaaaaaaaaaaaaaaaaaaaaaaaaaaaaaaaaaaaaaaaaacccttgtgggccgcttggnccaagtcaattttaaantgganaangtttatgcttgnggccgaatttggggntaattggnccaattccccntatngggagcngtttaaaatnnatggnccgggntttaacaangtgggnannggaaaaccctnggggtanccnaattaantngcttggnannaaanncccttntnncaagtgnggtannaggaaangncccgaccgacgccnttccnaaagttgccccnctnaanggcanngnaaattgnaaccctaatatttgtaaaaatcnnggtaaattttggtnaacaagctatttttaaccananggccaatnggg

SEQ ID NO: 732377 - DNA, 1426 bp, Homo sapiens
tgtgagaggaagcaaagaaggacctgggctttgggaagatctaaagacccaggaaggtctctgggtgggataaagccaagatgaaactccccctacttctggctcttctatttggggcagtttctgctcttcatctaaggtctgagacttccacctttgagacccctttgggtgctaagacgctgcctgaggatgaggagacaccagagcaggagatggaggagaccccttgcagggagctggaggaagaggagtgaagatgcctccaagaaagatggggctgttgagtctatctcagtgccagatatggtggacaaaaaccttacgtgtcctgaggaagaggacacagtaaaagtggtgggcatccctgggtgccagacctgccgctacctcctggtgagaagtcttcagacgtttagtcaagcttggtttacttgccggaggtgctacaggggcaacctggttttccatccacaacttcaatattaattatcgaatccagtgttctgtcagcgcgctcaaccagggtcaagtctggattggaggcaggatcacaggctcgggtcgctgcagacgctttcagtgggttgacggcagccgctggaactttgcgtactgggctgctcaccagccctggtcccgcggtggtcactgcgtggccctgtgtacccgaggaggctactggcgtcgagcccactgcctcagaagacttcctttcatctgttcctactgagctggtcccagccagcagttcagagctgccctctcctgggcagctgcctcccctcctctgcttgccatccctccctccacctccctgcaataaaatgggttttactgaaatggatttattttctcctctgatcgcggatccactctgcttagccctcattgaaacttcttccttatcatctctccccacaccacaactttcatagaagtgtcagaagctactactccttgaggaggaggatggagggtggagttgggtctatggagccttttggagatggaggaatgggctcagctagttctcttcatagaacacctgattactgggcacctgcatagtgctgccaggacctttcaaggttgtaggtagactcccaatggcccagtttgcatctctgtaaccaaaggccttttctctgtctctctccaaccccagaactgtggttggttttatatgtaaggaagttaacatgtccctgggaacagtccacaacattcaggaatgaatgtataagtaccgcaatccccggcccctcaagtggaataaatctaacatgtattgggcaccatttcccagtggcctgctgtggtagttggccttattccatgcatttttatgggctgccttcccttcctcaactgcattctctgctccttcctactctctgcaactcccaaataaacacttgtacgc

SEQ ID NO: 732378 - DNA, 1267 bp, Homo sapiens
  misc_feature (946)..(946): n is a, c, g, or t
  misc_feature (963)..(963): n is a, c, g, or t
  misc_feature (968)..(968): n is a, c, g, or t
  misc_feature (971)..(971): n is a, c, g, or t
  misc_feature (983)..(983): n is a, c, g, or t
  misc_feature (998)..(998): n is a, c, g, or t
  misc_feature (1006)..(1006): n is a, c, g, or t
  misc_feature (1017)..(1017): n is a, c, g, or t
  misc_feature (1021)..(1021): n is a, c, g, or t
  misc_feature (1028)..(1028): n is a, c, g, or t
  misc_feature (1038)..(1039): n is a, c, g, or t
  misc_feature (1044)..(1044): n is a, c, g, or t
  misc_feature (1050)..(1050): n is a, c, g, or t
  misc_feature (1059)..(1059): n is a, c, g, or t
  misc_feature (1065)..(1065): n is a, c, g, or t
  misc_feature (1067)..(1068): n is a, c, g, or t
  misc_feature (1079)..(1079): n is a, c, g, or t
  misc_feature (1086)..(1086): n is a, c, g, or t
  misc_feature (1089)..(1089): n is a, c, g, or t
  misc_feature (1096)..(1096): n is a, c, g, or t
  misc_feature (1098)..(1098): n is a, c, g, or t
  misc_feature (1105)..(1105): n is a, c, g, or t
  misc_feature (1107)..(1108): n is a, c, g, or t
  misc_feature (1112)..(1113): n is a, c, g, or t
  misc_feature (1119)..(1119): n is a, c, g, or t
  misc_feature (1121)..(1122): n is a, c, g, or t
  misc_feature (1129)..(1129): n is a, c, g, or t
  misc_feature (1134)..(1135): n is a, c, g, or t
  misc_feature (1142)..(1142): n is a, c, g, or t
  misc_feature (1144)..(1144): n is a, c, g, or t
  misc_feature (1158)..(1158): n is a, c, g, or t
  misc_feature (1163)..(1163): n is a, c, g, or t
  misc_feature (1175)..(1175): n is a, c, g, or t
  misc_feature (1178)..(1178): n is a, c, g, or t
  misc_feature (1181)..(1181): n is a, c, g, or t
  misc_feature (1186)..(1187): n is a, c, g, or t
  misc_feature (1189)..(1189): n is a, c, g, or t
  misc_feature (1196)..(1196): n is a, c, g, or t
  misc_feature (1219)..(1220): n is a, c, g, or t
  misc_feature (1234)..(1234): n is a, c, g, or t
  misc_feature (1254)..(1254): n is a, c, g, or t
  misc_feature (1256)..(1256): n is a, c, g, or t
  misc_feature (1264)..(1264): n is a, c, g, or t
tgtgagaggaagcaaagaaggacctgggctttgggaagatctaaagacccaggaaggtctctgggtgggataaagccaagatgaaactccccctacttctggctcttctatttggggcagtttctgctcttcatctaaggtctgagacttccacctttgagacccctttgggtgctaagacgctgcctgaggatgaggagacaccagagcaggagatggaggagaccccttgcagggagctggaggaagaggagtgaagatgcctccaagaaagatggggctgttgagtctatctcagtgccagatatggtggacaaaaaccttacgtgtcctgaggaagaggacacagtaaaagtggtgggcatccctgggtgccagacctgccgctacctcctggtgagaagtcttcagacgtttagtcaagcttggtttacttgccggaggtgctacaggggcaacctggttttccatccacaacttcaatattaattatcgaatccagtgttctgtcagcgcgctcaaccagggtcaagtctggattggaggcaggatcacaggctcgggtcgctgcagacgctttcagtgggttgacggcagccgctggaactttgcgtactgggctgctcaccagccctggtcccgcggtggtcactgcgtggccctgtgtacccgaggaggctactggcgtcgagcccactgcctcagaagacttcctttcatctgttcctactgagctggtcccagccagcagttcagagctgccctctcctgggcagctgcctcccctcctctgcttgccatccctccctccacctccctgcaataaaatgggttttactgaaaaaaaaaaaaaaaaaaaaaaaaaaaaaaaaaaaaaaaaaaaaaaaaaaaaaaaaaaaaaaaaaaaaaaaaaaaaaaaaaaaaaaacccttgtgggccgcttggnccaagtcaattttaaantgganaangtttatgcttgnggccgaatttggggntaattggnccaattccccntatngggagcngtttaaaatnnatggnccgggntttaacaangtgggnannggaaaaccctnggggtanccnaattaantngcttggnannaaanncccttntnncaagtgnggtannaggaaangncccgaccgacgccnttccnaaagttgccccnctnaanggcanngnaaattgnaaccctaatatttgtaaaaatcnnggtaaattttggtnaacaagctatttttaaccananggccaatnggg

SEQ ID NO: 732379 - DNA, 825 bp, Homo sapiens
tgtgagaggaagcaaagaaggacctgggctttgggaagatctaaagacccaggaaggtctctgggtgggataaagccaagatgaaactccccctacttctggctcttctatttggggcagtttctgctcttcatctaaggtctgagacttccacctttgagacccctttgggtgctaagacgctgcctgaggatgaggagacaccagagcaggagatggaggagaccccttgcagggagctggaggaagaggagtgaagatgcctccaagaaagatggggctgttgagtctatctcagtgccagatatggtggacaaaaaccttacgtgtcctgaggaagaggacacagtaaaagtggtgggcatccctgggtgccagacctgccgctacctcctggtgagaagtcttcagacgtttagtcaagcttggtttacttgccggaggtgctacaggggcaacctggttttccatccacaacttcaatattaattatcgaatccagtgttctgtcagcgcgctcaaccagggtcaagtctggattggaggcaggatcacaggctcgggtcgctgcagacgctttcagtgggttgacggcagccgctggaactttgcgtactgggctgctcaccagccctggtcccgcggtggtcactgcgtggccctgtgtacccgaggaggctactggcgtcgagcccactgcctcagaagacttcctttcatctgttcctactgagctggtcccagccagcagttcagagctgccctctcctgggcagctgcctcccctcctctgcaaggaacccacgcgcgtgggttccttgcaga

SEQ ID NO: 732380 - DNA, 827 bp, Homo sapiens
tgtgagaggaagcaaagaaggacctgggctttgggaagatctaaagacccaggaaggtctctgggtgggataaagccaagatgaaactccccctacttctggctcttctatttggggcagtttctgctcttcatctaaggtctgagacttccacctttgagacccctttgggtgctaagacgctgcctgaggatgaggagacaccagagcaggagatggaggagaccccttgcagggagctggaggaagaggagtgaagatgcctccaagaaagatggggctgttgagtctatctcagtgccagatatggtggacaaaaaccttacgtgtcctgaggaagaggacacagtaaaagtggtgggcatccctgggtgccagacctgccgctacctcctggtgagaagtcttcagacgtttagtcaagcttggtttacttgccggaggtgctacaggggcaacctggttttccatccacaacttcaatattaattatcgaatccagtgttctgtcagcgcgctcaaccagggtcaagtctggattggaggcaggatcacaggctcgggtcgctgcagacgctttcagtgggttgacggcagccgctggaactttgcgtactgggctgctcaccagccctggtcccgcggtggtcactgcgtggccctgtgtacccgaggaggctactggcgtcgagcccactgcctcagaagacttcctttcatctgttcctactgagctggtcccagccagcagttcagagctgccctctcctgggcagctgcctcccctcctctgcaaggaacccacgcgggatccttagatagaaaca

SEQ ID NO: 732381 - DNA, 1389 bp, Homo sapiens
tgtgagaggaagcaaagaaggacctgggctttgggaagatctaaagacccaggaaggtctctgggtgggataaagccaagatgaaactccccctacttctggctcttctatttggggcagtttctgctcttcatctaaggtctgagacttccacctttgagacccctttgggtgctaagacgctgcctgaggatgaggagacaccagagcaggagatggaggagaccccttgcagggagctggaggaagaggaggagtggggctctggaagtgaagatgcctccaagaaagatggggctgttgagtctatctcagtgccagatatggtggacaaaaaccttacgtgtcctgaggaagaggacacagttcttcagacgtttagtcaagcttggtttacttgccggaggtgctacaggggcaacctggttttccatccacaacttcaatattaattatcgaatccagtgttctgtcagcgcgctcaaccagggtcaagtctggattggaggcaggatcacaggctcgggtcgctgcagacgctttcagtgggttgacggcagccgctggaactttgcgtactgggctgctcaccagccctggtcccgcggtggtcactgcgtggccctgtgtacccgaggaggctactggcgtcgagcccactgcctcagaagacttcctttcatctgttcctactgagctggtcccagccagcagttcagagctgccctctcctgggcagctgcctcccctcctctgcttgccatccctccctccacctccctgcaataaaatgggttttactgaaatggatttattttctcctctgatcgcggatccactctgcttagccctcattgaaacttcttccttatcatctctccccacaccacaactttcatagaagtgtcagaagctactactccttgaggaggaggatggagggtggagttgggtctatggagccttttggagatggaggaatgggctcagctagttctcttcatagaacacctgattactgggcacctgcatagtgctgccaggacctttcaaggttgtaggtagactcccaatggcccagtttgcatctctgtaaccaaaggccttttctctgtctctctccaaccccagaactgtggttggttttatatgtaaggaagttaacatgtccctgggaacagtccacaacattcaggaatgaatgtataagtaccgcaatccccggcccctcaagtggaataaatctaacatgtattgggcaccatttcccagtggcctgctgtggtagttggccttattccatgcatttttatgggctgccttcccttcctcaactgcattctctgctccttcctactctctgcaactcccaaataaacacttgtacgc

SEQ ID NO: 732382 - DNA, 1230 bp, Homo sapiens
  misc_feature (909)..(909): n is a, c, g, or t
  misc_feature (926)..(926): n is a, c, g, or t
  misc_feature (931)..(931): n is a, c, g, or t
  misc_feature (934)..(934): n is a, c, g, or t
  misc_feature (946)..(946): n is a, c, g, or t
  misc_feature (961)..(961): n is a, c, g, or t
  misc_feature (969)..(969): n is a, c, g, or t
  misc_feature (980)..(980): n is a, c, g, or t
  misc_feature (984)..(984): n is a, c, g, or t
  misc_feature (991)..(991): n is a, c, g, or t
  misc_feature (1001)..(1002): n is a, c, g, or t
  misc_feature (1007)..(1007): n is a, c, g, or t
  misc_feature (1013)..(1013): n is a, c, g, or t
  misc_feature (1022)..(1022): n is a, c, g, or t
  misc_feature (1028)..(1028): n is a, c, g, or t
  misc_feature (1030)..(1031): n is a, c, g, or t
  misc_feature (1042)..(1042): n is a, c, g, or t
  misc_feature (1049)..(1049): n is a, c, g, or t
  misc_feature (1052)..(1052): n is a, c, g, or t
  misc_feature (1059)..(1059): n is a, c, g, or t
  misc_feature (1061)..(1061): n is a, c, g, or t
  misc_feature (1068)..(1068): n is a, c, g, or t
  misc_feature (1070)..(1071): n is a, c, g, or t
  misc_feature (1075)..(1076): n is a, c, g, or t
  misc_feature (1082)..(1082): n is a, c, g, or t
  misc_feature (1084)..(1085): n is a, c, g, or t
  misc_feature (1092)..(1092): n is a, c, g, or t
  misc_feature (1097)..(1098): n is a, c, g, or t
  misc_feature (1105)..(1105): n is a, c, g, or t
  misc_feature (1107)..(1107): n is a, c, g, or t
  misc_feature (1121)..(1121): n is a, c, g, or t
  misc_feature (1126)..(1126): n is a, c, g, or t
  misc_feature (1138)..(1138): n is a, c, g, or t
  misc_feature (1141)..(1141): n is a, c, g, or t
  misc_feature (1144)..(1144): n is a, c, g, or t
  misc_feature (1149)..(1150): n is a, c, g, or t
  misc_feature (1152)..(1152): n is a, c, g, or t
  misc_feature (1159)..(1159): n is a, c, g, or t
  misc_feature (1182)..(1183): n is a, c, g, or t
  misc_feature (1197)..(1197): n is a, c, g, or t
  misc_feature (1217)..(1217): n is a, c, g, or t
  misc_feature (1219)..(1219): n is a, c, g, or t
  misc_feature (1227)..(1227): n is a, c, g, or t
tgtgagaggaagcaaagaaggacctgggctttgggaagatctaaagacccaggaaggtctctgggtgggataaagccaagatgaaactccccctacttctggctcttctatttggggcagtttctgctcttcatctaaggtctgagacttccacctttgagacccctttgggtgctaagacgctgcctgaggatgaggagacaccagagcaggagatggaggagaccccttgcagggagctggaggaagaggaggagtggggctctggaagtgaagatgcctccaagaaagatggggctgttgagtctatctcagtgccagatatggtggacaaaaaccttacgtgtcctgaggaagaggacacagttcttcagacgtttagtcaagcttggtttacttgccggaggtgctacaggggcaacctggttttccatccacaacttcaatattaattatcgaatccagtgttctgtcagcgcgctcaaccagggtcaagtctggattggaggcaggatcacaggctcgggtcgctgcagacgctttcagtgggttgacggcagccgctggaactttgcgtactgggctgctcaccagccctggtcccgcggtggtcactgcgtggccctgtgtacccgaggaggctactggcgtcgagcccactgcctcagaagacttcctttcatctgttcctactgagctggtcccagccagcagttcagagctgccctctcctgggcagctgcctcccctcctctgcttgccatccctccctccacctccctgcaataaaatgggttttactgaaaaaaaaaaaaaaaaaaaaaaaaaaaaaaaaaaaaaaaaaaaaaaaaaaaaaaaaaaaaaaaaaaaaaaaaaaaaaaaaaaaaaaacccttgtgggccgcttggnccaagtcaattttaaantgganaangtttatgcttgnggccgaatttggggntaattggnccaattccccntatngggagcngtttaaaatnnatggnccgggntttaacaangtgggnannggaaaaccctnggggtanccnaattaantngcttggnannaaanncccttntnncaagtgnggtannaggaaangncccgaccgacgccnttccnaaagttgccccnctnaanggcanngnaaattgnaaccctaatatttgtaaaaatcnnggtaaattttggtnaacaagctatttttaaccananggccaatnggg

SEQ ID NO: 732383 - DNA, 803 bp, Homo sapiens
tgtgagaggaagcaaagaaggacctgggctttgggaagatctaaagacccaggaaggtctctgggtgggataaagccaagatgaaactccccctacttctggctcttctatttggggcagtttctgctcttcatctaaggtctgagacttccacctttgagacccctttgggtgctaagacgctgcctgaggatgaggagacaccagagcaggagatggaggagaccccttgcagggagctggaggaagaggaggagtggggctctggaagtgaagatgcctccaagaaagatggggctgttgagtctatctcagtgccagatatggtggacaaaaaccttacgtgtcctgaggaagaggacacagttcttcagacgtttagtcaagcttggtttacttgccggaggtgctacaggggcaacctggttttccatccacaacttcaatattaattatcgaatccagtgttctgtcagcgcgctcaaccagggtcaagtctggattggaggcaggatcacaggctcgggtcgctgcagacgctttcagtgggttgacggcagccgctggaactttgcgtactgggctgctcaccagccctggtcccgcggtggtcactgcgtggccctgtgtacccgaggaggctactggcgtcgagcccactgcctcagaagacttcctttcatctgttcctactgagctggtcccagccagcagttcagagctgccctctcctgggcagctgcctcccctcctctgcttgccatccctccctccacctccctgcaataaaatgggttttactg

SEQ ID NO: 732384 - DNA, 788 bp, Homo sapiens
tgtgagaggaagcaaagaaggacctgggctttgggaagatctaaagacccaggaaggtctctgggtgggataaagccaagatgaaactccccctacttctggctcttctatttggggcagtttctgctcttcatctaaggtctgagacttccacctttgagacccctttgggtgctaagacgctgcctgaggatgaggagacaccagagcaggagatggaggagaccccttgcagggagctggaggaagaggaggagtggggctctggaagtgaagatgcctccaagaaagatggggctgttgagtctatctcagtgccagatatggtggacaaaaaccttacgtgtcctgaggaagaggacacagttcttcagacgtttagtcaagcttggtttacttgccggaggtgctacaggggcaacctggttttccatccacaacttcaatattaattatcgaatccagtgttctgtcagcgcgctcaaccagggtcaagtctggattggaggcaggatcacaggctcgggtcgctgcagacgctttcagtgggttgacggcagccgctggaactttgcgtactgggctgctcaccagccctggtcccgcggtggtcactgcgtggccctgtgtacccgaggaggctactggcgtcgagcccactgcctcagaagacttcctttcatctgttcctactgagctggtcccagccagcagttcagagctgccctctcctgggcagctgcctcccctcctctgcaaggaacccacgcgcgtgggttccttgcaga

SEQ ID NO: 732385 - DNA, 790 bp, Homo sapiens
tgtgagaggaagcaaagaaggacctgggctttgggaagatctaaagacccaggaaggtctctgggtgggataaagccaagatgaaactccccctacttctggctcttctatttggggcagtttctgctcttcatctaaggtctgagacttccacctttgagacccctttgggtgctaagacgctgcctgaggatgaggagacaccagagcaggagatggaggagaccccttgcagggagctggaggaagaggaggagtggggctctggaagtgaagatgcctccaagaaagatggggctgttgagtctatctcagtgccagatatggtggacaaaaaccttacgtgtcctgaggaagaggacacagttcttcagacgtttagtcaagcttggtttacttgccggaggtgctacaggggcaacctggttttccatccacaacttcaatattaattatcgaatccagtgttctgtcagcgcgctcaaccagggtcaagtctggattggaggcaggatcacaggctcgggtcgctgcagacgctttcagtgggttgacggcagccgctggaactttgcgtactgggctgctcaccagccctggtcccgcggtggtcactgcgtggccctgtgtacccgaggaggctactggcgtcgagcccactgcctcagaagacttcctttcatctgttcctactgagctggtcccagccagcagttcagagctgccctctcctgggcagctgcctcccctcctctgcaaggaacccacgcgggatccttagatagaaaca

SEQ ID NO: 732386 - DNA, 1422 bp, Homo sapiens
ccatcttcaccctcatcaaaggctcccttcagaatgacccattttacgataaagccaagatgaaactccccctacttctggctcttctatttggggcagtttctgctcttcatctaaggtctgagacttccacctttgagacccctttgggtgctaagacgctgcctgaggatgaggagacaccagagcaggagatggaggagaccccttgcagggagctggaggaagaggaggagtggggctctggaagtgaagatgcctccaagaaagatggggctgttgagtctatctcagtgccagatatggtggacaaaaaccttacgtgtcctgaggaagaggacacagtaaaagtggtgggcatccctgggtgccagacctgccgctacctcctggtgagaagtcttcagacgtttagtcaagcttggtttacttgccggaggtgctacaggggcaacctggttttccatccacaacttcaatattaattatcgaatccagtgttctgtcagcgcgctcaaccagggtcaagtctggattggaggcaggatcacaggctcgggtcgctgcagacgctttcagtgggttgacggcagccgctggaactttgcgtactgggctgctcaccagccctggtcccgcggtggtcactgcgtggccctgtgtacccgaggaggctactggcgtcgagcccactgcctcagaagacttcctttcatctgttcctactgagctggtcccagccagcagttcagagctgccctctcctgggcagctgcctcccctcctctgcttgccatccctccctccacctccctgcaataaaatgggttttactgaaatggatttattttctcctctgatcgcggatccactctgcttagccctcattgaaacttcttccttatcatctctccccacaccacaactttcatagaagtgtcagaagctactactccttgaggaggaggatggagggtggagttgggtctatggagccttttggagatggaggaatgggctcagctagttctcttcatagaacacctgattactgggcacctgcatagtgctgccaggacctttcaaggttgtaggtagactcccaatggcccagtttgcatctctgtaaccaaaggccttttctctgtctctctccaaccccagaactgtggttggttttatatgtaaggaagttaacatgtccctgggaacagtccacaacattcaggaatgaatgtataagtaccgcaatccccggcccctcaagtggaataaatctaacatgtattgggcaccatttcccagtggcctgctgtggtagttggccttattccatgcatttttatgggctgccttcccttcctcaactgcattctctgctccttcctactctctgcaactcccaaataaacacttgtacgc

SEQ ID NO: 732387 - DNA, 1263 bp, Homo sapiens
  misc_feature (942)..(942): n is a, c, g, or t
  misc_feature (959)..(959): n is a, c, g, or t
  misc_feature (964)..(964): n is a, c, g, or t
  misc_feature (967)..(967): n is a, c, g, or t
  misc_feature (979)..(979): n is a, c, g, or t
  misc_feature (994)..(994): n is a, c, g, or t
  misc_feature (1002)..(1002): n is a, c, g, or t
  misc_feature (1013)..(1013): n is a, c, g, or t
  misc_feature (1017)..(1017): n is a, c, g, or t
  misc_feature (1024)..(1024): n is a, c, g, or t
  misc_feature (1034)..(1035): n is a, c, g, or t
  misc_feature (1040)..(1040): n is a, c, g, or t
  misc_feature (1046)..(1046): n is a, c, g, or t
  misc_feature (1055)..(1055): n is a, c, g, or t
  misc_feature (1061)..(1061): n is a, c, g, or t
  misc_feature (1063)..(1064): n is a, c, g, or t
  misc_feature (1075)..(1075): n is a, c, g, or t
  misc_feature (1082)..(1082): n is a, c, g, or t
  misc_feature (1085)..(1085): n is a, c, g, or t
  misc_feature (1092)..(1092): n is a, c, g, or t
  misc_feature (1094)..(1094): n is a, c, g, or t
  misc_feature (1101)..(1101): n is a, c, g, or t
  misc_feature (1103)..(1104): n is a, c, g, or t
  misc_feature (1108)..(1109): n is a, c, g, or t
  misc_feature (1115)..(1115): n is a, c, g, or t
  misc_feature (1117)..(1118): n is a, c, g, or t
  misc_feature (1125)..(1125): n is a, c, g, or t
  misc_feature (1130)..(1131): n is a, c, g, or t
  misc_feature (1138)..(1138): n is a, c, g, or t
  misc_feature (1140)..(1140): n is a, c, g, or t
  misc_feature (1154)..(1154): n is a, c, g, or t
  misc_feature (1159)..(1159): n is a, c, g, or t
  misc_feature (1171)..(1171): n is a, c, g, or t
  misc_feature (1174)..(1174): n is a, c, g, or t
  misc_feature (1177)..(1177): n is a, c, g, or t
  misc_feature (1182)..(1183): n is a, c, g, or t
  misc_feature (1185)..(1185): n is a, c, g, or t
  misc_feature (1192)..(1192): n is a, c, g, or t
  misc_feature (1215)..(1216): n is a, c, g, or t
  misc_feature (1230)..(1230): n is a, c, g, or t
  misc_feature (1250)..(1250): n is a, c, g, or t
  misc_feature (1252)..(1252): n is a, c, g, or t
  misc_feature (1260)..(1260): n is a, c, g, or t
ccatcttcaccctcatcaaaggctcccttcagaatgacccattttacgataaagccaagatgaaactccccctacttctggctcttctatttggggcagtttctgctcttcatctaaggtctgagacttccacctttgagacccctttgggtgctaagacgctgcctgaggatgaggagacaccagagcaggagatggaggagaccccttgcagggagctggaggaagaggaggagtggggctctggaagtgaagatgcctccaagaaagatggggctgttgagtctatctcagtgccagatatggtggacaaaaaccttacgtgtcctgaggaagaggacacagtaaaagtggtgggcatccctgggtgccagacctgccgctacctcctggtgagaagtcttcagacgtttagtcaagcttggtttacttgccggaggtgctacaggggcaacctggttttccatccacaacttcaatattaattatcgaatccagtgttctgtcagcgcgctcaaccagggtcaagtctggattggaggcaggatcacaggctcgggtcgctgcagacgctttcagtgggttgacggcagccgctggaactttgcgtactgggctgctcaccagccctggtcccgcggtggtcactgcgtggccctgtgtacccgaggaggctactggcgtcgagcccactgcctcagaagacttcctttcatctgttcctactgagctggtcccagccagcagttcagagctgccctctcctgggcagctgcctcccctcctctgcttgccatccctccctccacctccctgcaataaaatgggttttactgaaaaaaaaaaaaaaaaaaaaaaaaaaaaaaaaaaaaaaaaaaaaaaaaaaaaaaaaaaaaaaaaaaaaaaaaaaaaaaaaaaaaaaacccttgtgggccgcttggnccaagtcaattttaaantgganaangtttatgcttgnggccgaatttggggntaattggnccaattccccntatngggagcngtttaaaatnnatggnccgggntttaacaangtgggnannggaaaaccctnggggtanccnaattaantngcttggnannaaanncccttntnncaagtgnggtannaggaaangncccgaccgacgccnttccnaaagttgccccnctnaanggcanngnaaattgnaaccctaatatttgtaaaaatcnnggtaaattttggtnaacaagctatttttaaccananggccaatnggg

SEQ ID NO: 732388 - DNA, 836 bp, Homo sapiens
ccatcttcaccctcatcaaaggctcccttcagaatgacccattttacgataaagccaagatgaaactccccctacttctggctcttctatttggggcagtttctgctcttcatctaaggtctgagacttccacctttgagacccctttgggtgctaagacgctgcctgaggatgaggagacaccagagcaggagatggaggagaccccttgcagggagctggaggaagaggaggagtggggctctggaagtgaagatgcctccaagaaagatggggctgttgagtctatctcagtgccagatatggtggacaaaaaccttacgtgtcctgaggaagaggacacagtaaaagtggtgggcatccctgggtgccagacctgccgctacctcctggtgagaagtcttcagacgtttagtcaagcttggtttacttgccggaggtgctacaggggcaacctggttttccatccacaacttcaatattaattatcgaatccagtgttctgtcagcgcgctcaaccagggtcaagtctggattggaggcaggatcacaggctcgggtcgctgcagacgctttcagtgggttgacggcagccgctggaactttgcgtactgggctgctcaccagccctggtcccgcggtggtcactgcgtggccctgtgtacccgaggaggctactggcgtcgagcccactgcctcagaagacttcctttcatctgttcctactgagctggtcccagccagcagttcagagctgccctctcctgggcagctgcctcccctcctctgcttgccatccctccctccacctccctgcaataaaatgggttttactg

SEQ ID NO: 732389 - DNA, 821 bp, Homo sapiens
ccatcttcaccctcatcaaaggctcccttcagaatgacccattttacgataaagccaagatgaaactccccctacttctggctcttctatttggggcagtttctgctcttcatctaaggtctgagacttccacctttgagacccctttgggtgctaagacgctgcctgaggatgaggagacaccagagcaggagatggaggagaccccttgcagggagctggaggaagaggaggagtggggctctggaagtgaagatgcctccaagaaagatggggctgttgagtctatctcagtgccagatatggtggacaaaaaccttacgtgtcctgaggaagaggacacagtaaaagtggtgggcatccctgggtgccagacctgccgctacctcctggtgagaagtcttcagacgtttagtcaagcttggtttacttgccggaggtgctacaggggcaacctggttttccatccacaacttcaatattaattatcgaatccagtgttctgtcagcgcgctcaaccagggtcaagtctggattggaggcaggatcacaggctcgggtcgctgcagacgctttcagtgggttgacggcagccgctggaactttgcgtactgggctgctcaccagccctggtcccgcggtggtcactgcgtggccctgtgtacccgaggaggctactggcgtcgagcccactgcctcagaagacttcctttcatctgttcctactgagctggtcccagccagcagttcagagctgccctctcctgggcagctgcctcccctcctctgcaaggaacccacgcgcgtgggttccttgcaga

SEQ ID NO: 732390 - DNA, 823 bp, Homo sapiens
ccatcttcaccctcatcaaaggctcccttcagaatgacccattttacgataaagccaagatgaaactccccctacttctggctcttctatttggggcagtttctgctcttcatctaaggtctgagacttccacctttgagacccctttgggtgctaagacgctgcctgaggatgaggagacaccagagcaggagatggaggagaccccttgcagggagctggaggaagaggaggagtggggctctggaagtgaagatgcctccaagaaagatggggctgttgagtctatctcagtgccagatatggtggacaaaaaccttacgtgtcctgaggaagaggacacagtaaaagtggtgggcatccctgggtgccagacctgccgctacctcctggtgagaagtcttcagacgtttagtcaagcttggtttacttgccggaggtgctacaggggcaacctggttttccatccacaacttcaatattaattatcgaatccagtgttctgtcagcgcgctcaaccagggtcaagtctggattggaggcaggatcacaggctcgggtcgctgcagacgctttcagtgggttgacggcagccgctggaactttgcgtactgggctgctcaccagccctggtcccgcggtggtcactgcgtggccctgtgtacccgaggaggctactggcgtcgagcccactgcctcagaagacttcctttcatctgttcctactgagctggtcccagccagcagttcagagctgccctctcctgggcagctgcctcccctcctctgcaaggaacccacgcgggatccttagatagaaaca

SEQ ID NO: 732391 - DNA, 1294 bp, Homo sapiens
tgtgagaggaagcaaagaaggacctgggctttgggaagatctaaagacccaggaaggtctctgggtgggataaagccaagatgaaactccccctacttctggctcgagtggggctctggaagtgaagatgcctccaagaaagatggggctgttgagtctatctcagtgccagatatggtggacaaaaaccttacgtgtcctgaggaagaggacacagtaaaagtggtgggcatccctgggtgccagacctgccgctacctcctggtgagaagtcttcagacgtttagtcaagcttggtttacttgccggaggtgctacaggggcaacctggttttccatccacaacttcaatattaattatcgaatccagtgttctgtcagcgcgctcaaccagggtcaagtctggattggaggcaggatcacaggctcgggtcgctgcagacgctttcagtgggttgacggcagccgctggaactttgcgtactgggctgctcaccagccctggtcccgcggtggtcactgcgtggccctgtgtacccgaggaggctactggcgtcgagcccactgcctcagaagacttcctttcatctgttcctactgagctggtcccagccagcagttcagagctgccctctcctgggcagctgcctcccctcctctgcttgccatccctccctccacctccctgcaataaaatgggttttactgaaatggatttattttctcctctgatcgcggatccactctgcttagccctcattgaaacttcttccttatcatctctccccacaccacaactttcatagaagtgtcagaagctactactccttgaggaggaggatggagggtggagttgggtctatggagccttttggagatggaggaatgggctcagctagttctcttcatagaacacctgattactgggcacctgcatagtgctgccaggacctttcaaggttgtaggtagactcccaatggcccagtttgcatctctgtaaccaaaggccttttctctgtctctctccaaccccagaactgtggttggttttatatgtaaggaagttaacatgtccctgggaacagtccacaacattcaggaatgaatgtataagtaccgcaatccccggcccctcaagtggaataaatctaacatgtattgggcaccatttcccagtggcctgctgtggtagttggccttattccatgcatttttatgggctgccttcccttcctcaactgcattctctgctccttcctactctctgcaactcccaaataaacacttgtacgc

SEQ ID NO: 732392 - DNA, 1135 bp, Homo sapiens
  misc_feature (814)..(814): n is a, c, g, or t
  misc_feature (831)..(831): n is a, c, g, or t
  misc_feature (836)..(836): n is a, c, g, or t
  misc_feature (839)..(839): n is a, c, g, or t
  misc_feature (851)..(851): n is a, c, g, or t
  misc_feature (866)..(866): n is a, c, g, or t
  misc_feature (874)..(874): n is a, c, g, or t
  misc_feature (885)..(885): n is a, c, g, or t
  misc_feature (889)..(889): n is a, c, g, or t
  misc_feature (896)..(896): n is a, c, g, or t
  misc_feature (906)..(907): n is a, c, g, or t
  misc_feature (912)..(912): n is a, c, g, or t
  misc_feature (918)..(918): n is a, c, g, or t
  misc_feature (927)..(927): n is a, c, g, or t
  misc_feature (933)..(933): n is a, c, g, or t
  misc_feature (935)..(936): n is a, c, g, or t
  misc_feature (947)..(947): n is a, c, g, or t
  misc_feature (954)..(954): n is a, c, g, or t
  misc_feature (957)..(957): n is a, c, g, or t
  misc_feature (964)..(964): n is a, c, g, or t
  misc_feature (966)..(966): n is a, c, g, or t
  misc_feature (973)..(973): n is a, c, g, or t
  misc_feature (975)..(976): n is a, c, g, or t
  misc_feature (980)..(981): n is a, c, g, or t
  misc_feature (987)..(987): n is a, c, g, or t
  misc_feature (989)..(990): n is a, c, g, or t
  misc_feature (997)..(997): n is a, c, g, or t
  misc_feature (1002)..(1003): n is a, c, g, or t
  misc_feature (1010)..(1010): n is a, c, g, or t
  misc_feature (1012)..(1012): n is a, c, g, or t
  misc_feature (1026)..(1026): n is a, c, g, or t
  misc_feature (1031)..(1031): n is a, c, g, or t
  misc_feature (1043)..(1043): n is a, c, g, or t
  misc_feature (1046)..(1046): n is a, c, g, or t
  misc_feature (1049)..(1049): n is a, c, g, or t
  misc_feature (1054)..(1055): n is a, c, g, or t
  misc_feature (1057)..(1057): n is a, c, g, or t
  misc_feature (1064)..(1064): n is a, c, g, or t
  misc_feature (1087)..(1088): n is a, c, g, or t
  misc_feature (1102)..(1102): n is a, c, g, or t
  misc_feature (1122)..(1122): n is a, c, g, or t
  misc_feature (1124)..(1124): n is a, c, g, or t
  misc_feature (1132)..(1132): n is a, c, g, or t
tgtgagaggaagcaaagaaggacctgggctttgggaagatctaaagacccaggaaggtctctgggtgggataaagccaagatgaaactccccctacttctggctcgagtggggctctggaagtgaagatgcctccaagaaagatggggctgttgagtctatctcagtgccagatatggtggacaaaaaccttacgtgtcctgaggaagaggacacagtaaaagtggtgggcatccctgggtgccagacctgccgctacctcctggtgagaagtcttcagacgtttagtcaagcttggtttacttgccggaggtgctacaggggcaacctggttttccatccacaacttcaatattaattatcgaatccagtgttctgtcagcgcgctcaaccagggtcaagtctggattggaggcaggatcacaggctcgggtcgctgcagacgctttcagtgggttgacggcagccgctggaactttgcgtactgggctgctcaccagccctggtcccgcggtggtcactgcgtggccctgtgtacccgaggaggctactggcgtcgagcccactgcctcagaagacttcctttcatctgttcctactgagctggtcccagccagcagttcagagctgccctctcctgggcagctgcctcccctcctctgcttgccatccctccctccacctccctgcaataaaatgggttttactgaaaaaaaaaaaaaaaaaaaaaaaaaaaaaaaaaaaaaaaaaaaaaaaaaaaaaaaaaaaaaaaaaaaaaaaaaaaaaaaaaaaaaaacccttgtgggccgcttggnccaagtcaattttaaantgganaangtttatgcttgnggccgaatttggggntaattggnccaattccccntatngggagcngtttaaaatnnatggnccgggntttaacaangtgggnannggaaaaccctnggggtanccnaattaantngcttggnannaaanncccttntnncaagtgnggtannaggaaangncccgaccgacgccnttccnaaagttgccccnctnaanggcanngnaaattgnaaccctaatatttgtaaaaatcnnggtaaattttggtnaacaagctatttttaaccananggccaatnggg

SEQ ID NO: 732393 - DNA, 708 bp, Homo sapiens
tgtgagaggaagcaaagaaggacctgggctttgggaagatctaaagacccaggaaggtctctgggtgggataaagccaagatgaaactccccctacttctggctcgagtggggctctggaagtgaagatgcctccaagaaagatggggctgttgagtctatctcagtgccagatatggtggacaaaaaccttacgtgtcctgaggaagaggacacagtaaaagtggtgggcatccctgggtgccagacctgccgctacctcctggtgagaagtcttcagacgtttagtcaagcttggtttacttgccggaggtgctacaggggcaacctggttttccatccacaacttcaatattaattatcgaatccagtgttctgtcagcgcgctcaaccagggtcaagtctggattggaggcaggatcacaggctcgggtcgctgcagacgctttcagtgggttgacggcagccgctggaactttgcgtactgggctgctcaccagccctggtcccgcggtggtcactgcgtggccctgtgtacccgaggaggctactggcgtcgagcccactgcctcagaagacttcctttcatctgttcctactgagctggtcccagccagcagttcagagctgccctctcctgggcagctgcctcccctcctctgcttgccatccctccctccacctccctgcaataaaatgggttttactg

SEQ ID NO: 732394 - DNA, 693 bp, Homo sapiens
tgtgagaggaagcaaagaaggacctgggctttgggaagatctaaagacccaggaaggtctctgggtgggataaagccaagatgaaactccccctacttctggctcgagtggggctctggaagtgaagatgcctccaagaaagatggggctgttgagtctatctcagtgccagatatggtggacaaaaaccttacgtgtcctgaggaagaggacacagtaaaagtggtgggcatccctgggtgccagacctgccgctacctcctggtgagaagtcttcagacgtttagtcaagcttggtttacttgccggaggtgctacaggggcaacctggttttccatccacaacttcaatattaattatcgaatccagtgttctgtcagcgcgctcaaccagggtcaagtctggattggaggcaggatcacaggctcgggtcgctgcagacgctttcagtgggttgacggcagccgctggaactttgcgtactgggctgctcaccagccctggtcccgcggtggtcactgcgtggccctgtgtacccgaggaggctactggcgtcgagcccactgcctcagaagacttcctttcatctgttcctactgagctggtcccagccagcagttcagagctgccctctcctgggcagctgcctcccctcctctgcaaggaacccacgcgcgtgggttccttgcaga

SEQ ID NO: 732395 - DNA, 695 bp, Homo sapiens
tgtgagaggaagcaaagaaggacctgggctttgggaagatctaaagacccaggaaggtctctgggtgggataaagccaagatgaaactccccctacttctggctcgagtggggctctggaagtgaagatgcctccaagaaagatggggctgttgagtctatctcagtgccagatatggtggacaaaaaccttacgtgtcctgaggaagaggacacagtaaaagtggtgggcatccctgggtgccagacctgccgctacctcctggtgagaagtcttcagacgtttagtcaagcttggtttacttgccggaggtgctacaggggcaacctggttttccatccacaacttcaatattaattatcgaatccagtgttctgtcagcgcgctcaaccagggtcaagtctggattggaggcaggatcacaggctcgggtcgctgcagacgctttcagtgggttgacggcagccgctggaactttgcgtactgggctgctcaccagccctggtcccgcggtggtcactgcgtggccctgtgtacccgaggaggctactggcgtcgagcccactgcctcagaagacttcctttcatctgttcctactgagctggtcccagccagcagttcagagctgccctctcctgggcagctgcctcccctcctctgcaaggaacccacgcgggatccttagatagaaaca

SEQ ID NO: 732396 - DNA, 1556 bp, Homo sapiens
tgtgagaggaagcaaagaaggacctgggctttgggaagatctaaagacccaggaaggtctctgggtgggtgagtgctttctctgctgtggtggagctggtgacagtttattctcccaggaggtccctggctgtggctgacagtttctggagggctggcaggcgtctacctgtggctttcaggataaagccaagatgaaactccccctacttctggctcttctatttggggcagtttctgctcttcatctaaggtctgagacttccacctttgagacccctttgggtgctaagacgctgcctgaggatgaggagacaccagagcaggagatggaggagaccccttgcagggagctggaggaagaggaggagtggggctctggaagtgaagatgcctccaagaaagatggggctgttgagtctatctcagtgccagatatggtggacaaaaaccttacgtgtcctgaggaagaggacacagtaaaagtggtgggcatccctgggtgccagacctgccgctacctcctggtgagaagtcttcagacgtttagtcaagcttggtttacttgccggaggtgctacaggggcaacctggttttccatccacaacttcaatattaattatcgaatccagtgttctgtcagcgcgctcaaccagggtcaagtctggattggaggcaggatcacaggctcgggtcgctgcagacgctttcagtgggttgacggcagccgctggaactttgcgtactgggctgctcaccagccctggtcccgcggtggtcactgcgtggccctgtgtacccgaggaggctactggcgtcgagcccactgcctcagaagacttcctttcatctgttcctactgagctggtcccagccagcagttcagagctgccctctcctgggcagctgcctcccctcctctgcttgccatccctccctccacctccctgcaataaaatgggttttactgaaatggatttattttctcctctgatcgcggatccactctgcttagccctcattgaaacttcttccttatcatctctccccacaccacaactttcatagaagtgtcagaagctactactccttgaggaggaggatggagggtggagttgggtctatggagccttttggagatggaggaatgggctcagctagttctcttcatagaacacctgattactgggcacctgcatagtgctgccaggacctttcaaggttgtaggtagactcccaatggcccagtttgcatctctgtaaccaaaggccttttctctgtctctctccaaccccagaactgtggttggttttatatgtaaggaagttaacatgtccctgggaacagtccacaacattcaggaatgaatgtataagtaccgcaatccccggcccctcaagtggaataaatctaacatgtattgggcaccatttcccagtggcctgctgtggtagttggccttattccatgcatttttatgggctgccttcccttcctcaactgcattctctgctccttcctactctctgcaactcccaaataaacacttgtacgc

SEQ ID NO: 732397 - DNA, 1397 bp, Homo sapiens
  misc_feature (1076)..(1076): n is a, c, g, or t
  misc_feature (1093)..(1093): n is a, c, g, or t
  misc_feature (1098)..(1098): n is a, c, g, or t
  misc_feature (1101)..(1101): n is a, c, g, or t
  misc_feature (1113)..(1113): n is a, c, g, or t
  misc_feature (1128)..(1128): n is a, c, g, or t
  misc_feature (1136)..(1136): n is a, c, g, or t
  misc_feature (1147)..(1147): n is a, c, g, or t
  misc_feature (1151)..(1151): n is a, c, g, or t
  misc_feature (1158)..(1158): n is a, c, g, or t
  misc_feature (1168)..(1169): n is a, c, g, or t
  misc_feature (1174)..(1174): n is a, c, g, or t
  misc_feature (1180)..(1180): n is a, c, g, or t
  misc_feature (1189)..(1189): n is a, c, g, or t
  misc_feature (1195)..(1195): n is a, c, g, or t
  misc_feature (1197)..(1198): n is a, c, g, or t
  misc_feature (1209)..(1209): n is a, c, g, or t
  misc_feature (1216)..(1216): n is a, c, g, or t
  misc_feature (1219)..(1219): n is a, c, g, or t
  misc_feature (1226)..(1226): n is a, c, g, or t
  misc_feature (1228)..(1228): n is a, c, g, or t
  misc_feature (1235)..(1235): n is a, c, g, or t
  misc_feature (1237)..(1238): n is a, c, g, or t
  misc_feature (1242)..(1243): n is a, c, g, or t
  misc_feature (1249)..(1249): n is a, c, g, or t
  misc_feature (1251)..(1252): n is a, c, g, or t
  misc_feature (1259)..(1259): n is a, c, g, or t
  misc_feature (1264)..(1265): n is a, c, g, or t
  misc_feature (1272)..(1272): n is a, c, g, or t
  misc_feature (1274)..(1274): n is a, c, g, or t
  misc_feature (1288)..(1288): n is a, c, g, or t
  misc_feature (1293)..(1293): n is a, c, g, or t
  misc_feature (1305)..(1305): n is a, c, g, or t
  misc_feature (1308)..(1308): n is a, c, g, or t
  misc_feature (1311)..(1311): n is a, c, g, or t
  misc_feature (1316)..(1317): n is a, c, g, or t
  misc_feature (1319)..(1319): n is a, c, g, or t
  misc_feature (1326)..(1326): n is a, c, g, or t
  misc_feature (1349)..(1350): n is a, c, g, or t
  misc_feature (1364)..(1364): n is a, c, g, or t
  misc_feature (1384)..(1384): n is a, c, g, or t
  misc_feature (1386)..(1386): n is a, c, g, or t
  misc_feature (1394)..(1394): n is a, c, g, or t
tgtgagaggaagcaaagaaggacctgggctttgggaagatctaaagacccaggaaggtctctgggtgggtgagtgctttctctgctgtggtggagctggtgacagtttattctcccaggaggtccctggctgtggctgacagtttctggagggctggcaggcgtctacctgtggctttcaggataaagccaagatgaaactccccctacttctggctcttctatttggggcagtttctgctcttcatctaaggtctgagacttccacctttgagacccctttgggtgctaagacgctgcctgaggatgaggagacaccagagcaggagatggaggagaccccttgcagggagctggaggaagaggaggagtggggctctggaagtgaagatgcctccaagaaagatggggctgttgagtctatctcagtgccagatatggtggacaaaaaccttacgtgtcctgaggaagaggacacagtaaaagtggtgggcatccctgggtgccagacctgccgctacctcctggtgagaagtcttcagacgtttagtcaagcttggtttacttgccggaggtgctacaggggcaacctggttttccatccacaacttcaatattaattatcgaatccagtgttctgtcagcgcgctcaaccagggtcaagtctggattggaggcaggatcacaggctcgggtcgctgcagacgctttcagtgggttgacggcagccgctggaactttgcgtactgggctgctcaccagccctggtcccgcggtggtcactgcgtggccctgtgtacccgaggaggctactggcgtcgagcccactgcctcagaagacttcctttcatctgttcctactgagctggtcccagccagcagttcagagctgccctctcctgggcagctgcctcccctcctctgcttgccatccctccctccacctccctgcaataaaatgggttttactgaaaaaaaaaaaaaaaaaaaaaaaaaaaaaaaaaaaaaaaaaaaaaaaaaaaaaaaaaaaaaaaaaaaaaaaaaaaaaaaaaaaaaaacccttgtgggccgcttggnccaagtcaattttaaantgganaangtttatgcttgnggccgaatttggggntaattggnccaattccccntatngggagcngtttaaaatnnatggnccgggntttaacaangtgggnannggaaaaccctnggggtanccnaattaantngcttggnannaaanncccttntnncaagtgnggtannaggaaangncccgaccgacgccnttccnaaagttgccccnctnaanggcanngnaaattgnaaccctaatatttgtaaaaatcnnggtaaattttggtnaacaagctatttttaaccananggccaatnggg

SEQ ID NO: 732398 - DNA, 970 bp, Homo sapiens
tgtgagaggaagcaaagaaggacctgggctttgggaagatctaaagacccaggaaggtctctgggtgggtgagtgctttctctgctgtggtggagctggtgacagtttattctcccaggaggtccctggctgtggctgacagtttctggagggctggcaggcgtctacctgtggctttcaggataaagccaagatgaaactccccctacttctggctcttctatttggggcagtttctgctcttcatctaaggtctgagacttccacctttgagacccctttgggtgctaagacgctgcctgaggatgaggagacaccagagcaggagatggaggagaccccttgcagggagctggaggaagaggaggagtggggctctggaagtgaagatgcctccaagaaagatggggctgttgagtctatctcagtgccagatatggtggacaaaaaccttacgtgtcctgaggaagaggacacagtaaaagtggtgggcatccctgggtgccagacctgccgctacctcctggtgagaagtcttcagacgtttagtcaagcttggtttacttgccggaggtgctacaggggcaacctggttttccatccacaacttcaatattaattatcgaatccagtgttctgtcagcgcgctcaaccagggtcaagtctggattggaggcaggatcacaggctcgggtcgctgcagacgctttcagtgggttgacggcagccgctggaactttgcgtactgggctgctcaccagccctggtcccgcggtggtcactgcgtggccctgtgtacccgaggaggctactggcgtcgagcccactgcctcagaagacttcctttcatctgttcctactgagctggtcccagccagcagttcagagctgccctctcctgggcagctgcctcccctcctctgcttgccatccctccctccacctccctgcaataaaatgggttttactg

SEQ ID NO: 732399 - DNA, 955 bp, Homo sapiens
tgtgagaggaagcaaagaaggacctgggctttgggaagatctaaagacccaggaaggtctctgggtgggtgagtgctttctctgctgtggtggagctggtgacagtttattctcccaggaggtccctggctgtggctgacagtttctggagggctggcaggcgtctacctgtggctttcaggataaagccaagatgaaactccccctacttctggctcttctatttggggcagtttctgctcttcatctaaggtctgagacttccacctttgagacccctttgggtgctaagacgctgcctgaggatgaggagacaccagagcaggagatggaggagaccccttgcagggagctggaggaagaggaggagtggggctctggaagtgaagatgcctccaagaaagatggggctgttgagtctatctcagtgccagatatggtggacaaaaaccttacgtgtcctgaggaagaggacacagtaaaagtggtgggcatccctgggtgccagacctgccgctacctcctggtgagaagtcttcagacgtttagtcaagcttggtttacttgccggaggtgctacaggggcaacctggttttccatccacaacttcaatattaattatcgaatccagtgttctgtcagcgcgctcaaccagggtcaagtctggattggaggcaggatcacaggctcgggtcgctgcagacgctttcagtgggttgacggcagccgctggaactttgcgtactgggctgctcaccagccctggtcccgcggtggtcactgcgtggccctgtgtacccgaggaggctactggcgtcgagcccactgcctcagaagacttcctttcatctgttcctactgagctggtcccagccagcagttcagagctgccctctcctgggcagctgcctcccctcctctgcaaggaacccacgcgcgtgggttccttgcaga

SEQ ID NO: 732400 - DNA, 957 bp, Homo sapiens
tgtgagaggaagcaaagaaggacctgggctttgggaagatctaaagacccaggaaggtctctgggtgggtgagtgctttctctgctgtggtggagctggtgacagtttattctcccaggaggtccctggctgtggctgacagtttctggagggctggcaggcgtctacctgtggctttcaggataaagccaagatgaaactccccctacttctggctcttctatttggggcagtttctgctcttcatctaaggtctgagacttccacctttgagacccctttgggtgctaagacgctgcctgaggatgaggagacaccagagcaggagatggaggagaccccttgcagggagctggaggaagaggaggagtggggctctggaagtgaagatgcctccaagaaagatggggctgttgagtctatctcagtgccagatatggtggacaaaaaccttacgtgtcctgaggaagaggacacagtaaaagtggtgggcatccctgggtgccagacctgccgctacctcctggtgagaagtcttcagacgtttagtcaagcttggtttacttgccggaggtgctacaggggcaacctggttttccatccacaacttcaatattaattatcgaatccagtgttctgtcagcgcgctcaaccagggtcaagtctggattggaggcaggatcacaggctcgggtcgctgcagacgctttcagtgggttgacggcagccgctggaactttgcgtactgggctgctcaccagccctggtcccgcggtggtcactgcgtggccctgtgtacccgaggaggctactggcgtcgagcccactgcctcagaagacttcctttcatctgttcctactgagctggtcccagccagcagttcagagctgccctctcctgggcagctgcctcccctcctctgcaaggaacccacgcgggatccttagatagaaaca

SEQ ID NO: 732401 - DNA, 1317 bp, Homo sapiens
gataaagccaagatgaaactccccctacttctggctcccctttgggtgctaagacgctgcctgaggatgaggagacaccagagcaggagatggaggagaccccttgcagggagctggaggaagaggaggagtggggctctggaagtgaagatgcctccaagaaagatggggctgttgagtctatctcagtgccagatatggtggacaaaaaccttacgtgtcctgaggaagaggacacagtaaaagtggtgggcatccctgggtgccagacctgccgctacctcctggtgagaagtcttcagacgtttagtcaagcttggtttacttgccggaggtgctacaggggcaacctggttttccatccacaacttcaatattaattatcgaatccagtgttctgtcagcgcgctcaaccagggtcaagtctggattggaggcaggatcacaggctcgggtcgctgcagacgctttcagtgggttgacggcagccgctggaactttgcgtactgggctgctcaccagccctggtcccgcggtggtcactgcgtggccctgtgtacccgaggaggctactggcgtcgagcccactgcctcagaagacttcctttcatctgttcctactgagctggtcccagccagcagttcagagctgccctctcctgggcagctgcctcccctcctctgcttgccatccctccctccacctccctgcaataaaatgggttttactgaaatggatttattttctcctctgatcgcggatccactctgcttagccctcattgaaacttcttccttatcatctctccccacaccacaactttcatagaagtgtcagaagctactactccttgaggaggaggatggagggtggagttgggtctatggagccttttggagatggaggaatgggctcagctagttctcttcatagaacacctgattactgggcacctgcatagtgctgccaggacctttcaaggttgtaggtagactcccaatggcccagtttgcatctctgtaaccaaaggccttttctctgtctctctccaaccccagaactgtggttggttttatatgtaaggaagttaacatgtccctgggaacagtccacaacattcaggaatgaatgtataagtaccgcaatccccggcccctcaagtggaataaatctaacatgtattgggcaccatttcccagtggcctgctgtggtagttggccttattccatgcatttttatgggctgccttcccttcctcaactgcattctctgctccttcctactctctgcaactcccaaataaacacttgtacgc

SEQ ID NO: 732402 - DNA, 1158 bp, Homo sapiens
  misc_feature (837)..(837): n is a, c, g, or t
  misc_feature (854)..(854): n is a, c, g, or t
  misc_feature (859)..(859): n is a, c, g, or t
  misc_feature (862)..(862): n is a, c, g, or t
  misc_feature (874)..(874): n is a, c, g, or t
  misc_feature (889)..(889): n is a, c, g, or t
  misc_feature (897)..(897): n is a, c, g, or t
  misc_feature (908)..(908): n is a, c, g, or t
  misc_feature (912)..(912): n is a, c, g, or t
  misc_feature (919)..(919): n is a, c, g, or t
  misc_feature (929)..(930): n is a, c, g, or t
  misc_feature (935)..(935): n is a, c, g, or t
  misc_feature (941)..(941): n is a, c, g, or t
  misc_feature (950)..(950): n is a, c, g, or t
  misc_feature (956)..(956): n is a, c, g, or t
  misc_feature (958)..(959): n is a, c, g, or t
  misc_feature (970)..(970): n is a, c, g, or t
  misc_feature (977)..(977): n is a, c, g, or t
  misc_feature (980)..(980): n is a, c, g, or t
  misc_feature (987)..(987): n is a, c, g, or t
  misc_feature (989)..(989): n is a, c, g, or t
  misc_feature (996)..(996): n is a, c, g, or t
  misc_feature (998)..(999): n is a, c, g, or t
  misc_feature (1003)..(1004): n is a, c, g, or t
  misc_feature (1010)..(1010): n is a, c, g, or t
  misc_feature (1012)..(1013): n is a, c, g, or t
  misc_feature (1020)..(1020): n is a, c, g, or t
  misc_feature (1025)..(1026): n is a, c, g, or t
  misc_feature (1033)..(1033): n is a, c, g, or t
  misc_feature (1035)..(1035): n is a, c, g, or t
  misc_feature (1049)..(1049): n is a, c, g, or t
  misc_feature (1054)..(1054): n is a, c, g, or t
  misc_feature (1066)..(1066): n is a, c, g, or t
  misc_feature (1069)..(1069): n is a, c, g, or t
  misc_feature (1072)..(1072): n is a, c, g, or t
  misc_feature (1077)..(1078): n is a, c, g, or t
  misc_feature (1080)..(1080): n is a, c, g, or t
  misc_feature (1087)..(1087): n is a, c, g, or t
  misc_feature (1110)..(1111): n is a, c, g, or t
  misc_feature (1125)..(1125): n is a, c, g, or t
  misc_feature (1145)..(1145): n is a, c, g, or t
  misc_feature (1147)..(1147): n is a, c, g, or t
  misc_feature (1155)..(1155): n is a, c, g, or t
gataaagccaagatgaaactccccctacttctggctcccctttgggtgctaagacgctgcctgaggatgaggagacaccagagcaggagatggaggagaccccttgcagggagctggaggaagaggaggagtggggctctggaagtgaagatgcctccaagaaagatggggctgttgagtctatctcagtgccagatatggtggacaaaaaccttacgtgtcctgaggaagaggacacagtaaaagtggtgggcatccctgggtgccagacctgccgctacctcctggtgagaagtcttcagacgtttagtcaagcttggtttacttgccggaggtgctacaggggcaacctggttttccatccacaacttcaatattaattatcgaatccagtgttctgtcagcgcgctcaaccagggtcaagtctggattggaggcaggatcacaggctcgggtcgctgcagacgctttcagtgggttgacggcagccgctggaactttgcgtactgggctgctcaccagccctggtcccgcggtggtcactgcgtggccctgtgtacccgaggaggctactggcgtcgagcccactgcctcagaagacttcctttcatctgttcctactgagctggtcccagccagcagttcagagctgccctctcctgggcagctgcctcccctcctctgcttgccatccctccctccacctccctgcaataaaatgggttttactgaaaaaaaaaaaaaaaaaaaaaaaaaaaaaaaaaaaaaaaaaaaaaaaaaaaaaaaaaaaaaaaaaaaaaaaaaaaaaaaaaaaaaaacccttgtgggccgcttggnccaagtcaattttaaantgganaangtttatgcttgnggccgaatttggggntaattggnccaattccccntatngggagcngtttaaaatnnatggnccgggntttaacaangtgggnannggaaaaccctnggggtanccnaattaantngcttggnannaaanncccttntnncaagtgnggtannaggaaangncccgaccgacgccnttccnaaagttgccccnctnaanggcanngnaaattgnaaccctaatatttgtaaaaatcnnggtaaattttggtnaacaagctatttttaaccananggccaatnggg

SEQ ID NO: 732403 - DNA, 731 bp, Homo sapiens
gataaagccaagatgaaactccccctacttctggctcccctttgggtgctaagacgctgcctgaggatgaggagacaccagagcaggagatggaggagaccccttgcagggagctggaggaagaggaggagtggggctctggaagtgaagatgcctccaagaaagatggggctgttgagtctatctcagtgccagatatggtggacaaaaaccttacgtgtcctgaggaagaggacacagtaaaagtggtgggcatccctgggtgccagacctgccgctacctcctggtgagaagtcttcagacgtttagtcaagcttggtttacttgccggaggtgctacaggggcaacctggttttccatccacaacttcaatattaattatcgaatccagtgttctgtcagcgcgctcaaccagggtcaagtctggattggaggcaggatcacaggctcgggtcgctgcagacgctttcagtgggttgacggcagccgctggaactttgcgtactgggctgctcaccagccctggtcccgcggtggtcactgcgtggccctgtgtacccgaggaggctactggcgtcgagcccactgcctcagaagacttcctttcatctgttcctactgagctggtcccagccagcagttcagagctgccctctcctgggcagctgcctcccctcctctgcttgccatccctccctccacctccctgcaataaaatgggttttactg

SEQ ID NO: 732404 - DNA, 716 bp, Homo sapiens
gataaagccaagatgaaactccccctacttctggctcccctttgggtgctaagacgctgcctgaggatgaggagacaccagagcaggagatggaggagaccccttgcagggagctggaggaagaggaggagtggggctctggaagtgaagatgcctccaagaaagatggggctgttgagtctatctcagtgccagatatggtggacaaaaaccttacgtgtcctgaggaagaggacacagtaaaagtggtgggcatccctgggtgccagacctgccgctacctcctggtgagaagtcttcagacgtttagtcaagcttggtttacttgccggaggtgctacaggggcaacctggttttccatccacaacttcaatattaattatcgaatccagtgttctgtcagcgcgctcaaccagggtcaagtctggattggaggcaggatcacaggctcgggtcgctgcagacgctttcagtgggttgacggcagccgctggaactttgcgtactgggctgctcaccagccctggtcccgcggtggtcactgcgtggccctgtgtacccgaggaggctactggcgtcgagcccactgcctcagaagacttcctttcatctgttcctactgagctggtcccagccagcagttcagagctgccctctcctgggcagctgcctcccctcctctgcaaggaacccacgcgcgtgggttccttgcaga

SEQ ID NO: 732405 - DNA, 718 bp, Homo sapiens
gataaagccaagatgaaactccccctacttctggctcccctttgggtgctaagacgctgcctgaggatgaggagacaccagagcaggagatggaggagaccccttgcagggagctggaggaagaggaggagtggggctctggaagtgaagatgcctccaagaaagatggggctgttgagtctatctcagtgccagatatggtggacaaaaaccttacgtgtcctgaggaagaggacacagtaaaagtggtgggcatccctgggtgccagacctgccgctacctcctggtgagaagtcttcagacgtttagtcaagcttggtttacttgccggaggtgctacaggggcaacctggttttccatccacaacttcaatattaattatcgaatccagtgttctgtcagcgcgctcaaccagggtcaagtctggattggaggcaggatcacaggctcgggtcgctgcagacgctttcagtgggttgacggcagccgctggaactttgcgtactgggctgctcaccagccctggtcccgcggtggtcactgcgtggccctgtgtacccgaggaggctactggcgtcgagcccactgcctcagaagacttcctttcatctgttcctactgagctggtcccagccagcagttcagagctgccctctcctgggcagctgcctcccctcctctgcaaggaacccacgcgggatccttagatagaaaca

SEQ ID NO: 732406 - DNA, 483 bp, Homo sapiens
tgaattcatgtaggaaggatgctccattctttgtcttttatcctgccctgtagtttacttgccggaggtgctacaggggcaacctggttttccatccacaacttcaatattaattatcgaatccagtgttctgtcagcgcgctcaaccagggtcaagtctggattggaggcaggatcacaggctcggtaagagaagtgtgaacactaaatggggtgcacctgctgatctcagccagcactcagcttgcatcagatttgtctgtttttctcctgtataatctccagaagaaccagggatagatggacacccacagacaacactgagggggctgcctgggcattcagggaagagctaaggatttagaatcaggaggtttgggtccaagttcctttccatctctcactatctatgtaacttaagttagctgggcatggtggtgcatgtctgtaatcctagctacttgggaggctgaggcaggagag

SEQ ID NO: 732407 - DNA, 757 bp, Homo sapiens
  misc_feature (47)..(47): n is a, c, g, or t
  misc_feature (503)..(503): n is a, c, g, or t
  misc_feature (524)..(524): n is a, c, g, or t
acactgtcctttggccaccggacatcatgcctcccaagaaggatgtncccgtgaagaaaccagcagggccctccatctccaaacctgctgctaagccagcagcagcaggggctcctccagccaagaccaaagctgagccagctgtcccccaggcccctcagaaaacccaggagcctccagtcgatctctccaaagtggtgatcgagtttaacaaggaccagctggaggagttcaaggaggccttcgagctgtttgaccgagtgggggatggcaagatcctgtacagccagtgtggggacgtgatgagggccctgggccagaaccccaccaacgccgaggtgctcaaggtcctggggaaccccaagagtgatgagctgaagtcgcggcgtgtggactttgagactttcctgcccatgctccaggcagtggccaagaaccgaggccaaggcacatatgaggactacttggaggggtttcgtgtgtttgacaaggaggggaacggnaaagtcatgggagcagagctnagacatgttctcaccacccttggagagaagatgactgaggaggaggtggagaccgttctggcaggacacgaggacagcaacggctgcatcaactacgaggccttcttgaaacacatcctaagcgtctgagtgctgcagatccagtggggtccggacactgggccccgcaggcgaaagcacgttccagccaccaggaggccacctattgtttcaaaataaagactgggttcctc

SEQ ID NO: 732408 - DNA, 1135 bp, Homo sapiens
gagatgtcgctgctgcggtcgctgcgcgtgtttctggtcgcgcggaccgggagctacccggctgggtctcttctgcgtcagtcgccccagccaaggcacacattttatgctgggccccgtctgtctgcctcggcctccagcaaggagctcctcatgaagctgcggcggaaaacaggctactcctttgtaaattgcaagaaagctctggagacttgtggcggggacctcaaacaggcagagatctggctccacaaggaggcccagaaggagggctggagcaaagctgccaagctccaagggaggaagaccaaagaaggcctgattgggctgttgcaggaaggaaacacaactgtattagtagaggtaaactgtgagacagattttgtttctagaaatttaaaatttcaactgttggtccagcaagtagcccttggaaccatgatgcattgtcagaccctaaaggatcaaccctctgcatacagtaaaggtttcttgaattcctctgagctttctggacttccagctgggcctgacagagaaggctcactcaaggatcagttggctttagcaattggaaaactgggagaaaacatgattcttaaacgagctgcatgggtgaaggtgccatctgggttctacgttggctcttatgtccacggagcaatgcagagtccctcacttcacaagctggtgctggggaagtatggggccctggtcatctgtgagacgtctgaacagaaaacaaaccttgaagacgttggccgccgccttgggcagcatgtggtgggcatggcccccctctctgttggctccctggacgatgagcctgggggagaggcagagactaagatgctgtcccagccgtatttgctggatccctccattaccttggggcagtatgtgcagcctcagggggtgtcggtagtagactttgtgcggtttgaatgtggagaaggtgaagaggcagcagaaactgaataggttccagagacttttggcccaggaggaatatttacttttagctctggacatcattacaaaaaggaatatttcccaaacctcttcagaccgagaatgcatgggtaaaattattaaatagttgtataataaaaataattttttccttgtttgcgta

SEQ ID NO: 732409 - DNA, 15730 bp, Homo sapiens
  misc_feature (12274)..(12274): n is a, c, g, or t
  misc_feature (12366)..(12366): n is a, c, g, or t
caacccacaccgcccctgccagccaccatggggctgccactagcccgcctggcggctgtgtgcctggccctgtctttggcagggggctcggagctccagacagagggcagaacccgataccacggccgcaacgtctgcagcacctggggcaacttccactacaagaccttcgacggggacgtcttccgcttccccggcctctgcgactacaacttcgcctccgactgccgaggctcctacaaggaatttgctgtgcacctgaagcggggtccgggccaggctgaggcccccgccggggtggagtccatcctgctgaccatcaaggatgacaccatctacctcacccgccacctggctgtgcttaacggggccgtggtcagcaccccgcactacagccccgggctgctcattgagaagagcgatgcctacaccaaagtctactcccgcgccggcctcaccctcatgtggaaccgggaggatgcactcatgctggagctggacactaagttccggaaccacacctgtggcctctgcggggactacaacggcctgcagagctattcagaattcctctctgacggcgtgctcttcagtcccctggagtttgggaacatgcagaagatcaaccagcccgatgtggtgtgtgaggatcccgaggaggaggtggcccccgcatcctgctccgagcaccgcgccgagtgtgagaggctgctgaccgccgaggccttcgcggactgtcaggacctggtgccgctggagccgtatctgcgcgcctgccagcaggaccgctgccggtgcccgggcggtgacacctgcgtctgcagcaccgtggccgagttctcccgccagtgctcccacgccggcggccggcccgggaactggaggaccgccacgctctgccccaagacctgccccgggaacctggtgtacctggagagcggctcgccctgcatggacacctgctcacacctggaggtgagcagcctgtgcgaggagcaccgcatggacggctgtttctgcccagaaggcaccgtatatgacgacatcggggacagtggctgcgttcctgtgagccagtgccactgcaggctgcacggacacctgtacacaccgggccaggagatcaccaatgactgcgagcagtgtgtctgtaacgctggccgctgggtgtgcaaagacctgccctgccccggcacctgtgccctggacggcggctcccacatcaccaccttcgatgggaagacgtacaccttccacggggactgctactatgtcctggccaagggtgaccacaacgattcctacgctctcctgggcgagctggccccctgtggctccacagacaagcagacctgcctgaagacggtggtgctgctggctgacaagaagaagaatgtggtggtcttcaagtccgatggcagtgtactgctcaacgagctgcaggtgaacctgccccacgtgaccgcgagcttctctgtcttccgcccgtcttcctaccacatcatggtgagcatggccattggcgtccggctgcaggtgcagctggccccagtcatgcaactctttgtgacactggaccaggcctcccaggggcaggtgcagggcctctgcgggaacttcaacggcctggaaggtgacgacttcaagacggccagcgggctggtggaggccacgggggccggctttgccaacacctggaaggcacagtcaagctgccatgacaagctggactggttggacgatccctgctccctgaacatcgagagcgccaactacgccgagcactggtgctccctcctgaagaagacagagaccccctttggcaggtgccactcggctgtggaccctgctgagtattacaagaggtgcaaatatgacacgtgtaactgtcagaacaatgaggactgcctgtgcgccgccctgtcctcctacgcgcgcgcctgcaccgccaagggcgtcatgctgtggggctggcgggagcatgtctgcaacaaggatgtgggctcctgccccaactcgcaggtcttcctgtacaacctgaccacctgccagcagacctgccgctccctctccgaggccgacagccactgtctcgagggctttgcgcctgtggacggctgcggctgccctgaccacaccttcctggacgagaagggccgctgcgtacccctggccaagtgctcctgttaccaccgcggtctctacctggaggcgggggatgtggtcgtcaggcaggaagaacgatgtgtgtgccgggatgggcggctgcactgtaggcagatccggctgatcggccagagctgcacggccccaaagatccacatggactgcagcaacctgactgcactggccacctcgaagccccgagccctcagctgccagacgctggccgccggctattaccacacagagtgtgtcagtggctgtgtgtgccccgacgggctgatggatgacggccggggtggctgcgtggtggagaaggaatgcccttgcgtccataacaacgacctgtattcttccggcgccaagatcaaggtggactgcaatacctgcacctgcaagagaggacgctgggtgtgcacccaggctgtgtgccatggcacctgctccatttacgggagtggccactacatcacctttgatgggaagtactacgactttgacggacactgctcctacgtggctgttcaggactactgcggccagaactcctcactgggctcattcagcatcatcaccgagaacgtcccctgtggcactacgggcgtcacctgctccaaggccatcaagatcttcatggggaggacggagctgaagttggaagacaagcaccgtgtggtgatccagcgtgatgagggtcaccacgtggcctacaccacgcgggaggtgggccagtacctggtggtggagtccagcacgggcatcatcgtcatctgggacaagaggaccaccgtgttcatcaagctggctccctcctacaagggcaccgtgtgtggcctgtgtgggaactttgaccaccgctccaacaacgacttcaccacgcgggaccacatggtggtgagcagcgagctggacttcgggaacagctggaaggaggcccccacctgcccagatgtgagcaccaaccccgagccctgcagcctgaacccgcaccgccgctcctgggccgagaagcagtgcagcatcctcaaaagcagcgtgttcagcatctgccacagcaaggtggaccccaagcccttctacgaggcctgtgtgcacgactcgtgctcctgtgacacgggtggggactgtgagtgcttctgctctgccgtggcctcctacgcccaggagtgtaccaaagagggggcctgcgtgttctggaggacgccggacctgtgccccatattctgcgactactacaaccctccgcatgagtgtgagtggcactatgagccatgtgggaaccggagcttcgagacctgcaggaccatcaacggcatccactccaacatctccgtgtcctacctggagggctgctacccccggtgccccaaggacaggcccatctatgaggaggatctgaagaagtgtgtcactgcagacaagtgtggctgctatgtcgaggacacccactacccacctggagcatcggttcccaccgaggagacctgcaagtcctgcgtgtgtaccaactcctcccaagtcgtctgcaggccggaggaaggaaagattcttaaccagacccaggatggcgccttctgctactgggagatctgtggccccaacgggacggtggagaagcacttcaacatctgttccattacgacacgcccgtccaccctgaccaccttcaccaccatcaccctccccaccacccccacctccttcaccactaccaccaccaccaccaccccgacctccagcacagttttatcaacaactccgaagctgtgctgcctctggtctgactggatcaatgaggaccaccccagcagtggcagcgacgacggtgaccgagaaccatttgatggggtctgcggggcccctgaggacatcgagtgcaggtcggtcaaggatccccacctcagcttggagcagcatggccagaaggtgcagtgtgatgtctctgttgggttcatttgcaagaatgaagaccagtttggaaatggaccatttggactgtgttacgactacaagatacgtgtcaattgttgctggcccatggataagtgtatcaccactcccagccctccaactaccactcccagccctccaccaaccacgacgaccacccttccaccaaccaccacccccagccctccaaccaccaccacaaccacccctccaccaaccaccacccccagccctccaataaccaccacgaccacccctctaccaaccaccactcccagccctccaataagcaccacaaccacccctccaccaaccaccactcccagccctccaaccaccactcccagccctccaaccaccactcccagccctccaacaaccaccacaaccacccctccaccaaccaccactcccagccctccaatgactacgcccatcactccaccagccagcactaccacccttccaccaaccaccactcccagccctccaacaaccaccacaaccacccctccaccaaccaccactcccagtcctccaacgactacgcccatcactccaccaaccagcactactacccttccaccaaccaccactcccagccctccaccaaccaccacaaccacccctccaccaaccaccactcccagccctccaacaaccaccactcccagtcctccaacaatcaccacaaccacccctccaccaaccaccactcccagccctccaacaacgaccacaaccacccctccaccaaccaccactcccagccctccaacgactacacccatcactccaccaaccagcactaccacccttccaccaaccaccactcccagccctccaccaaccaccacaaccacccctccaccaaccaccactcccagccctccaacaaccaccactcccagccctccaataaccaccacaaccacccctccaccaaccaccactcccagctctccaataaccaccactcccagccctccaacaaccaccatgaccaccccttcaccaaccaccacccccagctctccaataaccaccacaaccaccccttcctcaactaccactcccagccctccaccaaccaccatgaccaccccttcaccaaccaccactcccagccctccaacaaccaccatgaccacccttccaccaaccaccacttccagccctctaacaactactcctctacctccatcaataactcctcctacattttcaccattctcaacgacaacccctactaccccatgcgtgcctctctgcaattggactggctggctggattctggaaaacccaactttcacaaaccaggtggagacacagaattgattggagacgtctgtggaccaggctgggcagctaacatctcttgcagagccaccatgtatcctgatgttcccattggacagcttggacaaacagtggtgtgtgatgtctctgtggggctgatatgcaaaaatgaagaccaaaagccaggtggggtcatccctatggccttctgcctcaactacgagatcaacgttcagtgctgtgagtgtgtcacccaacccaccaccatgacaaccaccaccacagagaacccaactccgccaaccacgacacccatcaccaccaccactacggtgaccccaaccccaacacccaccggcacacagaccccaaccacgacacccatcaccaccaccactacggtgaccccaaccccaacacccaccggcacacagaccccaaccacgacacccatcaccaccaccactacggtgaccccaaccccaacacccaccggcacacagaccccaaccacgacacccatcaccaccaccactacggtgaccccaaccccaacacccaccggcacacagaccccaaccacgacacccatcaccaccaccactacggtgaccccaaccccaacacccaccggcacacagaccccaaccacgacacccatcaccaccaccactacggtgaccccaaccccaacacccaccggcacacagaccccaaccacgacacccatcaccaccaccactacggtgaccccaaccccaacacccaccggcacacagaccccaaccacgacacccatcaccaccaccactacggtgaccccaaccccaacacccaccggcacacagaccccaaccacgacacccatcaccaccaccactacggtgaccccaaccccaacacccaccggcacacagaccccaaccacgacacccatcaccaccaccactacggtgaccccaaccccaacacccaccggcacacagaccccaaccacgacacccatcaccaccaccactacggtgaccccaaccccaacacccaccggcacacagaccccaaccacgacacccatcaccaccaccactacggtgaccccaaccccaacacccaccggcacacagaccccaaccacgacacccatcaccaccaccactacggtgaccccaaccccaacacccaccggcacacagaccccaaccacgacacccatcaccaccaccactacggtgaccccaaccccaacacccaccggcacacagaccccaaccacgacacccatcaccaccaccactacggtgaccccaaccccaacacccaccggcacacagaccccaaccacgacacccatcaccaccaccactacggtgaccccaaccccaacacccaccggcacacagaccccaaccacgacacccatcaccaccaccactacggtgaccccaaccccaacacccaccggcacacagaccccaaccacgacacccatcaccaccaccactacggtgaccccaaccccaacacccaccggcacacagaccccaaccacgacacccatcaccaccaccactacggtgaccccaaccccaacacccaccggcacacagaccccaaccacgacacccatcaccaccaccactacggtgaccccaaccccaacacccaccggcacacagaccccaaccacgacacccatcaccaccaccactacggtgaccccaaccccaacacccaccggcacacagaccccaaccacgacacccatcaccaccaccactacggtgaccccaaccccaacacccaccggcacacagaccccaaccacgacacccatcaccaccaccactacggtgaccccaaccccaacacccaccggcacacagaccccaaccacgacacccatcaccaccaccactacggtgaccccaaccccaacacccaccggcacacagaccccaaccacgacacccatcaccaccaccactacggtgaccccaaccccaacacccaccggcacacagaccccaaccacgacacccatcaccaccaccactacggtgaccccaaccccaacacccaccggcacacagaccccaaccacgacacccatcaccaccaccactacggtgaccccaaccccaacacccaccggcacacagaccccaaccacgacacccatcaccaccaccactacggtgaccccaaccccaacacccaccggcacacagaccccaaccacgacacccatcaccaccaccactacggtgaccccaaccccaacacccaccggcacacagaccccaaccacgacacccatcaccaccaccactacggtgaccccaaccccaacacccaccggcacacagaccccaaccacgacacccatcaccaccaccactacggtgaccccaaccccaacacccaccggcacacagaccccaaccacgacacccatcaccaccaccactacggtgaccccaaccccaacacccaccggcacacagaccccaaccacgacacccatcaccaccaccactacggtgaccccaaccccaacacccaccggcacacagaccccaaccacgacacccatcaccaccaccactacggtgaccccaaccccaacacccaccggcacacagaccccaaccacgacacccatcaccaccaccactacggtgaccccaaccccaacacccaccggcacacagaccccaaccacgacacccatcaccaccaccactacggtgaccccaaccccaacacccaccggcacacagaccccaaccacgacacccatcaccaccaccactacggtgaccccaaccccaacacccaccggcacacagaccccaaccacgacacccatcaccaccaccactacggtgaccccaaccccaacacccaccggcacacagaccccaaccacgacacccatcaccaccaccactacggtgaccccaaccccaacacccaccggcacacagaccccaaccacgacacccatcaccaccaccactacggtgaccccaaccccaacacccaccggcacacagaccccaaccacgacacccatcaccaccaccactacggtgaccccaaccccaacacccaccggcacacagaccccaaccacgacacccatcaccaccaccactacggtgaccccaaccccaacacccaccggcacacagaccccaaccacgacacccatcaccaccaccactacggtgaccccaaccccaacacccaccggcacacagaccccaaccacgacacccatcaccaccaccactacggtgaccccaaccccaacacccaccggcacacagaccccaaccacgacacccatcaccaccaccactacggtgaccccaaccccaacacccaccggcacacagaccccaaccacgacacccatcaccaccaccactacggtgaccccaaccccaacacccaccggcacacagaccccaaccacgacacccatcaccaccaccactacggtgaccccaaccccaacacccaccggcacacagaccccaaccacgacacccatcaccaccaccactacggtgaccccaaccccaacacccaccggcacacagaccccaaccacgacacccatcaccaccaccactacggtgaccccaaccccaacacccaccggcacacagaccccaaccacgacacccatcaccaccaccactacggtgaccccaaccccaacacccaccggcacacagaccccaaccacgacacccatcaccaccaccactacggtgaccccaaccccaacacccaccggcacacagaccccaaccacgacacccatcaccaccaccactacggtgaccccaaccccaacacccaccggcacacagaccccaaccacgacacccatcaccaccaccactacggtgaccccaaccccaacacccaccggcacacagaccccaaccacgacacccatcaccaccaccactacggtgaccccaaccccaacacccaccggcacacagaccccaaccacgacacccatcaccaccaccactacggtgaccccaaccccaacacccaccggcacacagaccccaaccacgacacccatcaccaccaccactacggtgaccccaaccccaacacccaccggcacacagaccccaaccacgacacccatcaccaccaccactacggtgaccccaaccccaacacccaccggcacacagaccccaaccacgacacccatcaccaccaccactacggtgaccccaaccccaacacccaccggcacacagaccccaaccacgacacccatcaccaccaccactacggtgaccccaaccccaacacccaccggcacacagaccccaaccacgacacccatcaccaccaccactacggtgaccccaaccccaacacccaccggcacacagaccccaaccacgacacccatcaccaccaccactacggtgaccccaaccccaacacccaccggcacacagaccccaaccacgacacccatcaccaccaccactacggtgaccccaaccccaacacccaccggcacacagaccccaaccacgacacccatcaccaccaccactacggtgaccccaaccccaacacccaccggcacacagaccccaaccacgacacccatcaccaccaccactacggtgaccccaaccccaacacccaccggcacacagaccccaaccacgacacccatcaccaccaccactacggtgaccccaaccccaacacccaccggcacacagaccccaaccacgacacccatcaccaccaccactacggtgaccccaaccccaacacccaccggcacacagaccccaaccacgacacccatcaccaccaccactacggtgaccccaaccccaacacccaccggcacacagaccccaaccacgacacccatcaccaccaccactacggtgaccccaaccccaacacccaccggcacacagaccccaaccacgacacccatcaccaccaccactacggtgaccccaaccccaacacccaccggcacacagaccccaaccacgacacccatcaccaccaccactacggtgaccccaaccccaacacccaccggcacacagaccccaaccacgacacccatcaccaccaccactacggtgaccccaaccccaacacccaccggcacacagaccccaaccacgacacccatcaccaccaccactacggtgaccccaaccccaacacccaccggcacacagaccccaaccacgacacccatcaccaccaccactacggtgaccccaaccccaacacccaccggcacacagaccccaaccacgacacccatcaccaccaccactacggtgaccccaaccccaacacccaccggcacacagaccccaaccacgacacccatcaccaccaccactacggtgaccccaaccccaacacccaccggcacacagaccccaaccacgacacccatcaccaccaccactacggtgaccccaaccccaacacccaccggcacacagaccccaaccacgacacccatcaccaccaccactacggtgaccccaaccccaacacccaccggcacacagaccccaaccacgacacccatcaccaccaccactacggtgaccccaaccccaacacccaccggcacacagaccccaaccacgacacccatcaccaccaccactacggtgaccccaaccccaacacccaccggcacacagaccccaaccacgacacccatcaccaccaccactacggtgaccccaaccccaacacccaccggcacacagaccccaaccacgacacccatcaccaccaccactacggtgaccccaaccccaacacccaccggcacacagaccccaaccacgacacccatcaccaccaccactacggtgaccccaaccccaacacccaccggcacacagaccccaaccacgacacccatcaccaccaccactacggtgaccccaaccccaacacccaccggcacacagaccccaaccacgacacccatcaccaccaccactacggtgaccccaaccccaacacccaccggcacacagaccccaaccacgacacccatcaccaccaccactacggtgaccccaaccccaacacccaccggcacacagaccccaaccacgacacccatcaccaccaccactacggtgaccccaaccccaacacccaccggcacacagaccccaaccacgacacccatcaccaccaccactacggtgaccccaaccccaacacccaccggcacacagaccccaaccacgacacccatcaccaccaccactacggtgaccccaaccccaacacccaccggcacacagaccccaaccacgacacccatcaccaccaccactacggtgaccccaaccccaacacccaccggcacacagaccccaaccacgacacccatcaccaccaccactacggtgaccccaaccccaacacccaccggcacacagaccccaaccacgacacccatcaccaccaccactacggtgaccccaaccccaacacccaccggcacacagaccccaaccacgacacccatcaccaccaccactacggtgaccccaaccccaacacccaccggcacacagaccccaaccacgacacccatcaccaccaccactacggtgaccccaaccccaacacccaccggcacacagaccccaaccacgacacccatcaccaccaccactacggtgaccccaaccccaacacccaccggcacacagaccccaaccacgacacccatcaccaccaccactacggtgaccccaaccccaacacccaccggcacacagaccccaaccncgacacccatcaccaccaccactacggtgaccccaaccccaacacccaccggcacacagaccccaaccacgacacccatcaccaccaccacnacggtgaccccaaccccaacacccaccggcacacagaccccaaccacgacacccatcaccaccaccactacggtgaccccaaccccaacacccaccggcacacagaccccaaccacgacacccatcaccaccaccactacggtgaccccaaccccaacacccaccggcacacagaccccaaccatgatacccatcagcaccaccactacggtgaccccaaccccaacacccaccactggaagcacggggccccccacccacacaagcacagcaccgattgctgagttgaccacatccaatcctccgcctgagtcctcaacccctcagacctctcggtccacctcttcccctctcacggagtcaaccacccttctgagtaccctaccacctgccattgagatgaccagcacggccccaccctccacacccacggcacccacgaccacgagcggaggccacacactgtctccaccgcccagcaccaccacgtcccctccaggcacccccactcgcggtaccacgaccgggtcatcttcagcccccacccccagcactgtgcagacgaccaccaccagtgcctggaccccaacgccgaccccactctccacacccagcatcatcaggaccacaggcctgaggccctacccttcctctgtgcttatctgctgtgtcctgaacgacacctactacgcaccaggtgaggaggtgtacaacggcacatacggagacacctgttatttcgtcaactgctcactgagctgtacgttggagttctataactggtcctgcccatccacgccctccccaacacccacgccctccaagtcgacgcccacgccttccaagccatcgtccacgccctccaagccgacgcccggcaccaagccccccgagtgcccagactttgatcctcccagacaggagaacgagacttggtggctgtgcgactgcttcatggccacgtgcaagtacaacaacacggtggagatcgtgaaggtggagtgtgagccgccgcccatgcccacctgctccaacggcctccaacccgtgcgcgtcgaggaccccgacggctgctgctggcactgggagtgcgactgctactgcacgggctggggcgacccgcactatgtcaccttcgacggactctactacagctaccagggcaactgcacctacgtgctggtggaggagatcagcccctccgtggacaacttcggagtttacatcgacaactaccactgcgatcccaacgacaaggtgtcctgcccccgcaccctcatcgtgcgccacgagacccaggaggtgctgatcaagaccgtgcatatgatgcccatgcaggtgcaggtgcaggtgaacaggcaggcggtggcactgccctacaagaagtacgggctggaggtgtaccagtctggcatcaactacgtggtggacatccccgagctgggtgtcctcgtctcctacaatggcctgtccttctccgtcaggctgccctaccaccggtttggcaacaacaccaagggccagtgtggcacctgcaccaacaccacctccgacgactgcattctgcccagcggggagatcgtctccaactgtgaggctgcggctgaccagtggctggtgaacgacccctccaagccacactgcccccacagcagctccacgaccaagcgcccggccgtcactgtgcccgggggcggtaaaacgaccccacacaaggactgcaccccatctcccctctgccagctcatcaaggacagcctgtttgcccagtgccacgcactggtgcccccgcagcactactacgatgcctgcgtgttcgacagctgcttcatgccgggctcgagcctggagtgcgccagtctgcaggcctacgcagccctctgtgcccagcagaacatctgcctcgactggcggaaccacacgcatggggcctgcttggtggagtgcccatctcacagggagtaccaggcctgtggccctgcagaagagcccacgtgcaaatccagctcctcccagcagaacaacacagtcctggtggaaggctgcttctgtcctgagggcaccatgaactacgctcctggctttgatgtctgcgtgaagacctgcggctgtgtgggacctgacaatgtgcccagagagtttggggagcacttcgagttcgactgcaagaactgtgtctgcctggagggtggaagtggcatcatctgccaacccaagaggtgcagccagaagcccgttacccactgcgtggaagacggcacctacctcgccacggaggtcaaccctgccgacacctgctgcaacattaccgtctgcaagtgcaacaccagcctgtgcaaagagaagccctccgtgtgcccgctgggattcgaagtgaagagcaagatggtgcctggaaggtgctgtcctttctactggtgtgagtccaagggggtgtgtgttcacgggaatgctgagtaccagcccggttctccagtttattcctccaagtgccaggactgcgtgtgcacggacaaggtggacaacaacaccctgctcaacgtcatcgcctgcacccacgtgccctgcaacacctcctgcagccctggcttcgaactcatggaggcccccggggagtgctgtaagaagtgtgaacagacgcactgtatcatcaaacggcccgacaaccagcacgtcatcctgaagcccggggacttcaagagcgacccgaagaacaactgcacattcttcagctgcgtgaagatccacaaccagctcatctcgtccgtctccaacatcacctgccccaactttgatgccagcatttgcatcccgggctccatcacattcatgcccaatggatgctgcaagacctgcacccctcgcaatgagaccagggtgccctgctccaccgtccccgtcaccacggaggtttcgtacgccggctgcaccaagaccgtcctcatgaatcattgctccgggtcctgcgggacatttgtcatgtactcggccaaggcccaggccctggaccacagctgctcctgctgcaaagaggagaaaaccagccagcgtgaggtggtcctgagctgccccaatggcggctcgctgacacacacctacacccacatcgagagctgccagtgccaggacaccgtctgcgggctccccaccggcacctcccgccgggcccggcgctcccctaggcatctggggagcgggtgagcggggtgggcacagcccccttcactgccctcgacagctttacctcccccggaccctctgagcctcctaagctcggcttcctctcttcagatatttattgtctgagtctttgttcagtccttgctttccaataataaactcagggggacatgcaaaaaaaaaa

SEQ ID NO: 732410 - DNA, 3809 bp, Homo sapiens
acgcatcacctaaatctattgctgttctatgatttcccccttatgtcactcatcaccacaatgacacccccttacaatcaccactcccagccctccaacaaccaccatgaccacccttccaccaaccaccacttccagccctctaacaactactcctctacctccatcaataactcctcctacattttcaccattctcaacgacaacccctactaccccatgcgtgcctctctgcaattggactggctggctggattctggaaaacccaactttcacaaaccaggtggagacacagaattgattggagacgtctgtggaccaggctgggcagctaacatctcttgcagagccaccatgtatcctgatgttcccattggacagcttggacaaacagtggtgtgtgatgtctctgtggggctgatatgcaaaaatgaagaccaaaagccaggtggggtcatccctatggccttctgcctcaactacgagatcaacgttcagtgctgtgagtgtgtcacccaacccaccaccatgacaaccaccaccacagagaacccaactccgacacccatcaccaccaccactacggtgaccccaaccccaacacccaccggcacacagaccccaaccatgatacccatcagcaccaccactacggtgaccccaaccccaacacccaccactggaagcacggggccccccacccacacaagcacagcaccgattgctgagttgaccacatccaatcctccgcctgagtcctcaacccctcagacctctcggtccacctcttcccctctcacggagtcaaccacccttctgagtaccctaccacctgccattgagatgaccagcacggccccaccctccacacccacggcacccacgaccacgagcggaggccacacactgtctccaccgcccagcaccaccacgtcccctccaggcacccccactcgcggtaccacgaccgggtcatcttcagcccccacccccagcactgtgcagacgaccaccaccagtgcctggaccccaacgccgaccccactctccacacccagcatcatcaggaccacaggcctgaggccctacccttcctctgtgcttatctgctgtgtcctgaacgacacctactacgcaccaggtgaggaggtgtacaacggcacatacggagacacctgttatttcgtcaactgctcactgagctgtacgttggagttctataactggtcctgcccatccacgccctccccaacacccacgccctccaagtcgacgcccacgccttccaagccatcgtccacgccctccaagccgacgcccggcaccaagccccccgagtgcccagactttgatcctcccagacaggagaacgagacttggtggctgtgcgactgcttcatggccacgtgcaagtacaacaacacggtggagatcgtgaaggtggagtgtgagccgccgcccatgcccacctgctccaacggcctccaacccgtgcgcgtcgaggaccccgacggctgctgctggcactgggagtgcgactgctactgcacgggctggggcgacccgcactatgtcaccttcgacggactctactacagctaccagggcaactgcacctacgtgctggtggaggagatcagcccctccgtggacaacttcggagtttacatcgacaactaccactgcgatcccaacgacaaggtgtcctgcccccgcaccctcatcgtgcgccacgagacccaggaggtgctgatcaagaccgtgcatatgatgcccatgcaggtgcaggtgcaggtgaacaggcaggcggtggcactgccctacaagaagtacgggctggaggtgtaccagtctggcatcaactacgtggtggacatccccgagctgggtgtcctcgtctcctacaatggcctgtccttctccgtcaggctgccctaccaccggtttggcaacaacaccaagggccagtgtggcacctgcaccaacaccacctccgacgactgcattctgcccagcggggagatcgtctccaactgtgaggctgcggctgaccagtggctggtgaacgacccctccaagccacactgcccccacagcagctccacgaccaagcgcccggccgtcactgtgcccgggggcggtaaaacgaccccacacaaggactgcaccccatctcccctctgccagctcatcaaggacagcctgtttgcccagtgccacgcactggtgcccccgcagcactactacgatgcctgcgtgttcgacagctgcttcatgccgggctcgagcctggagtgcgccagtctgcaggcctacgcagccctctgtgcccagcagaacatctgcctcgactggcggaaccacacgcatggggcctgcttggtggagtgcccatctcacagggagtaccaggcctgtggccctgcagaagagcccacgtgcaaatccagctcctcccagcagaacaacacagtcctggtggaaggctgcttctgtcctgagggcaccatgaactacgctcctggctttgatgtctgcgtgaagacctgcggctgtgtgggacctgacaatgtgcccagagagtttggggagcacttcgagttcgactgcaagaactgtgtctgcctggagggtggaagtggcatcatctgccaacccaagaggtgcagccagaagcccgttacccactgcgtggaagacggcacctacctcgccacggaggtcaaccctgccgacacctgctgcaacattaccgtctgcaagtgcaacaccagcctgtgcaaagagaagccctccgtgtgcccgctgggattcgaagtgaagagcaagatggtgcctggaaggtgctgtcctttctactggtgtgagtccaagggggtgtgtgttcacgggaatgctgagtaccagcccggttctccagtttattcctccaagtgccaggactgcgtgtgcacggacaaggtggacaacaacaccctgctcaacgtcatcgcctgcacccacgtgccctgcaacacctcctgcagccctggcttcgaactcatggaggcccccggggagtgctgtaagaagtgtgaacagacgcactgtatcatcaaacggcccgacaaccagcacgtcatcctgaagcccggggacttcaagagcgacccgaagaacaactgcacattcttcagctgcgtgaagatccacaaccagctcatctcgtccgtctccaacatcacctgccccaactttgatgccagcatttgcatcccgggctccatcacattcatgcccaatggatgctgcaagacctgcacccctcgcaatgagaccagggtgccctgctccaccgtccccgtcaccacggaggtttcgtacgccggctgcaccaagaccgtcctcatgaatcattgctccgggtcctgcgggacatttgtcatgtactcggccaaggcccaggccctggaccacagctgctcctgctgcaaagaggagaaaaccagccagcgtgaggtggtcctgagctgccccaatggcggctcgctgacacacacctacacccacatcgagagctgccagtgccaggacaccgtctgcgggctccccaccggcacctcccgccgggcccggcgctcccctaggcatctggggagcgggtgagcggggtgggcacagcccccttcactgccctcgacagctttacctcccccggaccctctgagcctcctaagctcggcttcctctcttcagatatttattgtctgagtctttgttcagtccttgctttccaataataaactcagggggacatgcaaaaaaaaaa

SEQ ID NO: 732411 - DNA, 308 bp, Homo sapiens
ggcggtaaaacgaccccacacaaggactgcaccccatctcccctctgccagctcatcaaggacagcctgtttgcccagtgccacgcactggtgcccccgcagcactactacgatgcctgcgtgttcgacagctgcttcatgccgggctcgagcctggagtgcgccagtctgcaggcctacgcagccctctgtgcccagcagaacatctgcctcgactggcggaaccacacgaagacgaccgcgtcccggcctgcggcggccggggtgggagcccagccctctggagagcccgccgtcccaaagcacag

SEQ ID NO: 732412 - DNA, 8959 bp, Homo sapiens
caacccacaccgcccctgccagccaccatggggctgccactagcccgcctggcggctgtgtgcctggccctgtctttggcagggggctcggagctccagacagagggcagaacccgataccacggccgcaacgtctgcagcacctggggcaacttccactacaagaccttcgacggggacgtcttccgcttccccggcctctgcgactacaacttcgcctccgactgccgaggctcctacaaggaatttgctgtgcacctgaagcggggtccgggccaggctgaggcccccgccggggtggagtccatcctgctgaccatcaaggatgacaccatctacctcacccgccacctggctgtgcttaacggggccgtggtcagcaccccgcactacagccccgggctgctcattgagaagagcgatgcctacaccaaagtctactcccgcgccggcctcaccctcatgtggaaccgggaggatgcactcatgctggagctggacactaagttccggaaccacacctgtggcctctgcggggactacaacggcctgcagagctattcagaattcctctctgacggcgtgctcttcagtcccctggagtttgggaacatgcagaagatcaaccagcccgatgtggtgtgtgaggatcccgaggaggaggtggcccccgcatcctgctccgagcaccgcgccgagtgtgagaggctgctgaccgccgaggccttcgcggactgtcaggacctggtgccgctggagccgtatctgcgcgcctgccagcaggaccgctgccggtgcccgggcggtgacacctgcgtctgcagcaccgtggccgagttctcccgccagtgctcccacgccggcggccggcccgggaactggaggaccgccacgctctgccccaagacctgccccgggaacctggtgtacctggagagcggctcgccctgcatggacacctgctcacacctggaggtgagcagcctgtgcgaggagcaccgcatggacggctgtttctgcccagaaggcaccgtatatgacgacatcggggacagtggctgcgttcctgtgagccagtgccactgcaggctgcacggacacctgtacacaccgggccaggagatcaccaatgactgcgagcagtgtgtctgtaacgctggccgctgggtgtgcaaagacctgccctgccccggcacctgtgccctggacggcggctcccacatcaccaccttcgatgggaagacgtacaccttccacggggactgctactatgtcctggccaagggtgaccacaacgattcctacgctctcctgggcgagctggccccctgtggctccacagacaagcagacctgcctgaagacggtggtgctgctggctgacaagaagaagaatgtggtggtcttcaagtccgatggcagtgtactgctcaacgagctgcaggtgaacctgccccacgtgaccgcgagcttctctgtcttccgcccgtcttcctaccacatcatggtgagcatggccattggcgtccggctgcaggtgcagctggccccagtcatgcaactctttgtgacactggaccaggcctcccaggggcaggtgcagggcctctgcgggaacttcaacggcctggaaggtgacgacttcaagacggccagcgggctggtggaggccacgggggccggctttgccaacacctggaaggcacagtcaagctgccatgacaagctggactggttggacgatccctgctccctgaacatcgagagcgccaactacgccgagcactggtgctccctcctgaagaagacagagaccccctttggcaggtgccactcggctgtggaccctgctgagtattacaagaggtgcaaatatgacacgtgtaactgtcagaacaatgaggactgcctgtgcgccgccctgtcctcctacgcgcgcgcctgcaccgccaagggcgtcatgctgtggggctggcgggagcatgtctgcaacaaggatgtgggctcctgccccaactcgcaggtcttcctgtacaacctgaccacctgccagcagacctgccgctccctctccgaggccgacagccactgtctcgagggctttgcgcctgtggacggctgcggctgccctgaccacaccttcctggacgagaagggccgctgcgtacccctggccaagtgctcctgttaccaccgcggtctctacctggaggcgggggatgtggtcgtcaggcaggaagaacgatgtgtgtgccgggatgggcggctgcactgtaggcagatccggctgatcggccagagctgcacggccccaaagatccacatggactgcagcaacctgactgcactggccacctcgaagccccgagccctcagctgccagacgctggccgccggctattaccacacagagtgtgtcagtggctgtgtgtgccccgacgggctgatggatgacggccggggtggctgcgtggtggagaaggaatgcccttgcgtccataacaacgacctgtattcttccggcgccaagatcaaggtggactgcaatacctgcacctgcaagagaggacgctgggtgtgcacccaggctgtgtgccatggcacctgctccatttacgggagtggccactacatcacctttgatgggaagtactacgactttgacggacactgctcctacgtggctgttcaggactactgcggccagaactcctcactgggctcattcagcatcatcaccgagaacgtcccctgtggcactacgggcgtcacctgctccaaggccatcaagatcttcatggggaggacggagctgaagttggaagacaagcaccgtgtggtgatccagcgtgatgagggtcaccacgtggcctacaccacgcgggaggtgggccagtacctggtggtggagtccagcacgggcatcatcgtcatctgggacaagaggaccaccgtgttcatcaagctggctccctcctacaagggcaccgtgtgtggcctgtgtgggaactttgaccaccgctccaacaacgacttcaccacgcgggaccacatggtggtgagcagcgagctggacttcgggaacagctggaaggaggcccccacctgcccagatgtgagcaccaaccccgagccctgcagcctgaacccgcaccgccgctcctgggccgagaagcagtgcagcatcctcaaaagcagcgtgttcagcatctgccacagcaaggtggaccccaagcccttctacgaggcctgtgtgcacgactcgtgctcctgtgacacgggtggggactgtgagtgcttctgctctgccgtggcctcctacgcccaggagtgtaccaaagagggggcctgcgtgttctggaggacgccggacctgtgccccatattctgcgactactacaaccctccgcatgagtgtgagtggcactatgagccatgtgggaaccggagcttcgagacctgcaggaccatcaacggcatccactccaacatctccgtgtcctacctggagggctgctacccccggtgccccaaggacaggcccatctatgaggaggatctgaagaagtgtgtcactgcagacaagtgtggctgctatgtcgaggacacccactacccacctggagcatcggttcccaccgaggagacctgcaagtcctgcgtgtgtaccaactcctcccaagtcgtctgcaggccggaggaaggaaagattcttaaccagacccaggatggcgccttctgctactgggagatctgtggccccaacgggacggtggagaagcacttcaacatctgttccattacgacacgcccgtccaccctgaccaccttcaccaccatcaccctccccaccacccccacctccttcaccactaccaccaccaccaccaccccgacctccagcacagttttatcaacaactccgaagctgtgctgcctctggtctgactggatcaatgaggaccaccccagcagtggcagcgacgacggtgaccgagaaccatttgatggggtctgcggggcccctgaggacatcgagtgcaggtcggtcaaggatccccacctcagcttggagcagcatggccagaaggtgcagtgtgatgtctctgttgggttcatttgcaagaatgaagaccagtttggaaatggaccatttggactgtgttacgactacaagatacgtgtcaattgttgctggcccatggataagtgtatcaccactcccagccctccaactaccactcccagccctccaccaaccacgacgaccacccttccaccaaccaccacccccagccctccaaccaccaccacaaccacccctccaccaaccaccacccccagccctccaataaccaccacgaccacccctctaccaaccaccactcccagccctccaataagcaccacaaccacccctccaccaaccaccactcccagccctccaaccaccactcccagccctccaaccaccactcccagccctccaacaaccaccacaaccacccctccaccaaccaccactcccagccctccaatgactacgcccatcactccaccagccagcactaccacccttccaccaaccaccactcccagccctccaacaaccaccacaaccacccctccaccaaccaccactcccagtcctccaacgactacgcccatcactccaccaaccagcactactacccttccaccaaccaccactcccagccctccaccaaccaccacaaccacccctccaccaaccaccactcccagccctccaacaaccaccactcccagtcctccaacaatcaccacaaccacccctccaccaaccaccactcccagccctccaacaacgaccacaaccacccctccaccaaccaccactcccagccctccaacgactacacccatcactccaccaaccagcactaccacccttccaccaaccaccactcccagccctccaccaaccaccacaaccacccctccaccaaccaccactcccagccctccaacaaccaccactcccagccctccaataaccaccacaaccacccctccaccaaccaccactcccagctctccaataaccaccactcccagccctccaacaaccaccatgaccaccccttcaccaaccaccacccccagctctccaataaccaccacaaccaccccttcctcaactaccactcccagccctccaccaaccaccatgaccaccccttcaccaaccaccactcccagccctccaacaaccaccatgaccacccttccaccaaccaccacttccagccctctaacaactactcctctacctccatcaataactcctcctacattttcaccattctcaacgacaacccctactaccccatgcgtgcctctctgcaattggactggctggctggattctggaaaacccaactttcacaaaccaggtggagacacagaattgattggagacgtctgtggaccaggctgggcagctaacatctcttgcagagccaccatgtatcctgatgttcccattggacagcttggacaaacagtggtgtgtgatgtctctgtggggctgatatgcaaaaatgaagaccaaaagccaggtggggtcatccctatggccttctgcctcaactacgagatcaacgttcagtgctgtgagtgtgtcacccaacccaccaccatgacaaccaccaccacagagaacccaactccgacacccatcaccaccaccactacggtgaccccaaccccaacacccaccggcacacagaccccaaccatgatacccatcagcaccaccactacggtgaccccaaccccaacacccaccactggaagcacggggccccccacccacacaagcacagcaccgattgctgagttgaccacatccaatcctccgcctgagtcctcaacccctcagacctctcggtccacctcttcccctctcacggagtcaaccacccttctgagtaccctaccacctgccattgagatgaccagcacggccccaccctccacacccacggcacccacgaccacgagcggaggccacacactgtctccaccgcccagcaccaccacgtcccctccaggcacccccactcgcggtaccacgaccgggtcatcttcagcccccacccccagcactgtgcagacgaccaccaccagtgcctggaccccaacgccgaccccactctccacacccagcatcatcaggaccacaggcctgaggccctacccttcctctgtgcttatctgctgtgtcctgaacgacacctactacgcaccaggtgaggaggtgtacaacggcacatacggagacacctgttatttcgtcaactgctcactgagctgtacgttggagttctataactggtcctgcccatccacgccctccccaacacccacgccctccaagtcgacgcccacgccttccaagccatcgtccacgccctccaagccgacgcccggcaccaagccccccgagtgcccagactttgatcctcccagacaggagaacgagacttggtggctgtgcgactgcttcatggccacgtgcaagtacaacaacacggtggagatcgtgaaggtggagtgtgagccgccgcccatgcccacctgctccaacggcctccaacccgtgcgcgtcgaggaccccgacggctgctgctggcactgggagtgcgactgctactgcacgggctggggcgacccgcactatgtcaccttcgacggactctactacagctaccagggcaactgcacctacgtgctggtggaggagatcagcccctccgtggacaacttcggagtttacatcgacaactaccactgcgatcccaacgacaaggtgtcctgcccccgcaccctcatcgtgcgccacgagacccaggaggtgctgatcaagaccgtgcatatgatgcccatgcaggtgcaggtgcaggtgaacaggcaggcggtggcactgccctacaagaagtacgggctggaggtgtaccagtctggcatcaactacgtggtggacatccccgagctgggtgtcctcgtctcctacaatggcctgtccttctccgtcaggctgccctaccaccggtttggcaacaacaccaagggccagtgtggcacctgcaccaacaccacctccgacgactgcattctgcccagcggggagatcgtctccaactgtgaggctgcggctgaccagtggctggtgaacgacccctccaagccacactgcccccacagcagctccacgaccaagcgcccggccgtcactgtgcccgggggcggtaaaacgaccccacacaaggactgcaccccatctcccctctgccagctcatcaaggacagcctgtttgcccagtgccacgcactggtgcccccgcagcactactacgatgcctgcgtgttcgacagctgcttcatgccgggctcgagcctggagtgcgccagtctgcaggcctacgcagccctctgtgcccagcagaacatctgcctcgactggcggaaccacacgcatggggcctgcttggtggagtgcccatctcacagggagtaccaggcctgtggccctgcagaagagcccacgtgcaaatccagctcctcccagcagaacaacacagtcctggtggaaggctgcttctgtcctgagggcaccatgaactacgctcctggctttgatgtctgcgtgaagacctgcggctgtgtgggacctgacaatgtgcccagagagtttggggagcacttcgagttcgactgcaagaactgtgtctgcctggagggtggaagtggcatcatctgccaacccaagaggtgcagccagaagcccgttacccactgcgtggaagacggcacctacctcgccacggaggtcaaccctgccgacacctgctgcaacattaccgtctgcaagtgcaacaccagcctgtgcaaagagaagccctccgtgtgcccgctgggattcgaagtgaagagcaagatggtgcctggaaggtgctgtcctttctactggtgtgagtccaagggggtgtgtgttcacgggaatgctgagtaccagcccggttctccagtttattcctccaagtgccaggactgcgtgtgcacggacaaggtggacaacaacaccctgctcaacgtcatcgcctgcacccacgtgccctgcaacacctcctgcagccctggcttcgaactcatggaggcccccggggagtgctgtaagaagtgtgaacagacgcactgtatcatcaaacggcccgacaaccagcacgtcatcctgaagcccggggacttcaagagcgacccgaagaacaactgcacattcttcagctgcgtgaagatccacaaccagctcatctcgtccgtctccaacatcacctgccccaactttgatgccagcatttgcatcccgggctccatcacattcatgcccaatggatgctgcaagacctgcacccctcgcaatgagaccagggtgccctgctccaccgtccccgtcaccacggaggtttcgtacgccggctgcaccaagaccgtcctcatgaatcattgctccgggtcctgcgggacatttgtcatgtactcggccaaggcccaggccctggaccacagctgctcctgctgcaaagaggagaaaaccagccagcgtgaggtggtcctgagctgccccaatggcggctcgctgacacacacctacacccacatcgagagctgccagtgccaggacaccgtctgcgggctccccaccggcacctcccgccgggcccggcgctcccctaggcatctggggagcgggtgagcggggtgggcacagcccccttcactgccctcgacagctttacctcccccggaccctctgagcctcctaagctcggcttcctctcttcagatatttattgtctgagtctttgttcagtccttgctttccaataataaactcagggggacatgcaaaaaaaaaa

SEQ ID NO: 732413 - DNA, 10042 bp, Homo sapiens
  misc_feature (6586)..(6586): n is a, c, g, or t
  misc_feature (6678)..(6678): n is a, c, g, or t
caacccacaccgcccctgccagccaccatggggctgccactagcccgcctggcggctgtgtgcctggccctgtctttggcagggggctcggagctccagacagagggcagaacccgataccacggccgcaacgtctgcagcacctggggcaacttccactacaagaccttcgacggggacgtcttccgcttccccggcctctgcgactacaacttcgcctccgactgccgaggctcctacaaggaatttgctgtgcacctgaagcggggtccgggccaggctgaggcccccgccggggtggagtccatcctgctgaccatcaaggatgacaccatctacctcacccgccacctggctgtgcttaacggggccgtggtcagcaccccgcactacagccccgggctgctcattgagaagagcgatgcctacaccaaagtctactcccgcgccggcctcaccctcatgtggaaccgggaggatgcactcatgctggagctggacactaagttccggaaccacacctgtggcctctgcggggactacaacggcctgcagagctattcagaattcctctctgacggcgtgctcttcagtcccctggagtttgggaacatgcagaagatcaaccagcccgatgtggtgtgtgaggatcccgaggaggaggtggcccccgcatcctgctccgagcaccgcgccgagtgtgagaggctgctgaccgccgaggccttcgcggactgtcaggacctggtgccgctggagccgtatctgcgcgcctgccagcaggaccgctgccggtgcccgggcggtgacacctgcgtctgcagcaccgtggccgagttctcccgccagtgctcccacgccggcggccggcccgggaactggaggaccgccacgctctgccccaagacctgccccgggaacctggtgtacctggagagcggctcgccctgcatggacacctgctcacacctggaggtgagcagcctgtgcgaggagcaccgcatggacggctgtttctgcccagaaggcaccgtatatgacgacatcggggacagtggctgcgttcctgtgagccagtgccactgcaggctgcacggacacctgtacacaccgggccaggagatcaccaatgactgcgagcagtgtgtctgtaacgctggccgctgggtgtgcaaagacctgccctgccccggcacctgtgccctggacggcggctcccacatcaccaccttcgatgggaagacgtacaccttccacggggactgctactatgtcctggccaagggtgaccacaacgattcctacgctctcctgggcgagctggccccctgtggctccacagacaagcagacctgcctgaagacggtggtgctgctggctgacaagaagaagaatgtggtggtcttcaagtccgatggcagtgtactgctcaacgagctgcaggtgaacctgccccacgtgaccgcgagcttctctgtcttccgcccgtcttcctaccacatcatggtgagcatggccattggcgtccggctgcaggtgcagctggccccagtcatgcaactctttgtgacactggaccaggcctcccaggggcaggtgcagggcctctgcgggaacttcaacggcctggaaggtgacgacttcaagacggccagcgggctggtggaggccacgggggccggctttgccaacacctggaaggcacagtcaagctgccatgacaagctggactggttggacgatccctgctccctgaacatcgagagcgccaactacgccgagcactggtgctccctcctgaagaagacagagaccccctttggcaggtgccactcggctgtggaccctgctgagtattacaagaggtgcaaatatgacacgtgtaactgtcagaacaatgaggactgcctgtgcgccgccctgtcctcctacgcgcgcgcctgcaccgccaagggcgtcatgctgtggggctggcgggagcatgtctgcaacaaggatgtgggctcctgccccaactcgcaggtcttcctgtacaacctgaccacctgccagcagacctgccgctccctctccgaggccgacagccactgtctcgagggctttgcgcctgtggacggctgcggctgccctgaccacaccttcctggacgagaagggccgctgcgtacccctggccaagtgctcctgttaccaccgcggtctctacctggaggcgggggatgtggtcgtcaggcaggaagaacgatgtgtgtgccgggatgggcggctgcactgtaggcagatccggctgatcggccagagctgcacggccccaaagatccacatggactgcagcaacctgactgcactggccacctcgaagccccgagccctcagctgccagacgctggccgccggctattaccacacagagtgtgtcagtggctgtgtgtgccccgacgggctgatggatgacggccggggtggctgcgtggtggagaaggaatgcccttgcgtccataacaacgacctgtattcttccggcgccaagatcaaggtggactgcaatacctgcacctgcaagagaggacgctgggtgtgcacccaggctgtgtgccatggcacctgctccatttacgggagtggccactacatcacctttgatgggaagtactacgactttgacggacactgctcctacgtggctgttcaggactactgcggccagaactcctcactgggctcattcagcatcatcaccgagaacgtcccctgtggcactacgggcgtcacctgctccaaggccatcaagatcttcatggggaggacggagctgaagttggaagacaagcaccgtgtggtgatccagcgtgatgagggtcaccacgtggcctacaccacgcgggaggtgggccagtacctggtggtggagtccagcacgggcatcatcgtcatctgggacaagaggaccaccgtgttcatcaagctggctccctcctacaagggcaccgtgtgtggcctgtgtgggaactttgaccaccgctccaacaacgacttcaccacgcgggaccacatggtggtgagcagcgagctggacttcgggaacagctggaaggaggcccccacctgcccagatgtgagcaccaaccccgagccctgcagcctgaacccgcaccgccgctcctgggccgagaagcagtgcagcatcctcaaaagcagcgtgttcagcatctgccacagcaaggtggaccccaagcccttctacgaggcctgtgtgcacgactcgtgctcctgtgacacgggtggggactgtgagtgcttctgctctgccgtggcctcctacgcccaggagtgtaccaaagagggggcctgcgtgttctggaggacgccggacctgtgccccatattctgcgactactacaaccctccgcatgagtgtgagtggcactatgagccatgtgggaaccggagcttcgagacctgcaggaccatcaacggcatccactccaacatctccgtgtcctacctggagggctgctacccccggtgccccaaggacaggcccatctatgaggaggatctgaagaagtgtgtcactgcagacaagtgtggctgctatgtcgaggacacccactacccacctggagcatcggttcccaccgaggagacctgcaagtcctgcgtgtgtaccaactcctcccaagtcgtctgcaggccggaggaaggaaagattcttaaccagacccaggatggcgccttctgctactgggagatctgtggccccaacgggacggtggagaagcacttcaacatctgttccattacgacacgcccgtccaccctgaccaccttcaccaccatcaccctccccaccacccccacctccttcaccactaccaccaccaccaccaccccgacctccagcacagttttatcaacaactccgaagctgtgctgcctctggtctgactggatcaatgaggaccaccccagcagtggcagcgacgacggtgaccgagaaccatttgatggggtctgcggggcccctgaggacatcgagtgcaggtcggtcaaggatccccacctcagcttggagcagcatggccagaaggtgcagtgtgatgtctctgttgggttcatttgcaagaatgaagaccagtttggaaatggaccatttggactgtgttacgactacaagatacgtgtcaattgttgctggcccatggataagtgtatcaccactcccagccctccaactaccactcccagccctccaccaaccacgacgaccacccttccaccaaccaccacccccagccctccaaccaccaccacaaccacccctccaccaaccaccacccccagccctccaataaccaccacgaccacccctctaccaaccaccactcccagccctccaataagcaccacaaccacccctccaccaaccaccactcccagccctccaaccaccactcccagccctccaaccaccactcccagccctccaacaaccaccacaaccacccctccaccaaccaccactcccagccctccaatgactacgcccatcactccaccagccagcactaccacccttccaccaaccaccactcccagccctccaacaaccaccacaaccacccctccaccaaccaccactcccagtcctccaacgactacgcccatcactccaccaaccagcactactacccttccaccaaccaccactcccagccctccaccaaccaccacaaccacccctccaccaaccaccactcccagccctccaacaaccaccactcccagtcctccaacaatcaccacaaccacccctccaccaaccaccactcccagccctccaacaacgaccacaaccacccctccaccaaccaccactcccagccctccaacgactacacccatcactccaccaaccagcactaccacccttccaccaaccaccactcccagccctccaccaaccaccacaaccacccctccaccaaccaccactcccagccctccaacaaccaccactcccagccctccaataaccaccacaaccacccctccaccaaccaccactcccagctctccaataaccaccactcccagccctccaacaaccaccatgaccaccccttcaccaaccaccacccccagctctccaataaccaccacaaccaccccttcctcaactaccactcccagccctccaccaaccaccatgaccaccccttcaccaaccaccactcccagccctccaacaaccaccatgaccacccttccaccaaccaccacttccagccctctaacaactactcctctacctccatcaataactcctcctacattttcaccattctcaacgacaacccctactaccccatgcgtgcctctctgcaattggactggctggctggattctggaaaacccaactttcacaaaccaggtggagacacagaattgattggagacgtctgtggaccaggctgggcagctaacatctcttgcagagccaccatgtatcctgatgttcccattggacagcttggacaaacagtggtgtgtgatgtctctgtggggctgatatgcaaaaatgaagaccaaaagccaggtggggtcatccctatggccttctgcctcaactacgagatcaacgttcagtgctgtgagtgtgtcacccaacccaccaccatgacaaccaccaccacagagaacccaactccgccaaccacgacacccatcaccaccaccactacggtgaccccaaccccaacacccaccggcacacagaccccaaccacgacacccatcaccaccaccactacggtgaccccaaccccaacacccaccggcacacagaccccaaccacgacacccatcaccaccaccactacggtgaccccaaccccaacacccaccggcacacagaccccaaccacgacacccatcaccaccaccactacggtgaccccaaccccaacacccaccggcacacagaccccaaccacgacacccatcaccaccaccactacggtgaccccaaccccaacacccatcaccaccaccactacggtgaccccaaccccaacacccaccggcacacagaccccaaccacgacacccatcaccaccaccactacggtgaccccaaccccaacacccaccggcacacagaccccaaccacgacacccatcaccaccaccactacggtgaccccaaccccaacacccaccggcacacagaccccaaccacgacacccatcaccaccaccactacggtgaccccaaccccaacacccaccggcacacagaccccaaccacgacacccatcaccaccaccactacggtgaccccaaccccaacacccaccggcacacagaccccaaccacgacacccatcaccaccaccactacggtgaccccaaccccaacacccaccggcacacagaccccaaccacgacacccatcaccaccaccactacggtgaccccaaccccaacacccaccggcacacagaccccaaccacgacacccatcaccaccaccactacggtgaccccaaccccaacacccaccggcacacagaccccaaccncgacacccatcaccaccaccactacggtgaccccaaccccaacacccaccggcacacagaccccaaccacgacacccatcaccaccaccacnacggtgaccccaaccccaacacccaccggcacacagaccccaaccacgacacccatcaccaccaccactacggtgaccccaaccccaacacccaccggcacacagaccccaaccacgacacccatcaccaccaccactacggtgaccccaaccccaacacccaccggcacacagaccccaaccatgatacccatcagcaccaccactacggtgaccccaaccccaacacccaccactggaagcacggggccccccacccacacaagcacagcaccgattgctgagttgaccacatccaatcctccgcctgagtcctcaacccctcagacctctcggtccacctcttcccctctcacggagtcaaccacccttctgagtaccctaccacctgccattgagatgaccagcacggccccaccctccacacccacggcacccacgaccacgagcggaggccacacactgtctccaccgcccagcaccaccacgtcccctccaggcacccccactcgcggtaccacgaccgggtcatcttcagcccccacccccagcactgtgcagacgaccaccaccagtgcctggaccccaacgccgaccccactctccacacccagcatcatcaggaccacaggcctgaggccctacccttcctctgtgcttatctgctgtgtcctgaacgacacctactacgcaccaggtgaggaggtgtacaacggcacatacggagacacctgttatttcgtcaactgctcactgagctgtacgttggagttctataactggtcctgcccatccacgccctccccaacacccacgccctccaagtcgacgcccacgccttccaagccatcgtccacgccctccaagccgacgcccggcaccaagccccccgagtgcccagactttgatcctcccagacaggagaacgagacttggtggctgtgcgactgcttcatggccacgtgcaagtacaacaacacggtggagatcgtgaaggtggagtgtgagccgccgcccatgcccacctgctccaacggcctccaacccgtgcgcgtcgaggaccccgacggctgctgctggcactgggagtgcgactgctactgcacgggctggggcgacccgcactatgtcaccttcgacggactctactacagctaccagggcaactgcacctacgtgctggtggaggagatcagcccctccgtggacaacttcggagtttacatcgacaactaccactgcgatcccaacgacaaggtgtcctgcccccgcaccctcatcgtgcgccacgagacccaggaggtgctgatcaagaccgtgcatatgatgcccatgcaggtgcaggtgcaggtgaacaggcaggcggtggcactgccctacaagaagtacgggctggaggtgtaccagtctggcatcaactacgtggtggacatccccgagctgggtgtcctcgtctcctacaatggcctgtccttctccgtcaggctgccctaccaccggtttggcaacaacaccaagggccagtgtggcacctgcaccaacaccacctccgacgactgcattctgcccagcggggagatcgtctccaactgtgaggctgcggctgaccagtggctggtgaacgacccctccaagccacactgcccccacagcagctccacgaccaagcgcccggccgtcactgtgcccgggggcggtaaaacgaccccacacaaggactgcaccccatctcccctctgccagctcatcaaggacagcctgtttgcccagtgccacgcactggtgcccccgcagcactactacgatgcctgcgtgttcgacagctgcttcatgccgggctcgagcctggagtgcgccagtctgcaggcctacgcagccctctgtgcccagcagaacatctgcctcgactggcggaaccacacgcatggggcctgcttggtggagtgcccatctcacagggagtaccaggcctgtggccctgcagaagagcccacgtgcaaatccagctcctcccagcagaacaacacagtcctggtggaaggctgcttctgtcctgagggcaccatgaactacgctcctggctttgatgtctgcgtgaagacctgcggctgtgtgggacctgacaatgtgcccagagagtttggggagcacttcgagttcgactgcaagaactgtgtctgcctggagggtggaagtggcatcatctgccaacccaagaggtgcagccagaagcccgttacccactgcgtggaagacggcacctacctcgccacggaggtcaaccctgccgacacctgctgcaacattaccgtctgcaagtgcaacaccagcctgtgcaaagagaagccctccgtgtgcccgctgggattcgaagtgaagagcaagatggtgcctggaaggtgctgtcctttctactggtgtgagtccaagggggtgtgtgttcacgggaatgctgagtaccagcccggttctccagtttattcctccaagtgccaggactgcgtgtgcacggacaaggtggacaacaacaccctgctcaacgtcatcgcctgcacccacgtgccctgcaacacctcctgcagccctggcttcgaactcatggaggcccccggggagtgctgtaagaagtgtgaacagacgcactgtatcatcaaacggcccgacaaccagcacgtcatcctgaagcccggggacttcaagagcgacccgaagaacaactgcacattcttcagctgcgtgaagatccacaaccagctcatctcgtccgtctccaacatcacctgccccaactttgatgccagcatttgcatcccgggctccatcacattcatgcccaatggatgctgcaagacctgcacccctcgcaatgagaccagggtgccctgctccaccgtccccgtcaccacggaggtttcgtacgccggctgcaccaagaccgtcctcatgaatcattgctccgggtcctgcgggacatttgtcatgtactcggccaaggcccaggccctggaccacagctgctcctgctgcaaagaggagaaaaccagccagcgtgaggtggtcctgagctgccccaatggcggctcgctgacacacacctacacccacatcgagagctgccagtgccaggacaccgtctgcgggctccccaccggcacctcccgccgggcccggcgctcccctaggcatctggggagcgggtgagcggggtgggcacagcccccttcactgccctcgacagctttacctcccccggaccctctgagcctcctaagctcggcttcctctcttcagatatttattgtctgagtctttgttcagtccttgctttccaataataaactcagggggacatgcaaaaaaaaaa

SEQ ID NO: 732414 - DNA, 9811 bp, Homo sapiens
  misc_feature (6586)..(6586): n is a, c, g, or t
  misc_feature (6678)..(6678): n is a, c, g, or t
caacccacaccgcccctgccagccaccatggggctgccactagcccgcctggcggctgtgtgcctggccctgtctttggcagggggctcggagctccagacagagggcagaacccgataccacggccgcaacgtctgcagcacctggggcaacttccactacaagaccttcgacggggacgtcttccgcttccccggcctctgcgactacaacttcgcctccgactgccgaggctcctacaaggaatttgctgtgcacctgaagcggggtccgggccaggctgaggcccccgccggggtggagtccatcctgctgaccatcaaggatgacaccatctacctcacccgccacctggctgtgcttaacggggccgtggtcagcaccccgcactacagccccgggctgctcattgagaagagcgatgcctacaccaaagtctactcccgcgccggcctcaccctcatgtggaaccgggaggatgcactcatgctggagctggacactaagttccggaaccacacctgtggcctctgcggggactacaacggcctgcagagctattcagaattcctctctgacggcgtgctcttcagtcccctggagtttgggaacatgcagaagatcaaccagcccgatgtggtgtgtgaggatcccgaggaggaggtggcccccgcatcctgctccgagcaccgcgccgagtgtgagaggctgctgaccgccgaggccttcgcggactgtcaggacctggtgccgctggagccgtatctgcgcgcctgccagcaggaccgctgccggtgcccgggcggtgacacctgcgtctgcagcaccgtggccgagttctcccgccagtgctcccacgccggcggccggcccgggaactggaggaccgccacgctctgccccaagacctgccccgggaacctggtgtacctggagagcggctcgccctgcatggacacctgctcacacctggaggtgagcagcctgtgcgaggagcaccgcatggacggctgtttctgcccagaaggcaccgtatatgacgacatcggggacagtggctgcgttcctgtgagccagtgccactgcaggctgcacggacacctgtacacaccgggccaggagatcaccaatgactgcgagcagtgtgtctgtaacgctggccgctgggtgtgcaaagacctgccctgccccggcacctgtgccctggacggcggctcccacatcaccaccttcgatgggaagacgtacaccttccacggggactgctactatgtcctggccaagggtgaccacaacgattcctacgctctcctgggcgagctggccccctgtggctccacagacaagcagacctgcctgaagacggtggtgctgctggctgacaagaagaagaatgtggtggtcttcaagtccgatggcagtgtactgctcaacgagctgcaggtgaacctgccccacgtgaccgcgagcttctctgtcttccgcccgtcttcctaccacatcatggtgagcatggccattggcgtccggctgcaggtgcagctggccccagtcatgcaactctttgtgacactggaccaggcctcccaggggcaggtgcagggcctctgcgggaacttcaacggcctggaaggtgacgacttcaagacggccagcgggctggtggaggccacgggggccggctttgccaacacctggaaggcacagtcaagctgccatgacaagctggactggttggacgatccctgctccctgaacatcgagagcgccaactacgccgagcactggtgctccctcctgaagaagacagagaccccctttggcaggtgccactcggctgtggaccctgctgagtattacaagaggtgcaaatatgacacgtgtaactgtcagaacaatgaggactgcctgtgcgccgccctgtcctcctacgcgcgcgcctgcaccgccaagggcgtcatgctgtggggctggcgggagcatgtctgcaacaaggatgtgggctcctgccccaactcgcaggtcttcctgtacaacctgaccacctgccagcagacctgccgctccctctccgaggccgacagccactgtctcgagggctttgcgcctgtggacggctgcggctgccctgaccacaccttcctggacgagaagggccgctgcgtacccctggccaagtgctcctgttaccaccgcggtctctacctggaggcgggggatgtggtcgtcaggcaggaagaacgatgtgtgtgccgggatgggcggctgcactgtaggcagatccggctgatcggccagagctgcacggccccaaagatccacatggactgcagcaacctgactgcactggccacctcgaagccccgagccctcagctgccagacgctggccgccggctattaccacacagagtgtgtcagtggctgtgtgtgccccgacgggctgatggatgacggccggggtggctgcgtggtggagaaggaatgcccttgcgtccataacaacgacctgtattcttccggcgccaagatcaaggtggactgcaatacctgcacctgcaagagaggacgctgggtgtgcacccaggctgtgtgccatggcacctgctccatttacgggagtggccactacatcacctttgatgggaagtactacgactttgacggacactgctcctacgtggctgttcaggactactgcggccagaactcctcactgggctcattcagcatcatcaccgagaacgtcccctgtggcactacgggcgtcacctgctccaaggccatcaagatcttcatggggaggacggagctgaagttggaagacaagcaccgtgtggtgatccagcgtgatgagggtcaccacgtggcctacaccacgcgggaggtgggccagtacctggtggtggagtccagcacgggcatcatcgtcatctgggacaagaggaccaccgtgttcatcaagctggctccctcctacaagggcaccgtgtgtggcctgtgtgggaactttgaccaccgctccaacaacgacttcaccacgcgggaccacatggtggtgagcagcgagctggacttcgggaacagctggaaggaggcccccacctgcccagatgtgagcaccaaccccgagccctgcagcctgaacccgcaccgccgctcctgggccgagaagcagtgcagcatcctcaaaagcagcgtgttcagcatctgccacagcaaggtggaccccaagcccttctacgaggcctgtgtgcacgactcgtgctcctgtgacacgggtggggactgtgagtgcttctgctctgccgtggcctcctacgcccaggagtgtaccaaagagggggcctgcgtgttctggaggacgccggacctgtgccccatattctgcgactactacaaccctccgcatgagtgtgagtggcactatgagccatgtgggaaccggagcttcgagacctgcaggaccatcaacggcatccactccaacatctccgtgtcctacctggagggctgctacccccggtgccccaaggacaggcccatctatgaggaggatctgaagaagtgtgtcactgcagacaagtgtggctgctatgtcgaggacacccactacccacctggagcatcggttcccaccgaggagacctgcaagtcctgcgtgtgtaccaactcctcccaagtcgtctgcaggccggaggaaggaaagattcttaaccagacccaggatggcgccttctgctactgggagatctgtggccccaacgggacggtggagaagcacttcaacatctgttccattacgacacgcccgtccaccctgaccaccttcaccaccatcaccctccccaccacccccacctccttcaccactaccaccaccaccaccaccccgacctccagcacagttttatcaacaactccgaagctgtgctgcctctggtctgactggatcaatgaggaccaccccagcagtggcagcgacgacggtgaccgagaaccatttgatggggtctgcggggcccctgaggacatcgagtgcaggtcggtcaaggatccccacctcagcttggagcagcatggccagaaggtgcagtgtgatgtctctgttgggttcatttgcaagaatgaagaccagtttggaaatggaccatttggactgtgttacgactacaagatacgtgtcaattgttgctggcccatggataagtgtatcaccactcccagccctccaactaccactcccagccctccaccaaccacgacgaccacccttccaccaaccaccacccccagccctccaaccaccaccacaaccacccctccaccaaccaccacccccagccctccaataaccaccacgaccacccctctaccaaccaccactcccagccctccaataagcaccacaaccacccctccaccaaccaccactcccagccctccaaccaccactcccagccctccaaccaccactcccagccctccaacaaccaccacaaccacccctccaccaaccaccactcccagccctccaatgactacgcccatcactccaccagccagcactaccacccttccaccaaccaccactcccagccctccaacaaccaccacaaccacccctccaccaaccaccactcccagtcctccaacgactacgcccatcactccaccaaccagcactactacccttccaccaaccaccactcccagccctccaccaaccaccacaaccacccctccaccaaccaccactcccagccctccaacaaccaccactcccagtcctccaacaatcaccacaaccacccctccaccaaccaccactcccagccctccaacaacgaccacaaccacccctccaccaaccaccactcccagccctccaacgactacacccatcactccaccaaccagcactaccacccttccaccaaccaccactcccagccctccaccaaccaccacaaccacccctccaccaaccaccactcccagccctccaacaaccaccactcccagccctccaataaccaccacaaccacccctccaccaaccaccactcccagctctccaataaccaccactcccagccctccaacaaccaccatgaccaccccttcaccaaccaccacccccagctctccaataaccaccacaaccaccccttcctcaactaccactcccagccctccaccaaccaccatgaccaccccttcaccaaccaccactcccagccctccaacaaccaccatgaccacccttccaccaaccaccacttccagccctctaacaactactcctctacctccatcaataactcctcctacattttcaccattctcaacgacaacccctactaccccatgcgtgcctctctgcaattggactggctggctggattctggaaaacccaactttcacaaaccaggtggagacacagaattgattggagacgtctgtggaccaggctgggcagctaacatctcttgcagagccaccatgtatcctgatgttcccattggacagcttggacaaacagtggtgtgtgatgtctctgtggggctgatatgcaaaaatgaagaccaaaagccaggtggggtcatccctatggccttctgcctcaactacgagatcaacgttcagtgctgtgagtgtgtcacccaacccaccaccatgacaaccaccaccacagagaacccaactccgccaaccacgacacccatcaccaccaccactacggtgaccccaaccccaacacccaccggcacacagaccccaaccacgacacccatcaccaccaccactacggtgaccccaaccccaacacccaccggcacacagaccccaaccacgacacccatcaccaccaccactacggtgaccccaaccccaacacccaccggcacacagaccccaaccacgacacccatcaccaccaccactacggtgaccccaaccccaacacccaccggcacacagaccccaaccacgacacccatcaccaccaccactacggtgaccccaaccccaacacccatcaccaccaccactacggtgaccccaaccccaacacccaccggcacacagaccccaaccacgacacccatcaccaccaccactacggtgaccccaaccccaacacccaccggcacacagaccccaaccacgacacccatcaccaccaccactacggtgaccccaaccccaacacccaccggcacacagaccccaaccacgacacccatcaccaccaccactacggtgaccccaaccccaacacccaccggcacacagaccccaaccacgacacccatcaccaccaccactacggtgaccccaaccccaacacccaccggcacacagaccccaaccacgacacccatcaccaccaccactacggtgaccccaaccccaacacccaccggcacacagaccccaaccacgacacccatcaccaccaccactacggtgaccccaaccccaacacccaccggcacacagaccccaaccacgacacccatcaccaccaccactacggtgaccccaaccccaacacccaccggcacacagaccccaaccncgacacccatcaccaccaccactacggtgaccccaaccccaacacccaccggcacacagaccccaaccacgacacccatcaccaccaccacnacggtgaccccaaccccaacacccaccggcacacagaccccaaccacgacacccatcaccaccaccactacggtgaccccaaccccaacacccaccggcacacagaccccaaccacgacacccatcaccaccaccactacggtgaccccaaccccaacacccaccggcacacagaccccaaccatgatacccatcagcaccaccactacggtgaccccaaccccaacacccaccactggaagcacggggccccccacccacacaagcacagcaccgattgctgagttgaccacatccaatcctccgcctgagtcctcaacccctcagacctctcggtccacctcttcccctctcacggagtcaaccacccttctgagtaccctaccacctgccattgagatgaccagcacggccccaccctccacacccacggcacccacgaccacgagcggaggccacacactgtctccaccgcccagcaccaccacgtcccctccaggcacccccactcgcggtaccacgaccgggtcatcttcagcccccacccccagcactgtgcagacgaccaccaccagtgcctggaccccaacgccgaccccactctccacacccagcatcatcaggaccacaggcctgaggccctacccttcctctgtgcttatctgctgtgtcctgaacgacacctactacgcaccaggtgaggaggtgtacaacggcacatacggagacacctgttatttcgtcaactgctcactgagctgtacgttggagttctataactggtcctgcccatccacgccctccccaacacccacgccctccaagtcgacgcccacgccttccaagccatcgtccacgccctccaagccgacgcccggcaccaagccccccgagtgcccagactttgatcctcccagacaggagaacgagacttggtggctgtgcgactgcttcatggccacgtgcaagtacaacaacacggtggagatcgtgaaggtggagtgtgagccgccgcccatgcccacctgctccaacggcctccaacccgtgcgcgtcgaggaccccgacggctgctgctggcactgggagtgcgactgctactgcacgggctggggcgacccgcactatgtcaccttcgacggactctactacagctaccagggcaactgcacctacgtgctggtggaggagatcagcccctccgtggacaacttcggagtttacatcgacaactaccactgcgatcccaacgacaaggtgtcctgcccccgcaccctcatcgtgcgccacgagacccaggaggtgctgatcaagaccgtgcatatgatgcccatgcaggtgcaggtgcaggtgaacaggcaggcggtggcactgccctacaagaagtacgggctggaggtgtaccagtctggcatcaactacgtggtggacatccccgagctgggtgtcctcgtctcctacaatggcctgtccttctccgtcaggctgccctaccaccggtttggcaacaacaccaagggccagtgtggcacctgcaccaacaccacctccgacgactgcattctgcccagcggggagatcgtctccaactgtgaggctgcggctgaccagtggctggtgaacgacccctccaagccacactgcccccacagcagctccacgaccaagcgcccggccgtcactgtgcccgggggcggtaaaacgaccccacacaaggactgcaccccatctcccctctgccagctcatcaaggacagcctgtttgcccagtgccacgcactggtgcccccgcagcactactacgatgcctgcgtgttcgacagctgcttcatgccgggctcgagcctggagtgcgccagtctgcaggcctacgcagccctctgtgcccagcagaacatctgcctcgactggcggaaccacacgcatggggcctgcttggtggagtgcccatctcacagggagtaccaggcctgtggccctgcagaagagcccacgtgcaaatccagctcctcccagcagaacaacacagtcctggtggaaggctgcttctgtcctgagggcaccatgaactacgctcctggctttgatgtctgcgtgaagacctgcggctgtgtgggacctgacaatgtgcccagagagtttggggagcacttcgagttcgactgcaagaactgtgtctgcctggagggtggaagtggcatcatctgccaacccaagaggtgcagccagaagcccgttacccactgcgtggaagacggcacctacctcgccacggaggtcaaccctgccgacacctgctgcaacattaccgtctgcaagtgcaacaccagcctgtgcaaagagaagccctccgtgtgcccgctgggattcgaagtgaagagcaagatggtgcctggaaggtgctgtcctttctactggtgtgagtccaagggggtgtgtgttcacgggaatgctgagtaccagcccggttctccagtttattcctccaagtgccaggactgcgtgtgcacggacaaggtggacaacaacaccctgctcaacgtcatcgcctgcacccacgtgccctgcaacacctcctgcagccctggcttcgaactcatggaggcccccggggagtgctgtaagaagtgtgaacagacgcactgtatcatcaaacggcccgacaaccagcacgtcatcctgaagcccggggacttcaagagcgacccgaagaacaactgcacattcttcagctgcgggacatttgtcatgtactcggccaaggcccaggccctggaccacagctgctcctgctgcaaagaggagaaaaccagccagcgtgaggtggtcctgagctgccccaatggcggctcgctgacacacacctacacccacatcgagagctgccagtgccaggacaccgtctgcgggctccccaccggcacctcccgccgggcccggcgctcccctaggcatctggggagcgggtgagcggggtgggcacagcccccttcactgccctcgacagctttacctcccccggaccctctgagcctcctaagctcggcttcctctcttcagatatttattgtctgagtctttgttcagtccttgctttccaataataaactcagggggacatgcaaaaaaaaaa

SEQ ID NO: 732415 - DNA, 9625 bp, Homo sapiens
  misc_feature (6586)..(6586): n is a, c, g, or t
  misc_feature (6678)..(6678): n is a, c, g, or t
caacccacaccgcccctgccagccaccatggggctgccactagcccgcctggcggctgtgtgcctggccctgtctttggcagggggctcggagctccagacagagggcagaacccgataccacggccgcaacgtctgcagcacctggggcaacttccactacaagaccttcgacggggacgtcttccgcttccccggcctctgcgactacaacttcgcctccgactgccgaggctcctacaaggaatttgctgtgcacctgaagcggggtccgggccaggctgaggcccccgccggggtggagtccatcctgctgaccatcaaggatgacaccatctacctcacccgccacctggctgtgcttaacggggccgtggtcagcaccccgcactacagccccgggctgctcattgagaagagcgatgcctacaccaaagtctactcccgcgccggcctcaccctcatgtggaaccgggaggatgcactcatgctggagctggacactaagttccggaaccacacctgtggcctctgcggggactacaacggcctgcagagctattcagaattcctctctgacggcgtgctcttcagtcccctggagtttgggaacatgcagaagatcaaccagcccgatgtggtgtgtgaggatcccgaggaggaggtggcccccgcatcctgctccgagcaccgcgccgagtgtgagaggctgctgaccgccgaggccttcgcggactgtcaggacctggtgccgctggagccgtatctgcgcgcctgccagcaggaccgctgccggtgcccgggcggtgacacctgcgtctgcagcaccgtggccgagttctcccgccagtgctcccacgccggcggccggcccgggaactggaggaccgccacgctctgccccaagacctgccccgggaacctggtgtacctggagagcggctcgccctgcatggacacctgctcacacctggaggtgagcagcctgtgcgaggagcaccgcatggacggctgtttctgcccagaaggcaccgtatatgacgacatcggggacagtggctgcgttcctgtgagccagtgccactgcaggctgcacggacacctgtacacaccgggccaggagatcaccaatgactgcgagcagtgtgtctgtaacgctggccgctgggtgtgcaaagacctgccctgccccggcacctgtgccctggacggcggctcccacatcaccaccttcgatgggaagacgtacaccttccacggggactgctactatgtcctggccaagggtgaccacaacgattcctacgctctcctgggcgagctggccccctgtggctccacagacaagcagacctgcctgaagacggtggtgctgctggctgacaagaagaagaatgtggtggtcttcaagtccgatggcagtgtactgctcaacgagctgcaggtgaacctgccccacgtgaccgcgagcttctctgtcttccgcccgtcttcctaccacatcatggtgagcatggccattggcgtccggctgcaggtgcagctggccccagtcatgcaactctttgtgacactggaccaggcctcccaggggcaggtgcagggcctctgcgggaacttcaacggcctggaaggtgacgacttcaagacggccagcgggctggtggaggccacgggggccggctttgccaacacctggaaggcacagtcaagctgccatgacaagctggactggttggacgatccctgctccctgaacatcgagagcgccaactacgccgagcactggtgctccctcctgaagaagacagagaccccctttggcaggtgccactcggctgtggaccctgctgagtattacaagaggtgcaaatatgacacgtgtaactgtcagaacaatgaggactgcctgtgcgccgccctgtcctcctacgcgcgcgcctgcaccgccaagggcgtcatgctgtggggctggcgggagcatgtctgcaacaaggatgtgggctcctgccccaactcgcaggtcttcctgtacaacctgaccacctgccagcagacctgccgctccctctccgaggccgacagccactgtctcgagggctttgcgcctgtggacggctgcggctgccctgaccacaccttcctggacgagaagggccgctgcgtacccctggccaagtgctcctgttaccaccgcggtctctacctggaggcgggggatgtggtcgtcaggcaggaagaacgatgtgtgtgccgggatgggcggctgcactgtaggcagatccggctgatcggccagagctgcacggccccaaagatccacatggactgcagcaacctgactgcactggccacctcgaagccccgagccctcagctgccagacgctggccgccggctattaccacacagagtgtgtcagtggctgtgtgtgccccgacgggctgatggatgacggccggggtggctgcgtggtggagaaggaatgcccttgcgtccataacaacgacctgtattcttccggcgccaagatcaaggtggactgcaatacctgcacctgcaagagaggacgctgggtgtgcacccaggctgtgtgccatggcacctgctccatttacgggagtggccactacatcacctttgatgggaagtactacgactttgacggacactgctcctacgtggctgttcaggactactgcggccagaactcctcactgggctcattcagcatcatcaccgagaacgtcccctgtggcactacgggcgtcacctgctccaaggccatcaagatcttcatggggaggacggagctgaagttggaagacaagcaccgtgtggtgatccagcgtgatgagggtcaccacgtggcctacaccacgcgggaggtgggccagtacctggtggtggagtccagcacgggcatcatcgtcatctgggacaagaggaccaccgtgttcatcaagctggctccctcctacaagggcaccgtgtgtggcctgtgtgggaactttgaccaccgctccaacaacgacttcaccacgcgggaccacatggtggtgagcagcgagctggacttcgggaacagctggaaggaggcccccacctgcccagatgtgagcaccaaccccgagccctgcagcctgaacccgcaccgccgctcctgggccgagaagcagtgcagcatcctcaaaagcagcgtgttcagcatctgccacagcaaggtggaccccaagcccttctacgaggcctgtgtgcacgactcgtgctcctgtgacacgggtggggactgtgagtgcttctgctctgccgtggcctcctacgcccaggagtgtaccaaagagggggcctgcgtgttctggaggacgccggacctgtgccccatattctgcgactactacaaccctccgcatgagtgtgagtggcactatgagccatgtgggaaccggagcttcgagacctgcaggaccatcaacggcatccactccaacatctccgtgtcctacctggagggctgctacccccggtgccccaaggacaggcccatctatgaggaggatctgaagaagtgtgtcactgcagacaagtgtggctgctatgtcgaggacacccactacccacctggagcatcggttcccaccgaggagacctgcaagtcctgcgtgtgtaccaactcctcccaagtcgtctgcaggccggaggaaggaaagattcttaaccagacccaggatggcgccttctgctactgggagatctgtggccccaacgggacggtggagaagcacttcaacatctgttccattacgacacgcccgtccaccctgaccaccttcaccaccatcaccctccccaccacccccacctccttcaccactaccaccaccaccaccaccccgacctccagcacagttttatcaacaactccgaagctgtgctgcctctggtctgactggatcaatgaggaccaccccagcagtggcagcgacgacggtgaccgagaaccatttgatggggtctgcggggcccctgaggacatcgagtgcaggtcggtcaaggatccccacctcagcttggagcagcatggccagaaggtgcagtgtgatgtctctgttgggttcatttgcaagaatgaagaccagtttggaaatggaccatttggactgtgttacgactacaagatacgtgtcaattgttgctggcccatggataagtgtatcaccactcccagccctccaactaccactcccagccctccaccaaccacgacgaccacccttccaccaaccaccacccccagccctccaaccaccaccacaaccacccctccaccaaccaccacccccagccctccaataaccaccacgaccacccctctaccaaccaccactcccagccctccaataagcaccacaaccacccctccaccaaccaccactcccagccctccaaccaccactcccagccctccaaccaccactcccagccctccaacaaccaccacaaccacccctccaccaaccaccactcccagccctccaatgactacgcccatcactccaccagccagcactaccacccttccaccaaccaccactcccagccctccaacaaccaccacaaccacccctccaccaaccaccactcccagtcctccaacgactacgcccatcactccaccaaccagcactactacccttccaccaaccaccactcccagccctccaccaaccaccacaaccacccctccaccaaccaccactcccagccctccaacaaccaccactcccagtcctccaacaatcaccacaaccacccctccaccaaccaccactcccagccctccaacaacgaccacaaccacccctccaccaaccaccactcccagccctccaacgactacacccatcactccaccaaccagcactaccacccttccaccaaccaccactcccagccctccaccaaccaccacaaccacccctccaccaaccaccactcccagccctccaacaaccaccactcccagccctccaataaccaccacaaccacccctccaccaaccaccactcccagctctccaataaccaccactcccagccctccaacaaccaccatgaccaccccttcaccaaccaccacccccagctctccaataaccaccacaaccaccccttcctcaactaccactcccagccctccaccaaccaccatgaccaccccttcaccaaccaccactcccagccctccaacaaccaccatgaccacccttccaccaaccaccacttccagccctctaacaactactcctctacctccatcaataactcctcctacattttcaccattctcaacgacaacccctactaccccatgcgtgcctctctgcaattggactggctggctggattctggaaaacccaactttcacaaaccaggtggagacacagaattgattggagacgtctgtggaccaggctgggcagctaacatctcttgcagagccaccatgtatcctgatgttcccattggacagcttggacaaacagtggtgtgtgatgtctctgtggggctgatatgcaaaaatgaagaccaaaagccaggtggggtcatccctatggccttctgcctcaactacgagatcaacgttcagtgctgtgagtgtgtcacccaacccaccaccatgacaaccaccaccacagagaacccaactccgccaaccacgacacccatcaccaccaccactacggtgaccccaaccccaacacccaccggcacacagaccccaaccacgacacccatcaccaccaccactacggtgaccccaaccccaacacccaccggcacacagaccccaaccacgacacccatcaccaccaccactacggtgaccccaaccccaacacccaccggcacacagaccccaaccacgacacccatcaccaccaccactacggtgaccccaaccccaacacccaccggcacacagaccccaaccacgacacccatcaccaccaccactacggtgaccccaaccccaacacccatcaccaccaccactacggtgaccccaaccccaacacccaccggcacacagaccccaaccacgacacccatcaccaccaccactacggtgaccccaaccccaacacccaccggcacacagaccccaaccacgacacccatcaccaccaccactacggtgaccccaaccccaacacccaccggcacacagaccccaaccacgacacccatcaccaccaccactacggtgaccccaaccccaacacccaccggcacacagaccccaaccacgacacccatcaccaccaccactacggtgaccccaaccccaacacccaccggcacacagaccccaaccacgacacccatcaccaccaccactacggtgaccccaaccccaacacccaccggcacacagaccccaaccacgacacccatcaccaccaccactacggtgaccccaaccccaacacccaccggcacacagaccccaaccacgacacccatcaccaccaccactacggtgaccccaaccccaacacccaccggcacacagaccccaaccncgacacccatcaccaccaccactacggtgaccccaaccccaacacccaccggcacacagaccccaaccacgacacccatcaccaccaccacnacggtgaccccaaccccaacacccaccggcacacagaccccaaccacgacacccatcaccaccaccactacggtgaccccaaccccaacacccaccggcacacagaccccaaccacgacacccatcaccaccaccactacggtgaccccaaccccaacacccaccggcacacagaccccaaccatgatacccatcagcaccaccactacggtgaccccaaccccaacacccaccactggaagcacggggccccccacccacacaagcacagcaccgattgctgagttgaccacatccaatcctccgcctgagtcctcaacccctcagacctctcggtccacctcttcccctctcacggagtcaaccacccttctgagtaccctaccacctgccattgagatgaccagcacggccccaccctccacacccacggcacccacgaccacgagcggaggccacacactgtctccaccgcccagcaccaccacgtcccctccaggcacccccactcgcggtaccacgaccgggtcatcttcagcccccacccccagcactgtgcagacgaccaccaccagtgcctggaccccaacgccgaccccactctccacacccagcatcatcaggaccacaggcctgaggccctacccttcctctgtgcttatctgctgtgtcctgaacgacacctactacgcaccaggtgaggaggtgtacaacggcacatacggagacacctgttatttcgtcaactgctcactgagctgtacgttggagttctataactggtcctgcccatccacgccctccccaacacccacgccctccaagtcgacgcccacgccttccaagccatcgtccacgccctccaagccgacgcccggcaccaagccccccgagtgcccagactttgatcctcccagacaggagaacgagacttggtggctgtgcgactgcttcatggccacgtgcaagtacaacaacacggtggagatcgtgaaggtggagtgtgagccgccgcccatgcccacctgctccaacggcctccaacccgtgcgcgtcgaggaccccgacggctgctgctggcactgggagtgcgactgctactgcacgggctggggcgacccgcactatgtcaccttcgacggactctactacagctaccagggcaactgcacctacgtgctggtggaggagatcagcccctccgtggacaacttcggagtttacatcgacaactaccactgcgatcccaacgacaaggtgtcctgcccccgcaccctcatcgtgcgccacgagacccaggaggtgctgatcaagaccgtgcatatgatgcccatgcaggtgcaggtgcaggtgaacaggcaggcggtggcactgccctacaagaagtacgggctggaggtgtaccagtctggcatcaactacgtggtggacatccccgagctgggtgtcctcgtctcctacaatggcctgtccttctccgtcaggctgccctaccaccggtttggcaacaacaccaagggccagtgtggcacctgcaccaacaccacctccgacgactgcattctgcccagcggggagatcgtctccaactgtgaggctgcggctgaccagtggctggtgaacgacccctccaagccacactgcccccacagcagctccacgaccaagcgcccggccgtcactgtgcccgggggcggtaaaacgaccccacacaaggactgcaccccatctcccctctgccagctcatcaaggacagcctgtttgcccagtgccacgcactggtgcccccgcagcactactacgatgcctgcgtgttcgacagctgcttcatgccgggctcgagcctggagtgcgccagtctgcaggcctacgcagccctctgtgcccagcagaacatctgcctcgactggcggaaccacacgcatggggcctgcttggtggagtgcccatctcacagggagtaccaggcctgtggccctgcagaagagcccacgtgcaaatccagctcctcccagcagaacaacacagtcctggtggaaggctgcttctgtcctgagggcaccatgaactacgctcctggctttgatgtctgcgtgaagacctgcggctgtgtgggacctgacaatgtgcccagagagtttggggagcacttcgagttcgactgcaagaactgtgtctgcctggagggtggaagtggcatcatctgccaacccaagaggtgcagccagaagcccgttacccactgcgtggaagacggcacctacctcgccacggaggtcaaccctgccgacacctgctgcaacattaccgtctgcaagtgcaacaccagcctgtgcaaagagaagccctccgtgtgcccgctgggattcgaagtgaagagcaagatggtgcctggaaggtgctgtcctttctactggtgtgagtccaagggggtgtgtgttcacgggaatgctgagtaccagcccggttctccagtttattcctccaagtgccaggactgcgtgtgcacggacaaggtggacaacaacaccctgctcaacgtcatcgcctgcacccacgtgccctgcaacacctcctgcagccctggcttcgaactcatggaggcccccggggagtgctgtaagaagtgtgaacagacgcactgtatcatcaaacggcccgacaaccagcacgtcatcctgaagcccggggacttcaagagcgacccgaagaacaactgcacattcttcagctgcgtgaagatccacaaccagctcatctcgtccgtctccaacatcacctgccccaactttgatgccagcatttgcatcccgggctccatcacattcatgcccaatggatgctgcaagacctgcacccctcgcaatgagaccaggtgcctgctctacaagtccccgtcacccgagagtttgttcccgttgcaccacggccctgtaatgcgtatta

SEQ ID NO: 732416 - DNA, 7587 bp, Homo sapiens
  misc_feature (6586)..(6586): n is a, c, g, or t
  misc_feature (6678)..(6678): n is a, c, g, or t
caacccacaccgcccctgccagccaccatggggctgccactagcccgcctggcggctgtgtgcctggccctgtctttggcagggggctcggagctccagacagagggcagaacccgataccacggccgcaacgtctgcagcacctggggcaacttccactacaagaccttcgacggggacgtcttccgcttccccggcctctgcgactacaacttcgcctccgactgccgaggctcctacaaggaatttgctgtgcacctgaagcggggtccgggccaggctgaggcccccgccggggtggagtccatcctgctgaccatcaaggatgacaccatctacctcacccgccacctggctgtgcttaacggggccgtggtcagcaccccgcactacagccccgggctgctcattgagaagagcgatgcctacaccaaagtctactcccgcgccggcctcaccctcatgtggaaccgggaggatgcactcatgctggagctggacactaagttccggaaccacacctgtggcctctgcggggactacaacggcctgcagagctattcagaattcctctctgacggcgtgctcttcagtcccctggagtttgggaacatgcagaagatcaaccagcccgatgtggtgtgtgaggatcccgaggaggaggtggcccccgcatcctgctccgagcaccgcgccgagtgtgagaggctgctgaccgccgaggccttcgcggactgtcaggacctggtgccgctggagccgtatctgcgcgcctgccagcaggaccgctgccggtgcccgggcggtgacacctgcgtctgcagcaccgtggccgagttctcccgccagtgctcccacgccggcggccggcccgggaactggaggaccgccacgctctgccccaagacctgccccgggaacctggtgtacctggagagcggctcgccctgcatggacacctgctcacacctggaggtgagcagcctgtgcgaggagcaccgcatggacggctgtttctgcccagaaggcaccgtatatgacgacatcggggacagtggctgcgttcctgtgagccagtgccactgcaggctgcacggacacctgtacacaccgggccaggagatcaccaatgactgcgagcagtgtgtctgtaacgctggccgctgggtgtgcaaagacctgccctgccccggcacctgtgccctggacggcggctcccacatcaccaccttcgatgggaagacgtacaccttccacggggactgctactatgtcctggccaagggtgaccacaacgattcctacgctctcctgggcgagctggccccctgtggctccacagacaagcagacctgcctgaagacggtggtgctgctggctgacaagaagaagaatgtggtggtcttcaagtccgatggcagtgtactgctcaacgagctgcaggtgaacctgccccacgtgaccgcgagcttctctgtcttccgcccgtcttcctaccacatcatggtgagcatggccattggcgtccggctgcaggtgcagctggccccagtcatgcaactctttgtgacactggaccaggcctcccaggggcaggtgcagggcctctgcgggaacttcaacggcctggaaggtgacgacttcaagacggccagcgggctggtggaggccacgggggccggctttgccaacacctggaaggcacagtcaagctgccatgacaagctggactggttggacgatccctgctccctgaacatcgagagcgccaactacgccgagcactggtgctccctcctgaagaagacagagaccccctttggcaggtgccactcggctgtggaccctgctgagtattacaagaggtgcaaatatgacacgtgtaactgtcagaacaatgaggactgcctgtgcgccgccctgtcctcctacgcgcgcgcctgcaccgccaagggcgtcatgctgtggggctggcgggagcatgtctgcaacaaggatgtgggctcctgccccaactcgcaggtcttcctgtacaacctgaccacctgccagcagacctgccgctccctctccgaggccgacagccactgtctcgagggctttgcgcctgtggacggctgcggctgccctgaccacaccttcctggacgagaagggccgctgcgtacccctggccaagtgctcctgttaccaccgcggtctctacctggaggcgggggatgtggtcgtcaggcaggaagaacgatgtgtgtgccgggatgggcggctgcactgtaggcagatccggctgatcggccagagctgcacggccccaaagatccacatggactgcagcaacctgactgcactggccacctcgaagccccgagccctcagctgccagacgctggccgccggctattaccacacagagtgtgtcagtggctgtgtgtgccccgacgggctgatggatgacggccggggtggctgcgtggtggagaaggaatgcccttgcgtccataacaacgacctgtattcttccggcgccaagatcaaggtggactgcaatacctgcacctgcaagagaggacgctgggtgtgcacccaggctgtgtgccatggcacctgctccatttacgggagtggccactacatcacctttgatgggaagtactacgactttgacggacactgctcctacgtggctgttcaggactactgcggccagaactcctcactgggctcattcagcatcatcaccgagaacgtcccctgtggcactacgggcgtcacctgctccaaggccatcaagatcttcatggggaggacggagctgaagttggaagacaagcaccgtgtggtgatccagcgtgatgagggtcaccacgtggcctacaccacgcgggaggtgggccagtacctggtggtggagtccagcacgggcatcatcgtcatctgggacaagaggaccaccgtgttcatcaagctggctccctcctacaagggcaccgtgtgtggcctgtgtgggaactttgaccaccgctccaacaacgacttcaccacgcgggaccacatggtggtgagcagcgagctggacttcgggaacagctggaaggaggcccccacctgcccagatgtgagcaccaaccccgagccctgcagcctgaacccgcaccgccgctcctgggccgagaagcagtgcagcatcctcaaaagcagcgtgttcagcatctgccacagcaaggtggaccccaagcccttctacgaggcctgtgtgcacgactcgtgctcctgtgacacgggtggggactgtgagtgcttctgctctgccgtggcctcctacgcccaggagtgtaccaaagagggggcctgcgtgttctggaggacgccggacctgtgccccatattctgcgactactacaaccctccgcatgagtgtgagtggcactatgagccatgtgggaaccggagcttcgagacctgcaggaccatcaacggcatccactccaacatctccgtgtcctacctggagggctgctacccccggtgccccaaggacaggcccatctatgaggaggatctgaagaagtgtgtcactgcagacaagtgtggctgctatgtcgaggacacccactacccacctggagcatcggttcccaccgaggagacctgcaagtcctgcgtgtgtaccaactcctcccaagtcgtctgcaggccggaggaaggaaagattcttaaccagacccaggatggcgccttctgctactgggagatctgtggccccaacgggacggtggagaagcacttcaacatctgttccattacgacacgcccgtccaccctgaccaccttcaccaccatcaccctccccaccacccccacctccttcaccactaccaccaccaccaccaccccgacctccagcacagttttatcaacaactccgaagctgtgctgcctctggtctgactggatcaatgaggaccaccccagcagtggcagcgacgacggtgaccgagaaccatttgatggggtctgcggggcccctgaggacatcgagtgcaggtcggtcaaggatccccacctcagcttggagcagcatggccagaaggtgcagtgtgatgtctctgttgggttcatttgcaagaatgaagaccagtttggaaatggaccatttggactgtgttacgactacaagatacgtgtcaattgttgctggcccatggataagtgtatcaccactcccagccctccaactaccactcccagccctccaccaaccacgacgaccacccttccaccaaccaccacccccagccctccaaccaccaccacaaccacccctccaccaaccaccacccccagccctccaataaccaccacgaccacccctctaccaaccaccactcccagccctccaataagcaccacaaccacccctccaccaaccaccactcccagccctccaaccaccactcccagccctccaaccaccactcccagccctccaacaaccaccacaaccacccctccaccaaccaccactcccagccctccaatgactacgcccatcactccaccagccagcactaccacccttccaccaaccaccactcccagccctccaacaaccaccacaaccacccctccaccaaccaccactcccagtcctccaacgactacgcccatcactccaccaaccagcactactacccttccaccaaccaccactcccagccctccaccaaccaccacaaccacccctccaccaaccaccactcccagccctccaacaaccaccactcccagtcctccaacaatcaccacaaccacccctccaccaaccaccactcccagccctccaacaacgaccacaaccacccctccaccaaccaccactcccagccctccaacgactacacccatcactccaccaaccagcactaccacccttccaccaaccaccactcccagccctccaccaaccaccacaaccacccctccaccaaccaccactcccagccctccaacaaccaccactcccagccctccaataaccaccacaaccacccctccaccaaccaccactcccagctctccaataaccaccactcccagccctccaacaaccaccatgaccaccccttcaccaaccaccacccccagctctccaataaccaccacaaccaccccttcctcaactaccactcccagccctccaccaaccaccatgaccaccccttcaccaaccaccactcccagccctccaacaaccaccatgaccacccttccaccaaccaccacttccagccctctaacaactactcctctacctccatcaataactcctcctacattttcaccattctcaacgacaacccctactaccccatgcgtgcctctctgcaattggactggctggctggattctggaaaacccaactttcacaaaccaggtggagacacagaattgattggagacgtctgtggaccaggctgggcagctaacatctcttgcagagccaccatgtatcctgatgttcccattggacagcttggacaaacagtggtgtgtgatgtctctgtggggctgatatgcaaaaatgaagaccaaaagccaggtggggtcatccctatggccttctgcctcaactacgagatcaacgttcagtgctgtgagtgtgtcacccaacccaccaccatgacaaccaccaccacagagaacccaactccgccaaccacgacacccatcaccaccaccactacggtgaccccaaccccaacacccaccggcacacagaccccaaccacgacacccatcaccaccaccactacggtgaccccaaccccaacacccaccggcacacagaccccaaccacgacacccatcaccaccaccactacggtgaccccaaccccaacacccaccggcacacagaccccaaccacgacacccatcaccaccaccactacggtgaccccaaccccaacacccaccggcacacagaccccaaccacgacacccatcaccaccaccactacggtgaccccaaccccaacacccatcaccaccaccactacggtgaccccaaccccaacacccaccggcacacagaccccaaccacgacacccatcaccaccaccactacggtgaccccaaccccaacacccaccggcacacagaccccaaccacgacacccatcaccaccaccactacggtgaccccaaccccaacacccaccggcacacagaccccaaccacgacacccatcaccaccaccactacggtgaccccaaccccaacacccaccggcacacagaccccaaccacgacacccatcaccaccaccactacggtgaccccaaccccaacacccaccggcacacagaccccaaccacgacacccatcaccaccaccactacggtgaccccaaccccaacacccaccggcacacagaccccaaccacgacacccatcaccaccaccactacggtgaccccaaccccaacacccaccggcacacagaccccaaccacgacacccatcaccaccaccactacggtgaccccaaccccaacacccaccggcacacagaccccaaccncgacacccatcaccaccaccactacggtgaccccaaccccaacacccaccggcacacagaccccaaccacgacacccatcaccaccaccacnacggtgaccccaaccccaacacccaccggcacacagaccccaaccacgacacccatcaccaccaccactacggtgaccccaaccccaacacccaccggcacacagaccccaaccacgacacccatcaccaccaccactacggtgaccccaaccccaacacccaccggcacacagaccccaaccatgatacccatcagcaccaccactacggtgaccccaaccccaacacccaccactggaagcacggggccccccacccacacaagcacagcaccgattgctgagttgaccacatccaatcctccgcctgagtcctcaacccctcagacctctcggtccacctcttcccctctcacggagtcaaccacccttctgagtaccctaccacctgccattgagatgaccagcacggccccaccctccacacccacggcacccacgaccacgagcggaggccacacactgtctccaccgcccagcaccaccacgtcccctccaggcacccccactcgcggtaccacgaccgggtcatcttcagcccccacccccagcactgtgcagacgaccaccaccagtgcctggaccccaacgccgaccccactctccacacccagcatcatcaggaccacaggcctgaggccctacccttcctctgtgcttatctgctgtgtcctgaacgacacctactacgcaccaggtgaggaggtgtacaacggcacatacggagacacctgttatttcgtcaactgctcactgagctgtacgttggagttctataactggtcctgcccatccacgccctccccaacacccacgccaacgttgggcctcacggtggcctctccaagctcagctcctgccctccaatggcatctgcaggccccaaatggtctccagtcgtggatatca

SEQ ID NO: 732417 - DNA, 3608 bp, Homo sapiens
caaccagcactaccacccttccaccaaccaccactcccagccctccaccaaccaccacaaccacccctccaccaaccaccactcccagccctccaacaaccaccactcccagccctccaataaccaccacaaccacccctccaccaaccaccactcccagctctccaataaccaccactcccagccctccaacaaccaccatgaccaccccttcaccaaccaccacccccagctctccaataaccaccacaaccaccccttcctcaactaccactcccagccctccaccaaccaccatgaccaccccttcaccaaccaccactcccagccctccaacaaccaccatgaccacccttccaccaaccaccacttccagccctctaacaactactcctctacctccatcaataactcctcctacattttcaccattctcaacgacaacccctactaccccatgcgtgcctctctgcaattggactggctggctggattctggaaaacccaactttcacaaaccaggtggagacacagaattgattggagacgtctgtggaccaggctgggcagctaacatctcttgcagagccaccatgtatcctgatgttcccattggacagcttggacaaacagtggtgtgtgatgtctctgtggggctgatatgcaaaaatgaagaccaaaagccaggtggggtcatccctatggccttctgcctcaactacgagatcaacgttcagtgctgtgcacccccactcgcggtaccacgaccgggtcatcttcagcccccacccccagcactgtgcagacgaccaccaccagtgcctggaccccaacgccgaccccactctccacacccagcatcatcaggaccacaggcctgaggccctacccttcctctgtgcttatctgctgtgtcctgaacgacacctactacgcaccaggtgaggaggtgtacaacggcacatacggagacacctgttatttcgtcaactgctcactgagctgtacgttggagttctataactggtcctgcccatccacgccctccccaacacccacgccctccaagtcgacgcccacgccttccaagccatcgtccacgccctccaagccgacgcccggcaccaagccccccgagtgcccagactttgatcctcccagacaggagaacgagacttggtggctgtgcgactgcttcatggccacgtgcaagtacaacaacacggtggagatcgtgaaggtggagtgtgagccgccgcccatgcccacctgctccaacggcctccaacccgtgcgcgtcgaggaccccgacggctgctgctggcactgggagtgcgactgctactgcacgggctggggcgacccgcactatgtcaccttcgacggactctactacagctaccagggcaactgcacctacgtgctggtggaggagatcagcccctccgtggacaacttcggagtttacatcgacaactaccactgcgatcccaacgacaaggtgtcctgcccccgcaccctcatcgtgcgccacgagacccaggaggtgctgatcaagaccgtgcatatgatgcccatgcaggtgcaggtgcaggtgaacaggcaggcggtggcactgccctacaagaagtacgggctggaggtgtaccagtctggcatcaactacgtggtggacatccccgagctgggtgtcctcgtctcctacaatggcctgtccttctccgtcaggctgccctaccaccggtttggcaacaacaccaagggccagtgtggcacctgcaccaacaccacctccgacgactgcattctgcccagcggggagatcgtctccaactgtgaggctgcggctgaccagtggctggtgaacgacccctccaagccacactgcccccacagcagctccacgaccaagcgcccggccgtcactgtgcccgggggcggtaaaacgaccccacacaaggactgcaccccatctcccctctgccagctcatcaaggacagcctgtttgcccagtgccacgcactggtgcccccgcagcactactacgatgcctgcgtgttcgacagctgcttcatgccgggctcgagcctggagtgcgccagtctgcaggcctacgcagccctctgtgcccagcagaacatctgcctcgactggcggaaccacacgcatggggcctgcttggtggagtgcccatctcacagggagtaccaggcctgtggccctgcagaagagcccacgtgcaaatccagctcctcccagcagaacaacacagtcctggtggaaggctgcttctgtcctgagggcaccatgaactacgctcctggctttgatgtctgcgtgaagacctgcggctgtgtgggacctgacaatgtgcccagagagtttggggagcacttcgagttcgactgcaagaactgtgtctgcctggagggtggaagtggcatcatctgccaacccaagaggtgcagccagaagcccgttacccactgcgtggaagacggcacctacctcgccacggaggtcaaccctgccgacacctgctgcaacattaccgtctgcaagtgcaacaccagcctgtgcaaagagaagccctccgtgtgcccgctgggattcgaagtgaagagcaagatggtgcctggaaggtgctgtcctttctactggtgtgagtccaagggggtgtgtgttcacgggaatgctgagtaccagcccggttctccagtttattcctccaagtgccaggactgcgtgtgcacggacaaggtggacaacaacaccctgctcaacgtcatcgcctgcacccacgtgccctgcaacacctcctgcagccctggcttcgaactcatggaggcccccggggagtgctgtaagaagtgtgaacagacgcactgtatcatcaaacggcccgacaaccagcacgtcatcctgaagcccggggacttcaagagcgacccgaagaacaactgcacattcttcagctgcgtgaagatccacaaccagctcatctcgtccgtctccaacatcacctgccccaactttgatgccagcatttgcatcccgggctccatcacattcatgcccaatggatgctgcaagacctgcacccctcgcaatgagaccagggtgccctgctccaccgtccccgtcaccacggaggtttcgtacgccggctgcaccaagaccgtcctcatgaatcattgctccgggtcctgcgggacatttgtcatgtactcggccaaggcccaggccctggaccacagctgctcctgctgcaaagaggagaaaaccagccagcgtgaggtggtcctgagctgccccaatggcggctcgctgacacacacctacacccacatcgagagctgccagtgccaggacaccgtctgcgggctccccaccggcacctcccgccgggcccggcgctcccctaggcatctggggagcgggtgagcggggtgggcacagcccccttcactgccctcgacagctttacctcccccggaccctctgagcctcctaagctcggcttcctctcttcagatatttattgtctgagtctttgttcagtccttgctttccaataataaactcagggggacatgcaaaaaaaaaa

SEQ ID NO: 732418 - DNA, 3377 bp, Homo sapiens
caaccagcactaccacccttccaccaaccaccactcccagccctccaccaaccaccacaaccacccctccaccaaccaccactcccagccctccaacaaccaccactcccagccctccaataaccaccacaaccacccctccaccaaccaccactcccagctctccaataaccaccactcccagccctccaacaaccaccatgaccaccccttcaccaaccaccacccccagctctccaataaccaccacaaccaccccttcctcaactaccactcccagccctccaccaaccaccatgaccaccccttcaccaaccaccactcccagccctccaacaaccaccatgaccacccttccaccaaccaccacttccagccctctaacaactactcctctacctccatcaataactcctcctacattttcaccattctcaacgacaacccctactaccccatgcgtgcctctctgcaattggactggctggctggattctggaaaacccaactttcacaaaccaggtggagacacagaattgattggagacgtctgtggaccaggctgggcagctaacatctcttgcagagccaccatgtatcctgatgttcccattggacagcttggacaaacagtggtgtgtgatgtctctgtggggctgatatgcaaaaatgaagaccaaaagccaggtggggtcatccctatggccttctgcctcaactacgagatcaacgttcagtgctgtgcacccccactcgcggtaccacgaccgggtcatcttcagcccccacccccagcactgtgcagacgaccaccaccagtgcctggaccccaacgccgaccccactctccacacccagcatcatcaggaccacaggcctgaggccctacccttcctctgtgcttatctgctgtgtcctgaacgacacctactacgcaccaggtgaggaggtgtacaacggcacatacggagacacctgttatttcgtcaactgctcactgagctgtacgttggagttctataactggtcctgcccatccacgccctccccaacacccacgccctccaagtcgacgcccacgccttccaagccatcgtccacgccctccaagccgacgcccggcaccaagccccccgagtgcccagactttgatcctcccagacaggagaacgagacttggtggctgtgcgactgcttcatggccacgtgcaagtacaacaacacggtggagatcgtgaaggtggagtgtgagccgccgcccatgcccacctgctccaacggcctccaacccgtgcgcgtcgaggaccccgacggctgctgctggcactgggagtgcgactgctactgcacgggctggggcgacccgcactatgtcaccttcgacggactctactacagctaccagggcaactgcacctacgtgctggtggaggagatcagcccctccgtggacaacttcggagtttacatcgacaactaccactgcgatcccaacgacaaggtgtcctgcccccgcaccctcatcgtgcgccacgagacccaggaggtgctgatcaagaccgtgcatatgatgcccatgcaggtgcaggtgcaggtgaacaggcaggcggtggcactgccctacaagaagtacgggctggaggtgtaccagtctggcatcaactacgtggtggacatccccgagctgggtgtcctcgtctcctacaatggcctgtccttctccgtcaggctgccctaccaccggtttggcaacaacaccaagggccagtgtggcacctgcaccaacaccacctccgacgactgcattctgcccagcggggagatcgtctccaactgtgaggctgcggctgaccagtggctggtgaacgacccctccaagccacactgcccccacagcagctccacgaccaagcgcccggccgtcactgtgcccgggggcggtaaaacgaccccacacaaggactgcaccccatctcccctctgccagctcatcaaggacagcctgtttgcccagtgccacgcactggtgcccccgcagcactactacgatgcctgcgtgttcgacagctgcttcatgccgggctcgagcctggagtgcgccagtctgcaggcctacgcagccctctgtgcccagcagaacatctgcctcgactggcggaaccacacgcatggggcctgcttggtggagtgcccatctcacagggagtaccaggcctgtggccctgcagaagagcccacgtgcaaatccagctcctcccagcagaacaacacagtcctggtggaaggctgcttctgtcctgagggcaccatgaactacgctcctggctttgatgtctgcgtgaagacctgcggctgtgtgggacctgacaatgtgcccagagagtttggggagcacttcgagttcgactgcaagaactgtgtctgcctggagggtggaagtggcatcatctgccaacccaagaggtgcagccagaagcccgttacccactgcgtggaagacggcacctacctcgccacggaggtcaaccctgccgacacctgctgcaacattaccgtctgcaagtgcaacaccagcctgtgcaaagagaagccctccgtgtgcccgctgggattcgaagtgaagagcaagatggtgcctggaaggtgctgtcctttctactggtgtgagtccaagggggtgtgtgttcacgggaatgctgagtaccagcccggttctccagtttattcctccaagtgccaggactgcgtgtgcacggacaaggtggacaacaacaccctgctcaacgtcatcgcctgcacccacgtgccctgcaacacctcctgcagccctggcttcgaactcatggaggcccccggggagtgctgtaagaagtgtgaacagacgcactgtatcatcaaacggcccgacaaccagcacgtcatcctgaagcccggggacttcaagagcgacccgaagaacaactgcacattcttcagctgcgggacatttgtcatgtactcggccaaggcccaggccctggaccacagctgctcctgctgcaaagaggagaaaaccagccagcgtgaggtggtcctgagctgccccaatggcggctcgctgacacacacctacacccacatcgagagctgccagtgccaggacaccgtctgcgggctccccaccggcacctcccgccgggcccggcgctcccctaggcatctggggagcgggtgagcggggtgggcacagcccccttcactgccctcgacagctttacctcccccggaccctctgagcctcctaagctcggcttcctctcttcagatatttattgtctgagtctttgttcagtccttgctttccaataataaactcagggggacatgcaaaaaaaaaa

SEQ ID NO: 732419 - DNA, 3191 bp, Homo sapiens
caaccagcactaccacccttccaccaaccaccactcccagccctccaccaaccaccacaaccacccctccaccaaccaccactcccagccctccaacaaccaccactcccagccctccaataaccaccacaaccacccctccaccaaccaccactcccagctctccaataaccaccactcccagccctccaacaaccaccatgaccaccccttcaccaaccaccacccccagctctccaataaccaccacaaccaccccttcctcaactaccactcccagccctccaccaaccaccatgaccaccccttcaccaaccaccactcccagccctccaacaaccaccatgaccacccttccaccaaccaccacttccagccctctaacaactactcctctacctccatcaataactcctcctacattttcaccattctcaacgacaacccctactaccccatgcgtgcctctctgcaattggactggctggctggattctggaaaacccaactttcacaaaccaggtggagacacagaattgattggagacgtctgtggaccaggctgggcagctaacatctcttgcagagccaccatgtatcctgatgttcccattggacagcttggacaaacagtggtgtgtgatgtctctgtggggctgatatgcaaaaatgaagaccaaaagccaggtggggtcatccctatggccttctgcctcaactacgagatcaacgttcagtgctgtgcacccccactcgcggtaccacgaccgggtcatcttcagcccccacccccagcactgtgcagacgaccaccaccagtgcctggaccccaacgccgaccccactctccacacccagcatcatcaggaccacaggcctgaggccctacccttcctctgtgcttatctgctgtgtcctgaacgacacctactacgcaccaggtgaggaggtgtacaacggcacatacggagacacctgttatttcgtcaactgctcactgagctgtacgttggagttctataactggtcctgcccatccacgccctccccaacacccacgccctccaagtcgacgcccacgccttccaagccatcgtccacgccctccaagccgacgcccggcaccaagccccccgagtgcccagactttgatcctcccagacaggagaacgagacttggtggctgtgcgactgcttcatggccacgtgcaagtacaacaacacggtggagatcgtgaaggtggagtgtgagccgccgcccatgcccacctgctccaacggcctccaacccgtgcgcgtcgaggaccccgacggctgctgctggcactgggagtgcgactgctactgcacgggctggggcgacccgcactatgtcaccttcgacggactctactacagctaccagggcaactgcacctacgtgctggtggaggagatcagcccctccgtggacaacttcggagtttacatcgacaactaccactgcgatcccaacgacaaggtgtcctgcccccgcaccctcatcgtgcgccacgagacccaggaggtgctgatcaagaccgtgcatatgatgcccatgcaggtgcaggtgcaggtgaacaggcaggcggtggcactgccctacaagaagtacgggctggaggtgtaccagtctggcatcaactacgtggtggacatccccgagctgggtgtcctcgtctcctacaatggcctgtccttctccgtcaggctgccctaccaccggtttggcaacaacaccaagggccagtgtggcacctgcaccaacaccacctccgacgactgcattctgcccagcggggagatcgtctccaactgtgaggctgcggctgaccagtggctggtgaacgacccctccaagccacactgcccccacagcagctccacgaccaagcgcccggccgtcactgtgcccgggggcggtaaaacgaccccacacaaggactgcaccccatctcccctctgccagctcatcaaggacagcctgtttgcccagtgccacgcactggtgcccccgcagcactactacgatgcctgcgtgttcgacagctgcttcatgccgggctcgagcctggagtgcgccagtctgcaggcctacgcagccctctgtgcccagcagaacatctgcctcgactggcggaaccacacgcatggggcctgcttggtggagtgcccatctcacagggagtaccaggcctgtggccctgcagaagagcccacgtgcaaatccagctcctcccagcagaacaacacagtcctggtggaaggctgcttctgtcctgagggcaccatgaactacgctcctggctttgatgtctgcgtgaagacctgcggctgtgtgggacctgacaatgtgcccagagagtttggggagcacttcgagttcgactgcaagaactgtgtctgcctggagggtggaagtggcatcatctgccaacccaagaggtgcagccagaagcccgttacccactgcgtggaagacggcacctacctcgccacggaggtcaaccctgccgacacctgctgcaacattaccgtctgcaagtgcaacaccagcctgtgcaaagagaagccctccgtgtgcccgctgggattcgaagtgaagagcaagatggtgcctggaaggtgctgtcctttctactggtgtgagtccaagggggtgtgtgttcacgggaatgctgagtaccagcccggttctccagtttattcctccaagtgccaggactgcgtgtgcacggacaaggtggacaacaacaccctgctcaacgtcatcgcctgcacccacgtgccctgcaacacctcctgcagccctggcttcgaactcatggaggcccccggggagtgctgtaagaagtgtgaacagacgcactgtatcatcaaacggcccgacaaccagcacgtcatcctgaagcccggggacttcaagagcgacccgaagaacaactgcacattcttcagctgcgtgaagatccacaaccagctcatctcgtccgtctccaacatcacctgccccaactttgatgccagcatttgcatcccgggctccatcacattcatgcccaatggatgctgcaagacctgcacccctcgcaatgagaccaggtgcctgctctacaagtccccgtcacccgagagtttgttcccgttgcaccacggccctgtaatgcgtatta

SEQ ID NO: 732420 - DNA, 3370 bp, Homo sapiens
acgcatcacctaaatctattgctgttctatgatttcccccttatgtcactcatcaccacaatgacacccccttacaatcaccactcccagccctccaacaaccaccatgaccacccttccaccaaccaccacttccagccctctaacaactactcctctacctccatcaataactcctcctacattttcaccattctcaacgacaacccctactaccccatgcgtgcctctctgcaattggactggctggctggattctggaaaacccaactttcacaaaccaggtggagacacagaattgattggagacgtctgtggaccaggctgggcagctaacatctcttgcagagccaccatgtatcctgatgttcccattggacagcttggacaaacagtggtgtgtgatgtctctgtggggctgatatgcaaaaatgaagaccaaaagccaggtggggtcatccctatggccttctgcctcaactacgagatcaacgttcagtgctgtgcacccccactcgcggtaccacgaccgggtcatcttcagcccccacccccagcactgtgcagacgaccaccaccagtgcctggaccccaacgccgaccccactctccacacccagcatcatcaggaccacaggcctgaggccctacccttcctctgtgcttatctgctgtgtcctgaacgacacctactacgcaccaggtgaggaggtgtacaacggcacatacggagacacctgttatttcgtcaactgctcactgagctgtacgttggagttctataactggtcctgcccatccacgccctccccaacacccacgccctccaagtcgacgcccacgccttccaagccatcgtccacgccctccaagccgacgcccggcaccaagccccccgagtgcccagactttgatcctcccagacaggagaacgagacttggtggctgtgcgactgcttcatggccacgtgcaagtacaacaacacggtggagatcgtgaaggtggagtgtgagccgccgcccatgcccacctgctccaacggcctccaacccgtgcgcgtcgaggaccccgacggctgctgctggcactgggagtgcgactgctactgcacgggctggggcgacccgcactatgtcaccttcgacggactctactacagctaccagggcaactgcacctacgtgctggtggaggagatcagcccctccgtggacaacttcggagtttacatcgacaactaccactgcgatcccaacgacaaggtgtcctgcccccgcaccctcatcgtgcgccacgagacccaggaggtgctgatcaagaccgtgcatatgatgcccatgcaggtgcaggtgcaggtgaacaggcaggcggtggcactgccctacaagaagtacgggctggaggtgtaccagtctggcatcaactacgtggtggacatccccgagctgggtgtcctcgtctcctacaatggcctgtccttctccgtcaggctgccctaccaccggtttggcaacaacaccaagggccagtgtggcacctgcaccaacaccacctccgacgactgcattctgcccagcggggagatcgtctccaactgtgaggctgcggctgaccagtggctggtgaacgacccctccaagccacactgcccccacagcagctccacgaccaagcgcccggccgtcactgtgcccgggggcggtaaaacgaccccacacaaggactgcaccccatctcccctctgccagctcatcaaggacagcctgtttgcccagtgccacgcactggtgcccccgcagcactactacgatgcctgcgtgttcgacagctgcttcatgccgggctcgagcctggagtgcgccagtctgcaggcctacgcagccctctgtgcccagcagaacatctgcctcgactggcggaaccacacgcatggggcctgcttggtggagtgcccatctcacagggagtaccaggcctgtggccctgcagaagagcccacgtgcaaatccagctcctcccagcagaacaacacagtcctggtggaaggctgcttctgtcctgagggcaccatgaactacgctcctggctttgatgtctgcgtgaagacctgcggctgtgtgggacctgacaatgtgcccagagagtttggggagcacttcgagttcgactgcaagaactgtgtctgcctggagggtggaagtggcatcatctgccaacccaagaggtgcagccagaagcccgttacccactgcgtggaagacggcacctacctcgccacggaggtcaaccctgccgacacctgctgcaacattaccgtctgcaagtgcaacaccagcctgtgcaaagagaagccctccgtgtgcccgctgggattcgaagtgaagagcaagatggtgcctggaaggtgctgtcctttctactggtgtgagtccaagggggtgtgtgttcacgggaatgctgagtaccagcccggttctccagtttattcctccaagtgccaggactgcgtgtgcacggacaaggtggacaacaacaccctgctcaacgtcatcgcctgcacccacgtgccctgcaacacctcctgcagccctggcttcgaactcatggaggcccccggggagtgctgtaagaagtgtgaacagacgcactgtatcatcaaacggcccgacaaccagcacgtcatcctgaagcccggggacttcaagagcgacccgaagaacaactgcacattcttcagctgcgtgaagatccacaaccagctcatctcgtccgtctccaacatcacctgccccaactttgatgccagcatttgcatcccgggctccatcacattcatgcccaatggatgctgcaagacctgcacccctcgcaatgagaccagggtgccctgctccaccgtccccgtcaccacggaggtttcgtacgccggctgcaccaagaccgtcctcatgaatcattgctccgggtcctgcgggacatttgtcatgtactcggccaaggcccaggccctggaccacagctgctcctgctgcaaagaggagaaaaccagccagcgtgaggtggtcctgagctgccccaatggcggctcgctgacacacacctacacccacatcgagagctgccagtgccaggacaccgtctgcgggctccccaccggcacctcccgccgggcccggcgctcccctaggcatctggggagcgggtgagcggggtgggcacagcccccttcactgccctcgacagctttacctcccccggaccctctgagcctcctaagctcggcttcctctcttcagatatttattgtctgagtctttgttcagtccttgctttccaataataaactcagggggacatgcaaaaaaaaaa

SEQ ID NO: 732421 - DNA, 3139 bp, Homo sapiens
acgcatcacctaaatctattgctgttctatgatttcccccttatgtcactcatcaccacaatgacacccccttacaatcaccactcccagccctccaacaaccaccatgaccacccttccaccaaccaccacttccagccctctaacaactactcctctacctccatcaataactcctcctacattttcaccattctcaacgacaacccctactaccccatgcgtgcctctctgcaattggactggctggctggattctggaaaacccaactttcacaaaccaggtggagacacagaattgattggagacgtctgtggaccaggctgggcagctaacatctcttgcagagccaccatgtatcctgatgttcccattggacagcttggacaaacagtggtgtgtgatgtctctgtggggctgatatgcaaaaatgaagaccaaaagccaggtggggtcatccctatggccttctgcctcaactacgagatcaacgttcagtgctgtgcacccccactcgcggtaccacgaccgggtcatcttcagcccccacccccagcactgtgcagacgaccaccaccagtgcctggaccccaacgccgaccccactctccacacccagcatcatcaggaccacaggcctgaggccctacccttcctctgtgcttatctgctgtgtcctgaacgacacctactacgcaccaggtgaggaggtgtacaacggcacatacggagacacctgttatttcgtcaactgctcactgagctgtacgttggagttctataactggtcctgcccatccacgccctccccaacacccacgccctccaagtcgacgcccacgccttccaagccatcgtccacgccctccaagccgacgcccggcaccaagccccccgagtgcccagactttgatcctcccagacaggagaacgagacttggtggctgtgcgactgcttcatggccacgtgcaagtacaacaacacggtggagatcgtgaaggtggagtgtgagccgccgcccatgcccacctgctccaacggcctccaacccgtgcgcgtcgaggaccccgacggctgctgctggcactgggagtgcgactgctactgcacgggctggggcgacccgcactatgtcaccttcgacggactctactacagctaccagggcaactgcacctacgtgctggtggaggagatcagcccctccgtggacaacttcggagtttacatcgacaactaccactgcgatcccaacgacaaggtgtcctgcccccgcaccctcatcgtgcgccacgagacccaggaggtgctgatcaagaccgtgcatatgatgcccatgcaggtgcaggtgcaggtgaacaggcaggcggtggcactgccctacaagaagtacgggctggaggtgtaccagtctggcatcaactacgtggtggacatccccgagctgggtgtcctcgtctcctacaatggcctgtccttctccgtcaggctgccctaccaccggtttggcaacaacaccaagggccagtgtggcacctgcaccaacaccacctccgacgactgcattctgcccagcggggagatcgtctccaactgtgaggctgcggctgaccagtggctggtgaacgacccctccaagccacactgcccccacagcagctccacgaccaagcgcccggccgtcactgtgcccgggggcggtaaaacgaccccacacaaggactgcaccccatctcccctctgccagctcatcaaggacagcctgtttgcccagtgccacgcactggtgcccccgcagcactactacgatgcctgcgtgttcgacagctgcttcatgccgggctcgagcctggagtgcgccagtctgcaggcctacgcagccctctgtgcccagcagaacatctgcctcgactggcggaaccacacgcatggggcctgcttggtggagtgcccatctcacagggagtaccaggcctgtggccctgcagaagagcccacgtgcaaatccagctcctcccagcagaacaacacagtcctggtggaaggctgcttctgtcctgagggcaccatgaactacgctcctggctttgatgtctgcgtgaagacctgcggctgtgtgggacctgacaatgtgcccagagagtttggggagcacttcgagttcgactgcaagaactgtgtctgcctggagggtggaagtggcatcatctgccaacccaagaggtgcagccagaagcccgttacccactgcgtggaagacggcacctacctcgccacggaggtcaaccctgccgacacctgctgcaacattaccgtctgcaagtgcaacaccagcctgtgcaaagagaagccctccgtgtgcccgctgggattcgaagtgaagagcaagatggtgcctggaaggtgctgtcctttctactggtgtgagtccaagggggtgtgtgttcacgggaatgctgagtaccagcccggttctccagtttattcctccaagtgccaggactgcgtgtgcacggacaaggtggacaacaacaccctgctcaacgtcatcgcctgcacccacgtgccctgcaacacctcctgcagccctggcttcgaactcatggaggcccccggggagtgctgtaagaagtgtgaacagacgcactgtatcatcaaacggcccgacaaccagcacgtcatcctgaagcccggggacttcaagagcgacccgaagaacaactgcacattcttcagctgcgggacatttgtcatgtactcggccaaggcccaggccctggaccacagctgctcctgctgcaaagaggagaaaaccagccagcgtgaggtggtcctgagctgccccaatggcggctcgctgacacacacctacacccacatcgagagctgccagtgccaggacaccgtctgcgggctccccaccggcacctcccgccgggcccggcgctcccctaggcatctggggagcgggtgagcggggtgggcacagcccccttcactgccctcgacagctttacctcccccggaccctctgagcctcctaagctcggcttcctctcttcagatatttattgtctgagtctttgttcagtccttgctttccaataataaactcagggggacatgcaaaaaaaaaa

SEQ ID NO: 732422 - DNA, 2953 bp, Homo sapiens
acgcatcacctaaatctattgctgttctatgatttcccccttatgtcactcatcaccacaatgacacccccttacaatcaccactcccagccctccaacaaccaccatgaccacccttccaccaaccaccacttccagccctctaacaactactcctctacctccatcaataactcctcctacattttcaccattctcaacgacaacccctactaccccatgcgtgcctctctgcaattggactggctggctggattctggaaaacccaactttcacaaaccaggtggagacacagaattgattggagacgtctgtggaccaggctgggcagctaacatctcttgcagagccaccatgtatcctgatgttcccattggacagcttggacaaacagtggtgtgtgatgtctctgtggggctgatatgcaaaaatgaagaccaaaagccaggtggggtcatccctatggccttctgcctcaactacgagatcaacgttcagtgctgtgcacccccactcgcggtaccacgaccgggtcatcttcagcccccacccccagcactgtgcagacgaccaccaccagtgcctggaccccaacgccgaccccactctccacacccagcatcatcaggaccacaggcctgaggccctacccttcctctgtgcttatctgctgtgtcctgaacgacacctactacgcaccaggtgaggaggtgtacaacggcacatacggagacacctgttatttcgtcaactgctcactgagctgtacgttggagttctataactggtcctgcccatccacgccctccccaacacccacgccctccaagtcgacgcccacgccttccaagccatcgtccacgccctccaagccgacgcccggcaccaagccccccgagtgcccagactttgatcctcccagacaggagaacgagacttggtggctgtgcgactgcttcatggccacgtgcaagtacaacaacacggtggagatcgtgaaggtggagtgtgagccgccgcccatgcccacctgctccaacggcctccaacccgtgcgcgtcgaggaccccgacggctgctgctggcactgggagtgcgactgctactgcacgggctggggcgacccgcactatgtcaccttcgacggactctactacagctaccagggcaactgcacctacgtgctggtggaggagatcagcccctccgtggacaacttcggagtttacatcgacaactaccactgcgatcccaacgacaaggtgtcctgcccccgcaccctcatcgtgcgccacgagacccaggaggtgctgatcaagaccgtgcatatgatgcccatgcaggtgcaggtgcaggtgaacaggcaggcggtggcactgccctacaagaagtacgggctggaggtgtaccagtctggcatcaactacgtggtggacatccccgagctgggtgtcctcgtctcctacaatggcctgtccttctccgtcaggctgccctaccaccggtttggcaacaacaccaagggccagtgtggcacctgcaccaacaccacctccgacgactgcattctgcccagcggggagatcgtctccaactgtgaggctgcggctgaccagtggctggtgaacgacccctccaagccacactgcccccacagcagctccacgaccaagcgcccggccgtcactgtgcccgggggcggtaaaacgaccccacacaaggactgcaccccatctcccctctgccagctcatcaaggacagcctgtttgcccagtgccacgcactggtgcccccgcagcactactacgatgcctgcgtgttcgacagctgcttcatgccgggctcgagcctggagtgcgccagtctgcaggcctacgcagccctctgtgcccagcagaacatctgcctcgactggcggaaccacacgcatggggcctgcttggtggagtgcccatctcacagggagtaccaggcctgtggccctgcagaagagcccacgtgcaaatccagctcctcccagcagaacaacacagtcctggtggaaggctgcttctgtcctgagggcaccatgaactacgctcctggctttgatgtctgcgtgaagacctgcggctgtgtgggacctgacaatgtgcccagagagtttggggagcacttcgagttcgactgcaagaactgtgtctgcctggagggtggaagtggcatcatctgccaacccaagaggtgcagccagaagcccgttacccactgcgtggaagacggcacctacctcgccacggaggtcaaccctgccgacacctgctgcaacattaccgtctgcaagtgcaacaccagcctgtgcaaagagaagccctccgtgtgcccgctgggattcgaagtgaagagcaagatggtgcctggaaggtgctgtcctttctactggtgtgagtccaagggggtgtgtgttcacgggaatgctgagtaccagcccggttctccagtttattcctccaagtgccaggactgcgtgtgcacggacaaggtggacaacaacaccctgctcaacgtcatcgcctgcacccacgtgccctgcaacacctcctgcagccctggcttcgaactcatggaggcccccggggagtgctgtaagaagtgtgaacagacgcactgtatcatcaaacggcccgacaaccagcacgtcatcctgaagcccggggacttcaagagcgacccgaagaacaactgcacattcttcagctgcgtgaagatccacaaccagctcatctcgtccgtctccaacatcacctgccccaactttgatgccagcatttgcatcccgggctccatcacattcatgcccaatggatgctgcaagacctgcacccctcgcaatgagaccaggtgcctgctctacaagtccccgtcacccgagagtttgttcccgttgcaccacggccctgtaatgcgtatta

SEQ ID NO: 732423 - DNA, 4892 bp, Homo sapiens; identical to SEQ ID NO: 488739
  misc_feature (1436)..(1436): n is a, c, g, or t
  misc_feature (1528)..(1528): n is a, c, g, or t

SEQ ID NO: 732424 - DNA, 4661 bp, Homo sapiens
  misc_feature (1436)..(1436): n is a, c, g, or t
  misc_feature (1528)..(1528): n is a, c, g, or t
acgcatcacctaaatctattgctgttctatgatttcccccttatgtcactcatcaccacaatgacacccccttacaatcaccactcccagccctccaacaaccaccatgaccacccttccaccaaccaccacttccagccctctaacaactactcctctacctccatcaataactcctcctacattttcaccattctcaacgacaacccctactaccccatgcgtgcctctctgcaattggactggctggctggattctggaaaacccaactttcacaaaccaggtggagacacagaattgattggagacgtctgtggaccaggctgggcagctaacatctcttgcagagccaccatgtatcctgatgttcccattggacagcttggacaaacagtggtgtgtgatgtctctgtggggctgatatgcaaaaatgaagaccaaaagccaggtggggtcatccctatggccttctgcctcaactacgagatcaacgttcagtgctgtgagtgtgtcacccaacccaccaccatgacaaccaccaccacagagaacccaactccgccaaccacgacacccatcaccaccaccactacggtgaccccaaccccaacacccaccggcacacagaccccaaccacgacacccatcaccaccaccactacggtgaccccaaccccaacacccaccggcacacagaccccaaccacgacacccatcaccaccaccactacggtgaccccaaccccaacacccaccggcacacagaccccaaccacgacacccatcaccaccaccactacggtgaccccaaccccaacacccaccggcacacagaccccaaccacgacacccatcaccaccaccactacggtgaccccaaccccaacacccatcaccaccaccactacggtgaccccaaccccaacacccaccggcacacagaccccaaccacgacacccatcaccaccaccactacggtgaccccaaccccaacacccaccggcacacagaccccaaccacgacacccatcaccaccaccactacggtgaccccaaccccaacacccaccggcacacagaccccaaccacgacacccatcaccaccaccactacggtgaccccaaccccaacacccaccggcacacagaccccaaccacgacacccatcaccaccaccactacggtgaccccaaccccaacacccaccggcacacagaccccaaccacgacacccatcaccaccaccactacggtgaccccaaccccaacacccaccggcacacagaccccaaccacgacacccatcaccaccaccactacggtgaccccaaccccaacacccaccggcacacagaccccaaccacgacacccatcaccaccaccactacggtgaccccaaccccaacacccaccggcacacagaccccaaccncgacacccatcaccaccaccactacggtgaccccaaccccaacacccaccggcacacagaccccaaccacgacacccatcaccaccaccacnacggtgaccccaaccccaacacccaccggcacacagaccccaaccacgacacccatcaccaccaccactacggtgaccccaaccccaacacccaccggcacacagaccccaaccacgacacccatcaccaccaccactacggtgaccccaaccccaacacccaccggcacacagaccccaaccatgatacccatcagcaccaccactacggtgaccccaaccccaacacccaccactggaagcacggggccccccacccacacaagcacagcaccgattgctgagttgaccacatccaatcctccgcctgagtcctcaacccctcagacctctcggtccacctcttcccctctcacggagtcaaccacccttctgagtaccctaccacctgccattgagatgaccagcacggccccaccctccacacccacggcacccacgaccacgagcggaggccacacactgtctccaccgcccagcaccaccacgtcccctccaggcacccccactcgcggtaccacgaccgggtcatcttcagcccccacccccagcactgtgcagacgaccaccaccagtgcctggaccccaacgccgaccccactctccacacccagcatcatcaggaccacaggcctgaggccctacccttcctctgtgcttatctgctgtgtcctgaacgacacctactacgcaccaggtgaggaggtgtacaacggcacatacggagacacctgttatttcgtcaactgctcactgagctgtacgttggagttctataactggtcctgcccatccacgccctccccaacacccacgccctccaagtcgacgcccacgccttccaagccatcgtccacgccctccaagccgacgcccggcaccaagccccccgagtgcccagactttgatcctcccagacaggagaacgagacttggtggctgtgcgactgcttcatggccacgtgcaagtacaacaacacggtggagatcgtgaaggtggagtgtgagccgccgcccatgcccacctgctccaacggcctccaacccgtgcgcgtcgaggaccccgacggctgctgctggcactgggagtgcgactgctactgcacgggctggggcgacccgcactatgtcaccttcgacggactctactacagctaccagggcaactgcacctacgtgctggtggaggagatcagcccctccgtggacaacttcggagtttacatcgacaactaccactgcgatcccaacgacaaggtgtcctgcccccgcaccctcatcgtgcgccacgagacccaggaggtgctgatcaagaccgtgcatatgatgcccatgcaggtgcaggtgcaggtgaacaggcaggcggtggcactgccctacaagaagtacgggctggaggtgtaccagtctggcatcaactacgtggtggacatccccgagctgggtgtcctcgtctcctacaatggcctgtccttctccgtcaggctgccctaccaccggtttggcaacaacaccaagggccagtgtggcacctgcaccaacaccacctccgacgactgcattctgcccagcggggagatcgtctccaactgtgaggctgcggctgaccagtggctggtgaacgacccctccaagccacactgcccccacagcagctccacgaccaagcgcccggccgtcactgtgcccgggggcggtaaaacgaccccacacaaggactgcaccccatctcccctctgccagctcatcaaggacagcctgtttgcccagtgccacgcactggtgcccccgcagcactactacgatgcctgcgtgttcgacagctgcttcatgccgggctcgagcctggagtgcgccagtctgcaggcctacgcagccctctgtgcccagcagaacatctgcctcgactggcggaaccacacgcatggggcctgcttggtggagtgcccatctcacagggagtaccaggcctgtggccctgcagaagagcccacgtgcaaatccagctcctcccagcagaacaacacagtcctggtggaaggctgcttctgtcctgagggcaccatgaactacgctcctggctttgatgtctgcgtgaagacctgcggctgtgtgggacctgacaatgtgcccagagagtttggggagcacttcgagttcgactgcaagaactgtgtctgcctggagggtggaagtggcatcatctgccaacccaagaggtgcagccagaagcccgttacccactgcgtggaagacggcacctacctcgccacggaggtcaaccctgccgacacctgctgcaacattaccgtctgcaagtgcaacaccagcctgtgcaaagagaagccctccgtgtgcccgctgggattcgaagtgaagagcaagatggtgcctggaaggtgctgtcctttctactggtgtgagtccaagggggtgtgtgttcacgggaatgctgagtaccagcccggttctccagtttattcctccaagtgccaggactgcgtgtgcacggacaaggtggacaacaacaccctgctcaacgtcatcgcctgcacccacgtgccctgcaacacctcctgcagccctggcttcgaactcatggaggcccccggggagtgctgtaagaagtgtgaacagacgcactgtatcatcaaacggcccgacaaccagcacgtcatcctgaagcccggggacttcaagagcgacccgaagaacaactgcacattcttcagctgcgggacatttgtcatgtactcggccaaggcccaggccctggaccacagctgctcctgctgcaaagaggagaaaaccagccagcgtgaggtggtcctgagctgccccaatggcggctcgctgacacacacctacacccacatcgagagctgccagtgccaggacaccgtctgcgggctccccaccggcacctcccgccgggcccggcgctcccctaggcatctggggagcgggtgagcggggtgggcacagcccccttcactgccctcgacagctttacctcccccggaccctctgagcctcctaagctcggcttcctctcttcagatatttattgtctgagtctttgttcagtccttgctttccaataataaactcagggggacatgcaaaaaaaaaa

SEQ ID NO: 732425 - DNA, 4475 bp, Homo sapiens
  misc_feature (1436)..(1436): n is a, c, g, or t
  misc_feature (1528)..(1528): n is a, c, g, or t
acgcatcacctaaatctattgctgttctatgatttcccccttatgtcactcatcaccacaatgacacccccttacaatcaccactcccagccctccaacaaccaccatgaccacccttccaccaaccaccacttccagccctctaacaactactcctctacctccatcaataactcctcctacattttcaccattctcaacgacaacccctactaccccatgcgtgcctctctgcaattggactggctggctggattctggaaaacccaactttcacaaaccaggtggagacacagaattgattggagacgtctgtggaccaggctgggcagctaacatctcttgcagagccaccatgtatcctgatgttcccattggacagcttggacaaacagtggtgtgtgatgtctctgtggggctgatatgcaaaaatgaagaccaaaagccaggtggggtcatccctatggccttctgcctcaactacgagatcaacgttcagtgctgtgagtgtgtcacccaacccaccaccatgacaaccaccaccacagagaacccaactccgccaaccacgacacccatcaccaccaccactacggtgaccccaaccccaacacccaccggcacacagaccccaaccacgacacccatcaccaccaccactacggtgaccccaaccccaacacccaccggcacacagaccccaaccacgacacccatcaccaccaccactacggtgaccccaaccccaacacccaccggcacacagaccccaaccacgacacccatcaccaccaccactacggtgaccccaaccccaacacccaccggcacacagaccccaaccacgacacccatcaccaccaccactacggtgaccccaaccccaacacccatcaccaccaccactacggtgaccccaaccccaacacccaccggcacacagaccccaaccacgacacccatcaccaccaccactacggtgaccccaaccccaacacccaccggcacacagaccccaaccacgacacccatcaccaccaccactacggtgaccccaaccccaacacccaccggcacacagaccccaaccacgacacccatcaccaccaccactacggtgaccccaaccccaacacccaccggcacacagaccccaaccacgacacccatcaccaccaccactacggtgaccccaaccccaacacccaccggcacacagaccccaaccacgacacccatcaccaccaccactacggtgaccccaaccccaacacccaccggcacacagaccccaaccacgacacccatcaccaccaccactacggtgaccccaaccccaacacccaccggcacacagaccccaaccacgacacccatcaccaccaccactacggtgaccccaaccccaacacccaccggcacacagaccccaaccncgacacccatcaccaccaccactacggtgaccccaaccccaacacccaccggcacacagaccccaaccacgacacccatcaccaccaccacnacggtgaccccaaccccaacacccaccggcacacagaccccaaccacgacacccatcaccaccaccactacggtgaccccaaccccaacacccaccggcacacagaccccaaccacgacacccatcaccaccaccactacggtgaccccaaccccaacacccaccggcacacagaccccaaccatgatacccatcagcaccaccactacggtgaccccaaccccaacacccaccactggaagcacggggccccccacccacacaagcacagcaccgattgctgagttgaccacatccaatcctccgcctgagtcctcaacccctcagacctctcggtccacctcttcccctctcacggagtcaaccacccttctgagtaccctaccacctgccattgagatgaccagcacggccccaccctccacacccacggcacccacgaccacgagcggaggccacacactgtctccaccgcccagcaccaccacgtcccctccaggcacccccactcgcggtaccacgaccgggtcatcttcagcccccacccccagcactgtgcagacgaccaccaccagtgcctggaccccaacgccgaccccactctccacacccagcatcatcaggaccacaggcctgaggccctacccttcctctgtgcttatctgctgtgtcctgaacgacacctactacgcaccaggtgaggaggtgtacaacggcacatacggagacacctgttatttcgtcaactgctcactgagctgtacgttggagttctataactggtcctgcccatccacgccctccccaacacccacgccctccaagtcgacgcccacgccttccaagccatcgtccacgccctccaagccgacgcccggcaccaagccccccgagtgcccagactttgatcctcccagacaggagaacgagacttggtggctgtgcgactgcttcatggccacgtgcaagtacaacaacacggtggagatcgtgaaggtggagtgtgagccgccgcccatgcccacctgctccaacggcctccaacccgtgcgcgtcgaggaccccgacggctgctgctggcactgggagtgcgactgctactgcacgggctggggcgacccgcactatgtcaccttcgacggactctactacagctaccagggcaactgcacctacgtgctggtggaggagatcagcccctccgtggacaacttcggagtttacatcgacaactaccactgcgatcccaacgacaaggtgtcctgcccccgcaccctcatcgtgcgccacgagacccaggaggtgctgatcaagaccgtgcatatgatgcccatgcaggtgcaggtgcaggtgaacaggcaggcggtggcactgccctacaagaagtacgggctggaggtgtaccagtctggcatcaactacgtggtggacatccccgagctgggtgtcctcgtctcctacaatggcctgtccttctccgtcaggctgccctaccaccggtttggcaacaacaccaagggccagtgtggcacctgcaccaacaccacctccgacgactgcattctgcccagcggggagatcgtctccaactgtgaggctgcggctgaccagtggctggtgaacgacccctccaagccacactgcccccacagcagctccacgaccaagcgcccggccgtcactgtgcccgggggcggtaaaacgaccccacacaaggactgcaccccatctcccctctgccagctcatcaaggacagcctgtttgcccagtgccacgcactggtgcccccgcagcactactacgatgcctgcgtgttcgacagctgcttcatgccgggctcgagcctggagtgcgccagtctgcaggcctacgcagccctctgtgcccagcagaacatctgcctcgactggcggaaccacacgcatggggcctgcttggtggagtgcccatctcacagggagtaccaggcctgtggccctgcagaagagcccacgtgcaaatccagctcctcccagcagaacaacacagtcctggtggaaggctgcttctgtcctgagggcaccatgaactacgctcctggctttgatgtctgcgtgaagacctgcggctgtgtgggacctgacaatgtgcccagagagtttggggagcacttcgagttcgactgcaagaactgtgtctgcctggagggtggaagtggcatcatctgccaacccaagaggtgcagccagaagcccgttacccactgcgtggaagacggcacctacctcgccacggaggtcaaccctgccgacacctgctgcaacattaccgtctgcaagtgcaacaccagcctgtgcaaagagaagccctccgtgtgcccgctgggattcgaagtgaagagcaagatggtgcctggaaggtgctgtcctttctactggtgtgagtccaagggggtgtgtgttcacgggaatgctgagtaccagcccggttctccagtttattcctccaagtgccaggactgcgtgtgcacggacaaggtggacaacaacaccctgctcaacgtcatcgcctgcacccacgtgccctgcaacacctcctgcagccctggcttcgaactcatggaggcccccggggagtgctgtaagaagtgtgaacagacgcactgtatcatcaaacggcccgacaaccagcacgtcatcctgaagcccggggacttcaagagcgacccgaagaacaactgcacattcttcagctgcgtgaagatccacaaccagctcatctcgtccgtctccaacatcacctgccccaactttgatgccagcatttgcatcccgggctccatcacattcatgcccaatggatgctgcaagacctgcacccctcgcaatgagaccaggtgcctgctctacaagtccccgtcacccgagagtttgttcccgttgcaccacggccctgtaatgcgtatta

SEQ ID NO: 732426 - DNA, 2437 bp, Homo sapiens
  misc_feature (1436)..(1436): n is a, c, g, or t
  misc_feature (1528)..(1528): n is a, c, g, or t
acgcatcacctaaatctattgctgttctatgatttcccccttatgtcactcatcaccacaatgacacccccttacaatcaccactcccagccctccaacaaccaccatgaccacccttccaccaaccaccacttccagccctctaacaactactcctctacctccatcaataactcctcctacattttcaccattctcaacgacaacccctactaccccatgcgtgcctctctgcaattggactggctggctggattctggaaaacccaactttcacaaaccaggtggagacacagaattgattggagacgtctgtggaccaggctgggcagctaacatctcttgcagagccaccatgtatcctgatgttcccattggacagcttggacaaacagtggtgtgtgatgtctctgtggggctgatatgcaaaaatgaagaccaaaagccaggtggggtcatccctatggccttctgcctcaactacgagatcaacgttcagtgctgtgagtgtgtcacccaacccaccaccatgacaaccaccaccacagagaacccaactccgccaaccacgacacccatcaccaccaccactacggtgaccccaaccccaacacccaccggcacacagaccccaaccacgacacccatcaccaccaccactacggtgaccccaaccccaacacccaccggcacacagaccccaaccacgacacccatcaccaccaccactacggtgaccccaaccccaacacccaccggcacacagaccccaaccacgacacccatcaccaccaccactacggtgaccccaaccccaacacccaccggcacacagaccccaaccacgacacccatcaccaccaccactacggtgaccccaaccccaacacccatcaccaccaccactacggtgaccccaaccccaacacccaccggcacacagaccccaaccacgacacccatcaccaccaccactacggtgaccccaaccccaacacccaccggcacacagaccccaaccacgacacccatcaccaccaccactacggtgaccccaaccccaacacccaccggcacacagaccccaaccacgacacccatcaccaccaccactacggtgaccccaaccccaacacccaccggcacacagaccccaaccacgacacccatcaccaccaccactacggtgaccccaaccccaacacccaccggcacacagaccccaaccacgacacccatcaccaccaccactacggtgaccccaaccccaacacccaccggcacacagaccccaaccacgacacccatcaccaccaccactacggtgaccccaaccccaacacccaccggcacacagaccccaaccacgacacccatcaccaccaccactacggtgaccccaaccccaacacccaccggcacacagaccccaaccncgacacccatcaccaccaccactacggtgaccccaaccccaacacccaccggcacacagaccccaaccacgacacccatcaccaccaccacnacggtgaccccaaccccaacacccaccggcacacagaccccaaccacgacacccatcaccaccaccactacggtgaccccaaccccaacacccaccggcacacagaccccaaccacgacacccatcaccaccaccactacggtgaccccaaccccaacacccaccggcacacagaccccaaccatgatacccatcagcaccaccactacggtgaccccaaccccaacacccaccactggaagcacggggccccccacccacacaagcacagcaccgattgctgagttgaccacatccaatcctccgcctgagtcctcaacccctcagacctctcggtccacctcttcccctctcacggagtcaaccacccttctgagtaccctaccacctgccattgagatgaccagcacggccccaccctccacacccacggcacccacgaccacgagcggaggccacacactgtctccaccgcccagcaccaccacgtcccctccaggcacccccactcgcggtaccacgaccgggtcatcttcagcccccacccccagcactgtgcagacgaccaccaccagtgcctggaccccaacgccgaccccactctccacacccagcatcatcaggaccacaggcctgaggccctacccttcctctgtgcttatctgctgtgtcctgaacgacacctactacgcaccaggtgaggaggtgtacaacggcacatacggagacacctgttatttcgtcaactgctcactgagctgtacgttggagttctataactggtcctgcccatccacgccctccccaacacccacgccaacgttgggcctcacggtggcctctccaagctcagctcctgccctccaatggcatctgcaggccccaaatggtctccagtcgtggatatca

SEQ ID NO: 732427 - DNA, 2328 bp, Homo sapiens; identical to SEQ ID NO: 488751
  misc_feature (81)..(81): n is a, c, g, or t
  misc_feature (95)..(95): n is a, c, g, or t
  misc_feature (147)..(147): n is a, c, g, or t

SEQ ID NO: 732428 - DNA, 2097 bp, Homo sapiens
  misc_feature (81)..(81): n is a, c, g, or t
  misc_feature (95)..(95): n is a, c, g, or t
  misc_feature (147)..(147): n is a, c, g, or t
gtagtagctctcgttcaggacacagcagataagcacagaggaaggttagggcctcaggcctgtggtcctgatgatgttggntgtgaagagtgggntcggcgtggggatccaggcaccggtggtggtcgtctgcacagtgctggggtngggggctgaagatgacccagtcgtgtacccgcgagtgggacatcgacaactaccactgcgatcccaacgacaaggtgtcctgcccccgcaccctcatcgtgcgccacgagacccaggaggtgctgatcaagaccgtgcatatgatgcccatgcaggtgcaggtgcaggtgaacaggcaggcggtggcactgccctacaagaagtacgggctggaggtgtaccagtctggcatcaactacgtggtggacatccccgagctgggtgtcctcgtctcctacaatggcctgtccttctccgtcaggctgccctaccaccggtttggcaacaacaccaagggccagtgtggcacctgcaccaacaccacctccgacgactgcattctgcccagcggggagatcgtctccaactgtgaggctgcggctgaccagtggctggtgaacgacccctccaagccacactgcccccacagcagctccacgaccaagcgcccggccgtcactgtgcccgggggcggtaaaacgaccccacacaaggactgcaccccatctcccctctgccagctcatcaaggacagcctgtttgcccagtgccacgcactggtgcccccgcagcactactacgatgcctgcgtgttcgacagctgcttcatgccgggctcgagcctggagtgcgccagtctgcaggcctacgcagccctctgtgcccagcagaacatctgcctcgactggcggaaccacacgcatggggcctgcttggtggagtgcccatctcacagggagtaccaggcctgtggccctgcagaagagcccacgtgcaaatccagctcctcccagcagaacaacacagtcctggtggaaggctgcttctgtcctgagggcaccatgaactacgctcctggctttgatgtctgcgtgaagacctgcggctgtgtgggacctgacaatgtgcccagagagtttggggagcacttcgagttcgactgcaagaactgtgtctgcctggagggtggaagtggcatcatctgccaacccaagaggtgcagccagaagcccgttacccactgcgtggaagacggcacctacctcgccacggaggtcaaccctgccgacacctgctgcaacattaccgtctgcaagtgcaacaccagcctgtgcaaagagaagccctccgtgtgcccgctgggattcgaagtgaagagcaagatggtgcctggaaggtgctgtcctttctactggtgtgagtccaagggggtgtgtgttcacgggaatgctgagtaccagcccggttctccagtttattcctccaagtgccaggactgcgtgtgcacggacaaggtggacaacaacaccctgctcaacgtcatcgcctgcacccacgtgccctgcaacacctcctgcagccctggcttcgaactcatggaggcccccggggagtgctgtaagaagtgtgaacagacgcactgtatcatcaaacggcccgacaaccagcacgtcatcctgaagcccggggacttcaagagcgacccgaagaacaactgcacattcttcagctgcgggacatttgtcatgtactcggccaaggcccaggccctggaccacagctgctcctgctgcaaagaggagaaaaccagccagcgtgaggtggtcctgagctgccccaatggcggctcgctgacacacacctacacccacatcgagagctgccagtgccaggacaccgtctgcgggctccccaccggcacctcccgccgggcccggcgctcccctaggcatctggggagcgggtgagcggggtgggcacagcccccttcactgccctcgacagctttacctcccccggaccctctgagcctcctaagctcggcttcctctcttcagatatttattgtctgagtctttgttcagtccttgctttccaataataaactcagggggacatgcaaaaaaaaaa

SEQ ID NO: 732429 - DNA, 1911 bp, Homo sapiens
  misc_feature (81)..(81): n is a, c, g, or t
  misc_feature (95)..(95): n is a, c, g, or t
  misc_feature (147)..(147): n is a, c, g, or t
gtagtagctctcgttcaggacacagcagataagcacagaggaaggttagggcctcaggcctgtggtcctgatgatgttggntgtgaagagtgggntcggcgtggggatccaggcaccggtggtggtcgtctgcacagtgctggggtngggggctgaagatgacccagtcgtgtacccgcgagtgggacatcgacaactaccactgcgatcccaacgacaaggtgtcctgcccccgcaccctcatcgtgcgccacgagacccaggaggtgctgatcaagaccgtgcatatgatgcccatgcaggtgcaggtgcaggtgaacaggcaggcggtggcactgccctacaagaagtacgggctggaggtgtaccagtctggcatcaactacgtggtggacatccccgagctgggtgtcctcgtctcctacaatggcctgtccttctccgtcaggctgccctaccaccggtttggcaacaacaccaagggccagtgtggcacctgcaccaacaccacctccgacgactgcattctgcccagcggggagatcgtctccaactgtgaggctgcggctgaccagtggctggtgaacgacccctccaagccacactgcccccacagcagctccacgaccaagcgcccggccgtcactgtgcccgggggcggtaaaacgaccccacacaaggactgcaccccatctcccctctgccagctcatcaaggacagcctgtttgcccagtgccacgcactggtgcccccgcagcactactacgatgcctgcgtgttcgacagctgcttcatgccgggctcgagcctggagtgcgccagtctgcaggcctacgcagccctctgtgcccagcagaacatctgcctcgactggcggaaccacacgcatggggcctgcttggtggagtgcccatctcacagggagtaccaggcctgtggccctgcagaagagcccacgtgcaaatccagctcctcccagcagaacaacacagtcctggtggaaggctgcttctgtcctgagggcaccatgaactacgctcctggctttgatgtctgcgtgaagacctgcggctgtgtgggacctgacaatgtgcccagagagtttggggagcacttcgagttcgactgcaagaactgtgtctgcctggagggtggaagtggcatcatctgccaacccaagaggtgcagccagaagcccgttacccactgcgtggaagacggcacctacctcgccacggaggtcaaccctgccgacacctgctgcaacattaccgtctgcaagtgcaacaccagcctgtgcaaagagaagccctccgtgtgcccgctgggattcgaagtgaagagcaagatggtgcctggaaggtgctgtcctttctactggtgtgagtccaagggggtgtgtgttcacgggaatgctgagtaccagcccggttctccagtttattcctccaagtgccaggactgcgtgtgcacggacaaggtggacaacaacaccctgctcaacgtcatcgcctgcacccacgtgccctgcaacacctcctgcagccctggcttcgaactcatggaggcccccggggagtgctgtaagaagtgtgaacagacgcactgtatcatcaaacggcccgacaaccagcacgtcatcctgaagcccggggacttcaagagcgacccgaagaacaactgcacattcttcagctgcgtgaagatccacaaccagctcatctcgtccgtctccaacatcacctgccccaactttgatgccagcatttgcatcccgggctccatcacattcatgcccaatggatgctgcaagacctgcacccctcgcaatgagaccaggtgcctgctctacaagtccccgtcacccgagagtttgttcccgttgcaccacggccctgtaatgcgtatta

SEQ ID NO: 732430 - DNA, 1615 bp, Homo sapiens
  misc_feature (1602)..(1602): n is a, c, g, or t
  misc_feature (1605)..(1605): n is a, c, g, or t
cagtagtccttggggcggaactggccccccgtggcccggcccggctcggccccacctccgcccgcaggcggtcccggcccacgcgggaaggtccttaagcccgggcggccggcgggaccggcggagacccgtggaggccgccgacgatggcggggccgacggaggccgagacggggttggccgagccccgggccctgtgcgcgcagcggggccaccgcacctacgcgcgccgctgggtgttcctgctcgcgatcagcctgctcaactgctccaacgccacgatcaactggctgtcactggtctacctcgtggtatccaccccatttggcgtggcggccatctggatcctggactccgtcgggctccgtgcggcgctcggtgtctataccatccctgctggcgtcgtctgcctgctgtccaccatctgcctgtgggagagtgtgccccccaccccgccctctgccggggctgccagctccacctcagagaagttcctggatgggctcaagccgcagctcatgtggaacaaggcctatgtcatcctggctgtgtgcttggggggaatgatcgggatctctgccagcttctcagccctcctggagcagatcctctgtgcaagcggccactccagtgggttttccggcctctgtggcgctctcttcatcacgtttgggatcctgggggcactggctctcggcccctatgtggaccggaccaagcacttcactgaggccaccaagattggcctgtgcctgttctctctggcctgcgtgccctttgccctggtgtcccagctgcagggacagacccttgccctggctgccacctgctcgctgctcgggctgtttggcttctcggtgggccccgtggccatggagttggcggtcgagtgttccttccccgtgggggagggggctgccacaggcatgatctttgtgctggggcaggccgagggaatactcatcatgctggcaatgacggcactgactgtgcgacgctcggagctgtccttgtccacctgccagcagggggaggatccacttgactggacagtgtctctgctgctgatggccggcctgtgcaccttcttcagctgcatcctggcggtcttcttccacaccccataccggcgcctgcaggccgagtctggggagcccccctccacccgtaacgccgtgggcggcgcagactcagggccgggtgtggaccgagggggagcaggaagggctggggtcctggggcccagcacggcgactccggagtgcacggcgaggggggcctcgctagaggaccccagagggcccgggagcccccacccagcctgccaccgagcgactccccgtgcgcaaggcccagcagccaccgacgcgccctcccgccccggcagactcgcaggcagggtccaagcgtccaggtttattgacccggctgggtctcactcctccttctcctccccgtgggtgatcacgtagctgagcgccttgtagtccaggttgcccgccacatcgatggaggcgaactggaacatctggtccacctgcgggcgggggcgaaagggctccttgcgggctccgggagcgaattacaagcgcgcacctgcancgncaaaaaaaaa

SEQ ID NO: 732431 - DNA, 1631 bp, Homo sapiens
  misc_feature (2)..(2): n is a, c, g, or t
  misc_feature (278)..(278): n is a, c, g, or t
  misc_feature (1618)..(1618): n is a, c, g, or t
  misc_feature (1621)..(1621): n is a, c, g, or t
gngacacaaaagaacaagatgaaaaaaagaggcaggaaccggaccggaaaacccgggaacggcgggaccggcggagacccgtggaggccgccgacgatggcggggccgacggaggccgagacggggttggccgagccccgggccctgtgcgcgcagcggggccaccgcacctacgcgcgccgctgggtgttcctgctcgcgatcagcctgctcaactgctccaacgccacgctgtggctcagctttgcacccgtggctgacgtcattgcagaggactnggtcctgtccatggagcagatcaactggctgtcactggtctacctcgtggtatccaccccatttggcgtggcggccatctggatcctggactccgtcgggctccgtgcggcgctcggtgtctataccatccctgctggcgtcgtctgcctgctgtccaccatctgcctgtgggagagtgtgccccccaccccgccctctgccggggctgccagctccacctcagagaagttcctggatgggctcaagccgcagctcatgtggaacaaggcctatgtcatcctggctgtgtgcttggggggaatgatcgggatctctgccagcttctcagccctcctggagcagatcctctgtgcaagcggccactccagtgggttttccggcctctgtggcgctctcttcatcacgtttgggatcctgggggcactggctctcggcccctatgtggaccggaccaagcacttcactgaggccaccaagattggcctgtgcctgttctctctggcctgcgtgccctttgccctggtgtcccagctgcagggacagacccttgccctggctgccacctgctcgctgctcgggctgtttggcttctcggtgggccccgtggccatggagttggcggtcgagtgttccttccccgtgggggagggggctgccacaggcatgatctttgtgctggggcaggccgagggaatactcatcatgctggcaatgacggcactgactgtgcgacgctcggagctgtccttgtccacctgccagcagggggaggatccacttgactggacagtgtctctgctgctgatggccggcctgtgcaccttcttcagctgcatcctggcggtcttcttccacaccccataccggcgcctgcaggccgagtctggggagcccccctccacccgtaacgccgtgggcggcgcagactcagggccgggtgtggaccgagggggagcaggaagggctggggtcctggggcccagcacggcgactccggagtgcacggcgaggggggcctcgctagaggaccccagagggcccgggagcccccacccagcctgccaccgagcgactccccgtgcgcaaggcccagcagccaccgacgcgccctcccgccccggcagactcgcaggcagggtccaagcgtccaggtttattgacccggctgggtctcactcctccttctcctccccgtgggtgatcacgtagctgagcgccttgtagtccaggttgcccgccacatcgatggaggcgaactggaacatctggtccacctgcgggcgggggcgaaagggctccttgcgggctccgggagcgaattacaagcgcgcacctgcancgncaaaaaaaaa

SEQ ID NO: 732432 - DNA, 2433 bp, Homo sapiens
  misc_feature (2)..(2): n is a, c, g, or t
  misc_feature (278)..(278): n is a, c, g, or t
gngacacaaaagaacaagatgaaaaaaagaggcaggaaccggaccggaaaacccgggaacggcgggaccggcggagacccgtggaggccgccgacgatggcggggccgacggaggccgagacggggttggccgagccccgggccctgtgcgcgcagcggggccaccgcacctacgcgcgccgctgggtgttcctgctcgcgatcagcctgctcaactgctccaacgccacgctgtggctcagctttgcacccgtggctgacgtcattgcagaggactnggtcctgtccatggagcagatcaactggctgtcactggtctacctcgtggtatccaccccatttggcgtggcggccatctggatcctggactccgtcgggctccgtgcggcgctcggtgtctataccatccctgctggcgtcgtctgcctgctgtccaccatctgcctgtgggagagtgtgccccccaccccgccctctgccggggctgccagctccacctcagagaagttcctggatgggctcaagccgcagctcatgtggaacaaggcctatgtcatcctggctgtgtgcttggggggaatgatcgggatctctgccagcttctcagccctcctggagcagatcctctgtgcaagcggccactccagtgggttttccggcctctgtggcgctctcttcatcacgtttgggatcctgggggcactggctctcggcccctatgtggaccggaccaagcacttcactgaggccaccaagattggcctgtgcctgttctctctggcctgcgtgccctttgccctggtgtcccagctgcagggacagacccttgccctggctgccacctgctcgctgctcgggctgtttggcttctcggtgggccccgtggccatggagttggcggtcgagtgttccttccccgtgggggagggggctgccacaggcatgatctttgtgctggggcaggccgagggaatactcatcatgctggcaatgacggcactgactgtgcgacgctcggagctgtccttgtccacctgccagcagggggaggatccacttgactggacagtgtctctgctgctgatggccggcctgtgcaccttcttcagctgcatcctggcggtcttcttccacaccccataccggcgcctgcaggccgagtctggggagcccccctccacccgtaacgccgtgggcggcgcagactcagggccgggtgtggaccgagggggagcaggaagggctggggtcctggggcccagcacggcgactccggagtgcacggcgaggggggcctcgctagaggaccccagagggcccgggagcccccacccagcctgccaccgagcgactccccgtgcgcaaggcccagcagccaccgacgcgccctcccgccccggcagactcgcaggcagggtccaagcgtccaggtttattgacccggctgggtctcactcctccttctcctccccgtgggtgatcacgtagctgagcgccttgtagtccaggttgcccgccacatcgatggaggcgaactggaacatctggtccaccccttctgtcgtcttcttgtcagcctgggacatcagcagacgcttgatgtactccttgttgattttccctttcccgtccgggtccagcatcttgaaggcgttaagaatggtctcctcggcgtcggtaccgctcagcttctccccaaacaggttcagaaacatggtgaagttgatgggccccgaggcctctttgagcatggcgtccagctcgtcgtccttgacgttggtcttgcccagggaggcataggtgtccttcaggtcctccttgtcaatgaagccatctcggttctgatccatgagtgtgaatgcctccttgaactcctggatctgagtctgctcaaagttggagaagacattggatgaggctctctgggcccggagggcacccccttccttcttcttggtcttcctgctggccatgcctgcttctgcctgctttgatgcgtctgcccagggccccaggtcttgcccatcttaagctcctgcttggtcccccaggacagttcagactccggctgccactccctacaaggacaggcttggggctaccccaggggactggacagctgcagagtgagctttggcagcctggcagtgactcacacccttgccctgcctcaccccgcaaggcccccagcctccccagatacctctggccaggactacctcccatccacctgtccccgaaccccggggaggctttgttctcccaaggattctgtgtgtcagcagggccacctgtacacgctcttggctgggggcctgggcaccctggaactgcaggagccagaggaaggggcactttttctagatttgcacaacgctgctgtgggtgactgcagctggtcaccgggcttctgccaagcacactctgtctgtc

SEQ ID NO: 732433 - DNA, 1600 bp, Homo sapiens
  misc_feature (2)..(2): n is a, c, g, or t
  misc_feature (278)..(278): n is a, c, g, or t
gngacacaaaagaacaagatgaaaaaaagaggcaggaaccggaccggaaaacccgggaacggcgggaccggcggagacccgtggaggccgccgacgatggcggggccgacggaggccgagacggggttggccgagccccgggccctgtgcgcgcagcggggccaccgcacctacgcgcgccgctgggtgttcctgctcgcgatcagcctgctcaactgctccaacgccacgctgtggctcagctttgcacccgtggctgacgtcattgcagaggactnggtcctgtccatggagcagatcaactggctgtcactggtctacctcgtggtatccaccccatttggcgtggcggccatctggatcctggactccgtcgggctccgtgcggcgctcggtgtctataccatccctgctggcgtcgtctgcctgctgtccaccatctgcctgtgggagagtgtgccccccaccccgccctctgccggggctgccagctccacctcagagaagttcctggatgggctcaagccgcagctcatgtggaacaaggcctatgtcatcctggctgtgtgcttggggggaatgatcgggatctctgccagcttctcagccctcctggagcagatcctctgtgcaagcggccactccagtgggttttccggcctctgtggcgctctcttcatcacgtttgggatcctgggggcactggctctcggcccctatgtggaccggaccaagcacttcactgaggccaccaagattggcctgtgcctgttctctctggcctgcgtgccctttgccctggtgtcccagctgcagggacagacccttgccctggctgccacctgctcgctgctcgggctgtttggcttctcggtgggccccgtggccatggagttggcggtcgagtgttccttccccgtgggggagggggctgccacaggcatgatctttgtgctggggcaggccgagggaatactcatcatgctggcaatgacggcactgactgtgcgacgctcggagctgtccttgtccacctgccagcagggggaggatccacttgactggacagtgtctctgctgctgatggccggcctgtgcaccttcttcagctgcatcctggcggtcttcttccacaccccataccggcgcctgcaggccgagtctggggagcccccctccacccgtaacgccgtgggcggcgcagactcagggccgggtgtggaccgagggggagcaggaagggctggggtcctggggcccagcacggcgactccggagtgcacggcgaggggggcctcgctagaggaccccagagggcccgggagcccccacccagcctgccaccgagcgactccccgtgcgcaaggcccagcagccaccgacgcgccctcccgccccggcagactcgcaggcagggtccaagcgtccaggtttattgacccggctgggtctcactcctccttctcctccccgtgggtgatcacgtagctgagcgccttgtagtccaggttgcccgccacatcgatggaggcgaactggaacatctggtccaccccttctgtcgtcttctaacagccgtatagtagtagtaggcggccgc

SEQ ID NO: 732434 - DNA, 1932 bp, Homo sapiens
  misc_feature (2)..(2): n is a, c, g, or t
  misc_feature (278)..(278): n is a, c, g, or t
gngacacaaaagaacaagatgaaaaaaagaggcaggaaccggaccggaaaacccgggaacggcgggaccggcggagacccgtggaggccgccgacgatggcggggccgacggaggccgagacggggttggccgagccccgggccctgtgcgcgcagcggggccaccgcacctacgcgcgccgctgggtgttcctgctcgcgatcagcctgctcaactgctccaacgccacgctgtggctcagctttgcacccgtggctgacgtcattgcagaggactnggtcctgtccatggagcagatcaactggctgtcactggtctacctcgtggtatccaccccatttggcgtggcggccatctggatcctggactccgtcgggctccgtgcggcgctcggtgtctataccatccctgctggcgtcgtctgcctgctgtccaccatctgcctgtgggagagtgtgccccccaccccgccctctgccggggctgccagctccacctcagagaagttcctggatgggctcaagccgcagctcatgtggaacaaggcctatgtcatcctggctgtgtgcttggggggaatgatcgggatctctgccagcttctcagccctcctggagcagatcctctgtgcaagcggccactccagtgggttttccggcctctgtggcgctctcttcatcacgtttgggatcctgggggcactggctctcggcccctatgtggaccggaccaagcacttcactgaggccaccaagattggcctgtgcctgttctctctggcctgcgtgccctttgccctggtgtcccagctgcagggacagacccttgccctggctgccacctgctcgctgctcgggctgtttggcttctcggtgggccccgtggccatggagttggcggtcgagtgttccttccccgtgggggagggggctgccacaggcatgatctttgtgctggggcaggccgagggaatactcatcatgctggcaatgacggcactgactgtgcgacgctcggagctgtccttgtccacctgccagcagggggaggatccacttgactggacagtgtctctgctgctgatggccggcctgtgcaccttcttcagctgcatcctggcggtcttcttccacaccccataccggcgcctgcaggccgagtctggggagcccccctccacccgtaacgccgtgggcggcgcagactcagggccgggtgtggaccgagggggagcaggaagggctggggtcctggggcccagcacggcgactccggagtgcacggcgaggggggcctcgctagaggaccccagagggcccgggagcccccacccagcctgccaccgagcgactccccgtgcgcaaggcccagcagccaccgacgcgccctcccgccccggcagactcgcaggcagggtccaagcgtccaggtttattgacccggctgggtctcactcctccttctcctccccgtgggtgatcacgtagctgagcgccttgtagtccaggttgcccgccacatcgatggaggcgaactggaacatctggtccacctgtcagcctgggacatcagcagacgcttgatgctgaggacgaggaaaggggtcagcgcgggctgatgcgggggtgcaggagccttctcggtggggctcaggtgctccaggggccccaggttgtactcgctcactgcactcccgcccttcccgctggagtgtggccctggggcaggtcccttcccaacacacactcaggggccatcacttctgggggagccgctgatggggacagagccggaaggaggttacaggccagcgcctggtactttccccggcgcctagcaggagctgaagatggaggagtgggctgaggggaagccgccccacccccaccgggcacaggcgctggtccctgtgtgagcagggctggcctccc

SEQ ID NO: 732435 - DNA, 2417 bp, Homo sapiens
  misc_feature (2)..(2): n is a, c, g, or t
  misc_feature (278)..(278): n is a, c, g, or t
gngacacaaaagaacaagatgaaaaaaagaggcaggaaccggaccggaaaacccgggaacggcgggaccggcggagacccgtggaggccgccgacgatggcggggccgacggaggccgagacggggttggccgagccccgggccctgtgcgcgcagcggggccaccgcacctacgcgcgccgctgggtgttcctgctcgcgatcagcctgctcaactgctccaacgccacgctgtggctcagctttgcacccgtggctgacgtcattgcagaggactnggtcctgtccatggagcagatcaactggctgtcactggtctacctcgtggtatccaccccatttggcgtggcggccatctggatcctggactccgtcgggctccgtgcggcgctcggtgtctataccatccctgctggcgtcgtctgcctgctgtccaccatctgcctgtgggagagtgtgccccccaccccgccctctgccggggctgccagctccacctcagagaagttcctggatgggctcaagccgcagctcatgtggaacaaggcctatgtcatcctggctgtgtgcttggggggaatgatcgggatctctgccagcttctcagccctcctggagcagatcctctgtgcaagcggccactccagtgggttttccggcctctgtggcgctctcttcatcacgtttgggatcctgggggcactggctctcggcccctatgtggaccggaccaagcacttcactgaggccaccaagattggcctgtgcctgttctctctggcctgcgtgccctttgccctggtgtcccagctgcagggacagacccttgccctggctgccacctgctcgctgctcgggctgtttggcttctcggtgggccccgtggccatggagttggcggtcgagtgttccttccccgtgggggagggggctgccacaggcatgatctttgtgctggggcaggccgagggaatactcatcatgctggcaatgacggcactgactgtgcgacgctcggagctgtccttgtccacctgccagcagggggaggatccacttgactggacagtgtctctgctgctgatggccggcctgtgcaccttcttcagctgcatcctggcggtcttcttccacaccccataccggcgcctgcaggccgagtctggggagcccccctccacccgtaacgccgtgggcggcgcagactcagggccgggtgtggaccgagggggagcaggaagggctggggtcctggggcccagcacggcgactccggagtgcacggcgaggggggcctcgctagaggaccccagagggcccgggagcccccacccagcctgccaccgagcgactccccgtgcgcaaggcccagcagccaccgacgcgccctcccgccccggcagactcgcaggcagggtccaagcgtccaggtttattgacccggctgggtctcactcctccttctcctccccgtgggtgatcacgtagctgagcgccttgtagtccaggttgcccgccacatcgatggaggcgaactggaacatctggtccacctgtcagcctgggacatcagcagacgcttgatgtactccttgttgattttccctttcccgtccgggtccagcatcttgaaggcgttaagaatggtctcctcggcgtcggtaccgctcagcttctccccaaacaggttcagaaacatggtgaagttgatgggccccgaggcctctttgagcatggcgtccagctcgtcgtccttgacgttggtcttgcccagggaggcataggtgtccttcaggtcctccttgtcaatgaagccatctcggttctgatccatgagtgtgaatgcctccttgaactcctggatctgagtctgctcaaagttggagaagacattggatgaggctctctgggcccggagggcacccccttccttcttcttggtcttcctgctggccatgcctgcttctgcctgctttgatgcgtctgcccagggccccaggtcttgcccatcttaagctcctgcttggtcccccaggacagttcagactccggctgccactccctacaaggacaggcttggggctaccccaggggactggacagctgcagagtgagctttggcagcctggcagtgactcacacccttgccctgcctcaccccgcaaggcccccagcctccccagatacctctggccaggactacctcccatccacctgtccccgaaccccggggaggctttgttctcccaaggattctgtgtgtcagcagggccacctgtacacgctcttggctgggggcctgggcaccctggaactgcaggagccagaggaaggggcactttttctagatttgcacaacgctgctgtgggtgactgcagctggtcaccgggcttctgccaagcacactctgtctgtc

SEQ ID NO: 732436 - DNA, 983 bp, Homo sapiens; identical to SEQ ID NO: 706180

SEQ ID NO: 732437 - DNA, 1606 bp, Homo sapiens
agaaactctctgtcctgagaggtgattaaagaaggcatccagcaagaactgcacaagaaacggagtcagccggagaacaaggagtggtcttccactgcctcacaggaggatggaggcccacaacgcgtctgccccattcaacttcaccctgccacccaactttggcaagcgccccacagacctggcactgagcgtcatcctggtgttcatgttgttcttcatcatgctctcgctgggctgcaccatggagttcagcaagatcaaggctcacttatggaagcctaaagggctggccatcgccctggtggcacagtatggcatcatgcccctcacggcctttgtgctgggcaaggtcttccggctgaagaacattgaggcactggccatcttggtctgtggctgctcacctggagggaacctgtccaatgtcttcagtctggccatgaagggggacatgaacctcagcattgtgatgaccacctgctccaccttctgtgcccttggcatgatgcctctcctcctgtacatctactccagggggatctatgatggggacctgaaggacaaggtgccctataaaggcatcgtgatatcactggtcctggttctcattccttgcaccatagggatcgtcctcaaatccaaacggccacaatacatgcgctatgtcatcaagggagggatgatcatcattctcttgtgcagtgtggccgtcacagttctctctgccatcaatgtggggaagagcatcatgtttgccatgacaccactcttgattgccacctcctccctgatgccttttattggctttctgctgggttatgttctctctgctctcttctgcctcaatggacggtgcagacgcactgtcagcatggagactggatgccaaaatgtccaactctgttccaccatcctcaatgtggcctttccacctgaagtcattggaccacttttcttctttcccctcctctacatgattttccagcttggagaagggcttctcctcattgccatattttggtgctatgagaaattcaagactcccaaggataaaacaaaaatgatctacacagctgccacaactgaagaaacaattccaggagctctgggaaatggcacctacaaaggggaggactgctccccttgcacagcctagcccttcccctggtggcctggattctggtcccaaagcaattctgaaagccagtgtggtaaactagagagagcagcaaaaacaccagtcttgcctgagtctttctccagcatttccagtacatctatcagaatcatcaagtcttggccgggaacacagacagggtgtctacccaagaagcctcacctatccccaacttagaatttgctacttattttaaagacttgttcagtgactgtaaactctatgaaaccagaaaccgaatctgcctcttgctgggatctctaaaagtgtctgataagcatcttaaagtcactcaattcctgaactaatcaatatatatgtttaacccattactcaaatacccaaatcccattccaagttttgtgacccaaaagagaaataaatgctcacaagtgctgtagaattaaacttcagaagttctaacct

SEQ ID NO: 732438 - DNA, 642 bp, Homo sapiens
ataaaacaaaaatgatctacacagctgccacaactgaagaaacaattccaggagctctgggaaatggcacctacaaaggggaggactgctccccttgcacagcctagcccttcccctggtggcctggattctggtcccaaagcaattctgaaagccagtgtggtaaactagagagagcagcaaaaacaccagtcttgcctgagtctttctccagcatttccagtacatctatcagaatcatcaagtcttggccgggaacacagacagggtgtctacccaagaagcctcacctatccccaacttagaatttgctacttattttaaagacttgttcagtgactgtaaactctatgaaaccagaaaccgaatctgcctcttgctgggatctctaaaagtgtctgataagcatcttaaagtcactcaattcctgaactaatcaatatatatgtttaacccattactcaaatacccaaatcccattccaagttttgtgacccaaaagagaaataaatgctcacaagtgctgtagaattaaacttcagaagttctaacctaaaaagttcagatcctattccttcccttttgacattattgggatgatgctcccgaaaagtcaaatttgacatcaagtatgcaaaagtg

SEQ ID NO: 732439 - DNA, 808 bp, Homo sapiens
aaaccataccatatcccaccagagagtgactcctgattgcctcctcaagtcgcagacactatgctgcctcccatggccctgcccagtgtatcttggatgctgctttcctgcctcatgctgctgtctcaggttcaaggtgaagaaccccagagggaactgccctctgcacggatccgctgtcccaaaggctccaaggcctatggctcccactgctatgccttgtttttgtcaccaaaatcctggacagatgcagatctggcctgccagaagcggccctctggaaacctggtgtctgtgctcagtggggctgagggatccttcgtgtcctccctggtgaagagcattggtaacagctactcatacgtctggattgggctccatgaccccacacagggcaccgagcccaatggagaaggttgggagtggagtagcagtgatgtgatgaattactttgcatgggagagaaatccctccaccatctcaagccccggccactgtgcgagcctgtcgagaagcacagcatttctgaggtggaaagattataactgtaatgtgaggttaccctatgtctgcaagttcactgactagtgcaggagggaagtcagcagcctgtgtttggtgtgcaactcatcatgggcatgagaccagtgtgaggactcaccctggaagagaatattcgcttaattcccccaacctgaccacctcattcttatctttcttctgtttcttcctccccgctgtcatttcagtctcttcattttgtcatacggcctaaggctttaaagagcaataaaatttttagtctgca

SEQ ID NO: 732440 - DNA, 785 bp, Homo sapiens
aaaccataccatatcccaccagagagtcgcagacactatgctgcctcccatggccctgcccagtgtatcttggatgctgctttcctgcctcatgctgctgtctcaggttcaaggtgaagaaccccagagggaactgccctctgcacggatccgctgtcccaaaggctccaaggcctatggctcccactgctatgccttgtttttgtcaccaaaatcctggacagatgcagatctggcctgccagaagcggccctctggaaacctggtgtctgtgctcagtggggctgagggatccttcgtgtcctccctggtgaagagcattggtaacagctactcatacgtctggattgggctccatgaccccacacagggcaccgagcccaatggagaaggttgggagtggagtagcagtgatgtgatgaattactttgcatgggagagaaatccctccaccatctcaagccccggccactgtgcgagcctgtcgagaagcacagcatttctgaggtggaaagattataactgtaatgtgaggttaccctatgtctgcaagttcactgactagtgcaggagggaagtcagcagcctgtgtttggtgtgcaactcatcatgggcatgagaccagtgtgaggactcaccctggaagagaatattcgcttaattcccccaacctgaccacctcattcttatctttcttctgtttcttcctccccgctgtcatttcagtctcttcattttgtcatacggcctaaggctttaaagagcaataaaatttttagtctgca

SEQ ID NO: 732441 - DNA, 908 bp, Homo sapiens
  misc_feature (1)..(1): n is a, c, g, or t
ntcctatcatcgcaaaactcatgatgctccggctgctcagttccctcctccttgtggccgttgcctcaggctatggcccaccttcctctcgcccttccagccgcgttgtcaatggtgaggatgcggtcccctacagctggccctggcaggtttccctgcagtatgagaaaagtggaagcttctaccacacgtgtggcggtagcctcatcgcccccgactgggttgtgactgccggccactgcatctcgagctcctggacctaccaggtggtgttgggcgagtacgaccgtgctgtgaaggagggccccgagcaggtgatccccatcaactctggggacctctttgtgcatccactctggaaccgctcgtgtgtggcctgtggcaatgacatcgccctcatcaagctctcacgcagcgcccagctgggagacgccgtccagctcgcctcactccctcccgctggtgacatccttcccaacgagacaccctgctacatcaccggctggggccgtctctataccaacgggccactcccagacaagctgcaggaggccctgctgcccgtggtggactatgaacactgctccaggtggaactggtggggttcctccgtgaagaagaccatggtgtgtgctggaggggacatccgctccggctgcaacggtgactctggaggacccctcaactgccccacagaggatggtggctggcaggtccatggcgtgaccagctttgtttctgcctttggctgcaacacccgcaggaagcccacggtgttcactcgagtctccgccttcatcgactggattgaggagaccatagcaagccactagaaccaaggcccagctggcagtgctgatcgatcccacatcctgaataaagaataaagatctctcagaaaattccaa

SEQ ID NO: 732442 - DNA, 520 bp, Homo sapiens
  misc_feature (125)..(125): n is a, c, g, or t
ggcaggagttattgccacagccacacacgaggcccagtgggagagcgtcaagttgcctaattccttccggttggtgaaatcctttcccaaggagacaccttgtaacatcaccggtgggggcggtntttataccaacgggccactcccagacaagctgcaggaggccctgctgcccgtggtggactatgaacactgctccaggtggaactggtggggttcctccgtgaagaagaccatggtgtgtgctggaggggacatccgctccggctgcaacggtgactctggaggacccctcaactgccccacagaggatggtggctggcaggtccatggcgtgaccagctttgtttctgcctttggctgcaacacccgcaggaagcccacggtgttcactcgagtctccgccttcatcgactggattgaggagaccatagcaagccactagaaccaaggcccagctggcagtgctgatcgatcccacatcctgaataaagaataaagatctctcagaaaattccaa

SEQ ID NO: 732443 - DNA, 485 bp, Homo sapiens
  misc_feature (1)..(1): n is a, c, g, or t
ntcctatcatcgcaaaactcatgatgctccggctgctcagttccctcctccttgtggccgttgcctgctacatcaccggctggggccgtctctataccaacgggccactcccagacaagctgcaggaggccctgctgcccgtggtggactatgaacactgctccaggtggaactggtggggttcctccgtgaagaagaccatggtgtgtgctggaggggacatccgctccggctgcaacggtgactctggaggacccctcaactgccccacagaggatggtggctggcaggtccatggcgtgaccagctttgtttctgcctttggctgcaacacccgcaggaagcccacggtgttcactcgagtctccgccttcatcgactggattgaggagaccatagcaagccactagaaccaaggcccagctggcagtgctgatcgatcccacatcctgaataaagaataaagatctctcagaaaattccaa

SEQ ID NO: 732444 - DNA, 487 bp, Homo sapiens
  misc_feature (2)..(2): n is a, c, g, or t
  misc_feature (10)..(10): n is a, c, g, or t
  misc_feature (12)..(12): n is a, c, g, or t
gngcaggggncnacgagcggctgctcagttccctcctccttgtggccgttgcctcaggctatggcccaccttcctctcgcccttccagccgcgttgtcaatggtgaggatgcggtcccctacagctggccctggcaggtttccctgcagtatgagaaaagtggaagcttctaccacacgtgtggcggtagcctcatcgcccccgactgggttgtgactgccggccactgcatctcgagctcctggacctaccaggtggtgttgggcgagtacgaccgtgctgtgaaggagggccccgagcaggtgatccccatcaactctggggacctctttgtgcatccactctggaaccgctcgtgtgtggcctgtggcaatgacatcgccctcatcaagctaccatagcaagccactagaaccaaggcccagctggcagtgctgatcgatcccacatcctgaataaagaataaagatctctcagaaaattccaa

SEQ ID NO: 732445 - DNA, 896 bp, Homo sapiens; identical to SEQ ID NO: 262037
  misc_feature (2)..(2): n is a, c, g, or t
  misc_feature (10)..(10): n is a, c, g, or t
  misc_feature (12)..(12): n is a, c, g, or t

SEQ ID NO: 732446 - DNA, 1033 bp, Homo sapiens
  misc_feature (2)..(2): n is a, c, g, or t
  misc_feature (10)..(10): n is a, c, g, or t
  misc_feature (12)..(12): n is a, c, g, or t
gngcaggggncnacgagcggctgctcagttccctcctccttgtggccgttgcctcaggctatggcccaccttcctctcgcccttccagccgcgttgtcaatggtgaggatgcggtcccctacagctggccctggcaggtttccctgcagtatgagaaaagtggaagcttctaccacacgtgtggcggtagcctcatcgcccccgactgggttgtgactgccggccactgcatctcgagctcctggacctaccaggtggtgttgggcgagtacgaccgtgctgtgaaggagggccccgagcaggtgatccccatcaactctggggacctctttgtgcatccactctggaaccgctcgtgtgtggcctgtggcaatgacatcgccctcatcaagctctcacgcagcgcccagctgggagacgccgtccagctcgcctcactccctcccgctggtgacatccttcccaacgagacaccctgctacatcaccggctggggccgtctctataccaacgggccactcccagacaagctgcaggaggccctgctgcccgtggtggactatgaacactgctccaggtggaactggtggggttcctccgtgaagaagaccatggtgtgtgctggaggggacatccgctccggctgcaacggtgactctggaggacccctcaactgccccacagaggatggtggctggcaggtccatggcgtgaccagctttgtttctgcctttggctgcaacacccgcaggaagcccacggtgttcactcgagtctccgccttcatcgactggattgaggagaaactacagggcaacaaggcaccagagtcccggacttaggaccactgtgtgtgattcaccgtgaacactggcatattaaaggctctgagaagtcctgtaggaaaggacaatttgactttgtttgagctcatattttccaatcccatctgacctttagttcttcactgagtgcccactgggttatattctgggagccgaggccacagcagtgaacaaagcacacaaaaccc

SEQ ID NO: 732447 - DNA, 1045 bp, Homo sapiens
  misc_feature (1)..(1): n is a, c, g, or t
ntcctatcatcgcaaaactcatgatgctccggctgctcagttccctcctccttgtggccgttgcctcaggctatggcccaccttcctctcgcccttccagccgcgttgtcaatggtgaggatgcggtcccctacagctggccctggcaggtttccctgcagtatgagaaaagtggaagcttctaccacacgtgtggcggtagcctcatcgcccccgactgggttgtgactgccggccactgcatctcgagctcctggacctaccaggtggtgttgggcgagtacgaccgtgctgtgaaggagggccccgagcaggtgatccccatcaactctggggacctctttgtgcatccactctggaaccgctcgtgtgtggcctgtggcaatgacatcgccctcatcaagctctcacgcagcgcccagctgggagacgccgtccagctcgcctcactccctcccgctggtgacatccttcccaacgagacaccctgctacatcaccggctggggccgtctctataccaacgggccactcccagacaagctgcaggaggccctgctgcccgtggtggactatgaacactgctccaggtggaactggtggggttcctccgtgaagaagaccatggtgtgtgctggaggggacatccgctccggctgcaacggtgactctggaggacccctcaactgccccacagaggatggtggctggcaggtccatggcgtgaccagctttgtttctgcctttggctgcaacacccgcaggaagcccacggtgttcactcgagtctccgccttcatcgactggattgaggagaaactacagggcaacaaggcaccagagtcccggacttaggaccactgtgtgtgattcaccgtgaacactggcatattaaaggctctgagaagtcctgtaggaaaggacaatttgactttgtttgagctcatattttccaatcccatctgacctttagttcttcactgagtgcccactgggttatattctgggagccgaggccacagcagtgaacaaagcacacaaaaccc

SEQ ID NO: 732448 - DNA, 1084 bp, Homo sapiens
tttttctagagatgaggtcttgctatgttgcccaggctggtctcaaactcccgggctcaagcgatcctcccgcctcggcctctcaaagcactaggattacagcctcaggctatggcccaccttcctctcgcccttccagccgcgttgtcaatggtgaggatgcggtcccctacagctggccctggcaggtttccctgcagtatgagaaaagtggaagcttctaccacacgtgtggcggtagcctcatcgcccccgactgggttgtgactgccggccactgcatctcgagctcctggacctaccaggtggtgttgggcgagtacgaccgtgctgtgaaggagggccccgagcaggtgatccccatcaactctggggacctctttgtgcatccactctggaaccgctcgtgtgtggcctgtggcaatgacatcgccctcatcaagctctcacgcagcgcccagctgggagacgccgtccagctcgcctcactccctcccgctggtgacatccttcccaacgagacaccctgctacatcaccggctggggccgtctctataccaacgggccactcccagacaagctgcaggaggccctgctgcccgtggtggactatgaacactgctccaggtggaactggtggggttcctccgtgaagaagaccatggtgtgtgctggaggggacatccgctccggctgcaacggtgactctggaggacccctcaactgccccacagaggatggtggctggcaggtccatggcgtgaccagctttgtttctgcctttggctgcaacacccgcaggaagcccacggtgttcactcgagtctccgccttcatcgactggattgaggagaaactacagggcaacaaggcaccagagtcccggacttaggaccactgtgtgtgattcaccgtgaacactggcatattaaaggctctgagaagtcctgtaggaaaggacaatttgactttgtttgagctcatattttccaatcccatctgacctttagttcttcactgagtgcccactgggttatattctgggagccgaggccacagcagtgaacaaagcacacaaaaccc

SEQ ID NO: 732449 - DNA, 947 bp, Homo sapiens; identical to SEQ ID NO: 262036

SEQ ID NO: 732450 - DNA, 1643 bp, Homo sapiens; identical to SEQ ID NO: 73264

SEQ ID NO: 732451 - DNA, 3427 bp, Homo sapiens
ggccaggcaagcctgaatcctgtccctgccatctcgccactgcagctcgggtccagaaaggcaccattttgtcgcggctgcccgctctcccagggggaggagggatcttttttgcattttggagcggctgccaaggaggggaacctgttgggcatctccccagacccgcttgtgagcgcctccggggcgggcgggcgggaccagacccctcggggcacggcgtatcttggcacccggaggcagcggaggcaggcgcagcatcctcgctgggaactggagctggagtgagcgcaccgcgcgggaggagccgccgcagcctcgcagaacccgagtggaggaggtgacagctccattgccgggtttttattttttttctctccgcctccccgtctcctcctcaggctcggaccatggtgcagtcccactggctcccctgcccccctctcctgtgagactggctgcggggagggatcatggatacttgtctgccggcttctggttcccacgcaagtaagcctgctgtcaatggaggaggacattgatacccgcaaaatcaacaacagtttcctgcgcgaccacagctatgcgaccgaagctgacattatctctacggtagaattcaaccacacgggagaattactagcgacaggggacaaggggggtcgggttgtaatatttcaacgagagcaggagagtaaaaatcaggttcatcgtaggggtgaatacaatgtttacagcacattccagagccatgaacccgagttcgattacctgaagagtttagaaatagaagaaaaaatcaataaaataagatggctcccccagcagaatgcagcttactttcttctgtctactaatgataaaactgtgaagctgtggaaagtcagcgagcgtgataagaggccagaaggctacaatctgaaagatgaggagggccggctccgggatcctgccaccatcacaaccctgcgggtgcctgtcctgagacccatggacctgatggtggaggccaccccacgaagagtatttgccaacgcacacacatatcacatcaactccatatctgtcaacagcgactatgaaacctacatgtccgctgatgacctgaggattaacctatggaactttgaaataaccaatcaaagttttaatattgtggacattaagccagccaacatggaggagctcacggaggtgatcacagcagccgagttccacccccatcattgcaacaccttcgtgtacagcagcagcaaagggacaatccggctgtgtgacatgcgggcatctgccctgtgtgacaggcacaccaaattttttgaagagccggaagatccaagcaacagatcatttttctctgaaattatctcttcgatttcggatgtgaagttcagccacagtgggaggtatatcatgaccagggactacttgaccgtcaaagtctgggatctcaacatggaaaaccgccccatcgagacttaccaggttcatgactacctccgcagcaagctgtgttccctctatgaaaatgactgcatttttgataaatttgagtgtgtgtggaatgggtcagacagtgtcatcatgacaggctcctacaacaacttcttcaggatgttcgacagaaacaccaagcgtgatgtgacccttgaggcttcgagggaaaacagcaagccccgggctatcctcaaaccccgaaaagtgtgtgtggggggcaagcggagaaaagacgagatcagtgtcgacagtctggactttagcaaaaagatcttgcatacagcttggcatccttcagaaaatattatagcagtggcggctacaaataacctatatatattccaggacaaggttaactaggtggacaagttattacttaataatctcacatactgaatactagtcaaacaagtttttaaatgtttctttgggtcttcatttgatgcattgactttaatttccctatacaggaaatgattggaatagaattaaaaggagtccaacattcccagctccccagttctaagaaacttttgtcaaacccaataggtttgggacacttctgtttagaattgaaagctgccagctaacagtaattcttccatagttgacttgaacttctgatgcttttattgcccagttttctctggtgggtccagtgttttgttcctaggtgtctgctgcgataaaatgaggttgtctgtagtatttaaggagaaaagagataagttttttttaattaagcaattccatttgattgaaaaaaatcaacaaaaaataaacaccgtttactcttagacaaattcttcttgttttgtgaaaaaccagaactagtcagtatctcctgcccctccaccatttttttttccattttccattttcctttgaacaatttcatttaagccagagatttattgcatgaagctgagaagaggatgcagaatgacaaggaaagggcacatcaaccctgctatgctctttttttgtaagctccatagaaacagcctgagaatttggctagggaacttgaatgcttcaggggacagaaagagagcactttcgacacagtgcttcccagagtgagcttggcagggccaggcggggccaaattccatctgctgccttgttactcttgctttttgtgctcttaaatggctccatataatcttctacttacatgttccttggcttttttctcttcaaccttttccagcttatttattccattgacttctaaaggccgagtcctgggtgcttattatctggtgttctaaatgaagcagtaagttggaagcagtgccaccacccctgagtccctgagaaaggctggtctgttctttttgggtgtttctcctaagcagcaccctcccctcctcctggttttggtaaccaaaagtaacaatccatcaacctccattgtacctagaacaaaaatagccaataaaaacgctgagttgtgaagtccaatcaggcacttctaactcaccccaagctcgccatctggaaaaacagaccagaaggcttctcttctacagaaatgaactgtggggaaatcaagcagctgtgacatgaagtgaatgaagtccacttgaagctgtggaagatggttcatccttttccccagttgaggatccagatttataacttctagaaagccatttccagaaggttctatgtggcacacccctaggaaaggcactaaatgcatgcaaaggatttataaacttaggaaagtagatgggtggagtccagaaaactggttctgggttaatatctctacatctgtcttgatgactcatttctcctaactcccatttagtgcagggtaaatggtttgagatgagagtttttcaatgaaagggaaattttctttcagtttacagatgtattagaagtcctgactttcaagtgtaatttgctttggaggagg

SEQ ID NO: 732452 - DNA, 1978 bp, Homo sapiens
aatgcaccagccgcctccagcctcctgcagcagcagcagcagcagcagcagcagcagctgcgagtgcgcgcgtgtgggtgtgagggctcggaccatggtgcagtcccactggctcccctgcccccctctcctgtgagactggctgcggggagggatcatggatacttgtctgccggcttctggttcccacgcaagtaagcctgctgtcaatggaggaggacattgatacccgcaaaatcaacaacagtttcctgcgcgaccacagctatgcgaccgaagctgacattatctctacggtagaattcaaccacacgggagaattactagcgacaggggacaaggggggtcgggttgtaatatttcaacgagagcaggagagtaaaaatcaggttcatcgtaggggtgaatacaatgtttacagcacattccagagccatgaacccgagttcgattacctgaagagtttagaaatagaagaaaaaatcaataaaataagatggctcccccagcagaatgcagcttactttcttctgtctactaatgataaaactgtgaagctgtggaaagtcagcgagcgtgataagaggccagaaggctacaatctgaaagatgaggagggccggctccgggatcctgccaccatcacaaccctgcgggtgcctgtcctgagacccatggacctgatggtggaggccaccccacgaagagtatttgccaacgcacacacatatcacatcaactccatatctgtcaacagcgactatgaaacctacatgtccgctgatgacctgaggattaacctatggaactttgaaataaccaatcaaagttttaatattgtggacattaagccagccaacatggaggagctcacggaggtgatcacagcagccgagttccacccccatcattgcaacaccttcgtgtacagcagcagcaaagggacaatccggctgtgtgacatgcgggcatctgccctgtgtgacaggcacaccaaattttttgaagagccggaagatccaagcaacagatcatttttctctgaaattatctcttcgatttcggatgtgaagttcagccacagtgggaggtatatcatgaccagggactacttgaccgtcaaagtctgggatctcaacatggaaaaccgccccatcgagacttaccaggttcatgactacctccgcagcaagctgtgttccctctatgaaaatgactgcatttttgataaatttgagtgtgtgtggaatgggtcagacagtgtcatcatgacaggctcctacaacaacttcttcaggatgttcgacagaaacaccaagcgtgatgtgacccttgaggcttcgagggaaaacagcaagccccgggctatcctcaaaccccgaaaagtgtgtgtggggggcaagcggagaaaagacgagatcagtgtcgacagtctggactttagcaaaaagatcttgcatacagcttggcatccttcagaaaatattatagcagtggcggctacaaataacctatatatattccaggacaaggttaactaggtggacaagttattacttaataatctcacatactgaatactagtcaaacaagtttttaaatgtttctttgggtcttcatttgatgcattgactttaatttccctatacaggaaatgattggaatagaattaaaaggagtccaacattcccagctccccagttctaagaaacttttgtcaaacccaataggtttgggacacttctgtttagaattgaaagctgccagctaacagtaattcttccatagttgacttgaacttctgatgcttttattgcccagttttctctggtgggtccagtgttttgttcctaggtgtctgctgcgataaaatgaggttgtctgtagtatttaaggagaaaagagataagttttttttaattaagcaattccatttgattgaaaaaaatcaacaaaaaataaacaccgtttactctta

SEQ ID NO: 732453 - DNA, 2065 bp, Homo sapiens
tcagcaaatcctgttcagaggagcttcagccaatgaagaggctatatcccggcttgcttgggggcttctgagtttgagctgcatgcagaaatgtaaggcagtgcttcctggcgctgatggcaaaatgggacccatctccagttattcctcgggcaccccagctttgcaaatctgggaaagaacctacataaacatattggtgatgtagccagcttaaaaggccgagagaatccttatggattcaggagactgtttttttatttagatttttattttttatttggaagatgaaatgcttctctcgttacctgccttacatcttcagacctccgaacaccatcctttcttccagctgccacacagaagctgacattatctctacggtagaattcaaccacacgggagaattactagcgacaggggacaaggggggtcgggttgtaatatttcaacgagagcaggagagtaaaaatcaggttcatcgtaggggtgaatacaatgtttacagcacattccagagccatgaacccgagttcgattacctgaagagtttagaaatagaagaaaaaatcaataaaataagatggctcccccagcagaatgcagcttactttcttctgtctactaatgataaaactgtgaagctgtggaaagtcagcgagcgtgataagaggccagaaggctacaatctgaaagatgaggagggccggctccgggatcctgccaccatcacaaccctgcgggtgcctgtcctgagacccatggacctgatggtggaggccaccccacgaagagtatttgccaacgcacacacatatcacatcaactccatatctgtcaacagcgactatgaaacctacatgtccgctgatgacctgaggattaacctatggaactttgaaataaccaatcaaagttttaatattgtggacattaagccagccaacatggaggagctcacggaggtgatcacagcagccgagttccacccccatcattgcaacaccttcgtgtacagcagcagcaaagggacaatccggctgtgtgacatgcgggcatctgccctgtgtgacaggcacaccaaattttttgaagagccggaagatccaagcaacagatcatttttctctgaaattatctcttcgatttcggatgtgaagttcagccacagtgggaggtatatcatgaccagggactacttgaccgtcaaagtctgggatctcaacatggaaaaccgccccatcgagacttaccaggttcatgactacctccgcagcaagctgtgttccctctatgaaaatgactgcatttttgataaatttgagtgtgtgtggaatgggtcagacagtgtcatcatgacaggctcctacaacaacttcttcaggatgttcgacagaaacaccaagcgtgatgtgacccttgaggcttcgagggaaaacagcaagccccgggctatcctcaaaccccgaaaagtgtgtgtggggggcaagcggagaaaagacgagatcagtgtcgacagtctggactttagcaaaaagatcttgcatacagcttggcatccttcagaaaatattatagcagtggcggctacaaataacctatatatattccaggacaaggttaactaggtggacaagttattacttaataatctcacatactgaatactagtcaaacaagtttttaaatgtttctttgggtcttcatttgatgcattgactttaatttccctatacaggaaatgattggaatagaattaaaaggagtccaacattcccagctccccagttctaagaaacttttgtcaaacccaataggtttgggacacttctgtttagaattgaaagctgccagctaacagtaattcttccatagttgacttgaacttctgatgcttttattgcccagttttctctggtgggtccagtgttttgttcctaggtgtctgctgcgataaaatgaggttgtctgtagtatttaaggagaaaagagataagttttttttaattaagcaattccatttgattgaaaaaaatcaacaaaaaataaacaccgtttactctta

SEQ ID NO: 732454 - DNA, 1982 bp, Homo sapiens
actgcaagtccttcgtaaccactccaggacgctgccagggcctgagaagggacaaactccaattgctccagttcaaactggtcctggcctggtcaaacggaggagacagagcagtgattcacagcaggacgtggaattgggacactcacccaggacacactatggtgcttcagccaagtgaaaggcactatcgagattggaaccacagaagatgtgccttgcttccccttcgccttctgccatgattgtaagtttcctgagacctccccagccatgcagaactctgacattatctctacggtagaattcaaccacacgggagaattactagcgacaggggacaaggggggtcgggttgtaatatttcaacgagagcaggagagtaaaaatcaggttcatcgtaggggtgaatacaatgtttacagcacattccagagccatgaacccgagttcgattacctgaagagtttagaaatagaagaaaaaatcaataaaataagatggctcccccagcagaatgcagcttactttcttctgtctactaatgataaaactgtgaagctgtggaaagtcagcgagcgtgataagaggccagaaggctacaatctgaaagatgaggagggccggctccgggatcctgccaccatcacaaccctgcgggtgcctgtcctgagacccatggacctgatggtggaggccaccccacgaagagtatttgccaacgcacacacatatcacatcaactccatatctgtcaacagcgactatgaaacctacatgtccgctgatgacctgaggattaacctatggaactttgaaataaccaatcaaagttttaatattgtggacattaagccagccaacatggaggagctcacggaggtgatcacagcagccgagttccacccccatcattgcaacaccttcgtgtacagcagcagcaaagggacaatccggctgtgtgacatgcgggcatctgccctgtgtgacaggcacaccaaattttttgaagagccggaagatccaagcaacagatcatttttctctgaaattatctcttcgatttcggatgtgaagttcagccacagtgggaggtatatcatgaccagggactacttgaccgtcaaagtctgggatctcaacatggaaaaccgccccatcgagacttaccaggttcatgactacctccgcagcaagctgtgttccctctatgaaaatgactgcatttttgataaatttgagtgtgtgtggaatgggtcagacagtgtcatcatgacaggctcctacaacaacttcttcaggatgttcgacagaaacaccaagcgtgatgtgacccttgaggcttcgagggaaaacagcaagccccgggctatcctcaaaccccgaaaagtgtgtgtggggggcaagcggagaaaagacgagatcagtgtcgacagtctggactttagcaaaaagatcttgcatacagcttggcatccttcagaaaatattatagcagtggcggctacaaataacctatatatattccaggacaaggttaactaggtggacaagttattacttaataatctcacatactgaatactagtcaaacaagtttttaaatgtttctttgggtcttcatttgatgcattgactttaatttccctatacaggaaatgattggaatagaattaaaaggagtccaacattcccagctccccagttctaagaaacttttgtcaaacccaataggtttgggacacttctgtttagaattgaaagctgccagctaacagtaattcttccatagttgacttgaacttctgatgcttttattgcccagttttctctggtgggtccagtgttttgttcctaggtgtctgctgcgataaaatgaggttgtctgtagtatttaaggagaaaagagataagttttttttaattaagcaattccatttgattgaaaaaaatcaacaaaaaataaacaccgtttactctta

SEQ ID NO: 732455 - DNA, 2169 bp, Homo sapiens
actgcaagtccttcgtaaccactccaggacgctgccagggcctgagaagggacaaactccaattgctccagttcaaactggtcctggcctggtcaaacggaggagacagagcagtgattcacagcaggacgtggtacttgcagactgaccgtcctctcaggactcactagggtctcttctctgacgagatgatacctggaattgggacactcacccaggacacactatggtgcttcagccaagtgaaaggcactatcgagattggaaccacagaaggctcggaccatggtgcagtcccactggctcccctgcccccctctcctgtgagactggctgcggggagggatcatggatacttgtctgccggcttctggttcccacgcaagtaagcctgctgtcaatggaggaggacattgatacccgcaaaatcaacaacagtttcctgcgcgaccacagctatgcgaccgaagctgacattatctctacggtagaattcaaccacacgggagaattactagcgacaggggacaaggggggtcgggttgtaatatttcaacgagagcaggagagtaaaaatcaggttcatcgtaggggtgaatacaatgtttacagcacattccagagccatgaacccgagttcgattacctgaagagtttagaaatagaagaaaaaatcaataaaataagatggctcccccagcagaatgcagcttactttcttctgtctactaatgataaaactgtgaagctgtggaaagtcagcgagcgtgataagaggccagaaggctacaatctgaaagatgaggagggccggctccgggatcctgccaccatcacaaccctgcgggtgcctgtcctgagacccatggacctgatggtggaggccaccccacgaagagtatttgccaacgcacacacatatcacatcaactccatatctgtcaacagcgactatgaaacctacatgtccgctgatgacctgaggattaacctatggaactttgaaataaccaatcaaagttttaatattgtggacattaagccagccaacatggaggagctcacggaggtgatcacagcagccgagttccacccccatcattgcaacaccttcgtgtacagcagcagcaaagggacaatccggctgtgtgacatgcgggcatctgccctgtgtgacaggcacaccaaattttttgaagagccggaagatccaagcaacagatcatttttctctgaaattatctcttcgatttcggatgtgaagttcagccacagtgggaggtatatcatgaccagggactacttgaccgtcaaagtctgggatctcaacatggaaaaccgccccatcgagacttaccaggttcatgactacctccgcagcaagctgtgttccctctatgaaaatgactgcatttttgataaatttgagtgtgtgtggaatgggtcagacagtgtcatcatgacaggctcctacaacaacttcttcaggatgttcgacagaaacaccaagcgtgatgtgacccttgaggcttcgagggaaaacagcaagccccgggctatcctcaaaccccgaaaagtgtgtgtggggggcaagcggagaaaagacgagatcagtgtcgacagtctggactttagcaaaaagatcttgcatacagcttggcatccttcagaaaatattatagcagtggcggctacaaataacctatatatattccaggacaaggttaactaggtggacaagttattacttaataatctcacatactgaatactagtcaaacaagtttttaaatgtttctttgggtcttcatttgatgcattgactttaatttccctatacaggaaatgattggaatagaattaaaaggagtccaacattcccagctccccagttctaagaaacttttgtcaaacccaataggtttgggacacttctgtttagaattgaaagctgccagctaacagtaattcttccatagttgacttgaacttctgatgcttttattgcccagttttctctggtgggtccagtgttttgttcctaggtgtctgctgcgataaaatgaggttgtctgtagtatttaaggagaaaagagataagttttttttaattaagcaattccatttgattgaaaaaaatcaacaaaaaataaacaccgtttactctta

SEQ ID NO: 732456 - DNA, 738 bp, Homo sapiens
ggccaggcaagcctgaatcctgtccctgccatctcgccactgcagctcgggtccagaaaggcaccattttgtcgcggctgcccgctctcccagggggaggagggatcttttttgcattttggagcggctgccaaggaggggaacctgttgggcatctccccagacccgcttgtgagcgcctccggggcgggcgggcgggaccagacccctcggggcacggcgtatttggcatccttcagaaaatattatagcagtggcggctacaaataacctatatatattccaggacaaggttaactaggtggacaagttattacttaataatctcacatactgaatactagtcaaacaagtttttaaatgtttctttgggtcttcatttgatgcattgactttaatttccctatacaggaaatgattggaatagaattaaaaggagtccaacattcccagctccccagttctaagaaacttttgtcaaacccaataggtttgggacacttctgtttagaattgaaagctgccagctaacagtaattcttccatagttgacttgaacttctgatgcttttattgcccagttttctctggtgggtccagtgttttgttcctaggtgtctgctgcgataaaatgaggttgtctgtagtatttaaggagaaaagagataagttttttttaattaagcaattccatttgattgaaaaaaatcaacaaaaaataaacaccgtttactctta

SEQ ID NO: 732457 - DNA, 2259 bp, Homo sapiens
tcagcaaatcctgttcagaggagcttcagccaatgaagaggctatatcccggcttgcttgggggcttctgagtttgagctgcatgcagaaatgtaaggcagtgcttcctggcgctgatggcaaaatgggacccatctccagttattcctcgggcaccccagctttgcaaatctgggaaagaacctacataaacatattggtgatgtagccagcttaaaaggccgagagaatccttatggattcaggagactgtttttttatttagatttttattttttatttggaagatgaaatgcttctctcgttacctgccttacatcttcagacctccgaacaccatcctttcttccagctgccacacagaaggctcggaccatggtgcagtcccactggctcccctgcccccctctcctgtgagactggctgcggggagggatcatggatacttgtctgccggcttctggttcccacgcaagtaagcctgctgtcaatggaggaggacattgatacccgcaaaatcaacaacagtttcctgcgcgaccacagctatgcgaccgaagctgacattatctctacggtagaattcaaccacacgggagaattactagcgacaggggacaaggggggtcgggttgtaatatttcaacgagagcaggagagtaaaaatcaggttcatcgtaggggtgaatacaatgtttacagcacattccagagccatgaacccgagttcgattacctgaagagtttagaaatagaagaaaaaatcaataaaataagatggctcccccagcagaatgcagcttactttcttctgtctactaatgataaaactgtgaagctgtggaaagtcagcgagcgtgataagaggccagaaggctacaatctgaaagatgaggagggccggctccgggatcctgccaccatcacaaccctgcgggtgcctgtcctgagacccatggacctgatggtggaggccaccccacgaagagtatttgccaacgcacacacatatcacatcaactccatatctgtcaacagcgactatgaaacctacatgtccgctgatgacctgaggattaacctatggaactttgaaataaccaatcaaagttttaatattgtggacattaagccagccaacatggaggagctcacggaggtgatcacagcagccgagttccacccccatcattgcaacaccttcgtgtacagcagcagcaaagggacaatccggctgtgtgacatgcgggcatctgccctgtgtgacaggcacaccaaattttttgaagagccggaagatccaagcaacagatcatttttctctgaaattatctcttcgatttcggatgtgaagttcagccacagtgggaggtatatcatgaccagggactacttgaccgtcaaagtctgggatctcaacatggaaaaccgccccatcgagacttaccaggttcatgactacctccgcagcaagctgtgttccctctatgaaaatgactgcatttttgataaatttgagtgtgtgtggaatgggtcagacagtgtcatcatgacaggctcctacaacaacttcttcaggatgttcgacagaaacaccaagcgtgatgtgacccttgaggcttcgagggaaaacagcaagccccgggctatcctcaaaccccgaaaagtgtgtgtggggggcaagcggagaaaagacgagatcagtgtcgacagtctggactttagcaaaaagatcttgcatacagcttggcatccttcagaaaatattatagcagtggcggctacaaataacctatatatattccaggacaaggttaactaggtggacaagttattacttaataatctcacatactgaatactagtcaaacaagtttttaaatgtttctttgggtcttcatttgatgcattgactttaatttccctatacaggaaatgattggaatagaattaaaaggagtccaacattcccagctccccagttctaagaaacttttgtcaaacccaataggtttgggacacttctgtttagaattgaaagctgccagctaacagtaattcttccatagttgacttgaacttctgatgcttttattgcccagttttctctggtgggtccagtgttttgttcctaggtgtctgctgcgataaaatgaggttgtctgtagtatttaaggagaaaagagataagttttttttaattaagcaattccatttgattgaaaaaaatcaacaaaaaataaacaccgtttactctta

SEQ ID NO: 732458 - DNA, 1989 bp, Homo sapiens
actgcaagtccttcgtaaccactccaggacgctgccagggcctgagaagggacaaactccaattgctccagttcaaactggtcctggcctggtcaaacggaggagacagagcagtgattcacagcaggacgtggaattgggacactcacccaggacacactatggtgcttcagccaagtgaaaggcactatcgagattggaaccacagaaggagccaagggagaacccaagacagagaatagtggcccaataatgaagcatgaattatccagatgaaaacacctatggaactgacattatctctacggtagaattcaaccacacgggagaattactagcgacaggggacaaggggggtcgggttgtaatatttcaacgagagcaggagagtaaaaatcaggttcatcgtaggggtgaatacaatgtttacagcacattccagagccatgaacccgagttcgattacctgaagagtttagaaatagaagaaaaaatcaataaaataagatggctcccccagcagaatgcagcttactttcttctgtctactaatgataaaactgtgaagctgtggaaagtcagcgagcgtgataagaggccagaaggctacaatctgaaagatgaggagggccggctccgggatcctgccaccatcacaaccctgcgggtgcctgtcctgagacccatggacctgatggtggaggccaccccacgaagagtatttgccaacgcacacacatatcacatcaactccatatctgtcaacagcgactatgaaacctacatgtccgctgatgacctgaggattaacctatggaactttgaaataaccaatcaaagttttaatattgtggacattaagccagccaacatggaggagctcacggaggtgatcacagcagccgagttccacccccatcattgcaacaccttcgtgtacagcagcagcaaagggacaatccggctgtgtgacatgcgggcatctgccctgtgtgacaggcacaccaaattttttgaagagccggaagatccaagcaacagatcatttttctctgaaattatctcttcgatttcggatgtgaagttcagccacagtgggaggtatatcatgaccagggactacttgaccgtcaaagtctgggatctcaacatggaaaaccgccccatcgagacttaccaggttcatgactacctccgcagcaagctgtgttccctctatgaaaatgactgcatttttgataaatttgagtgtgtgtggaatgggtcagacagtgtcatcatgacaggctcctacaacaacttcttcaggatgttcgacagaaacaccaagcgtgatgtgacccttgaggcttcgagggaaaacagcaagccccgggctatcctcaaaccccgaaaagtgtgtgtggggggcaagcggagaaaagacgagatcagtgtcgacagtctggactttagcaaaaagatcttgcatacagcttggcatccttcagaaaatattatagcagtggcggctacaaataacctatatatattccaggacaaggttaactaggtggacaagttattacttaataatctcacatactgaatactagtcaaacaagtttttaaatgtttctttgggtcttcatttgatgcattgactttaatttccctatacaggaaatgattggaatagaattaaaaggagtccaacattcccagctccccagttctaagaaacttttgtcaaacccaataggtttgggacacttctgtttagaattgaaagctgccagctaacagtaattcttccatagttgacttgaacttctgatgcttttattgcccagttttctctggtgggtccagtgttttgttcctaggtgtctgctgcgataaaatgaggttgtctgtagtatttaaggagaaaagagataagttttttttaattaagcaattccatttgattgaaaaaaatcaacaaaaaataaacaccgtttactctta

SEQ ID NO: 732459 - DNA, 286 bp, Homo sapiens
tgtggagtctaggatgttgaagagagctgggaggagatgccaagaacactaggctgcttcctaccatctagcttacagtccaacatgtgagtaacaccaatacaaatgaaaagccatcaaatgtgtccaatagtgaatatcatcccggcagtctctgagctaggagggagagtcctggagaggtgtttattttctgatataaaaaaggagccaagggagaacccaagacagagaatagtggcccaataatgaagcatgaattatccagatgaaaacacctatggaa

SEQ ID NO: 732460 - DNA, 1707 bp, Homo sapiens
agaaggaggaaggacagcacagctgacagccgtgctcagacagcttctggatcctaggctcatctccacagaggagaacacgcaggcagcagagaccatggggcccctcccagccccttcctgcacacagcgcatcacctggaaggggctcctgctcacagcatcacttttaaacttctggaacccgcccaccactgccgaagtcacgattgaagcccagccacccaaagtttctgaggggaaggatgttcttctacttgtccacaatttgccccagaatcttcctggctacttctggtacaaaggggaaatgacggacctctaccattacattatatcgtatatagttgatggtaaaataattatatatgggcctgcatacagtggaagagaaacagtatattccaacgcatccctgctgatccagaatgtcacgcaggaaggatgcaggaacctacaccttacacatcataaagcgaggtgatgagactagagaagaaattcgacatttcaccttcaccttatacttggagactcccaagccctacatctccagcagcaacttaaaccccagggaggccatggaggctgtgcgcttaatctgtgatcctgagactctggacgcaagctacctagtggtggatgaatggtcagagcctccctgtgactcacaggttgcagctgtccaaaaccaacaggaccctctatctatttggtgtcacaaagtatattgcaggaccctatgaatgtgaaatacggaacccagtgagtgccagtcgcagtgacccagtcaccctgaatctcctcccgaagctgcccatcccctacatcaccatcaacaacttaaaccccagggagaataaggatgtcttagccttcacctgtgaacctaagagtgagaactacacctacatttggtggctaaacggtcagagcctccccgtcagtcccggggtaaagcgacccattgaaaacaggatactcattctacccagtgtcacgagaaatgaaacaggaccctatcaatgtgaaatacgggaccgatatggtggcctccgcagtaacccagtcatcctaaatgtcctctatggtccagacctccccagaatttacccttcattcacctattaccgttcaggagaaaacctcgacttgtcctgcttcacggaatctaacccaccggcagagtatttttggacaattaatgggaagtttcagcaatcaggacaaaagctctttatcccccaaattactagaaatcatagcgggctctatgcttgctctgttcataactcagccactggcaaggaaatctccaaatccatgacagtcaaagtctctggtccctgccatggagacctgacagagtctcagtcatgactgcaacaactgagacactgagaaaaagaacaggctgataccttcatgaaattcaagacaaagaagaaaaaaactcaatgttattggactaaataatcaaaaggataatgttttcataattttttattggaaaatgtgctgattctttgaatgttttattctccagatttatgaactttttttcttcagcaattggtaaagtatacttttgtaaacaaaaattgaaatatttgcttttgctgtctatctgaatgccccagaattgtgaaactattcatgagtattcataggtttatggtaataaagttatttgcacatgttccgtaa

SEQ ID NO: 732461 - DNA, 411 bp, Homo sapiens
  misc_feature (13)..(13): n is a, c, g, or t
  misc_feature (27)..(27): n is a, c, g, or t
tggccagggaaanccccccaaaccccnggacagtcaaagtcctctggtccctgccatggagacctgacagagtctcagtcatgactgcaacaactgagacactgagaaaaagaacaggctgataccttcatgaaattcaagacaaagaagaaaaaaactcaatgttattggactaaataatcaaaaggataatgttttcataattttttattggaaaatgtgctgattctttgaatgttttattctccagatttatgaactttttttcttcagcaattggtaaagtatacttttgtaaacaaaaattgaaatatttgcttttgctgtctatctgaatgccccagaattgtgaaactattcatgagtattcataggtttatggtaataaagttatttgcacatgttccgtaa

SEQ ID NO: 732462 - DNA, 946 bp, Homo sapiens
cagcctacagccgtgctcaggaagtttctggatcctaggctcagctccacagaggagaacacgcaggcgcagagaccatggggcccctctcagcccctccctgcacacagcacatcacctggaaggggctcctgctcacagcatcacttttaaacttctggaacctgcctatcactgctcaagtcacgattgaagccctgccacccaaagtttccgaggggaaggatgttcttctacttgtccacaatttgcctcagaatcttgctggctacatctggtacaaaggacaactgatggacctctaccattacattacatcatatgtagtagacggtcaaataaatatatatgggcctgcatacactggacgagaaacagtatattccaatgcatccctgctgatccagaatgtcacccgggaagacgcaggatcctataccttacacatcataaagcgaggtgataggactagaggagtaactggatatttcaccttcaacttatacctgaagctgcccaagccctacatcaccatcaacaactcaaaacccagggagaataaggatgtcttagccttcacctgtgaacctaagagtgagaactacacctacatttggtggctaaatggtcagagcctcccggtcagtcccaggggtaaagcaacccattgaaaacaggatcctcattctacccagtgtcacgagaaatgaaacaggaccctatgaatgtgaaatacgggaccgagatggtggcatgcacagtgacccagtcaccctgaatgtcctctgtgagtatcttttgttcctctgtgggccaggacaccagcttaaatctaaatgaccacaagccagtcctctcagtctttctccggtccaagtatagacacctttatttctggacatctgagctggccatgactccctgcccttggaaaacctaggtaggc

SEQ ID NO: 732463 - DNA, 1428 bp, Homo sapiens
agaaggaggaaggacagcacagctgacagccgtgctcagacagcttctggatcctaggctcatctccacagaggagaacacgcaggcagcagagaccatggggcccctcccagccccttcctgcacacagcgcatcacctggaaggggctcctgctcacagcatcacttttaaacttctggaacccgcccaccactgccgaagtcacgattgaagcccagccacccaaagtttctgaggggaaggatgttcttctacttgtccacaatttgccccagaatcttcctggctacttctggtacaaaggggaaatgacggacctctaccattacattatatcgtatatagttgatggtaaaataattatatatgggcctgcatacagtggaagagaaacagtatattccaacgcatccctgctgatccagaatgtcacgcaggaaggatgcaggaacctacaccttacacatcataaagcgaggtgatgagactagagaagaaattcgacatttcaccttcaccttatacttggagactcccaagccctacatctccagcagcaacttaaaccccagggaggccatggaggctgtgcgcttaatctgtgatcctgagactctggacgcaagctacctagtggtggatgaatggtcagagcctccctgtgactcacaggttgcagctgtccaaaaccaacaggaccctctatctatttggtgtcacaaagtatattgcaggaccctatgaatgtgaaatacggaacccagtgagtgccagtcgcagtgacccagtcaccctgaatctcctccatggtccagacctccccagaatttacccttcattcacctattaccgttcaggagaaaacctcgacttgtcctgcttcacggaatctaacccaccggcagagtatttttggacaattaatgggaagtttcagcaatcaggacaaaagctctttatcccccaaattactagaaatcatagcgggctctatgcttgctctgttcataactcagccactggcaaggaaatctccaaatccatgacagtcaaagtctctggtccctgccatggagacctgacagagtctcagtcatgactgcaacaactgagacactgagaaaaagaacaggctgataccttcatgaaattcaagacaaagaagaaaaaaactcaatgttattggactaaataatcaaaaggataatgttttcataattttttattggaaaatgtgctgattctttgaatgttttattctccagatttatgaactttttttcttcagcaattggtaaagtatacttttgtaaacaaaaattgaaatatttgcttttgctgtctatctgaatgccccagaattgtgaaactattcatgagtattcataggtttatggtaataaagttatttgcacatgttccgtaa

SEQ ID NO: 732464 - DNA, 2014 bp, Homo sapiens
  misc_feature (1788)..(1788): n is a, c, g, or t
  misc_feature (1790)..(1790): n is a, c, g, or t
  misc_feature (1800)..(1800): n is a, c, g, or t
agaaggaggaaggacagcacagctgacagccgtgctcagacagcttctggatcctaggctcatctccacagaggagaacacgcaggcagcagagaccatggggcccctcccagccccttcctgcacacagcgcatcacctggaaggggctcctgctcacagcatcacttttaaacttctggaacccgcccaccactgccgaagtcacgattgaagcccagccacccaaagtttctgaggggaaggatgttcttctacttgtccacaatttgccccagaatcttcctggctacttctggtacaaaggggaaatgacggacctctaccattacattatatcgtatatagttgatggtaaaataattatatatgggcctgcatacagtggaagagaaacagtatattccaacgcatccctgctgatccagaatgtcacgcaggaaggatgcaggaacctacaccttacacatcataaagcgaggtgatgagactagagaagaaattcgacatttcaccttcaccttatacttggagactcccaagccctacatctccagcagcaacttaaaccccagggaggccatggaggctgtgcgcttaatctgtgatcctgagactctggacgcaagctacctagtggtggatgaatggtcagagcctccctgtgactcacaggttgcagctgtccaaaaccaacaggaccctctatctatttggtgtcacaaagtatattgcaggaccctatgaatgtgaaatacggaacccagtgagtgccagtcgcagtgacccagtcaccctgaatctcctcccgaagctgcccatcccctacatcaccatcaacaacttaaaccccagggagaataaggatgtcttagccttcacctgtgaacctaagagtgagaactacacctacatttggtggctaaacggtcagagcctccccgtcagtcccggggtaaagcgacccattgaaaacaggatactcattctacccagtgtcacgagaaatgaaacaggaccctatcaatgtgaaatacgggaccgatatggtggcctccgcagtaacccagtcatcctaaatgtcctctatggtccagacctccccagaatttacccttcattcacctattaccgttcaggagaaaacctcgacttgtcctgcttcacggaatctaacccaccggcagagtatttttggacaattaatgggaagtttcagcaatcaggacaaaagctctttatcccccaaattactagaaatcatagcgggctctatgcttgctctgttcataactcagccactggcaaggaaatctccaaatccatgacagtcaaagtctctggtccctgccatggagacctgacagagtctcagtcatgactgcaacaactgagacactgagaaaaagaacaggctgataccttcatgaaattcaagacaaagaagaaaaaaactcaatgttattggactaaataatcaaaaggataatgttttcataattttttattggaaaatgtgctgattctttgaatgttttattctccagatttatgaactttttttcttcagcaattggtaaagtatacttttgtaaacaaaaattgaaatatttgcttttgctgtctatctgaatgccccagaattgtgaaactattcatgagtattcataggtttatggtaataaagttatttgcacatgttccgtaaaaaaaaaaaaaaaaaaaaaaaaaaaacaaaaaaaaaaaaaacaaaaaacaaaacaaaacaacaaacaaaacaaaacaaaananaaagagaaanagacaaagagagagacaaaaaagaaaaacaagaaagaaaaaaaaagagaacaaaaagacaccaagaacagcacacaacacagaaaggaggcgggcgggcgcgcgacggcgggaaagaaagacgaaaaaaagaccaagggggcgcgaggacagccgaccgcgagtgacacgagagcgacgagaaagagcggcgccccgaagacaggaggtcgagt

SEQ ID NO: 732465 - DNA, 1735 bp, Homo sapiens
  misc_feature (1509)..(1509): n is a, c, g, or t
  misc_feature (1511)..(1511): n is a, c, g, or t
  misc_feature (1521)..(1521): n is a, c, g, or t
agaaggaggaaggacagcacagctgacagccgtgctcagacagcttctggatcctaggctcatctccacagaggagaacacgcaggcagcagagaccatggggcccctcccagccccttcctgcacacagcgcatcacctggaaggggctcctgctcacagcatcacttttaaacttctggaacccgcccaccactgccgaagtcacgattgaagcccagccacccaaagtttctgaggggaaggatgttcttctacttgtccacaatttgccccagaatcttcctggctacttctggtacaaaggggaaatgacggacctctaccattacattatatcgtatatagttgatggtaaaataattatatatgggcctgcatacagtggaagagaaacagtatattccaacgcatccctgctgatccagaatgtcacgcaggaaggatgcaggaacctacaccttacacatcataaagcgaggtgatgagactagagaagaaattcgacatttcaccttcaccttatacttggagactcccaagccctacatctccagcagcaacttaaaccccagggaggccatggaggctgtgcgcttaatctgtgatcctgagactctggacgcaagctacctagtggtggatgaatggtcagagcctccctgtgactcacaggttgcagctgtccaaaaccaacaggaccctctatctatttggtgtcacaaagtatattgcaggaccctatgaatgtgaaatacggaacccagtgagtgccagtcgcagtgacccagtcaccctgaatctcctccatggtccagacctccccagaatttacccttcattcacctattaccgttcaggagaaaacctcgacttgtcctgcttcacggaatctaacccaccggcagagtatttttggacaattaatgggaagtttcagcaatcaggacaaaagctctttatcccccaaattactagaaatcatagcgggctctatgcttgctctgttcataactcagccactggcaaggaaatctccaaatccatgacagtcaaagtctctggtccctgccatggagacctgacagagtctcagtcatgactgcaacaactgagacactgagaaaaagaacaggctgataccttcatgaaattcaagacaaagaagaaaaaaactcaatgttattggactaaataatcaaaaggataatgttttcataattttttattggaaaatgtgctgattctttgaatgttttattctccagatttatgaactttttttcttcagcaattggtaaagtatacttttgtaaacaaaaattgaaatatttgcttttgctgtctatctgaatgccccagaattgtgaaactattcatgagtattcataggtttatggtaataaagttatttgcacatgttccgtaaaaaaaaaaaaaaaaaaaaaaaaaaaacaaaaaaaaaaaaaacaaaaaacaaaacaaaacaacaaacaaaacaaaacaaaananaaagagaaanagacaaagagagagacaaaaaagaaaaacaagaaagaaaaaaaaagagaacaaaaagacaccaagaacagcacacaacacagaaaggaggcgggcgggcgcgcgacggcgggaaagaaagacgaaaaaaagaccaagggggcgcgaggacagccgaccgcgagtgacacgagagcgacgagaaagagcggcgccccgaagacaggaggtcgagt

SEQ ID NO: 732466 - DNA, 696 bp, Homo sapiens
  misc_feature (19)..(19): n is a, c, g, or t
  misc_feature (470)..(470): n is a, c, g, or t
  misc_feature (472)..(472): n is a, c, g, or t
  misc_feature (482)..(482): n is a, c, g, or t
ctgtctagaggatcccagngtcatgtccctgccatggagacctgacagagtctcagtcatgactgcaacaactgagacactgagaaaaagaacaggctgataccttcatgaaattcaagacaaagaagaaaaaaactcaatgttattggactaaataatcaaaaggataatgttttcataattttttattggaaaatgtgctgattctttgaatgttttattctccagatttatgaactttttttcttcagcaattggtaaagtatacttttgtaaacaaaaattgaaatatttgcttttgctgtctatctgaatgccccagaattgtgaaactattcatgagtattcataggtttatggtaataaagttatttgcacatgttccgtaaaaaaaaaaaaaaaaaaaaaaaaaaaacaaaaaaaaaaaaaacaaaaaacaaaacaaaacaacaaacaaaacaaaacaaaananaaagagaaanagacaaagagagagacaaaaaagaaaaacaagaaagaaaaaaaaagagaacaaaaagacaccaagaacagcacacaacacagaaaggaggcgggcgggcgcgcgacggcgggaaagaaagacgaaaaaaagaccaagggggcgcgaggacagccgaccgcgagtgacacgagagcgacgagaaagagcggcgccccgaagacaggaggtcgagt

SEQ ID NO: 732467 - DNA, 389 bp, Homo sapiens
  misc_feature (19)..(19): n is a, c, g, or t
ctgtctagaggatcccagngtcatgtccctgccatggagacctgacagagtctcagtcatgactgcaacaactgagacactgagaaaaagaacaggctgataccttcatgaaattcaagacaaagaagaaaaaaactcaatgttattggactaaataatcaaaaggataatgttttcataattttttattggaaaatgtgctgattctttgaatgttttattctccagatttatgaactttttttcttcagcaattggtaaagtatacttttgtaaacaaaaattgaaatatttgcttttgctgtctatctgaatgccccagaattgtgaaactattcatgagtattcataggtttatggtaataaagttatttgcacatgttccgtaa

SEQ ID NO: 732468 - DNA, 1148 bp, Homo sapiens
agaaggaggaaggacagcacagctgacagccgtgctcagacagcttctggatcctaggctcatctccacagaggagaacacgcaggcagcagagaccatggggcccctcccagccccttcctgcacacagcgcatcacctggaaggggctcctgctcacagcatcacttttaaacttctggaacccgcccaccactgccgaagtcacgattgaagcccagccacccaaagtttctgaggggaaggatgttcttctacttgtccacaatttgccccagaatcttcctggctacttctggtacaaaggggaaatgacggacctctaccattacattatatcgtatatagttgatggtaaaataattatatatgggcctgcatacagtggaagagaaacagtatattccaacgcatccctgctgatccagaatgtcacgcaggaaggatgcaggaacctacaccttacacatcataaagcgaggtgatgagactagagaagaaattcgacatttcaccttcaccttatactatggtccagacctccccagaatttacccttcattcacctattaccgttcaggagaaaacctcgacttgtcctgcttcacggaatctaacccaccggcagagtatttttggacaattaatgggaagtttcagcaatcaggacaaaagctctttatcccccaaattactagaaatcatagcgggctctatgcttgctctgttcataactcagccactggcaaggaaatctccaaatccatgacagtcaaagtctctggtccctgccatggagacctgacagagtctcagtcatgactgcaacaactgagacactgagaaaaagaacaggctgataccttcatgaaattcaagacaaagaagaaaaaaactcaatgttattggactaaataatcaaaaggataatgttttcataattttttattggaaaatgtgctgattctttgaatgttttattctccagatttatgaactttttttcttcagcaattggtaaagtatacttttgtaaacaaaaattgaaatatttgcttttgctgtctatctgaatgccccagaattgtgaaactattcatgagtattcataggtttatggtaataaagttatttgcacatgttccgtaa

SEQ ID NO: 732469 - DNA, 1455 bp, Homo sapiens
  misc_feature (1229)..(1229): n is a, c, g, or t
  misc_feature (1231)..(1231): n is a, c, g, or t
  misc_feature (1241)..(1241): n is a, c, g, or t
agaaggaggaaggacagcacagctgacagccgtgctcagacagcttctggatcctaggctcatctccacagaggagaacacgcaggcagcagagaccatggggcccctcccagccccttcctgcacacagcgcatcacctggaaggggctcctgctcacagcatcacttttaaacttctggaacccgcccaccactgccgaagtcacgattgaagcccagccacccaaagtttctgaggggaaggatgttcttctacttgtccacaatttgccccagaatcttcctggctacttctggtacaaaggggaaatgacggacctctaccattacattatatcgtatatagttgatggtaaaataattatatatgggcctgcatacagtggaagagaaacagtatattccaacgcatccctgctgatccagaatgtcacgcaggaaggatgcaggaacctacaccttacacatcataaagcgaggtgatgagactagagaagaaattcgacatttcaccttcaccttatactatggtccagacctccccagaatttacccttcattcacctattaccgttcaggagaaaacctcgacttgtcctgcttcacggaatctaacccaccggcagagtatttttggacaattaatgggaagtttcagcaatcaggacaaaagctctttatcccccaaattactagaaatcatagcgggctctatgcttgctctgttcataactcagccactggcaaggaaatctccaaatccatgacagtcaaagtctctggtccctgccatggagacctgacagagtctcagtcatgactgcaacaactgagacactgagaaaaagaacaggctgataccttcatgaaattcaagacaaagaagaaaaaaactcaatgttattggactaaataatcaaaaggataatgttttcataattttttattggaaaatgtgctgattctttgaatgttttattctccagatttatgaactttttttcttcagcaattggtaaagtatacttttgtaaacaaaaattgaaatatttgcttttgctgtctatctgaatgccccagaattgtgaaactattcatgagtattcataggtttatggtaataaagttatttgcacatgttccgtaaaaaaaaaaaaaaaaaaaaaaaaaaaacaaaaaaaaaaaaaacaaaaaacaaaacaaaacaacaaacaaaacaaaacaaaananaaagagaaanagacaaagagagagacaaaaaagaaaaacaagaaagaaaaaaaaagagaacaaaaagacaccaagaacagcacacaacacagaaaggaggcgggcgggcgcgcgacggcgggaaagaaagacgaaaaaaagaccaagggggcgcgaggacagccgaccgcgagtgacacgagagcgacgagaaagagcggcgccccgaagacaggaggtcgagt

SEQ ID NO: 732470 - DNA, 1967 bp, Homo sapiens
agaaggaggaaggacagcacagctgacagccgtgctcagacagcttctggatcctaggctcatctccacagaggagaacacgcaggcagcagagaccatggggcccctcccagccccttcctgcacacagcgcatcacctggaaggggctcctgctcacagcatcacttttaaacttctggaacccgcccaccactgccgaagtcacgattgaagcccagccacccaaagtttctgaggggaaggatgttcttctacttgtccacaatttgccccagaatcttcctggctacttctggtacaaaggggaaatgacggacctctaccattacattatatcgtatatagttgatggtaaaataattatatatgggcctgcatacagtggaagagaaacagtatattccaacgcatccctgctgatccagaatgtcacgcaggaaggatgcaggaacctacaccttacacatcataaagcgaggtgatgagactagagaagaaattcgacatttcaccttcaccttatacttggagactcccaagccctacatctccagcagcaacttaaaccccagggaggccatggaggctgtgcgcttaatctgtgatcctgagactctggacgcaagctacctagtggtggatgaatggtcagagcctccctgtgactcacaggttgcagctgtccaaaaccaacaggaccctctatctatttggtgtcacaaagtatattgcaggaccctatgaatgtgaaatacggaacccagtgagtgccagtcgcagtgacccagtcaccctgaatctcctccatggtccagacctccccagaatttacccttcattcacctattaccgttcaggagaaaacctcgacttgtcctgcttcacggaatctaacccaccggcagagtatttttggacaattaatgggaagtttcagcaatcaggacaaaagctctttatcccccaaattactagaaatcatagcgggctctatgcttgctctgttcataactcagccactggcaaggaaatctccaaatccatgacagtcaaagtctctggtaagtggatcccagcatccttggcagtagggttttatgtggagtctatctggctttcagagaagagtcaggaaaacatttttattcccagcctgtgtcccatgggcacaagcaaatcccaaattctcctcctgaaccctcccaatttgtctctacagactctcttctccttgtttttctgttttcttatggctgaccttgtgtctggcctgaaaaaggtagggagggggctttatcagccctgagccctatgtggtagaagaggcttcagagagggacaagaagggaattccaaggcagcgtccgcaggtcgtggtcacctgccagcgactgtctcagactgggcagggaggctttggcatgacttaagaggaagggcagtcttgggcccgctatgcaggtcctggcaaacctggctgccctgtctccatccctgtccctcagggtagcaccatggcaggactgggggaactggagtgtccttgctgtatccctgttgtgaggttccttccaggggctggcactgaagcaagggtgctgggaccccatggccttcagccctggctgagcaactgggctgtagggcagggcacttctgaggtcaggtcttggtaggtgcctgcatctgtctgccttctggctgacaatcctggaaatctgttctccagaatcaggccaaaaagttcacagtcaaatggggaggggtattcttcatgcaggagacccctaggccctggaggctgcaacatacctcaatcctgtcccaggccggatcctcctgaagcccttttcgcagcactgctatcctccaaagccattgtaaatgtgtgtacagtgtgtataaaccttcttcttctttttttttttttaaactgaggattgtcattaaacacagttgttttct

SEQ ID NO: 732471 - DNA, 965 bp, Homo sapiens
agaaggaggaaggacagcacagctgacagccgtgctcagacagcttctggatcctaggctcatctccacagaggagaacacgcaggcagcagagaccatggggcccctcccagccccttcctgcacacagcgcatcacctggaaggggctcctgctcacagcatcacttttaaacttctggaacccgcccaccactgccgaagtcacgattgaagcccagccacccaaagtttctgaggggaaggatgttcttctacttgtccacaatttgccccagaatcttcctggctacttctggtacaaaggggaaatgacggacctctaccattacattatatcgtatatagttgatggtaaaataattatatatgggcctgcatacagtggaagagaaacagtatattccaacgcatccctgctgatccagaatgtcacgcaggaaggatgcaggaacctacaccttacacatcataaagcgaggtgatgagactagagaagaaattcgacatttcaccttcaccttatacttggagactcccaagccctacatctccagcagcaacttaaaccccagggaggccatggaggctgtgcgcttaatctgtgatcctgagactctggacgcaagctacctagtggtggatgaatggtcagagcctccctgtgactcacaggttgcagctgtccaaaaccaacaggaccctctatctatttggtgtcacaaagtatattgcaggaccctatgaatgtgaaatacggaacccagtgagtgccagtcgcatgacccagtcaccctgaatgtcctctgtgagtatcttttgttcctctgtgggccaggacaccagcttaaatccaaaccaccagaggccaggtctctcagtctctctccagtccaagtatagacacctttacttctggacatccgaggtggccatgactccctgccctgggaaaacctaggtagg

SEQ ID NO: 732472 - DNA, 465 bp, Homo sapiens
aactctgattgaagtatgcctgtggaggaatcaaaggtgccacacaggacaatcttctctctgttatccacacagcaaagctgtccaagccctacatcacaatcaacaacttaaaccccagagagaataaggatgtcttaaccttcacctgtgaacctaagagtaagaactacacctacatttggtggctaaatggtcagagcctccctgtcagtcccagggtaaagcgacccattgaaaacaggatcctcattctacccaatgtcacgagaaatgaaacaggaccttatcaatgtgaaatacgggaccgatatggtggcatccgcagtgacccagtcaccctgaatgtcctctgtgagtatcttttgttcctctgtgggccaggacaccagcttaaatccaaaccaccagaggccaggtctctcagtctctctccagtccaagtatagacacctttacttctgg

SEQ ID NO: 732473 - DNA, 2049 bp, Homo sapiens
ctgccccgggaggaggctcgacagaaggaggaaggacagcacagctgacagccgtactcaggaagcttctggatcctaggcttatctccacagaggagaacacacaagcagcagagaccatggggcccctctcagcccctccctgcacacacctcatcacttggaagggggtcctgctcacagcatcacttttaaacttctggaatccgcccacaactgcccaagtcacgattgaagcccagccacccaaagtttctgaggggaaggatgttcttctacttgtccacaatttgccccagaatcttgctggctacatttggtacaaagggcaaatgacatacctctaccattacattacatcatatgtagtagacggtcaaagaattatatatgggcctgcatacagtggaagagaaagagtatattccaatgcatccctgctgatccagaatgtcacgcaggaggatgcaggatcctacaccttacacatcataaagcgacgcgatgggactggaggagtaactggacatttcaccttcaccttacacctggagactcccaagccctccatctccagcagcaacttaaatcccagggaggccatggaggctgtgatcttaacctgtgatcctgcgactccagccgcaagctaccagtggtggatgaatggtcagagcctccctatgactcacaggttgcagctgtccaaaaccaacaggaccctctttatatttggtgtcacaaagtatattgcaggaccctatgaatgtgaaatacggaacccagtgagtgccagccgcagtgacccagtcaccctgaatctcctcccaaagctgtccaagccctacatcacaatcaacaacttaaaccccagagagaataaggatgtcttaaccttcacctgtgaacctaagagtgagaactacacctacatttggtggctaaatggtcagagcctccctgtcagtcccagggtaaagcgacccattgaaaacaggatcctcattctacccaatgtcacgagaaatgaaacaggaccttatcaatgtgaaatacgggaccgatatggtggcatccgcagtgacccagtcaccctgaatgtcctctatggtccagacctccccagcatttacccttcattcacctattaccgttcaggagaaaacctctacttgtcctgcttcgccgagtctaacccacgggcacaatattcttggacaattaatgggaagtttcagctatcaggacaaaagctctctatcccccaaataactacaaagcatagtgggctctatgcttgctctgttcgtaactcagccactggcaaggaaagctccaaatccatcacagtcaaagtctctgactggatattaccctgaattctactagttcctccaattccattttctcccatggaatcacgaagagcaagacccactctgttccagaagccctataagctggaggtggacaactcgatgtaaatttcatgggaaaacccttgtacctgacatgtgagccactcagaactcaccaaaatgttcgacaccataacaacagctactcaaactgtaaaccaggataacaagttgatgacttcacactgtggacagtttttccaaagatgtcagaacaagactccccatcatgataaggctcccacccctcttaactgtccttgctcatgcctgcctctttcacttggcaggataatgcagtcattagaatttcacatgtagtagcttctgagggtaacaacagagtgtcagatatgtcatctcaacctcaaacttttacgtaacatctcaggggaaatgtggctctctccatcttgcatacagggctcccaatagaaatgaacacagagatattgcctgtgtgtttgcagagaagatggtttctataaagagtaggaaagctgaaattatagtagagtctcctttaaatgcacattgtgtggatggctctcaccatttcctaagagatacagtgtaaaacgtgacagtaatactgattctagcagaataaaacatgtaccacatttgctaa

SEQ ID NO: 732474 - DNA, 643 bp, Homo sapiens; identical to SEQ ID NO: 362259

SEQ ID NO: 732475 - DNA, 389 bp, Homo sapiens
gctcggtacccctctatccttaatctggagtaactggacatttcaccttcaccttacacctggagactcccaagccctccatctccagcagcaacttaaatcccagggaggccatggaggctgtgatcttaacctgtgatcctgcgactccagccgcaagctaccagtggtggatgaatggtcagagcctccctatgactcacaggttgcagctgtccaaaaccaacaggaccctctttatatttggtgtcacaaagtatattgcaggaccctatgaatgtgaaatacggaacccagtgagtgccagccgcagtgacccagtcaccctgaatctcctcccaaagctgtccaagccctacatcacaatcaacaacttaaaccccagagag

SEQ ID NO: 732476 - DNA, 878 bp, Homo sapiens
ctgccccgggaggaggctcgacagaaggaggaaggacagcacagctgacagccgtactcaggaagcttctggatcctaggcttatctccacagaggagaacacacaagcagcagagaccatggggcccctctcagcccctccctgcacacacctcatcacttggaagggggtcctgctcacagcatcacttttaaacttctggaatccgcccacaactgcccaagtcacgattgaagcccagccacccaaagtttctgaggggaaggatgttcttctacttgtccacaatttgccccagaatcttgctggctacatttggtacaaagggcaaatgacatacctctaccattacattacatcatatgtagtagacggtcaaagaattatatatgggcctgcatacagtggaagagaaagagtatattccaatgcatccctgctgatccagaatgtcacgcaggaggatgcaggatcctacaccttacacatcataaagcgacgcgatgggactggaggagtaactggacatttcaccttcaccttacacctggagactcccaagccctccatctccagcagcaacttaaatcccagggaggccatggaggctgtgatcttaacctgtgatcctgcgactccagccgcaagctaccagtggtggatgaatggtcagagcctccctatgactcacaggttgcagctgtccaaaaccaacaggaccctctttatatttggtgtcacaaagtatattgcaggaccctatgaatgtgaaatacggaacccagtgagtgccagccgcagtgacccagtcaccctgaatctcctcccaaagctgtccaagccctacatcacaatcaacaacttaaaccccagagag

SEQ ID NO: 732477 - DNA, 1866 bp, Homo sapiens
ctgctccgcccctctctgctgctccgcccctctctgcccaagtcacgattgaagcccagccacccaaagtttctgaggggaaggatgttcttctacttgtccacaatttgccccagaatcttgctggctacatttggtacaaagggcaaatgacatacctctaccattacattacatcatatgtagtagacggtcaaagaattatatatgggcctgcatacagtggaagagaaagagtatattccaatgcatccctgctgatccagaatgtcacgcaggaggatgcaggatcctacaccttacacatcataaagcgacgcgatgggactggaggagtaactggacatttcaccttcaccttacacctggagactcccaagccctccatctccagcagcaacttaaatcccagggaggccatggaggctgtgatcttaacctgtgatcctgcgactccagccgcaagctaccagtggtggatgaatggtcagagcctccctatgactcacaggttgcagctgtccaaaaccaacaggaccctctttatatttggtgtcacaaagtatattgcaggaccctatgaatgtgaaatacggaacccagtgagtgccagccgcagtgacccagtcaccctgaatctcctcccaaagctgtccaagccctacatcacaatcaacaacttaaaccccagagagaataaggatgtcttaaccttcacctgtgaacctaagagtgagaactacacctacatttggtggctaaatggtcagagcctccctgtcagtcccagggtaaagcgacccattgaaaacaggatcctcattctacccaatgtcacgagaaatgaaacaggaccttatcaatgtgaaatacgggaccgatatggtggcatccgcagtgacccagtcaccctgaatgtcctctatggtccagacctccccagcatttacccttcattcacctattaccgttcaggagaaaacctctacttgtcctgcttcgccgagtctaacccacgggcacaatattcttggacaattaatgggaagtttcagctatcaggacaaaagctctctatcccccaaataactacaaagcatagtgggctctatgcttgctctgttcgtaactcagccactggcaaggaaagctccaaatccatcacagtcaaagtctctgactggatattaccctgaattctactagttcctccaattccattttctcccatggaatcacgaagagcaagacccactctgttccagaagccctataagctggaggtggacaactcgatgtaaatttcatgggaaaacccttgtacctgacatgtgagccactcagaactcaccaaaatgttcgacaccataacaacagctactcaaactgtaaaccaggataacaagttgatgacttcacactgtggacagtttttccaaagatgtcagaacaagactccccatcatgataaggctcccacccctcttaactgtccttgctcatgcctgcctctttcacttggcaggataatgcagtcattagaatttcacatgtagtagcttctgagggtaacaacagagtgtcagatatgtcatctcaacctcaaacttttacgtaacatctcaggggaaatgtggctctctccatcttgcatacagggctcccaatagaaatgaacacagagatattgcctgtgtgtttgcagagaagatggtttctataaagagtaggaaagctgaaattatagtagagtctcctttaaatgcacattgtgtggatggctctcaccatttcctaagagatacagtgtaaaacgtgacagtaatactgattctagcagaataaaacatgtaccacatttgctaa

SEQ ID NO: 732478 - DNA, 695 bp, Homo sapiens
ctgctccgcccctctctgctgctccgcccctctctgcccaagtcacgattgaagcccagccacccaaagtttctgaggggaaggatgttcttctacttgtccacaatttgccccagaatcttgctggctacatttggtacaaagggcaaatgacatacctctaccattacattacatcatatgtagtagacggtcaaagaattatatatgggcctgcatacagtggaagagaaagagtatattccaatgcatccctgctgatccagaatgtcacgcaggaggatgcaggatcctacaccttacacatcataaagcgacgcgatgggactggaggagtaactggacatttcaccttcaccttacacctggagactcccaagccctccatctccagcagcaacttaaatcccagggaggccatggaggctgtgatcttaacctgtgatcctgcgactccagccgcaagctaccagtggtggatgaatggtcagagcctccctatgactcacaggttgcagctgtccaaaaccaacaggaccctctttatatttggtgtcacaaagtatattgcaggaccctatgaatgtgaaatacggaacccagtgagtgccagccgcagtgacccagtcaccctgaatctcctcccaaagctgtccaagccctacatcacaatcaacaacttaaaccccagagag

SEQ ID NO: 732479 - DNA, 1893 bp, Homo sapiens
ctgctccgcccctctctgctgctccgcccctctctgcccaagtcacgattgaagcccagccacccaaagtttctgaggggaaggatgttcttctacttgtccacaatttgccccagaatcttgctggctacatttggtacaaagggcaaatgacatacctctaccattacattacatcatatgtagtagacggtcaaagaattatatatgggcctgcatacagtggaagagaaagagtatattccaatgcatccctgctgatccagaatgtcacgcaggaggatgcaggatcctacaccttacacatcataaagcgacgcgatgggactggaggagtaactggacatttcaccttcaccttacacctggagactcccaagccctccatctccagcagcaacttaaatcccagggaggccatggaggctgtgatcttaacctgtgatcctgcgactccagccgcaagctaccagtggtggatgaatggtcagagcctccctatgactcacaggttgcagctgtccaaaaccaacaggaccctctttatatttggtgtcacaaagtatattgcaggaccctatgaatgtgaaatacggaacccagtgagtgccagccgcagtgacccagtcaccctgaatctcctcccaaagctgtccaagccctacatcacaatcaacaacttaaaccccagagagaataaggatgtcttaaccttcacctgtgaacctaagagtgagaactacacctacatttggtggctaaatggtcagagcctccctgtcagtcccagggtaaagcgacccattgaaaacaggatcctcattctacccaatgtcacgagaaatgaaacaggaccttatcaatgtgaaatacgggaccgatatggtggcatccgcagtgacccagtcaccctgaatgtcctctatggtccagacctccccagcatttacccttcattcacctattaccgttcaggagaaaacctctacttgtcctgcttcgccgagtctaacccacgggcacaatattcttggacaattaatgggaagtttcagctatcaggacaaaagctctctatcccccaaataactacaaagcatagtgggctctatgcttgctctgttcgtaactcagccactggcaaggaaagctccaaatccatcacagtcaaagtctctgactggatattaccctgaattctactagttcctccaattccattttctcccatggaatcacgaagagcaagacccactctgttccagaagccctataagctggaggtggacaactcgatgtaaatttcatgggaaaacccttgtacctgacatgtgagccactcagaactcaccaaaatgttcgacaccataacaacagctactcaaactgtaaaccaggataacaagttgatgacttcacactgtggacagtttttccaaagatgtcagaacaagactccccatcatgataaggctcccacccctcttaactgtccttgctcatgcctgcctctttcacttggcaggataatgcagtcattagaatttcacatgtagtagcttctgagggtaacaacagagtgtcagatatgtcatctcaacctcaaacttttacgtaacatctcaggggaaatgtggctctctccatcttgcatacagggctcccaatagaaatgaacacagagatattgcctgtgtgtttgcagagaagatggtttctataaagagtaggaaagctgaaattatagtagagtctcctttaaatgcacattgtgtggatggctctcaccatttcctaagagatacagtgtaaaacgtgacagtaatactgattctagcagaataaaacatgtaccacatttgctaaaaaaaaaaaaaacaacaaaaaaaaacc

SEQ ID NO: 732480 - DNA, 2076 bp, Homo sapiens
ctgccccgggaggaggctcgacagaaggaggaaggacagcacagctgacagccgtactcaggaagcttctggatcctaggcttatctccacagaggagaacacacaagcagcagagaccatggggcccctctcagcccctccctgcacacacctcatcacttggaagggggtcctgctcacagcatcacttttaaacttctggaatccgcccacaactgcccaagtcacgattgaagcccagccacccaaagtttctgaggggaaggatgttcttctacttgtccacaatttgccccagaatcttgctggctacatttggtacaaagggcaaatgacatacctctaccattacattacatcatatgtagtagacggtcaaagaattatatatgggcctgcatacagtggaagagaaagagtatattccaatgcatccctgctgatccagaatgtcacgcaggaggatgcaggatcctacaccttacacatcataaagcgacgcgatgggactggaggagtaactggacatttcaccttcaccttacacctggagactcccaagccctccatctccagcagcaacttaaatcccagggaggccatggaggctgtgatcttaacctgtgatcctgcgactccagccgcaagctaccagtggtggatgaatggtcagagcctccctatgactcacaggttgcagctgtccaaaaccaacaggaccctctttatatttggtgtcacaaagtatattgcaggaccctatgaatgtgaaatacggaacccagtgagtgccagccgcagtgacccagtcaccctgaatctcctcccaaagctgtccaagccctacatcacaatcaacaacttaaaccccagagagaataaggatgtcttaaccttcacctgtgaacctaagagtgagaactacacctacatttggtggctaaatggtcagagcctccctgtcagtcccagggtaaagcgacccattgaaaacaggatcctcattctacccaatgtcacgagaaatgaaacaggaccttatcaatgtgaaatacgggaccgatatggtggcatccgcagtgacccagtcaccctgaatgtcctctatggtccagacctccccagcatttacccttcattcacctattaccgttcaggagaaaacctctacttgtcctgcttcgccgagtctaacccacgggcacaatattcttggacaattaatgggaagtttcagctatcaggacaaaagctctctatcccccaaataactacaaagcatagtgggctctatgcttgctctgttcgtaactcagccactggcaaggaaagctccaaatccatcacagtcaaagtctctgactggatattaccctgaattctactagttcctccaattccattttctcccatggaatcacgaagagcaagacccactctgttccagaagccctataagctggaggtggacaactcgatgtaaatttcatgggaaaacccttgtacctgacatgtgagccactcagaactcaccaaaatgttcgacaccataacaacagctactcaaactgtaaaccaggataacaagttgatgacttcacactgtggacagtttttccaaagatgtcagaacaagactccccatcatgataaggctcccacccctcttaactgtccttgctcatgcctgcctctttcacttggcaggataatgcagtcattagaatttcacatgtagtagcttctgagggtaacaacagagtgtcagatatgtcatctcaacctcaaacttttacgtaacatctcaggggaaatgtggctctctccatcttgcatacagggctcccaatagaaatgaacacagagatattgcctgtgtgtttgcagagaagatggtttctataaagagtaggaaagctgaaattatagtagagtctcctttaaatgcacattgtgtggatggctctcaccatttcctaagagatacagtgtaaaacgtgacagtaatactgattctagcagaataaaacatgtaccacatttgctaaaaaaaaaaaaaacaacaaaaaaaaacc

SEQ ID NO: 732481 - DNA, 979 bp, Homo sapiens
ctgctccgcccctctctgctgctccgcccctctctgcccaagtcacgattgaagcccagccacccaaagtttctgaggggaaggatgttcttctacttgtccacaatttgccccagaatcttgctggctacatttggtacaaagggcaaatgacatacctctaccattacattacatcatatgtagtagacggtcaaagaattatatatgggcctgcatacagtggaagagaaagagtatattccaatgcatccctgctgatccagaatgtcacgcaggaggatgcaggatcctacaccttacacatcataaagcgacgcgatgggactggaggagtaactggacatttcaccttcaccttacacctggagactcccaagccctccatctccagcagcaacttaaatcccagggaggccatggaggctgtgatcttaacctgtgatcctgcgactccagccgcaagctaccagtggtggatgaatggtcagagcctccctatgactcacaggttgcagctgtccaaaaccaacaggaccctctttatatttggtgtcacaaagtatattgcaggaccctatgaatgtgaaatacggaacccagtgagtgccagccgcagtgacccagtcaccctgaatctcctcccaaagctgtccaagccctacatcacaatcaacaacttaaaccccagagagaataaggatgtcttaaccttcacctgtgaacctaagagtgagaactacacctacatttggtggctaaatggtcagagcctccctgtcagtcccagggtaaagcgacccattgaaaacaggatcctcattctacccaatgtcacgagaaatgaaacaggaccttatcaatgtgaaatacgggaccgatatggtggcatccgcagtgacccagtcaccctgaatgtcctctatggtccagacctccccagcattacccttctgtcgtcttctcgagtcctctaatc

SEQ ID NO: 732482 - DNA, 1087 bp, Homo sapiens
ctgctccgcccctctctgctgctccgcccctctctgcccaagtcacgattgaagcccagccacccaaagtttctgaggggaaggatgttcttctacttgtccacaatttgccccagaatcttgctggctacatttggtacaaagggcaaatgacatacctctaccattacattacatcatatgtagtagacggtcaaagaattatatatgggcctgcatacagtggaagagaaagagtatattccaatgcatccctgctgatccagaatgtcacgcaggaggatgcaggatcctacaccttacacatcataaagcgacgcgatgggactggaggagtaactggacatttcaccttcaccttacacctggagactcccaagccctccatctccagcagcaacttaaatcccagggaggccatggaggctgtgatcttaacctgtgatcctgcgactccagccgcaagctaccagtggtggatgaatggtcagagcctccctatgactcacaggttgcagctgtccaaaaccaacaggaccctctttatatttggtgtcacaaagtatattgcaggaccctatgaatgtgaaatacggaacccagtgagtgccagccgcagtgacccagtcaccctgaatctcctcccaaagctgtccaagccctacatcacaatcaacaacttaaaccccagagagaataaggatgtcttaaccttcacctgtgaacctaagagtgagaactacacctacatttggtggctaaatggtcagagcctccctgtcagtcccagggtaaagcgacccattgaaaacaggatcctcattctacccaatgtcacgagaaatgaaacaggaccttatcaatgtgaaatacgggaccgatatggtggcatccgcagtgacccagtcaccctgaatgtcctctatggtccagacctccccagcatttacccttcattcacctattaccgttcaggagaaaacctctacttgtcctgcttcgcggaatctaacccaccggcagagtatttttggacaattaatgggaagtttcagcaatcaggacaaaagctctctatcccccaaat

SEQ ID NO: 732483 - DNA, 1392 bp, Homo sapiens
ctgctccgcccctctctgctgctccgcccctctctgcccaagtcacgattgaagcccagccacccaaagtttctgaggggaaggatgttcttctacttgtccacaatttgccccagaatcttgctggctacatttggtacaaagggcaaatgacatacctctaccattacattacatcatatgtagtagacggtcaaagaattatatatgggcctgcatacagtggaagagaaagagtatattccaatgcatccctgctgatccagaatgtcacgcaggaggatgcaggatcctacaccttacacatcataaagcgacgcgatgggactggaggagtaactggacatttcaccttcaccttacacctggagactcccaagccctccatctccagcagcaacttaaatcccagggaggccatggaggctgtgatcttaacctgtgatcctgcgactccagccgcaagctaccagtggtggatgaatggtcagagcctccctatgactcacaggttgcagctgtccaaaaccaacaggaccctctttatatttggtgtcacaaagtatattgcaggaccctatgaatgtgaaatacggaacccagtgagtgccagccgcagtgacccagtcaccctgaatctcctcccaaagctgtccaagccctacatcacaatcaacaacttaaaccccagagagaataaggatgtcttaaccttcacctgtgaacctaagagtgagaactacacctacatttggtggctaaatggtcagagcctccctgtcagtcccagggtaaagcgacccattgaaaacaggatcctcattctacccaatgtcacgagaaatgaaacaggaccttatcaatgtgaaatacgggaccgatatggtggcatccgcagtgacccagtcaccctgaatgtcctctatggtccagacctccccagcatttacccttcattcacctattaccgttcaggagaaaacctctacttgtcctgcttcgccgagtctaacccacgggcacaatattcttggacaattaatgggaagtttcagctatcaggacaaaagctctctatcccccaaataactacaaagcatagtgggctctatgcttgctctgttcgtaactcagccactggcaaggaaagctccaaatccatcacagtcaaagtctctggacacatttcaaatcattggttatattaccaaggctttgactgggatgttatattcaagaatatagatagaatgaaccaatatgaactgcaggcaaagtctgaagtcagccttggtttggcttcctattctcaagggttttgtaaaagtttaatctgagagtccttataaaaacttagagcaaataaaattctaaaagagcgcctaaaaggtc

SEQ ID NO: 732484 - DNA, 1846 bp, Homo sapiens
ctgctccgcccctctctgctgctccgcccctctctgcccaagtcacgattgaagcccagccacccaaagtttctgaggggaaggatgttcttctacttgtccacaatttgccccagaatcttgctggctacatttggtacaaagggcaaatgacatacctctaccattacattacatcatatgtagtagacggtcaaagaattatatatgggcctgcatacagtggaagagaaagagtatattccaatgcatccctgctgatccagaatgtcacgcaggaggatgcaggatcctacaccttacacatcataaagcgacgcgatgggactggaggagtaactggacatttcaccttcaccttacacctggagactcccaagccctccatctccagcagcaacttaaatcccagggaggccatggaggctgtgatcttaacctgtgatcctgcgactccagccgcaagctaccagtggtggatgaatggtcagagcctccctatgactcacaggttgcagctgtccaaaaccaacaggaccctctttatatttggtgtcacaaagtatattgcaggaccctatgaatgtgaaatacggaacccagtgagtgccagccgcagtgacccagtcaccctgaatctcctcccaaagctgtccaagccctacatcacaatcaacaacttaaaccccagagagaataaggatgtcttaaccttcacctgtgaacctaagagtgagaactacacctacatttggtggctaaatggtcagagcctccctgtcagtcccagggtaaagcgacccattgaaaacaggatcctcattctacccaatgtcacgagaaatgaaacaggaccttatcaatgtgaaatacgggaccgatatggtggcatccgcagtgacccagtcaccctgaatgtcctcttcaggagaaaacctctacttgtcctgcttcgccgagtctaacccacgggcacaatattcttggacaattaatgggaagtttcagctatcaggacaaaagctctctatcccccaaataactacaaagcatagtgggctctatgcttgctctgttcgtaactcagccactggcaaggaaagctccaaatccatcacagtcaaagtctctgactggatattaccctgaattctactagttcctccaattccattttctcccatggaatcacgaagagcaagacccactctgttccagaagccctataagctggaggtggacaactcgatgtaaatttcatgggaaaacccttgtacctgacatgtgagccactcagaactcaccaaaatgttcgacaccataacaacagctactcaaactgtaaaccaggataacaagttgatgacttcacactgtggacagtttttccaaagatgtcagaacaagactccccatcatgataaggctcccacccctcttaactgtccttgctcatgcctgcctctttcacttggcaggataatgcagtcattagaatttcacatgtagtagcttctgagggtaacaacagagtgtcagatatgtcatctcaacctcaaacttttacgtaacatctcaggggaaatgtggctctctccatcttgcatacagggctcccaatagaaatgaacacagagatattgcctgtgtgtttgcagagaagatggtttctataaagagtaggaaagctgaaattatagtagagtctcctttaaatgcacattgtgtggatggctctcaccatttcctaagagatacagtgtaaaacgtgacagtaatactgattctagcagaataaaacatgtaccacatttgctaaaaaaaaaaaaaacaacaaaaaaaaacc

SEQ ID NO: 732485 - DNA, 1819 bp, Homo sapiens
ctgctccgcccctctctgctgctccgcccctctctgcccaagtcacgattgaagcccagccacccaaagtttctgaggggaaggatgttcttctacttgtccacaatttgccccagaatcttgctggctacatttggtacaaagggcaaatgacatacctctaccattacattacatcatatgtagtagacggtcaaagaattatatatgggcctgcatacagtggaagagaaagagtatattccaatgcatccctgctgatccagaatgtcacgcaggaggatgcaggatcctacaccttacacatcataaagcgacgcgatgggactggaggagtaactggacatttcaccttcaccttacacctggagactcccaagccctccatctccagcagcaacttaaatcccagggaggccatggaggctgtgatcttaacctgtgatcctgcgactccagccgcaagctaccagtggtggatgaatggtcagagcctccctatgactcacaggttgcagctgtccaaaaccaacaggaccctctttatatttggtgtcacaaagtatattgcaggaccctatgaatgtgaaatacggaacccagtgagtgccagccgcagtgacccagtcaccctgaatctcctcccaaagctgtccaagccctacatcacaatcaacaacttaaaccccagagagaataaggatgtcttaaccttcacctgtgaacctaagagtgagaactacacctacatttggtggctaaatggtcagagcctccctgtcagtcccagggtaaagcgacccattgaaaacaggatcctcattctacccaatgtcacgagaaatgaaacaggaccttatcaatgtgaaatacgggaccgatatggtggcatccgcagtgacccagtcaccctgaatgtcctcttcaggagaaaacctctacttgtcctgcttcgccgagtctaacccacgggcacaatattcttggacaattaatgggaagtttcagctatcaggacaaaagctctctatcccccaaataactacaaagcatagtgggctctatgcttgctctgttcgtaactcagccactggcaaggaaagctccaaatccatcacagtcaaagtctctgactggatattaccctgaattctactagttcctccaattccattttctcccatggaatcacgaagagcaagacccactctgttccagaagccctataagctggaggtggacaactcgatgtaaatttcatgggaaaacccttgtacctgacatgtgagccactcagaactcaccaaaatgttcgacaccataacaacagctactcaaactgtaaaccaggataacaagttgatgacttcacactgtggacagtttttccaaagatgtcagaacaagactccccatcatgataaggctcccacccctcttaactgtccttgctcatgcctgcctctttcacttggcaggataatgcagtcattagaatttcacatgtagtagcttctgagggtaacaacagagtgtcagatatgtcatctcaacctcaaacttttacgtaacatctcaggggaaatgtggctctctccatcttgcatacagggctcccaatagaaatgaacacagagatattgcctgtgtgtttgcagagaagatggtttctataaagagtaggaaagctgaaattatagtagagtctcctttaaatgcacattgtgtggatggctctcaccatttcctaagagatacagtgtaaaacgtgacagtaatactgattctagcagaataaaacatgtaccacatttgctaa

SEQ ID NO: 732486 - DNA, 1162 bp, Homo sapiens
ctgccccgggaggaggctcgacagaaggaggaaggacagcacagctgacagccgtactcaggaagcttctggatcctaggcttatctccacagaggagaacacacaagcagcagagaccatggggcccctctcagcccctccctgcacacacctcatcacttggaagggggtcctgctcacagcatcacttttaaacttctggaatccgcccacaactgcccaagtcacgattgaagcccagccacccaaagtttctgaggggaaggatgttcttctacttgtccacaatttgccccagaatcttgctggctacatttggtacaaagggcaaatgacatacctctaccattacattacatcatatgtagtagacggtcaaagaattatatatgggcctgcatacagtggaagagaaagagtatattccaatgcatccctgctgatccagaatgtcacgcaggaggatgcaggatcctacaccttacacatcataaagcgacgcgatgggactggaggagtaactggacatttcaccttcaccttacacctggagactcccaagccctccatctccagcagcaacttaaatcccagggaggccatggaggctgtgatcttaacctgtgatcctgcgactccagccgcaagctaccagtggtggatgaatggtcagagcctccctatgactcacaggttgcagctgtccaaaaccaacaggaccctctttatatttggtgtcacaaagtatattgcaggaccctatgaatgtgaaatacggaacccagtgagtgccagccgcagtgacccagtcaccctgaatctcctcccaaagctgtccaagccctacatcacaatcaacaacttaaaccccagagagaataaggatgtcttaaccttcacctgtgaacctaagagtgagaactacacctacatttggtggctaaatggtcagagcctccctgtcagtcccagggtaaagcgacccattgaaaacaggatcctcattctacccaatgtcacgagaaatgaaacaggaccttatcaatgtgaaatacgggaccgatatggtggcatccgcagtgacccagtcaccctgaatgtcctctatggtccagacctccccagcattacccttctgtcgtcttctcgagtcctctaatc

SEQ ID NO: 732487 - DNA, 1270 bp, Homo sapiens
ctgccccgggaggaggctcgacagaaggaggaaggacagcacagctgacagccgtactcaggaagcttctggatcctaggcttatctccacagaggagaacacacaagcagcagagaccatggggcccctctcagcccctccctgcacacacctcatcacttggaagggggtcctgctcacagcatcacttttaaacttctggaatccgcccacaactgcccaagtcacgattgaagcccagccacccaaagtttctgaggggaaggatgttcttctacttgtccacaatttgccccagaatcttgctggctacatttggtacaaagggcaaatgacatacctctaccattacattacatcatatgtagtagacggtcaaagaattatatatgggcctgcatacagtggaagagaaagagtatattccaatgcatccctgctgatccagaatgtcacgcaggaggatgcaggatcctacaccttacacatcataaagcgacgcgatgggactggaggagtaactggacatttcaccttcaccttacacctggagactcccaagccctccatctccagcagcaacttaaatcccagggaggccatggaggctgtgatcttaacctgtgatcctgcgactccagccgcaagctaccagtggtggatgaatggtcagagcctccctatgactcacaggttgcagctgtccaaaaccaacaggaccctctttatatttggtgtcacaaagtatattgcaggaccctatgaatgtgaaatacggaacccagtgagtgccagccgcagtgacccagtcaccctgaatctcctcccaaagctgtccaagccctacatcacaatcaacaacttaaaccccagagagaataaggatgtcttaaccttcacctgtgaacctaagagtgagaactacacctacatttggtggctaaatggtcagagcctccctgtcagtcccagggtaaagcgacccattgaaaacaggatcctcattctacccaatgtcacgagaaatgaaacaggaccttatcaatgtgaaatacgggaccgatatggtggcatccgcagtgacccagtcaccctgaatgtcctctatggtccagacctccccagcatttacccttcattcacctattaccgttcaggagaaaacctctacttgtcctgcttcgcggaatctaacccaccggcagagtatttttggacaattaatgggaagtttcagcaatcaggacaaaagctctctatcccccaaat

SEQ ID NO: 732488 - DNA, 1575 bp, Homo sapiens
ctgccccgggaggaggctcgacagaaggaggaaggacagcacagctgacagccgtactcaggaagcttctggatcctaggcttatctccacagaggagaacacacaagcagcagagaccatggggcccctctcagcccctccctgcacacacctcatcacttggaagggggtcctgctcacagcatcacttttaaacttctggaatccgcccacaactgcccaagtcacgattgaagcccagccacccaaagtttctgaggggaaggatgttcttctacttgtccacaatttgccccagaatcttgctggctacatttggtacaaagggcaaatgacatacctctaccattacattacatcatatgtagtagacggtcaaagaattatatatgggcctgcatacagtggaagagaaagagtatattccaatgcatccctgctgatccagaatgtcacgcaggaggatgcaggatcctacaccttacacatcataaagcgacgcgatgggactggaggagtaactggacatttcaccttcaccttacacctggagactcccaagccctccatctccagcagcaacttaaatcccagggaggccatggaggctgtgatcttaacctgtgatcctgcgactccagccgcaagctaccagtggtggatgaatggtcagagcctccctatgactcacaggttgcagctgtccaaaaccaacaggaccctctttatatttggtgtcacaaagtatattgcaggaccctatgaatgtgaaatacggaacccagtgagtgccagccgcagtgacccagtcaccctgaatctcctcccaaagctgtccaagccctacatcacaatcaacaacttaaaccccagagagaataaggatgtcttaaccttcacctgtgaacctaagagtgagaactacacctacatttggtggctaaatggtcagagcctccctgtcagtcccagggtaaagcgacccattgaaaacaggatcctcattctacccaatgtcacgagaaatgaaacaggaccttatcaatgtgaaatacgggaccgatatggtggcatccgcagtgacccagtcaccctgaatgtcctctatggtccagacctccccagcatttacccttcattcacctattaccgttcaggagaaaacctctacttgtcctgcttcgccgagtctaacccacgggcacaatattcttggacaattaatgggaagtttcagctatcaggacaaaagctctctatcccccaaataactacaaagcatagtgggctctatgcttgctctgttcgtaactcagccactggcaaggaaagctccaaatccatcacagtcaaagtctctggacacatttcaaatcattggttatattaccaaggctttgactgggatgttatattcaagaatatagatagaatgaaccaatatgaactgcaggcaaagtctgaagtcagccttggtttggcttcctattctcaagggttttgtaaaagtttaatctgagagtccttataaaaacttagagcaaataaaattctaaaagagcgcctaaaaggtc

SEQ ID NO: 732489 - DNA, 2029 bp, Homo sapiens
ctgccccgggaggaggctcgacagaaggaggaaggacagcacagctgacagccgtactcaggaagcttctggatcctaggcttatctccacagaggagaacacacaagcagcagagaccatggggcccctctcagcccctccctgcacacacctcatcacttggaagggggtcctgctcacagcatcacttttaaacttctggaatccgcccacaactgcccaagtcacgattgaagcccagccacccaaagtttctgaggggaaggatgttcttctacttgtccacaatttgccccagaatcttgctggctacatttggtacaaagggcaaatgacatacctctaccattacattacatcatatgtagtagacggtcaaagaattatatatgggcctgcatacagtggaagagaaagagtatattccaatgcatccctgctgatccagaatgtcacgcaggaggatgcaggatcctacaccttacacatcataaagcgacgcgatgggactggaggagtaactggacatttcaccttcaccttacacctggagactcccaagccctccatctccagcagcaacttaaatcccagggaggccatggaggctgtgatcttaacctgtgatcctgcgactccagccgcaagctaccagtggtggatgaatggtcagagcctccctatgactcacaggttgcagctgtccaaaaccaacaggaccctctttatatttggtgtcacaaagtatattgcaggaccctatgaatgtgaaatacggaacccagtgagtgccagccgcagtgacccagtcaccctgaatctcctcccaaagctgtccaagccctacatcacaatcaacaacttaaaccccagagagaataaggatgtcttaaccttcacctgtgaacctaagagtgagaactacacctacatttggtggctaaatggtcagagcctccctgtcagtcccagggtaaagcgacccattgaaaacaggatcctcattctacccaatgtcacgagaaatgaaacaggaccttatcaatgtgaaatacgggaccgatatggtggcatccgcagtgacccagtcaccctgaatgtcctcttcaggagaaaacctctacttgtcctgcttcgccgagtctaacccacgggcacaatattcttggacaattaatgggaagtttcagctatcaggacaaaagctctctatcccccaaataactacaaagcatagtgggctctatgcttgctctgttcgtaactcagccactggcaaggaaagctccaaatccatcacagtcaaagtctctgactggatattaccctgaattctactagttcctccaattccattttctcccatggaatcacgaagagcaagacccactctgttccagaagccctataagctggaggtggacaactcgatgtaaatttcatgggaaaacccttgtacctgacatgtgagccactcagaactcaccaaaatgttcgacaccataacaacagctactcaaactgtaaaccaggataacaagttgatgacttcacactgtggacagtttttccaaagatgtcagaacaagactccccatcatgataaggctcccacccctcttaactgtccttgctcatgcctgcctctttcacttggcaggataatgcagtcattagaatttcacatgtagtagcttctgagggtaacaacagagtgtcagatatgtcatctcaacctcaaacttttacgtaacatctcaggggaaatgtggctctctccatcttgcatacagggctcccaatagaaatgaacacagagatattgcctgtgtgtttgcagagaagatggtttctataaagagtaggaaagctgaaattatagtagagtctcctttaaatgcacattgtgtggatggctctcaccatttcctaagagatacagtgtaaaacgtgacagtaatactgattctagcagaataaaacatgtaccacatttgctaaaaaaaaaaaaaacaacaaaaaaaaacc

SEQ ID NO: 732490 - DNA, 2002 bp, Homo sapiens
ctgccccgggaggaggctcgacagaaggaggaaggacagcacagctgacagccgtactcaggaagcttctggatcctaggcttatctccacagaggagaacacacaagcagcagagaccatggggcccctctcagcccctccctgcacacacctcatcacttggaagggggtcctgctcacagcatcacttttaaacttctggaatccgcccacaactgcccaagtcacgattgaagcccagccacccaaagtttctgaggggaaggatgttcttctacttgtccacaatttgccccagaatcttgctggctacatttggtacaaagggcaaatgacatacctctaccattacattacatcatatgtagtagacggtcaaagaattatatatgggcctgcatacagtggaagagaaagagtatattccaatgcatccctgctgatccagaatgtcacgcaggaggatgcaggatcctacaccttacacatcataaagcgacgcgatgggactggaggagtaactggacatttcaccttcaccttacacctggagactcccaagccctccatctccagcagcaacttaaatcccagggaggccatggaggctgtgatcttaacctgtgatcctgcgactccagccgcaagctaccagtggtggatgaatggtcagagcctccctatgactcacaggttgcagctgtccaaaaccaacaggaccctctttatatttggtgtcacaaagtatattgcaggaccctatgaatgtgaaatacggaacccagtgagtgccagccgcagtgacccagtcaccctgaatctcctcccaaagctgtccaagccctacatcacaatcaacaacttaaaccccagagagaataaggatgtcttaaccttcacctgtgaacctaagagtgagaactacacctacatttggtggctaaatggtcagagcctccctgtcagtcccagggtaaagcgacccattgaaaacaggatcctcattctacccaatgtcacgagaaatgaaacaggaccttatcaatgtgaaatacgggaccgatatggtggcatccgcagtgacccagtcaccctgaatgtcctcttcaggagaaaacctctacttgtcctgcttcgccgagtctaacccacgggcacaatattcttggacaattaatgggaagtttcagctatcaggacaaaagctctctatcccccaaataactacaaagcatagtgggctctatgcttgctctgttcgtaactcagccactggcaaggaaagctccaaatccatcacagtcaaagtctctgactggatattaccctgaattctactagttcctccaattccattttctcccatggaatcacgaagagcaagacccactctgttccagaagccctataagctggaggtggacaactcgatgtaaatttcatgggaaaacccttgtacctgacatgtgagccactcagaactcaccaaaatgttcgacaccataacaacagctactcaaactgtaaaccaggataacaagttgatgacttcacactgtggacagtttttccaaagatgtcagaacaagactccccatcatgataaggctcccacccctcttaactgtccttgctcatgcctgcctctttcacttggcaggataatgcagtcattagaatttcacatgtagtagcttctgagggtaacaacagagtgtcagatatgtcatctcaacctcaaacttttacgtaacatctcaggggaaatgtggctctctccatcttgcatacagggctcccaatagaaatgaacacagagatattgcctgtgtgtttgcagagaagatggtttctataaagagtaggaaagctgaaattatagtagagtctcctttaaatgcacattgtgtggatggctctcaccatttcctaagagatacagtgtaaaacgtgacagtaatactgattctagcagaataaaacatgtaccacatttgctaa

SEQ ID NO: 732491 - DNA, 1043 bp, Homo sapiens
ctgctccgcccctctctgctgctccgcccctctctgcccaagtcacgattgaagcccagccacccaaagtttctgaggggaaggatgttcttctacttgtccacaatttgccccagaatcttgctggctacatttggtacaaagggcaaatgacatacctctaccattacattacatcatatgtagtagacggtcaaagaattatatatgggcctgcatacagtggaagagaaagagtatattccaatgcatccctgctgatccagaatgtcacgcaggaggatgcaggatcctacaccttacacatcataaagcgacgcgatgggactggaggagtaactggacatttcaccttcaccttacacctggagactcccaagccctccatctccagcagcaacttaaatcccagggaggccatggaggctgtgatcttaacctgtgatcctgcgactccagccgcaagctaccagtggtggatgaatggtcagagcctccctatgactcacaggttgcagctgtccaaaaccaacaggaccctctttatatttggtgtcacaaagtatattgcaggaccctatgaatgtgaaatacggaacccagtgagtgccagccgcagtgacccagtcaccctgaatctcctccgtgagtatcctcggttcctctgtgagccaggctgccatcccaaatacacatggccagaggccaggcctctcagtccctctcaggtccaagtacagagacctttacccctggacatcaaagctggccatgactttctgccccaggcaaaacagagtaggcctaggcttgatccacaataggagaaaagaggctgctcctgtcatgggagactcaggttccacagcttgtgatgggagaaacaggtgaatgtctcaggctccagatcagtgaacacagcggggatttggctgggacttcagtgagtgccagccacagtgacccagtcaccctgaatctcctccgtgagtatcctctgttcctctgtgagccaggctgccatcccaaatacacatggccag

SEQ ID NO: 732492 - DNA, 1915 bp, Homo sapiens
ctgctccgcccctctctgctgctccgcccctctctgcccaagtcacgattgaagcccagccacccaaagtttctgaggggaaggatgttcttctacttgtccacaatttgccccagaatcttgctggctacatttggtacaaagggcaaatgacatacctctaccattacattacatcatatgtagtagacggtcaaagaattatatatgggcctgcatacagtggaagagaaagagtatattccaatgcatccctgctgatccagaatgtcacgcaggaggatgcaggatcctacaccttacacatcataaagcgacgcgatgggactggaggagtaactggacatttcaccttcaccttacacctggagactcccaagccctccatctccagcagcaacttaaatcccagggaggccatggaggctgtgatcttaacctgtgatcctgcgactccagccgcaagctaccagtggtggatgaatggtcagagcctccctatgactcacaggttgcagctgtccaaaaccaacaggaccctctttatatttggtgtcacaaagtatattgcaggaccctatgaatgtgaaatacggaacccagtgagtgccagccgcagtgacccagtcaccctgaatctcctcccaaagctgtccaagccctacatcacaatcaacaacttaaaccccagagagaataaggatgtcttaaccttcacctgtgaacctaagagtgagaactacacctacatttggtggctaaatggtcagagcctccctgtcagtcccagggtaaagcgacccattgaaaacaggatcctcattctacccaatgtcacgagaaatgaaacaggaccttatcaatgtgaaatacgggaccgatatggtggcatccgcagtgacccagtcaccctgaatgtcctctatggtccagacctccccagcatttacccttcattcacctattaccgttcaggagaaaacctctacttgtcctgcttcgccgagtctaacccacgggcacaatattcttggacaattaatgggaagtttcagctatcaggacaaaagctctctatcccccaaataactacaaagcatagtgggctctatgcttgctctgttcgtaactcagccactggcaaggaaagctccaaatccatcacagtcaaagtctctggtaagtggatcccagcatccttggcaatagggatttaggtggagtctatctggcattcagggaagagtgaggaaaacatttttattcccagcctgtgtcccatgggcacaagcaaatcccaaattctcctcctgaacactcccaatttgtctaagaacttccaaaactttaacaaacaggctgatatcttcttaaaattcccagcctagaccaagcaggagaaacattgatttcattgaaataattgacaatattgaggataatatttttatgatttttatttgaaaatttgctgattctttaaatggtttgttttctagatttatggaatttttttcttttaatctatctatagcttgtagcagttcaataaactatacttctgggaaccgtaattgaaacatttacttttgctctctacctgactgccccagaattgggcaactattcatgagtattgatatgtttatggtaatacacatatttgcacaagtacagtaacaatctgctctctttgtaacaggacacatttcaaatcattggttatattaccaaggctttgactgggatgttatattcaagaatatagatagaatgaaccaatatgaactgcaggcaaagtctgaagtcagccttggtttggcttcctattctcaagggttttgtaaaagtttaatctgagagtccttataaaaacttagagcaaataaaattctaaaagagcgcctaaaaggtc

SEQ ID NO: 732493 - DNA, 980 bp, Homo sapiens
ctgctccgcccctctctgctgctccgcccctctctgcccaagtcacgattgaagcccagccacccaaagtttctgaggggaaggatgttcttctacttgtccacaatttgccccagaatcttgctggctacatttggtacaaagggcaaatgacatacctctaccattacattacatcatatgtagtagacggtcaaagaattatatatgggcctgcatacagtggaagagaaagagtatattccaatgcatccctgctgatccagaatgtcacgcaggaggatgcaggatcctacaccttacacatcataaagcgacgcgatgggactggaggagtaactggacatttcaccttcaccttacacctggagactcccaagccctccatctccagcagcaacttaaatcccagggaggccatggaggctgtgatcttaacctgtgatcctgcgactccagccgcaagctaccagtggtggatgaatggtcagagcctccctatgactcacaggttgcagctgtccaaaaccaacaggaccctctttatatttggtgtcacaaagtatattgcaggaccctatgaatgtgaaatacggaacccagtgagtgccagccgcagtgacccagtcaccctgaatctcctcccaaagctcccaagccctacatctccagcagcaacttaaaccccagggaggccatggaggctgtgatcttaacctgtgatcctgcggcttcagacacaagctacctgtggtggatgaatggtcagagcctccctatgactcacaggttgcagctgtccaaaaccaacaggaccctctttatatttggtgtcacaaagtatattgcaggaccctatgaatgtgaaatacggaacccagtgagtgccagccacagtgacccagtcaccctgaatctcctccgtgagtatcctctgttcctctgtgagccaggctgccatcccaaatacacatggccag

SEQ ID NO: 732494 - DNA, 1021 bp, Homo sapiens
ctgctccgcccctctctgctgctccgcccctctctgcccaagtcacgattgaagcccagccacccaaagtttctgaggggaaggatgttcttctacttgtccacaatttgccccagaatcttgctggctacatttggtacaaagggcaaatgacatacctctaccattacattacatcatatgtagtagacggtcaaagaattatatatgggcctgcatacagtggaagagaaagagtatattccaatgcatccctgctgatccagaatgtcacgcaggaggatgcaggatcctacaccttacacatcataaagcgacgcgatgggactggaggagtaactggacatttcaccttcaccttacacctggagactcccaagccctccatctccagcagcaacttaaatcccagggaggccatggaggctgtgatcttaacctgtgatcctgcgactccagccgcaagctaccagtggtggatgaatggtcagagcctccctattgcaggaccctatgaatgtgaaatacggaacccagtgagtgccagccgcagtgacccagtcaccctgaatctcctcccaaagctgtccaagccctacatcacaatcaacaacttaaaccccagagagaataaggatgtcttaaccttcacctgtgaacctaagagtgagaactacacctacatttggtggctaaatggtcagagcctccctgtcagtcccagggtaaagcgacccattgaaaacaggatcctcattctacccaatgtcacgagaaatgaaacaggaccttatcaatgtgaaatacgggaccgatatggtggcatccgcagtgacccagtcaccctgaatgtcctctatggtccagacctccccagcatttacccttcattcacctattaccgttcaggagaaaacctctacttgtcctgcttcgcggaatctaacccaccggcagagtatttttggacaattaatgggaagtttcagcaatcaggacaaaagctctctatcccccaaat

SEQ ID NO: 732495 - DNA, 1827 bp, Homo sapiens
ctgctccgcccctctctgctgctccgcccctctctgcccaagtcacgattgaagcccagccacccaaagtttctgaggggaaggatgttcttctacttgtccacaatttgccccagaatcttgctggctacatttggtacaaagggcaaatgacatacctctaccattacattacatcatatgtagtagacggtcaaagaattatatatgggcctgcatacagtggaagagaaagagtatattccaatgcatccctgctgatccagaatgtcacgcaggaggatgcaggatcctacaccttacacatcataaagcgacgcgatgggactggaggagtaactggacatttcaccttcaccttacacctggagactcccaagccctccatctccagcagcaacttaaatcccagggaggccatggaggctgtgatcttaacctgtgatcctgcgactccagccgcaagctaccagtggtggatgaatggtcagagcctccctattgcaggaccctatgaatgtgaaatacggaacccagtgagtgccagccgcagtgacccagtcaccctgaatctcctcccaaagctgtccaagccctacatcacaatcaacaacttaaaccccagagagaataaggatgtcttaaccttcacctgtgaacctaagagtgagaactacacctacatttggtggctaaatggtcagagcctccctgtcagtcccagggtaaagcgacccattgaaaacaggatcctcattctacccaatgtcacgagaaatgaaacaggaccttatcaatgtgaaatacgggaccgatatggtggcatccgcagtgacccagtcaccctgaatgtcctctatggtccagacctccccagcatttacccttcattcacctattaccgttcaggagaaaacctctacttgtcctgcttcgccgagtctaacccacgggcacaatattcttggacaattaatgggaagtttcagctatcaggacaaaagctctctatcccccaaataactacaaagcatagtgggctctatgcttgctctgttcgtaactcagccactggcaaggaaagctccaaatccatcacagtcaaagtctctgactggatattaccctgaattctactagttcctccaattccattttctcccatggaatcacgaagagcaagacccactctgttccagaagccctataagctggaggtggacaactcgatgtaaatttcatgggaaaacccttgtacctgacatgtgagccactcagaactcaccaaaatgttcgacaccataacaacagctactcaaactgtaaaccaggataacaagttgatgacttcacactgtggacagtttttccaaagatgtcagaacaagactccccatcatgataaggctcccacccctcttaactgtccttgctcatgcctgcctctttcacttggcaggataatgcagtcattagaatttcacatgtagtagcttctgagggtaacaacagagtgtcagatatgtcatctcaacctcaaacttttacgtaacatctcaggggaaatgtggctctctccatcttgcatacagggctcccaatagaaatgaacacagagatattgcctgtgtgtttgcagagaagatggtttctataaagagtaggaaagctgaaattatagtagagtctcctttaaatgcacattgtgtggatggctctcaccatttcctaagagatacagtgtaaaacgtgacagtaatactgattctagcagaataaaacatgtaccacatttgctaaaaaaaaaaaaaacaacaaaaaaaaacc

SEQ ID NO: 732496 - DNA, 1800 bp, Homo sapiens
ctgctccgcccctctctgctgctccgcccctctctgcccaagtcacgattgaagcccagccacccaaagtttctgaggggaaggatgttcttctacttgtccacaatttgccccagaatcttgctggctacatttggtacaaagggcaaatgacatacctctaccattacattacatcatatgtagtagacggtcaaagaattatatatgggcctgcatacagtggaagagaaagagtatattccaatgcatccctgctgatccagaatgtcacgcaggaggatgcaggatcctacaccttacacatcataaagcgacgcgatgggactggaggagtaactggacatttcaccttcaccttacacctggagactcccaagccctccatctccagcagcaacttaaatcccagggaggccatggaggctgtgatcttaacctgtgatcctgcgactccagccgcaagctaccagtggtggatgaatggtcagagcctccctattgcaggaccctatgaatgtgaaatacggaacccagtgagtgccagccgcagtgacccagtcaccctgaatctcctcccaaagctgtccaagccctacatcacaatcaacaacttaaaccccagagagaataaggatgtcttaaccttcacctgtgaacctaagagtgagaactacacctacatttggtggctaaatggtcagagcctccctgtcagtcccagggtaaagcgacccattgaaaacaggatcctcattctacccaatgtcacgagaaatgaaacaggaccttatcaatgtgaaatacgggaccgatatggtggcatccgcagtgacccagtcaccctgaatgtcctctatggtccagacctccccagcatttacccttcattcacctattaccgttcaggagaaaacctctacttgtcctgcttcgccgagtctaacccacgggcacaatattcttggacaattaatgggaagtttcagctatcaggacaaaagctctctatcccccaaataactacaaagcatagtgggctctatgcttgctctgttcgtaactcagccactggcaaggaaagctccaaatccatcacagtcaaagtctctgactggatattaccctgaattctactagttcctccaattccattttctcccatggaatcacgaagagcaagacccactctgttccagaagccctataagctggaggtggacaactcgatgtaaatttcatgggaaaacccttgtacctgacatgtgagccactcagaactcaccaaaatgttcgacaccataacaacagctactcaaactgtaaaccaggataacaagttgatgacttcacactgtggacagtttttccaaagatgtcagaacaagactccccatcatgataaggctcccacccctcttaactgtccttgctcatgcctgcctctttcacttggcaggataatgcagtcattagaatttcacatgtagtagcttctgagggtaacaacagagtgtcagatatgtcatctcaacctcaaacttttacgtaacatctcaggggaaatgtggctctctccatcttgcatacagggctcccaatagaaatgaacacagagatattgcctgtgtgtttgcagagaagatggtttctataaagagtaggaaagctgaaattatagtagagtctcctttaaatgcacattgtgtggatggctctcaccatttcctaagagatacagtgtaaaacgtgacagtaatactgattctagcagaataaaacatgtaccacatttgctaa

SEQ ID NO: 732497 - DNA, 1849 bp, Homo sapiens
ctgctccgcccctctctgctgctccgcccctctctgcccaagtcacgattgaagcccagccacccaaagtttctgaggggaaggatgttcttctacttgtccacaatttgccccagaatcttgctggctacatttggtacaaagggcaaatgacatacctctaccattacattacatcatatgtagtagacggtcaaagaattatatatgggcctgcatacagtggaagagaaagagtatattccaatgcatccctgctgatccagaatgtcacgcaggaggatgcaggatcctacaccttacacatcataaagcgacgcgatgggactggaggagtaactggacatttcaccttcaccttacacctggagactcccaagccctccatctccagcagcaacttaaatcccagggaggccatggaggctgtgatcttaacctgtgatcctgcgactccagccgcaagctaccagtggtggatgaatggtcagagcctccctattgcaggaccctatgaatgtgaaatacggaacccagtgagtgccagccgcagtgacccagtcaccctgaatctcctcccaaagctgtccaagccctacatcacaatcaacaacttaaaccccagagagaataaggatgtcttaaccttcacctgtgaacctaagagtgagaactacacctacatttggtggctaaatggtcagagcctccctgtcagtcccagggtaaagcgacccattgaaaacaggatcctcattctacccaatgtcacgagaaatgaaacaggaccttatcaatgtgaaatacgggaccgatatggtggcatccgcagtgacccagtcaccctgaatgtcctctatggtccagacctccccagcatttacccttcattcacctattaccgttcaggagaaaacctctacttgtcctgcttcgccgagtctaacccacgggcacaatattcttggacaattaatgggaagtttcagctatcaggacaaaagctctctatcccccaaataactacaaagcatagtgggctctatgcttgctctgttcgtaactcagccactggcaaggaaagctccaaatccatcacagtcaaagtctctggtaagtggatcccagcatccttggcaatagggatttaggtggagtctatctggcattcagggaagagtgaggaaaacatttttattcccagcctgtgtcccatgggcacaagcaaatcccaaattctcctcctgaacactcccaatttgtctaagaacttccaaaactttaacaaacaggctgatatcttcttaaaattcccagcctagaccaagcaggagaaacattgatttcattgaaataattgacaatattgaggataatatttttatgatttttatttgaaaatttgctgattctttaaatggtttgttttctagatttatggaatttttttcttttaatctatctatagcttgtagcagttcaataaactatacttctgggaaccgtaattgaaacatttacttttgctctctacctgactgccccagaattgggcaactattcatgagtattgatatgtttatggtaatacacatatttgcacaagtacagtaacaatctgctctctttgtaacaggacacatttcaaatcattggttatattaccaaggctttgactgggatgttatattcaagaatatagatagaatgaaccaatatgaactgcaggcaaagtctgaagtcagccttggtttggcttcctattctcaagggttttgtaaaagtttaatctgagagtccttataaaaacttagagcaaataaaattctaaaagagcgcctaaaaggtc

SEQ ID NO: 732498 - DNA, 1326 bp, Homo sapiens
ctgctccgcccctctctgctgctccgcccctctctgcccaagtcacgattgaagcccagccacccaaagtttctgaggggaaggatgttcttctacttgtccacaatttgccccagaatcttgctggctacatttggtacaaagggcaaatgacatacctctaccattacattacatcatatgtagtagacggtcaaagaattatatatgggcctgcatacagtggaagagaaagagtatattccaatgcatccctgctgatccagaatgtcacgcaggaggatgcaggatcctacaccttacacatcataaagcgacgcgatgggactggaggagtaactggacatttcaccttcaccttacacctggagactcccaagccctccatctccagcagcaacttaaatcccagggaggccatggaggctgtgatcttaacctgtgatcctgcgactccagccgcaagctaccagtggtggatgaatggtcagagcctccctattgcaggaccctatgaatgtgaaatacggaacccagtgagtgccagccgcagtgacccagtcaccctgaatctcctcccaaagctgtccaagccctacatcacaatcaacaacttaaaccccagagagaataaggatgtcttaaccttcacctgtgaacctaagagtgagaactacacctacatttggtggctaaatggtcagagcctccctgtcagtcccagggtaaagcgacccattgaaaacaggatcctcattctacccaatgtcacgagaaatgaaacaggaccttatcaatgtgaaatacgggaccgatatggtggcatccgcagtgacccagtcaccctgaatgtcctctatggtccagacctccccagcatttacccttcattcacctattaccgttcaggagaaaacctctacttgtcctgcttcgccgagtctaacccacgggcacaatattcttggacaattaatgggaagtttcagctatcaggacaaaagctctctatcccccaaataactacaaagcatagtgggctctatgcttgctctgttcgtaactcagccactggcaaggaaagctccaaatccatcacagtcaaagtctctggacacatttcaaatcattggttatattaccaaggctttgactgggatgttatattcaagaatatagatagaatgaaccaatatgaactgcaggcaaagtctgaagtcagccttggtttggcttcctattctcaagggttttgtaaaagtttaatctgagagtccttataaaaacttagagcaaataaaattctaaaagagcgcctaaaaggtc

SEQ ID NO: 732499 - DNA, 1780 bp, Homo sapiens
ctgctccgcccctctctgctgctccgcccctctctgcccaagtcacgattgaagcccagccacccaaagtttctgaggggaaggatgttcttctacttgtccacaatttgccccagaatcttgctggctacatttggtacaaagggcaaatgacatacctctaccattacattacatcatatgtagtagacggtcaaagaattatatatgggcctgcatacagtggaagagaaagagtatattccaatgcatccctgctgatccagaatgtcacgcaggaggatgcaggatcctacaccttacacatcataaagcgacgcgatgggactggaggagtaactggacatttcaccttcaccttacacctggagactcccaagccctccatctccagcagcaacttaaatcccagggaggccatggaggctgtgatcttaacctgtgatcctgcgactccagccgcaagctaccagtggtggatgaatggtcagagcctccctattgcaggaccctatgaatgtgaaatacggaacccagtgagtgccagccgcagtgacccagtcaccctgaatctcctcccaaagctgtccaagccctacatcacaatcaacaacttaaaccccagagagaataaggatgtcttaaccttcacctgtgaacctaagagtgagaactacacctacatttggtggctaaatggtcagagcctccctgtcagtcccagggtaaagcgacccattgaaaacaggatcctcattctacccaatgtcacgagaaatgaaacaggaccttatcaatgtgaaatacgggaccgatatggtggcatccgcagtgacccagtcaccctgaatgtcctcttcaggagaaaacctctacttgtcctgcttcgccgagtctaacccacgggcacaatattcttggacaattaatgggaagtttcagctatcaggacaaaagctctctatcccccaaataactacaaagcatagtgggctctatgcttgctctgttcgtaactcagccactggcaaggaaagctccaaatccatcacagtcaaagtctctgactggatattaccctgaattctactagttcctccaattccattttctcccatggaatcacgaagagcaagacccactctgttccagaagccctataagctggaggtggacaactcgatgtaaatttcatgggaaaacccttgtacctgacatgtgagccactcagaactcaccaaaatgttcgacaccataacaacagctactcaaactgtaaaccaggataacaagttgatgacttcacactgtggacagtttttccaaagatgtcagaacaagactccccatcatgataaggctcccacccctcttaactgtccttgctcatgcctgcctctttcacttggcaggataatgcagtcattagaatttcacatgtagtagcttctgagggtaacaacagagtgtcagatatgtcatctcaacctcaaacttttacgtaacatctcaggggaaatgtggctctctccatcttgcatacagggctcccaatagaaatgaacacagagatattgcctgtgtgtttgcagagaagatggtttctataaagagtaggaaagctgaaattatagtagagtctcctttaaatgcacattgtgtggatggctctcaccatttcctaagagatacagtgtaaaacgtgacagtaatactgattctagcagaataaaacatgtaccacatttgctaaaaaaaaaaaaaacaacaaaaaaaaacc

SEQ ID NO: 732500 - DNA, 1753 bp, Homo sapiens
ctgctccgcccctctctgctgctccgcccctctctgcccaagtcacgattgaagcccagccacccaaagtttctgaggggaaggatgttcttctacttgtccacaatttgccccagaatcttgctggctacatttggtacaaagggcaaatgacatacctctaccattacattacatcatatgtagtagacggtcaaagaattatatatgggcctgcatacagtggaagagaaagagtatattccaatgcatccctgctgatccagaatgtcacgcaggaggatgcaggatcctacaccttacacatcataaagcgacgcgatgggactggaggagtaactggacatttcaccttcaccttacacctggagactcccaagccctccatctccagcagcaacttaaatcccagggaggccatggaggctgtgatcttaacctgtgatcctgcgactccagccgcaagctaccagtggtggatgaatggtcagagcctccctattgcaggaccctatgaatgtgaaatacggaacccagtgagtgccagccgcagtgacccagtcaccctgaatctcctcccaaagctgtccaagccctacatcacaatcaacaacttaaaccccagagagaataaggatgtcttaaccttcacctgtgaacctaagagtgagaactacacctacatttggtggctaaatggtcagagcctccctgtcagtcccagggtaaagcgacccattgaaaacaggatcctcattctacccaatgtcacgagaaatgaaacaggaccttatcaatgtgaaatacgggaccgatatggtggcatccgcagtgacccagtcaccctgaatgtcctcttcaggagaaaacctctacttgtcctgcttcgccgagtctaacccacgggcacaatattcttggacaattaatgggaagtttcagctatcaggacaaaagctctctatcccccaaataactacaaagcatagtgggctctatgcttgctctgttcgtaactcagccactggcaaggaaagctccaaatccatcacagtcaaagtctctgactggatattaccctgaattctactagttcctccaattccattttctcccatggaatcacgaagagcaagacccactctgttccagaagccctataagctggaggtggacaactcgatgtaaatttcatgggaaaacccttgtacctgacatgtgagccactcagaactcaccaaaatgttcgacaccataacaacagctactcaaactgtaaaccaggataacaagttgatgacttcacactgtggacagtttttccaaagatgtcagaacaagactccccatcatgataaggctcccacccctcttaactgtccttgctcatgcctgcctctttcacttggcaggataatgcagtcattagaatttcacatgtagtagcttctgagggtaacaacagagtgtcagatatgtcatctcaacctcaaacttttacgtaacatctcaggggaaatgtggctctctccatcttgcatacagggctcccaatagaaatgaacacagagatattgcctgtgtgtttgcagagaagatggtttctataaagagtaggaaagctgaaattatagtagagtctcctttaaatgcacattgtgtggatggctctcaccatttcctaagagatacagtgtaaaacgtgacagtaatactgattctagcagaataaaacatgtaccacatttgctaa

SEQ ID NO: 732501 - DNA, 799 bp, Homo sapiens
ctgccccgggaggaggctcgacagaaggaggaaggacagcacagctgacagccgtactcaggaagcttctggatcctaggcttatctccacagaggagaacacacaagcagcagagaccatggggcccctctcagcccctccctgcacacacctcatcacttggaagggggtcctgctcacagcatcacttttaaacttctggaatccgcccacaactgcccaagtcacgattgaagcccagccacccaaagtttctgaggggaaggatgttcttctacttgtccacaatttgccccagaatcttgctggctacatttggtacaaagggcaaatgacatacctctaccattacattacatcatatgtagtagacggtcaaagaattatatatgggcctgcatacagtggaagagaaagagtatattccaatgcatccctgctgatccagaatgtcacgcaggaggatgcaggatcctacaccttacacatcataaagcgacgcgatgggactggaggagtaactggacatttcaccttcaccttacaccagtcagaacataacatgaggtctaaactcctgacaactttttatgggaaaattacagtattacgaattgagcatcggaaatccagaaatccacaatctgaaatgctccaaaactcaacccttctgaccactgatgtgatgttaaaaagaagtgctcactggcgcattgtggattttaaatttttcagatttgggatgctaaaccagtacatgtactgcaaatattccaaaattaaaaaaattagaaatcc

SEQ ID NO: 732502 - DNA, 1226 bp, Homo sapiens
ctgccccgggaggaggctcgacagaaggaggaaggacagcacagctgacagccgtactcaggaagcttctggatcctaggcttatctccacagaggagaacacacaagcagcagagaccatggggcccctctcagcccctccctgcacacacctcatcacttggaagggggtcctgctcacagcatcacttttaaacttctggaatccgcccacaactgcccaagtcacgattgaagcccagccacccaaagtttctgaggggaaggatgttcttctacttgtccacaatttgccccagaatcttgctggctacatttggtacaaagggcaaatgacatacctctaccattacattacatcatatgtagtagacggtcaaagaattatatatgggcctgcatacagtggaagagaaagagtatattccaatgcatccctgctgatccagaatgtcacgcaggaggatgcaggatcctacaccttacacatcataaagcgacgcgatgggactggaggagtaactggacatttcaccttcaccttacacctggagactcccaagccctccatctccagcagcaacttaaatcccagggaggccatggaggctgtgatcttaacctgtgatcctgcgactccagccgcaagctaccagtggtggatgaatggtcagagcctccctatgactcacaggttgcagctgtccaaaaccaacaggaccctctttatatttggtgtcacaaagtatattgcaggaccctatgaatgtgaaatacggaacccagtgagtgccagccgcagtgacccagtcaccctgaatctcctccgtgagtatcctcggttcctctgtgagccaggctgccatcccaaatacacatggccagaggccaggcctctcagtccctctcaggtccaagtacagagacctttacccctggacatcaaagctggccatgactttctgccccaggcaaaacagagtaggcctaggcttgatccacaataggagaaaagaggctgctcctgtcatgggagactcaggttccacagcttgtgatgggagaaacaggtgaatgtctcaggctccagatcagtgaacacagcggggatttggctgggacttcagtgagtgccagccacagtgacccagtcaccctgaatctcctccgtgagtatcctctgttcctctgtgagccaggctgccatcccaaatacacatggccag

SEQ ID NO: 732503 - DNA, 2098 bp, Homo sapiens
ctgccccgggaggaggctcgacagaaggaggaaggacagcacagctgacagccgtactcaggaagcttctggatcctaggcttatctccacagaggagaacacacaagcagcagagaccatggggcccctctcagcccctccctgcacacacctcatcacttggaagggggtcctgctcacagcatcacttttaaacttctggaatccgcccacaactgcccaagtcacgattgaagcccagccacccaaagtttctgaggggaaggatgttcttctacttgtccacaatttgccccagaatcttgctggctacatttggtacaaagggcaaatgacatacctctaccattacattacatcatatgtagtagacggtcaaagaattatatatgggcctgcatacagtggaagagaaagagtatattccaatgcatccctgctgatccagaatgtcacgcaggaggatgcaggatcctacaccttacacatcataaagcgacgcgatgggactggaggagtaactggacatttcaccttcaccttacacctggagactcccaagccctccatctccagcagcaacttaaatcccagggaggccatggaggctgtgatcttaacctgtgatcctgcgactccagccgcaagctaccagtggtggatgaatggtcagagcctccctatgactcacaggttgcagctgtccaaaaccaacaggaccctctttatatttggtgtcacaaagtatattgcaggaccctatgaatgtgaaatacggaacccagtgagtgccagccgcagtgacccagtcaccctgaatctcctcccaaagctgtccaagccctacatcacaatcaacaacttaaaccccagagagaataaggatgtcttaaccttcacctgtgaacctaagagtgagaactacacctacatttggtggctaaatggtcagagcctccctgtcagtcccagggtaaagcgacccattgaaaacaggatcctcattctacccaatgtcacgagaaatgaaacaggaccttatcaatgtgaaatacgggaccgatatggtggcatccgcagtgacccagtcaccctgaatgtcctctatggtccagacctccccagcatttacccttcattcacctattaccgttcaggagaaaacctctacttgtcctgcttcgccgagtctaacccacgggcacaatattcttggacaattaatgggaagtttcagctatcaggacaaaagctctctatcccccaaataactacaaagcatagtgggctctatgcttgctctgttcgtaactcagccactggcaaggaaagctccaaatccatcacagtcaaagtctctggtaagtggatcccagcatccttggcaatagggatttaggtggagtctatctggcattcagggaagagtgaggaaaacatttttattcccagcctgtgtcccatgggcacaagcaaatcccaaattctcctcctgaacactcccaatttgtctaagaacttccaaaactttaacaaacaggctgatatcttcttaaaattcccagcctagaccaagcaggagaaacattgatttcattgaaataattgacaatattgaggataatatttttatgatttttatttgaaaatttgctgattctttaaatggtttgttttctagatttatggaatttttttcttttaatctatctatagcttgtagcagttcaataaactatacttctgggaaccgtaattgaaacatttacttttgctctctacctgactgccccagaattgggcaactattcatgagtattgatatgtttatggtaatacacatatttgcacaagtacagtaacaatctgctctctttgtaacaggacacatttcaaatcattggttatattaccaaggctttgactgggatgttatattcaagaatatagatagaatgaaccaatatgaactgcaggcaaagtctgaagtcagccttggtttggcttcctattctcaagggttttgtaaaagtttaatctgagagtccttataaaaacttagagcaaataaaattctaaaagagcgcctaaaaggtc

SEQ ID NO: 732504 - DNA, 1163 bp, Homo sapiens
ctgccccgggaggaggctcgacagaaggaggaaggacagcacagctgacagccgtactcaggaagcttctggatcctaggcttatctccacagaggagaacacacaagcagcagagaccatggggcccctctcagcccctccctgcacacacctcatcacttggaagggggtcctgctcacagcatcacttttaaacttctggaatccgcccacaactgcccaagtcacgattgaagcccagccacccaaagtttctgaggggaaggatgttcttctacttgtccacaatttgccccagaatcttgctggctacatttggtacaaagggcaaatgacatacctctaccattacattacatcatatgtagtagacggtcaaagaattatatatgggcctgcatacagtggaagagaaagagtatattccaatgcatccctgctgatccagaatgtcacgcaggaggatgcaggatcctacaccttacacatcataaagcgacgcgatgggactggaggagtaactggacatttcaccttcaccttacacctggagactcccaagccctccatctccagcagcaacttaaatcccagggaggccatggaggctgtgatcttaacctgtgatcctgcgactccagccgcaagctaccagtggtggatgaatggtcagagcctccctatgactcacaggttgcagctgtccaaaaccaacaggaccctctttatatttggtgtcacaaagtatattgcaggaccctatgaatgtgaaatacggaacccagtgagtgccagccgcagtgacccagtcaccctgaatctcctcccaaagctcccaagccctacatctccagcagcaacttaaaccccagggaggccatggaggctgtgatcttaacctgtgatcctgcggcttcagacacaagctacctgtggtggatgaatggtcagagcctccctatgactcacaggttgcagctgtccaaaaccaacaggaccctctttatatttggtgtcacaaagtatattgcaggaccctatgaatgtgaaatacggaacccagtgagtgccagccacagtgacccagtcaccctgaatctcctccgtgagtatcctctgttcctctgtgagccaggctgccatcccaaatacacatggccag

SEQ ID NO: 732505 - DNA, 1204 bp, Homo sapiens
ctgccccgggaggaggctcgacagaaggaggaaggacagcacagctgacagccgtactcaggaagcttctggatcctaggcttatctccacagaggagaacacacaagcagcagagaccatggggcccctctcagcccctccctgcacacacctcatcacttggaagggggtcctgctcacagcatcacttttaaacttctggaatccgcccacaactgcccaagtcacgattgaagcccagccacccaaagtttctgaggggaaggatgttcttctacttgtccacaatttgccccagaatcttgctggctacatttggtacaaagggcaaatgacatacctctaccattacattacatcatatgtagtagacggtcaaagaattatatatgggcctgcatacagtggaagagaaagagtatattccaatgcatccctgctgatccagaatgtcacgcaggaggatgcaggatcctacaccttacacatcataaagcgacgcgatgggactggaggagtaactggacatttcaccttcaccttacacctggagactcccaagccctccatctccagcagcaacttaaatcccagggaggccatggaggctgtgatcttaacctgtgatcctgcgactccagccgcaagctaccagtggtggatgaatggtcagagcctccctattgcaggaccctatgaatgtgaaatacggaacccagtgagtgccagccgcagtgacccagtcaccctgaatctcctcccaaagctgtccaagccctacatcacaatcaacaacttaaaccccagagagaataaggatgtcttaaccttcacctgtgaacctaagagtgagaactacacctacatttggtggctaaatggtcagagcctccctgtcagtcccagggtaaagcgacccattgaaaacaggatcctcattctacccaatgtcacgagaaatgaaacaggaccttatcaatgtgaaatacgggaccgatatggtggcatccgcagtgacccagtcaccctgaatgtcctctatggtccagacctccccagcatttacccttcattcacctattaccgttcaggagaaaacctctacttgtcctgcttcgcggaatctaacccaccggcagagtatttttggacaattaatgggaagtttcagcaatcaggacaaaagctctctatcccccaaat

SEQ ID NO: 732506 - DNA, 2010 bp, Homo sapiens
ctgccccgggaggaggctcgacagaaggaggaaggacagcacagctgacagccgtactcaggaagcttctggatcctaggcttatctccacagaggagaacacacaagcagcagagaccatggggcccctctcagcccctccctgcacacacctcatcacttggaagggggtcctgctcacagcatcacttttaaacttctggaatccgcccacaactgcccaagtcacgattgaagcccagccacccaaagtttctgaggggaaggatgttcttctacttgtccacaatttgccccagaatcttgctggctacatttggtacaaagggcaaatgacatacctctaccattacattacatcatatgtagtagacggtcaaagaattatatatgggcctgcatacagtggaagagaaagagtatattccaatgcatccctgctgatccagaatgtcacgcaggaggatgcaggatcctacaccttacacatcataaagcgacgcgatgggactggaggagtaactggacatttcaccttcaccttacacctggagactcccaagccctccatctccagcagcaacttaaatcccagggaggccatggaggctgtgatcttaacctgtgatcctgcgactccagccgcaagctaccagtggtggatgaatggtcagagcctccctattgcaggaccctatgaatgtgaaatacggaacccagtgagtgccagccgcagtgacccagtcaccctgaatctcctcccaaagctgtccaagccctacatcacaatcaacaacttaaaccccagagagaataaggatgtcttaaccttcacctgtgaacctaagagtgagaactacacctacatttggtggctaaatggtcagagcctccctgtcagtcccagggtaaagcgacccattgaaaacaggatcctcattctacccaatgtcacgagaaatgaaacaggaccttatcaatgtgaaatacgggaccgatatggtggcatccgcagtgacccagtcaccctgaatgtcctctatggtccagacctccccagcatttacccttcattcacctattaccgttcaggagaaaacctctacttgtcctgcttcgccgagtctaacccacgggcacaatattcttggacaattaatgggaagtttcagctatcaggacaaaagctctctatcccccaaataactacaaagcatagtgggctctatgcttgctctgttcgtaactcagccactggcaaggaaagctccaaatccatcacagtcaaagtctctgactggatattaccctgaattctactagttcctccaattccattttctcccatggaatcacgaagagcaagacccactctgttccagaagccctataagctggaggtggacaactcgatgtaaatttcatgggaaaacccttgtacctgacatgtgagccactcagaactcaccaaaatgttcgacaccataacaacagctactcaaactgtaaaccaggataacaagttgatgacttcacactgtggacagtttttccaaagatgtcagaacaagactccccatcatgataaggctcccacccctcttaactgtccttgctcatgcctgcctctttcacttggcaggataatgcagtcattagaatttcacatgtagtagcttctgagggtaacaacagagtgtcagatatgtcatctcaacctcaaacttttacgtaacatctcaggggaaatgtggctctctccatcttgcatacagggctcccaatagaaatgaacacagagatattgcctgtgtgtttgcagagaagatggtttctataaagagtaggaaagctgaaattatagtagagtctcctttaaatgcacattgtgtggatggctctcaccatttcctaagagatacagtgtaaaacgtgacagtaatactgattctagcagaataaaacatgtaccacatttgctaaaaaaaaaaaaaacaacaaaaaaaaacc

SEQ ID NO: 732507 - DNA, 1983 bp, Homo sapiens
ctgccccgggaggaggctcgacagaaggaggaaggacagcacagctgacagccgtactcaggaagcttctggatcctaggcttatctccacagaggagaacacacaagcagcagagaccatggggcccctctcagcccctccctgcacacacctcatcacttggaagggggtcctgctcacagcatcacttttaaacttctggaatccgcccacaactgcccaagtcacgattgaagcccagccacccaaagtttctgaggggaaggatgttcttctacttgtccacaatttgccccagaatcttgctggctacatttggtacaaagggcaaatgacatacctctaccattacattacatcatatgtagtagacggtcaaagaattatatatgggcctgcatacagtggaagagaaagagtatattccaatgcatccctgctgatccagaatgtcacgcaggaggatgcaggatcctacaccttacacatcataaagcgacgcgatgggactggaggagtaactggacatttcaccttcaccttacacctggagactcccaagccctccatctccagcagcaacttaaatcccagggaggccatggaggctgtgatcttaacctgtgatcctgcgactccagccgcaagctaccagtggtggatgaatggtcagagcctccctattgcaggaccctatgaatgtgaaatacggaacccagtgagtgccagccgcagtgacccagtcaccctgaatctcctcccaaagctgtccaagccctacatcacaatcaacaacttaaaccccagagagaataaggatgtcttaaccttcacctgtgaacctaagagtgagaactacacctacatttggtggctaaatggtcagagcctccctgtcagtcccagggtaaagcgacccattgaaaacaggatcctcattctacccaatgtcacgagaaatgaaacaggaccttatcaatgtgaaatacgggaccgatatggtggcatccgcagtgacccagtcaccctgaatgtcctctatggtccagacctccccagcatttacccttcattcacctattaccgttcaggagaaaacctctacttgtcctgcttcgccgagtctaacccacgggcacaatattcttggacaattaatgggaagtttcagctatcaggacaaaagctctctatcccccaaataactacaaagcatagtgggctctatgcttgctctgttcgtaactcagccactggcaaggaaagctccaaatccatcacagtcaaagtctctgactggatattaccctgaattctactagttcctccaattccattttctcccatggaatcacgaagagcaagacccactctgttccagaagccctataagctggaggtggacaactcgatgtaaatttcatgggaaaacccttgtacctgacatgtgagccactcagaactcaccaaaatgttcgacaccataacaacagctactcaaactgtaaaccaggataacaagttgatgacttcacactgtggacagtttttccaaagatgtcagaacaagactccccatcatgataaggctcccacccctcttaactgtccttgctcatgcctgcctctttcacttggcaggataatgcagtcattagaatttcacatgtagtagcttctgagggtaacaacagagtgtcagatatgtcatctcaacctcaaacttttacgtaacatctcaggggaaatgtggctctctccatcttgcatacagggctcccaatagaaatgaacacagagatattgcctgtgtgtttgcagagaagatggtttctataaagagtaggaaagctgaaattatagtagagtctcctttaaatgcacattgtgtggatggctctcaccatttcctaagagatacagtgtaaaacgtgacagtaatactgattctagcagaataaaacatgtaccacatttgctaa

SEQ ID NO: 732508 - DNA, 2032 bp, Homo sapiens
ctgccccgggaggaggctcgacagaaggaggaaggacagcacagctgacagccgtactcaggaagcttctggatcctaggcttatctccacagaggagaacacacaagcagcagagaccatggggcccctctcagcccctccctgcacacacctcatcacttggaagggggtcctgctcacagcatcacttttaaacttctggaatccgcccacaactgcccaagtcacgattgaagcccagccacccaaagtttctgaggggaaggatgttcttctacttgtccacaatttgccccagaatcttgctggctacatttggtacaaagggcaaatgacatacctctaccattacattacatcatatgtagtagacggtcaaagaattatatatgggcctgcatacagtggaagagaaagagtatattccaatgcatccctgctgatccagaatgtcacgcaggaggatgcaggatcctacaccttacacatcataaagcgacgcgatgggactggaggagtaactggacatttcaccttcaccttacacctggagactcccaagccctccatctccagcagcaacttaaatcccagggaggccatggaggctgtgatcttaacctgtgatcctgcgactccagccgcaagctaccagtggtggatgaatggtcagagcctccctattgcaggaccctatgaatgtgaaatacggaacccagtgagtgccagccgcagtgacccagtcaccctgaatctcctcccaaagctgtccaagccctacatcacaatcaacaacttaaaccccagagagaataaggatgtcttaaccttcacctgtgaacctaagagtgagaactacacctacatttggtggctaaatggtcagagcctccctgtcagtcccagggtaaagcgacccattgaaaacaggatcctcattctacccaatgtcacgagaaatgaaacaggaccttatcaatgtgaaatacgggaccgatatggtggcatccgcagtgacccagtcaccctgaatgtcctctatggtccagacctccccagcatttacccttcattcacctattaccgttcaggagaaaacctctacttgtcctgcttcgccgagtctaacccacgggcacaatattcttggacaattaatgggaagtttcagctatcaggacaaaagctctctatcccccaaataactacaaagcatagtgggctctatgcttgctctgttcgtaactcagccactggcaaggaaagctccaaatccatcacagtcaaagtctctggtaagtggatcccagcatccttggcaatagggatttaggtggagtctatctggcattcagggaagagtgaggaaaacatttttattcccagcctgtgtcccatgggcacaagcaaatcccaaattctcctcctgaacactcccaatttgtctaagaacttccaaaactttaacaaacaggctgatatcttcttaaaattcccagcctagaccaagcaggagaaacattgatttcattgaaataattgacaatattgaggataatatttttatgatttttatttgaaaatttgctgattctttaaatggtttgttttctagatttatggaatttttttcttttaatctatctatagcttgtagcagttcaataaactatacttctgggaaccgtaattgaaacatttacttttgctctctacctgactgccccagaattgggcaactattcatgagtattgatatgtttatggtaatacacatatttgcacaagtacagtaacaatctgctctctttgtaacaggacacatttcaaatcattggttatattaccaaggctttgactgggatgttatattcaagaatatagatagaatgaaccaatatgaactgcaggcaaagtctgaagtcagccttggtttggcttcctattctcaagggttttgtaaaagtttaatctgagagtccttataaaaacttagagcaaataaaattctaaaagagcgcctaaaaggtc

SEQ ID NO: 732509 - DNA, 1509 bp, Homo sapiens
ctgccccgggaggaggctcgacagaaggaggaaggacagcacagctgacagccgtactcaggaagcttctggatcctaggcttatctccacagaggagaacacacaagcagcagagaccatggggcccctctcagcccctccctgcacacacctcatcacttggaagggggtcctgctcacagcatcacttttaaacttctggaatccgcccacaactgcccaagtcacgattgaagcccagccacccaaagtttctgaggggaaggatgttcttctacttgtccacaatttgccccagaatcttgctggctacatttggtacaaagggcaaatgacatacctctaccattacattacatcatatgtagtagacggtcaaagaattatatatgggcctgcatacagtggaagagaaagagtatattccaatgcatccctgctgatccagaatgtcacgcaggaggatgcaggatcctacaccttacacatcataaagcgacgcgatgggactggaggagtaactggacatttcaccttcaccttacacctggagactcccaagccctccatctccagcagcaacttaaatcccagggaggccatggaggctgtgatcttaacctgtgatcctgcgactccagccgcaagctaccagtggtggatgaatggtcagagcctccctattgcaggaccctatgaatgtgaaatacggaacccagtgagtgccagccgcagtgacccagtcaccctgaatctcctcccaaagctgtccaagccctacatcacaatcaacaacttaaaccccagagagaataaggatgtcttaaccttcacctgtgaacctaagagtgagaactacacctacatttggtggctaaatggtcagagcctccctgtcagtcccagggtaaagcgacccattgaaaacaggatcctcattctacccaatgtcacgagaaatgaaacaggaccttatcaatgtgaaatacgggaccgatatggtggcatccgcagtgacccagtcaccctgaatgtcctctatggtccagacctccccagcatttacccttcattcacctattaccgttcaggagaaaacctctacttgtcctgcttcgccgagtctaacccacgggcacaatattcttggacaattaatgggaagtttcagctatcaggacaaaagctctctatcccccaaataactacaaagcatagtgggctctatgcttgctctgttcgtaactcagccactggcaaggaaagctccaaatccatcacagtcaaagtctctggacacatttcaaatcattggttatattaccaaggctttgactgggatgttatattcaagaatatagatagaatgaaccaatatgaactgcaggcaaagtctgaagtcagccttggtttggcttcctattctcaagggttttgtaaaagtttaatctgagagtccttataaaaacttagagcaaataaaattctaaaagagcgcctaaaaggtc

SEQ ID NO: 732510 - DNA, 1963 bp, Homo sapiens
ctgccccgggaggaggctcgacagaaggaggaaggacagcacagctgacagccgtactcaggaagcttctggatcctaggcttatctccacagaggagaacacacaagcagcagagaccatggggcccctctcagcccctccctgcacacacctcatcacttggaagggggtcctgctcacagcatcacttttaaacttctggaatccgcccacaactgcccaagtcacgattgaagcccagccacccaaagtttctgaggggaaggatgttcttctacttgtccacaatttgccccagaatcttgctggctacatttggtacaaagggcaaatgacatacctctaccattacattacatcatatgtagtagacggtcaaagaattatatatgggcctgcatacagtggaagagaaagagtatattccaatgcatccctgctgatccagaatgtcacgcaggaggatgcaggatcctacaccttacacatcataaagcgacgcgatgggactggaggagtaactggacatttcaccttcaccttacacctggagactcccaagccctccatctccagcagcaacttaaatcccagggaggccatggaggctgtgatcttaacctgtgatcctgcgactccagccgcaagctaccagtggtggatgaatggtcagagcctccctattgcaggaccctatgaatgtgaaatacggaacccagtgagtgccagccgcagtgacccagtcaccctgaatctcctcccaaagctgtccaagccctacatcacaatcaacaacttaaaccccagagagaataaggatgtcttaaccttcacctgtgaacctaagagtgagaactacacctacatttggtggctaaatggtcagagcctccctgtcagtcccagggtaaagcgacccattgaaaacaggatcctcattctacccaatgtcacgagaaatgaaacaggaccttatcaatgtgaaatacgggaccgatatggtggcatccgcagtgacccagtcaccctgaatgtcctcttcaggagaaaacctctacttgtcctgcttcgccgagtctaacccacgggcacaatattcttggacaattaatgggaagtttcagctatcaggacaaaagctctctatcccccaaataactacaaagcatagtgggctctatgcttgctctgttcgtaactcagccactggcaaggaaagctccaaatccatcacagtcaaagtctctgactggatattaccctgaattctactagttcctccaattccattttctcccatggaatcacgaagagcaagacccactctgttccagaagccctataagctggaggtggacaactcgatgtaaatttcatgggaaaacccttgtacctgacatgtgagccactcagaactcaccaaaatgttcgacaccataacaacagctactcaaactgtaaaccaggataacaagttgatgacttcacactgtggacagtttttccaaagatgtcagaacaagactccccatcatgataaggctcccacccctcttaactgtccttgctcatgcctgcctctttcacttggcaggataatgcagtcattagaatttcacatgtagtagcttctgagggtaacaacagagtgtcagatatgtcatctcaacctcaaacttttacgtaacatctcaggggaaatgtggctctctccatcttgcatacagggctcccaatagaaatgaacacagagatattgcctgtgtgtttgcagagaagatggtttctataaagagtaggaaagctgaaattatagtagagtctcctttaaatgcacattgtgtggatggctctcaccatttcctaagagatacagtgtaaaacgtgacagtaatactgattctagcagaataaaacatgtaccacatttgctaaaaaaaaaaaaaacaacaaaaaaaaacc

SEQ ID NO: 732511 - DNA, 1936 bp, Homo sapiens
ctgccccgggaggaggctcgacagaaggaggaaggacagcacagctgacagccgtactcaggaagcttctggatcctaggcttatctccacagaggagaacacacaagcagcagagaccatggggcccctctcagcccctccctgcacacacctcatcacttggaagggggtcctgctcacagcatcacttttaaacttctggaatccgcccacaactgcccaagtcacgattgaagcccagccacccaaagtttctgaggggaaggatgttcttctacttgtccacaatttgccccagaatcttgctggctacatttggtacaaagggcaaatgacatacctctaccattacattacatcatatgtagtagacggtcaaagaattatatatgggcctgcatacagtggaagagaaagagtatattccaatgcatccctgctgatccagaatgtcacgcaggaggatgcaggatcctacaccttacacatcataaagcgacgcgatgggactggaggagtaactggacatttcaccttcaccttacacctggagactcccaagccctccatctccagcagcaacttaaatcccagggaggccatggaggctgtgatcttaacctgtgatcctgcgactccagccgcaagctaccagtggtggatgaatggtcagagcctccctattgcaggaccctatgaatgtgaaatacggaacccagtgagtgccagccgcagtgacccagtcaccctgaatctcctcccaaagctgtccaagccctacatcacaatcaacaacttaaaccccagagagaataaggatgtcttaaccttcacctgtgaacctaagagtgagaactacacctacatttggtggctaaatggtcagagcctccctgtcagtcccagggtaaagcgacccattgaaaacaggatcctcattctacccaatgtcacgagaaatgaaacaggaccttatcaatgtgaaatacgggaccgatatggtggcatccgcagtgacccagtcaccctgaatgtcctcttcaggagaaaacctctacttgtcctgcttcgccgagtctaacccacgggcacaatattcttggacaattaatgggaagtttcagctatcaggacaaaagctctctatcccccaaataactacaaagcatagtgggctctatgcttgctctgttcgtaactcagccactggcaaggaaagctccaaatccatcacagtcaaagtctctgactggatattaccctgaattctactagttcctccaattccattttctcccatggaatcacgaagagcaagacccactctgttccagaagccctataagctggaggtggacaactcgatgtaaatttcatgggaaaacccttgtacctgacatgtgagccactcagaactcaccaaaatgttcgacaccataacaacagctactcaaactgtaaaccaggataacaagttgatgacttcacactgtggacagtttttccaaagatgtcagaacaagactccccatcatgataaggctcccacccctcttaactgtccttgctcatgcctgcctctttcacttggcaggataatgcagtcattagaatttcacatgtagtagcttctgagggtaacaacagagtgtcagatatgtcatctcaacctcaaacttttacgtaacatctcaggggaaatgtggctctctccatcttgcatacagggctcccaatagaaatgaacacagagatattgcctgtgtgtttgcagagaagatggtttctataaagagtaggaaagctgaaattatagtagagtctcctttaaatgcacattgtgtggatggctctcaccatttcctaagagatacagtgtaaaacgtgacagtaatactgattctagcagaataaaacatgtaccacatttgctaa

SEQ ID NO: 732512 - DNA, 812 bp, Homo sapiens
ctgccccgggaggaggctcgacagaaggaggaaggacagcacagctgacagccgtactcaggaagcttctggatcctaggcttatctccacagaggagaacacacaagcagcagagaccatggggcccctctcagcccctccctgcacacacctcatcacttggaagggggtcctgctcacagcatcacttttaaacttctggaatccgcccacaactgcccaagtcacgattgaagcccagccacccaaagtttctgaggggaaggatgttcttctacttgtccacaatttgccccagaatcttgctggctacatttggtacaaagggcaaatgacatacctctaccattacattacatcatatgtagtagacggtcaaagaattatatatgggcctgcatacagtggaagagaaagagtatattccaatgcatccctgctgatccagaatgtcacgcaggaggatgcaggatcctacaccttacacatcataaagcgacgcgatgggactggaggagtaactggacatttcaccttcaccttacacctggagactcccaagccctccatctccagcagcaacttaaatcccagggaggccatggaggctgtgatcttaacctgtgatcctgcgactccagccgcaagctaccagtggtggatgaatggtcagagcctccctattgcaggaccctatgaatgtgaaatacggaacccagtgagtgccagccgcagtgacccagtcaccctgaatctcctcccaaagctgtccaagccctacatcacaatcaacaacttaaaccccagagag

SEQ ID NO: 732513 - DNA, 1797 bp, Homo sapiens
ctgccccgggaggaggctcgacagaaggaggaaggacagcacagctgacagccgtactcaggaagcttctggatcctaggcttatctccacagaggagaacacacaagcagcagagaccatggggcccctctcagcccctccctgcacacacctcatcacttggaagggggtcctgctcacagcatcacttttaaacttctggaatccgcccacaactgcccaagtcacgattgaagcccagccacccaaagtttctgaggggaaggatgttcttctacttgtccacaatttgccccagaatcttgctggctacatttggtacaaagggcaaatgacatacctctaccattacattacatcatatgtagtagacggtcaaagaattatatatgggcctgcatacagtggaagagaaagagtatattccaatgcatccctgctgatccagaatgtcacgcaggaggatgcaggatcctacaccttacacatcataaagcgacgcgatgggactggaggagtaactggacatttcaccttcaccttacacctggagactcccaagccctccatctccagcagcaacttaaatcccagggaggccatggaggctgtgatcttaacctgtgatcctgcgactccagccgcaagctaccagtggtggatgaatggtcagagcctccctatgactcacaggttgcagctgtccaaaaccaacaggaccctctttatatttggtgtcacaaagtatattgcaggaccctatgaatgtgaaatacggaacccagtgagtgccagccgcagtgacccagtcaccctgaatctcctccatggtccagacctccccagcatttacccttcattcacctattaccgttcaggagaaaacctctacttgtcctgcttcgccgagtctaacccacgggcacaatattcttggacaattaatgggaagtttcagctatcaggacaaaagctctctatcccccaaataactacaaagcatagtgggctctatgcttgctctgttcgtaactcagccactggcaaggaaagctccaaatccatcacagtcaaagtctctgactggatattaccctgaattctactagttcctccaattccattttctcccatggaatcacgaagagcaagacccactctgttccagaagccctataagctggaggtggacaactcgatgtaaatttcatgggaaaacccttgtacctgacatgtgagccactcagaactcaccaaaatgttcgacaccataacaacagctactcaaactgtaaaccaggataacaagttgatgacttcacactgtggacagtttttccaaagatgtcagaacaagactccccatcatgataaggctcccacccctcttaactgtccttgctcatgcctgcctctttcacttggcaggataatgcagtcattagaatttcacatgtagtagcttctgagggtaacaacagagtgtcagatatgtcatctcaacctcaaacttttacgtaacatctcaggggaaatgtggctctctccatcttgcatacagggctcccaatagaaatgaacacagagatattgcctgtgtgtttgcagagaagatggtttctataaagagtaggaaagctgaaattatagtagagtctcctttaaatgcacattgtgtggatggctctcaccatttcctaagagatacagtgtaaaacgtgacagtaatactgattctagcagaataaaacatgtaccacatttgctaaaaaaaaaaaaaacaacaaaaaaaaacc

SEQ ID NO: 732514 - DNA, 1770 bp, Homo sapiens
ctgccccgggaggaggctcgacagaaggaggaaggacagcacagctgacagccgtactcaggaagcttctggatcctaggcttatctccacagaggagaacacacaagcagcagagaccatggggcccctctcagcccctccctgcacacacctcatcacttggaagggggtcctgctcacagcatcacttttaaacttctggaatccgcccacaactgcccaagtcacgattgaagcccagccacccaaagtttctgaggggaaggatgttcttctacttgtccacaatttgccccagaatcttgctggctacatttggtacaaagggcaaatgacatacctctaccattacattacatcatatgtagtagacggtcaaagaattatatatgggcctgcatacagtggaagagaaagagtatattccaatgcatccctgctgatccagaatgtcacgcaggaggatgcaggatcctacaccttacacatcataaagcgacgcgatgggactggaggagtaactggacatttcaccttcaccttacacctggagactcccaagccctccatctccagcagcaacttaaatcccagggaggccatggaggctgtgatcttaacctgtgatcctgcgactccagccgcaagctaccagtggtggatgaatggtcagagcctccctatgactcacaggttgcagctgtccaaaaccaacaggaccctctttatatttggtgtcacaaagtatattgcaggaccctatgaatgtgaaatacggaacccagtgagtgccagccgcagtgacccagtcaccctgaatctcctccatggtccagacctccccagcatttacccttcattcacctattaccgttcaggagaaaacctctacttgtcctgcttcgccgagtctaacccacgggcacaatattcttggacaattaatgggaagtttcagctatcaggacaaaagctctctatcccccaaataactacaaagcatagtgggctctatgcttgctctgttcgtaactcagccactggcaaggaaagctccaaatccatcacagtcaaagtctctgactggatattaccctgaattctactagttcctccaattccattttctcccatggaatcacgaagagcaagacccactctgttccagaagccctataagctggaggtggacaactcgatgtaaatttcatgggaaaacccttgtacctgacatgtgagccactcagaactcaccaaaatgttcgacaccataacaacagctactcaaactgtaaaccaggataacaagttgatgacttcacactgtggacagtttttccaaagatgtcagaacaagactccccatcatgataaggctcccacccctcttaactgtccttgctcatgcctgcctctttcacttggcaggataatgcagtcattagaatttcacatgtagtagcttctgagggtaacaacagagtgtcagatatgtcatctcaacctcaaacttttacgtaacatctcaggggaaatgtggctctctccatcttgcatacagggctcccaatagaaatgaacacagagatattgcctgtgtgtttgcagagaagatggtttctataaagagtaggaaagctgaaattatagtagagtctcctttaaatgcacattgtgtggatggctctcaccatttcctaagagatacagtgtaaaacgtgacagtaatactgattctagcagaataaaacatgtaccacatttgctaa

SEQ ID NO: 732515 - DNA, 952 bp, Homo sapiens
tagaggatccctatcagagcatacccctactcaggagaaaacctctacttgtcctgcttcgccgagtctaacccacgggcacaatattcttggacaattaatgggaagtttcagctatcaggacaaaagctctctatcccccaaataactacaaagcatagtgggctctatgcttgctctgttcgtaactcagccactggcaaggaaagctccaaatccatcacagtcaaagtctctgactggatattaccctgaattctactagttcctccaattccattttctcccatggaatcacgaagagcaagacccactctgttccagaagccctataagctggaggtggacaactcgatgtaaatttcatgggaaaacccttgtacctgacatgtgagccactcagaactcaccaaaatgttcgacaccataacaacagctactcaaactgtaaaccaggataacaagttgatgacttcacactgtggacagtttttccaaagatgtcagaacaagactccccatcatgataaggctcccacccctcttaactgtccttgctcatgcctgcctctttcacttggcaggataatgcagtcattagaatttcacatgtagtagcttctgagggtaacaacagagtgtcagatatgtcatctcaacctcaaacttttacgtaacatctcaggggaaatgtggctctctccatcttgcatacagggctcccaatagaaatgaacacagagatattgcctgtgtgtttgcagagaagatggtttctataaagagtaggaaagctgaaattatagtagagtctcctttaaatgcacattgtgtggatggctctcaccatttcctaagagatacagtgtaaaacgtgacagtaatactgattctagcagaataaaacatgtaccacatttgctaaaaaaaaaaaaaacaacaaaaaaaaacc

SEQ ID NO: 732516 - DNA, 925 bp, Homo sapiens; identical to SEQ ID NO: 362273

SEQ ID NO: 732517 - DNA, 451 bp, Homo sapiens
tagaggatccctatcagagcatacccctactcaggagaaaacctctacttgtcctgcttcgccgagtctaacccacgggcacaatattcttggacaattaatgggaagtttcagctatcaggacaaaagctctctatcccccaaataactacaaagcatagtgggctctatgcttgctctgttcgtaactcagccactggcaaggaaagctccaaatccatcacagtcaaagtctctggacacatttcaaatcattggttatattaccaaggctttgactgggatgttatattcaagaatatagatagaatgaaccaatatgaactgcaggcaaagtctgaagtcagccttggtttggcttcctattctcaagggttttgtaaaagtttaatctgagagtccttataaaaacttagagcaaataaaattctaaaagagcgcctaaaaggtc

SEQ ID NO: 732518 - DNA, 1366 bp, Homo sapiens
gtgagtatcttttgttcctctgtgggccaggacaccagcttaaatccaaaccaccagaggccaggtctctcagtctctctccagtccaagtatagacacctttacttctggacatccgaggtggccatgactccctgccctgggaaaacctaggtaggcacagccttaaccaagaatataaggggaggggacgctcttgtcatgggagacttggggcctaaaacttgtgatgggagaaacagtgaacatagagggagtttggctgggacttgaaggtgtgtcttggcttagagggtaactgtgtccctttaagagaccaggaacatccccttccctcggatgacatcacctatggctttattctctttgcgccagatggtccagacctccccagcatttacccttcattcacctattaccgttcaggagaaaacctctacttgtcctgcttcgccgagtctaacccacgggcacaatattcttggacaattaatgggaagtttcagctatcaggacaaaagctctctatcccccaaataactacaaagcatagtgggctctatgcttgctctgttcgtaactcagccactggcaaggaaagctccaaatccatcacagtcaaagtctctggtaagtggatcccagcatccttggcaatagggatttaggtggagtctatctggcattcagggaagagtgaggaaaacatttttattcccagcctgtgtcccatgggcacaagcaaatcccaaattctcctcctgaacactcccaatttgtctaagaacttccaaaactttaacaaacaggctgatatcttcttaaaattcccagcctagaccaagcaggagaaacattgatttcattgaaataattgacaatattgaggataatatttttatgatttttatttgaaaatttgctgattctttaaatggtttgttttctagatttatggaatttttttcttttaatctatctatagcttgtagcagttcaataaactatacttctgggaaccgtaattgaaacatttacttttgctctctacctgactgccccagaattgggcaactattcatgagtattgatatgtttatggtaatacacatatttgcacaagtacagtaacaatctgctctctttgtaacaggacacatttcaaatcattggttatattaccaaggctttgactgggatgttatattcaagaatatagatagaatgaaccaatatgaactgcaggcaaagtctgaagtcagccttggtttggcttcctattctcaagggttttgtaaaagtttaatctgagagtccttataaaaacttagagcaaataaaattctaaaagagcgcctaaaaggtc

SEQ ID NO: 732519 - DNA, 1010 bp, Homo sapiens
  misc_feature (26)..(26): n is a, c, g, or t
tctagaggatcctgcgggagccttancctccgggagccttaatggtccagacctccccagcatttacccttcattcacctattaccgttcaggagaaaacctctacttgtcctgcttcgccgagtctaacccacgggcacaatattcttggacaattaatgggaagtttcagctatcaggacaaaagctctctatcccccaaataactacaaagcatagtgggctctatgcttgctctgttcgtaactcagccactggcaaggaaagctccaaatccatcacagtcaaagtctctgactggatattaccctgaattctactagttcctccaattccattttctcccatggaatcacgaagagcaagacccactctgttccagaagccctataagctggaggtggacaactcgatgtaaatttcatgggaaaacccttgtacctgacatgtgagccactcagaactcaccaaaatgttcgacaccataacaacagctactcaaactgtaaaccaggataacaagttgatgacttcacactgtggacagtttttccaaagatgtcagaacaagactccccatcatgataaggctcccacccctcttaactgtccttgctcatgcctgcctctttcacttggcaggataatgcagtcattagaatttcacatgtagtagcttctgagggtaacaacagagtgtcagatatgtcatctcaacctcaaacttttacgtaacatctcaggggaaatgtggctctctccatcttgcatacagggctcccaatagaaatgaacacagagatattgcctgtgtgtttgcagagaagatggtttctataaagagtaggaaagctgaaattatagtagagtctcctttaaatgcacattgtgtggatggctctcaccatttcctaagagatacagtgtaaaacgtgacagtaatactgattctagcagaataaaacatgtaccacatttgctaaaaaaaaaaaaaacaacaaaaaaaaacc

SEQ ID NO: 732520 - DNA, 983 bp, Homo sapiens; identical to SEQ ID NO: 362298
  misc_feature (26)..(26): n is a, c, g, or t

SEQ ID NO: 732521 - DNA, 864 bp, Homo sapiens
ctgctccgcccctctctgctgctccgcccctctctgcccaagtcacgattgaagcccagccacccaaagtttctgaggggaaggatgttcttctacttgtccacaatttgccccagaatcttgctggctacatttggtacaaagggcaaatgacatacctctaccattacattacatcatatgtagtagacggtcaaagaattatatatgggcctgcatacagtggaagagaaagagtatattccaatgcatccctgctgatccagaatgtcacgcaggaggatgcaggatcctacaccttacacatcataaagcgacgcgatgggactggaggagtaactggacatttcaccttcaccttacacctggagactcccaagccctccatctccagcagcaacttaaatcccagggaggccatggaggctgtgatcttaacctgtgatcctgcgactccagccgcaagctaccagtggtggatgaatggtcagagcctccctatgactcacaggttgcagctgtccaaaaccaacaggaccctctttatatttggtgtcacaaagtatattgcaggaccctatgaatgtgaaatacggaacccagtgagtgccagccgcagtgacccagtcaccctgaatctcctcctacaaaggacaactgatggacctctaccattacattacatcatatgtagtagacggtcaaataattatatatgggcctgcatacagtggacgagaaacagtatattcccatgcatccctgctgatccagaatgtcacccgggaagacgcaggatcctacaccttacacatcataaagcgaggtgataggactagaggagtaactggatatttcaccttc

SEQ ID NO: 732522 - DNA, 1864 bp, Homo sapiens
ctgctccgcccctctctgctgctccgcccctctctgcccaagtcacgattgaagcccagccacccaaagtttctgaggggaaggatgttcttctacttgtccacaatttgccccagaatcttgctggctacatttggtacaaagggcaaatgacatacctctaccattacattacatcatatgtagtagacggtcaaagaattatatatgggcctgcatacagtggaagagaaagagtatattccaatgcatccctgctgatccagaatgtcacgcaggaggatgcaggatcctacaccttacacatcataaagcgacgcgatgggactggaggagtaactggacatttcaccttcaccttacacctggagactcccaagccctccatctccagcagcaacttaaatcccagggaggccatggaggctgtgatcttaacctgtgatcctgcgactccagccgcaagctaccagtggtggatgaatggtcagagcctccctatgactcacaggttgcagctgtccaaaaccaacaggaccctctttatatttggtgtcacaaagtatattgcaggaccctatgaatgtgaaatacggaacccagtgagtgccagccgcagtgacccagtcaccctgaatctcctcccaaagctgtccaagccctacatcacaatcaacaacttaaaccccagagagaataaggatgtcttaaccttcacctgtgaacctaagagtgagaactacacctacatttggtggctaaatggtcagagcctccctgtcagtcccagggtaaagcgacccattgaaaacaggatcctcaggaccttatcaatgtgaaatacgggaccgatatggtggcatccgcagtgacccagtcaccctgaatgtcctctatggtccagacctccccagcatttacccttcattcacctattaccgttcaggagaaaacctctacttgtcctgcttcgccgagtctaacccacgggcacaatattcttggacaattaatgggaagtttcagctatcaggacaaaagctctctatcccccaaataactacaaagcatagtgggctctatgcttgctctgttcgtaactcagccactggcaaggaaagctccaaatccatcacagtcaaagtctctgactggatattaccctgaattctactagttcctccaattccattttctcccatggaatcacgaagagcaagacccactctgttccagaagccctataagctggaggtggacaactcgatgtaaatttcatgggaaaacccttgtacctgacatgtgagccactcagaactcaccaaaatgttcgacaccataacaacagctactcaaactgtaaaccaggataacaagttgatgacttcacactgtggacagtttttccaaagatgtcagaacaagactccccatcatgataaggctcccacccctcttaactgtccttgctcatgcctgcctctttcacttggcaggataatgcagtcattagaatttcacatgtagtagcttctgagggtaacaacagagtgtcagatatgtcatctcaacctcaaacttttacgtaacatctcaggggaaatgtggctctctccatcttgcatacagggctcccaatagaaatgaacacagagatattgcctgtgtgtttgcagagaagatggtttctataaagagtaggaaagctgaaattatagtagagtctcctttaaatgcacattgtgtggatggctctcaccatttcctaagagatacagtgtaaaacgtgacagtaatactgattctagcagaataaaacatgtaccacatttgctaaaaaaaaaaaaaacaacaaaaaaaaacc

SEQ ID NO: 732523 - DNA, 1837 bp, Homo sapiens
ctgctccgcccctctctgctgctccgcccctctctgcccaagtcacgattgaagcccagccacccaaagtttctgaggggaaggatgttcttctacttgtccacaatttgccccagaatcttgctggctacatttggtacaaagggcaaatgacatacctctaccattacattacatcatatgtagtagacggtcaaagaattatatatgggcctgcatacagtggaagagaaagagtatattccaatgcatccctgctgatccagaatgtcacgcaggaggatgcaggatcctacaccttacacatcataaagcgacgcgatgggactggaggagtaactggacatttcaccttcaccttacacctggagactcccaagccctccatctccagcagcaacttaaatcccagggaggccatggaggctgtgatcttaacctgtgatcctgcgactccagccgcaagctaccagtggtggatgaatggtcagagcctccctatgactcacaggttgcagctgtccaaaaccaacaggaccctctttatatttggtgtcacaaagtatattgcaggaccctatgaatgtgaaatacggaacccagtgagtgccagccgcagtgacccagtcaccctgaatctcctcccaaagctgtccaagccctacatcacaatcaacaacttaaaccccagagagaataaggatgtcttaaccttcacctgtgaacctaagagtgagaactacacctacatttggtggctaaatggtcagagcctccctgtcagtcccagggtaaagcgacccattgaaaacaggatcctcaggaccttatcaatgtgaaatacgggaccgatatggtggcatccgcagtgacccagtcaccctgaatgtcctctatggtccagacctccccagcatttacccttcattcacctattaccgttcaggagaaaacctctacttgtcctgcttcgccgagtctaacccacgggcacaatattcttggacaattaatgggaagtttcagctatcaggacaaaagctctctatcccccaaataactacaaagcatagtgggctctatgcttgctctgttcgtaactcagccactggcaaggaaagctccaaatccatcacagtcaaagtctctgactggatattaccctgaattctactagttcctccaattccattttctcccatggaatcacgaagagcaagacccactctgttccagaagccctataagctggaggtggacaactcgatgtaaatttcatgggaaaacccttgtacctgacatgtgagccactcagaactcaccaaaatgttcgacaccataacaacagctactcaaactgtaaaccaggataacaagttgatgacttcacactgtggacagtttttccaaagatgtcagaacaagactccccatcatgataaggctcccacccctcttaactgtccttgctcatgcctgcctctttcacttggcaggataatgcagtcattagaatttcacatgtagtagcttctgagggtaacaacagagtgtcagatatgtcatctcaacctcaaacttttacgtaacatctcaggggaaatgtggctctctccatcttgcatacagggctcccaatagaaatgaacacagagatattgcctgtgtgtttgcagagaagatggtttctataaagagtaggaaagctgaaattatagtagagtctcctttaaatgcacattgtgtggatggctctcaccatttcctaagagatacagtgtaaaacgtgacagtaatactgattctagcagaataaaacatgtaccacatttgctaa

SEQ ID NO: 732524 - DNA, 1886 bp, Homo sapiens
ctgctccgcccctctctgctgctccgcccctctctgcccaagtcacgattgaagcccagccacccaaagtttctgaggggaaggatgttcttctacttgtccacaatttgccccagaatcttgctggctacatttggtacaaagggcaaatgacatacctctaccattacattacatcatatgtagtagacggtcaaagaattatatatgggcctgcatacagtggaagagaaagagtatattccaatgcatccctgctgatccagaatgtcacgcaggaggatgcaggatcctacaccttacacatcataaagcgacgcgatgggactggaggagtaactggacatttcaccttcaccttacacctggagactcccaagccctccatctccagcagcaacttaaatcccagggaggccatggaggctgtgatcttaacctgtgatcctgcgactccagccgcaagctaccagtggtggatgaatggtcagagcctccctatgactcacaggttgcagctgtccaaaaccaacaggaccctctttatatttggtgtcacaaagtatattgcaggaccctatgaatgtgaaatacggaacccagtgagtgccagccgcagtgacccagtcaccctgaatctcctcccaaagctgtccaagccctacatcacaatcaacaacttaaaccccagagagaataaggatgtcttaaccttcacctgtgaacctaagagtgagaactacacctacatttggtggctaaatggtcagagcctccctgtcagtcccagggtaaagcgacccattgaaaacaggatcctcaggaccttatcaatgtgaaatacgggaccgatatggtggcatccgcagtgacccagtcaccctgaatgtcctctatggtccagacctccccagcatttacccttcattcacctattaccgttcaggagaaaacctctacttgtcctgcttcgccgagtctaacccacgggcacaatattcttggacaattaatgggaagtttcagctatcaggacaaaagctctctatcccccaaataactacaaagcatagtgggctctatgcttgctctgttcgtaactcagccactggcaaggaaagctccaaatccatcacagtcaaagtctctggtaagtggatcccagcatccttggcaatagggatttaggtggagtctatctggcattcagggaagagtgaggaaaacatttttattcccagcctgtgtcccatgggcacaagcaaatcccaaattctcctcctgaacactcccaatttgtctaagaacttccaaaactttaacaaacaggctgatatcttcttaaaattcccagcctagaccaagcaggagaaacattgatttcattgaaataattgacaatattgaggataatatttttatgatttttatttgaaaatttgctgattctttaaatggtttgttttctagatttatggaatttttttcttttaatctatctatagcttgtagcagttcaataaactatacttctgggaaccgtaattgaaacatttacttttgctctctacctgactgccccagaattgggcaactattcatgagtattgatatgtttatggtaatacacatatttgcacaagtacagtaacaatctgctctctttgtaacaggacacatttcaaatcattggttatattaccaaggctttgactgggatgttatattcaagaatatagatagaatgaaccaatatgaactgcaggcaaagtctgaagtcagccttggtttggcttcctattctcaagggttttgtaaaagtttaatctgagagtccttataaaaacttagagcaaataaaattctaaaagagcgcctaaaaggtc

SEQ ID NO: 732525 - DNA, 1363 bp, Homo sapiens
ctgctccgcccctctctgctgctccgcccctctctgcccaagtcacgattgaagcccagccacccaaagtttctgaggggaaggatgttcttctacttgtccacaatttgccccagaatcttgctggctacatttggtacaaagggcaaatgacatacctctaccattacattacatcatatgtagtagacggtcaaagaattatatatgggcctgcatacagtggaagagaaagagtatattccaatgcatccctgctgatccagaatgtcacgcaggaggatgcaggatcctacaccttacacatcataaagcgacgcgatgggactggaggagtaactggacatttcaccttcaccttacacctggagactcccaagccctccatctccagcagcaacttaaatcccagggaggccatggaggctgtgatcttaacctgtgatcctgcgactccagccgcaagctaccagtggtggatgaatggtcagagcctccctatgactcacaggttgcagctgtccaaaaccaacaggaccctctttatatttggtgtcacaaagtatattgcaggaccctatgaatgtgaaatacggaacccagtgagtgccagccgcagtgacccagtcaccctgaatctcctcccaaagctgtccaagccctacatcacaatcaacaacttaaaccccagagagaataaggatgtcttaaccttcacctgtgaacctaagagtgagaactacacctacatttggtggctaaatggtcagagcctccctgtcagtcccagggtaaagcgacccattgaaaacaggatcctcaggaccttatcaatgtgaaatacgggaccgatatggtggcatccgcagtgacccagtcaccctgaatgtcctctatggtccagacctccccagcatttacccttcattcacctattaccgttcaggagaaaacctctacttgtcctgcttcgccgagtctaacccacgggcacaatattcttggacaattaatgggaagtttcagctatcaggacaaaagctctctatcccccaaataactacaaagcatagtgggctctatgcttgctctgttcgtaactcagccactggcaaggaaagctccaaatccatcacagtcaaagtctctggacacatttcaaatcattggttatattaccaaggctttgactgggatgttatattcaagaatatagatagaatgaaccaatatgaactgcaggcaaagtctgaagtcagccttggtttggcttcctattctcaagggttttgtaaaagtttaatctgagagtccttataaaaacttagagcaaataaaattctaaaagagcgcctaaaaggtc

SEQ ID NO: 732526 - DNA, 1047 bp, Homo sapiens
ctgccccgggaggaggctcgacagaaggaggaaggacagcacagctgacagccgtactcaggaagcttctggatcctaggcttatctccacagaggagaacacacaagcagcagagaccatggggcccctctcagcccctccctgcacacacctcatcacttggaagggggtcctgctcacagcatcacttttaaacttctggaatccgcccacaactgcccaagtcacgattgaagcccagccacccaaagtttctgaggggaaggatgttcttctacttgtccacaatttgccccagaatcttgctggctacatttggtacaaagggcaaatgacatacctctaccattacattacatcatatgtagtagacggtcaaagaattatatatgggcctgcatacagtggaagagaaagagtatattccaatgcatccctgctgatccagaatgtcacgcaggaggatgcaggatcctacaccttacacatcataaagcgacgcgatgggactggaggagtaactggacatttcaccttcaccttacacctggagactcccaagccctccatctccagcagcaacttaaatcccagggaggccatggaggctgtgatcttaacctgtgatcctgcgactccagccgcaagctaccagtggtggatgaatggtcagagcctccctatgactcacaggttgcagctgtccaaaaccaacaggaccctctttatatttggtgtcacaaagtatattgcaggaccctatgaatgtgaaatacggaacccagtgagtgccagccgcagtgacccagtcaccctgaatctcctcctacaaaggacaactgatggacctctaccattacattacatcatatgtagtagacggtcaaataattatatatgggcctgcatacagtggacgagaaacagtatattcccatgcatccctgctgatccagaatgtcacccgggaagacgcaggatcctacaccttacacatcataaagcgaggtgataggactagaggagtaactggatatttcaccttc

SEQ ID NO: 732527 - DNA, 2047 bp, Homo sapiens
ctgccccgggaggaggctcgacagaaggaggaaggacagcacagctgacagccgtactcaggaagcttctggatcctaggcttatctccacagaggagaacacacaagcagcagagaccatggggcccctctcagcccctccctgcacacacctcatcacttggaagggggtcctgctcacagcatcacttttaaacttctggaatccgcccacaactgcccaagtcacgattgaagcccagccacccaaagtttctgaggggaaggatgttcttctacttgtccacaatttgccccagaatcttgctggctacatttggtacaaagggcaaatgacatacctctaccattacattacatcatatgtagtagacggtcaaagaattatatatgggcctgcatacagtggaagagaaagagtatattccaatgcatccctgctgatccagaatgtcacgcaggaggatgcaggatcctacaccttacacatcataaagcgacgcgatgggactggaggagtaactggacatttcaccttcaccttacacctggagactcccaagccctccatctccagcagcaacttaaatcccagggaggccatggaggctgtgatcttaacctgtgatcctgcgactccagccgcaagctaccagtggtggatgaatggtcagagcctccctatgactcacaggttgcagctgtccaaaaccaacaggaccctctttatatttggtgtcacaaagtatattgcaggaccctatgaatgtgaaatacggaacccagtgagtgccagccgcagtgacccagtcaccctgaatctcctcccaaagctgtccaagccctacatcacaatcaacaacttaaaccccagagagaataaggatgtcttaaccttcacctgtgaacctaagagtgagaactacacctacatttggtggctaaatggtcagagcctccctgtcagtcccagggtaaagcgacccattgaaaacaggatcctcaggaccttatcaatgtgaaatacgggaccgatatggtggcatccgcagtgacccagtcaccctgaatgtcctctatggtccagacctccccagcatttacccttcattcacctattaccgttcaggagaaaacctctacttgtcctgcttcgccgagtctaacccacgggcacaatattcttggacaattaatgggaagtttcagctatcaggacaaaagctctctatcccccaaataactacaaagcatagtgggctctatgcttgctctgttcgtaactcagccactggcaaggaaagctccaaatccatcacagtcaaagtctctgactggatattaccctgaattctactagttcctccaattccattttctcccatggaatcacgaagagcaagacccactctgttccagaagccctataagctggaggtggacaactcgatgtaaatttcatgggaaaacccttgtacctgacatgtgagccactcagaactcaccaaaatgttcgacaccataacaacagctactcaaactgtaaaccaggataacaagttgatgacttcacactgtggacagtttttccaaagatgtcagaacaagactccccatcatgataaggctcccacccctcttaactgtccttgctcatgcctgcctctttcacttggcaggataatgcagtcattagaatttcacatgtagtagcttctgagggtaacaacagagtgtcagatatgtcatctcaacctcaaacttttacgtaacatctcaggggaaatgtggctctctccatcttgcatacagggctcccaatagaaatgaacacagagatattgcctgtgtgtttgcagagaagatggtttctataaagagtaggaaagctgaaattatagtagagtctcctttaaatgcacattgtgtggatggctctcaccatttcctaagagatacagtgtaaaacgtgacagtaatactgattctagcagaataaaacatgtaccacatttgctaaaaaaaaaaaaaacaacaaaaaaaaacc

SEQ ID NO: 732528 - DNA, 2020 bp, Homo sapiens
ctgccccgggaggaggctcgacagaaggaggaaggacagcacagctgacagccgtactcaggaagcttctggatcctaggcttatctccacagaggagaacacacaagcagcagagaccatggggcccctctcagcccctccctgcacacacctcatcacttggaagggggtcctgctcacagcatcacttttaaacttctggaatccgcccacaactgcccaagtcacgattgaagcccagccacccaaagtttctgaggggaaggatgttcttctacttgtccacaatttgccccagaatcttgctggctacatttggtacaaagggcaaatgacatacctctaccattacattacatcatatgtagtagacggtcaaagaattatatatgggcctgcatacagtggaagagaaagagtatattccaatgcatccctgctgatccagaatgtcacgcaggaggatgcaggatcctacaccttacacatcataaagcgacgcgatgggactggaggagtaactggacatttcaccttcaccttacacctggagactcccaagccctccatctccagcagcaacttaaatcccagggaggccatggaggctgtgatcttaacctgtgatcctgcgactccagccgcaagctaccagtggtggatgaatggtcagagcctccctatgactcacaggttgcagctgtccaaaaccaacaggaccctctttatatttggtgtcacaaagtatattgcaggaccctatgaatgtgaaatacggaacccagtgagtgccagccgcagtgacccagtcaccctgaatctcctcccaaagctgtccaagccctacatcacaatcaacaacttaaaccccagagagaataaggatgtcttaaccttcacctgtgaacctaagagtgagaactacacctacatttggtggctaaatggtcagagcctccctgtcagtcccagggtaaagcgacccattgaaaacaggatcctcaggaccttatcaatgtgaaatacgggaccgatatggtggcatccgcagtgacccagtcaccctgaatgtcctctatggtccagacctccccagcatttacccttcattcacctattaccgttcaggagaaaacctctacttgtcctgcttcgccgagtctaacccacgggcacaatattcttggacaattaatgggaagtttcagctatcaggacaaaagctctctatcccccaaataactacaaagcatagtgggctctatgcttgctctgttcgtaactcagccactggcaaggaaagctccaaatccatcacagtcaaagtctctgactggatattaccctgaattctactagttcctccaattccattttctcccatggaatcacgaagagcaagacccactctgttccagaagccctataagctggaggtggacaactcgatgtaaatttcatgggaaaacccttgtacctgacatgtgagccactcagaactcaccaaaatgttcgacaccataacaacagctactcaaactgtaaaccaggataacaagttgatgacttcacactgtggacagtttttccaaagatgtcagaacaagactccccatcatgataaggctcccacccctcttaactgtccttgctcatgcctgcctctttcacttggcaggataatgcagtcattagaatttcacatgtagtagcttctgagggtaacaacagagtgtcagatatgtcatctcaacctcaaacttttacgtaacatctcaggggaaatgtggctctctccatcttgcatacagggctcccaatagaaatgaacacagagatattgcctgtgtgtttgcagagaagatggtttctataaagagtaggaaagctgaaattatagtagagtctcctttaaatgcacattgtgtggatggctctcaccatttcctaagagatacagtgtaaaacgtgacagtaatactgattctagcagaataaaacatgtaccacatttgctaa

SEQ ID NO: 732529 - DNA, 2069 bp, Homo sapiens
ctgccccgggaggaggctcgacagaaggaggaaggacagcacagctgacagccgtactcaggaagcttctggatcctaggcttatctccacagaggagaacacacaagcagcagagaccatggggcccctctcagcccctccctgcacacacctcatcacttggaagggggtcctgctcacagcatcacttttaaacttctggaatccgcccacaactgcccaagtcacgattgaagcccagccacccaaagtttctgaggggaaggatgttcttctacttgtccacaatttgccccagaatcttgctggctacatttggtacaaagggcaaatgacatacctctaccattacattacatcatatgtagtagacggtcaaagaattatatatgggcctgcatacagtggaagagaaagagtatattccaatgcatccctgctgatccagaatgtcacgcaggaggatgcaggatcctacaccttacacatcataaagcgacgcgatgggactggaggagtaactggacatttcaccttcaccttacacctggagactcccaagccctccatctccagcagcaacttaaatcccagggaggccatggaggctgtgatcttaacctgtgatcctgcgactccagccgcaagctaccagtggtggatgaatggtcagagcctccctatgactcacaggttgcagctgtccaaaaccaacaggaccctctttatatttggtgtcacaaagtatattgcaggaccctatgaatgtgaaatacggaacccagtgagtgccagccgcagtgacccagtcaccctgaatctcctcccaaagctgtccaagccctacatcacaatcaacaacttaaaccccagagagaataaggatgtcttaaccttcacctgtgaacctaagagtgagaactacacctacatttggtggctaaatggtcagagcctccctgtcagtcccagggtaaagcgacccattgaaaacaggatcctcaggaccttatcaatgtgaaatacgggaccgatatggtggcatccgcagtgacccagtcaccctgaatgtcctctatggtccagacctccccagcatttacccttcattcacctattaccgttcaggagaaaacctctacttgtcctgcttcgccgagtctaacccacgggcacaatattcttggacaattaatgggaagtttcagctatcaggacaaaagctctctatcccccaaataactacaaagcatagtgggctctatgcttgctctgttcgtaactcagccactggcaaggaaagctccaaatccatcacagtcaaagtctctggtaagtggatcccagcatccttggcaatagggatttaggtggagtctatctggcattcagggaagagtgaggaaaacatttttattcccagcctgtgtcccatgggcacaagcaaatcccaaattctcctcctgaacactcccaatttgtctaagaacttccaaaactttaacaaacaggctgatatcttcttaaaattcccagcctagaccaagcaggagaaacattgatttcattgaaataattgacaatattgaggataatatttttatgatttttatttgaaaatttgctgattctttaaatggtttgttttctagatttatggaatttttttcttttaatctatctatagcttgtagcagttcaataaactatacttctgggaaccgtaattgaaacatttacttttgctctctacctgactgccccagaattgggcaactattcatgagtattgatatgtttatggtaatacacatatttgcacaagtacagtaacaatctgctctctttgtaacaggacacatttcaaatcattggttatattaccaaggctttgactgggatgttatattcaagaatatagatagaatgaaccaatatgaactgcaggcaaagtctgaagtcagccttggtttggcttcctattctcaagggttttgtaaaagtttaatctgagagtccttataaaaacttagagcaaataaaattctaaaagagcgcctaaaaggtc

SEQ ID NO: 732530 - DNA, 1546 bp, Homo sapiens
ctgccccgggaggaggctcgacagaaggaggaaggacagcacagctgacagccgtactcaggaagcttctggatcctaggcttatctccacagaggagaacacacaagcagcagagaccatggggcccctctcagcccctccctgcacacacctcatcacttggaagggggtcctgctcacagcatcacttttaaacttctggaatccgcccacaactgcccaagtcacgattgaagcccagccacccaaagtttctgaggggaaggatgttcttctacttgtccacaatttgccccagaatcttgctggctacatttggtacaaagggcaaatgacatacctctaccattacattacatcatatgtagtagacggtcaaagaattatatatgggcctgcatacagtggaagagaaagagtatattccaatgcatccctgctgatccagaatgtcacgcaggaggatgcaggatcctacaccttacacatcataaagcgacgcgatgggactggaggagtaactggacatttcaccttcaccttacacctggagactcccaagccctccatctccagcagcaacttaaatcccagggaggccatggaggctgtgatcttaacctgtgatcctgcgactccagccgcaagctaccagtggtggatgaatggtcagagcctccctatgactcacaggttgcagctgtccaaaaccaacaggaccctctttatatttggtgtcacaaagtatattgcaggaccctatgaatgtgaaatacggaacccagtgagtgccagccgcagtgacccagtcaccctgaatctcctcccaaagctgtccaagccctacatcacaatcaacaacttaaaccccagagagaataaggatgtcttaaccttcacctgtgaacctaagagtgagaactacacctacatttggtggctaaatggtcagagcctccctgtcagtcccagggtaaagcgacccattgaaaacaggatcctcaggaccttatcaatgtgaaatacgggaccgatatggtggcatccgcagtgacccagtcaccctgaatgtcctctatggtccagacctccccagcatttacccttcattcacctattaccgttcaggagaaaacctctacttgtcctgcttcgccgagtctaacccacgggcacaatattcttggacaattaatgggaagtttcagctatcaggacaaaagctctctatcccccaaataactacaaagcatagtgggctctatgcttgctctgttcgtaactcagccactggcaaggaaagctccaaatccatcacagtcaaagtctctggacacatttcaaatcattggttatattaccaaggctttgactgggatgttatattcaagaatatagatagaatgaaccaatatgaactgcaggcaaagtctgaagtcagccttggtttggcttcctattctcaagggttttgtaaaagtttaatctgagagtccttataaaaacttagagcaaataaaattctaaaagagcgcctaaaaggtc

SEQ ID NO: 732531 - DNA, 1077 bp, Homo sapiens
ctgccccgggaggaggctcgacagaaggaggaaggacagcacagctgacagccgtactcaggaagcttctggatcctaggcttatctccacagaggagaacacacaagcagcagagaccatggggcccctctcagcccctccctgcacacacctcatcacttggaagggggtcctgctcacagcatcacttttaaacttctggaatccgcccacaactgcccaagtcacgattgaagcccagccacccaaagtttctgaggggaaggatgttcttctacttgtccacaatttgccccagaatcttgctggctacatttggtacaaagggcaaatgacatacctctaccattacattacatcatatgtagtagacggtcaaagaattatatatgggcctgcatacagtggaagagaaagagtatattccaatgcatccctgctgatccagaatgtcacgcaggaggatgcaggatcctacaccttacacatcataaagcgacgcgatgggactggaggagtaactggacatttcaccttcaccttacacctggagactcccaagccctccatctccagcagcaacttaaatcccagggaatgactcacaggttgcagctgtccaaaaccaacaggaccctctttatatttggtgtcacaaagtatattgcaggaccctatgaatgtgaaatacggaacccagtgagtgccagccgcagtgacccagtcaccctgaatctcctcccaaagctgtccaagccctacatcacaatcaacaacttaaaccccagagagaataaggatgtcttaaccttcacctgtgaacctaagagtgagaactacacctacatttggtggctaaatggtcagagcctccctgtcagtcccagggtaaagcgacccattgaaaacaggatcctcattctacccaatgtcacgagaaatgaaacaggaccttatcaatgtgaaatacgggaccgatatggtggcatccgcagtgacccagtcaccctgaatgtcctctatggtccagacctccccagcattacccttctgtcgtcttctcgagtcctctaatc

SEQ ID NO: 732532 - DNA, 793 bp, Homo sapiens
ctgccccgggaggaggctcgacagaaggaggaaggacagcacagctgacagccgtactcaggaagcttctggatcctaggcttatctccacagaggagaacacacaagcagcagagaccatggggcccctctcagcccctccctgcacacacctcatcacttggaagggggtcctgctcacagcatcacttttaaacttctggaatccgcccacaactgcccaagtcacgattgaagcccagccacccaaagtttctgaggggaaggatgttcttctacttgtccacaatttgccccagaatcttgctggctacatttggtacaaagggcaaatgacatacctctaccattacattacatcatatgtagtagacggtcaaagaattatatatgggcctgcatacagtggaagagaaagagtatattccaatgcatccctgctgatccagaatgtcacgcaggaggatgcaggatcctacaccttacacatcataaagcgacgcgatgggactggaggagtaactggacatttcaccttcaccttacacctggagactcccaagccctccatctccagcagcaacttaaatcccagggaatgactcacaggttgcagctgtccaaaaccaacaggaccctctttatatttggtgtcacaaagtatattgcaggaccctatgaatgtgaaatacggaacccagtgagtgccagccgcagtgacccagtcaccctgaatctcctcccaaagctgtccaagccctacatcacaatcaacaacttaaaccccagagag

SEQ ID NO: 732533 - DNA, 979 bp, Homo sapiens
ctgccccgggaggaggctcgacagaaggaggaaggacagcacagctgacagccgtactcaggaagcttctggatcctaggcttatctccacagaggagaacacacaagcagcagagaccatggggcccctctcagcccctccctgcacacacctcatcacttggaagggggtcctgctcacagcatcacttttaaacttctggaatccgcccacaactgcccaagtcacgattgaagcccagccacccaaagtttctgaggggaaggatgttcttctacttgtccacaatttgccccagaatcttgctggctacatttggtacaaagggcaaatgacatacctctaccattacattacatcatatgtagtagacggtcaaagaattatatatgggcctgcatacagtggaagagaaagagtatattccaatgcatccctgctgatccagaatgtcacgcaggaggatgcaggatcctacaccttacacatcataaagcgacgcgatgggactggaggagtaactggacatttcaccttcaccttacacctggagactcccaagccctccatctccagcagcaacttaaatcccagggaatgactcacaggttgcagctgtccaaaaccaacaggaccctctttatatttggtgtcacaaagtatattgcaggaccctatgaatgtgaaatacggaacccagtgagtgccagccgcagtgacccagtcaccctgaatctcctcccaaagctcccaagccctacatctccagcagcaacttaaaccccagggaggccatggaggctgtgatcttaacctgtgatcctgcggcttcagacacaagctacctgtggtggatgaatggtcagagcctccctatgactcacaggttgcagctgtccaaaaccaacaggaccctctttatatttggtgtcacaaagtatattgcaggaccctatgaatgtgaaatacggaacccag

SEQ ID NO: 732534 - DNA, 1185 bp, Homo sapiens
ctgccccgggaggaggctcgacagaaggaggaaggacagcacagctgacagccgtactcaggaagcttctggatcctaggcttatctccacagaggagaacacacaagcagcagagaccatggggcccctctcagcccctccctgcacacacctcatcacttggaagggggtcctgctcacagcatcacttttaaacttctggaatccgcccacaactgcccaagtcacgattgaagcccagccacccaaagtttctgaggggaaggatgttcttctacttgtccacaatttgccccagaatcttgctggctacatttggtacaaagggcaaatgacatacctctaccattacattacatcatatgtagtagacggtcaaagaattatatatgggcctgcatacagtggaagagaaagagtatattccaatgcatccctgctgatccagaatgtcacgcaggaggatgcaggatcctacaccttacacatcataaagcgacgcgatgggactggaggagtaactggacatttcaccttcaccttacacctggagactcccaagccctccatctccagcagcaacttaaatcccagggaatgactcacaggttgcagctgtccaaaaccaacaggaccctctttatatttggtgtcacaaagtatattgcaggaccctatgaatgtgaaatacggaacccagtgagtgccagccgcagtgacccagtcaccctgaatctcctcccaaagctgtccaagccctacatcacaatcaacaacttaaaccccagagagaataaggatgtcttaaccttcacctgtgaacctaagagtgagaactacacctacatttggtggctaaatggtcagagcctccctgtcagtcccagggtaaagcgacccattgaaaacaggatcctcattctacccaatgtcacgagaaatgaaacaggaccttatcaatgtgaaatacgggaccgatatggtggcatccgcagtgacccagtcaccctgaatgtcctctatggtccagacctccccagcatttacccttcattcacctattaccgttcaggagaaaacctctacttgtcctgcttcgcggaatctaacccaccggcagagtatttttggacaattaatgggaagtttcagcaatcaggacaaaagctctctatcccccaaat

SEQ ID NO: 732535 - DNA, 1991 bp, Homo sapiens
ctgccccgggaggaggctcgacagaaggaggaaggacagcacagctgacagccgtactcaggaagcttctggatcctaggcttatctccacagaggagaacacacaagcagcagagaccatggggcccctctcagcccctccctgcacacacctcatcacttggaagggggtcctgctcacagcatcacttttaaacttctggaatccgcccacaactgcccaagtcacgattgaagcccagccacccaaagtttctgaggggaaggatgttcttctacttgtccacaatttgccccagaatcttgctggctacatttggtacaaagggcaaatgacatacctctaccattacattacatcatatgtagtagacggtcaaagaattatatatgggcctgcatacagtggaagagaaagagtatattccaatgcatccctgctgatccagaatgtcacgcaggaggatgcaggatcctacaccttacacatcataaagcgacgcgatgggactggaggagtaactggacatttcaccttcaccttacacctggagactcccaagccctccatctccagcagcaacttaaatcccagggaatgactcacaggttgcagctgtccaaaaccaacaggaccctctttatatttggtgtcacaaagtatattgcaggaccctatgaatgtgaaatacggaacccagtgagtgccagccgcagtgacccagtcaccctgaatctcctcccaaagctgtccaagccctacatcacaatcaacaacttaaaccccagagagaataaggatgtcttaaccttcacctgtgaacctaagagtgagaactacacctacatttggtggctaaatggtcagagcctccctgtcagtcccagggtaaagcgacccattgaaaacaggatcctcattctacccaatgtcacgagaaatgaaacaggaccttatcaatgtgaaatacgggaccgatatggtggcatccgcagtgacccagtcaccctgaatgtcctctatggtccagacctccccagcatttacccttcattcacctattaccgttcaggagaaaacctctacttgtcctgcttcgccgagtctaacccacgggcacaatattcttggacaattaatgggaagtttcagctatcaggacaaaagctctctatcccccaaataactacaaagcatagtgggctctatgcttgctctgttcgtaactcagccactggcaaggaaagctccaaatccatcacagtcaaagtctctgactggatattaccctgaattctactagttcctccaattccattttctcccatggaatcacgaagagcaagacccactctgttccagaagccctataagctggaggtggacaactcgatgtaaatttcatgggaaaacccttgtacctgacatgtgagccactcagaactcaccaaaatgttcgacaccataacaacagctactcaaactgtaaaccaggataacaagttgatgacttcacactgtggacagtttttccaaagatgtcagaacaagactccccatcatgataaggctcccacccctcttaactgtccttgctcatgcctgcctctttcacttggcaggataatgcagtcattagaatttcacatgtagtagcttctgagggtaacaacagagtgtcagatatgtcatctcaacctcaaacttttacgtaacatctcaggggaaatgtggctctctccatcttgcatacagggctcccaatagaaatgaacacagagatattgcctgtgtgtttgcagagaagatggtttctataaagagtaggaaagctgaaattatagtagagtctcctttaaatgcacattgtgtggatggctctcaccatttcctaagagatacagtgtaaaacgtgacagtaatactgattctagcagaataaaacatgtaccacatttgctaaaaaaaaaaaaaacaacaaaaaaaaacc

SEQ ID NO: 732536 - DNA, 1964 bp, Homo sapiens
ctgccccgggaggaggctcgacagaaggaggaaggacagcacagctgacagccgtactcaggaagcttctggatcctaggcttatctccacagaggagaacacacaagcagcagagaccatggggcccctctcagcccctccctgcacacacctcatcacttggaagggggtcctgctcacagcatcacttttaaacttctggaatccgcccacaactgcccaagtcacgattgaagcccagccacccaaagtttctgaggggaaggatgttcttctacttgtccacaatttgccccagaatcttgctggctacatttggtacaaagggcaaatgacatacctctaccattacattacatcatatgtagtagacggtcaaagaattatatatgggcctgcatacagtggaagagaaagagtatattccaatgcatccctgctgatccagaatgtcacgcaggaggatgcaggatcctacaccttacacatcataaagcgacgcgatgggactggaggagtaactggacatttcaccttcaccttacacctggagactcccaagccctccatctccagcagcaacttaaatcccagggaatgactcacaggttgcagctgtccaaaaccaacaggaccctctttatatttggtgtcacaaagtatattgcaggaccctatgaatgtgaaatacggaacccagtgagtgccagccgcagtgacccagtcaccctgaatctcctcccaaagctgtccaagccctacatcacaatcaacaacttaaaccccagagagaataaggatgtcttaaccttcacctgtgaacctaagagtgagaactacacctacatttggtggctaaatggtcagagcctccctgtcagtcccagggtaaagcgacccattgaaaacaggatcctcattctacccaatgtcacgagaaatgaaacaggaccttatcaatgtgaaatacgggaccgatatggtggcatccgcagtgacccagtcaccctgaatgtcctctatggtccagacctccccagcatttacccttcattcacctattaccgttcaggagaaaacctctacttgtcctgcttcgccgagtctaacccacgggcacaatattcttggacaattaatgggaagtttcagctatcaggacaaaagctctctatcccccaaataactacaaagcatagtgggctctatgcttgctctgttcgtaactcagccactggcaaggaaagctccaaatccatcacagtcaaagtctctgactggatattaccctgaattctactagttcctccaattccattttctcccatggaatcacgaagagcaagacccactctgttccagaagccctataagctggaggtggacaactcgatgtaaatttcatgggaaaacccttgtacctgacatgtgagccactcagaactcaccaaaatgttcgacaccataacaacagctactcaaactgtaaaccaggataacaagttgatgacttcacactgtggacagtttttccaaagatgtcagaacaagactccccatcatgataaggctcccacccctcttaactgtccttgctcatgcctgcctctttcacttggcaggataatgcagtcattagaatttcacatgtagtagcttctgagggtaacaacagagtgtcagatatgtcatctcaacctcaaacttttacgtaacatctcaggggaaatgtggctctctccatcttgcatacagggctcccaatagaaatgaacacagagatattgcctgtgtgtttgcagagaagatggtttctataaagagtaggaaagctgaaattatagtagagtctcctttaaatgcacattgtgtggatggctctcaccatttcctaagagatacagtgtaaaacgtgacagtaatactgattctagcagaataaaacatgtaccacatttgctaa

SEQ ID NO: 732537 - DNA, 2013 bp, Homo sapiens
ctgccccgggaggaggctcgacagaaggaggaaggacagcacagctgacagccgtactcaggaagcttctggatcctaggcttatctccacagaggagaacacacaagcagcagagaccatggggcccctctcagcccctccctgcacacacctcatcacttggaagggggtcctgctcacagcatcacttttaaacttctggaatccgcccacaactgcccaagtcacgattgaagcccagccacccaaagtttctgaggggaaggatgttcttctacttgtccacaatttgccccagaatcttgctggctacatttggtacaaagggcaaatgacatacctctaccattacattacatcatatgtagtagacggtcaaagaattatatatgggcctgcatacagtggaagagaaagagtatattccaatgcatccctgctgatccagaatgtcacgcaggaggatgcaggatcctacaccttacacatcataaagcgacgcgatgggactggaggagtaactggacatttcaccttcaccttacacctggagactcccaagccctccatctccagcagcaacttaaatcccagggaatgactcacaggttgcagctgtccaaaaccaacaggaccctctttatatttggtgtcacaaagtatattgcaggaccctatgaatgtgaaatacggaacccagtgagtgccagccgcagtgacccagtcaccctgaatctcctcccaaagctgtccaagccctacatcacaatcaacaacttaaaccccagagagaataaggatgtcttaaccttcacctgtgaacctaagagtgagaactacacctacatttggtggctaaatggtcagagcctccctgtcagtcccagggtaaagcgacccattgaaaacaggatcctcattctacccaatgtcacgagaaatgaaacaggaccttatcaatgtgaaatacgggaccgatatggtggcatccgcagtgacccagtcaccctgaatgtcctctatggtccagacctccccagcatttacccttcattcacctattaccgttcaggagaaaacctctacttgtcctgcttcgccgagtctaacccacgggcacaatattcttggacaattaatgggaagtttcagctatcaggacaaaagctctctatcccccaaataactacaaagcatagtgggctctatgcttgctctgttcgtaactcagccactggcaaggaaagctccaaatccatcacagtcaaagtctctggtaagtggatcccagcatccttggcaatagggatttaggtggagtctatctggcattcagggaagagtgaggaaaacatttttattcccagcctgtgtcccatgggcacaagcaaatcccaaattctcctcctgaacactcccaatttgtctaagaacttccaaaactttaacaaacaggctgatatcttcttaaaattcccagcctagaccaagcaggagaaacattgatttcattgaaataattgacaatattgaggataatatttttatgatttttatttgaaaatttgctgattctttaaatggtttgttttctagatttatggaatttttttcttttaatctatctatagcttgtagcagttcaataaactatacttctgggaaccgtaattgaaacatttacttttgctctctacctgactgccccagaattgggcaactattcatgagtattgatatgtttatggtaatacacatatttgcacaagtacagtaacaatctgctctctttgtaacaggacacatttcaaatcattggttatattaccaaggctttgactgggatgttatattcaagaatatagatagaatgaaccaatatgaactgcaggcaaagtctgaagtcagccttggtttggcttcctattctcaagggttttgtaaaagtttaatctgagagtccttataaaaacttagagcaaataaaattctaaaagagcgcctaaaaggtc

SEQ ID NO: 732538 - DNA, 1490 bp, Homo sapiens
ctgccccgggaggaggctcgacagaaggaggaaggacagcacagctgacagccgtactcaggaagcttctggatcctaggcttatctccacagaggagaacacacaagcagcagagaccatggggcccctctcagcccctccctgcacacacctcatcacttggaagggggtcctgctcacagcatcacttttaaacttctggaatccgcccacaactgcccaagtcacgattgaagcccagccacccaaagtttctgaggggaaggatgttcttctacttgtccacaatttgccccagaatcttgctggctacatttggtacaaagggcaaatgacatacctctaccattacattacatcatatgtagtagacggtcaaagaattatatatgggcctgcatacagtggaagagaaagagtatattccaatgcatccctgctgatccagaatgtcacgcaggaggatgcaggatcctacaccttacacatcataaagcgacgcgatgggactggaggagtaactggacatttcaccttcaccttacacctggagactcccaagccctccatctccagcagcaacttaaatcccagggaatgactcacaggttgcagctgtccaaaaccaacaggaccctctttatatttggtgtcacaaagtatattgcaggaccctatgaatgtgaaatacggaacccagtgagtgccagccgcagtgacccagtcaccctgaatctcctcccaaagctgtccaagccctacatcacaatcaacaacttaaaccccagagagaataaggatgtcttaaccttcacctgtgaacctaagagtgagaactacacctacatttggtggctaaatggtcagagcctccctgtcagtcccagggtaaagcgacccattgaaaacaggatcctcattctacccaatgtcacgagaaatgaaacaggaccttatcaatgtgaaatacgggaccgatatggtggcatccgcagtgacccagtcaccctgaatgtcctctatggtccagacctccccagcatttacccttcattcacctattaccgttcaggagaaaacctctacttgtcctgcttcgccgagtctaacccacgggcacaatattcttggacaattaatgggaagtttcagctatcaggacaaaagctctctatcccccaaataactacaaagcatagtgggctctatgcttgctctgttcgtaactcagccactggcaaggaaagctccaaatccatcacagtcaaagtctctggacacatttcaaatcattggttatattaccaaggctttgactgggatgttatattcaagaatatagatagaatgaaccaatatgaactgcaggcaaagtctgaagtcagccttggtttggcttcctattctcaagggttttgtaaaagtttaatctgagagtccttataaaaacttagagcaaataaaattctaaaagagcgcctaaaaggtc

SEQ ID NO: 732539 - DNA, 1944 bp, Homo sapiens
ctgccccgggaggaggctcgacagaaggaggaaggacagcacagctgacagccgtactcaggaagcttctggatcctaggcttatctccacagaggagaacacacaagcagcagagaccatggggcccctctcagcccctccctgcacacacctcatcacttggaagggggtcctgctcacagcatcacttttaaacttctggaatccgcccacaactgcccaagtcacgattgaagcccagccacccaaagtttctgaggggaaggatgttcttctacttgtccacaatttgccccagaatcttgctggctacatttggtacaaagggcaaatgacatacctctaccattacattacatcatatgtagtagacggtcaaagaattatatatgggcctgcatacagtggaagagaaagagtatattccaatgcatccctgctgatccagaatgtcacgcaggaggatgcaggatcctacaccttacacatcataaagcgacgcgatgggactggaggagtaactggacatttcaccttcaccttacacctggagactcccaagccctccatctccagcagcaacttaaatcccagggaatgactcacaggttgcagctgtccaaaaccaacaggaccctctttatatttggtgtcacaaagtatattgcaggaccctatgaatgtgaaatacggaacccagtgagtgccagccgcagtgacccagtcaccctgaatctcctcccaaagctgtccaagccctacatcacaatcaacaacttaaaccccagagagaataaggatgtcttaaccttcacctgtgaacctaagagtgagaactacacctacatttggtggctaaatggtcagagcctccctgtcagtcccagggtaaagcgacccattgaaaacaggatcctcattctacccaatgtcacgagaaatgaaacaggaccttatcaatgtgaaatacgggaccgatatggtggcatccgcagtgacccagtcaccctgaatgtcctcttcaggagaaaacctctacttgtcctgcttcgccgagtctaacccacgggcacaatattcttggacaattaatgggaagtttcagctatcaggacaaaagctctctatcccccaaataactacaaagcatagtgggctctatgcttgctctgttcgtaactcagccactggcaaggaaagctccaaatccatcacagtcaaagtctctgactggatattaccctgaattctactagttcctccaattccattttctcccatggaatcacgaagagcaagacccactctgttccagaagccctataagctggaggtggacaactcgatgtaaatttcatgggaaaacccttgtacctgacatgtgagccactcagaactcaccaaaatgttcgacaccataacaacagctactcaaactgtaaaccaggataacaagttgatgacttcacactgtggacagtttttccaaagatgtcagaacaagactccccatcatgataaggctcccacccctcttaactgtccttgctcatgcctgcctctttcacttggcaggataatgcagtcattagaatttcacatgtagtagcttctgagggtaacaacagagtgtcagatatgtcatctcaacctcaaacttttacgtaacatctcaggggaaatgtggctctctccatcttgcatacagggctcccaatagaaatgaacacagagatattgcctgtgtgtttgcagagaagatggtttctataaagagtaggaaagctgaaattatagtagagtctcctttaaatgcacattgtgtggatggctctcaccatttcctaagagatacagtgtaaaacgtgacagtaatactgattctagcagaataaaacatgtaccacatttgctaaaaaaaaaaaaaacaacaaaaaaaaacc

SEQ ID NO: 732540 - DNA, 1917 bp, Homo sapiens
ctgccccgggaggaggctcgacagaaggaggaaggacagcacagctgacagccgtactcaggaagcttctggatcctaggcttatctccacagaggagaacacacaagcagcagagaccatggggcccctctcagcccctccctgcacacacctcatcacttggaagggggtcctgctcacagcatcacttttaaacttctggaatccgcccacaactgcccaagtcacgattgaagcccagccacccaaagtttctgaggggaaggatgttcttctacttgtccacaatttgccccagaatcttgctggctacatttggtacaaagggcaaatgacatacctctaccattacattacatcatatgtagtagacggtcaaagaattatatatgggcctgcatacagtggaagagaaagagtatattccaatgcatccctgctgatccagaatgtcacgcaggaggatgcaggatcctacaccttacacatcataaagcgacgcgatgggactggaggagtaactggacatttcaccttcaccttacacctggagactcccaagccctccatctccagcagcaacttaaatcccagggaatgactcacaggttgcagctgtccaaaaccaacaggaccctctttatatttggtgtcacaaagtatattgcaggaccctatgaatgtgaaatacggaacccagtgagtgccagccgcagtgacccagtcaccctgaatctcctcccaaagctgtccaagccctacatcacaatcaacaacttaaaccccagagagaataaggatgtcttaaccttcacctgtgaacctaagagtgagaactacacctacatttggtggctaaatggtcagagcctccctgtcagtcccagggtaaagcgacccattgaaaacaggatcctcattctacccaatgtcacgagaaatgaaacaggaccttatcaatgtgaaatacgggaccgatatggtggcatccgcagtgacccagtcaccctgaatgtcctcttcaggagaaaacctctacttgtcctgcttcgccgagtctaacccacgggcacaatattcttggacaattaatgggaagtttcagctatcaggacaaaagctctctatcccccaaataactacaaagcatagtgggctctatgcttgctctgttcgtaactcagccactggcaaggaaagctccaaatccatcacagtcaaagtctctgactggatattaccctgaattctactagttcctccaattccattttctcccatggaatcacgaagagcaagacccactctgttccagaagccctataagctggaggtggacaactcgatgtaaatttcatgggaaaacccttgtacctgacatgtgagccactcagaactcaccaaaatgttcgacaccataacaacagctactcaaactgtaaaccaggataacaagttgatgacttcacactgtggacagtttttccaaagatgtcagaacaagactccccatcatgataaggctcccacccctcttaactgtccttgctcatgcctgcctctttcacttggcaggataatgcagtcattagaatttcacatgtagtagcttctgagggtaacaacagagtgtcagatatgtcatctcaacctcaaacttttacgtaacatctcaggggaaatgtggctctctccatcttgcatacagggctcccaatagaaatgaacacagagatattgcctgtgtgtttgcagagaagatggtttctataaagagtaggaaagctgaaattatagtagagtctcctttaaatgcacattgtgtggatggctctcaccatttcctaagagatacagtgtaaaacgtgacagtaatactgattctagcagaataaaacatgtaccacatttgctaa

SEQ ID NO: 732541 - DNA, 1962 bp, Homo sapiens
ctgccccgggaggaggctcgacagaaggaggaaggacagcacagctgacagccgtactcaggaagcttctggatcctaggcttatctccacagaggagaacacacaagcagcagagaccatggggcccctctcagcccctccctgcacacacctcatcacttggaagggggtcctgctcacagcatcacttttaaacttctggaatccgcccacaactgcccaagtcacgattgaagcccagccacccaaagtttctgaggggaaggatgttcttctacttgtccacaatttgccccagaatcttgctggctacatttggtacaaagggcaaatgacatacctctaccattacattacatcatatgtagtagacggtcaaagaattatatatgggcctgcatacagtggaagagaaagagtatattccaatgcatccctgctgatccagaatgtcacgcaggaggatgcaggatcctacaccttacacatcataaagcgacgcgatgggactggaggagtaactggacatttcaccttcaccttacacctggagactcccaagccctccatctccagcagcaacttaaatcccagggaatgactcacaggttgcagctgtccaaaaccaacaggaccctctttatatttggtgtcacaaagtatattgcaggaccctatgaatgtgaaatacggaacccagtgagtgccagccgcagtgacccagtcaccctgaatctcctcccaaagctgtccaagccctacatcacaatcaacaacttaaaccccagagagaataaggatgtcttaaccttcacctgtgaacctaagagtgagaactacacctacatttggtggctaaatggtcagagcctccctgtcagtcccagggtaaagcgacccattgaaaacaggatcctcaggaccttatcaatgtgaaatacgggaccgatatggtggcatccgcagtgacccagtcaccctgaatgtcctctatggtccagacctccccagcatttacccttcattcacctattaccgttcaggagaaaacctctacttgtcctgcttcgccgagtctaacccacgggcacaatattcttggacaattaatgggaagtttcagctatcaggacaaaagctctctatcccccaaataactacaaagcatagtgggctctatgcttgctctgttcgtaactcagccactggcaaggaaagctccaaatccatcacagtcaaagtctctgactggatattaccctgaattctactagttcctccaattccattttctcccatggaatcacgaagagcaagacccactctgttccagaagccctataagctggaggtggacaactcgatgtaaatttcatgggaaaacccttgtacctgacatgtgagccactcagaactcaccaaaatgttcgacaccataacaacagctactcaaactgtaaaccaggataacaagttgatgacttcacactgtggacagtttttccaaagatgtcagaacaagactccccatcatgataaggctcccacccctcttaactgtccttgctcatgcctgcctctttcacttggcaggataatgcagtcattagaatttcacatgtagtagcttctgagggtaacaacagagtgtcagatatgtcatctcaacctcaaacttttacgtaacatctcaggggaaatgtggctctctccatcttgcatacagggctcccaatagaaatgaacacagagatattgcctgtgtgtttgcagagaagatggtttctataaagagtaggaaagctgaaattatagtagagtctcctttaaatgcacattgtgtggatggctctcaccatttcctaagagatacagtgtaaaacgtgacagtaatactgattctagcagaataaaacatgtaccacatttgctaaaaaaaaaaaaaacaacaaaaaaaaacc

SEQ ID NO: 732542 - DNA, 1935 bp, Homo sapiens
ctgccccgggaggaggctcgacagaaggaggaaggacagcacagctgacagccgtactcaggaagcttctggatcctaggcttatctccacagaggagaacacacaagcagcagagaccatggggcccctctcagcccctccctgcacacacctcatcacttggaagggggtcctgctcacagcatcacttttaaacttctggaatccgcccacaactgcccaagtcacgattgaagcccagccacccaaagtttctgaggggaaggatgttcttctacttgtccacaatttgccccagaatcttgctggctacatttggtacaaagggcaaatgacatacctctaccattacattacatcatatgtagtagacggtcaaagaattatatatgggcctgcatacagtggaagagaaagagtatattccaatgcatccctgctgatccagaatgtcacgcaggaggatgcaggatcctacaccttacacatcataaagcgacgcgatgggactggaggagtaactggacatttcaccttcaccttacacctggagactcccaagccctccatctccagcagcaacttaaatcccagggaatgactcacaggttgcagctgtccaaaaccaacaggaccctctttatatttggtgtcacaaagtatattgcaggaccctatgaatgtgaaatacggaacccagtgagtgccagccgcagtgacccagtcaccctgaatctcctcccaaagctgtccaagccctacatcacaatcaacaacttaaaccccagagagaataaggatgtcttaaccttcacctgtgaacctaagagtgagaactacacctacatttggtggctaaatggtcagagcctccctgtcagtcccagggtaaagcgacccattgaaaacaggatcctcaggaccttatcaatgtgaaatacgggaccgatatggtggcatccgcagtgacccagtcaccctgaatgtcctctatggtccagacctccccagcatttacccttcattcacctattaccgttcaggagaaaacctctacttgtcctgcttcgccgagtctaacccacgggcacaatattcttggacaattaatgggaagtttcagctatcaggacaaaagctctctatcccccaaataactacaaagcatagtgggctctatgcttgctctgttcgtaactcagccactggcaaggaaagctccaaatccatcacagtcaaagtctctgactggatattaccctgaattctactagttcctccaattccattttctcccatggaatcacgaagagcaagacccactctgttccagaagccctataagctggaggtggacaactcgatgtaaatttcatgggaaaacccttgtacctgacatgtgagccactcagaactcaccaaaatgttcgacaccataacaacagctactcaaactgtaaaccaggataacaagttgatgacttcacactgtggacagtttttccaaagatgtcagaacaagactccccatcatgataaggctcccacccctcttaactgtccttgctcatgcctgcctctttcacttggcaggataatgcagtcattagaatttcacatgtagtagcttctgagggtaacaacagagtgtcagatatgtcatctcaacctcaaacttttacgtaacatctcaggggaaatgtggctctctccatcttgcatacagggctcccaatagaaatgaacacagagatattgcctgtgtgtttgcagagaagatggtttctataaagagtaggaaagctgaaattatagtagagtctcctttaaatgcacattgtgtggatggctctcaccatttcctaagagatacagtgtaaaacgtgacagtaatactgattctagcagaataaaacatgtaccacatttgctaa

SEQ ID NO: 732543 - DNA, 1984 bp, Homo sapiens
ctgccccgggaggaggctcgacagaaggaggaaggacagcacagctgacagccgtactcaggaagcttctggatcctaggcttatctccacagaggagaacacacaagcagcagagaccatggggcccctctcagcccctccctgcacacacctcatcacttggaagggggtcctgctcacagcatcacttttaaacttctggaatccgcccacaactgcccaagtcacgattgaagcccagccacccaaagtttctgaggggaaggatgttcttctacttgtccacaatttgccccagaatcttgctggctacatttggtacaaagggcaaatgacatacctctaccattacattacatcatatgtagtagacggtcaaagaattatatatgggcctgcatacagtggaagagaaagagtatattccaatgcatccctgctgatccagaatgtcacgcaggaggatgcaggatcctacaccttacacatcataaagcgacgcgatgggactggaggagtaactggacatttcaccttcaccttacacctggagactcccaagccctccatctccagcagcaacttaaatcccagggaatgactcacaggttgcagctgtccaaaaccaacaggaccctctttatatttggtgtcacaaagtatattgcaggaccctatgaatgtgaaatacggaacccagtgagtgccagccgcagtgacccagtcaccctgaatctcctcccaaagctgtccaagccctacatcacaatcaacaacttaaaccccagagagaataaggatgtcttaaccttcacctgtgaacctaagagtgagaactacacctacatttggtggctaaatggtcagagcctccctgtcagtcccagggtaaagcgacccattgaaaacaggatcctcaggaccttatcaatgtgaaatacgggaccgatatggtggcatccgcagtgacccagtcaccctgaatgtcctctatggtccagacctccccagcatttacccttcattcacctattaccgttcaggagaaaacctctacttgtcctgcttcgccgagtctaacccacgggcacaatattcttggacaattaatgggaagtttcagctatcaggacaaaagctctctatcccccaaataactacaaagcatagtgggctctatgcttgctctgttcgtaactcagccactggcaaggaaagctccaaatccatcacagtcaaagtctctggtaagtggatcccagcatccttggcaatagggatttaggtggagtctatctggcattcagggaagagtgaggaaaacatttttattcccagcctgtgtcccatgggcacaagcaaatcccaaattctcctcctgaacactcccaatttgtctaagaacttccaaaactttaacaaacaggctgatatcttcttaaaattcccagcctagaccaagcaggagaaacattgatttcattgaaataattgacaatattgaggataatatttttatgatttttatttgaaaatttgctgattctttaaatggtttgttttctagatttatggaatttttttcttttaatctatctatagcttgtagcagttcaataaactatacttctgggaaccgtaattgaaacatttacttttgctctctacctgactgccccagaattgggcaactattcatgagtattgatatgtttatggtaatacacatatttgcacaagtacagtaacaatctgctctctttgtaacaggacacatttcaaatcattggttatattaccaaggctttgactgggatgttatattcaagaatatagatagaatgaaccaatatgaactgcaggcaaagtctgaagtcagccttggtttggcttcctattctcaagggttttgtaaaagtttaatctgagagtccttataaaaacttagagcaaataaaattctaaaagagcgcctaaaaggtc

SEQ ID NO: 732544 - DNA, 1461 bp, Homo sapiens
ctgccccgggaggaggctcgacagaaggaggaaggacagcacagctgacagccgtactcaggaagcttctggatcctaggcttatctccacagaggagaacacacaagcagcagagaccatggggcccctctcagcccctccctgcacacacctcatcacttggaagggggtcctgctcacagcatcacttttaaacttctggaatccgcccacaactgcccaagtcacgattgaagcccagccacccaaagtttctgaggggaaggatgttcttctacttgtccacaatttgccccagaatcttgctggctacatttggtacaaagggcaaatgacatacctctaccattacattacatcatatgtagtagacggtcaaagaattatatatgggcctgcatacagtggaagagaaagagtatattccaatgcatccctgctgatccagaatgtcacgcaggaggatgcaggatcctacaccttacacatcataaagcgacgcgatgggactggaggagtaactggacatttcaccttcaccttacacctggagactcccaagccctccatctccagcagcaacttaaatcccagggaatgactcacaggttgcagctgtccaaaaccaacaggaccctctttatatttggtgtcacaaagtatattgcaggaccctatgaatgtgaaatacggaacccagtgagtgccagccgcagtgacccagtcaccctgaatctcctcccaaagctgtccaagccctacatcacaatcaacaacttaaaccccagagagaataaggatgtcttaaccttcacctgtgaacctaagagtgagaactacacctacatttggtggctaaatggtcagagcctccctgtcagtcccagggtaaagcgacccattgaaaacaggatcctcaggaccttatcaatgtgaaatacgggaccgatatggtggcatccgcagtgacccagtcaccctgaatgtcctctatggtccagacctccccagcatttacccttcattcacctattaccgttcaggagaaaacctctacttgtcctgcttcgccgagtctaacccacgggcacaatattcttggacaattaatgggaagtttcagctatcaggacaaaagctctctatcccccaaataactacaaagcatagtgggctctatgcttgctctgttcgtaactcagccactggcaaggaaagctccaaatccatcacagtcaaagtctctggacacatttcaaatcattggttatattaccaaggctttgactgggatgttatattcaagaatatagatagaatgaaccaatatgaactgcaggcaaagtctgaagtcagccttggtttggcttcctattctcaagggttttgtaaaagtttaatctgagagtccttataaaaacttagagcaaataaaattctaaaagagcgcctaaaaggtc

SEQ ID NO: 732545 - DNA, 492 bp, Homo sapiens
acatggccagaggccaggcctctcagtccctctcaggtccaagtacagatgactcacaggttgcagctgtccaaaaccaacaggaccctctttatatttggtgtcacaaagtatattgcaggaccctatgaatgtgaaatacggaacccagtgagtgccagccgcagtgacccagtcaccctgaatctcctccgtgagtatcctcggttcctctgtgagccaggctgccatcccaaatacacatggccagaggccaggcctctcagtccctctcaggtccaagtacagagacctttacccctggacatcaaagctggccatgactttctgccccaggcaaaacagagtaggcctaggcttgatccacaataggagaaaagaggctgctcctgtcatgggagactcaggttccacagcttgtgatgggagaaacaggtgaatgtctcaggctccagatcagtgaacacagcggggatttggctgggacttcag

SEQ ID NO: 732546 - DNA, 1576 bp, Homo sapiens
ctgccccgggaggaggctcgacagaaggaggaaggacagcacagctgacagccgtactcaggaagcttctggatcctaggcttatctccacagaggagaacacacaagcagcagagaccatggggcccctctcagcccctccctgcacacacctcatcacttggaagggggtcctgctcacagatgactcacaggttgcagctgtccaaaaccaacaggaccctctttatatttggtgtcacaaagtatattgcaggaccctatgaatgtgaaatacggaacccagtgagtgccagccgcagtgacccagtcaccctgaatctcctcccaaagctgtccaagccctacatcacaatcaacaacttaaaccccagagagaataaggatgtcttaaccttcacctgtgaacctaagagtgagaactacacctacatttggtggctaaatggtcagagcctccctgtcagtcccagggtaaagcgacccattgaaaacaggatcctcattctacccaatgtcacgagaaatgaaacaggaccttatcaatgtgaaatacgggaccgatatggtggcatccgcagtgacccagtcaccctgaatgtcctctatggtccagacctccccagcatttacccttcattcacctattaccgttcaggagaaaacctctacttgtcctgcttcgccgagtctaacccacgggcacaatattcttggacaattaatgggaagtttcagctatcaggacaaaagctctctatcccccaaataactacaaagcatagtgggctctatgcttgctctgttcgtaactcagccactggcaaggaaagctccaaatccatcacagtcaaagtctctgactggatattaccctgaattctactagttcctccaattccattttctcccatggaatcacgaagagcaagacccactctgttccagaagccctataagctggaggtggacaactcgatgtaaatttcatgggaaaacccttgtacctgacatgtgagccactcagaactcaccaaaatgttcgacaccataacaacagctactcaaactgtaaaccaggataacaagttgatgacttcacactgtggacagtttttccaaagatgtcagaacaagactccccatcatgataaggctcccacccctcttaactgtccttgctcatgcctgcctctttcacttggcaggataatgcagtcattagaatttcacatgtagtagcttctgagggtaacaacagagtgtcagatatgtcatctcaacctcaaacttttacgtaacatctcaggggaaatgtggctctctccatcttgcatacagggctcccaatagaaatgaacacagagatattgcctgtgtgtttgcagagaagatggtttctataaagagtaggaaagctgaaattatagtagagtctcctttaaatgcacattgtgtggatggctctcaccatttcctaagagatacagtgtaaaacgtgacagtaatactgattctagcagaataaaacatgtaccacatttgctaaaaaaaaaaaaaacaacaaaaaaaaacc

SEQ ID NO: 732547 - DNA, 1549 bp, Homo sapiens
ctgccccgggaggaggctcgacagaaggaggaaggacagcacagctgacagccgtactcaggaagcttctggatcctaggcttatctccacagaggagaacacacaagcagcagagaccatggggcccctctcagcccctccctgcacacacctcatcacttggaagggggtcctgctcacagatgactcacaggttgcagctgtccaaaaccaacaggaccctctttatatttggtgtcacaaagtatattgcaggaccctatgaatgtgaaatacggaacccagtgagtgccagccgcagtgacccagtcaccctgaatctcctcccaaagctgtccaagccctacatcacaatcaacaacttaaaccccagagagaataaggatgtcttaaccttcacctgtgaacctaagagtgagaactacacctacatttggtggctaaatggtcagagcctccctgtcagtcccagggtaaagcgacccattgaaaacaggatcctcattctacccaatgtcacgagaaatgaaacaggaccttatcaatgtgaaatacgggaccgatatggtggcatccgcagtgacccagtcaccctgaatgtcctctatggtccagacctccccagcatttacccttcattcacctattaccgttcaggagaaaacctctacttgtcctgcttcgccgagtctaacccacgggcacaatattcttggacaattaatgggaagtttcagctatcaggacaaaagctctctatcccccaaataactacaaagcatagtgggctctatgcttgctctgttcgtaactcagccactggcaaggaaagctccaaatccatcacagtcaaagtctctgactggatattaccctgaattctactagttcctccaattccattttctcccatggaatcacgaagagcaagacccactctgttccagaagccctataagctggaggtggacaactcgatgtaaatttcatgggaaaacccttgtacctgacatgtgagccactcagaactcaccaaaatgttcgacaccataacaacagctactcaaactgtaaaccaggataacaagttgatgacttcacactgtggacagtttttccaaagatgtcagaacaagactccccatcatgataaggctcccacccctcttaactgtccttgctcatgcctgcctctttcacttggcaggataatgcagtcattagaatttcacatgtagtagcttctgagggtaacaacagagtgtcagatatgtcatctcaacctcaaacttttacgtaacatctcaggggaaatgtggctctctccatcttgcatacagggctcccaatagaaatgaacacagagatattgcctgtgtgtttgcagagaagatggtttctataaagagtaggaaagctgaaattatagtagagtctcctttaaatgcacattgtgtggatggctctcaccatttcctaagagatacagtgtaaaacgtgacagtaatactgattctagcagaataaaacatgtaccacatttgctaa

SEQ ID NO: 732548 - DNA, 1598 bp, Homo sapiens
ctgccccgggaggaggctcgacagaaggaggaaggacagcacagctgacagccgtactcaggaagcttctggatcctaggcttatctccacagaggagaacacacaagcagcagagaccatggggcccctctcagcccctccctgcacacacctcatcacttggaagggggtcctgctcacagatgactcacaggttgcagctgtccaaaaccaacaggaccctctttatatttggtgtcacaaagtatattgcaggaccctatgaatgtgaaatacggaacccagtgagtgccagccgcagtgacccagtcaccctgaatctcctcccaaagctgtccaagccctacatcacaatcaacaacttaaaccccagagagaataaggatgtcttaaccttcacctgtgaacctaagagtgagaactacacctacatttggtggctaaatggtcagagcctccctgtcagtcccagggtaaagcgacccattgaaaacaggatcctcattctacccaatgtcacgagaaatgaaacaggaccttatcaatgtgaaatacgggaccgatatggtggcatccgcagtgacccagtcaccctgaatgtcctctatggtccagacctccccagcatttacccttcattcacctattaccgttcaggagaaaacctctacttgtcctgcttcgccgagtctaacccacgggcacaatattcttggacaattaatgggaagtttcagctatcaggacaaaagctctctatcccccaaataactacaaagcatagtgggctctatgcttgctctgttcgtaactcagccactggcaaggaaagctccaaatccatcacagtcaaagtctctggtaagtggatcccagcatccttggcaatagggatttaggtggagtctatctggcattcagggaagagtgaggaaaacatttttattcccagcctgtgtcccatgggcacaagcaaatcccaaattctcctcctgaacactcccaatttgtctaagaacttccaaaactttaacaaacaggctgatatcttcttaaaattcccagcctagaccaagcaggagaaacattgatttcattgaaataattgacaatattgaggataatatttttatgatttttatttgaaaatttgctgattctttaaatggtttgttttctagatttatggaatttttttcttttaatctatctatagcttgtagcagttcaataaactatacttctgggaaccgtaattgaaacatttacttttgctctctacctgactgccccagaattgggcaactattcatgagtattgatatgtttatggtaatacacatatttgcacaagtacagtaacaatctgctctctttgtaacaggacacatttcaaatcattggttatattaccaaggctttgactgggatgttatattcaagaatatagatagaatgaaccaatatgaactgcaggcaaagtctgaagtcagccttggtttggcttcctattctcaagggttttgtaaaagtttaatctgagagtccttataaaaacttagagcaaataaaattctaaaagagcgcctaaaaggtc

SEQ ID NO: 732549 - DNA, 1075 bp, Homo sapiens
ctgccccgggaggaggctcgacagaaggaggaaggacagcacagctgacagccgtactcaggaagcttctggatcctaggcttatctccacagaggagaacacacaagcagcagagaccatggggcccctctcagcccctccctgcacacacctcatcacttggaagggggtcctgctcacagatgactcacaggttgcagctgtccaaaaccaacaggaccctctttatatttggtgtcacaaagtatattgcaggaccctatgaatgtgaaatacggaacccagtgagtgccagccgcagtgacccagtcaccctgaatctcctcccaaagctgtccaagccctacatcacaatcaacaacttaaaccccagagagaataaggatgtcttaaccttcacctgtgaacctaagagtgagaactacacctacatttggtggctaaatggtcagagcctccctgtcagtcccagggtaaagcgacccattgaaaacaggatcctcattctacccaatgtcacgagaaatgaaacaggaccttatcaatgtgaaatacgggaccgatatggtggcatccgcagtgacccagtcaccctgaatgtcctctatggtccagacctccccagcatttacccttcattcacctattaccgttcaggagaaaacctctacttgtcctgcttcgccgagtctaacccacgggcacaatattcttggacaattaatgggaagtttcagctatcaggacaaaagctctctatcccccaaataactacaaagcatagtgggctctatgcttgctctgttcgtaactcagccactggcaaggaaagctccaaatccatcacagtcaaagtctctggacacatttcaaatcattggttatattaccaaggctttgactgggatgttatattcaagaatatagatagaatgaaccaatatgaactgcaggcaaagtctgaagtcagccttggtttggcttcctattctcaagggttttgtaaaagtttaatctgagagtccttataaaaacttagagcaaataaaattctaaaagagcgcctaaaaggtc

SEQ ID NO: 732550 - DNA, 1183 bp, Homo sapiens
agggaaagaaggctctgttggagcctggataggggaaaatacaccagagggtcaaaataggaaagtcacattgaagcggaattggtaagtggtaggaaaatcttaagtgttctgttttcctgattaatcatcaggggccaccatattttgaaaaatgataacaataactatatcagatgacacttcaaatgaaaatataagcaggacatgaaacactgtcctcagcaagaaacctcaacaattggggggaaaaagaaacatccagagggtggagaccctgagaactctcacatctacaggagtctgccgcctgttccagcatcacttttaaacttctggaatccgcccacaactgcccaagtcacgattgaagcccagccacccaaagtttctgaggggaaggatgttcttctacttgtccacaatttgccccagaatcttgctggctacatttggtacaaagggcaaatgacatacctctaccattacattacatcatatgtagtagacggtcaaagaattatatatgggcctgcatacagtggaagagaaagagtatattccaatgcatccctgctgatccagaatgtcacgcaggaggatgcaggatcctacaccttacacatcataaagcgacgcgatgggactggaggagtaactggacatttcaccttcaccttacacctggagactcccaagccctccatctccagcagcaacttaaatcccagggaggccatggaggctgtgatcttaacctgtgatcctgcgactccagccgcaagctaccagtggtggatgaatggtcagagcctccctatgactcacaggttgcagctgtccaaaaccaacaggaccctctttatatttggtgtcacaaagtatattgcaggaccctatgaatgtgaaatacggaacccagtgagtgccagccgcagtgacccagtcaccctgaatctcctcctacaaaggacaactgatggacctctaccattacattacatcatatgtagtagacggtcaaataattatatatgggcctgcatacagtggacgagaaacagtatattcccatgcatccctgctgatccagaatgtcacccgggaagacgcaggatcctacaccttacacatcataaagcgaggtgataggactagaggagtaactggatatttcaccttc

SEQ ID NO: 732551 - DNA, 1362 bp, Homo sapiens
agggaaagaaggctctgttggagcctggataggggaaaatacaccagagggtcaaaataggaaagtcacattgaagcggaattggtaagtggtaggaaaatcttaagtgttctgttttcctgattaatcatcaggggccaccatattttgaaaaatgataacaataactatatcagatgacacttcaaatgaaaatataagcaggacatgaaacactgtcctcagcaagaaacctcaacaattggggggaaaaagaaacatccagagggtggagaccctgagaactctcacatctacaggagtctgccgcctgttccagcatcacttttaaacttctggaatccgcccacaactgcccaagtcacgattgaagcccagccacccaaagtttctgaggggaaggatgttcttctacttgtccacaatttgccccagaatcttgctggctacatttggtacaaagggcaaatgacatacctctaccattacattacatcatatgtagtagacggtcaaagaattatatatgggcctgcatacagtggaagagaaagagtatattccaatgcatccctgctgatccagaatgtcacgcaggaggatgcaggatcctacaccttacacatcataaagcgacgcgatgggactggaggagtaactggacatttcaccttcaccttacacctggagactcccaagccctccatctccagcagcaacttaaatcccagggaggccatggaggctgtgatcttaacctgtgatcctgcgactccagccgcaagctaccagtggtggatgaatggtcagagcctccctatgactcacaggttgcagctgtccaaaaccaacaggaccctctttatatttggtgtcacaaagtatattgcaggaccctatgaatgtgaaatacggaacccagtgagtgccagccgcagtgacccagtcaccctgaatctcctccgtgagtatcctcggttcctctgtgagccaggctgccatcccaaatacacatggccagaggccaggcctctcagtccctctcaggtccaagtacagagacctttacccctggacatcaaagctggccatgactttctgccccaggcaaaacagagtaggcctaggcttgatccacaataggagaaaagaggctgctcctgtcatgggagactcaggttccacagcttgtgatgggagaaacaggtgaatgtctcaggctccagatcagtgaacacagcggggatttggctgggacttcagtgagtgccagccacagtgacccagtcaccctgaatctcctccgtgagtatcctctgttcctctgtgagccaggctgccatcccaaatacacatggccag

SEQ ID NO: 732552 - DNA, 1298 bp, Homo sapiens
agggaaagaaggctctgttggagcctggataggggaaaatacaccagagggtcaaaataggaaagtcacattgaagcggaattggtaagtggtaggaaaatcttaagtgttctgttttcctgattaatcatcaggggccaccatattttgaaaaatgataacaataactatatcagatgacacttcaaatgaaaatataagcaggacatgaaacactgtcctcagcaagaaacctcaacaattggggggaaaaagaaacatccagagggtggagaccctgagaactctcacatctacaggagtctgccgcctgttccagcatcacttttaaacttctggaatccgcccacaactgcccaagtcacgattgaagcccagccacccaaagtttctgaggggaaggatgttcttctacttgtccacaatttgccccagaatcttgctggctacatttggtacaaagggcaaatgacatacctctaccattacattacatcatatgtagtagacggtcaaagaattatatatgggcctgcatacagtggaagagaaagagtatattccaatgcatccctgctgatccagaatgtcacgcaggaggatgcaggatcctacaccttacacatcataaagcgacgcgatgggactggaggagtaactggacatttcaccttcaccttacacctggagactcccaagccctccatctccagcagcaacttaaatcccagggaggccatggaggctgtgatcttaacctgtgatcctgcgactccagccgcaagctaccagtggtggatgaatggtcagagcctccctatgactcacaggttgcagctgtccaaaaccaacaggaccctctttatatttggtgtcacaaagtatattgcaggaccctatgaatgtgaaatacggaacccagtgagtgccagccgcagtgacccagtcaccctgaatctcctcccaaagctgtccaagccctacatcacaatcaacaacttaaaccccagagagaataaggatgtcttaaccttcacctgtgaacctaagagtgagaactacacctacatttggtggctaaatggtcagagcctccctgtcagtcccagggtaaagcgacccattgaaaacaggatcctcattctacccaatgtcacgagaaatgaaacaggaccttatcaatgtgaaatacgggaccgatatggtggcatccgcagtgacccagtcaccctgaatgtcctctatggtccagacctccccagcattacccttctgtcgtcttctcgagtcctctaatc

SEQ ID NO: 732553 - DNA, 1406 bp, Homo sapiens
agggaaagaaggctctgttggagcctggataggggaaaatacaccagagggtcaaaataggaaagtcacattgaagcggaattggtaagtggtaggaaaatcttaagtgttctgttttcctgattaatcatcaggggccaccatattttgaaaaatgataacaataactatatcagatgacacttcaaatgaaaatataagcaggacatgaaacactgtcctcagcaagaaacctcaacaattggggggaaaaagaaacatccagagggtggagaccctgagaactctcacatctacaggagtctgccgcctgttccagcatcacttttaaacttctggaatccgcccacaactgcccaagtcacgattgaagcccagccacccaaagtttctgaggggaaggatgttcttctacttgtccacaatttgccccagaatcttgctggctacatttggtacaaagggcaaatgacatacctctaccattacattacatcatatgtagtagacggtcaaagaattatatatgggcctgcatacagtggaagagaaagagtatattccaatgcatccctgctgatccagaatgtcacgcaggaggatgcaggatcctacaccttacacatcataaagcgacgcgatgggactggaggagtaactggacatttcaccttcaccttacacctggagactcccaagccctccatctccagcagcaacttaaatcccagggaggccatggaggctgtgatcttaacctgtgatcctgcgactccagccgcaagctaccagtggtggatgaatggtcagagcctccctatgactcacaggttgcagctgtccaaaaccaacaggaccctctttatatttggtgtcacaaagtatattgcaggaccctatgaatgtgaaatacggaacccagtgagtgccagccgcagtgacccagtcaccctgaatctcctcccaaagctgtccaagccctacatcacaatcaacaacttaaaccccagagagaataaggatgtcttaaccttcacctgtgaacctaagagtgagaactacacctacatttggtggctaaatggtcagagcctccctgtcagtcccagggtaaagcgacccattgaaaacaggatcctcattctacccaatgtcacgagaaatgaaacaggaccttatcaatgtgaaatacgggaccgatatggtggcatccgcagtgacccagtcaccctgaatgtcctctatggtccagacctccccagcatttacccttcattcacctattaccgttcaggagaaaacctctacttgtcctgcttcgcggaatctaacccaccggcagagtatttttggacaattaatgggaagtttcagcaatcaggacaaaagctctctatcccccaaat

SEQ ID NO: 732554 - DNA, 2212 bp, Homo sapiens
agggaaagaaggctctgttggagcctggataggggaaaatacaccagagggtcaaaataggaaagtcacattgaagcggaattggtaagtggtaggaaaatcttaagtgttctgttttcctgattaatcatcaggggccaccatattttgaaaaatgataacaataactatatcagatgacacttcaaatgaaaatataagcaggacatgaaacactgtcctcagcaagaaacctcaacaattggggggaaaaagaaacatccagagggtggagaccctgagaactctcacatctacaggagtctgccgcctgttccagcatcacttttaaacttctggaatccgcccacaactgcccaagtcacgattgaagcccagccacccaaagtttctgaggggaaggatgttcttctacttgtccacaatttgccccagaatcttgctggctacatttggtacaaagggcaaatgacatacctctaccattacattacatcatatgtagtagacggtcaaagaattatatatgggcctgcatacagtggaagagaaagagtatattccaatgcatccctgctgatccagaatgtcacgcaggaggatgcaggatcctacaccttacacatcataaagcgacgcgatgggactggaggagtaactggacatttcaccttcaccttacacctggagactcccaagccctccatctccagcagcaacttaaatcccagggaggccatggaggctgtgatcttaacctgtgatcctgcgactccagccgcaagctaccagtggtggatgaatggtcagagcctccctatgactcacaggttgcagctgtccaaaaccaacaggaccctctttatatttggtgtcacaaagtatattgcaggaccctatgaatgtgaaatacggaacccagtgagtgccagccgcagtgacccagtcaccctgaatctcctcccaaagctgtccaagccctacatcacaatcaacaacttaaaccccagagagaataaggatgtcttaaccttcacctgtgaacctaagagtgagaactacacctacatttggtggctaaatggtcagagcctccctgtcagtcccagggtaaagcgacccattgaaaacaggatcctcattctacccaatgtcacgagaaatgaaacaggaccttatcaatgtgaaatacgggaccgatatggtggcatccgcagtgacccagtcaccctgaatgtcctctatggtccagacctccccagcatttacccttcattcacctattaccgttcaggagaaaacctctacttgtcctgcttcgccgagtctaacccacgggcacaatattcttggacaattaatgggaagtttcagctatcaggacaaaagctctctatcccccaaataactacaaagcatagtgggctctatgcttgctctgttcgtaactcagccactggcaaggaaagctccaaatccatcacagtcaaagtctctgactggatattaccctgaattctactagttcctccaattccattttctcccatggaatcacgaagagcaagacccactctgttccagaagccctataagctggaggtggacaactcgatgtaaatttcatgggaaaacccttgtacctgacatgtgagccactcagaactcaccaaaatgttcgacaccataacaacagctactcaaactgtaaaccaggataacaagttgatgacttcacactgtggacagtttttccaaagatgtcagaacaagactccccatcatgataaggctcccacccctcttaactgtccttgctcatgcctgcctctttcacttggcaggataatgcagtcattagaatttcacatgtagtagcttctgagggtaacaacagagtgtcagatatgtcatctcaacctcaaacttttacgtaacatctcaggggaaatgtggctctctccatcttgcatacagggctcccaatagaaatgaacacagagatattgcctgtgtgtttgcagagaagatggtttctataaagagtaggaaagctgaaattatagtagagtctcctttaaatgcacattgtgtggatggctctcaccatttcctaagagatacagtgtaaaacgtgacagtaatactgattctagcagaataaaacatgtaccacatttgctaaaaaaaaaaaaaacaacaaaaaaaaacc

SEQ ID NO: 732555 - DNA, 2185 bp, Homo sapiens; identical to SEQ ID NO: 362287

SEQ ID NO: 732556 - DNA, 2234 bp, Homo sapiens
agggaaagaaggctctgttggagcctggataggggaaaatacaccagagggtcaaaataggaaagtcacattgaagcggaattggtaagtggtaggaaaatcttaagtgttctgttttcctgattaatcatcaggggccaccatattttgaaaaatgataacaataactatatcagatgacacttcaaatgaaaatataagcaggacatgaaacactgtcctcagcaagaaacctcaacaattggggggaaaaagaaacatccagagggtggagaccctgagaactctcacatctacaggagtctgccgcctgttccagcatcacttttaaacttctggaatccgcccacaactgcccaagtcacgattgaagcccagccacccaaagtttctgaggggaaggatgttcttctacttgtccacaatttgccccagaatcttgctggctacatttggtacaaagggcaaatgacatacctctaccattacattacatcatatgtagtagacggtcaaagaattatatatgggcctgcatacagtggaagagaaagagtatattccaatgcatccctgctgatccagaatgtcacgcaggaggatgcaggatcctacaccttacacatcataaagcgacgcgatgggactggaggagtaactggacatttcaccttcaccttacacctggagactcccaagccctccatctccagcagcaacttaaatcccagggaggccatggaggctgtgatcttaacctgtgatcctgcgactccagccgcaagctaccagtggtggatgaatggtcagagcctccctatgactcacaggttgcagctgtccaaaaccaacaggaccctctttatatttggtgtcacaaagtatattgcaggaccctatgaatgtgaaatacggaacccagtgagtgccagccgcagtgacccagtcaccctgaatctcctcccaaagctgtccaagccctacatcacaatcaacaacttaaaccccagagagaataaggatgtcttaaccttcacctgtgaacctaagagtgagaactacacctacatttggtggctaaatggtcagagcctccctgtcagtcccagggtaaagcgacccattgaaaacaggatcctcattctacccaatgtcacgagaaatgaaacaggaccttatcaatgtgaaatacgggaccgatatggtggcatccgcagtgacccagtcaccctgaatgtcctctatggtccagacctccccagcatttacccttcattcacctattaccgttcaggagaaaacctctacttgtcctgcttcgccgagtctaacccacgggcacaatattcttggacaattaatgggaagtttcagctatcaggacaaaagctctctatcccccaaataactacaaagcatagtgggctctatgcttgctctgttcgtaactcagccactggcaaggaaagctccaaatccatcacagtcaaagtctctggtaagtggatcccagcatccttggcaatagggatttaggtggagtctatctggcattcagggaagagtgaggaaaacatttttattcccagcctgtgtcccatgggcacaagcaaatcccaaattctcctcctgaacactcccaatttgtctaagaacttccaaaactttaacaaacaggctgatatcttcttaaaattcccagcctagaccaagcaggagaaacattgatttcattgaaataattgacaatattgaggataatatttttatgatttttatttgaaaatttgctgattctttaaatggtttgttttctagatttatggaatttttttcttttaatctatctatagcttgtagcagttcaataaactatacttctgggaaccgtaattgaaacatttacttttgctctctacctgactgccccagaattgggcaactattcatgagtattgatatgtttatggtaatacacatatttgcacaagtacagtaacaatctgctctctttgtaacaggacacatttcaaatcattggttatattaccaaggctttgactgggatgttatattcaagaatatagatagaatgaaccaatatgaactgcaggcaaagtctgaagtcagccttggtttggcttcctattctcaagggttttgtaaaagtttaatctgagagtccttataaaaacttagagcaaataaaattctaaaagagcgcctaaaaggtc

SEQ ID NO: 732557 - DNA, 1711 bp, Homo sapiens
agggaaagaaggctctgttggagcctggataggggaaaatacaccagagggtcaaaataggaaagtcacattgaagcggaattggtaagtggtaggaaaatcttaagtgttctgttttcctgattaatcatcaggggccaccatattttgaaaaatgataacaataactatatcagatgacacttcaaatgaaaatataagcaggacatgaaacactgtcctcagcaagaaacctcaacaattggggggaaaaagaaacatccagagggtggagaccctgagaactctcacatctacaggagtctgccgcctgttccagcatcacttttaaacttctggaatccgcccacaactgcccaagtcacgattgaagcccagccacccaaagtttctgaggggaaggatgttcttctacttgtccacaatttgccccagaatcttgctggctacatttggtacaaagggcaaatgacatacctctaccattacattacatcatatgtagtagacggtcaaagaattatatatgggcctgcatacagtggaagagaaagagtatattccaatgcatccctgctgatccagaatgtcacgcaggaggatgcaggatcctacaccttacacatcataaagcgacgcgatgggactggaggagtaactggacatttcaccttcaccttacacctggagactcccaagccctccatctccagcagcaacttaaatcccagggaggccatggaggctgtgatcttaacctgtgatcctgcgactccagccgcaagctaccagtggtggatgaatggtcagagcctccctatgactcacaggttgcagctgtccaaaaccaacaggaccctctttatatttggtgtcacaaagtatattgcaggaccctatgaatgtgaaatacggaacccagtgagtgccagccgcagtgacccagtcaccctgaatctcctcccaaagctgtccaagccctacatcacaatcaacaacttaaaccccagagagaataaggatgtcttaaccttcacctgtgaacctaagagtgagaactacacctacatttggtggctaaatggtcagagcctccctgtcagtcccagggtaaagcgacccattgaaaacaggatcctcattctacccaatgtcacgagaaatgaaacaggaccttatcaatgtgaaatacgggaccgatatggtggcatccgcagtgacccagtcaccctgaatgtcctctatggtccagacctccccagcatttacccttcattcacctattaccgttcaggagaaaacctctacttgtcctgcttcgccgagtctaacccacgggcacaatattcttggacaattaatgggaagtttcagctatcaggacaaaagctctctatcccccaaataactacaaagcatagtgggctctatgcttgctctgttcgtaactcagccactggcaaggaaagctccaaatccatcacagtcaaagtctctggacacatttcaaatcattggttatattaccaaggctttgactgggatgttatattcaagaatatagatagaatgaaccaatatgaactgcaggcaaagtctgaagtcagccttggtttggcttcctattctcaagggttttgtaaaagtttaatctgagagtccttataaaaacttagagcaaataaaattctaaaagagcgcctaaaaggtc

SEQ ID NO: 732558 - DNA, 2165 bp, Homo sapiens
agggaaagaaggctctgttggagcctggataggggaaaatacaccagagggtcaaaataggaaagtcacattgaagcggaattggtaagtggtaggaaaatcttaagtgttctgttttcctgattaatcatcaggggccaccatattttgaaaaatgataacaataactatatcagatgacacttcaaatgaaaatataagcaggacatgaaacactgtcctcagcaagaaacctcaacaattggggggaaaaagaaacatccagagggtggagaccctgagaactctcacatctacaggagtctgccgcctgttccagcatcacttttaaacttctggaatccgcccacaactgcccaagtcacgattgaagcccagccacccaaagtttctgaggggaaggatgttcttctacttgtccacaatttgccccagaatcttgctggctacatttggtacaaagggcaaatgacatacctctaccattacattacatcatatgtagtagacggtcaaagaattatatatgggcctgcatacagtggaagagaaagagtatattccaatgcatccctgctgatccagaatgtcacgcaggaggatgcaggatcctacaccttacacatcataaagcgacgcgatgggactggaggagtaactggacatttcaccttcaccttacacctggagactcccaagccctccatctccagcagcaacttaaatcccagggaggccatggaggctgtgatcttaacctgtgatcctgcgactccagccgcaagctaccagtggtggatgaatggtcagagcctccctatgactcacaggttgcagctgtccaaaaccaacaggaccctctttatatttggtgtcacaaagtatattgcaggaccctatgaatgtgaaatacggaacccagtgagtgccagccgcagtgacccagtcaccctgaatctcctcccaaagctgtccaagccctacatcacaatcaacaacttaaaccccagagagaataaggatgtcttaaccttcacctgtgaacctaagagtgagaactacacctacatttggtggctaaatggtcagagcctccctgtcagtcccagggtaaagcgacccattgaaaacaggatcctcattctacccaatgtcacgagaaatgaaacaggaccttatcaatgtgaaatacgggaccgatatggtggcatccgcagtgacccagtcaccctgaatgtcctcttcaggagaaaacctctacttgtcctgcttcgccgagtctaacccacgggcacaatattcttggacaattaatgggaagtttcagctatcaggacaaaagctctctatcccccaaataactacaaagcatagtgggctctatgcttgctctgttcgtaactcagccactggcaaggaaagctccaaatccatcacagtcaaagtctctgactggatattaccctgaattctactagttcctccaattccattttctcccatggaatcacgaagagcaagacccactctgttccagaagccctataagctggaggtggacaactcgatgtaaatttcatgggaaaacccttgtacctgacatgtgagccactcagaactcaccaaaatgttcgacaccataacaacagctactcaaactgtaaaccaggataacaagttgatgacttcacactgtggacagtttttccaaagatgtcagaacaagactccccatcatgataaggctcccacccctcttaactgtccttgctcatgcctgcctctttcacttggcaggataatgcagtcattagaatttcacatgtagtagcttctgagggtaacaacagagtgtcagatatgtcatctcaacctcaaacttttacgtaacatctcaggggaaatgtggctctctccatcttgcatacagggctcccaatagaaatgaacacagagatattgcctgtgtgtttgcagagaagatggtttctataaagagtaggaaagctgaaattatagtagagtctcctttaaatgcacattgtgtggatggctctcaccatttcctaagagatacagtgtaaaacgtgacagtaatactgattctagcagaataaaacatgtaccacatttgctaaaaaaaaaaaaaacaacaaaaaaaaacc

SEQ ID NO: 732559 - DNA, 2138 bp, Homo sapiens
agggaaagaaggctctgttggagcctggataggggaaaatacaccagagggtcaaaataggaaagtcacattgaagcggaattggtaagtggtaggaaaatcttaagtgttctgttttcctgattaatcatcaggggccaccatattttgaaaaatgataacaataactatatcagatgacacttcaaatgaaaatataagcaggacatgaaacactgtcctcagcaagaaacctcaacaattggggggaaaaagaaacatccagagggtggagaccctgagaactctcacatctacaggagtctgccgcctgttccagcatcacttttaaacttctggaatccgcccacaactgcccaagtcacgattgaagcccagccacccaaagtttctgaggggaaggatgttcttctacttgtccacaatttgccccagaatcttgctggctacatttggtacaaagggcaaatgacatacctctaccattacattacatcatatgtagtagacggtcaaagaattatatatgggcctgcatacagtggaagagaaagagtatattccaatgcatccctgctgatccagaatgtcacgcaggaggatgcaggatcctacaccttacacatcataaagcgacgcgatgggactggaggagtaactggacatttcaccttcaccttacacctggagactcccaagccctccatctccagcagcaacttaaatcccagggaggccatggaggctgtgatcttaacctgtgatcctgcgactccagccgcaagctaccagtggtggatgaatggtcagagcctccctatgactcacaggttgcagctgtccaaaaccaacaggaccctctttatatttggtgtcacaaagtatattgcaggaccctatgaatgtgaaatacggaacccagtgagtgccagccgcagtgacccagtcaccctgaatctcctcccaaagctgtccaagccctacatcacaatcaacaacttaaaccccagagagaataaggatgtcttaaccttcacctgtgaacctaagagtgagaactacacctacatttggtggctaaatggtcagagcctccctgtcagtcccagggtaaagcgacccattgaaaacaggatcctcattctacccaatgtcacgagaaatgaaacaggaccttatcaatgtgaaatacgggaccgatatggtggcatccgcagtgacccagtcaccctgaatgtcctcttcaggagaaaacctctacttgtcctgcttcgccgagtctaacccacgggcacaatattcttggacaattaatgggaagtttcagctatcaggacaaaagctctctatcccccaaataactacaaagcatagtgggctctatgcttgctctgttcgtaactcagccactggcaaggaaagctccaaatccatcacagtcaaagtctctgactggatattaccctgaattctactagttcctccaattccattttctcccatggaatcacgaagagcaagacccactctgttccagaagccctataagctggaggtggacaactcgatgtaaatttcatgggaaaacccttgtacctgacatgtgagccactcagaactcaccaaaatgttcgacaccataacaacagctactcaaactgtaaaccaggataacaagttgatgacttcacactgtggacagtttttccaaagatgtcagaacaagactccccatcatgataaggctcccacccctcttaactgtccttgctcatgcctgcctctttcacttggcaggataatgcagtcattagaatttcacatgtagtagcttctgagggtaacaacagagtgtcagatatgtcatctcaacctcaaacttttacgtaacatctcaggggaaatgtggctctctccatcttgcatacagggctcccaatagaaatgaacacagagatattgcctgtgtgtttgcagagaagatggtttctataaagagtaggaaagctgaaattatagtagagtctcctttaaatgcacattgtgtggatggctctcaccatttcctaagagatacagtgtaaaacgtgacagtaatactgattctagcagaataaaacatgtaccacatttgctaa

SEQ ID NO: 732560 - DNA, 1014 bp, Homo sapiens
agggaaagaaggctctgttggagcctggataggggaaaatacaccagagggtcaaaataggaaagtcacattgaagcggaattggtaagtggtaggaaaatcttaagtgttctgttttcctgattaatcatcaggggccaccatattttgaaaaatgataacaataactatatcagatgacacttcaaatgaaaatataagcaggacatgaaacactgtcctcagcaagaaacctcaacaattggggggaaaaagaaacatccagagggtggagaccctgagaactctcacatctacaggagtctgccgcctgttccagcatcacttttaaacttctggaatccgcccacaactgcccaagtcacgattgaagcccagccacccaaagtttctgaggggaaggatgttcttctacttgtccacaatttgccccagaatcttgctggctacatttggtacaaagggcaaatgacatacctctaccattacattacatcatatgtagtagacggtcaaagaattatatatgggcctgcatacagtggaagagaaagagtatattccaatgcatccctgctgatccagaatgtcacgcaggaggatgcaggatcctacaccttacacatcataaagcgacgcgatgggactggaggagtaactggacatttcaccttcaccttacacctggagactcccaagccctccatctccagcagcaacttaaatcccagggaggccatggaggctgtgatcttaacctgtgatcctgcgactccagccgcaagctaccagtggtggatgaatggtcagagcctccctatgactcacaggttgcagctgtccaaaaccaacaggaccctctttatatttggtgtcacaaagtatattgcaggaccctatgaatgtgaaatacggaacccagtgagtgccagccgcagtgacccagtcaccctgaatctcctcccaaagctgtccaagccctacatcacaatcaacaacttaaaccccagagag

SEQ ID NO: 732561 - DNA, 1299 bp, Homo sapiens
agggaaagaaggctctgttggagcctggataggggaaaatacaccagagggtcaaaataggaaagtcacattgaagcggaattggtaagtggtaggaaaatcttaagtgttctgttttcctgattaatcatcaggggccaccatattttgaaaaatgataacaataactatatcagatgacacttcaaatgaaaatataagcaggacatgaaacactgtcctcagcaagaaacctcaacaattggggggaaaaagaaacatccagagggtggagaccctgagaactctcacatctacaggagtctgccgcctgttccagcatcacttttaaacttctggaatccgcccacaactgcccaagtcacgattgaagcccagccacccaaagtttctgaggggaaggatgttcttctacttgtccacaatttgccccagaatcttgctggctacatttggtacaaagggcaaatgacatacctctaccattacattacatcatatgtagtagacggtcaaagaattatatatgggcctgcatacagtggaagagaaagagtatattccaatgcatccctgctgatccagaatgtcacgcaggaggatgcaggatcctacaccttacacatcataaagcgacgcgatgggactggaggagtaactggacatttcaccttcaccttacacctggagactcccaagccctccatctccagcagcaacttaaatcccagggaggccatggaggctgtgatcttaacctgtgatcctgcgactccagccgcaagctaccagtggtggatgaatggtcagagcctccctatgactcacaggttgcagctgtccaaaaccaacaggaccctctttatatttggtgtcacaaagtatattgcaggaccctatgaatgtgaaatacggaacccagtgagtgccagccgcagtgacccagtcaccctgaatctcctcccaaagctcccaagccctacatctccagcagcaacttaaaccccagggaggccatggaggctgtgatcttaacctgtgatcctgcggcttcagacacaagctacctgtggtggatgaatggtcagagcctccctatgactcacaggttgcagctgtccaaaaccaacaggaccctctttatatttggtgtcacaaagtatattgcaggaccctatgaatgtgaaatacggaacccagtgagtgccagccacagtgacccagtcaccctgaatctcctccgtgagtatcctctgttcctctgtgagccaggctgccatcccaaatacacatggccag

SEQ ID NO: 732562 - DNA, 2183 bp, Homo sapiens
agggaaagaaggctctgttggagcctggataggggaaaatacaccagagggtcaaaataggaaagtcacattgaagcggaattggtaagtggtaggaaaatcttaagtgttctgttttcctgattaatcatcaggggccaccatattttgaaaaatgataacaataactatatcagatgacacttcaaatgaaaatataagcaggacatgaaacactgtcctcagcaagaaacctcaacaattggggggaaaaagaaacatccagagggtggagaccctgagaactctcacatctacaggagtctgccgcctgttccagcatcacttttaaacttctggaatccgcccacaactgcccaagtcacgattgaagcccagccacccaaagtttctgaggggaaggatgttcttctacttgtccacaatttgccccagaatcttgctggctacatttggtacaaagggcaaatgacatacctctaccattacattacatcatatgtagtagacggtcaaagaattatatatgggcctgcatacagtggaagagaaagagtatattccaatgcatccctgctgatccagaatgtcacgcaggaggatgcaggatcctacaccttacacatcataaagcgacgcgatgggactggaggagtaactggacatttcaccttcaccttacacctggagactcccaagccctccatctccagcagcaacttaaatcccagggaggccatggaggctgtgatcttaacctgtgatcctgcgactccagccgcaagctaccagtggtggatgaatggtcagagcctccctatgactcacaggttgcagctgtccaaaaccaacaggaccctctttatatttggtgtcacaaagtatattgcaggaccctatgaatgtgaaatacggaacccagtgagtgccagccgcagtgacccagtcaccctgaatctcctcccaaagctgtccaagccctacatcacaatcaacaacttaaaccccagagagaataaggatgtcttaaccttcacctgtgaacctaagagtgagaactacacctacatttggtggctaaatggtcagagcctccctgtcagtcccagggtaaagcgacccattgaaaacaggatcctcaggaccttatcaatgtgaaatacgggaccgatatggtggcatccgcagtgacccagtcaccctgaatgtcctctatggtccagacctccccagcatttacccttcattcacctattaccgttcaggagaaaacctctacttgtcctgcttcgccgagtctaacccacgggcacaatattcttggacaattaatgggaagtttcagctatcaggacaaaagctctctatcccccaaataactacaaagcatagtgggctctatgcttgctctgttcgtaactcagccactggcaaggaaagctccaaatccatcacagtcaaagtctctgactggatattaccctgaattctactagttcctccaattccattttctcccatggaatcacgaagagcaagacccactctgttccagaagccctataagctggaggtggacaactcgatgtaaatttcatgggaaaacccttgtacctgacatgtgagccactcagaactcaccaaaatgttcgacaccataacaacagctactcaaactgtaaaccaggataacaagttgatgacttcacactgtggacagtttttccaaagatgtcagaacaagactccccatcatgataaggctcccacccctcttaactgtccttgctcatgcctgcctctttcacttggcaggataatgcagtcattagaatttcacatgtagtagcttctgagggtaacaacagagtgtcagatatgtcatctcaacctcaaacttttacgtaacatctcaggggaaatgtggctctctccatcttgcatacagggctcccaatagaaatgaacacagagatattgcctgtgtgtttgcagagaagatggtttctataaagagtaggaaagctgaaattatagtagagtctcctttaaatgcacattgtgtggatggctctcaccatttcctaagagatacagtgtaaaacgtgacagtaatactgattctagcagaataaaacatgtaccacatttgctaaaaaaaaaaaaaacaacaaaaaaaaacc

SEQ ID NO: 732563 - DNA, 2156 bp, Homo sapiens
agggaaagaaggctctgttggagcctggataggggaaaatacaccagagggtcaaaataggaaagtcacattgaagcggaattggtaagtggtaggaaaatcttaagtgttctgttttcctgattaatcatcaggggccaccatattttgaaaaatgataacaataactatatcagatgacacttcaaatgaaaatataagcaggacatgaaacactgtcctcagcaagaaacctcaacaattggggggaaaaagaaacatccagagggtggagaccctgagaactctcacatctacaggagtctgccgcctgttccagcatcacttttaaacttctggaatccgcccacaactgcccaagtcacgattgaagcccagccacccaaagtttctgaggggaaggatgttcttctacttgtccacaatttgccccagaatcttgctggctacatttggtacaaagggcaaatgacatacctctaccattacattacatcatatgtagtagacggtcaaagaattatatatgggcctgcatacagtggaagagaaagagtatattccaatgcatccctgctgatccagaatgtcacgcaggaggatgcaggatcctacaccttacacatcataaagcgacgcgatgggactggaggagtaactggacatttcaccttcaccttacacctggagactcccaagccctccatctccagcagcaacttaaatcccagggaggccatggaggctgtgatcttaacctgtgatcctgcgactccagccgcaagctaccagtggtggatgaatggtcagagcctccctatgactcacaggttgcagctgtccaaaaccaacaggaccctctttatatttggtgtcacaaagtatattgcaggaccctatgaatgtgaaatacggaacccagtgagtgccagccgcagtgacccagtcaccctgaatctcctcccaaagctgtccaagccctacatcacaatcaacaacttaaaccccagagagaataaggatgtcttaaccttcacctgtgaacctaagagtgagaactacacctacatttggtggctaaatggtcagagcctccctgtcagtcccagggtaaagcgacccattgaaaacaggatcctcaggaccttatcaatgtgaaatacgggaccgatatggtggcatccgcagtgacccagtcaccctgaatgtcctctatggtccagacctccccagcatttacccttcattcacctattaccgttcaggagaaaacctctacttgtcctgcttcgccgagtctaacccacgggcacaatattcttggacaattaatgggaagtttcagctatcaggacaaaagctctctatcccccaaataactacaaagcatagtgggctctatgcttgctctgttcgtaactcagccactggcaaggaaagctccaaatccatcacagtcaaagtctctgactggatattaccctgaattctactagttcctccaattccattttctcccatggaatcacgaagagcaagacccactctgttccagaagccctataagctggaggtggacaactcgatgtaaatttcatgggaaaacccttgtacctgacatgtgagccactcagaactcaccaaaatgttcgacaccataacaacagctactcaaactgtaaaccaggataacaagttgatgacttcacactgtggacagtttttccaaagatgtcagaacaagactccccatcatgataaggctcccacccctcttaactgtccttgctcatgcctgcctctttcacttggcaggataatgcagtcattagaatttcacatgtagtagcttctgagggtaacaacagagtgtcagatatgtcatctcaacctcaaacttttacgtaacatctcaggggaaatgtggctctctccatcttgcatacagggctcccaatagaaatgaacacagagatattgcctgtgtgtttgcagagaagatggtttctataaagagtaggaaagctgaaattatagtagagtctcctttaaatgcacattgtgtggatggctctcaccatttcctaagagatacagtgtaaaacgtgacagtaatactgattctagcagaataaaacatgtaccacatttgctaa

SEQ ID NO: 732564 - DNA, 2205 bp, Homo sapiens
agggaaagaaggctctgttggagcctggataggggaaaatacaccagagggtcaaaataggaaagtcacattgaagcggaattggtaagtggtaggaaaatcttaagtgttctgttttcctgattaatcatcaggggccaccatattttgaaaaatgataacaataactatatcagatgacacttcaaatgaaaatataagcaggacatgaaacactgtcctcagcaagaaacctcaacaattggggggaaaaagaaacatccagagggtggagaccctgagaactctcacatctacaggagtctgccgcctgttccagcatcacttttaaacttctggaatccgcccacaactgcccaagtcacgattgaagcccagccacccaaagtttctgaggggaaggatgttcttctacttgtccacaatttgccccagaatcttgctggctacatttggtacaaagggcaaatgacatacctctaccattacattacatcatatgtagtagacggtcaaagaattatatatgggcctgcatacagtggaagagaaagagtatattccaatgcatccctgctgatccagaatgtcacgcaggaggatgcaggatcctacaccttacacatcataaagcgacgcgatgggactggaggagtaactggacatttcaccttcaccttacacctggagactcccaagccctccatctccagcagcaacttaaatcccagggaggccatggaggctgtgatcttaacctgtgatcctgcgactccagccgcaagctaccagtggtggatgaatggtcagagcctccctatgactcacaggttgcagctgtccaaaaccaacaggaccctctttatatttggtgtcacaaagtatattgcaggaccctatgaatgtgaaatacggaacccagtgagtgccagccgcagtgacccagtcaccctgaatctcctcccaaagctgtccaagccctacatcacaatcaacaacttaaaccccagagagaataaggatgtcttaaccttcacctgtgaacctaagagtgagaactacacctacatttggtggctaaatggtcagagcctccctgtcagtcccagggtaaagcgacccattgaaaacaggatcctcaggaccttatcaatgtgaaatacgggaccgatatggtggcatccgcagtgacccagtcaccctgaatgtcctctatggtccagacctccccagcatttacccttcattcacctattaccgttcaggagaaaacctctacttgtcctgcttcgccgagtctaacccacgggcacaatattcttggacaattaatgggaagtttcagctatcaggacaaaagctctctatcccccaaataactacaaagcatagtgggctctatgcttgctctgttcgtaactcagccactggcaaggaaagctccaaatccatcacagtcaaagtctctggtaagtggatcccagcatccttggcaatagggatttaggtggagtctatctggcattcagggaagagtgaggaaaacatttttattcccagcctgtgtcccatgggcacaagcaaatcccaaattctcctcctgaacactcccaatttgtctaagaacttccaaaactttaacaaacaggctgatatcttcttaaaattcccagcctagaccaagcaggagaaacattgatttcattgaaataattgacaatattgaggataatatttttatgatttttatttgaaaatttgctgattctttaaatggtttgttttctagatttatggaatttttttcttttaatctatctatagcttgtagcagttcaataaactatacttctgggaaccgtaattgaaacatttacttttgctctctacctgactgccccagaattgggcaactattcatgagtattgatatgtttatggtaatacacatatttgcacaagtacagtaacaatctgctctctttgtaacaggacacatttcaaatcattggttatattaccaaggctttgactgggatgttatattcaagaatatagatagaatgaaccaatatgaactgcaggcaaagtctgaagtcagccttggtttggcttcctattctcaagggttttgtaaaagtttaatctgagagtccttataaaaacttagagcaaataaaattctaaaagagcgcctaaaaggtc

SEQ ID NO: 732565 - DNA, 1682 bp, Homo sapiens
agggaaagaaggctctgttggagcctggataggggaaaatacaccagagggtcaaaataggaaagtcacattgaagcggaattggtaagtggtaggaaaatcttaagtgttctgttttcctgattaatcatcaggggccaccatattttgaaaaatgataacaataactatatcagatgacacttcaaatgaaaatataagcaggacatgaaacactgtcctcagcaagaaacctcaacaattggggggaaaaagaaacatccagagggtggagaccctgagaactctcacatctacaggagtctgccgcctgttccagcatcacttttaaacttctggaatccgcccacaactgcccaagtcacgattgaagcccagccacccaaagtttctgaggggaaggatgttcttctacttgtccacaatttgccccagaatcttgctggctacatttggtacaaagggcaaatgacatacctctaccattacattacatcatatgtagtagacggtcaaagaattatatatgggcctgcatacagtggaagagaaagagtatattccaatgcatccctgctgatccagaatgtcacgcaggaggatgcaggatcctacaccttacacatcataaagcgacgcgatgggactggaggagtaactggacatttcaccttcaccttacacctggagactcccaagccctccatctccagcagcaacttaaatcccagggaggccatggaggctgtgatcttaacctgtgatcctgcgactccagccgcaagctaccagtggtggatgaatggtcagagcctccctatgactcacaggttgcagctgtccaaaaccaacaggaccctctttatatttggtgtcacaaagtatattgcaggaccctatgaatgtgaaatacggaacccagtgagtgccagccgcagtgacccagtcaccctgaatctcctcccaaagctgtccaagccctacatcacaatcaacaacttaaaccccagagagaataaggatgtcttaaccttcacctgtgaacctaagagtgagaactacacctacatttggtggctaaatggtcagagcctccctgtcagtcccagggtaaagcgacccattgaaaacaggatcctcaggaccttatcaatgtgaaatacgggaccgatatggtggcatccgcagtgacccagtcaccctgaatgtcctctatggtccagacctccccagcatttacccttcattcacctattaccgttcaggagaaaacctctacttgtcctgcttcgccgagtctaacccacgggcacaatattcttggacaattaatgggaagtttcagctatcaggacaaaagctctctatcccccaaataactacaaagcatagtgggctctatgcttgctctgttcgtaactcagccactggcaaggaaagctccaaatccatcacagtcaaagtctctggacacatttcaaatcattggttatattaccaaggctttgactgggatgttatattcaagaatatagatagaatgaaccaatatgaactgcaggcaaagtctgaagtcagccttggtttggcttcctattctcaagggttttgtaaaagtttaatctgagagtccttataaaaacttagagcaaataaaattctaaaagagcgcctaaaaggtc

SEQ ID NO: 732566 - DNA, 1340 bp, Homo sapiens
agggaaagaaggctctgttggagcctggataggggaaaatacaccagagggtcaaaataggaaagtcacattgaagcggaattggtaagtggtaggaaaatcttaagtgttctgttttcctgattaatcatcaggggccaccatattttgaaaaatgataacaataactatatcagatgacacttcaaatgaaaatataagcaggacatgaaacactgtcctcagcaagaaacctcaacaattggggggaaaaagaaacatccagagggtggagaccctgagaactctcacatctacaggagtctgccgcctgttccagcatcacttttaaacttctggaatccgcccacaactgcccaagtcacgattgaagcccagccacccaaagtttctgaggggaaggatgttcttctacttgtccacaatttgccccagaatcttgctggctacatttggtacaaagggcaaatgacatacctctaccattacattacatcatatgtagtagacggtcaaagaattatatatgggcctgcatacagtggaagagaaagagtatattccaatgcatccctgctgatccagaatgtcacgcaggaggatgcaggatcctacaccttacacatcataaagcgacgcgatgggactggaggagtaactggacatttcaccttcaccttacacctggagactcccaagccctccatctccagcagcaacttaaatcccagggaggccatggaggctgtgatcttaacctgtgatcctgcgactccagccgcaagctaccagtggtggatgaatggtcagagcctccctattgcaggaccctatgaatgtgaaatacggaacccagtgagtgccagccgcagtgacccagtcaccctgaatctcctcccaaagctgtccaagccctacatcacaatcaacaacttaaaccccagagagaataaggatgtcttaaccttcacctgtgaacctaagagtgagaactacacctacatttggtggctaaatggtcagagcctccctgtcagtcccagggtaaagcgacccattgaaaacaggatcctcattctacccaatgtcacgagaaatgaaacaggaccttatcaatgtgaaatacgggaccgatatggtggcatccgcagtgacccagtcaccctgaatgtcctctatggtccagacctccccagcatttacccttcattcacctattaccgttcaggagaaaacctctacttgtcctgcttcgcggaatctaacccaccggcagagtatttttggacaattaatgggaagtttcagcaatcaggacaaaagctctctatcccccaaat

SEQ ID NO: 732567 - DNA, 2146 bp, Homo sapiens
agggaaagaaggctctgttggagcctggataggggaaaatacaccagagggtcaaaataggaaagtcacattgaagcggaattggtaagtggtaggaaaatcttaagtgttctgttttcctgattaatcatcaggggccaccatattttgaaaaatgataacaataactatatcagatgacacttcaaatgaaaatataagcaggacatgaaacactgtcctcagcaagaaacctcaacaattggggggaaaaagaaacatccagagggtggagaccctgagaactctcacatctacaggagtctgccgcctgttccagcatcacttttaaacttctggaatccgcccacaactgcccaagtcacgattgaagcccagccacccaaagtttctgaggggaaggatgttcttctacttgtccacaatttgccccagaatcttgctggctacatttggtacaaagggcaaatgacatacctctaccattacattacatcatatgtagtagacggtcaaagaattatatatgggcctgcatacagtggaagagaaagagtatattccaatgcatccctgctgatccagaatgtcacgcaggaggatgcaggatcctacaccttacacatcataaagcgacgcgatgggactggaggagtaactggacatttcaccttcaccttacacctggagactcccaagccctccatctccagcagcaacttaaatcccagggaggccatggaggctgtgatcttaacctgtgatcctgcgactccagccgcaagctaccagtggtggatgaatggtcagagcctccctattgcaggaccctatgaatgtgaaatacggaacccagtgagtgccagccgcagtgacccagtcaccctgaatctcctcccaaagctgtccaagccctacatcacaatcaacaacttaaaccccagagagaataaggatgtcttaaccttcacctgtgaacctaagagtgagaactacacctacatttggtggctaaatggtcagagcctccctgtcagtcccagggtaaagcgacccattgaaaacaggatcctcattctacccaatgtcacgagaaatgaaacaggaccttatcaatgtgaaatacgggaccgatatggtggcatccgcagtgacccagtcaccctgaatgtcctctatggtccagacctccccagcatttacccttcattcacctattaccgttcaggagaaaacctctacttgtcctgcttcgccgagtctaacccacgggcacaatattcttggacaattaatgggaagtttcagctatcaggacaaaagctctctatcccccaaataactacaaagcatagtgggctctatgcttgctctgttcgtaactcagccactggcaaggaaagctccaaatccatcacagtcaaagtctctgactggatattaccctgaattctactagttcctccaattccattttctcccatggaatcacgaagagcaagacccactctgttccagaagccctataagctggaggtggacaactcgatgtaaatttcatgggaaaacccttgtacctgacatgtgagccactcagaactcaccaaaatgttcgacaccataacaacagctactcaaactgtaaaccaggataacaagttgatgacttcacactgtggacagtttttccaaagatgtcagaacaagactccccatcatgataaggctcccacccctcttaactgtccttgctcatgcctgcctctttcacttggcaggataatgcagtcattagaatttcacatgtagtagcttctgagggtaacaacagagtgtcagatatgtcatctcaacctcaaacttttacgtaacatctcaggggaaatgtggctctctccatcttgcatacagggctcccaatagaaatgaacacagagatattgcctgtgtgtttgcagagaagatggtttctataaagagtaggaaagctgaaattatagtagagtctcctttaaatgcacattgtgtggatggctctcaccatttcctaagagatacagtgtaaaacgtgacagtaatactgattctagcagaataaaacatgtaccacatttgctaaaaaaaaaaaaaacaacaaaaaaaaacc

SEQ ID NO: 732568 - DNA, 2119 bp, Homo sapiens
agggaaagaaggctctgttggagcctggataggggaaaatacaccagagggtcaaaataggaaagtcacattgaagcggaattggtaagtggtaggaaaatcttaagtgttctgttttcctgattaatcatcaggggccaccatattttgaaaaatgataacaataactatatcagatgacacttcaaatgaaaatataagcaggacatgaaacactgtcctcagcaagaaacctcaacaattggggggaaaaagaaacatccagagggtggagaccctgagaactctcacatctacaggagtctgccgcctgttccagcatcacttttaaacttctggaatccgcccacaactgcccaagtcacgattgaagcccagccacccaaagtttctgaggggaaggatgttcttctacttgtccacaatttgccccagaatcttgctggctacatttggtacaaagggcaaatgacatacctctaccattacattacatcatatgtagtagacggtcaaagaattatatatgggcctgcatacagtggaagagaaagagtatattccaatgcatccctgctgatccagaatgtcacgcaggaggatgcaggatcctacaccttacacatcataaagcgacgcgatgggactggaggagtaactggacatttcaccttcaccttacacctggagactcccaagccctccatctccagcagcaacttaaatcccagggaggccatggaggctgtgatcttaacctgtgatcctgcgactccagccgcaagctaccagtggtggatgaatggtcagagcctccctattgcaggaccctatgaatgtgaaatacggaacccagtgagtgccagccgcagtgacccagtcaccctgaatctcctcccaaagctgtccaagccctacatcacaatcaacaacttaaaccccagagagaataaggatgtcttaaccttcacctgtgaacctaagagtgagaactacacctacatttggtggctaaatggtcagagcctccctgtcagtcccagggtaaagcgacccattgaaaacaggatcctcattctacccaatgtcacgagaaatgaaacaggaccttatcaatgtgaaatacgggaccgatatggtggcatccgcagtgacccagtcaccctgaatgtcctctatggtccagacctccccagcatttacccttcattcacctattaccgttcaggagaaaacctctacttgtcctgcttcgccgagtctaacccacgggcacaatattcttggacaattaatgggaagtttcagctatcaggacaaaagctctctatcccccaaataactacaaagcatagtgggctctatgcttgctctgttcgtaactcagccactggcaaggaaagctccaaatccatcacagtcaaagtctctgactggatattaccctgaattctactagttcctccaattccattttctcccatggaatcacgaagagcaagacccactctgttccagaagccctataagctggaggtggacaactcgatgtaaatttcatgggaaaacccttgtacctgacatgtgagccactcagaactcaccaaaatgttcgacaccataacaacagctactcaaactgtaaaccaggataacaagttgatgacttcacactgtggacagtttttccaaagatgtcagaacaagactccccatcatgataaggctcccacccctcttaactgtccttgctcatgcctgcctctttcacttggcaggataatgcagtcattagaatttcacatgtagtagcttctgagggtaacaacagagtgtcagatatgtcatctcaacctcaaacttttacgtaacatctcaggggaaatgtggctctctccatcttgcatacagggctcccaatagaaatgaacacagagatattgcctgtgtgtttgcagagaagatggtttctataaagagtaggaaagctgaaattatagtagagtctcctttaaatgcacattgtgtggatggctctcaccatttcctaagagatacagtgtaaaacgtgacagtaatactgattctagcagaataaaacatgtaccacatttgctaa

SEQ ID NO: 732569 - DNA, 2168 bp, Homo sapiens
agggaaagaaggctctgttggagcctggataggggaaaatacaccagagggtcaaaataggaaagtcacattgaagcggaattggtaagtggtaggaaaatcttaagtgttctgttttcctgattaatcatcaggggccaccatattttgaaaaatgataacaataactatatcagatgacacttcaaatgaaaatataagcaggacatgaaacactgtcctcagcaagaaacctcaacaattggggggaaaaagaaacatccagagggtggagaccctgagaactctcacatctacaggagtctgccgcctgttccagcatcacttttaaacttctggaatccgcccacaactgcccaagtcacgattgaagcccagccacccaaagtttctgaggggaaggatgttcttctacttgtccacaatttgccccagaatcttgctggctacatttggtacaaagggcaaatgacatacctctaccattacattacatcatatgtagtagacggtcaaagaattatatatgggcctgcatacagtggaagagaaagagtatattccaatgcatccctgctgatccagaatgtcacgcaggaggatgcaggatcctacaccttacacatcataaagcgacgcgatgggactggaggagtaactggacatttcaccttcaccttacacctggagactcccaagccctccatctccagcagcaacttaaatcccagggaggccatggaggctgtgatcttaacctgtgatcctgcgactccagccgcaagctaccagtggtggatgaatggtcagagcctccctattgcaggaccctatgaatgtgaaatacggaacccagtgagtgccagccgcagtgacccagtcaccctgaatctcctcccaaagctgtccaagccctacatcacaatcaacaacttaaaccccagagagaataaggatgtcttaaccttcacctgtgaacctaagagtgagaactacacctacatttggtggctaaatggtcagagcctccctgtcagtcccagggtaaagcgacccattgaaaacaggatcctcattctacccaatgtcacgagaaatgaaacaggaccttatcaatgtgaaatacgggaccgatatggtggcatccgcagtgacccagtcaccctgaatgtcctctatggtccagacctccccagcatttacccttcattcacctattaccgttcaggagaaaacctctacttgtcctgcttcgccgagtctaacccacgggcacaatattcttggacaattaatgggaagtttcagctatcaggacaaaagctctctatcccccaaataactacaaagcatagtgggctctatgcttgctctgttcgtaactcagccactggcaaggaaagctccaaatccatcacagtcaaagtctctggtaagtggatcccagcatccttggcaatagggatttaggtggagtctatctggcattcagggaagagtgaggaaaacatttttattcccagcctgtgtcccatgggcacaagcaaatcccaaattctcctcctgaacactcccaatttgtctaagaacttccaaaactttaacaaacaggctgatatcttcttaaaattcccagcctagaccaagcaggagaaacattgatttcattgaaataattgacaatattgaggataatatttttatgatttttatttgaaaatttgctgattctttaaatggtttgttttctagatttatggaatttttttcttttaatctatctatagcttgtagcagttcaataaactatacttctgggaaccgtaattgaaacatttacttttgctctctacctgactgccccagaattgggcaactattcatgagtattgatatgtttatggtaatacacatatttgcacaagtacagtaacaatctgctctctttgtaacaggacacatttcaaatcattggttatattaccaaggctttgactgggatgttatattcaagaatatagatagaatgaaccaatatgaactgcaggcaaagtctgaagtcagccttggtttggcttcctattctcaagggttttgtaaaagtttaatctgagagtccttataaaaacttagagcaaataaaattctaaaagagcgcctaaaaggtc

SEQ ID NO: 732570 - DNA, 1645 bp, Homo sapiens
agggaaagaaggctctgttggagcctggataggggaaaatacaccagagggtcaaaataggaaagtcacattgaagcggaattggtaagtggtaggaaaatcttaagtgttctgttttcctgattaatcatcaggggccaccatattttgaaaaatgataacaataactatatcagatgacacttcaaatgaaaatataagcaggacatgaaacactgtcctcagcaagaaacctcaacaattggggggaaaaagaaacatccagagggtggagaccctgagaactctcacatctacaggagtctgccgcctgttccagcatcacttttaaacttctggaatccgcccacaactgcccaagtcacgattgaagcccagccacccaaagtttctgaggggaaggatgttcttctacttgtccacaatttgccccagaatcttgctggctacatttggtacaaagggcaaatgacatacctctaccattacattacatcatatgtagtagacggtcaaagaattatatatgggcctgcatacagtggaagagaaagagtatattccaatgcatccctgctgatccagaatgtcacgcaggaggatgcaggatcctacaccttacacatcataaagcgacgcgatgggactggaggagtaactggacatttcaccttcaccttacacctggagactcccaagccctccatctccagcagcaacttaaatcccagggaggccatggaggctgtgatcttaacctgtgatcctgcgactccagccgcaagctaccagtggtggatgaatggtcagagcctccctattgcaggaccctatgaatgtgaaatacggaacccagtgagtgccagccgcagtgacccagtcaccctgaatctcctcccaaagctgtccaagccctacatcacaatcaacaacttaaaccccagagagaataaggatgtcttaaccttcacctgtgaacctaagagtgagaactacacctacatttggtggctaaatggtcagagcctccctgtcagtcccagggtaaagcgacccattgaaaacaggatcctcattctacccaatgtcacgagaaatgaaacaggaccttatcaatgtgaaatacgggaccgatatggtggcatccgcagtgacccagtcaccctgaatgtcctctatggtccagacctccccagcatttacccttcattcacctattaccgttcaggagaaaacctctacttgtcctgcttcgccgagtctaacccacgggcacaatattcttggacaattaatgggaagtttcagctatcaggacaaaagctctctatcccccaaataactacaaagcatagtgggctctatgcttgctctgttcgtaactcagccactggcaaggaaagctccaaatccatcacagtcaaagtctctggacacatttcaaatcattggttatattaccaaggctttgactgggatgttatattcaagaatatagatagaatgaaccaatatgaactgcaggcaaagtctgaagtcagccttggtttggcttcctattctcaagggttttgtaaaagtttaatctgagagtccttataaaaacttagagcaaataaaattctaaaagagcgcctaaaaggtc

SEQ ID NO: 732571 - DNA, 2099 bp, Homo sapiens
agggaaagaaggctctgttggagcctggataggggaaaatacaccagagggtcaaaataggaaagtcacattgaagcggaattggtaagtggtaggaaaatcttaagtgttctgttttcctgattaatcatcaggggccaccatattttgaaaaatgataacaataactatatcagatgacacttcaaatgaaaatataagcaggacatgaaacactgtcctcagcaagaaacctcaacaattggggggaaaaagaaacatccagagggtggagaccctgagaactctcacatctacaggagtctgccgcctgttccagcatcacttttaaacttctggaatccgcccacaactgcccaagtcacgattgaagcccagccacccaaagtttctgaggggaaggatgttcttctacttgtccacaatttgccccagaatcttgctggctacatttggtacaaagggcaaatgacatacctctaccattacattacatcatatgtagtagacggtcaaagaattatatatgggcctgcatacagtggaagagaaagagtatattccaatgcatccctgctgatccagaatgtcacgcaggaggatgcaggatcctacaccttacacatcataaagcgacgcgatgggactggaggagtaactggacatttcaccttcaccttacacctggagactcccaagccctccatctccagcagcaacttaaatcccagggaggccatggaggctgtgatcttaacctgtgatcctgcgactccagccgcaagctaccagtggtggatgaatggtcagagcctccctattgcaggaccctatgaatgtgaaatacggaacccagtgagtgccagccgcagtgacccagtcaccctgaatctcctcccaaagctgtccaagccctacatcacaatcaacaacttaaaccccagagagaataaggatgtcttaaccttcacctgtgaacctaagagtgagaactacacctacatttggtggctaaatggtcagagcctccctgtcagtcccagggtaaagcgacccattgaaaacaggatcctcattctacccaatgtcacgagaaatgaaacaggaccttatcaatgtgaaatacgggaccgatatggtggcatccgcagtgacccagtcaccctgaatgtcctcttcaggagaaaacctctacttgtcctgcttcgccgagtctaacccacgggcacaatattcttggacaattaatgggaagtttcagctatcaggacaaaagctctctatcccccaaataactacaaagcatagtgggctctatgcttgctctgttcgtaactcagccactggcaaggaaagctccaaatccatcacagtcaaagtctctgactggatattaccctgaattctactagttcctccaattccattttctcccatggaatcacgaagagcaagacccactctgttccagaagccctataagctggaggtggacaactcgatgtaaatttcatgggaaaacccttgtacctgacatgtgagccactcagaactcaccaaaatgttcgacaccataacaacagctactcaaactgtaaaccaggataacaagttgatgacttcacactgtggacagtttttccaaagatgtcagaacaagactccccatcatgataaggctcccacccctcttaactgtccttgctcatgcctgcctctttcacttggcaggataatgcagtcattagaatttcacatgtagtagcttctgagggtaacaacagagtgtcagatatgtcatctcaacctcaaacttttacgtaacatctcaggggaaatgtggctctctccatcttgcatacagggctcccaatagaaatgaacacagagatattgcctgtgtgtttgcagagaagatggtttctataaagagtaggaaagctgaaattatagtagagtctcctttaaatgcacattgtgtggatggctctcaccatttcctaagagatacagtgtaaaacgtgacagtaatactgattctagcagaataaaacatgtaccacatttgctaaaaaaaaaaaaaacaacaaaaaaaaacc

SEQ ID NO: 732572 - DNA, 2072 bp, Homo sapiens
agggaaagaaggctctgttggagcctggataggggaaaatacaccagagggtcaaaataggaaagtcacattgaagcggaattggtaagtggtaggaaaatcttaagtgttctgttttcctgattaatcatcaggggccaccatattttgaaaaatgataacaataactatatcagatgacacttcaaatgaaaatataagcaggacatgaaacactgtcctcagcaagaaacctcaacaattggggggaaaaagaaacatccagagggtggagaccctgagaactctcacatctacaggagtctgccgcctgttccagcatcacttttaaacttctggaatccgcccacaactgcccaagtcacgattgaagcccagccacccaaagtttctgaggggaaggatgttcttctacttgtccacaatttgccccagaatcttgctggctacatttggtacaaagggcaaatgacatacctctaccattacattacatcatatgtagtagacggtcaaagaattatatatgggcctgcatacagtggaagagaaagagtatattccaatgcatccctgctgatccagaatgtcacgcaggaggatgcaggatcctacaccttacacatcataaagcgacgcgatgggactggaggagtaactggacatttcaccttcaccttacacctggagactcccaagccctccatctccagcagcaacttaaatcccagggaggccatggaggctgtgatcttaacctgtgatcctgcgactccagccgcaagctaccagtggtggatgaatggtcagagcctccctattgcaggaccctatgaatgtgaaatacggaacccagtgagtgccagccgcagtgacccagtcaccctgaatctcctcccaaagctgtccaagccctacatcacaatcaacaacttaaaccccagagagaataaggatgtcttaaccttcacctgtgaacctaagagtgagaactacacctacatttggtggctaaatggtcagagcctccctgtcagtcccagggtaaagcgacccattgaaaacaggatcctcattctacccaatgtcacgagaaatgaaacaggaccttatcaatgtgaaatacgggaccgatatggtggcatccgcagtgacccagtcaccctgaatgtcctcttcaggagaaaacctctacttgtcctgcttcgccgagtctaacccacgggcacaatattcttggacaattaatgggaagtttcagctatcaggacaaaagctctctatcccccaaataactacaaagcatagtgggctctatgcttgctctgttcgtaactcagccactggcaaggaaagctccaaatccatcacagtcaaagtctctgactggatattaccctgaattctactagttcctccaattccattttctcccatggaatcacgaagagcaagacccactctgttccagaagccctataagctggaggtggacaactcgatgtaaatttcatgggaaaacccttgtacctgacatgtgagccactcagaactcaccaaaatgttcgacaccataacaacagctactcaaactgtaaaccaggataacaagttgatgacttcacactgtggacagtttttccaaagatgtcagaacaagactccccatcatgataaggctcccacccctcttaactgtccttgctcatgcctgcctctttcacttggcaggataatgcagtcattagaatttcacatgtagtagcttctgagggtaacaacagagtgtcagatatgtcatctcaacctcaaacttttacgtaacatctcaggggaaatgtggctctctccatcttgcatacagggctcccaatagaaatgaacacagagatattgcctgtgtgtttgcagagaagatggtttctataaagagtaggaaagctgaaattatagtagagtctcctttaaatgcacattgtgtggatggctctcaccatttcctaagagatacagtgtaaaacgtgacagtaatactgattctagcagaataaaacatgtaccacatttgctaa

SEQ ID NO: 732573 - DNA, 1447 bp, Homo sapiens
agcacagaaggaggaaggacagcacacctgacagccctgctcaggaagtctctggatcctaggctcatctccacaggggagaacacacagacagcagagaccatgggacccctctcagcccctccctgcactcagcacatcacctggaaggggctcctgctcacagcatcacttttaaacttctggaacctgcccaccactgcccaagtaataattgaagccaagccacccaaagtttccgaggggaaggatgttcttctacttgtccacaatttgccccagaatcttactggctacatctggtacaaagggcaaatgacggacctctaccattacattacatcatatgtagtacacggtcaaattatatatgggcctgcctacagtggacgagaaacagtatattccaatgcatccctgctgatccagaatgtcacacaggaggatgcaggatcctacaccttacacatcataaagcgaggcgatgggactggaggagtaactggatatttcactgtcaccttatactcggagactcccaagccctccatctccagcagcaacttaaaccccagggaggtcatggaggctgtgcgcttaatctgtgatcctgagactccggatgcaagctacctgtggttgctgaatggtcagaacctccctatgactcacaggttgcagctgtccaaaaccaacaggaccctctatctatttggtgtcacaaagtatattgcaggaccctatgaatgtgaaatacggaacccagtgagtgccagccgcagtgacccagtcaccctgaatctcctcccgaagctgcccatgccttacatcaccatcaacaacttaaaccccagggagaagaaggatgtgttagccttcacctgtgaacctaagagtcggaactacacctacatttggtggctaaatggtcagagcctcccggtcagtccgagggtaaagcgacccattgaaaacaggatactcattctacccagtgtcacgagaaatgaaacaggaccctatcaatgtgaaatacgggaccgatatggtggcatccgcagtaacccagtcaccctgaatgtcctctatggtccagacctccccagaatttacccttcattcacctattaccgttcaggagaaaacctcgacttgtcctgctttgcggactctaacccaccggcagagtattcttggacaattaatgggaagtttcagctatcaggacaaaagctctttatcccccaaattactacaaatcatagcgggctctatgcttgctctgttcgtaactcagccactggcaaggaaatctccaaatccatgatagtcaaagtctctgagacagcatctccccaggttacctatgctggtccaaacacctggtttcaagaaatccttctgctgtgacctcccaaagtgctaggattaaaacatgacccaccat

SEQ ID NO: 732574 - DNA, 1168 bp, Homo sapiens
agcacagaaggaggaaggacagcacacctgacagccctgctcaggaagtctctggatcctaggctcatctccacaggggagaacacacagacagcagagaccatgggacccctctcagcccctccctgcactcagcacatcacctggaaggggctcctgctcacagcatcacttttaaacttctggaacctgcccaccactgcccaagtaataattgaagccaagccacccaaagtttccgaggggaaggatgttcttctacttgtccacaatttgccccagaatcttactggctacatctggtacaaagggcaaatgacggacctctaccattacattacatcatatgtagtacacggtcaaattatatatgggcctgcctacagtggacgagaaacagtatattccaatgcatccctgctgatccagaatgtcacacaggaggatgcaggatcctacaccttacacatcataaagcgaggcgatgggactggaggagtaactggatatttcactgtcaccttatactcggagactcccaagccctccatctccagcagcaacttaaaccccagggaggtcatggaggctgtgcgcttaatctgtgatcctgagactccggatgcaagctacctgtggttgctgaatggtcagaacctccctatgactcacaggttgcagctgtccaaaaccaacaggaccctctatctatttggtgtcacaaagtatattgcaggaccctatgaatgtgaaatacggaacccagtgagtgccagccgcagtgacccagtcaccctgaatctcctccatggtccagacctccccagaatttacccttcattcacctattaccgttcaggagaaaacctcgacttgtcctgctttgcggactctaacccaccggcagagtattcttggacaattaatgggaagtttcagctatcaggacaaaagctctttatcccccaaattactacaaatcatagcgggctctatgcttgctctgttcgtaactcagccactggcaaggaaatctccaaatccatgatagtcaaagtctctgagacagcatctccccaggttacctatgctggtccaaacacctggtttcaagaaatccttctgctgtgacctcccaaagtgctaggattaaaacatgacccaccat

SEQ ID NO: 732575 - DNA, 805 bp, Homo sapiens
agcacagaaggaggaaggacagcacacctgacagccctgctcaggaagtctctggatcctaggctcatctccacaggggagaacacacagacagcagagaccatgggacccctctcagcccctccctgcactcagcacatcacctggaaggggctcctgctcacagcggagactcccaagccctccatctccagcagcaacttaaaccccagggaggtcatggaggctgtgcgcttaatctgtgatcctgagactccggatgcaagctacctgtggttgctgaatggtcagaacctccctatgactcacaggttgcagctgtccaaaaccaacaggaccctctatctatttggtgtcacaaagtatattgcaggaccctatgaatgtgaaatacggaacccagtgagtgccagccgcagtgacccagtcaccctgaatctcctccatggtccagacctccccagaatttacccttcattcacctattaccgttcaggagaaaacctcgacttgtcctgctttgcggactctaacccaccggcagagtattcttggacaattaatgggaagtttcagctatcaggacaaaagctctttatcccccaaattactacaaatcatagcgggctctatgcttgctctgttcgtaactcagccactggcaaggaaatctccaaatccatgatagtcaaagtctctgagacagcatctccccaggttacctatgctggtccaaacacctggtttcaagaaatccttctgctgtgacctcccaaagtgctaggattaaaacatgacccaccat

SEQ ID NO: 732576 - DNA, 1847 bp, Homo sapiens
  misc_feature (1689)..(1689): n is a, c, g, or t
  misc_feature (1691)..(1691): n is a, c, g, or t
  misc_feature (1697)..(1699): n is a, c, g, or t
atattaactgatgctgtctctaccacacatcacttttaaacttctggaacctgcccaccactgcccaagtaataattgaagccaagccacccaaagtttccgaggggaaggatgttcttctacttgtccacaatttgccccagaatcttactggctacatctggtacaaagggcaaatgacggacctctaccattacattacatcatatgtagtacacggtcaaattatatatgggcctgcctacagtggacgagaaacagtatattccaatgcatccctgctgatccagaatgtcacacaggaggatgcaggatcctacaccttacacatcataaagcgaggcgatgggactggaggagtaactggatatttcactgtcaccttatactatgtgggacaactacaaaggctgtcacatacacttaacgggaatacttgtggtttggggaccagatggaggtggccagcggagactcccaagccctccatctccagcagcaacttaaaccccagggaggtcatggaggctgtgcgcttaatctgtgatcctgagactccggatgcaagctacctgtggttgctgaatggtcagaacctccctatgactcacaggttgcagctgtccaaaaccaacaggaccctctatctatttggtgtcacaaagtatattgcaggaccctatgaatgtgaaatacggaacccagtgagtgccagccgcagtgacccagtcaccctgaatctcctcccgaagctgcccatgccttacatcaccatcaacaacttaaaccccagggagaagaaggatgtgttagccttcacctgtgaacctaagagtcggaactacacctacatttggtggctaaatggtcagagcctcccggtcagtccgagggtaaagcgacccattgaaaacaggatactcattctacccagtgtcacgagaaatgaaacaggaccctatcaatgtgaaatacgggaccgatatggtggcatccgcagtaacccagtcaccctgaatgtcctctatggtccagacctccccagaatttacccttcattcacctattaccgttcaggagaaaacctcgacttgtcctgctttgcggactctaacccaccggcagagtattcttggacaattaatgggaagtttcagctatcaggacaaaagctctttatcccccaaattactacaaatcatagcgggctctatgcttgctctgttcgtaactcagccactggcaaggaaatctccaaatccatgatagtcaaagtctctggtccctgccatggaaaccagacagagtctcattaatggctgccacaatagagacactgagaaaaagaacaggttgataccttcatgaaattcaagacaaagaagaaaaaaactcaatgttattggactaaataatcaaaaggataatgttttcataattttttattggaaaatgtgctgattcttggaatgttttattctccagatttatgaactttttttcttcagcaattggtaaagtatacttttgtaaacaaaaattgaaacatttgcttttgctctctatctgagtgccccagaattgggaaactattcatgagtattcataggtttatggtaataaagttatttgcacaagttcaaaaaaaaaaaaaaaaaaacaaaaaaaaacagttgttggggcggcctngnggcccnnngaaaaagcttttctgagaacacattgctttgggacgccgcggggccccagtagggtcacggcggaacagtgggcgccacaacggtgtgttcctcagaggagaatcggggccaagagacataagggccgggggtttctcccataagaaa

SEQ ID NO: 732577 - DNA, 3122 bp, Homo sapiens
  misc_feature (2964)..(2964): n is a, c, g, or t
  misc_feature (2966)..(2966): n is a, c, g, or t
  misc_feature (2972)..(2974): n is a, c, g, or t
atattaactgatgctgtctctaccacacatcacttttaaacttctggaacctgcccaccactgcccaagtaataattgaagccaagccacccaaagtttccgaggggaaggatgttcttctacttgtccacaatttgccccagaatcttactggctacatctggtacaaagggcaaatgacggacctctaccattacattacatcatatgtagtacacggtcaaattatatatgggcctgcctacagtggacgagaaacagtatattccaatgcatccctgctgatccagaatgtcacacaggaggatgcaggatcctacaccttacacatcataaagcgaggcgatgggactggaggagtaactggatatttcactgtcaccttatactatgtgggacaactacaaaggctgtcacatacacttaacgggaatacttgtggtttggggaccagatggaggtggccagcggagactcccaagccctccatctccagcagcaacttaaaccccagggaggtcatggaggctgtgcgcttaatctgtgatcctgagactccggatgcaagctacctgtggttgctgaatggtcagaacctccctatgactcacaggttgcagctgtccaaaaccaacaggaccctctatctatttggtgtcacaaagtatattgcaggaccctatgaatgtgaaatacggaacccagtgagtgccagccgcagtgacccagtcaccctgaatctcctcccgaagctgcccatgccttacatcaccatcaacaacttaaaccccagggagaagaaggatgtgttagccttcacctgtgaacctaagagtcggaactacacctacatttggtggctaaatggtcagagcctcccggtcagtccgagggtaaagcgacccattgaaaacaggatactcattctacccagtgtcacgagaaatgaaacaggaccctatcaatgtgaaatacgggaccgatatggtggcatccgcagtaacccagtcaccctgaatgtcctctatggtccagacctccccagaatttacccttcattcacctattaccgttcaggagaaaacctcgacttgtcctgctttgcggactctaacccaccggcagagtattcttggacaattaatgggaagtttcagctatcaggacaaaagctctttatcccccaaattactacaaatcatagcgggctctatgcttgctctgttcgtaactcagccactggcaaggaaatctccaaatccatgatagtcaaagtctctgagacagcatctccccaggttacctatgctggtccaaacacctggtttcaagaaatccttctgctgtgacctcccaaagtgctaggattaaaacatgacccaccatgctcagagtccattttcatttatgatttgagtaattttatcttttctctttttttcttagccaatctagttaatggttgtcaattttgttgattttattttgaagaatcaacttttggtttcagtaatttcctctattctgtttccattctccattttatttatatccaccctaatacttattatttccctcattcactgtgcttgggtttagtttgttcttctttcgtatcctgaagtattaaagtaggttgttgacctgagctctttcttcttttttaatgtaagagtttacagttataaatttcttgcacaagactcaacttctctgaacccctgattcctcacctgaaaattgcaataagagtactttcttcataccattcttttaaaggtttaatgcagtcaatgaaacaagatgccacacaaagaggaaccaatgtcagctgctatattactaccatcatcattagccttgaggtcaaatagtcctagaatcaaatctcagatccacctgtcactagccatatgacaccaggaaagtttttacaccatgctaagcttctgtcttttcatcagcaaaatggaaataatgcctacctgacagggttattgtgtggattaaatgagatacaggtaaagtattgagcacagggcctggcacatagaaagtgcacctcaacagtacctacctttttccatagatatgaaaaaagcggtaacacataaaacactaggacatggttactgactaattgtgggagagaaagaaaaaaagctaagtgcaaagaatcaagtctggtatgttagtttttaccaactgagatgcatccaagatgggattagacatacaagataatttatcagggaagacacctgtgagggaatgtggggcaggcatgaaggtagtatgggagaacccacagaccgctatgcagagctgattcctgtgaaaaagaaagagaaagaagttttaggtaccaatgcagttctaagagtttttgcaaggctgatgaggaatcctccaaccagtcacccattggagttaaagagagcctcggagaactagacttgctttcacacccttgctgggagcctgtgggaaagaagctttctctgtaaaggaggtagtgaatttgaaatgcgctgacctgggccttctgtcaatcaggtccctgccatggaaaccagacagagtctcattaatggctgccacaatagagacactgagaaaaagaacaggttgataccttcatgaaattcaagacaaagaagaaaaaaactcaatgttattggactaaataatcaaaaggataatgttttcataattttttattggaaaatgtgctgattcttggaatgttttattctccagatttatgaactttttttcttcagcaattggtaaagtatacttttgtaaacaaaaattgaaacatttgcttttgctctctatctgagtgccccagaattgggaaactattcatgagtattcataggtttatggtaataaagttatttgcacaagttcaaaaaaaaaaaaaaaaaaacaaaaaaaaacagttgttggggcggcctngnggcccnnngaaaaagcttttctgagaacacattgctttgggacgccgcggggccccagtagggtcacggcggaacagtgggcgccacaacggtgtgttcctcagaggagaatcggggccaagagacataagggccgggggtttctcccataagaaa

SEQ ID NO: 732578 - DNA, 1568 bp, Homo sapiens
  misc_feature (1410)..(1410): n is a, c, g, or t
  misc_feature (1412)..(1412): n is a, c, g, or t
  misc_feature (1418)..(1420): n is a, c, g, or t
atattaactgatgctgtctctaccacacatcacttttaaacttctggaacctgcccaccactgcccaagtaataattgaagccaagccacccaaagtttccgaggggaaggatgttcttctacttgtccacaatttgccccagaatcttactggctacatctggtacaaagggcaaatgacggacctctaccattacattacatcatatgtagtacacggtcaaattatatatgggcctgcctacagtggacgagaaacagtatattccaatgcatccctgctgatccagaatgtcacacaggaggatgcaggatcctacaccttacacatcataaagcgaggcgatgggactggaggagtaactggatatttcactgtcaccttatactatgtgggacaactacaaaggctgtcacatacacttaacgggaatacttgtggtttggggaccagatggaggtggccagcggagactcccaagccctccatctccagcagcaacttaaaccccagggaggtcatggaggctgtgcgcttaatctgtgatcctgagactccggatgcaagctacctgtggttgctgaatggtcagaacctccctatgactcacaggttgcagctgtccaaaaccaacaggaccctctatctatttggtgtcacaaagtatattgcaggaccctatgaatgtgaaatacggaacccagtgagtgccagccgcagtgacccagtcaccctgaatctcctccatggtccagacctccccagaatttacccttcattcacctattaccgttcaggagaaaacctcgacttgtcctgctttgcggactctaacccaccggcagagtattcttggacaattaatgggaagtttcagctatcaggacaaaagctctttatcccccaaattactacaaatcatagcgggctctatgcttgctctgttcgtaactcagccactggcaaggaaatctccaaatccatgatagtcaaagtctctggtccctgccatggaaaccagacagagtctcattaatggctgccacaatagagacactgagaaaaagaacaggttgataccttcatgaaattcaagacaaagaagaaaaaaactcaatgttattggactaaataatcaaaaggataatgttttcataattttttattggaaaatgtgctgattcttggaatgttttattctccagatttatgaactttttttcttcagcaattggtaaagtatacttttgtaaacaaaaattgaaacatttgcttttgctctctatctgagtgccccagaattgggaaactattcatgagtattcataggtttatggtaataaagttatttgcacaagttcaaaaaaaaaaaaaaaaaaacaaaaaaaaacagttgttggggcggcctngnggcccnnngaaaaagcttttctgagaacacattgctttgggacgccgcggggccccagtagggtcacggcggaacagtgggcgccacaacggtgtgttcctcagaggagaatcggggccaagagacataagggccgggggtttctcccataagaaa

SEQ ID NO: 732579 - DNA, 2843 bp, Homo sapiens
  misc_feature (2685)..(2685): n is a, c, g, or t
  misc_feature (2687)..(2687): n is a, c, g, or t
  misc_feature (2693)..(2695): n is a, c, g, or t
atattaactgatgctgtctctaccacacatcacttttaaacttctggaacctgcccaccactgcccaagtaataattgaagccaagccacccaaagtttccgaggggaaggatgttcttctacttgtccacaatttgccccagaatcttactggctacatctggtacaaagggcaaatgacggacctctaccattacattacatcatatgtagtacacggtcaaattatatatgggcctgcctacagtggacgagaaacagtatattccaatgcatccctgctgatccagaatgtcacacaggaggatgcaggatcctacaccttacacatcataaagcgaggcgatgggactggaggagtaactggatatttcactgtcaccttatactatgtgggacaactacaaaggctgtcacatacacttaacgggaatacttgtggtttggggaccagatggaggtggccagcggagactcccaagccctccatctccagcagcaacttaaaccccagggaggtcatggaggctgtgcgcttaatctgtgatcctgagactccggatgcaagctacctgtggttgctgaatggtcagaacctccctatgactcacaggttgcagctgtccaaaaccaacaggaccctctatctatttggtgtcacaaagtatattgcaggaccctatgaatgtgaaatacggaacccagtgagtgccagccgcagtgacccagtcaccctgaatctcctccatggtccagacctccccagaatttacccttcattcacctattaccgttcaggagaaaacctcgacttgtcctgctttgcggactctaacccaccggcagagtattcttggacaattaatgggaagtttcagctatcaggacaaaagctctttatcccccaaattactacaaatcatagcgggctctatgcttgctctgttcgtaactcagccactggcaaggaaatctccaaatccatgatagtcaaagtctctgagacagcatctccccaggttacctatgctggtccaaacacctggtttcaagaaatccttctgctgtgacctcccaaagtgctaggattaaaacatgacccaccatgctcagagtccattttcatttatgatttgagtaattttatcttttctctttttttcttagccaatctagttaatggttgtcaattttgttgattttattttgaagaatcaacttttggtttcagtaatttcctctattctgtttccattctccattttatttatatccaccctaatacttattatttccctcattcactgtgcttgggtttagtttgttcttctttcgtatcctgaagtattaaagtaggttgttgacctgagctctttcttcttttttaatgtaagagtttacagttataaatttcttgcacaagactcaacttctctgaacccctgattcctcacctgaaaattgcaataagagtactttcttcataccattcttttaaaggtttaatgcagtcaatgaaacaagatgccacacaaagaggaaccaatgtcagctgctatattactaccatcatcattagccttgaggtcaaatagtcctagaatcaaatctcagatccacctgtcactagccatatgacaccaggaaagtttttacaccatgctaagcttctgtcttttcatcagcaaaatggaaataatgcctacctgacagggttattgtgtggattaaatgagatacaggtaaagtattgagcacagggcctggcacatagaaagtgcacctcaacagtacctacctttttccatagatatgaaaaaagcggtaacacataaaacactaggacatggttactgactaattgtgggagagaaagaaaaaaagctaagtgcaaagaatcaagtctggtatgttagtttttaccaactgagatgcatccaagatgggattagacatacaagataatttatcagggaagacacctgtgagggaatgtggggcaggcatgaaggtagtatgggagaacccacagaccgctatgcagagctgattcctgtgaaaaagaaagagaaagaagttttaggtaccaatgcagttctaagagtttttgcaaggctgatgaggaatcctccaaccagtcacccattggagttaaagagagcctcggagaactagacttgctttcacacccttgctgggagcctgtgggaaagaagctttctctgtaaaggaggtagtgaatttgaaatgcgctgacctgggccttctgtcaatcaggtccctgccatggaaaccagacagagtctcattaatggctgccacaatagagacactgagaaaaagaacaggttgataccttcatgaaattcaagacaaagaagaaaaaaactcaatgttattggactaaataatcaaaaggataatgttttcataattttttattggaaaatgtgctgattcttggaatgttttattctccagatttatgaactttttttcttcagcaattggtaaagtatacttttgtaaacaaaaattgaaacatttgcttttgctctctatctgagtgccccagaattgggaaactattcatgagtattcataggtttatggtaataaagttatttgcacaagttcaaaaaaaaaaaaaaaaaaacaaaaaaaaacagttgttggggcggcctngnggcccnnngaaaaagcttttctgagaacacattgctttgggacgccgcggggccccagtagggtcacggcggaacagtgggcgccacaacggtgtgttcctcagaggagaatcggggccaagagacataagggccgggggtttctcccataagaaa

SEQ ID NO: 732580 - DNA, 1107 bp, Homo sapiens
atattaactgatgctgtctctaccacacatcacttttaaacttctggaacctgcccaccactgcccaagtaataattgaagccaagccacccaaagtttccgaggggaaggatgttcttctacttgtccacaatttgccccagaatcttactggctacatctggtacaaagggcaaatgacggacctctaccattacattacatcatatgtagtacacggtcaaattatatatgggcctgcctacagtggacgagaaacagtatattccaatgcatccctgctgatccagaatgtcacacaggaggatgcaggatcctacaccttacacatcataaagcgaggcgatgggactggaggagtaactggatatttcactgtcaccttatactatgtgggacaactacaaaggctgtcacatacacttaacgggaatacttgtggtttggggaccagatggaggtggccagcggagactcccaagccctccatctccagcagcaacttaaaccccagggaggtcatggaggctgtgcgcttaatctgtgatcctgagactccggatgcaagctacctgtggttgctgaatggtcagaacctccctatgactcacaggttgcagctgtccaaaaccaacaggaccctctatctatttggtgtcacaaagtatattgcaggaccctatgaatgtgaaatacggaacccagtgagtgccagccgcagtgacccagtcaccctgaatctcctccatggtccagacctccccagaatttacccttcattcacctattaccgttcaggagaaaacctcgacttgtcctgctttgcggactctaacccaccggcagagtattcttggacaattaatgggaagtttcagctatcaggacaaaagctctttatcccccaaattactacaaatcatagcgggctctatgcttgctctgttcgtaactcagccactggcaaggaaatctccaaatccatgatagtcaaagtctctgagacagcatctccccaggttacctatgctggtccaaacacctggtttcaagaaatccttctgctgtgacctcccaaagtgctaggattaaaacatgacccaccat

SEQ ID NO: 732581 - DNA, 1769 bp, Homo sapiens
  misc_feature (1611)..(1611): n is a, c, g, or t
  misc_feature (1613)..(1613): n is a, c, g, or t
  misc_feature (1619)..(1621): n is a, c, g, or t
atattaactgatgctgtctctaccacacatcacttttaaacttctggaacctgcccaccactgcccaagtaataattgaagccaagccacccaaagtttccgaggggaaggatgttcttctacttgtccacaatttgccccagaatcttactggctacatctggtacaaagggcaaatgacggacctctaccattacattacatcatatgtagtacacggtcaaattatatatgggcctgcctacagtggacgagaaacagtatattccaatgcatccctgctgatccagaatgtcacacaggaggatgcaggatcctacaccttacacatcataaagcgaggcgatgggactggaggagtaactggatatttcactgtcaccttatactcggagactcccaagccctccatctccagcagcaacttaaaccccagggaggtcatggaggctgtgcgcttaatctgtgatcctgagactccggatgcaagctacctgtggttgctgaatggtcagaacctccctatgactcacaggttgcagctgtccaaaaccaacaggaccctctatctatttggtgtcacaaagtatattgcaggaccctatgaatgtgaaatacggaacccagtgagtgccagccgcagtgacccagtcaccctgaatctcctcccgaagctgcccatgccttacatcaccatcaacaacttaaaccccagggagaagaaggatgtgttagccttcacctgtgaacctaagagtcggaactacacctacatttggtggctaaatggtcagagcctcccggtcagtccgagggtaaagcgacccattgaaaacaggatactcattctacccagtgtcacgagaaatgaaacaggaccctatcaatgtgaaatacgggaccgatatggtggcatccgcagtaacccagtcaccctgaatgtcctctatggtccagacctccccagaatttacccttcattcacctattaccgttcaggagaaaacctcgacttgtcctgctttgcggactctaacccaccggcagagtattcttggacaattaatgggaagtttcagctatcaggacaaaagctctttatcccccaaattactacaaatcatagcgggctctatgcttgctctgttcgtaactcagccactggcaaggaaatctccaaatccatgatagtcaaagtctctggtccctgccatggaaaccagacagagtctcattaatggctgccacaatagagacactgagaaaaagaacaggttgataccttcatgaaattcaagacaaagaagaaaaaaactcaatgttattggactaaataatcaaaaggataatgttttcataattttttattggaaaatgtgctgattcttggaatgttttattctccagatttatgaactttttttcttcagcaattggtaaagtatacttttgtaaacaaaaattgaaacatttgcttttgctctctatctgagtgccccagaattgggaaactattcatgagtattcataggtttatggtaataaagttatttgcacaagttcaaaaaaaaaaaaaaaaaaacaaaaaaaaacagttgttggggcggcctngnggcccnnngaaaaagcttttctgagaacacattgctttgggacgccgcggggccccagtagggtcacggcggaacagtgggcgccacaacggtgtgttcctcagaggagaatcggggccaagagacataagggccgggggtttctcccataagaaa

SEQ ID NO: 732582 - DNA, 3044 bp, Homo sapiens
  misc_feature (2886)..(2886): n is a, c, g, or t
  misc_feature (2888)..(2888): n is a, c, g, or t
  misc_feature (2894)..(2896): n is a, c, g, or t
atattaactgatgctgtctctaccacacatcacttttaaacttctggaacctgcccaccactgcccaagtaataattgaagccaagccacccaaagtttccgaggggaaggatgttcttctacttgtccacaatttgccccagaatcttactggctacatctggtacaaagggcaaatgacggacctctaccattacattacatcatatgtagtacacggtcaaattatatatgggcctgcctacagtggacgagaaacagtatattccaatgcatccctgctgatccagaatgtcacacaggaggatgcaggatcctacaccttacacatcataaagcgaggcgatgggactggaggagtaactggatatttcactgtcaccttatactcggagactcccaagccctccatctccagcagcaacttaaaccccagggaggtcatggaggctgtgcgcttaatctgtgatcctgagactccggatgcaagctacctgtggttgctgaatggtcagaacctccctatgactcacaggttgcagctgtccaaaaccaacaggaccctctatctatttggtgtcacaaagtatattgcaggaccctatgaatgtgaaatacggaacccagtgagtgccagccgcagtgacccagtcaccctgaatctcctcccgaagctgcccatgccttacatcaccatcaacaacttaaaccccagggagaagaaggatgtgttagccttcacctgtgaacctaagagtcggaactacacctacatttggtggctaaatggtcagagcctcccggtcagtccgagggtaaagcgacccattgaaaacaggatactcattctacccagtgtcacgagaaatgaaacaggaccctatcaatgtgaaatacgggaccgatatggtggcatccgcagtaacccagtcaccctgaatgtcctctatggtccagacctccccagaatttacccttcattcacctattaccgttcaggagaaaacctcgacttgtcctgctttgcggactctaacccaccggcagagtattcttggacaattaatgggaagtttcagctatcaggacaaaagctctttatcccccaaattactacaaatcatagcgggctctatgcttgctctgttcgtaactcagccactggcaaggaaatctccaaatccatgatagtcaaagtctctgagacagcatctccccaggttacctatgctggtccaaacacctggtttcaagaaatccttctgctgtgacctcccaaagtgctaggattaaaacatgacccaccatgctcagagtccattttcatttatgatttgagtaattttatcttttctctttttttcttagccaatctagttaatggttgtcaattttgttgattttattttgaagaatcaacttttggtttcagtaatttcctctattctgtttccattctccattttatttatatccaccctaatacttattatttccctcattcactgtgcttgggtttagtttgttcttctttcgtatcctgaagtattaaagtaggttgttgacctgagctctttcttcttttttaatgtaagagtttacagttataaatttcttgcacaagactcaacttctctgaacccctgattcctcacctgaaaattgcaataagagtactttcttcataccattcttttaaaggtttaatgcagtcaatgaaacaagatgccacacaaagaggaaccaatgtcagctgctatattactaccatcatcattagccttgaggtcaaatagtcctagaatcaaatctcagatccacctgtcactagccatatgacaccaggaaagtttttacaccatgctaagcttctgtcttttcatcagcaaaatggaaataatgcctacctgacagggttattgtgtggattaaatgagatacaggtaaagtattgagcacagggcctggcacatagaaagtgcacctcaacagtacctacctttttccatagatatgaaaaaagcggtaacacataaaacactaggacatggttactgactaattgtgggagagaaagaaaaaaagctaagtgcaaagaatcaagtctggtatgttagtttttaccaactgagatgcatccaagatgggattagacatacaagataatttatcagggaagacacctgtgagggaatgtggggcaggcatgaaggtagtatgggagaacccacagaccgctatgcagagctgattcctgtgaaaaagaaagagaaagaagttttaggtaccaatgcagttctaagagtttttgcaaggctgatgaggaatcctccaaccagtcacccattggagttaaagagagcctcggagaactagacttgctttcacacccttgctgggagcctgtgggaaagaagctttctctgtaaaggaggtagtgaatttgaaatgcgctgacctgggccttctgtcaatcaggtccctgccatggaaaccagacagagtctcattaatggctgccacaatagagacactgagaaaaagaacaggttgataccttcatgaaattcaagacaaagaagaaaaaaactcaatgttattggactaaataatcaaaaggataatgttttcataattttttattggaaaatgtgctgattcttggaatgttttattctccagatttatgaactttttttcttcagcaattggtaaagtatacttttgtaaacaaaaattgaaacatttgcttttgctctctatctgagtgccccagaattgggaaactattcatgagtattcataggtttatggtaataaagttatttgcacaagttcaaaaaaaaaaaaaaaaaaacaaaaaaaaacagttgttggggcggcctngnggcccnnngaaaaagcttttctgagaacacattgctttgggacgccgcggggccccagtagggtcacggcggaacagtgggcgccacaacggtgtgttcctcagaggagaatcggggccaagagacataagggccgggggtttctcccataagaaa

SEQ ID NO: 732583 - DNA, 1490 bp, Homo sapiens
  misc_feature (1332)..(1332): n is a, c, g, or t
  misc_feature (1334)..(1334): n is a, c, g, or t
  misc_feature (1340)..(1342): n is a, c, g, or t
atattaactgatgctgtctctaccacacatcacttttaaacttctggaacctgcccaccactgcccaagtaataattgaagccaagccacccaaagtttccgaggggaaggatgttcttctacttgtccacaatttgccccagaatcttactggctacatctggtacaaagggcaaatgacggacctctaccattacattacatcatatgtagtacacggtcaaattatatatgggcctgcctacagtggacgagaaacagtatattccaatgcatccctgctgatccagaatgtcacacaggaggatgcaggatcctacaccttacacatcataaagcgaggcgatgggactggaggagtaactggatatttcactgtcaccttatactcggagactcccaagccctccatctccagcagcaacttaaaccccagggaggtcatggaggctgtgcgcttaatctgtgatcctgagactccggatgcaagctacctgtggttgctgaatggtcagaacctccctatgactcacaggttgcagctgtccaaaaccaacaggaccctctatctatttggtgtcacaaagtatattgcaggaccctatgaatgtgaaatacggaacccagtgagtgccagccgcagtgacccagtcaccctgaatctcctccatggtccagacctccccagaatttacccttcattcacctattaccgttcaggagaaaacctcgacttgtcctgctttgcggactctaacccaccggcagagtattcttggacaattaatgggaagtttcagctatcaggacaaaagctctttatcccccaaattactacaaatcatagcgggctctatgcttgctctgttcgtaactcagccactggcaaggaaatctccaaatccatgatagtcaaagtctctggtccctgccatggaaaccagacagagtctcattaatggctgccacaatagagacactgagaaaaagaacaggttgataccttcatgaaattcaagacaaagaagaaaaaaactcaatgttattggactaaataatcaaaaggataatgttttcataattttttattggaaaatgtgctgattcttggaatgttttattctccagatttatgaactttttttcttcagcaattggtaaagtatacttttgtaaacaaaaattgaaacatttgcttttgctctctatctgagtgccccagaattgggaaactattcatgagtattcataggtttatggtaataaagttatttgcacaagttcaaaaaaaaaaaaaaaaaaacaaaaaaaaacagttgttggggcggcctngnggcccnnngaaaaagcttttctgagaacacattgctttgggacgccgcggggccccagtagggtcacggcggaacagtgggcgccacaacggtgtgttcctcagaggagaatcggggccaagagacataagggccgggggtttctcccataagaaa

SEQ ID NO: 732584 - DNA, 2765 bp, Homo sapiens
  misc_feature (2607)..(2607): n is a, c, g, or t
  misc_feature (2609)..(2609): n is a, c, g, or t
  misc_feature (2615)..(2617): n is a, c, g, or t
atattaactgatgctgtctctaccacacatcacttttaaacttctggaacctgcccaccactgcccaagtaataattgaagccaagccacccaaagtttccgaggggaaggatgttcttctacttgtccacaatttgccccagaatcttactggctacatctggtacaaagggcaaatgacggacctctaccattacattacatcatatgtagtacacggtcaaattatatatgggcctgcctacagtggacgagaaacagtatattccaatgcatccctgctgatccagaatgtcacacaggaggatgcaggatcctacaccttacacatcataaagcgaggcgatgggactggaggagtaactggatatttcactgtcaccttatactcggagactcccaagccctccatctccagcagcaacttaaaccccagggaggtcatggaggctgtgcgcttaatctgtgatcctgagactccggatgcaagctacctgtggttgctgaatggtcagaacctccctatgactcacaggttgcagctgtccaaaaccaacaggaccctctatctatttggtgtcacaaagtatattgcaggaccctatgaatgtgaaatacggaacccagtgagtgccagccgcagtgacccagtcaccctgaatctcctccatggtccagacctccccagaatttacccttcattcacctattaccgttcaggagaaaacctcgacttgtcctgctttgcggactctaacccaccggcagagtattcttggacaattaatgggaagtttcagctatcaggacaaaagctctttatcccccaaattactacaaatcatagcgggctctatgcttgctctgttcgtaactcagccactggcaaggaaatctccaaatccatgatagtcaaagtctctgagacagcatctccccaggttacctatgctggtccaaacacctggtttcaagaaatccttctgctgtgacctcccaaagtgctaggattaaaacatgacccaccatgctcagagtccattttcatttatgatttgagtaattttatcttttctctttttttcttagccaatctagttaatggttgtcaattttgttgattttattttgaagaatcaacttttggtttcagtaatttcctctattctgtttccattctccattttatttatatccaccctaatacttattatttccctcattcactgtgcttgggtttagtttgttcttctttcgtatcctgaagtattaaagtaggttgttgacctgagctctttcttcttttttaatgtaagagtttacagttataaatttcttgcacaagactcaacttctctgaacccctgattcctcacctgaaaattgcaataagagtactttcttcataccattcttttaaaggtttaatgcagtcaatgaaacaagatgccacacaaagaggaaccaatgtcagctgctatattactaccatcatcattagccttgaggtcaaatagtcctagaatcaaatctcagatccacctgtcactagccatatgacaccaggaaagtttttacaccatgctaagcttctgtcttttcatcagcaaaatggaaataatgcctacctgacagggttattgtgtggattaaatgagatacaggtaaagtattgagcacagggcctggcacatagaaagtgcacctcaacagtacctacctttttccatagatatgaaaaaagcggtaacacataaaacactaggacatggttactgactaattgtgggagagaaagaaaaaaagctaagtgcaaagaatcaagtctggtatgttagtttttaccaactgagatgcatccaagatgggattagacatacaagataatttatcagggaagacacctgtgagggaatgtggggcaggcatgaaggtagtatgggagaacccacagaccgctatgcagagctgattcctgtgaaaaagaaagagaaagaagttttaggtaccaatgcagttctaagagtttttgcaaggctgatgaggaatcctccaaccagtcacccattggagttaaagagagcctcggagaactagacttgctttcacacccttgctgggagcctgtgggaaagaagctttctctgtaaaggaggtagtgaatttgaaatgcgctgacctgggccttctgtcaatcaggtccctgccatggaaaccagacagagtctcattaatggctgccacaatagagacactgagaaaaagaacaggttgataccttcatgaaattcaagacaaagaagaaaaaaactcaatgttattggactaaataatcaaaaggataatgttttcataattttttattggaaaatgtgctgattcttggaatgttttattctccagatttatgaactttttttcttcagcaattggtaaagtatacttttgtaaacaaaaattgaaacatttgcttttgctctctatctgagtgccccagaattgggaaactattcatgagtattcataggtttatggtaataaagttatttgcacaagttcaaaaaaaaaaaaaaaaaaacaaaaaaaaacagttgttggggcggcctngnggcccnnngaaaaagcttttctgagaacacattgctttgggacgccgcggggccccagtagggtcacggcggaacagtgggcgccacaacggtgtgttcctcagaggagaatcggggccaagagacataagggccgggggtttctcccataagaaa

SEQ ID NO: 732585 - DNA, 1029 bp, Homo sapiens
atattaactgatgctgtctctaccacacatcacttttaaacttctggaacctgcccaccactgcccaagtaataattgaagccaagccacccaaagtttccgaggggaaggatgttcttctacttgtccacaatttgccccagaatcttactggctacatctggtacaaagggcaaatgacggacctctaccattacattacatcatatgtagtacacggtcaaattatatatgggcctgcctacagtggacgagaaacagtatattccaatgcatccctgctgatccagaatgtcacacaggaggatgcaggatcctacaccttacacatcataaagcgaggcgatgggactggaggagtaactggatatttcactgtcaccttatactcggagactcccaagccctccatctccagcagcaacttaaaccccagggaggtcatggaggctgtgcgcttaatctgtgatcctgagactccggatgcaagctacctgtggttgctgaatggtcagaacctccctatgactcacaggttgcagctgtccaaaaccaacaggaccctctatctatttggtgtcacaaagtatattgcaggaccctatgaatgtgaaatacggaacccagtgagtgccagccgcagtgacccagtcaccctgaatctcctccatggtccagacctccccagaatttacccttcattcacctattaccgttcaggagaaaacctcgacttgtcctgctttgcggactctaacccaccggcagagtattcttggacaattaatgggaagtttcagctatcaggacaaaagctctttatcccccaaattactacaaatcatagcgggctctatgcttgctctgttcgtaactcagccactggcaaggaaatctccaaatccatgatagtcaaagtctctgagacagcatctccccaggttacctatgctggtccaaacacctggtttcaagaaatccttctgctgtgacctcccaaagtgctaggattaaaacatgacccaccat

SEQ ID NO: 732586 - DNA, 1908 bp, Homo sapiens
  misc_feature (1750)..(1750): n is a, c, g, or t
  misc_feature (1752)..(1752): n is a, c, g, or t
  misc_feature (1758)..(1760): n is a, c, g, or t
agcacagaaggaggaaggacagcacacctgacagccctgctcaggaagtctctggatcctaggctcatctccacaggggagaacacacagacagcagagaccatgggacccctctcagcccctccctgcactcagcacatcacctggaaggggctcctgctcacagcatcacttttaaacttctggaacctgcccaccactgcccaagtaataattgaagccaagccacccaaagtttccgaggggaaggatgttcttctacttgtccacaatttgccccagaatcttactggctacatctggtacaaagggcaaatgacggacctctaccattacattacatcatatgtagtacacggtcaaattatatatgggcctgcctacagtggacgagaaacagtatattccaatgcatccctgctgatccagaatgtcacacaggaggatgcaggatcctacaccttacacatcataaagcgaggcgatgggactggaggagtaactggatatttcactgtcaccttatactcggagactcccaagccctccatctccagcagcaacttaaaccccagggaggtcatggaggctgtgcgcttaatctgtgatcctgagactccggatgcaagctacctgtggttgctgaatggtcagaacctccctatgactcacaggttgcagctgtccaaaaccaacaggaccctctatctatttggtgtcacaaagtatattgcaggaccctatgaatgtgaaatacggaacccagtgagtgccagccgcagtgacccagtcaccctgaatctcctcccgaagctgcccatgccttacatcaccatcaacaacttaaaccccagggagaagaaggatgtgttagccttcacctgtgaacctaagagtcggaactacacctacatttggtggctaaatggtcagagcctcccggtcagtccgagggtaaagcgacccattgaaaacaggatactcattctacccagtgtcacgagaaatgaaacaggaccctatcaatgtgaaatacgggaccgatatggtggcatccgcagtaacccagtcaccctgaatgtcctctatggtccagacctccccagaatttacccttcattcacctattaccgttcaggagaaaacctcgacttgtcctgctttgcggactctaacccaccggcagagtattcttggacaattaatgggaagtttcagctatcaggacaaaagctctttatcccccaaattactacaaatcatagcgggctctatgcttgctctgttcgtaactcagccactggcaaggaaatctccaaatccatgatagtcaaagtctctggtccctgccatggaaaccagacagagtctcattaatggctgccacaatagagacactgagaaaaagaacaggttgataccttcatgaaattcaagacaaagaagaaaaaaactcaatgttattggactaaataatcaaaaggataatgttttcataattttttattggaaaatgtgctgattcttggaatgttttattctccagatttatgaactttttttcttcagcaattggtaaagtatacttttgtaaacaaaaattgaaacatttgcttttgctctctatctgagtgccccagaattgggaaactattcatgagtattcataggtttatggtaataaagttatttgcacaagttcaaaaaaaaaaaaaaaaaaacaaaaaaaaacagttgttggggcggcctngnggcccnnngaaaaagcttttctgagaacacattgctttgggacgccgcggggccccagtagggtcacggcggaacagtgggcgccacaacggtgtgttcctcagaggagaatcggggccaagagacataagggccgggggtttctcccataagaaa

SEQ ID NO: 732587 - DNA, 3183 bp, Homo sapiens
  misc_feature (3025)..(3025): n is a, c, g, or t
  misc_feature (3027)..(3027): n is a, c, g, or t
  misc_feature (3033)..(3035): n is a, c, g, or t
agcacagaaggaggaaggacagcacacctgacagccctgctcaggaagtctctggatcctaggctcatctccacaggggagaacacacagacagcagagaccatgggacccctctcagcccctccctgcactcagcacatcacctggaaggggctcctgctcacagcatcacttttaaacttctggaacctgcccaccactgcccaagtaataattgaagccaagccacccaaagtttccgaggggaaggatgttcttctacttgtccacaatttgccccagaatcttactggctacatctggtacaaagggcaaatgacggacctctaccattacattacatcatatgtagtacacggtcaaattatatatgggcctgcctacagtggacgagaaacagtatattccaatgcatccctgctgatccagaatgtcacacaggaggatgcaggatcctacaccttacacatcataaagcgaggcgatgggactggaggagtaactggatatttcactgtcaccttatactcggagactcccaagccctccatctccagcagcaacttaaaccccagggaggtcatggaggctgtgcgcttaatctgtgatcctgagactccggatgcaagctacctgtggttgctgaatggtcagaacctccctatgactcacaggttgcagctgtccaaaaccaacaggaccctctatctatttggtgtcacaaagtatattgcaggaccctatgaatgtgaaatacggaacccagtgagtgccagccgcagtgacccagtcaccctgaatctcctcccgaagctgcccatgccttacatcaccatcaacaacttaaaccccagggagaagaaggatgtgttagccttcacctgtgaacctaagagtcggaactacacctacatttggtggctaaatggtcagagcctcccggtcagtccgagggtaaagcgacccattgaaaacaggatactcattctacccagtgtcacgagaaatgaaacaggaccctatcaatgtgaaatacgggaccgatatggtggcatccgcagtaacccagtcaccctgaatgtcctctatggtccagacctccccagaatttacccttcattcacctattaccgttcaggagaaaacctcgacttgtcctgctttgcggactctaacccaccggcagagtattcttggacaattaatgggaagtttcagctatcaggacaaaagctctttatcccccaaattactacaaatcatagcgggctctatgcttgctctgttcgtaactcagccactggcaaggaaatctccaaatccatgatagtcaaagtctctgagacagcatctccccaggttacctatgctggtccaaacacctggtttcaagaaatccttctgctgtgacctcccaaagtgctaggattaaaacatgacccaccatgctcagagtccattttcatttatgatttgagtaattttatcttttctctttttttcttagccaatctagttaatggttgtcaattttgttgattttattttgaagaatcaacttttggtttcagtaatttcctctattctgtttccattctccattttatttatatccaccctaatacttattatttccctcattcactgtgcttgggtttagtttgttcttctttcgtatcctgaagtattaaagtaggttgttgacctgagctctttcttcttttttaatgtaagagtttacagttataaatttcttgcacaagactcaacttctctgaacccctgattcctcacctgaaaattgcaataagagtactttcttcataccattcttttaaaggtttaatgcagtcaatgaaacaagatgccacacaaagaggaaccaatgtcagctgctatattactaccatcatcattagccttgaggtcaaatagtcctagaatcaaatctcagatccacctgtcactagccatatgacaccaggaaagtttttacaccatgctaagcttctgtcttttcatcagcaaaatggaaataatgcctacctgacagggttattgtgtggattaaatgagatacaggtaaagtattgagcacagggcctggcacatagaaagtgcacctcaacagtacctacctttttccatagatatgaaaaaagcggtaacacataaaacactaggacatggttactgactaattgtgggagagaaagaaaaaaagctaagtgcaaagaatcaagtctggtatgttagtttttaccaactgagatgcatccaagatgggattagacatacaagataatttatcagggaagacacctgtgagggaatgtggggcaggcatgaaggtagtatgggagaacccacagaccgctatgcagagctgattcctgtgaaaaagaaagagaaagaagttttaggtaccaatgcagttctaagagtttttgcaaggctgatgaggaatcctccaaccagtcacccattggagttaaagagagcctcggagaactagacttgctttcacacccttgctgggagcctgtgggaaagaagctttctctgtaaaggaggtagtgaatttgaaatgcgctgacctgggccttctgtcaatcaggtccctgccatggaaaccagacagagtctcattaatggctgccacaatagagacactgagaaaaagaacaggttgataccttcatgaaattcaagacaaagaagaaaaaaactcaatgttattggactaaataatcaaaaggataatgttttcataattttttattggaaaatgtgctgattcttggaatgttttattctccagatttatgaactttttttcttcagcaattggtaaagtatacttttgtaaacaaaaattgaaacatttgcttttgctctctatctgagtgccccagaattgggaaactattcatgagtattcataggtttatggtaataaagttatttgcacaagttcaaaaaaaaaaaaaaaaaaacaaaaaaaaacagttgttggggcggcctngnggcccnnngaaaaagcttttctgagaacacattgctttgggacgccgcggggccccagtagggtcacggcggaacagtgggcgccacaacggtgtgttcctcagaggagaatcggggccaagagacataagggccgggggtttctcccataagaaa

SEQ ID NO: 732588 - DNA, 1986 bp, Homo sapiens
  misc_feature (1828)..(1828): n is a, c, g, or t
  misc_feature (1830)..(1830): n is a, c, g, or t
  misc_feature (1836)..(1838): n is a, c, g, or t
agcacagaaggaggaaggacagcacacctgacagccctgctcaggaagtctctggatcctaggctcatctccacaggggagaacacacagacagcagagaccatgggacccctctcagcccctccctgcactcagcacatcacctggaaggggctcctgctcacagcatcacttttaaacttctggaacctgcccaccactgcccaagtaataattgaagccaagccacccaaagtttccgaggggaaggatgttcttctacttgtccacaatttgccccagaatcttactggctacatctggtacaaagggcaaatgacggacctctaccattacattacatcatatgtagtacacggtcaaattatatatgggcctgcctacagtggacgagaaacagtatattccaatgcatccctgctgatccagaatgtcacacaggaggatgcaggatcctacaccttacacatcataaagcgaggcgatgggactggaggagtaactggatatttcactgtcaccttatactatgtgggacaactacaaaggctgtcacatacacttaacgggaatacttgtggtttggggaccagatggaggtggccagcggagactcccaagccctccatctccagcagcaacttaaaccccagggaggtcatggaggctgtgcgcttaatctgtgatcctgagactccggatgcaagctacctgtggttgctgaatggtcagaacctccctatgactcacaggttgcagctgtccaaaaccaacaggaccctctatctatttggtgtcacaaagtatattgcaggaccctatgaatgtgaaatacggaacccagtgagtgccagccgcagtgacccagtcaccctgaatctcctcccgaagctgcccatgccttacatcaccatcaacaacttaaaccccagggagaagaaggatgtgttagccttcacctgtgaacctaagagtcggaactacacctacatttggtggctaaatggtcagagcctcccggtcagtccgagggtaaagcgacccattgaaaacaggatactcattctacccagtgtcacgagaaatgaaacaggaccctatcaatgtgaaatacgggaccgatatggtggcatccgcagtaacccagtcaccctgaatgtcctctatggtccagacctccccagaatttacccttcattcacctattaccgttcaggagaaaacctcgacttgtcctgctttgcggactctaacccaccggcagagtattcttggacaattaatgggaagtttcagctatcaggacaaaagctctttatcccccaaattactacaaatcatagcgggctctatgcttgctctgttcgtaactcagccactggcaaggaaatctccaaatccatgatagtcaaagtctctggtccctgccatggaaaccagacagagtctcattaatggctgccacaatagagacactgagaaaaagaacaggttgataccttcatgaaattcaagacaaagaagaaaaaaactcaatgttattggactaaataatcaaaaggataatgttttcataattttttattggaaaatgtgctgattcttggaatgttttattctccagatttatgaactttttttcttcagcaattggtaaagtatacttttgtaaacaaaaattgaaacatttgcttttgctctctatctgagtgccccagaattgggaaactattcatgagtattcataggtttatggtaataaagttatttgcacaagttcaaaaaaaaaaaaaaaaaaacaaaaaaaaacagttgttggggcggcctngnggcccnnngaaaaagcttttctgagaacacattgctttgggacgccgcggggccccagtagggtcacggcggaacagtgggcgccacaacggtgtgttcctcagaggagaatcggggccaagagacataagggccgggggtttctcccataagaaa

SEQ ID NO: 732589 - DNA, 3261 bp, Homo sapiens
  misc_feature (3103)..(3103): n is a, c, g, or t
  misc_feature (3105)..(3105): n is a, c, g, or t
  misc_feature (3111)..(3113): n is a, c, g, or t
agcacagaaggaggaaggacagcacacctgacagccctgctcaggaagtctctggatcctaggctcatctccacaggggagaacacacagacagcagagaccatgggacccctctcagcccctccctgcactcagcacatcacctggaaggggctcctgctcacagcatcacttttaaacttctggaacctgcccaccactgcccaagtaataattgaagccaagccacccaaagtttccgaggggaaggatgttcttctacttgtccacaatttgccccagaatcttactggctacatctggtacaaagggcaaatgacggacctctaccattacattacatcatatgtagtacacggtcaaattatatatgggcctgcctacagtggacgagaaacagtatattccaatgcatccctgctgatccagaatgtcacacaggaggatgcaggatcctacaccttacacatcataaagcgaggcgatgggactggaggagtaactggatatttcactgtcaccttatactatgtgggacaactacaaaggctgtcacatacacttaacgggaatacttgtggtttggggaccagatggaggtggccagcggagactcccaagccctccatctccagcagcaacttaaaccccagggaggtcatggaggctgtgcgcttaatctgtgatcctgagactccggatgcaagctacctgtggttgctgaatggtcagaacctccctatgactcacaggttgcagctgtccaaaaccaacaggaccctctatctatttggtgtcacaaagtatattgcaggaccctatgaatgtgaaatacggaacccagtgagtgccagccgcagtgacccagtcaccctgaatctcctcccgaagctgcccatgccttacatcaccatcaacaacttaaaccccagggagaagaaggatgtgttagccttcacctgtgaacctaagagtcggaactacacctacatttggtggctaaatggtcagagcctcccggtcagtccgagggtaaagcgacccattgaaaacaggatactcattctacccagtgtcacgagaaatgaaacaggaccctatcaatgtgaaatacgggaccgatatggtggcatccgcagtaacccagtcaccctgaatgtcctctatggtccagacctccccagaatttacccttcattcacctattaccgttcaggagaaaacctcgacttgtcctgctttgcggactctaacccaccggcagagtattcttggacaattaatgggaagtttcagctatcaggacaaaagctctttatcccccaaattactacaaatcatagcgggctctatgcttgctctgttcgtaactcagccactggcaaggaaatctccaaatccatgatagtcaaagtctctgagacagcatctccccaggttacctatgctggtccaaacacctggtttcaagaaatccttctgctgtgacctcccaaagtgctaggattaaaacatgacccaccatgctcagagtccattttcatttatgatttgagtaattttatcttttctctttttttcttagccaatctagttaatggttgtcaattttgttgattttattttgaagaatcaacttttggtttcagtaatttcctctattctgtttccattctccattttatttatatccaccctaatacttattatttccctcattcactgtgcttgggtttagtttgttcttctttcgtatcctgaagtattaaagtaggttgttgacctgagctctttcttcttttttaatgtaagagtttacagttataaatttcttgcacaagactcaacttctctgaacccctgattcctcacctgaaaattgcaataagagtactttcttcataccattcttttaaaggtttaatgcagtcaatgaaacaagatgccacacaaagaggaaccaatgtcagctgctatattactaccatcatcattagccttgaggtcaaatagtcctagaatcaaatctcagatccacctgtcactagccatatgacaccaggaaagtttttacaccatgctaagcttctgtcttttcatcagcaaaatggaaataatgcctacctgacagggttattgtgtggattaaatgagatacaggtaaagtattgagcacagggcctggcacatagaaagtgcacctcaacagtacctacctttttccatagatatgaaaaaagcggtaacacataaaacactaggacatggttactgactaattgtgggagagaaagaaaaaaagctaagtgcaaagaatcaagtctggtatgttagtttttaccaactgagatgcatccaagatgggattagacatacaagataatttatcagggaagacacctgtgagggaatgtggggcaggcatgaaggtagtatgggagaacccacagaccgctatgcagagctgattcctgtgaaaaagaaagagaaagaagttttaggtaccaatgcagttctaagagtttttgcaaggctgatgaggaatcctccaaccagtcacccattggagttaaagagagcctcggagaactagacttgctttcacacccttgctgggagcctgtgggaaagaagctttctctgtaaaggaggtagtgaatttgaaatgcgctgacctgggccttctgtcaatcaggtccctgccatggaaaccagacagagtctcattaatggctgccacaatagagacactgagaaaaagaacaggttgataccttcatgaaattcaagacaaagaagaaaaaaactcaatgttattggactaaataatcaaaaggataatgttttcataattttttattggaaaatgtgctgattcttggaatgttttattctccagatttatgaactttttttcttcagcaattggtaaagtatacttttgtaaacaaaaattgaaacatttgcttttgctctctatctgagtgccccagaattgggaaactattcatgagtattcataggtttatggtaataaagttatttgcacaagttcaaaaaaaaaaaaaaaaaaacaaaaaaaaacagttgttggggcggcctngnggcccnnngaaaaagcttttctgagaacacattgctttgggacgccgcggggccccagtagggtcacggcggaacagtgggcgccacaacggtgtgttcctcagaggagaatcggggccaagagacataagggccgggggtttctcccataagaaa

SEQ ID NO: 732590 - DNA, 1707 bp, Homo sapiens
  misc_feature (1549)..(1549): n is a, c, g, or t
  misc_feature (1551)..(1551): n is a, c, g, or t
  misc_feature (1557)..(1559): n is a, c, g, or t
agcacagaaggaggaaggacagcacacctgacagccctgctcaggaagtctctggatcctaggctcatctccacaggggagaacacacagacagcagagaccatgggacccctctcagcccctccctgcactcagcacatcacctggaaggggctcctgctcacagcatcacttttaaacttctggaacctgcccaccactgcccaagtaataattgaagccaagccacccaaagtttccgaggggaaggatgttcttctacttgtccacaatttgccccagaatcttactggctacatctggtacaaagggcaaatgacggacctctaccattacattacatcatatgtagtacacggtcaaattatatatgggcctgcctacagtggacgagaaacagtatattccaatgcatccctgctgatccagaatgtcacacaggaggatgcaggatcctacaccttacacatcataaagcgaggcgatgggactggaggagtaactggatatttcactgtcaccttatactatgtgggacaactacaaaggctgtcacatacacttaacgggaatacttgtggtttggggaccagatggaggtggccagcggagactcccaagccctccatctccagcagcaacttaaaccccagggaggtcatggaggctgtgcgcttaatctgtgatcctgagactccggatgcaagctacctgtggttgctgaatggtcagaacctccctatgactcacaggttgcagctgtccaaaaccaacaggaccctctatctatttggtgtcacaaagtatattgcaggaccctatgaatgtgaaatacggaacccagtgagtgccagccgcagtgacccagtcaccctgaatctcctccatggtccagacctccccagaatttacccttcattcacctattaccgttcaggagaaaacctcgacttgtcctgctttgcggactctaacccaccggcagagtattcttggacaattaatgggaagtttcagctatcaggacaaaagctctttatcccccaaattactacaaatcatagcgggctctatgcttgctctgttcgtaactcagccactggcaaggaaatctccaaatccatgatagtcaaagtctctggtccctgccatggaaaccagacagagtctcattaatggctgccacaatagagacactgagaaaaagaacaggttgataccttcatgaaattcaagacaaagaagaaaaaaactcaatgttattggactaaataatcaaaaggataatgttttcataattttttattggaaaatgtgctgattcttggaatgttttattctccagatttatgaactttttttcttcagcaattggtaaagtatacttttgtaaacaaaaattgaaacatttgcttttgctctctatctgagtgccccagaattgggaaactattcatgagtattcataggtttatggtaataaagttatttgcacaagttcaaaaaaaaaaaaaaaaaaacaaaaaaaaacagttgttggggcggcctngnggcccnnngaaaaagcttttctgagaacacattgctttgggacgccgcggggccccagtagggtcacggcggaacagtgggcgccacaacggtgtgttcctcagaggagaatcggggccaagagacataagggccgggggtttctcccataagaaa

SEQ ID NO: 732591 - DNA, 2982 bp, Homo sapiens
  misc_feature (2824)..(2824): n is a, c, g, or t
  misc_feature (2826)..(2826): n is a, c, g, or t
  misc_feature (2832)..(2834): n is a, c, g, or t
agcacagaaggaggaaggacagcacacctgacagccctgctcaggaagtctctggatcctaggctcatctccacaggggagaacacacagacagcagagaccatgggacccctctcagcccctccctgcactcagcacatcacctggaaggggctcctgctcacagcatcacttttaaacttctggaacctgcccaccactgcccaagtaataattgaagccaagccacccaaagtttccgaggggaaggatgttcttctacttgtccacaatttgccccagaatcttactggctacatctggtacaaagggcaaatgacggacctctaccattacattacatcatatgtagtacacggtcaaattatatatgggcctgcctacagtggacgagaaacagtatattccaatgcatccctgctgatccagaatgtcacacaggaggatgcaggatcctacaccttacacatcataaagcgaggcgatgggactggaggagtaactggatatttcactgtcaccttatactatgtgggacaactacaaaggctgtcacatacacttaacgggaatacttgtggtttggggaccagatggaggtggccagcggagactcccaagccctccatctccagcagcaacttaaaccccagggaggtcatggaggctgtgcgcttaatctgtgatcctgagactccggatgcaagctacctgtggttgctgaatggtcagaacctccctatgactcacaggttgcagctgtccaaaaccaacaggaccctctatctatttggtgtcacaaagtatattgcaggaccctatgaatgtgaaatacggaacccagtgagtgccagccgcagtgacccagtcaccctgaatctcctccatggtccagacctccccagaatttacccttcattcacctattaccgttcaggagaaaacctcgacttgtcctgctttgcggactctaacccaccggcagagtattcttggacaattaatgggaagtttcagctatcaggacaaaagctctttatcccccaaattactacaaatcatagcgggctctatgcttgctctgttcgtaactcagccactggcaaggaaatctccaaatccatgatagtcaaagtctctgagacagcatctccccaggttacctatgctggtccaaacacctggtttcaagaaatccttctgctgtgacctcccaaagtgctaggattaaaacatgacccaccatgctcagagtccattttcatttatgatttgagtaattttatcttttctctttttttcttagccaatctagttaatggttgtcaattttgttgattttattttgaagaatcaacttttggtttcagtaatttcctctattctgtttccattctccattttatttatatccaccctaatacttattatttccctcattcactgtgcttgggtttagtttgttcttctttcgtatcctgaagtattaaagtaggttgttgacctgagctctttcttcttttttaatgtaagagtttacagttataaatttcttgcacaagactcaacttctctgaacccctgattcctcacctgaaaattgcaataagagtactttcttcataccattcttttaaaggtttaatgcagtcaatgaaacaagatgccacacaaagaggaaccaatgtcagctgctatattactaccatcatcattagccttgaggtcaaatagtcctagaatcaaatctcagatccacctgtcactagccatatgacaccaggaaagtttttacaccatgctaagcttctgtcttttcatcagcaaaatggaaataatgcctacctgacagggttattgtgtggattaaatgagatacaggtaaagtattgagcacagggcctggcacatagaaagtgcacctcaacagtacctacctttttccatagatatgaaaaaagcggtaacacataaaacactaggacatggttactgactaattgtgggagagaaagaaaaaaagctaagtgcaaagaatcaagtctggtatgttagtttttaccaactgagatgcatccaagatgggattagacatacaagataatttatcagggaagacacctgtgagggaatgtggggcaggcatgaaggtagtatgggagaacccacagaccgctatgcagagctgattcctgtgaaaaagaaagagaaagaagttttaggtaccaatgcagttctaagagtttttgcaaggctgatgaggaatcctccaaccagtcacccattggagttaaagagagcctcggagaactagacttgctttcacacccttgctgggagcctgtgggaaagaagctttctctgtaaaggaggtagtgaatttgaaatgcgctgacctgggccttctgtcaatcaggtccctgccatggaaaccagacagagtctcattaatggctgccacaatagagacactgagaaaaagaacaggttgataccttcatgaaattcaagacaaagaagaaaaaaactcaatgttattggactaaataatcaaaaggataatgttttcataattttttattggaaaatgtgctgattcttggaatgttttattctccagatttatgaactttttttcttcagcaattggtaaagtatacttttgtaaacaaaaattgaaacatttgcttttgctctctatctgagtgccccagaattgggaaactattcatgagtattcataggtttatggtaataaagttatttgcacaagttcaaaaaaaaaaaaaaaaaaacaaaaaaaaacagttgttggggcggcctngnggcccnnngaaaaagcttttctgagaacacattgctttgggacgccgcggggccccagtagggtcacggcggaacagtgggcgccacaacggtgtgttcctcagaggagaatcggggccaagagacataagggccgggggtttctcccataagaaa

SEQ ID NO: 732592 - DNA, 1246 bp, Homo sapiens
agcacagaaggaggaaggacagcacacctgacagccctgctcaggaagtctctggatcctaggctcatctccacaggggagaacacacagacagcagagaccatgggacccctctcagcccctccctgcactcagcacatcacctggaaggggctcctgctcacagcatcacttttaaacttctggaacctgcccaccactgcccaagtaataattgaagccaagccacccaaagtttccgaggggaaggatgttcttctacttgtccacaatttgccccagaatcttactggctacatctggtacaaagggcaaatgacggacctctaccattacattacatcatatgtagtacacggtcaaattatatatgggcctgcctacagtggacgagaaacagtatattccaatgcatccctgctgatccagaatgtcacacaggaggatgcaggatcctacaccttacacatcataaagcgaggcgatgggactggaggagtaactggatatttcactgtcaccttatactatgtgggacaactacaaaggctgtcacatacacttaacgggaatacttgtggtttggggaccagatggaggtggccagcggagactcccaagccctccatctccagcagcaacttaaaccccagggaggtcatggaggctgtgcgcttaatctgtgatcctgagactccggatgcaagctacctgtggttgctgaatggtcagaacctccctatgactcacaggttgcagctgtccaaaaccaacaggaccctctatctatttggtgtcacaaagtatattgcaggaccctatgaatgtgaaatacggaacccagtgagtgccagccgcagtgacccagtcaccctgaatctcctccatggtccagacctccccagaatttacccttcattcacctattaccgttcaggagaaaacctcgacttgtcctgctttgcggactctaacccaccggcagagtattcttggacaattaatgggaagtttcagctatcaggacaaaagctctttatcccccaaattactacaaatcatagcgggctctatgcttgctctgttcgtaactcagccactggcaaggaaatctccaaatccatgatagtcaaagtctctgagacagcatctccccaggttacctatgctggtccaaacacctggtttcaagaaatccttctgctgtgacctcccaaagtgctaggattaaaacatgacccaccat

SEQ ID NO: 732593 - DNA, 1629 bp, Homo sapiens
  misc_feature (1471)..(1471): n is a, c, g, or t
  misc_feature (1473)..(1473): n is a, c, g, or t
  misc_feature (1479)..(1481): n is a, c, g, or t
agcacagaaggaggaaggacagcacacctgacagccctgctcaggaagtctctggatcctaggctcatctccacaggggagaacacacagacagcagagaccatgggacccctctcagcccctccctgcactcagcacatcacctggaaggggctcctgctcacagcatcacttttaaacttctggaacctgcccaccactgcccaagtaataattgaagccaagccacccaaagtttccgaggggaaggatgttcttctacttgtccacaatttgccccagaatcttactggctacatctggtacaaagggcaaatgacggacctctaccattacattacatcatatgtagtacacggtcaaattatatatgggcctgcctacagtggacgagaaacagtatattccaatgcatccctgctgatccagaatgtcacacaggaggatgcaggatcctacaccttacacatcataaagcgaggcgatgggactggaggagtaactggatatttcactgtcaccttatactcggagactcccaagccctccatctccagcagcaacttaaaccccagggaggtcatggaggctgtgcgcttaatctgtgatcctgagactccggatgcaagctacctgtggttgctgaatggtcagaacctccctatgactcacaggttgcagctgtccaaaaccaacaggaccctctatctatttggtgtcacaaagtatattgcaggaccctatgaatgtgaaatacggaacccagtgagtgccagccgcagtgacccagtcaccctgaatctcctccatggtccagacctccccagaatttacccttcattcacctattaccgttcaggagaaaacctcgacttgtcctgctttgcggactctaacccaccggcagagtattcttggacaattaatgggaagtttcagctatcaggacaaaagctctttatcccccaaattactacaaatcatagcgggctctatgcttgctctgttcgtaactcagccactggcaaggaaatctccaaatccatgatagtcaaagtctctggtccctgccatggaaaccagacagagtctcattaatggctgccacaatagagacactgagaaaaagaacaggttgataccttcatgaaattcaagacaaagaagaaaaaaactcaatgttattggactaaataatcaaaaggataatgttttcataattttttattggaaaatgtgctgattcttggaatgttttattctccagatttatgaactttttttcttcagcaattggtaaagtatacttttgtaaacaaaaattgaaacatttgcttttgctctctatctgagtgccccagaattgggaaactattcatgagtattcataggtttatggtaataaagttatttgcacaagttcaaaaaaaaaaaaaaaaaaacaaaaaaaaacagttgttggggcggcctngnggcccnnngaaaaagcttttctgagaacacattgctttgggacgccgcggggccccagtagggtcacggcggaacagtgggcgccacaacggtgtgttcctcagaggagaatcggggccaagagacataagggccgggggtttctcccataagaaa

SEQ ID NO: 732594 - DNA, 2904 bp, Homo sapiens
  misc_feature (2746)..(2746): n is a, c, g, or t
  misc_feature (2748)..(2748): n is a, c, g, or t
  misc_feature (2754)..(2756): n is a, c, g, or t
agcacagaaggaggaaggacagcacacctgacagccctgctcaggaagtctctggatcctaggctcatctccacaggggagaacacacagacagcagagaccatgggacccctctcagcccctccctgcactcagcacatcacctggaaggggctcctgctcacagcatcacttttaaacttctggaacctgcccaccactgcccaagtaataattgaagccaagccacccaaagtttccgaggggaaggatgttcttctacttgtccacaatttgccccagaatcttactggctacatctggtacaaagggcaaatgacggacctctaccattacattacatcatatgtagtacacggtcaaattatatatgggcctgcctacagtggacgagaaacagtatattccaatgcatccctgctgatccagaatgtcacacaggaggatgcaggatcctacaccttacacatcataaagcgaggcgatgggactggaggagtaactggatatttcactgtcaccttatactcggagactcccaagccctccatctccagcagcaacttaaaccccagggaggtcatggaggctgtgcgcttaatctgtgatcctgagactccggatgcaagctacctgtggttgctgaatggtcagaacctccctatgactcacaggttgcagctgtccaaaaccaacaggaccctctatctatttggtgtcacaaagtatattgcaggaccctatgaatgtgaaatacggaacccagtgagtgccagccgcagtgacccagtcaccctgaatctcctccatggtccagacctccccagaatttacccttcattcacctattaccgttcaggagaaaacctcgacttgtcctgctttgcggactctaacccaccggcagagtattcttggacaattaatgggaagtttcagctatcaggacaaaagctctttatcccccaaattactacaaatcatagcgggctctatgcttgctctgttcgtaactcagccactggcaaggaaatctccaaatccatgatagtcaaagtctctgagacagcatctccccaggttacctatgctggtccaaacacctggtttcaagaaatccttctgctgtgacctcccaaagtgctaggattaaaacatgacccaccatgctcagagtccattttcatttatgatttgagtaattttatcttttctctttttttcttagccaatctagttaatggttgtcaattttgttgattttattttgaagaatcaacttttggtttcagtaatttcctctattctgtttccattctccattttatttatatccaccctaatacttattatttccctcattcactgtgcttgggtttagtttgttcttctttcgtatcctgaagtattaaagtaggttgttgacctgagctctttcttcttttttaatgtaagagtttacagttataaatttcttgcacaagactcaacttctctgaacccctgattcctcacctgaaaattgcaataagagtactttcttcataccattcttttaaaggtttaatgcagtcaatgaaacaagatgccacacaaagaggaaccaatgtcagctgctatattactaccatcatcattagccttgaggtcaaatagtcctagaatcaaatctcagatccacctgtcactagccatatgacaccaggaaagtttttacaccatgctaagcttctgtcttttcatcagcaaaatggaaataatgcctacctgacagggttattgtgtggattaaatgagatacaggtaaagtattgagcacagggcctggcacatagaaagtgcacctcaacagtacctacctttttccatagatatgaaaaaagcggtaacacataaaacactaggacatggttactgactaattgtgggagagaaagaaaaaaagctaagtgcaaagaatcaagtctggtatgttagtttttaccaactgagatgcatccaagatgggattagacatacaagataatttatcagggaagacacctgtgagggaatgtggggcaggcatgaaggtagtatgggagaacccacagaccgctatgcagagctgattcctgtgaaaaagaaagagaaagaagttttaggtaccaatgcagttctaagagtttttgcaaggctgatgaggaatcctccaaccagtcacccattggagttaaagagagcctcggagaactagacttgctttcacacccttgctgggagcctgtgggaaagaagctttctctgtaaaggaggtagtgaatttgaaatgcgctgacctgggccttctgtcaatcaggtccctgccatggaaaccagacagagtctcattaatggctgccacaatagagacactgagaaaaagaacaggttgataccttcatgaaattcaagacaaagaagaaaaaaactcaatgttattggactaaataatcaaaaggataatgttttcataattttttattggaaaatgtgctgattcttggaatgttttattctccagatttatgaactttttttcttcagcaattggtaaagtatacttttgtaaacaaaaattgaaacatttgcttttgctctctatctgagtgccccagaattgggaaactattcatgagtattcataggtttatggtaataaagttatttgcacaagttcaaaaaaaaaaaaaaaaaaacaaaaaaaaacagttgttggggcggcctngnggcccnnngaaaaagcttttctgagaacacattgctttgggacgccgcggggccccagtagggtcacggcggaacagtgggcgccacaacggtgtgttcctcagaggagaatcggggccaagagacataagggccgggggtttctcccataagaaa

SEQ ID NO: 732595 - DNA, 1545 bp, Homo sapiens
  misc_feature (1387)..(1387): n is a, c, g, or t
  misc_feature (1389)..(1389): n is a, c, g, or t
  misc_feature (1395)..(1397): n is a, c, g, or t
agcacagaaggaggaaggacagcacacctgacagccctgctcaggaagtctctggatcctaggctcatctccacaggggagaacacacagacagcagagaccatgggacccctctcagcccctccctgcactcagcacatcacctggaaggggctcctgctcacagcggagactcccaagccctccatctccagcagcaacttaaaccccagggaggtcatggaggctgtgcgcttaatctgtgatcctgagactccggatgcaagctacctgtggttgctgaatggtcagaacctccctatgactcacaggttgcagctgtccaaaaccaacaggaccctctatctatttggtgtcacaaagtatattgcaggaccctatgaatgtgaaatacggaacccagtgagtgccagccgcagtgacccagtcaccctgaatctcctcccgaagctgcccatgccttacatcaccatcaacaacttaaaccccagggagaagaaggatgtgttagccttcacctgtgaacctaagagtcggaactacacctacatttggtggctaaatggtcagagcctcccggtcagtccgagggtaaagcgacccattgaaaacaggatactcattctacccagtgtcacgagaaatgaaacaggaccctatcaatgtgaaatacgggaccgatatggtggcatccgcagtaacccagtcaccctgaatgtcctctatggtccagacctccccagaatttacccttcattcacctattaccgttcaggagaaaacctcgacttgtcctgctttgcggactctaacccaccggcagagtattcttggacaattaatgggaagtttcagctatcaggacaaaagctctttatcccccaaattactacaaatcatagcgggctctatgcttgctctgttcgtaactcagccactggcaaggaaatctccaaatccatgatagtcaaagtctctggtccctgccatggaaaccagacagagtctcattaatggctgccacaatagagacactgagaaaaagaacaggttgataccttcatgaaattcaagacaaagaagaaaaaaactcaatgttattggactaaataatcaaaaggataatgttttcataattttttattggaaaatgtgctgattcttggaatgttttattctccagatttatgaactttttttcttcagcaattggtaaagtatacttttgtaaacaaaaattgaaacatttgcttttgctctctatctgagtgccccagaattgggaaactattcatgagtattcataggtttatggtaataaagttatttgcacaagttcaaaaaaaaaaaaaaaaaaacaaaaaaaaacagttgttggggcggcctngnggcccnnngaaaaagcttttctgagaacacattgctttgggacgccgcggggccccagtagggtcacggcggaacagtgggcgccacaacggtgtgttcctcagaggagaatcggggccaagagacataagggccgggggtttctcccataagaaa

SEQ ID NO: 732596 - DNA, 2820 bp, Homo sapiens
  misc_feature (2662)..(2662): n is a, c, g, or t
  misc_feature (2664)..(2664): n is a, c, g, or t
  misc_feature (2670)..(2672): n is a, c, g, or t
agcacagaaggaggaaggacagcacacctgacagccctgctcaggaagtctctggatcctaggctcatctccacaggggagaacacacagacagcagagaccatgggacccctctcagcccctccctgcactcagcacatcacctggaaggggctcctgctcacagcggagactcccaagccctccatctccagcagcaacttaaaccccagggaggtcatggaggctgtgcgcttaatctgtgatcctgagactccggatgcaagctacctgtggttgctgaatggtcagaacctccctatgactcacaggttgcagctgtccaaaaccaacaggaccctctatctatttggtgtcacaaagtatattgcaggaccctatgaatgtgaaatacggaacccagtgagtgccagccgcagtgacccagtcaccctgaatctcctcccgaagctgcccatgccttacatcaccatcaacaacttaaaccccagggagaagaaggatgtgttagccttcacctgtgaacctaagagtcggaactacacctacatttggtggctaaatggtcagagcctcccggtcagtccgagggtaaagcgacccattgaaaacaggatactcattctacccagtgtcacgagaaatgaaacaggaccctatcaatgtgaaatacgggaccgatatggtggcatccgcagtaacccagtcaccctgaatgtcctctatggtccagacctccccagaatttacccttcattcacctattaccgttcaggagaaaacctcgacttgtcctgctttgcggactctaacccaccggcagagtattcttggacaattaatgggaagtttcagctatcaggacaaaagctctttatcccccaaattactacaaatcatagcgggctctatgcttgctctgttcgtaactcagccactggcaaggaaatctccaaatccatgatagtcaaagtctctgagacagcatctccccaggttacctatgctggtccaaacacctggtttcaagaaatccttctgctgtgacctcccaaagtgctaggattaaaacatgacccaccatgctcagagtccattttcatttatgatttgagtaattttatcttttctctttttttcttagccaatctagttaatggttgtcaattttgttgattttattttgaagaatcaacttttggtttcagtaatttcctctattctgtttccattctccattttatttatatccaccctaatacttattatttccctcattcactgtgcttgggtttagtttgttcttctttcgtatcctgaagtattaaagtaggttgttgacctgagctctttcttcttttttaatgtaagagtttacagttataaatttcttgcacaagactcaacttctctgaacccctgattcctcacctgaaaattgcaataagagtactttcttcataccattcttttaaaggtttaatgcagtcaatgaaacaagatgccacacaaagaggaaccaatgtcagctgctatattactaccatcatcattagccttgaggtcaaatagtcctagaatcaaatctcagatccacctgtcactagccatatgacaccaggaaagtttttacaccatgctaagcttctgtcttttcatcagcaaaatggaaataatgcctacctgacagggttattgtgtggattaaatgagatacaggtaaagtattgagcacagggcctggcacatagaaagtgcacctcaacagtacctacctttttccatagatatgaaaaaagcggtaacacataaaacactaggacatggttactgactaattgtgggagagaaagaaaaaaagctaagtgcaaagaatcaagtctggtatgttagtttttaccaactgagatgcatccaagatgggattagacatacaagataatttatcagggaagacacctgtgagggaatgtggggcaggcatgaaggtagtatgggagaacccacagaccgctatgcagagctgattcctgtgaaaaagaaagagaaagaagttttaggtaccaatgcagttctaagagtttttgcaaggctgatgaggaatcctccaaccagtcacccattggagttaaagagagcctcggagaactagacttgctttcacacccttgctgggagcctgtgggaaagaagctttctctgtaaaggaggtagtgaatttgaaatgcgctgacctgggccttctgtcaatcaggtccctgccatggaaaccagacagagtctcattaatggctgccacaatagagacactgagaaaaagaacaggttgataccttcatgaaattcaagacaaagaagaaaaaaactcaatgttattggactaaataatcaaaaggataatgttttcataattttttattggaaaatgtgctgattcttggaatgttttattctccagatttatgaactttttttcttcagcaattggtaaagtatacttttgtaaacaaaaattgaaacatttgcttttgctctctatctgagtgccccagaattgggaaactattcatgagtattcataggtttatggtaataaagttatttgcacaagttcaaaaaaaaaaaaaaaaaaacaaaaaaaaacagttgttggggcggcctngnggcccnnngaaaaagcttttctgagaacacattgctttgggacgccgcggggccccagtagggtcacggcggaacagtgggcgccacaacggtgtgttcctcagaggagaatcggggccaagagacataagggccgggggtttctcccataagaaa

SEQ ID NO: 732597 - DNA, 1266 bp, Homo sapiens
  misc_feature (1108)..(1108): n is a, c, g, or t
  misc_feature (1110)..(1110): n is a, c, g, or t
  misc_feature (1116)..(1118): n is a, c, g, or t
agcacagaaggaggaaggacagcacacctgacagccctgctcaggaagtctctggatcctaggctcatctccacaggggagaacacacagacagcagagaccatgggacccctctcagcccctccctgcactcagcacatcacctggaaggggctcctgctcacagcggagactcccaagccctccatctccagcagcaacttaaaccccagggaggtcatggaggctgtgcgcttaatctgtgatcctgagactccggatgcaagctacctgtggttgctgaatggtcagaacctccctatgactcacaggttgcagctgtccaaaaccaacaggaccctctatctatttggtgtcacaaagtatattgcaggaccctatgaatgtgaaatacggaacccagtgagtgccagccgcagtgacccagtcaccctgaatctcctccatggtccagacctccccagaatttacccttcattcacctattaccgttcaggagaaaacctcgacttgtcctgctttgcggactctaacccaccggcagagtattcttggacaattaatgggaagtttcagctatcaggacaaaagctctttatcccccaaattactacaaatcatagcgggctctatgcttgctctgttcgtaactcagccactggcaaggaaatctccaaatccatgatagtcaaagtctctggtccctgccatggaaaccagacagagtctcattaatggctgccacaatagagacactgagaaaaagaacaggttgataccttcatgaaattcaagacaaagaagaaaaaaactcaatgttattggactaaataatcaaaaggataatgttttcataattttttattggaaaatgtgctgattcttggaatgttttattctccagatttatgaactttttttcttcagcaattggtaaagtatacttttgtaaacaaaaattgaaacatttgcttttgctctctatctgagtgccccagaattgggaaactattcatgagtattcataggtttatggtaataaagttatttgcacaagttcaaaaaaaaaaaaaaaaaaacaaaaaaaaacagttgttggggcggcctngnggcccnnngaaaaagcttttctgagaacacattgctttgggacgccgcggggccccagtagggtcacggcggaacagtgggcgccacaacggtgtgttcctcagaggagaatcggggccaagagacataagggccgggggtttctcccataagaaa

SEQ ID NO: 732598 - DNA, 2541 bp, Homo sapiens
  misc_feature (2383)..(2383): n is a, c, g, or t
  misc_feature (2385)..(2385): n is a, c, g, or t
  misc_feature (2391)..(2393): n is a, c, g, or t
agcacagaaggaggaaggacagcacacctgacagccctgctcaggaagtctctggatcctaggctcatctccacaggggagaacacacagacagcagagaccatgggacccctctcagcccctccctgcactcagcacatcacctggaaggggctcctgctcacagcggagactcccaagccctccatctccagcagcaacttaaaccccagggaggtcatggaggctgtgcgcttaatctgtgatcctgagactccggatgcaagctacctgtggttgctgaatggtcagaacctccctatgactcacaggttgcagctgtccaaaaccaacaggaccctctatctatttggtgtcacaaagtatattgcaggaccctatgaatgtgaaatacggaacccagtgagtgccagccgcagtgacccagtcaccctgaatctcctccatggtccagacctccccagaatttacccttcattcacctattaccgttcaggagaaaacctcgacttgtcctgctttgcggactctaacccaccggcagagtattcttggacaattaatgggaagtttcagctatcaggacaaaagctctttatcccccaaattactacaaatcatagcgggctctatgcttgctctgttcgtaactcagccactggcaaggaaatctccaaatccatgatagtcaaagtctctgagacagcatctccccaggttacctatgctggtccaaacacctggtttcaagaaatccttctgctgtgacctcccaaagtgctaggattaaaacatgacccaccatgctcagagtccattttcatttatgatttgagtaattttatcttttctctttttttcttagccaatctagttaatggttgtcaattttgttgattttattttgaagaatcaacttttggtttcagtaatttcctctattctgtttccattctccattttatttatatccaccctaatacttattatttccctcattcactgtgcttgggtttagtttgttcttctttcgtatcctgaagtattaaagtaggttgttgacctgagctctttcttcttttttaatgtaagagtttacagttataaatttcttgcacaagactcaacttctctgaacccctgattcctcacctgaaaattgcaataagagtactttcttcataccattcttttaaaggtttaatgcagtcaatgaaacaagatgccacacaaagaggaaccaatgtcagctgctatattactaccatcatcattagccttgaggtcaaatagtcctagaatcaaatctcagatccacctgtcactagccatatgacaccaggaaagtttttacaccatgctaagcttctgtcttttcatcagcaaaatggaaataatgcctacctgacagggttattgtgtggattaaatgagatacaggtaaagtattgagcacagggcctggcacatagaaagtgcacctcaacagtacctacctttttccatagatatgaaaaaagcggtaacacataaaacactaggacatggttactgactaattgtgggagagaaagaaaaaaagctaagtgcaaagaatcaagtctggtatgttagtttttaccaactgagatgcatccaagatgggattagacatacaagataatttatcagggaagacacctgtgagggaatgtggggcaggcatgaaggtagtatgggagaacccacagaccgctatgcagagctgattcctgtgaaaaagaaagagaaagaagttttaggtaccaatgcagttctaagagtttttgcaaggctgatgaggaatcctccaaccagtcacccattggagttaaagagagcctcggagaactagacttgctttcacacccttgctgggagcctgtgggaaagaagctttctctgtaaaggaggtagtgaatttgaaatgcgctgacctgggccttctgtcaatcaggtccctgccatggaaaccagacagagtctcattaatggctgccacaatagagacactgagaaaaagaacaggttgataccttcatgaaattcaagacaaagaagaaaaaaactcaatgttattggactaaataatcaaaaggataatgttttcataattttttattggaaaatgtgctgattcttggaatgttttattctccagatttatgaactttttttcttcagcaattggtaaagtatacttttgtaaacaaaaattgaaacatttgcttttgctctctatctgagtgccccagaattgggaaactattcatgagtattcataggtttatggtaataaagttatttgcacaagttcaaaaaaaaaaaaaaaaaaacaaaaaaaaacagttgttggggcggcctngnggcccnnngaaaaagcttttctgagaacacattgctttgggacgccgcggggccccagtagggtcacggcggaacagtgggcgccacaacggtgtgttcctcagaggagaatcggggccaagagacataagggccgggggtttctcccataagaaa

SEQ ID NO: 732599 - DNA, 1930 bp, Homo sapiens
  misc_feature (1772)..(1772): n is a, c, g, or t
  misc_feature (1774)..(1774): n is a, c, g, or t
  misc_feature (1780)..(1782): n is a, c, g, or t
atattaactgatgctgtctctaccacacatcacttttaaacttctggaacctgcccaccactgcccaagtaataattgaagccaagccacccaaagtttccgaggggaaggatgttcttctacttgtccacaatttgccccagaatcttactggctacatctggtacaaagggcaaatgacggacctctaccattacattacatcatatgtagtacacggtcaaattatatatgggcctgcctacagtggacgagaaacagtatattccaatgcatccctgctgatccagaatgtcacacaggaggatgcaggatcctacaccttacacatcataaagcgaggcgatgggactggaggagtaactggatatttcactgtcaccttatactatgtgggacaactacaaaggctgtcacatacacttaacgggaatacttgtggtttggggaccagatggaggtggccagcggagactcccaagccctccatctccagcagcaacttaaaccccagggaggtcatggaggctgtgcgcttaatctgtgatcctgagactccggatgcaagctacctgtggttgctgaatggtcagaacctccctatgactcacaggttgcagctgtccaaaaccaacaggaccctctatctatttggtgtcacaaagtatattgcaggaccctatgaatgtgaaatacggaacccagtgagtgccagccgcagtgacccagtcaccctgaatctcctccgtgggagatgccaactctgaatgaaggatgcctgtggaggaatcaaaggtgccacacaggacaatcttctgttatccacacagcgaagctgcccatgccttacatcaccatcaacaacttaaaccccagggagaagaaggatgtgttagccttcacctgtgaacctaagagtcggaactacacctacatttggtggctaaatggtcagagcctcccggtcagtccgagggtaaagcgacccattgaaaacaggatactcattctacccagtgtcacgagaaatgaaacaggaccctatcaatgtgaaatacgggaccgatatggtggcatccgcagtaacccagtcaccctgaatgtcctctatggtccagacctccccagaatttacccttcattcacctattaccgttcaggagaaaacctcgacttgtcctgctttgcggactctaacccaccggcagagtattcttggacaattaatgggaagtttcagctatcaggacaaaagctctttatcccccaaattactacaaatcatagcgggctctatgcttgctctgttcgtaactcagccactggcaaggaaatctccaaatccatgatagtcaaagtctctggtccctgccatggaaaccagacagagtctcattaatggctgccacaatagagacactgagaaaaagaacaggttgataccttcatgaaattcaagacaaagaagaaaaaaactcaatgttattggactaaataatcaaaaggataatgttttcataattttttattggaaaatgtgctgattcttggaatgttttattctccagatttatgaactttttttcttcagcaattggtaaagtatacttttgtaaacaaaaattgaaacatttgcttttgctctctatctgagtgccccagaattgggaaactattcatgagtattcataggtttatggtaataaagttatttgcacaagttcaaaaaaaaaaaaaaaaaaacaaaaaaaaacagttgttggggcggcctngnggcccnnngaaaaagcttttctgagaacacattgctttgggacgccgcggggccccagtagggtcacggcggaacagtgggcgccacaacggtgtgttcctcagaggagaatcggggccaagagacataagggccgggggtttctcccataagaaa

SEQ ID NO: 732600 - DNA, 4586 bp, Homo sapiens
atattaactgatgctgtctctaccacacatcacttttaaacttctggaacctgcccaccactgcccaagtaataattgaagccaagccacccaaagtttccgaggggaaggatgttcttctacttgtccacaatttgccccagaatcttactggctacatctggtacaaagggcaaatgacggacctctaccattacattacatcatatgtagtacacggtcaaattatatatgggcctgcctacagtggacgagaaacagtatattccaatgcatccctgctgatccagaatgtcacacaggaggatgcaggatcctacaccttacacatcataaagcgaggcgatgggactggaggagtaactggatatttcactgtcaccttatactatgtgggacaactacaaaggctgtcacatacacttaacgggaatacttgtggtttggggaccagatggaggtggccagcggagactcccaagccctccatctccagcagcaacttaaaccccagggaggtcatggaggctgtgcgcttaatctgtgatcctgagactccggatgcaagctacctgtggttgctgaatggtcagaacctccctatgactcacaggttgcagctgtccaaaaccaacaggaccctctatctatttggtgtcacaaagtatattgcaggaccctatgaatgtgaaatacggaacccagtgagtgccagccgcagtgacccagtcaccctgaatctcctcccgaagctgcccatgccttacatcaccatcaacaacttaaaccccagggagaagaaggatgtgttagccttcacctgtgaacctaagagtcggaactacacctacatttggtggctaaatggtcagagcctcccggtcagtccgagggtaaagcgacccattgaaaacaggatactcattctacccagtgtcacgagaaatgaaacaggaccctatcaatgtgaaatacgggaccgatatggtggcatccgcagtaacccagtcaccctgaatgtcctctatggtccagacctccccagaatttacccttcattcacctattaccgttcaggagaaaacctcgacttgtcctgctttgcggactctaacccaccggcagagtattcttggacaattaatgggaagtttcagctatcaggacaaaagctctttatcccccaaattactacaaatcatagcgggctctatgcttgctctgttcgtaactcagccactggcaaggaaatctccaaatccatgatagtcaaagtctctggtaagtggatcccagcatccttggcaatagggttttaggtggagtctatctggctttcagagaagagtcaggaaaacatttgtattcccagactgtgtcccatgggcacaagcaaatcccaaattctcctcctgaaccctcccaacttatctctacagactctcttctgcttgtttttctgttttctcatggctgaccttgtgtctggcctgagaaaggtagggagggggctttatcagccctgagccctatgtggtagaagaggcttcacagagggacaagaaggagagtcctcaagatcaagttgcttctcgctgtcacgaacacatccccttctgccatgtctttgttttcttgtacctattccatgagctacaaggaacatctgaggctttgaaacaagctcacacttttcccccaaatgagaggaggaagccctttgggtgagggaggagcagctcagactctgcttcctgctctgctccgggctcctctggtgactggcctggccctgcctgactccacctggggtggaaccaacatgtgtggagaaagggccctggtggcctgtcctgaagttggctaaatcgagctgccagttgaagccaagcctcccccgggccaggctgcagggaaataagaagagagggagcttcagggctgactcctgagctgcatcctggctctgaagtcaccagctgtatgaggctttgggcacagcacgtgggacacagcacggaggacagtgactgatgcagagctagagaaatagggagattcacccctggggctctgcatggcaggaaaggggcagtgccaaaaagtgtgtaattatagagagggcaagaccacgagacactttatatatatctaatattagacttaccattaactaagtgtgcaatttagtgttgtgtaactatcacactatccatttccagaactttttcctcttaccatattaaacctctgtacccaataaacagtaactctcactccttctccccctaacccttaacacccaccattctactttctgtctctatgtaactggctattctaactatcttttataaatggaattatataataattatccttttgtgtctggcttatttcagttggcataatatcttcaaggttcatccattttgcacgatgtattgtaattttcttccttgttaaggttgaataacatttcaatgtatagatacatctcatttgcctacccacttatctttcaatggacttttcagttgtttccatttttggctagtgtgagtaatgcttctctgtacatcagtgtacaaatatttcttcaaatttctttcaattctatagggagtatgtccagaaggggaattgctggatcaaatggtaatttattgtttaattttttgaaaaacagccacactactttttacattggctataacatttcccattcccatcagcaatgcactagagctccaatttttccatctacttggaaacacctgttgtttagtgttgctgtcattgttgttgtttatcaaagccatcctaaagtgtgtgaggtgttgtaacattgtggttttgatttgcatatctctaagtattcgtgatgctgaggaactttgcatgggctatataaaaggttttgatttttatgaagtctgatttatccattttatttgttgcctatgcttttgttgttacaaccaagaaatcattgtgaaatccactatcatgaagtttttcttctaagagttgtatagtttttactcttacatttagatctttgatctattgtgggttaatttttgtacatggtgttaggtaaaggttccactcttcttgcccttggatatccacctttcccaatatcatttggtgagaacactgtcccttccccattgaacgatcttggcacactcgatgaaaatcatttggccatatatgcaagcatttctttctgggctatgatatttcattaatttctatgtcctcctttatgccagtaccacactgtattgattactggggctttgtagtaaatgctgaaatcaggaagtgtgagtcctccagcttcattcttcctcttcaaagctgtgtgtctatttagagtcatgagatgcaatataaattttaggacagatttttctttttctgcaaaaatgtcactgagattctgataggaattgtattgaatctgcagctcactttgggcagcactgtcctcctaacaatattgagtcttccaattcatgaacacaaaatgtctttcaatttattgatgtcatctttcatttctttcagcaatactttgtagatttcaggtataatcatttcacctctttggttaaacttattcctaaatattttattctttttgatgtgaatataaattgaaattatttttcttaatttcccttcagattgttcatggttagtgtattgaaatacaactgatgtttgaatgttgattttgtattgtgcaacattactgaatttattaattctaataggtttgttccatctttaggattttctacaaataagttcaagttatctataaacagaaataattttactccttccttccaatttgaatgtctttttaaaaattcttccctaatttttctgattagacctttcactactatgttgaataaaagtgtcaatagcaggcatccttgtcttttcctgctcatacagggaaagttttcagtctttctctgttatgtaagatgttagcattgggtttttcacatattgcctttatgttgaggtggttgccttccattcttagaatgtttttattatgaaaaaatactgaatttcatcaaatgcttttattgattcaatcttcttactgattatagttatattcatatttttgtgtgtttctaggagtttgtctatttcatctaggttatccaatttattggcatacaattatttatagtactttcataatcattattttattagaattggtagtaatcgcttcatttttcttttttctttttcttttaagacagagagacaggctctcactctgtaggccaccctaggatggaatacagtggtgtgattatggctcactgcagcctcaacctcctgggctcaagcaattctccttcttcagcctcccaagatgctaggactacaggtgcatgtcaacatgcccagctaattggttttttttttttttgtagagacagcatctccccaggttacctatgctggtccaaacacctggtttcaagaaatccttctgctgtgacctcccaaagtgctaggattaaaacatgacccaccat

SEQ ID NO: 732601 - DNA, 3205 bp, Homo sapiens
  misc_feature (3047)..(3047): n is a, c, g, or t
  misc_feature (3049)..(3049): n is a, c, g, or t
  misc_feature (3055)..(3057): n is a, c, g, or t
atattaactgatgctgtctctaccacacatcacttttaaacttctggaacctgcccaccactgcccaagtaataattgaagccaagccacccaaagtttccgaggggaaggatgttcttctacttgtccacaatttgccccagaatcttactggctacatctggtacaaagggcaaatgacggacctctaccattacattacatcatatgtagtacacggtcaaattatatatgggcctgcctacagtggacgagaaacagtatattccaatgcatccctgctgatccagaatgtcacacaggaggatgcaggatcctacaccttacacatcataaagcgaggcgatgggactggaggagtaactggatatttcactgtcaccttatactatgtgggacaactacaaaggctgtcacatacacttaacgggaatacttgtggtttggggaccagatggaggtggccagcggagactcccaagccctccatctccagcagcaacttaaaccccagggaggtcatggaggctgtgcgcttaatctgtgatcctgagactccggatgcaagctacctgtggttgctgaatggtcagaacctccctatgactcacaggttgcagctgtccaaaaccaacaggaccctctatctatttggtgtcacaaagtatattgcaggaccctatgaatgtgaaatacggaacccagtgagtgccagccgcagtgacccagtcaccctgaatctcctccgtgggagatgccaactctgaatgaaggatgcctgtggaggaatcaaaggtgccacacaggacaatcttctgttatccacacagcgaagctgcccatgccttacatcaccatcaacaacttaaaccccagggagaagaaggatgtgttagccttcacctgtgaacctaagagtcggaactacacctacatttggtggctaaatggtcagagcctcccggtcagtccgagggtaaagcgacccattgaaaacaggatactcattctacccagtgtcacgagaaatgaaacaggaccctatcaatgtgaaatacgggaccgatatggtggcatccgcagtaacccagtcaccctgaatgtcctctatggtccagacctccccagaatttacccttcattcacctattaccgttcaggagaaaacctcgacttgtcctgctttgcggactctaacccaccggcagagtattcttggacaattaatgggaagtttcagctatcaggacaaaagctctttatcccccaaattactacaaatcatagcgggctctatgcttgctctgttcgtaactcagccactggcaaggaaatctccaaatccatgatagtcaaagtctctgagacagcatctccccaggttacctatgctggtccaaacacctggtttcaagaaatccttctgctgtgacctcccaaagtgctaggattaaaacatgacccaccatgctcagagtccattttcatttatgatttgagtaattttatcttttctctttttttcttagccaatctagttaatggttgtcaattttgttgattttattttgaagaatcaacttttggtttcagtaatttcctctattctgtttccattctccattttatttatatccaccctaatacttattatttccctcattcactgtgcttgggtttagtttgttcttctttcgtatcctgaagtattaaagtaggttgttgacctgagctctttcttcttttttaatgtaagagtttacagttataaatttcttgcacaagactcaacttctctgaacccctgattcctcacctgaaaattgcaataagagtactttcttcataccattcttttaaaggtttaatgcagtcaatgaaacaagatgccacacaaagaggaaccaatgtcagctgctatattactaccatcatcattagccttgaggtcaaatagtcctagaatcaaatctcagatccacctgtcactagccatatgacaccaggaaagtttttacaccatgctaagcttctgtcttttcatcagcaaaatggaaataatgcctacctgacagggttattgtgtggattaaatgagatacaggtaaagtattgagcacagggcctggcacatagaaagtgcacctcaacagtacctacctttttccatagatatgaaaaaagcggtaacacataaaacactaggacatggttactgactaattgtgggagagaaagaaaaaaagctaagtgcaaagaatcaagtctggtatgttagtttttaccaactgagatgcatccaagatgggattagacatacaagataatttatcagggaagacacctgtgagggaatgtggggcaggcatgaaggtagtatgggagaacccacagaccgctatgcagagctgattcctgtgaaaaagaaagagaaagaagttttaggtaccaatgcagttctaagagtttttgcaaggctgatgaggaatcctccaaccagtcacccattggagttaaagagagcctcggagaactagacttgctttcacacccttgctgggagcctgtgggaaagaagctttctctgtaaaggaggtagtgaatttgaaatgcgctgacctgggccttctgtcaatcaggtccctgccatggaaaccagacagagtctcattaatggctgccacaatagagacactgagaaaaagaacaggttgataccttcatgaaattcaagacaaagaagaaaaaaactcaatgttattggactaaataatcaaaaggataatgttttcataattttttattggaaaatgtgctgattcttggaatgttttattctccagatttatgaactttttttcttcagcaattggtaaagtatacttttgtaaacaaaaattgaaacatttgcttttgctctctatctgagtgccccagaattgggaaactattcatgagtattcataggtttatggtaataaagttatttgcacaagttcaaaaaaaaaaaaaaaaaaacaaaaaaaaacagttgttggggcggcctngnggcccnnngaaaaagcttttctgagaacacattgctttgggacgccgcggggccccagtagggtcacggcggaacagtgggcgccacaacggtgtgttcctcagaggagaatcggggccaagagacataagggccgggggtttctcccataagaaa

SEQ ID NO: 732602 - DNA, 4307 bp, Homo sapiens
atattaactgatgctgtctctaccacacatcacttttaaacttctggaacctgcccaccactgcccaagtaataattgaagccaagccacccaaagtttccgaggggaaggatgttcttctacttgtccacaatttgccccagaatcttactggctacatctggtacaaagggcaaatgacggacctctaccattacattacatcatatgtagtacacggtcaaattatatatgggcctgcctacagtggacgagaaacagtatattccaatgcatccctgctgatccagaatgtcacacaggaggatgcaggatcctacaccttacacatcataaagcgaggcgatgggactggaggagtaactggatatttcactgtcaccttatactatgtgggacaactacaaaggctgtcacatacacttaacgggaatacttgtggtttggggaccagatggaggtggccagcggagactcccaagccctccatctccagcagcaacttaaaccccagggaggtcatggaggctgtgcgcttaatctgtgatcctgagactccggatgcaagctacctgtggttgctgaatggtcagaacctccctatgactcacaggttgcagctgtccaaaaccaacaggaccctctatctatttggtgtcacaaagtatattgcaggaccctatgaatgtgaaatacggaacccagtgagtgccagccgcagtgacccagtcaccctgaatctcctccatggtccagacctccccagaatttacccttcattcacctattaccgttcaggagaaaacctcgacttgtcctgctttgcggactctaacccaccggcagagtattcttggacaattaatgggaagtttcagctatcaggacaaaagctctttatcccccaaattactacaaatcatagcgggctctatgcttgctctgttcgtaactcagccactggcaaggaaatctccaaatccatgatagtcaaagtctctggtaagtggatcccagcatccttggcaatagggttttaggtggagtctatctggctttcagagaagagtcaggaaaacatttgtattcccagactgtgtcccatgggcacaagcaaatcccaaattctcctcctgaaccctcccaacttatctctacagactctcttctgcttgtttttctgttttctcatggctgaccttgtgtctggcctgagaaaggtagggagggggctttatcagccctgagccctatgtggtagaagaggcttcacagagggacaagaaggagagtcctcaagatcaagttgcttctcgctgtcacgaacacatccccttctgccatgtctttgttttcttgtacctattccatgagctacaaggaacatctgaggctttgaaacaagctcacacttttcccccaaatgagaggaggaagccctttgggtgagggaggagcagctcagactctgcttcctgctctgctccgggctcctctggtgactggcctggccctgcctgactccacctggggtggaaccaacatgtgtggagaaagggccctggtggcctgtcctgaagttggctaaatcgagctgccagttgaagccaagcctcccccgggccaggctgcagggaaataagaagagagggagcttcagggctgactcctgagctgcatcctggctctgaagtcaccagctgtatgaggctttgggcacagcacgtgggacacagcacggaggacagtgactgatgcagagctagagaaatagggagattcacccctggggctctgcatggcaggaaaggggcagtgccaaaaagtgtgtaattatagagagggcaagaccacgagacactttatatatatctaatattagacttaccattaactaagtgtgcaatttagtgttgtgtaactatcacactatccatttccagaactttttcctcttaccatattaaacctctgtacccaataaacagtaactctcactccttctccccctaacccttaacacccaccattctactttctgtctctatgtaactggctattctaactatcttttataaatggaattatataataattatccttttgtgtctggcttatttcagttggcataatatcttcaaggttcatccattttgcacgatgtattgtaattttcttccttgttaaggttgaataacatttcaatgtatagatacatctcatttgcctacccacttatctttcaatggacttttcagttgtttccatttttggctagtgtgagtaatgcttctctgtacatcagtgtacaaatatttcttcaaatttctttcaattctatagggagtatgtccagaaggggaattgctggatcaaatggtaatttattgtttaattttttgaaaaacagccacactactttttacattggctataacatttcccattcccatcagcaatgcactagagctccaatttttccatctacttggaaacacctgttgtttagtgttgctgtcattgttgttgtttatcaaagccatcctaaagtgtgtgaggtgttgtaacattgtggttttgatttgcatatctctaagtattcgtgatgctgaggaactttgcatgggctatataaaaggttttgatttttatgaagtctgatttatccattttatttgttgcctatgcttttgttgttacaaccaagaaatcattgtgaaatccactatcatgaagtttttcttctaagagttgtatagtttttactcttacatttagatctttgatctattgtgggttaatttttgtacatggtgttaggtaaaggttccactcttcttgcccttggatatccacctttcccaatatcatttggtgagaacactgtcccttccccattgaacgatcttggcacactcgatgaaaatcatttggccatatatgcaagcatttctttctgggctatgatatttcattaatttctatgtcctcctttatgccagtaccacactgtattgattactggggctttgtagtaaatgctgaaatcaggaagtgtgagtcctccagcttcattcttcctcttcaaagctgtgtgtctatttagagtcatgagatgcaatataaattttaggacagatttttctttttctgcaaaaatgtcactgagattctgataggaattgtattgaatctgcagctcactttgggcagcactgtcctcctaacaatattgagtcttccaattcatgaacacaaaatgtctttcaatttattgatgtcatctttcatttctttcagcaatactttgtagatttcaggtataatcatttcacctctttggttaaacttattcctaaatattttattctttttgatgtgaatataaattgaaattatttttcttaatttcccttcagattgttcatggttagtgtattgaaatacaactgatgtttgaatgttgattttgtattgtgcaacattactgaatttattaattctaataggtttgttccatctttaggattttctacaaataagttcaagttatctataaacagaaataattttactccttccttccaatttgaatgtctttttaaaaattcttccctaatttttctgattagacctttcactactatgttgaataaaagtgtcaatagcaggcatccttgtcttttcctgctcatacagggaaagttttcagtctttctctgttatgtaagatgttagcattgggtttttcacatattgcctttatgttgaggtggttgccttccattcttagaatgtttttattatgaaaaaatactgaatttcatcaaatgcttttattgattcaatcttcttactgattatagttatattcatatttttgtgtgtttctaggagtttgtctatttcatctaggttatccaatttattggcatacaattatttatagtactttcataatcattattttattagaattggtagtaatcgcttcatttttcttttttctttttcttttaagacagagagacaggctctcactctgtaggccaccctaggatggaatacagtggtgtgattatggctcactgcagcctcaacctcctgggctcaagcaattctccttcttcagcctcccaagatgctaggactacaggtgcatgtcaacatgcccagctaattggttttttttttttttgtagagacagcatctccccaggttacctatgctggtccaaacacctggtttcaagaaatccttctgctgtgacctcccaaagtgctaggattaaaacatgacccaccat

SEQ ID NO: 732603 - DNA, 1852 bp, Homo sapiens
  misc_feature (1694)..(1694): n is a, c, g, or t
  misc_feature (1696)..(1696): n is a, c, g, or t
  misc_feature (1702)..(1704): n is a, c, g, or t
atattaactgatgctgtctctaccacacatcacttttaaacttctggaacctgcccaccactgcccaagtaataattgaagccaagccacccaaagtttccgaggggaaggatgttcttctacttgtccacaatttgccccagaatcttactggctacatctggtacaaagggcaaatgacggacctctaccattacattacatcatatgtagtacacggtcaaattatatatgggcctgcctacagtggacgagaaacagtatattccaatgcatccctgctgatccagaatgtcacacaggaggatgcaggatcctacaccttacacatcataaagcgaggcgatgggactggaggagtaactggatatttcactgtcaccttatactcggagactcccaagccctccatctccagcagcaacttaaaccccagggaggtcatggaggctgtgcgcttaatctgtgatcctgagactccggatgcaagctacctgtggttgctgaatggtcagaacctccctatgactcacaggttgcagctgtccaaaaccaacaggaccctctatctatttggtgtcacaaagtatattgcaggaccctatgaatgtgaaatacggaacccagtgagtgccagccgcagtgacccagtcaccctgaatctcctccgtgggagatgccaactctgaatgaaggatgcctgtggaggaatcaaaggtgccacacaggacaatcttctgttatccacacagcgaagctgcccatgccttacatcaccatcaacaacttaaaccccagggagaagaaggatgtgttagccttcacctgtgaacctaagagtcggaactacacctacatttggtggctaaatggtcagagcctcccggtcagtccgagggtaaagcgacccattgaaaacaggatactcattctacccagtgtcacgagaaatgaaacaggaccctatcaatgtgaaatacgggaccgatatggtggcatccgcagtaacccagtcaccctgaatgtcctctatggtccagacctccccagaatttacccttcattcacctattaccgttcaggagaaaacctcgacttgtcctgctttgcggactctaacccaccggcagagtattcttggacaattaatgggaagtttcagctatcaggacaaaagctctttatcccccaaattactacaaatcatagcgggctctatgcttgctctgttcgtaactcagccactggcaaggaaatctccaaatccatgatagtcaaagtctctggtccctgccatggaaaccagacagagtctcattaatggctgccacaatagagacactgagaaaaagaacaggttgataccttcatgaaattcaagacaaagaagaaaaaaactcaatgttattggactaaataatcaaaaggataatgttttcataattttttattggaaaatgtgctgattcttggaatgttttattctccagatttatgaactttttttcttcagcaattggtaaagtatacttttgtaaacaaaaattgaaacatttgcttttgctctctatctgagtgccccagaattgggaaactattcatgagtattcataggtttatggtaataaagttatttgcacaagttcaaaaaaaaaaaaaaaaaaacaaaaaaaaacagttgttggggcggcctngnggcccnnngaaaaagcttttctgagaacacattgctttgggacgccgcggggccccagtagggtcacggcggaacagtgggcgccacaacggtgtgttcctcagaggagaatcggggccaagagacataagggccgggggtttctcccataagaaa

SEQ ID NO: 732604 - DNA, 4508 bp, Homo sapiens
atattaactgatgctgtctctaccacacatcacttttaaacttctggaacctgcccaccactgcccaagtaataattgaagccaagccacccaaagtttccgaggggaaggatgttcttctacttgtccacaatttgccccagaatcttactggctacatctggtacaaagggcaaatgacggacctctaccattacattacatcatatgtagtacacggtcaaattatatatgggcctgcctacagtggacgagaaacagtatattccaatgcatccctgctgatccagaatgtcacacaggaggatgcaggatcctacaccttacacatcataaagcgaggcgatgggactggaggagtaactggatatttcactgtcaccttatactcggagactcccaagccctccatctccagcagcaacttaaaccccagggaggtcatggaggctgtgcgcttaatctgtgatcctgagactccggatgcaagctacctgtggttgctgaatggtcagaacctccctatgactcacaggttgcagctgtccaaaaccaacaggaccctctatctatttggtgtcacaaagtatattgcaggaccctatgaatgtgaaatacggaacccagtgagtgccagccgcagtgacccagtcaccctgaatctcctcccgaagctgcccatgccttacatcaccatcaacaacttaaaccccagggagaagaaggatgtgttagccttcacctgtgaacctaagagtcggaactacacctacatttggtggctaaatggtcagagcctcccggtcagtccgagggtaaagcgacccattgaaaacaggatactcattctacccagtgtcacgagaaatgaaacaggaccctatcaatgtgaaatacgggaccgatatggtggcatccgcagtaacccagtcaccctgaatgtcctctatggtccagacctccccagaatttacccttcattcacctattaccgttcaggagaaaacctcgacttgtcctgctttgcggactctaacccaccggcagagtattcttggacaattaatgggaagtttcagctatcaggacaaaagctctttatcccccaaattactacaaatcatagcgggctctatgcttgctctgttcgtaactcagccactggcaaggaaatctccaaatccatgatagtcaaagtctctggtaagtggatcccagcatccttggcaatagggttttaggtggagtctatctggctttcagagaagagtcaggaaaacatttgtattcccagactgtgtcccatgggcacaagcaaatcccaaattctcctcctgaaccctcccaacttatctctacagactctcttctgcttgtttttctgttttctcatggctgaccttgtgtctggcctgagaaaggtagggagggggctttatcagccctgagccctatgtggtagaagaggcttcacagagggacaagaaggagagtcctcaagatcaagttgcttctcgctgtcacgaacacatccccttctgccatgtctttgttttcttgtacctattccatgagctacaaggaacatctgaggctttgaaacaagctcacacttttcccccaaatgagaggaggaagccctttgggtgagggaggagcagctcagactctgcttcctgctctgctccgggctcctctggtgactggcctggccctgcctgactccacctggggtggaaccaacatgtgtggagaaagggccctggtggcctgtcctgaagttggctaaatcgagctgccagttgaagccaagcctcccccgggccaggctgcagggaaataagaagagagggagcttcagggctgactcctgagctgcatcctggctctgaagtcaccagctgtatgaggctttgggcacagcacgtgggacacagcacggaggacagtgactgatgcagagctagagaaatagggagattcacccctggggctctgcatggcaggaaaggggcagtgccaaaaagtgtgtaattatagagagggcaagaccacgagacactttatatatatctaatattagacttaccattaactaagtgtgcaatttagtgttgtgtaactatcacactatccatttccagaactttttcctcttaccatattaaacctctgtacccaataaacagtaactctcactccttctccccctaacccttaacacccaccattctactttctgtctctatgtaactggctattctaactatcttttataaatggaattatataataattatccttttgtgtctggcttatttcagttggcataatatcttcaaggttcatccattttgcacgatgtattgtaattttcttccttgttaaggttgaataacatttcaatgtatagatacatctcatttgcctacccacttatctttcaatggacttttcagttgtttccatttttggctagtgtgagtaatgcttctctgtacatcagtgtacaaatatttcttcaaatttctttcaattctatagggagtatgtccagaaggggaattgctggatcaaatggtaatttattgtttaattttttgaaaaacagccacactactttttacattggctataacatttcccattcccatcagcaatgcactagagctccaatttttccatctacttggaaacacctgttgtttagtgttgctgtcattgttgttgtttatcaaagccatcctaaagtgtgtgaggtgttgtaacattgtggttttgatttgcatatctctaagtattcgtgatgctgaggaactttgcatgggctatataaaaggttttgatttttatgaagtctgatttatccattttatttgttgcctatgcttttgttgttacaaccaagaaatcattgtgaaatccactatcatgaagtttttcttctaagagttgtatagtttttactcttacatttagatctttgatctattgtgggttaatttttgtacatggtgttaggtaaaggttccactcttcttgcccttggatatccacctttcccaatatcatttggtgagaacactgtcccttccccattgaacgatcttggcacactcgatgaaaatcatttggccatatatgcaagcatttctttctgggctatgatatttcattaatttctatgtcctcctttatgccagtaccacactgtattgattactggggctttgtagtaaatgctgaaatcaggaagtgtgagtcctccagcttcattcttcctcttcaaagctgtgtgtctatttagagtcatgagatgcaatataaattttaggacagatttttctttttctgcaaaaatgtcactgagattctgataggaattgtattgaatctgcagctcactttgggcagcactgtcctcctaacaatattgagtcttccaattcatgaacacaaaatgtctttcaatttattgatgtcatctttcatttctttcagcaatactttgtagatttcaggtataatcatttcacctctttggttaaacttattcctaaatattttattctttttgatgtgaatataaattgaaattatttttcttaatttcccttcagattgttcatggttagtgtattgaaatacaactgatgtttgaatgttgattttgtattgtgcaacattactgaatttattaattctaataggtttgttccatctttaggattttctacaaataagttcaagttatctataaacagaaataattttactccttccttccaatttgaatgtctttttaaaaattcttccctaatttttctgattagacctttcactactatgttgaataaaagtgtcaatagcaggcatccttgtcttttcctgctcatacagggaaagttttcagtctttctctgttatgtaagatgttagcattgggtttttcacatattgcctttatgttgaggtggttgccttccattcttagaatgtttttattatgaaaaaatactgaatttcatcaaatgcttttattgattcaatcttcttactgattatagttatattcatatttttgtgtgtttctaggagtttgtctatttcatctaggttatccaatttattggcatacaattatttatagtactttcataatcattattttattagaattggtagtaatcgcttcatttttcttttttctttttcttttaagacagagagacaggctctcactctgtaggccaccctaggatggaatacagtggtgtgattatggctcactgcagcctcaacctcctgggctcaagcaattctccttcttcagcctcccaagatgctaggactacaggtgcatgtcaacatgcccagctaattggttttttttttttttgtagagacagcatctccccaggttacctatgctggtccaaacacctggtttcaagaaatccttctgctgtgacctcccaaagtgctaggattaaaacatgacccaccat

SEQ ID NO: 732605 - DNA, 3127 bp, Homo sapiens
  misc_feature (2969)..(2969): n is a, c, g, or t
  misc_feature (2971)..(2971): n is a, c, g, or t
  misc_feature (2977)..(2979): n is a, c, g, or t
atattaactgatgctgtctctaccacacatcacttttaaacttctggaacctgcccaccactgcccaagtaataattgaagccaagccacccaaagtttccgaggggaaggatgttcttctacttgtccacaatttgccccagaatcttactggctacatctggtacaaagggcaaatgacggacctctaccattacattacatcatatgtagtacacggtcaaattatatatgggcctgcctacagtggacgagaaacagtatattccaatgcatccctgctgatccagaatgtcacacaggaggatgcaggatcctacaccttacacatcataaagcgaggcgatgggactggaggagtaactggatatttcactgtcaccttatactcggagactcccaagccctccatctccagcagcaacttaaaccccagggaggtcatggaggctgtgcgcttaatctgtgatcctgagactccggatgcaagctacctgtggttgctgaatggtcagaacctccctatgactcacaggttgcagctgtccaaaaccaacaggaccctctatctatttggtgtcacaaagtatattgcaggaccctatgaatgtgaaatacggaacccagtgagtgccagccgcagtgacccagtcaccctgaatctcctccgtgggagatgccaactctgaatgaaggatgcctgtggaggaatcaaaggtgccacacaggacaatcttctgttatccacacagcgaagctgcccatgccttacatcaccatcaacaacttaaaccccagggagaagaaggatgtgttagccttcacctgtgaacctaagagtcggaactacacctacatttggtggctaaatggtcagagcctcccggtcagtccgagggtaaagcgacccattgaaaacaggatactcattctacccagtgtcacgagaaatgaaacaggaccctatcaatgtgaaatacgggaccgatatggtggcatccgcagtaacccagtcaccctgaatgtcctctatggtccagacctccccagaatttacccttcattcacctattaccgttcaggagaaaacctcgacttgtcctgctttgcggactctaacccaccggcagagtattcttggacaattaatgggaagtttcagctatcaggacaaaagctctttatcccccaaattactacaaatcatagcgggctctatgcttgctctgttcgtaactcagccactggcaaggaaatctccaaatccatgatagtcaaagtctctgagacagcatctccccaggttacctatgctggtccaaacacctggtttcaagaaatccttctgctgtgacctcccaaagtgctaggattaaaacatgacccaccatgctcagagtccattttcatttatgatttgagtaattttatcttttctctttttttcttagccaatctagttaatggttgtcaattttgttgattttattttgaagaatcaacttttggtttcagtaatttcctctattctgtttccattctccattttatttatatccaccctaatacttattatttccctcattcactgtgcttgggtttagtttgttcttctttcgtatcctgaagtattaaagtaggttgttgacctgagctctttcttcttttttaatgtaagagtttacagttataaatttcttgcacaagactcaacttctctgaacccctgattcctcacctgaaaattgcaataagagtactttcttcataccattcttttaaaggtttaatgcagtcaatgaaacaagatgccacacaaagaggaaccaatgtcagctgctatattactaccatcatcattagccttgaggtcaaatagtcctagaatcaaatctcagatccacctgtcactagccatatgacaccaggaaagtttttacaccatgctaagcttctgtcttttcatcagcaaaatggaaataatgcctacctgacagggttattgtgtggattaaatgagatacaggtaaagtattgagcacagggcctggcacatagaaagtgcacctcaacagtacctacctttttccatagatatgaaaaaagcggtaacacataaaacactaggacatggttactgactaattgtgggagagaaagaaaaaaagctaagtgcaaagaatcaagtctggtatgttagtttttaccaactgagatgcatccaagatgggattagacatacaagataatttatcagggaagacacctgtgagggaatgtggggcaggcatgaaggtagtatgggagaacccacagaccgctatgcagagctgattcctgtgaaaaagaaagagaaagaagttttaggtaccaatgcagttctaagagtttttgcaaggctgatgaggaatcctccaaccagtcacccattggagttaaagagagcctcggagaactagacttgctttcacacccttgctgggagcctgtgggaaagaagctttctctgtaaaggaggtagtgaatttgaaatgcgctgacctgggccttctgtcaatcaggtccctgccatggaaaccagacagagtctcattaatggctgccacaatagagacactgagaaaaagaacaggttgataccttcatgaaattcaagacaaagaagaaaaaaactcaatgttattggactaaataatcaaaaggataatgttttcataattttttattggaaaatgtgctgattcttggaatgttttattctccagatttatgaactttttttcttcagcaattggtaaagtatacttttgtaaacaaaaattgaaacatttgcttttgctctctatctgagtgccccagaattgggaaactattcatgagtattcataggtttatggtaataaagttatttgcacaagttcaaaaaaaaaaaaaaaaaaacaaaaaaaaacagttgttggggcggcctngnggcccnnngaaaaagcttttctgagaacacattgctttgggacgccgcggggccccagtagggtcacggcggaacagtgggcgccacaacggtgtgttcctcagaggagaatcggggccaagagacataagggccgggggtttctcccataagaaa

SEQ ID NO: 732606 - DNA, 4229 bp, Homo sapiens
atattaactgatgctgtctctaccacacatcacttttaaacttctggaacctgcccaccactgcccaagtaataattgaagccaagccacccaaagtttccgaggggaaggatgttcttctacttgtccacaatttgccccagaatcttactggctacatctggtacaaagggcaaatgacggacctctaccattacattacatcatatgtagtacacggtcaaattatatatgggcctgcctacagtggacgagaaacagtatattccaatgcatccctgctgatccagaatgtcacacaggaggatgcaggatcctacaccttacacatcataaagcgaggcgatgggactggaggagtaactggatatttcactgtcaccttatactcggagactcccaagccctccatctccagcagcaacttaaaccccagggaggtcatggaggctgtgcgcttaatctgtgatcctgagactccggatgcaagctacctgtggttgctgaatggtcagaacctccctatgactcacaggttgcagctgtccaaaaccaacaggaccctctatctatttggtgtcacaaagtatattgcaggaccctatgaatgtgaaatacggaacccagtgagtgccagccgcagtgacccagtcaccctgaatctcctccatggtccagacctccccagaatttacccttcattcacctattaccgttcaggagaaaacctcgacttgtcctgctttgcggactctaacccaccggcagagtattcttggacaattaatgggaagtttcagctatcaggacaaaagctctttatcccccaaattactacaaatcatagcgggctctatgcttgctctgttcgtaactcagccactggcaaggaaatctccaaatccatgatagtcaaagtctctggtaagtggatcccagcatccttggcaatagggttttaggtggagtctatctggctttcagagaagagtcaggaaaacatttgtattcccagactgtgtcccatgggcacaagcaaatcccaaattctcctcctgaaccctcccaacttatctctacagactctcttctgcttgtttttctgttttctcatggctgaccttgtgtctggcctgagaaaggtagggagggggctttatcagccctgagccctatgtggtagaagaggcttcacagagggacaagaaggagagtcctcaagatcaagttgcttctcgctgtcacgaacacatccccttctgccatgtctttgttttcttgtacctattccatgagctacaaggaacatctgaggctttgaaacaagctcacacttttcccccaaatgagaggaggaagccctttgggtgagggaggagcagctcagactctgcttcctgctctgctccgggctcctctggtgactggcctggccctgcctgactccacctggggtggaaccaacatgtgtggagaaagggccctggtggcctgtcctgaagttggctaaatcgagctgccagttgaagccaagcctcccccgggccaggctgcagggaaataagaagagagggagcttcagggctgactcctgagctgcatcctggctctgaagtcaccagctgtatgaggctttgggcacagcacgtgggacacagcacggaggacagtgactgatgcagagctagagaaatagggagattcacccctggggctctgcatggcaggaaaggggcagtgccaaaaagtgtgtaattatagagagggcaagaccacgagacactttatatatatctaatattagacttaccattaactaagtgtgcaatttagtgttgtgtaactatcacactatccatttccagaactttttcctcttaccatattaaacctctgtacccaataaacagtaactctcactccttctccccctaacccttaacacccaccattctactttctgtctctatgtaactggctattctaactatcttttataaatggaattatataataattatccttttgtgtctggcttatttcagttggcataatatcttcaaggttcatccattttgcacgatgtattgtaattttcttccttgttaaggttgaataacatttcaatgtatagatacatctcatttgcctacccacttatctttcaatggacttttcagttgtttccatttttggctagtgtgagtaatgcttctctgtacatcagtgtacaaatatttcttcaaatttctttcaattctatagggagtatgtccagaaggggaattgctggatcaaatggtaatttattgtttaattttttgaaaaacagccacactactttttacattggctataacatttcccattcccatcagcaatgcactagagctccaatttttccatctacttggaaacacctgttgtttagtgttgctgtcattgttgttgtttatcaaagccatcctaaagtgtgtgaggtgttgtaacattgtggttttgatttgcatatctctaagtattcgtgatgctgaggaactttgcatgggctatataaaaggttttgatttttatgaagtctgatttatccattttatttgttgcctatgcttttgttgttacaaccaagaaatcattgtgaaatccactatcatgaagtttttcttctaagagttgtatagtttttactcttacatttagatctttgatctattgtgggttaatttttgtacatggtgttaggtaaaggttccactcttcttgcccttggatatccacctttcccaatatcatttggtgagaacactgtcccttccccattgaacgatcttggcacactcgatgaaaatcatttggccatatatgcaagcatttctttctgggctatgatatttcattaatttctatgtcctcctttatgccagtaccacactgtattgattactggggctttgtagtaaatgctgaaatcaggaagtgtgagtcctccagcttcattcttcctcttcaaagctgtgtgtctatttagagtcatgagatgcaatataaattttaggacagatttttctttttctgcaaaaatgtcactgagattctgataggaattgtattgaatctgcagctcactttgggcagcactgtcctcctaacaatattgagtcttccaattcatgaacacaaaatgtctttcaatttattgatgtcatctttcatttctttcagcaatactttgtagatttcaggtataatcatttcacctctttggttaaacttattcctaaatattttattctttttgatgtgaatataaattgaaattatttttcttaatttcccttcagattgttcatggttagtgtattgaaatacaactgatgtttgaatgttgattttgtattgtgcaacattactgaatttattaattctaataggtttgttccatctttaggattttctacaaataagttcaagttatctataaacagaaataattttactccttccttccaatttgaatgtctttttaaaaattcttccctaatttttctgattagacctttcactactatgttgaataaaagtgtcaatagcaggcatccttgtcttttcctgctcatacagggaaagttttcagtctttctctgttatgtaagatgttagcattgggtttttcacatattgcctttatgttgaggtggttgccttccattcttagaatgtttttattatgaaaaaatactgaatttcatcaaatgcttttattgattcaatcttcttactgattatagttatattcatatttttgtgtgtttctaggagtttgtctatttcatctaggttatccaatttattggcatacaattatttatagtactttcataatcattattttattagaattggtagtaatcgcttcatttttcttttttctttttcttttaagacagagagacaggctctcactctgtaggccaccctaggatggaatacagtggtgtgattatggctcactgcagcctcaacctcctgggctcaagcaattctccttcttcagcctcccaagatgctaggactacaggtgcatgtcaacatgcccagctaattggttttttttttttttgtagagacagcatctccccaggttacctatgctggtccaaacacctggtttcaagaaatccttctgctgtgacctcccaaagtgctaggattaaaacatgacccaccat

SEQ ID NO: 732607 - DNA, 4647 bp, Homo sapiens
agcacagaaggaggaaggacagcacacctgacagccctgctcaggaagtctctggatcctaggctcatctccacaggggagaacacacagacagcagagaccatgggacccctctcagcccctccctgcactcagcacatcacctggaaggggctcctgctcacagcatcacttttaaacttctggaacctgcccaccactgcccaagtaataattgaagccaagccacccaaagtttccgaggggaaggatgttcttctacttgtccacaatttgccccagaatcttactggctacatctggtacaaagggcaaatgacggacctctaccattacattacatcatatgtagtacacggtcaaattatatatgggcctgcctacagtggacgagaaacagtatattccaatgcatccctgctgatccagaatgtcacacaggaggatgcaggatcctacaccttacacatcataaagcgaggcgatgggactggaggagtaactggatatttcactgtcaccttatactcggagactcccaagccctccatctccagcagcaacttaaaccccagggaggtcatggaggctgtgcgcttaatctgtgatcctgagactccggatgcaagctacctgtggttgctgaatggtcagaacctccctatgactcacaggttgcagctgtccaaaaccaacaggaccctctatctatttggtgtcacaaagtatattgcaggaccctatgaatgtgaaatacggaacccagtgagtgccagccgcagtgacccagtcaccctgaatctcctcccgaagctgcccatgccttacatcaccatcaacaacttaaaccccagggagaagaaggatgtgttagccttcacctgtgaacctaagagtcggaactacacctacatttggtggctaaatggtcagagcctcccggtcagtccgagggtaaagcgacccattgaaaacaggatactcattctacccagtgtcacgagaaatgaaacaggaccctatcaatgtgaaatacgggaccgatatggtggcatccgcagtaacccagtcaccctgaatgtcctctatggtccagacctccccagaatttacccttcattcacctattaccgttcaggagaaaacctcgacttgtcctgctttgcggactctaacccaccggcagagtattcttggacaattaatgggaagtttcagctatcaggacaaaagctctttatcccccaaattactacaaatcatagcgggctctatgcttgctctgttcgtaactcagccactggcaaggaaatctccaaatccatgatagtcaaagtctctggtaagtggatcccagcatccttggcaatagggttttaggtggagtctatctggctttcagagaagagtcaggaaaacatttgtattcccagactgtgtcccatgggcacaagcaaatcccaaattctcctcctgaaccctcccaacttatctctacagactctcttctgcttgtttttctgttttctcatggctgaccttgtgtctggcctgagaaaggtagggagggggctttatcagccctgagccctatgtggtagaagaggcttcacagagggacaagaaggagagtcctcaagatcaagttgcttctcgctgtcacgaacacatccccttctgccatgtctttgttttcttgtacctattccatgagctacaaggaacatctgaggctttgaaacaagctcacacttttcccccaaatgagaggaggaagccctttgggtgagggaggagcagctcagactctgcttcctgctctgctccgggctcctctggtgactggcctggccctgcctgactccacctggggtggaaccaacatgtgtggagaaagggccctggtggcctgtcctgaagttggctaaatcgagctgccagttgaagccaagcctcccccgggccaggctgcagggaaataagaagagagggagcttcagggctgactcctgagctgcatcctggctctgaagtcaccagctgtatgaggctttgggcacagcacgtgggacacagcacggaggacagtgactgatgcagagctagagaaatagggagattcacccctggggctctgcatggcaggaaaggggcagtgccaaaaagtgtgtaattatagagagggcaagaccacgagacactttatatatatctaatattagacttaccattaactaagtgtgcaatttagtgttgtgtaactatcacactatccatttccagaactttttcctcttaccatattaaacctctgtacccaataaacagtaactctcactccttctccccctaacccttaacacccaccattctactttctgtctctatgtaactggctattctaactatcttttataaatggaattatataataattatccttttgtgtctggcttatttcagttggcataatatcttcaaggttcatccattttgcacgatgtattgtaattttcttccttgttaaggttgaataacatttcaatgtatagatacatctcatttgcctacccacttatctttcaatggacttttcagttgtttccatttttggctagtgtgagtaatgcttctctgtacatcagtgtacaaatatttcttcaaatttctttcaattctatagggagtatgtccagaaggggaattgctggatcaaatggtaatttattgtttaattttttgaaaaacagccacactactttttacattggctataacatttcccattcccatcagcaatgcactagagctccaatttttccatctacttggaaacacctgttgtttagtgttgctgtcattgttgttgtttatcaaagccatcctaaagtgtgtgaggtgttgtaacattgtggttttgatttgcatatctctaagtattcgtgatgctgaggaactttgcatgggctatataaaaggttttgatttttatgaagtctgatttatccattttatttgttgcctatgcttttgttgttacaaccaagaaatcattgtgaaatccactatcatgaagtttttcttctaagagttgtatagtttttactcttacatttagatctttgatctattgtgggttaatttttgtacatggtgttaggtaaaggttccactcttcttgcccttggatatccacctttcccaatatcatttggtgagaacactgtcccttccccattgaacgatcttggcacactcgatgaaaatcatttggccatatatgcaagcatttctttctgggctatgatatttcattaatttctatgtcctcctttatgccagtaccacactgtattgattactggggctttgtagtaaatgctgaaatcaggaagtgtgagtcctccagcttcattcttcctcttcaaagctgtgtgtctatttagagtcatgagatgcaatataaattttaggacagatttttctttttctgcaaaaatgtcactgagattctgataggaattgtattgaatctgcagctcactttgggcagcactgtcctcctaacaatattgagtcttccaattcatgaacacaaaatgtctttcaatttattgatgtcatctttcatttctttcagcaatactttgtagatttcaggtataatcatttcacctctttggttaaacttattcctaaatattttattctttttgatgtgaatataaattgaaattatttttcttaatttcccttcagattgttcatggttagtgtattgaaatacaactgatgtttgaatgttgattttgtattgtgcaacattactgaatttattaattctaataggtttgttccatctttaggattttctacaaataagttcaagttatctataaacagaaataattttactccttccttccaatttgaatgtctttttaaaaattcttccctaatttttctgattagacctttcactactatgttgaataaaagtgtcaatagcaggcatccttgtcttttcctgctcatacagggaaagttttcagtctttctctgttatgtaagatgttagcattgggtttttcacatattgcctttatgttgaggtggttgccttccattcttagaatgtttttattatgaaaaaatactgaatttcatcaaatgcttttattgattcaatcttcttactgattatagttatattcatatttttgtgtgtttctaggagtttgtctatttcatctaggttatccaatttattggcatacaattatttatagtactttcataatcattattttattagaattggtagtaatcgcttcatttttcttttttctttttcttttaagacagagagacaggctctcactctgtaggccaccctaggatggaatacagtggtgtgattatggctcactgcagcctcaacctcctgggctcaagcaattctccttcttcagcctcccaagatgctaggactacaggtgcatgtcaacatgcccagctaattggttttttttttttttgtagagacagcatctccccaggttacctatgctggtccaaacacctggtttcaagaaatccttctgctgtgacctcccaaagtgctaggattaaaacatgacccaccat

SEQ ID NO: 732608 - DNA, 2069 bp, Homo sapiens
  misc_feature (1911)..(1911): n is a, c, g, or t
  misc_feature (1913)..(1913): n is a, c, g, or t
  misc_feature (1919)..(1921): n is a, c, g, or t
agcacagaaggaggaaggacagcacacctgacagccctgctcaggaagtctctggatcctaggctcatctccacaggggagaacacacagacagcagagaccatgggacccctctcagcccctccctgcactcagcacatcacctggaaggggctcctgctcacagcatcacttttaaacttctggaacctgcccaccactgcccaagtaataattgaagccaagccacccaaagtttccgaggggaaggatgttcttctacttgtccacaatttgccccagaatcttactggctacatctggtacaaagggcaaatgacggacctctaccattacattacatcatatgtagtacacggtcaaattatatatgggcctgcctacagtggacgagaaacagtatattccaatgcatccctgctgatccagaatgtcacacaggaggatgcaggatcctacaccttacacatcataaagcgaggcgatgggactggaggagtaactggatatttcactgtcaccttatactatgtgggacaactacaaaggctgtcacatacacttaacgggaatacttgtggtttggggaccagatggaggtggccagcggagactcccaagccctccatctccagcagcaacttaaaccccagggaggtcatggaggctgtgcgcttaatctgtgatcctgagactccggatgcaagctacctgtggttgctgaatggtcagaacctccctatgactcacaggttgcagctgtccaaaaccaacaggaccctctatctatttggtgtcacaaagtatattgcaggaccctatgaatgtgaaatacggaacccagtgagtgccagccgcagtgacccagtcaccctgaatctcctccgtgggagatgccaactctgaatgaaggatgcctgtggaggaatcaaaggtgccacacaggacaatcttctgttatccacacagcgaagctgcccatgccttacatcaccatcaacaacttaaaccccagggagaagaaggatgtgttagccttcacctgtgaacctaagagtcggaactacacctacatttggtggctaaatggtcagagcctcccggtcagtccgagggtaaagcgacccattgaaaacaggatactcattctacccagtgtcacgagaaatgaaacaggaccctatcaatgtgaaatacgggaccgatatggtggcatccgcagtaacccagtcaccctgaatgtcctctatggtccagacctccccagaatttacccttcattcacctattaccgttcaggagaaaacctcgacttgtcctgctttgcggactctaacccaccggcagagtattcttggacaattaatgggaagtttcagctatcaggacaaaagctctttatcccccaaattactacaaatcatagcgggctctatgcttgctctgttcgtaactcagccactggcaaggaaatctccaaatccatgatagtcaaagtctctggtccctgccatggaaaccagacagagtctcattaatggctgccacaatagagacactgagaaaaagaacaggttgataccttcatgaaattcaagacaaagaagaaaaaaactcaatgttattggactaaataatcaaaaggataatgttttcataattttttattggaaaatgtgctgattcttggaatgttttattctccagatttatgaactttttttcttcagcaattggtaaagtatacttttgtaaacaaaaattgaaacatttgcttttgctctctatctgagtgccccagaattgggaaactattcatgagtattcataggtttatggtaataaagttatttgcacaagttcaaaaaaaaaaaaaaaaaaacaaaaaaaaacagttgttggggcggcctngnggcccnnngaaaaagcttttctgagaacacattgctttgggacgccgcggggccccagtagggtcacggcggaacagtgggcgccacaacggtgtgttcctcagaggagaatcggggccaagagacataagggccgggggtttctcccataagaaa

SEQ ID NO: 732609 - DNA, 4725 bp, Homo sapiens
agcacagaaggaggaaggacagcacacctgacagccctgctcaggaagtctctggatcctaggctcatctccacaggggagaacacacagacagcagagaccatgggacccctctcagcccctccctgcactcagcacatcacctggaaggggctcctgctcacagcatcacttttaaacttctggaacctgcccaccactgcccaagtaataattgaagccaagccacccaaagtttccgaggggaaggatgttcttctacttgtccacaatttgccccagaatcttactggctacatctggtacaaagggcaaatgacggacctctaccattacattacatcatatgtagtacacggtcaaattatatatgggcctgcctacagtggacgagaaacagtatattccaatgcatccctgctgatccagaatgtcacacaggaggatgcaggatcctacaccttacacatcataaagcgaggcgatgggactggaggagtaactggatatttcactgtcaccttatactatgtgggacaactacaaaggctgtcacatacacttaacgggaatacttgtggtttggggaccagatggaggtggccagcggagactcccaagccctccatctccagcagcaacttaaaccccagggaggtcatggaggctgtgcgcttaatctgtgatcctgagactccggatgcaagctacctgtggttgctgaatggtcagaacctccctatgactcacaggttgcagctgtccaaaaccaacaggaccctctatctatttggtgtcacaaagtatattgcaggaccctatgaatgtgaaatacggaacccagtgagtgccagccgcagtgacccagtcaccctgaatctcctcccgaagctgcccatgccttacatcaccatcaacaacttaaaccccagggagaagaaggatgtgttagccttcacctgtgaacctaagagtcggaactacacctacatttggtggctaaatggtcagagcctcccggtcagtccgagggtaaagcgacccattgaaaacaggatactcattctacccagtgtcacgagaaatgaaacaggaccctatcaatgtgaaatacgggaccgatatggtggcatccgcagtaacccagtcaccctgaatgtcctctatggtccagacctccccagaatttacccttcattcacctattaccgttcaggagaaaacctcgacttgtcctgctttgcggactctaacccaccggcagagtattcttggacaattaatgggaagtttcagctatcaggacaaaagctctttatcccccaaattactacaaatcatagcgggctctatgcttgctctgttcgtaactcagccactggcaaggaaatctccaaatccatgatagtcaaagtctctggtaagtggatcccagcatccttggcaatagggttttaggtggagtctatctggctttcagagaagagtcaggaaaacatttgtattcccagactgtgtcccatgggcacaagcaaatcccaaattctcctcctgaaccctcccaacttatctctacagactctcttctgcttgtttttctgttttctcatggctgaccttgtgtctggcctgagaaaggtagggagggggctttatcagccctgagccctatgtggtagaagaggcttcacagagggacaagaaggagagtcctcaagatcaagttgcttctcgctgtcacgaacacatccccttctgccatgtctttgttttcttgtacctattccatgagctacaaggaacatctgaggctttgaaacaagctcacacttttcccccaaatgagaggaggaagccctttgggtgagggaggagcagctcagactctgcttcctgctctgctccgggctcctctggtgactggcctggccctgcctgactccacctggggtggaaccaacatgtgtggagaaagggccctggtggcctgtcctgaagttggctaaatcgagctgccagttgaagccaagcctcccccgggccaggctgcagggaaataagaagagagggagcttcagggctgactcctgagctgcatcctggctctgaagtcaccagctgtatgaggctttgggcacagcacgtgggacacagcacggaggacagtgactgatgcagagctagagaaatagggagattcacccctggggctctgcatggcaggaaaggggcagtgccaaaaagtgtgtaattatagagagggcaagaccacgagacactttatatatatctaatattagacttaccattaactaagtgtgcaatttagtgttgtgtaactatcacactatccatttccagaactttttcctcttaccatattaaacctctgtacccaataaacagtaactctcactccttctccccctaacccttaacacccaccattctactttctgtctctatgtaactggctattctaactatcttttataaatggaattatataataattatccttttgtgtctggcttatttcagttggcataatatcttcaaggttcatccattttgcacgatgtattgtaattttcttccttgttaaggttgaataacatttcaatgtatagatacatctcatttgcctacccacttatctttcaatggacttttcagttgtttccatttttggctagtgtgagtaatgcttctctgtacatcagtgtacaaatatttcttcaaatttctttcaattctatagggagtatgtccagaaggggaattgctggatcaaatggtaatttattgtttaattttttgaaaaacagccacactactttttacattggctataacatttcccattcccatcagcaatgcactagagctccaatttttccatctacttggaaacacctgttgtttagtgttgctgtcattgttgttgtttatcaaagccatcctaaagtgtgtgaggtgttgtaacattgtggttttgatttgcatatctctaagtattcgtgatgctgaggaactttgcatgggctatataaaaggttttgatttttatgaagtctgatttatccattttatttgttgcctatgcttttgttgttacaaccaagaaatcattgtgaaatccactatcatgaagtttttcttctaagagttgtatagtttttactcttacatttagatctttgatctattgtgggttaatttttgtacatggtgttaggtaaaggttccactcttcttgcccttggatatccacctttcccaatatcatttggtgagaacactgtcccttccccattgaacgatcttggcacactcgatgaaaatcatttggccatatatgcaagcatttctttctgggctatgatatttcattaatttctatgtcctcctttatgccagtaccacactgtattgattactggggctttgtagtaaatgctgaaatcaggaagtgtgagtcctccagcttcattcttcctcttcaaagctgtgtgtctatttagagtcatgagatgcaatataaattttaggacagatttttctttttctgcaaaaatgtcactgagattctgataggaattgtattgaatctgcagctcactttgggcagcactgtcctcctaacaatattgagtcttccaattcatgaacacaaaatgtctttcaatttattgatgtcatctttcatttctttcagcaatactttgtagatttcaggtataatcatttcacctctttggttaaacttattcctaaatattttattctttttgatgtgaatataaattgaaattatttttcttaatttcccttcagattgttcatggttagtgtattgaaatacaactgatgtttgaatgttgattttgtattgtgcaacattactgaatttattaattctaataggtttgttccatctttaggattttctacaaataagttcaagttatctataaacagaaataattttactccttccttccaatttgaatgtctttttaaaaattcttccctaatttttctgattagacctttcactactatgttgaataaaagtgtcaatagcaggcatccttgtcttttcctgctcatacagggaaagttttcagtctttctctgttatgtaagatgttagcattgggtttttcacatattgcctttatgttgaggtggttgccttccattcttagaatgtttttattatgaaaaaatactgaatttcatcaaatgcttttattgattcaatcttcttactgattatagttatattcatatttttgtgtgtttctaggagtttgtctatttcatctaggttatccaatttattggcatacaattatttatagtactttcataatcattattttattagaattggtagtaatcgcttcatttttcttttttctttttcttttaagacagagagacaggctctcactctgtaggccaccctaggatggaatacagtggtgtgattatggctcactgcagcctcaacctcctgggctcaagcaattctccttcttcagcctcccaagatgctaggactacaggtgcatgtcaacatgcccagctaattggttttttttttttttgtagagacagcatctccccaggttacctatgctggtccaaacacctggtttcaagaaatccttctgctgtgacctcccaaagtgctaggattaaaacatgacccaccat

SEQ ID NO: 732610 - DNA, 3344 bp, Homo sapiens
  misc_feature (3186)..(3186): n is a, c, g, or t
  misc_feature (3188)..(3188): n is a, c, g, or t
  misc_feature (3194)..(3196): n is a, c, g, or t
agcacagaaggaggaaggacagcacacctgacagccctgctcaggaagtctctggatcctaggctcatctccacaggggagaacacacagacagcagagaccatgggacccctctcagcccctccctgcactcagcacatcacctggaaggggctcctgctcacagcatcacttttaaacttctggaacctgcccaccactgcccaagtaataattgaagccaagccacccaaagtttccgaggggaaggatgttcttctacttgtccacaatttgccccagaatcttactggctacatctggtacaaagggcaaatgacggacctctaccattacattacatcatatgtagtacacggtcaaattatatatgggcctgcctacagtggacgagaaacagtatattccaatgcatccctgctgatccagaatgtcacacaggaggatgcaggatcctacaccttacacatcataaagcgaggcgatgggactggaggagtaactggatatttcactgtcaccttatactatgtgggacaactacaaaggctgtcacatacacttaacgggaatacttgtggtttggggaccagatggaggtggccagcggagactcccaagccctccatctccagcagcaacttaaaccccagggaggtcatggaggctgtgcgcttaatctgtgatcctgagactccggatgcaagctacctgtggttgctgaatggtcagaacctccctatgactcacaggttgcagctgtccaaaaccaacaggaccctctatctatttggtgtcacaaagtatattgcaggaccctatgaatgtgaaatacggaacccagtgagtgccagccgcagtgacccagtcaccctgaatctcctccgtgggagatgccaactctgaatgaaggatgcctgtggaggaatcaaaggtgccacacaggacaatcttctgttatccacacagcgaagctgcccatgccttacatcaccatcaacaacttaaaccccagggagaagaaggatgtgttagccttcacctgtgaacctaagagtcggaactacacctacatttggtggctaaatggtcagagcctcccggtcagtccgagggtaaagcgacccattgaaaacaggatactcattctacccagtgtcacgagaaatgaaacaggaccctatcaatgtgaaatacgggaccgatatggtggcatccgcagtaacccagtcaccctgaatgtcctctatggtccagacctccccagaatttacccttcattcacctattaccgttcaggagaaaacctcgacttgtcctgctttgcggactctaacccaccggcagagtattcttggacaattaatgggaagtttcagctatcaggacaaaagctctttatcccccaaattactacaaatcatagcgggctctatgcttgctctgttcgtaactcagccactggcaaggaaatctccaaatccatgatagtcaaagtctctgagacagcatctccccaggttacctatgctggtccaaacacctggtttcaagaaatccttctgctgtgacctcccaaagtgctaggattaaaacatgacccaccatgctcagagtccattttcatttatgatttgagtaattttatcttttctctttttttcttagccaatctagttaatggttgtcaattttgttgattttattttgaagaatcaacttttggtttcagtaatttcctctattctgtttccattctccattttatttatatccaccctaatacttattatttccctcattcactgtgcttgggtttagtttgttcttctttcgtatcctgaagtattaaagtaggttgttgacctgagctctttcttcttttttaatgtaagagtttacagttataaatttcttgcacaagactcaacttctctgaacccctgattcctcacctgaaaattgcaataagagtactttcttcataccattcttttaaaggtttaatgcagtcaatgaaacaagatgccacacaaagaggaaccaatgtcagctgctatattactaccatcatcattagccttgaggtcaaatagtcctagaatcaaatctcagatccacctgtcactagccatatgacaccaggaaagtttttacaccatgctaagcttctgtcttttcatcagcaaaatggaaataatgcctacctgacagggttattgtgtggattaaatgagatacaggtaaagtattgagcacagggcctggcacatagaaagtgcacctcaacagtacctacctttttccatagatatgaaaaaagcggtaacacataaaacactaggacatggttactgactaattgtgggagagaaagaaaaaaagctaagtgcaaagaatcaagtctggtatgttagtttttaccaactgagatgcatccaagatgggattagacatacaagataatttatcagggaagacacctgtgagggaatgtggggcaggcatgaaggtagtatgggagaacccacagaccgctatgcagagctgattcctgtgaaaaagaaagagaaagaagttttaggtaccaatgcagttctaagagtttttgcaaggctgatgaggaatcctccaaccagtcacccattggagttaaagagagcctcggagaactagacttgctttcacacccttgctgggagcctgtgggaaagaagctttctctgtaaaggaggtagtgaatttgaaatgcgctgacctgggccttctgtcaatcaggtccctgccatggaaaccagacagagtctcattaatggctgccacaatagagacactgagaaaaagaacaggttgataccttcatgaaattcaagacaaagaagaaaaaaactcaatgttattggactaaataatcaaaaggataatgttttcataattttttattggaaaatgtgctgattcttggaatgttttattctccagatttatgaactttttttcttcagcaattggtaaagtatacttttgtaaacaaaaattgaaacatttgcttttgctctctatctgagtgccccagaattgggaaactattcatgagtattcataggtttatggtaataaagttatttgcacaagttcaaaaaaaaaaaaaaaaaaacaaaaaaaaacagttgttggggcggcctngnggcccnnngaaaaagcttttctgagaacacattgctttgggacgccgcggggccccagtagggtcacggcggaacagtgggcgccacaacggtgtgttcctcagaggagaatcggggccaagagacataagggccgggggtttctcccataagaaa

SEQ ID NO: 732611 - DNA, 4446 bp, Homo sapiens
agcacagaaggaggaaggacagcacacctgacagccctgctcaggaagtctctggatcctaggctcatctccacaggggagaacacacagacagcagagaccatgggacccctctcagcccctccctgcactcagcacatcacctggaaggggctcctgctcacagcatcacttttaaacttctggaacctgcccaccactgcccaagtaataattgaagccaagccacccaaagtttccgaggggaaggatgttcttctacttgtccacaatttgccccagaatcttactggctacatctggtacaaagggcaaatgacggacctctaccattacattacatcatatgtagtacacggtcaaattatatatgggcctgcctacagtggacgagaaacagtatattccaatgcatccctgctgatccagaatgtcacacaggaggatgcaggatcctacaccttacacatcataaagcgaggcgatgggactggaggagtaactggatatttcactgtcaccttatactatgtgggacaactacaaaggctgtcacatacacttaacgggaatacttgtggtttggggaccagatggaggtggccagcggagactcccaagccctccatctccagcagcaacttaaaccccagggaggtcatggaggctgtgcgcttaatctgtgatcctgagactccggatgcaagctacctgtggttgctgaatggtcagaacctccctatgactcacaggttgcagctgtccaaaaccaacaggaccctctatctatttggtgtcacaaagtatattgcaggaccctatgaatgtgaaatacggaacccagtgagtgccagccgcagtgacccagtcaccctgaatctcctccatggtccagacctccccagaatttacccttcattcacctattaccgttcaggagaaaacctcgacttgtcctgctttgcggactctaacccaccggcagagtattcttggacaattaatgggaagtttcagctatcaggacaaaagctctttatcccccaaattactacaaatcatagcgggctctatgcttgctctgttcgtaactcagccactggcaaggaaatctccaaatccatgatagtcaaagtctctggtaagtggatcccagcatccttggcaatagggttttaggtggagtctatctggctttcagagaagagtcaggaaaacatttgtattcccagactgtgtcccatgggcacaagcaaatcccaaattctcctcctgaaccctcccaacttatctctacagactctcttctgcttgtttttctgttttctcatggctgaccttgtgtctggcctgagaaaggtagggagggggctttatcagccctgagccctatgtggtagaagaggcttcacagagggacaagaaggagagtcctcaagatcaagttgcttctcgctgtcacgaacacatccccttctgccatgtctttgttttcttgtacctattccatgagctacaaggaacatctgaggctttgaaacaagctcacacttttcccccaaatgagaggaggaagccctttgggtgagggaggagcagctcagactctgcttcctgctctgctccgggctcctctggtgactggcctggccctgcctgactccacctggggtggaaccaacatgtgtggagaaagggccctggtggcctgtcctgaagttggctaaatcgagctgccagttgaagccaagcctcccccgggccaggctgcagggaaataagaagagagggagcttcagggctgactcctgagctgcatcctggctctgaagtcaccagctgtatgaggctttgggcacagcacgtgggacacagcacggaggacagtgactgatgcagagctagagaaatagggagattcacccctggggctctgcatggcaggaaaggggcagtgccaaaaagtgtgtaattatagagagggcaagaccacgagacactttatatatatctaatattagacttaccattaactaagtgtgcaatttagtgttgtgtaactatcacactatccatttccagaactttttcctcttaccatattaaacctctgtacccaataaacagtaactctcactccttctccccctaacccttaacacccaccattctactttctgtctctatgtaactggctattctaactatcttttataaatggaattatataataattatccttttgtgtctggcttatttcagttggcataatatcttcaaggttcatccattttgcacgatgtattgtaattttcttccttgttaaggttgaataacatttcaatgtatagatacatctcatttgcctacccacttatctttcaatggacttttcagttgtttccatttttggctagtgtgagtaatgcttctctgtacatcagtgtacaaatatttcttcaaatttctttcaattctatagggagtatgtccagaaggggaattgctggatcaaatggtaatttattgtttaattttttgaaaaacagccacactactttttacattggctataacatttcccattcccatcagcaatgcactagagctccaatttttccatctacttggaaacacctgttgtttagtgttgctgtcattgttgttgtttatcaaagccatcctaaagtgtgtgaggtgttgtaacattgtggttttgatttgcatatctctaagtattcgtgatgctgaggaactttgcatgggctatataaaaggttttgatttttatgaagtctgatttatccattttatttgttgcctatgcttttgttgttacaaccaagaaatcattgtgaaatccactatcatgaagtttttcttctaagagttgtatagtttttactcttacatttagatctttgatctattgtgggttaatttttgtacatggtgttaggtaaaggttccactcttcttgcccttggatatccacctttcccaatatcatttggtgagaacactgtcccttccccattgaacgatcttggcacactcgatgaaaatcatttggccatatatgcaagcatttctttctgggctatgatatttcattaatttctatgtcctcctttatgccagtaccacactgtattgattactggggctttgtagtaaatgctgaaatcaggaagtgtgagtcctccagcttcattcttcctcttcaaagctgtgtgtctatttagagtcatgagatgcaatataaattttaggacagatttttctttttctgcaaaaatgtcactgagattctgataggaattgtattgaatctgcagctcactttgggcagcactgtcctcctaacaatattgagtcttccaattcatgaacacaaaatgtctttcaatttattgatgtcatctttcatttctttcagcaatactttgtagatttcaggtataatcatttcacctctttggttaaacttattcctaaatattttattctttttgatgtgaatataaattgaaattatttttcttaatttcccttcagattgttcatggttagtgtattgaaatacaactgatgtttgaatgttgattttgtattgtgcaacattactgaatttattaattctaataggtttgttccatctttaggattttctacaaataagttcaagttatctataaacagaaataattttactccttccttccaatttgaatgtctttttaaaaattcttccctaatttttctgattagacctttcactactatgttgaataaaagtgtcaatagcaggcatccttgtcttttcctgctcatacagggaaagttttcagtctttctctgttatgtaagatgttagcattgggtttttcacatattgcctttatgttgaggtggttgccttccattcttagaatgtttttattatgaaaaaatactgaatttcatcaaatgcttttattgattcaatcttcttactgattatagttatattcatatttttgtgtgtttctaggagtttgtctatttcatctaggttatccaatttattggcatacaattatttatagtactttcataatcattattttattagaattggtagtaatcgcttcatttttcttttttctttttcttttaagacagagagacaggctctcactctgtaggccaccctaggatggaatacagtggtgtgattatggctcactgcagcctcaacctcctgggctcaagcaattctccttcttcagcctcccaagatgctaggactacaggtgcatgtcaacatgcccagctaattggttttttttttttttgtagagacagcatctccccaggttacctatgctggtccaaacacctggtttcaagaaatccttctgctgtgacctcccaaagtgctaggattaaaacatgacccaccat

SEQ ID NO: 732612 - DNA, 1991 bp, Homo sapiens
  misc_feature (1833)..(1833): n is a, c, g, or t
  misc_feature (1835)..(1835): n is a, c, g, or t
  misc_feature (1841)..(1843): n is a, c, g, or t
agcacagaaggaggaaggacagcacacctgacagccctgctcaggaagtctctggatcctaggctcatctccacaggggagaacacacagacagcagagaccatgggacccctctcagcccctccctgcactcagcacatcacctggaaggggctcctgctcacagcatcacttttaaacttctggaacctgcccaccactgcccaagtaataattgaagccaagccacccaaagtttccgaggggaaggatgttcttctacttgtccacaatttgccccagaatcttactggctacatctggtacaaagggcaaatgacggacctctaccattacattacatcatatgtagtacacggtcaaattatatatgggcctgcctacagtggacgagaaacagtatattccaatgcatccctgctgatccagaatgtcacacaggaggatgcaggatcctacaccttacacatcataaagcgaggcgatgggactggaggagtaactggatatttcactgtcaccttatactcggagactcccaagccctccatctccagcagcaacttaaaccccagggaggtcatggaggctgtgcgcttaatctgtgatcctgagactccggatgcaagctacctgtggttgctgaatggtcagaacctccctatgactcacaggttgcagctgtccaaaaccaacaggaccctctatctatttggtgtcacaaagtatattgcaggaccctatgaatgtgaaatacggaacccagtgagtgccagccgcagtgacccagtcaccctgaatctcctccgtgggagatgccaactctgaatgaaggatgcctgtggaggaatcaaaggtgccacacaggacaatcttctgttatccacacagcgaagctgcccatgccttacatcaccatcaacaacttaaaccccagggagaagaaggatgtgttagccttcacctgtgaacctaagagtcggaactacacctacatttggtggctaaatggtcagagcctcccggtcagtccgagggtaaagcgacccattgaaaacaggatactcattctacccagtgtcacgagaaatgaaacaggaccctatcaatgtgaaatacgggaccgatatggtggcatccgcagtaacccagtcaccctgaatgtcctctatggtccagacctccccagaatttacccttcattcacctattaccgttcaggagaaaacctcgacttgtcctgctttgcggactctaacccaccggcagagtattcttggacaattaatgggaagtttcagctatcaggacaaaagctctttatcccccaaattactacaaatcatagcgggctctatgcttgctctgttcgtaactcagccactggcaaggaaatctccaaatccatgatagtcaaagtctctggtccctgccatggaaaccagacagagtctcattaatggctgccacaatagagacactgagaaaaagaacaggttgataccttcatgaaattcaagacaaagaagaaaaaaactcaatgttattggactaaataatcaaaaggataatgttttcataattttttattggaaaatgtgctgattcttggaatgttttattctccagatttatgaactttttttcttcagcaattggtaaagtatacttttgtaaacaaaaattgaaacatttgcttttgctctctatctgagtgccccagaattgggaaactattcatgagtattcataggtttatggtaataaagttatttgcacaagttcaaaaaaaaaaaaaaaaaaacaaaaaaaaacagttgttggggcggcctngnggcccnnngaaaaagcttttctgagaacacattgctttgggacgccgcggggccccagtagggtcacggcggaacagtgggcgccacaacggtgtgttcctcagaggagaatcggggccaagagacataagggccgggggtttctcccataagaaa

SEQ ID NO: 732613 - DNA, 3266 bp, Homo sapiens
  misc_feature (3108)..(3108): n is a, c, g, or t
  misc_feature (3110)..(3110): n is a, c, g, or t
  misc_feature (3116)..(3118): n is a, c, g, or t
agcacagaaggaggaaggacagcacacctgacagccctgctcaggaagtctctggatcctaggctcatctccacaggggagaacacacagacagcagagaccatgggacccctctcagcccctccctgcactcagcacatcacctggaaggggctcctgctcacagcatcacttttaaacttctggaacctgcccaccactgcccaagtaataattgaagccaagccacccaaagtttccgaggggaaggatgttcttctacttgtccacaatttgccccagaatcttactggctacatctggtacaaagggcaaatgacggacctctaccattacattacatcatatgtagtacacggtcaaattatatatgggcctgcctacagtggacgagaaacagtatattccaatgcatccctgctgatccagaatgtcacacaggaggatgcaggatcctacaccttacacatcataaagcgaggcgatgggactggaggagtaactggatatttcactgtcaccttatactcggagactcccaagccctccatctccagcagcaacttaaaccccagggaggtcatggaggctgtgcgcttaatctgtgatcctgagactccggatgcaagctacctgtggttgctgaatggtcagaacctccctatgactcacaggttgcagctgtccaaaaccaacaggaccctctatctatttggtgtcacaaagtatattgcaggaccctatgaatgtgaaatacggaacccagtgagtgccagccgcagtgacccagtcaccctgaatctcctccgtgggagatgccaactctgaatgaaggatgcctgtggaggaatcaaaggtgccacacaggacaatcttctgttatccacacagcgaagctgcccatgccttacatcaccatcaacaacttaaaccccagggagaagaaggatgtgttagccttcacctgtgaacctaagagtcggaactacacctacatttggtggctaaatggtcagagcctcccggtcagtccgagggtaaagcgacccattgaaaacaggatactcattctacccagtgtcacgagaaatgaaacaggaccctatcaatgtgaaatacgggaccgatatggtggcatccgcagtaacccagtcaccctgaatgtcctctatggtccagacctccccagaatttacccttcattcacctattaccgttcaggagaaaacctcgacttgtcctgctttgcggactctaacccaccggcagagtattcttggacaattaatgggaagtttcagctatcaggacaaaagctctttatcccccaaattactacaaatcatagcgggctctatgcttgctctgttcgtaactcagccactggcaaggaaatctccaaatccatgatagtcaaagtctctgagacagcatctccccaggttacctatgctggtccaaacacctggtttcaagaaatccttctgctgtgacctcccaaagtgctaggattaaaacatgacccaccatgctcagagtccattttcatttatgatttgagtaattttatcttttctctttttttcttagccaatctagttaatggttgtcaattttgttgattttattttgaagaatcaacttttggtttcagtaatttcctctattctgtttccattctccattttatttatatccaccctaatacttattatttccctcattcactgtgcttgggtttagtttgttcttctttcgtatcctgaagtattaaagtaggttgttgacctgagctctttcttcttttttaatgtaagagtttacagttataaatttcttgcacaagactcaacttctctgaacccctgattcctcacctgaaaattgcaataagagtactttcttcataccattcttttaaaggtttaatgcagtcaatgaaacaagatgccacacaaagaggaaccaatgtcagctgctatattactaccatcatcattagccttgaggtcaaatagtcctagaatcaaatctcagatccacctgtcactagccatatgacaccaggaaagtttttacaccatgctaagcttctgtcttttcatcagcaaaatggaaataatgcctacctgacagggttattgtgtggattaaatgagatacaggtaaagtattgagcacagggcctggcacatagaaagtgcacctcaacagtacctacctttttccatagatatgaaaaaagcggtaacacataaaacactaggacatggttactgactaattgtgggagagaaagaaaaaaagctaagtgcaaagaatcaagtctggtatgttagtttttaccaactgagatgcatccaagatgggattagacatacaagataatttatcagggaagacacctgtgagggaatgtggggcaggcatgaaggtagtatgggagaacccacagaccgctatgcagagctgattcctgtgaaaaagaaagagaaagaagttttaggtaccaatgcagttctaagagtttttgcaaggctgatgaggaatcctccaaccagtcacccattggagttaaagagagcctcggagaactagacttgctttcacacccttgctgggagcctgtgggaaagaagctttctctgtaaaggaggtagtgaatttgaaatgcgctgacctgggccttctgtcaatcaggtccctgccatggaaaccagacagagtctcattaatggctgccacaatagagacactgagaaaaagaacaggttgataccttcatgaaattcaagacaaagaagaaaaaaactcaatgttattggactaaataatcaaaaggataatgttttcataattttttattggaaaatgtgctgattcttggaatgttttattctccagatttatgaactttttttcttcagcaattggtaaagtatacttttgtaaacaaaaattgaaacatttgcttttgctctctatctgagtgccccagaattgggaaactattcatgagtattcataggtttatggtaataaagttatttgcacaagttcaaaaaaaaaaaaaaaaaaacaaaaaaaaacagttgttggggcggcctngnggcccnnngaaaaagcttttctgagaacacattgctttgggacgccgcggggccccagtagggtcacggcggaacagtgggcgccacaacggtgtgttcctcagaggagaatcggggccaagagacataagggccgggggtttctcccataagaaa

SEQ ID NO: 732614 - DNA, 4368 bp, Homo sapiens
agcacagaaggaggaaggacagcacacctgacagccctgctcaggaagtctctggatcctaggctcatctccacaggggagaacacacagacagcagagaccatgggacccctctcagcccctccctgcactcagcacatcacctggaaggggctcctgctcacagcatcacttttaaacttctggaacctgcccaccactgcccaagtaataattgaagccaagccacccaaagtttccgaggggaaggatgttcttctacttgtccacaatttgccccagaatcttactggctacatctggtacaaagggcaaatgacggacctctaccattacattacatcatatgtagtacacggtcaaattatatatgggcctgcctacagtggacgagaaacagtatattccaatgcatccctgctgatccagaatgtcacacaggaggatgcaggatcctacaccttacacatcataaagcgaggcgatgggactggaggagtaactggatatttcactgtcaccttatactcggagactcccaagccctccatctccagcagcaacttaaaccccagggaggtcatggaggctgtgcgcttaatctgtgatcctgagactccggatgcaagctacctgtggttgctgaatggtcagaacctccctatgactcacaggttgcagctgtccaaaaccaacaggaccctctatctatttggtgtcacaaagtatattgcaggaccctatgaatgtgaaatacggaacccagtgagtgccagccgcagtgacccagtcaccctgaatctcctccatggtccagacctccccagaatttacccttcattcacctattaccgttcaggagaaaacctcgacttgtcctgctttgcggactctaacccaccggcagagtattcttggacaattaatgggaagtttcagctatcaggacaaaagctctttatcccccaaattactacaaatcatagcgggctctatgcttgctctgttcgtaactcagccactggcaaggaaatctccaaatccatgatagtcaaagtctctggtaagtggatcccagcatccttggcaatagggttttaggtggagtctatctggctttcagagaagagtcaggaaaacatttgtattcccagactgtgtcccatgggcacaagcaaatcccaaattctcctcctgaaccctcccaacttatctctacagactctcttctgcttgtttttctgttttctcatggctgaccttgtgtctggcctgagaaaggtagggagggggctttatcagccctgagccctatgtggtagaagaggcttcacagagggacaagaaggagagtcctcaagatcaagttgcttctcgctgtcacgaacacatccccttctgccatgtctttgttttcttgtacctattccatgagctacaaggaacatctgaggctttgaaacaagctcacacttttcccccaaatgagaggaggaagccctttgggtgagggaggagcagctcagactctgcttcctgctctgctccgggctcctctggtgactggcctggccctgcctgactccacctggggtggaaccaacatgtgtggagaaagggccctggtggcctgtcctgaagttggctaaatcgagctgccagttgaagccaagcctcccccgggccaggctgcagggaaataagaagagagggagcttcagggctgactcctgagctgcatcctggctctgaagtcaccagctgtatgaggctttgggcacagcacgtgggacacagcacggaggacagtgactgatgcagagctagagaaatagggagattcacccctggggctctgcatggcaggaaaggggcagtgccaaaaagtgtgtaattatagagagggcaagaccacgagacactttatatatatctaatattagacttaccattaactaagtgtgcaatttagtgttgtgtaactatcacactatccatttccagaactttttcctcttaccatattaaacctctgtacccaataaacagtaactctcactccttctccccctaacccttaacacccaccattctactttctgtctctatgtaactggctattctaactatcttttataaatggaattatataataattatccttttgtgtctggcttatttcagttggcataatatcttcaaggttcatccattttgcacgatgtattgtaattttcttccttgttaaggttgaataacatttcaatgtatagatacatctcatttgcctacccacttatctttcaatggacttttcagttgtttccatttttggctagtgtgagtaatgcttctctgtacatcagtgtacaaatatttcttcaaatttctttcaattctatagggagtatgtccagaaggggaattgctggatcaaatggtaatttattgtttaattttttgaaaaacagccacactactttttacattggctataacatttcccattcccatcagcaatgcactagagctccaatttttccatctacttggaaacacctgttgtttagtgttgctgtcattgttgttgtttatcaaagccatcctaaagtgtgtgaggtgttgtaacattgtggttttgatttgcatatctctaagtattcgtgatgctgaggaactttgcatgggctatataaaaggttttgatttttatgaagtctgatttatccattttatttgttgcctatgcttttgttgttacaaccaagaaatcattgtgaaatccactatcatgaagtttttcttctaagagttgtatagtttttactcttacatttagatctttgatctattgtgggttaatttttgtacatggtgttaggtaaaggttccactcttcttgcccttggatatccacctttcccaatatcatttggtgagaacactgtcccttccccattgaacgatcttggcacactcgatgaaaatcatttggccatatatgcaagcatttctttctgggctatgatatttcattaatttctatgtcctcctttatgccagtaccacactgtattgattactggggctttgtagtaaatgctgaaatcaggaagtgtgagtcctccagcttcattcttcctcttcaaagctgtgtgtctatttagagtcatgagatgcaatataaattttaggacagatttttctttttctgcaaaaatgtcactgagattctgataggaattgtattgaatctgcagctcactttgggcagcactgtcctcctaacaatattgagtcttccaattcatgaacacaaaatgtctttcaatttattgatgtcatctttcatttctttcagcaatactttgtagatttcaggtataatcatttcacctctttggttaaacttattcctaaatattttattctttttgatgtgaatataaattgaaattatttttcttaatttcccttcagattgttcatggttagtgtattgaaatacaactgatgtttgaatgttgattttgtattgtgcaacattactgaatttattaattctaataggtttgttccatctttaggattttctacaaataagttcaagttatctataaacagaaataattttactccttccttccaatttgaatgtctttttaaaaattcttccctaatttttctgattagacctttcactactatgttgaataaaagtgtcaatagcaggcatccttgtcttttcctgctcatacagggaaagttttcagtctttctctgttatgtaagatgttagcattgggtttttcacatattgcctttatgttgaggtggttgccttccattcttagaatgtttttattatgaaaaaatactgaatttcatcaaatgcttttattgattcaatcttcttactgattatagttatattcatatttttgtgtgtttctaggagtttgtctatttcatctaggttatccaatttattggcatacaattatttatagtactttcataatcattattttattagaattggtagtaatcgcttcatttttcttttttctttttcttttaagacagagagacaggctctcactctgtaggccaccctaggatggaatacagtggtgtgattatggctcactgcagcctcaacctcctgggctcaagcaattctccttcttcagcctcccaagatgctaggactacaggtgcatgtcaacatgcccagctaattggttttttttttttttgtagagacagcatctccccaggttacctatgctggtccaaacacctggtttcaagaaatccttctgctgtgacctcccaaagtgctaggattaaaacatgacccaccat

SEQ ID NO: 732615 - DNA, 1628 bp, Homo sapiens
  misc_feature (1470)..(1470): n is a, c, g, or t
  misc_feature (1472)..(1472): n is a, c, g, or t
  misc_feature (1478)..(1480): n is a, c, g, or t
agcacagaaggaggaaggacagcacacctgacagccctgctcaggaagtctctggatcctaggctcatctccacaggggagaacacacagacagcagagaccatgggacccctctcagcccctccctgcactcagcacatcacctggaaggggctcctgctcacagcggagactcccaagccctccatctccagcagcaacttaaaccccagggaggtcatggaggctgtgcgcttaatctgtgatcctgagactccggatgcaagctacctgtggttgctgaatggtcagaacctccctatgactcacaggttgcagctgtccaaaaccaacaggaccctctatctatttggtgtcacaaagtatattgcaggaccctatgaatgtgaaatacggaacccagtgagtgccagccgcagtgacccagtcaccctgaatctcctccgtgggagatgccaactctgaatgaaggatgcctgtggaggaatcaaaggtgccacacaggacaatcttctgttatccacacagcgaagctgcccatgccttacatcaccatcaacaacttaaaccccagggagaagaaggatgtgttagccttcacctgtgaacctaagagtcggaactacacctacatttggtggctaaatggtcagagcctcccggtcagtccgagggtaaagcgacccattgaaaacaggatactcattctacccagtgtcacgagaaatgaaacaggaccctatcaatgtgaaatacgggaccgatatggtggcatccgcagtaacccagtcaccctgaatgtcctctatggtccagacctccccagaatttacccttcattcacctattaccgttcaggagaaaacctcgacttgtcctgctttgcggactctaacccaccggcagagtattcttggacaattaatgggaagtttcagctatcaggacaaaagctctttatcccccaaattactacaaatcatagcgggctctatgcttgctctgttcgtaactcagccactggcaaggaaatctccaaatccatgatagtcaaagtctctggtccctgccatggaaaccagacagagtctcattaatggctgccacaatagagacactgagaaaaagaacaggttgataccttcatgaaattcaagacaaagaagaaaaaaactcaatgttattggactaaataatcaaaaggataatgttttcataattttttattggaaaatgtgctgattcttggaatgttttattctccagatttatgaactttttttcttcagcaattggtaaagtatacttttgtaaacaaaaattgaaacatttgcttttgctctctatctgagtgccccagaattgggaaactattcatgagtattcataggtttatggtaataaagttatttgcacaagttcaaaaaaaaaaaaaaaaaaacaaaaaaaaacagttgttggggcggcctngnggcccnnngaaaaagcttttctgagaacacattgctttgggacgccgcggggccccagtagggtcacggcggaacagtgggcgccacaacggtgtgttcctcagaggagaatcggggccaagagacataagggccgggggtttctcccataagaaa

SEQ ID NO: 732616 - DNA, 4284 bp, Homo sapiens
agcacagaaggaggaaggacagcacacctgacagccctgctcaggaagtctctggatcctaggctcatctccacaggggagaacacacagacagcagagaccatgggacccctctcagcccctccctgcactcagcacatcacctggaaggggctcctgctcacagcggagactcccaagccctccatctccagcagcaacttaaaccccagggaggtcatggaggctgtgcgcttaatctgtgatcctgagactccggatgcaagctacctgtggttgctgaatggtcagaacctccctatgactcacaggttgcagctgtccaaaaccaacaggaccctctatctatttggtgtcacaaagtatattgcaggaccctatgaatgtgaaatacggaacccagtgagtgccagccgcagtgacccagtcaccctgaatctcctcccgaagctgcccatgccttacatcaccatcaacaacttaaaccccagggagaagaaggatgtgttagccttcacctgtgaacctaagagtcggaactacacctacatttggtggctaaatggtcagagcctcccggtcagtccgagggtaaagcgacccattgaaaacaggatactcattctacccagtgtcacgagaaatgaaacaggaccctatcaatgtgaaatacgggaccgatatggtggcatccgcagtaacccagtcaccctgaatgtcctctatggtccagacctccccagaatttacccttcattcacctattaccgttcaggagaaaacctcgacttgtcctgctttgcggactctaacccaccggcagagtattcttggacaattaatgggaagtttcagctatcaggacaaaagctctttatcccccaaattactacaaatcatagcgggctctatgcttgctctgttcgtaactcagccactggcaaggaaatctccaaatccatgatagtcaaagtctctggtaagtggatcccagcatccttggcaatagggttttaggtggagtctatctggctttcagagaagagtcaggaaaacatttgtattcccagactgtgtcccatgggcacaagcaaatcccaaattctcctcctgaaccctcccaacttatctctacagactctcttctgcttgtttttctgttttctcatggctgaccttgtgtctggcctgagaaaggtagggagggggctttatcagccctgagccctatgtggtagaagaggcttcacagagggacaagaaggagagtcctcaagatcaagttgcttctcgctgtcacgaacacatccccttctgccatgtctttgttttcttgtacctattccatgagctacaaggaacatctgaggctttgaaacaagctcacacttttcccccaaatgagaggaggaagccctttgggtgagggaggagcagctcagactctgcttcctgctctgctccgggctcctctggtgactggcctggccctgcctgactccacctggggtggaaccaacatgtgtggagaaagggccctggtggcctgtcctgaagttggctaaatcgagctgccagttgaagccaagcctcccccgggccaggctgcagggaaataagaagagagggagcttcagggctgactcctgagctgcatcctggctctgaagtcaccagctgtatgaggctttgggcacagcacgtgggacacagcacggaggacagtgactgatgcagagctagagaaatagggagattcacccctggggctctgcatggcaggaaaggggcagtgccaaaaagtgtgtaattatagagagggcaagaccacgagacactttatatatatctaatattagacttaccattaactaagtgtgcaatttagtgttgtgtaactatcacactatccatttccagaactttttcctcttaccatattaaacctctgtacccaataaacagtaactctcactccttctccccctaacccttaacacccaccattctactttctgtctctatgtaactggctattctaactatcttttataaatggaattatataataattatccttttgtgtctggcttatttcagttggcataatatcttcaaggttcatccattttgcacgatgtattgtaattttcttccttgttaaggttgaataacatttcaatgtatagatacatctcatttgcctacccacttatctttcaatggacttttcagttgtttccatttttggctagtgtgagtaatgcttctctgtacatcagtgtacaaatatttcttcaaatttctttcaattctatagggagtatgtccagaaggggaattgctggatcaaatggtaatttattgtttaattttttgaaaaacagccacactactttttacattggctataacatttcccattcccatcagcaatgcactagagctccaatttttccatctacttggaaacacctgttgtttagtgttgctgtcattgttgttgtttatcaaagccatcctaaagtgtgtgaggtgttgtaacattgtggttttgatttgcatatctctaagtattcgtgatgctgaggaactttgcatgggctatataaaaggttttgatttttatgaagtctgatttatccattttatttgttgcctatgcttttgttgttacaaccaagaaatcattgtgaaatccactatcatgaagtttttcttctaagagttgtatagtttttactcttacatttagatctttgatctattgtgggttaatttttgtacatggtgttaggtaaaggttccactcttcttgcccttggatatccacctttcccaatatcatttggtgagaacactgtcccttccccattgaacgatcttggcacactcgatgaaaatcatttggccatatatgcaagcatttctttctgggctatgatatttcattaatttctatgtcctcctttatgccagtaccacactgtattgattactggggctttgtagtaaatgctgaaatcaggaagtgtgagtcctccagcttcattcttcctcttcaaagctgtgtgtctatttagagtcatgagatgcaatataaattttaggacagatttttctttttctgcaaaaatgtcactgagattctgataggaattgtattgaatctgcagctcactttgggcagcactgtcctcctaacaatattgagtcttccaattcatgaacacaaaatgtctttcaatttattgatgtcatctttcatttctttcagcaatactttgtagatttcaggtataatcatttcacctctttggttaaacttattcctaaatattttattctttttgatgtgaatataaattgaaattatttttcttaatttcccttcagattgttcatggttagtgtattgaaatacaactgatgtttgaatgttgattttgtattgtgcaacattactgaatttattaattctaataggtttgttccatctttaggattttctacaaataagttcaagttatctataaacagaaataattttactccttccttccaatttgaatgtctttttaaaaattcttccctaatttttctgattagacctttcactactatgttgaataaaagtgtcaatagcaggcatccttgtcttttcctgctcatacagggaaagttttcagtctttctctgttatgtaagatgttagcattgggtttttcacatattgcctttatgttgaggtggttgccttccattcttagaatgtttttattatgaaaaaatactgaatttcatcaaatgcttttattgattcaatcttcttactgattatagttatattcatatttttgtgtgtttctaggagtttgtctatttcatctaggttatccaatttattggcatacaattatttatagtactttcataatcattattttattagaattggtagtaatcgcttcatttttcttttttctttttcttttaagacagagagacaggctctcactctgtaggccaccctaggatggaatacagtggtgtgattatggctcactgcagcctcaacctcctgggctcaagcaattctccttcttcagcctcccaagatgctaggactacaggtgcatgtcaacatgcccagctaattggttttttttttttttgtagagacagcatctccccaggttacctatgctggtccaaacacctggtttcaagaaatccttctgctgtgacctcccaaagtgctaggattaaaacatgacccaccat

SEQ ID NO: 732617 - DNA, 2903 bp, Homo sapiens
  misc_feature (2745)..(2745): n is a, c, g, or t
  misc_feature (2747)..(2747): n is a, c, g, or t
  misc_feature (2753)..(2755): n is a, c, g, or t
agcacagaaggaggaaggacagcacacctgacagccctgctcaggaagtctctggatcctaggctcatctccacaggggagaacacacagacagcagagaccatgggacccctctcagcccctccctgcactcagcacatcacctggaaggggctcctgctcacagcggagactcccaagccctccatctccagcagcaacttaaaccccagggaggtcatggaggctgtgcgcttaatctgtgatcctgagactccggatgcaagctacctgtggttgctgaatggtcagaacctccctatgactcacaggttgcagctgtccaaaaccaacaggaccctctatctatttggtgtcacaaagtatattgcaggaccctatgaatgtgaaatacggaacccagtgagtgccagccgcagtgacccagtcaccctgaatctcctccgtgggagatgccaactctgaatgaaggatgcctgtggaggaatcaaaggtgccacacaggacaatcttctgttatccacacagcgaagctgcccatgccttacatcaccatcaacaacttaaaccccagggagaagaaggatgtgttagccttcacctgtgaacctaagagtcggaactacacctacatttggtggctaaatggtcagagcctcccggtcagtccgagggtaaagcgacccattgaaaacaggatactcattctacccagtgtcacgagaaatgaaacaggaccctatcaatgtgaaatacgggaccgatatggtggcatccgcagtaacccagtcaccctgaatgtcctctatggtccagacctccccagaatttacccttcattcacctattaccgttcaggagaaaacctcgacttgtcctgctttgcggactctaacccaccggcagagtattcttggacaattaatgggaagtttcagctatcaggacaaaagctctttatcccccaaattactacaaatcatagcgggctctatgcttgctctgttcgtaactcagccactggcaaggaaatctccaaatccatgatagtcaaagtctctgagacagcatctccccaggttacctatgctggtccaaacacctggtttcaagaaatccttctgctgtgacctcccaaagtgctaggattaaaacatgacccaccatgctcagagtccattttcatttatgatttgagtaattttatcttttctctttttttcttagccaatctagttaatggttgtcaattttgttgattttattttgaagaatcaacttttggtttcagtaatttcctctattctgtttccattctccattttatttatatccaccctaatacttattatttccctcattcactgtgcttgggtttagtttgttcttctttcgtatcctgaagtattaaagtaggttgttgacctgagctctttcttcttttttaatgtaagagtttacagttataaatttcttgcacaagactcaacttctctgaacccctgattcctcacctgaaaattgcaataagagtactttcttcataccattcttttaaaggtttaatgcagtcaatgaaacaagatgccacacaaagaggaaccaatgtcagctgctatattactaccatcatcattagccttgaggtcaaatagtcctagaatcaaatctcagatccacctgtcactagccatatgacaccaggaaagtttttacaccatgctaagcttctgtcttttcatcagcaaaatggaaataatgcctacctgacagggttattgtgtggattaaatgagatacaggtaaagtattgagcacagggcctggcacatagaaagtgcacctcaacagtacctacctttttccatagatatgaaaaaagcggtaacacataaaacactaggacatggttactgactaattgtgggagagaaagaaaaaaagctaagtgcaaagaatcaagtctggtatgttagtttttaccaactgagatgcatccaagatgggattagacatacaagataatttatcagggaagacacctgtgagggaatgtggggcaggcatgaaggtagtatgggagaacccacagaccgctatgcagagctgattcctgtgaaaaagaaagagaaagaagttttaggtaccaatgcagttctaagagtttttgcaaggctgatgaggaatcctccaaccagtcacccattggagttaaagagagcctcggagaactagacttgctttcacacccttgctgggagcctgtgggaaagaagctttctctgtaaaggaggtagtgaatttgaaatgcgctgacctgggccttctgtcaatcaggtccctgccatggaaaccagacagagtctcattaatggctgccacaatagagacactgagaaaaagaacaggttgataccttcatgaaattcaagacaaagaagaaaaaaactcaatgttattggactaaataatcaaaaggataatgttttcataattttttattggaaaatgtgctgattcttggaatgttttattctccagatttatgaactttttttcttcagcaattggtaaagtatacttttgtaaacaaaaattgaaacatttgcttttgctctctatctgagtgccccagaattgggaaactattcatgagtattcataggtttatggtaataaagttatttgcacaagttcaaaaaaaaaaaaaaaaaaacaaaaaaaaacagttgttggggcggcctngnggcccnnngaaaaagcttttctgagaacacattgctttgggacgccgcggggccccagtagggtcacggcggaacagtgggcgccacaacggtgtgttcctcagaggagaatcggggccaagagacataagggccgggggtttctcccataagaaa

SEQ ID NO: 732618 - DNA, 4005 bp, Homo sapiens
agcacagaaggaggaaggacagcacacctgacagccctgctcaggaagtctctggatcctaggctcatctccacaggggagaacacacagacagcagagaccatgggacccctctcagcccctccctgcactcagcacatcacctggaaggggctcctgctcacagcggagactcccaagccctccatctccagcagcaacttaaaccccagggaggtcatggaggctgtgcgcttaatctgtgatcctgagactccggatgcaagctacctgtggttgctgaatggtcagaacctccctatgactcacaggttgcagctgtccaaaaccaacaggaccctctatctatttggtgtcacaaagtatattgcaggaccctatgaatgtgaaatacggaacccagtgagtgccagccgcagtgacccagtcaccctgaatctcctccatggtccagacctccccagaatttacccttcattcacctattaccgttcaggagaaaacctcgacttgtcctgctttgcggactctaacccaccggcagagtattcttggacaattaatgggaagtttcagctatcaggacaaaagctctttatcccccaaattactacaaatcatagcgggctctatgcttgctctgttcgtaactcagccactggcaaggaaatctccaaatccatgatagtcaaagtctctggtaagtggatcccagcatccttggcaatagggttttaggtggagtctatctggctttcagagaagagtcaggaaaacatttgtattcccagactgtgtcccatgggcacaagcaaatcccaaattctcctcctgaaccctcccaacttatctctacagactctcttctgcttgtttttctgttttctcatggctgaccttgtgtctggcctgagaaaggtagggagggggctttatcagccctgagccctatgtggtagaagaggcttcacagagggacaagaaggagagtcctcaagatcaagttgcttctcgctgtcacgaacacatccccttctgccatgtctttgttttcttgtacctattccatgagctacaaggaacatctgaggctttgaaacaagctcacacttttcccccaaatgagaggaggaagccctttgggtgagggaggagcagctcagactctgcttcctgctctgctccgggctcctctggtgactggcctggccctgcctgactccacctggggtggaaccaacatgtgtggagaaagggccctggtggcctgtcctgaagttggctaaatcgagctgccagttgaagccaagcctcccccgggccaggctgcagggaaataagaagagagggagcttcagggctgactcctgagctgcatcctggctctgaagtcaccagctgtatgaggctttgggcacagcacgtgggacacagcacggaggacagtgactgatgcagagctagagaaatagggagattcacccctggggctctgcatggcaggaaaggggcagtgccaaaaagtgtgtaattatagagagggcaagaccacgagacactttatatatatctaatattagacttaccattaactaagtgtgcaatttagtgttgtgtaactatcacactatccatttccagaactttttcctcttaccatattaaacctctgtacccaataaacagtaactctcactccttctccccctaacccttaacacccaccattctactttctgtctctatgtaactggctattctaactatcttttataaatggaattatataataattatccttttgtgtctggcttatttcagttggcataatatcttcaaggttcatccattttgcacgatgtattgtaattttcttccttgttaaggttgaataacatttcaatgtatagatacatctcatttgcctacccacttatctttcaatggacttttcagttgtttccatttttggctagtgtgagtaatgcttctctgtacatcagtgtacaaatatttcttcaaatttctttcaattctatagggagtatgtccagaaggggaattgctggatcaaatggtaatttattgtttaattttttgaaaaacagccacactactttttacattggctataacatttcccattcccatcagcaatgcactagagctccaatttttccatctacttggaaacacctgttgtttagtgttgctgtcattgttgttgtttatcaaagccatcctaaagtgtgtgaggtgttgtaacattgtggttttgatttgcatatctctaagtattcgtgatgctgaggaactttgcatgggctatataaaaggttttgatttttatgaagtctgatttatccattttatttgttgcctatgcttttgttgttacaaccaagaaatcattgtgaaatccactatcatgaagtttttcttctaagagttgtatagtttttactcttacatttagatctttgatctattgtgggttaatttttgtacatggtgttaggtaaaggttccactcttcttgcccttggatatccacctttcccaatatcatttggtgagaacactgtcccttccccattgaacgatcttggcacactcgatgaaaatcatttggccatatatgcaagcatttctttctgggctatgatatttcattaatttctatgtcctcctttatgccagtaccacactgtattgattactggggctttgtagtaaatgctgaaatcaggaagtgtgagtcctccagcttcattcttcctcttcaaagctgtgtgtctatttagagtcatgagatgcaatataaattttaggacagatttttctttttctgcaaaaatgtcactgagattctgataggaattgtattgaatctgcagctcactttgggcagcactgtcctcctaacaatattgagtcttccaattcatgaacacaaaatgtctttcaatttattgatgtcatctttcatttctttcagcaatactttgtagatttcaggtataatcatttcacctctttggttaaacttattcctaaatattttattctttttgatgtgaatataaattgaaattatttttcttaatttcccttcagattgttcatggttagtgtattgaaatacaactgatgtttgaatgttgattttgtattgtgcaacattactgaatttattaattctaataggtttgttccatctttaggattttctacaaataagttcaagttatctataaacagaaataattttactccttccttccaatttgaatgtctttttaaaaattcttccctaatttttctgattagacctttcactactatgttgaataaaagtgtcaatagcaggcatccttgtcttttcctgctcatacagggaaagttttcagtctttctctgttatgtaagatgttagcattgggtttttcacatattgcctttatgttgaggtggttgccttccattcttagaatgtttttattatgaaaaaatactgaatttcatcaaatgcttttattgattcaatcttcttactgattatagttatattcatatttttgtgtgtttctaggagtttgtctatttcatctaggttatccaatttattggcatacaattatttatagtactttcataatcattattttattagaattggtagtaatcgcttcatttttcttttttctttttcttttaagacagagagacaggctctcactctgtaggccaccctaggatggaatacagtggtgtgattatggctcactgcagcctcaacctcctgggctcaagcaattctccttcttcagcctcccaagatgctaggactacaggtgcatgtcaacatgcccagctaattggttttttttttttttgtagagacagcatctccccaggttacctatgctggtccaaacacctggtttcaagaaatccttctgctgtgacctcccaaagtgctaggattaaaacatgacccaccat

SEQ ID NO: 732619 - DNA, 1762 bp, Homo sapiens
atattaactgatgctgtctctaccacacatcacttttaaacttctggaacctgcccaccactgcccaagtaataattgaagccaagccacccaaagtttccgaggggaaggatgttcttctacttgtccacaatttgccccagaatcttactggctacatctggtacaaagggcaaatgacggacctctaccattacattacatcatatgtagtacacggtcaaattatatatgggcctgcctacagtggacgagaaacagtatattccaatgcatccctgctgatccagaatgtcacacaggaggatgcaggatcctacaccttacacatcataaagcgaggcgatgggactggaggagtaactggatatttcactgtcaccttatactatgtgggacaactacaaaggctgtcacatacacttaacgggaatacttgtggtttggggaccagatggaggtggccagcggagactcccaagccctccatctccagcagcaacttaaaccccagggaggtcatggaggctgtgcgcttaatctgtgatcctgagactccggatgcaagctacctgtggttgctgaatggtcagaacctccctatgactcacaggttgcagctgtccaaaaccaacaggaccctctatctatttggtgtcacaaagtatattgcaggaccctatgaatgtgaaatacggaacccagtgagtgccagccgcagtgacccagtcaccctgaatctcctccgtgagtatcttctgttcctctgtgagccaggctgccatcccaaatacaagtggccagaggccaggcctctcagtccctctcaggtccaagtacagagacctttatccctgaacatcaaagctggccatgactttctgctccaggcaaaccagagtaggcctaggcttgatcaacaataagagagaagaggcttctcctgtcatgggagactcaggttccacagcttgtgatggaagaaacaggtgaatgtctcaggctccagatcagtgaacacagcggggatttggctgggacttcagtgttgcaacttggctcacagggtcactgtgactgtgtcccttccacagaccaggattttcccttccctctgacaatatcgcctgtgacattattctctttgctccgcatggcctggatgctcccaccgtttcttcctcatacacctattaccatacaggggaagtccccaagctctcctgcctcacagactctcacccactggcagagcattcttggctgattgatgggaagttccagcaatcagcacaagtgttctttataccccaaatcactaaaacatatagaggggtctatgtctgtttcatccataactcagccactggtggaacaaatctcataatcaagaggatcatagtccctggtaagtggatccctggagcattggcaccatgttttccagtaaagtctatctagctgtcagggaagagccacctgctctctgcaaagggagagggaaaatcaaaacccaggaaagggaatatgtttctgctccaaaaccaccagcttctgcctgtccccttcactctttctagatcattctttagacaatacactaacaatgaacaatctgaaaggaagttaaggaaagaatttcaattcacattaacatcaaaaggaataaaatattttggaataagtttaaccaaaaaggtcaaatgattataccctgaaaactacaaaacattgctgaaagaaattaaagacgatatcaata

SEQ ID NO: 732620 - DNA, 4669 bp, Homo sapiens
atattaactgatgctgtctctaccacacatcacttttaaacttctggaacctgcccaccactgcccaagtaataattgaagccaagccacccaaagtttccgaggggaaggatgttcttctacttgtccacaatttgccccagaatcttactggctacatctggtacaaagggcaaatgacggacctctaccattacattacatcatatgtagtacacggtcaaattatatatgggcctgcctacagtggacgagaaacagtatattccaatgcatccctgctgatccagaatgtcacacaggaggatgcaggatcctacaccttacacatcataaagcgaggcgatgggactggaggagtaactggatatttcactgtcaccttatactatgtgggacaactacaaaggctgtcacatacacttaacgggaatacttgtggtttggggaccagatggaggtggccagcggagactcccaagccctccatctccagcagcaacttaaaccccagggaggtcatggaggctgtgcgcttaatctgtgatcctgagactccggatgcaagctacctgtggttgctgaatggtcagaacctccctatgactcacaggttgcagctgtccaaaaccaacaggaccctctatctatttggtgtcacaaagtatattgcaggaccctatgaatgtgaaatacggaacccagtgagtgccagccgcagtgacccagtcaccctgaatctcctccgtgggagatgccaactctgaatgaaggatgcctgtggaggaatcaaaggtgccacacaggacaatcttctgttatccacacagcgaagctgcccatgccttacatcaccatcaacaacttaaaccccagggagaagaaggatgtgttagccttcacctgtgaacctaagagtcggaactacacctacatttggtggctaaatggtcagagcctcccggtcagtccgagggtaaagcgacccattgaaaacaggatactcattctacccagtgtcacgagaaatgaaacaggaccctatcaatgtgaaatacgggaccgatatggtggcatccgcagtaacccagtcaccctgaatgtcctctatggtccagacctccccagaatttacccttcattcacctattaccgttcaggagaaaacctcgacttgtcctgctttgcggactctaacccaccggcagagtattcttggacaattaatgggaagtttcagctatcaggacaaaagctctttatcccccaaattactacaaatcatagcgggctctatgcttgctctgttcgtaactcagccactggcaaggaaatctccaaatccatgatagtcaaagtctctggtaagtggatcccagcatccttggcaatagggttttaggtggagtctatctggctttcagagaagagtcaggaaaacatttgtattcccagactgtgtcccatgggcacaagcaaatcccaaattctcctcctgaaccctcccaacttatctctacagactctcttctgcttgtttttctgttttctcatggctgaccttgtgtctggcctgagaaaggtagggagggggctttatcagccctgagccctatgtggtagaagaggcttcacagagggacaagaaggagagtcctcaagatcaagttgcttctcgctgtcacgaacacatccccttctgccatgtctttgttttcttgtacctattccatgagctacaaggaacatctgaggctttgaaacaagctcacacttttcccccaaatgagaggaggaagccctttgggtgagggaggagcagctcagactctgcttcctgctctgctccgggctcctctggtgactggcctggccctgcctgactccacctggggtggaaccaacatgtgtggagaaagggccctggtggcctgtcctgaagttggctaaatcgagctgccagttgaagccaagcctcccccgggccaggctgcagggaaataagaagagagggagcttcagggctgactcctgagctgcatcctggctctgaagtcaccagctgtatgaggctttgggcacagcacgtgggacacagcacggaggacagtgactgatgcagagctagagaaatagggagattcacccctggggctctgcatggcaggaaaggggcagtgccaaaaagtgtgtaattatagagagggcaagaccacgagacactttatatatatctaatattagacttaccattaactaagtgtgcaatttagtgttgtgtaactatcacactatccatttccagaactttttcctcttaccatattaaacctctgtacccaataaacagtaactctcactccttctccccctaacccttaacacccaccattctactttctgtctctatgtaactggctattctaactatcttttataaatggaattatataataattatccttttgtgtctggcttatttcagttggcataatatcttcaaggttcatccattttgcacgatgtattgtaattttcttccttgttaaggttgaataacatttcaatgtatagatacatctcatttgcctacccacttatctttcaatggacttttcagttgtttccatttttggctagtgtgagtaatgcttctctgtacatcagtgtacaaatatttcttcaaatttctttcaattctatagggagtatgtccagaaggggaattgctggatcaaatggtaatttattgtttaattttttgaaaaacagccacactactttttacattggctataacatttcccattcccatcagcaatgcactagagctccaatttttccatctacttggaaacacctgttgtttagtgttgctgtcattgttgttgtttatcaaagccatcctaaagtgtgtgaggtgttgtaacattgtggttttgatttgcatatctctaagtattcgtgatgctgaggaactttgcatgggctatataaaaggttttgatttttatgaagtctgatttatccattttatttgttgcctatgcttttgttgttacaaccaagaaatcattgtgaaatccactatcatgaagtttttcttctaagagttgtatagtttttactcttacatttagatctttgatctattgtgggttaatttttgtacatggtgttaggtaaaggttccactcttcttgcccttggatatccacctttcccaatatcatttggtgagaacactgtcccttccccattgaacgatcttggcacactcgatgaaaatcatttggccatatatgcaagcatttctttctgggctatgatatttcattaatttctatgtcctcctttatgccagtaccacactgtattgattactggggctttgtagtaaatgctgaaatcaggaagtgtgagtcctccagcttcattcttcctcttcaaagctgtgtgtctatttagagtcatgagatgcaatataaattttaggacagatttttctttttctgcaaaaatgtcactgagattctgataggaattgtattgaatctgcagctcactttgggcagcactgtcctcctaacaatattgagtcttccaattcatgaacacaaaatgtctttcaatttattgatgtcatctttcatttctttcagcaatactttgtagatttcaggtataatcatttcacctctttggttaaacttattcctaaatattttattctttttgatgtgaatataaattgaaattatttttcttaatttcccttcagattgttcatggttagtgtattgaaatacaactgatgtttgaatgttgattttgtattgtgcaacattactgaatttattaattctaataggtttgttccatctttaggattttctacaaataagttcaagttatctataaacagaaataattttactccttccttccaatttgaatgtctttttaaaaattcttccctaatttttctgattagacctttcactactatgttgaataaaagtgtcaatagcaggcatccttgtcttttcctgctcatacagggaaagttttcagtctttctctgttatgtaagatgttagcattgggtttttcacatattgcctttatgttgaggtggttgccttccattcttagaatgtttttattatgaaaaaatactgaatttcatcaaatgcttttattgattcaatcttcttactgattatagttatattcatatttttgtgtgtttctaggagtttgtctatttcatctaggttatccaatttattggcatacaattatttatagtactttcataatcattattttattagaattggtagtaatcgcttcatttttcttttttctttttcttttaagacagagagacaggctctcactctgtaggccaccctaggatggaatacagtggtgtgattatggctcactgcagcctcaacctcctgggctcaagcaattctccttcttcagcctcccaagatgctaggactacaggtgcatgtcaacatgcccagctaattggttttttttttttttgtagagacagcatctccccaggttacctatgctggtccaaacacctggtttcaagaaatccttctgctgtgacctcccaaagtgctaggattaaaacatgacccaccat

SEQ ID NO: 732621 - DNA, 1684 bp, Homo sapiens
atattaactgatgctgtctctaccacacatcacttttaaacttctggaacctgcccaccactgcccaagtaataattgaagccaagccacccaaagtttccgaggggaaggatgttcttctacttgtccacaatttgccccagaatcttactggctacatctggtacaaagggcaaatgacggacctctaccattacattacatcatatgtagtacacggtcaaattatatatgggcctgcctacagtggacgagaaacagtatattccaatgcatccctgctgatccagaatgtcacacaggaggatgcaggatcctacaccttacacatcataaagcgaggcgatgggactggaggagtaactggatatttcactgtcaccttatactcggagactcccaagccctccatctccagcagcaacttaaaccccagggaggtcatggaggctgtgcgcttaatctgtgatcctgagactccggatgcaagctacctgtggttgctgaatggtcagaacctccctatgactcacaggttgcagctgtccaaaaccaacaggaccctctatctatttggtgtcacaaagtatattgcaggaccctatgaatgtgaaatacggaacccagtgagtgccagccgcagtgacccagtcaccctgaatctcctccgtgagtatcttctgttcctctgtgagccaggctgccatcccaaatacaagtggccagaggccaggcctctcagtccctctcaggtccaagtacagagacctttatccctgaacatcaaagctggccatgactttctgctccaggcaaaccagagtaggcctaggcttgatcaacaataagagagaagaggcttctcctgtcatgggagactcaggttccacagcttgtgatggaagaaacaggtgaatgtctcaggctccagatcagtgaacacagcggggatttggctgggacttcagtgttgcaacttggctcacagggtcactgtgactgtgtcccttccacagaccaggattttcccttccctctgacaatatcgcctgtgacattattctctttgctccgcatggcctggatgctcccaccgtttcttcctcatacacctattaccatacaggggaagtccccaagctctcctgcctcacagactctcacccactggcagagcattcttggctgattgatgggaagttccagcaatcagcacaagtgttctttataccccaaatcactaaaacatatagaggggtctatgtctgtttcatccataactcagccactggtggaacaaatctcataatcaagaggatcatagtccctggtaagtggatccctggagcattggcaccatgttttccagtaaagtctatctagctgtcagggaagagccacctgctctctgcaaagggagagggaaaatcaaaacccaggaaagggaatatgtttctgctccaaaaccaccagcttctgcctgtccccttcactctttctagatcattctttagacaatacactaacaatgaacaatctgaaaggaagttaaggaaagaatttcaattcacattaacatcaaaaggaataaaatattttggaataagtttaaccaaaaaggtcaaatgattataccctgaaaactacaaaacattgctgaaagaaattaaagacgatatcaata

SEQ ID NO: 732622 - DNA, 4591 bp, Homo sapiens
atattaactgatgctgtctctaccacacatcacttttaaacttctggaacctgcccaccactgcccaagtaataattgaagccaagccacccaaagtttccgaggggaaggatgttcttctacttgtccacaatttgccccagaatcttactggctacatctggtacaaagggcaaatgacggacctctaccattacattacatcatatgtagtacacggtcaaattatatatgggcctgcctacagtggacgagaaacagtatattccaatgcatccctgctgatccagaatgtcacacaggaggatgcaggatcctacaccttacacatcataaagcgaggcgatgggactggaggagtaactggatatttcactgtcaccttatactcggagactcccaagccctccatctccagcagcaacttaaaccccagggaggtcatggaggctgtgcgcttaatctgtgatcctgagactccggatgcaagctacctgtggttgctgaatggtcagaacctccctatgactcacaggttgcagctgtccaaaaccaacaggaccctctatctatttggtgtcacaaagtatattgcaggaccctatgaatgtgaaatacggaacccagtgagtgccagccgcagtgacccagtcaccctgaatctcctccgtgggagatgccaactctgaatgaaggatgcctgtggaggaatcaaaggtgccacacaggacaatcttctgttatccacacagcgaagctgcccatgccttacatcaccatcaacaacttaaaccccagggagaagaaggatgtgttagccttcacctgtgaacctaagagtcggaactacacctacatttggtggctaaatggtcagagcctcccggtcagtccgagggtaaagcgacccattgaaaacaggatactcattctacccagtgtcacgagaaatgaaacaggaccctatcaatgtgaaatacgggaccgatatggtggcatccgcagtaacccagtcaccctgaatgtcctctatggtccagacctccccagaatttacccttcattcacctattaccgttcaggagaaaacctcgacttgtcctgctttgcggactctaacccaccggcagagtattcttggacaattaatgggaagtttcagctatcaggacaaaagctctttatcccccaaattactacaaatcatagcgggctctatgcttgctctgttcgtaactcagccactggcaaggaaatctccaaatccatgatagtcaaagtctctggtaagtggatcccagcatccttggcaatagggttttaggtggagtctatctggctttcagagaagagtcaggaaaacatttgtattcccagactgtgtcccatgggcacaagcaaatcccaaattctcctcctgaaccctcccaacttatctctacagactctcttctgcttgtttttctgttttctcatggctgaccttgtgtctggcctgagaaaggtagggagggggctttatcagccctgagccctatgtggtagaagaggcttcacagagggacaagaaggagagtcctcaagatcaagttgcttctcgctgtcacgaacacatccccttctgccatgtctttgttttcttgtacctattccatgagctacaaggaacatctgaggctttgaaacaagctcacacttttcccccaaatgagaggaggaagccctttgggtgagggaggagcagctcagactctgcttcctgctctgctccgggctcctctggtgactggcctggccctgcctgactccacctggggtggaaccaacatgtgtggagaaagggccctggtggcctgtcctgaagttggctaaatcgagctgccagttgaagccaagcctcccccgggccaggctgcagggaaataagaagagagggagcttcagggctgactcctgagctgcatcctggctctgaagtcaccagctgtatgaggctttgggcacagcacgtgggacacagcacggaggacagtgactgatgcagagctagagaaatagggagattcacccctggggctctgcatggcaggaaaggggcagtgccaaaaagtgtgtaattatagagagggcaagaccacgagacactttatatatatctaatattagacttaccattaactaagtgtgcaatttagtgttgtgtaactatcacactatccatttccagaactttttcctcttaccatattaaacctctgtacccaataaacagtaactctcactccttctccccctaacccttaacacccaccattctactttctgtctctatgtaactggctattctaactatcttttataaatggaattatataataattatccttttgtgtctggcttatttcagttggcataatatcttcaaggttcatccattttgcacgatgtattgtaattttcttccttgttaaggttgaataacatttcaatgtatagatacatctcatttgcctacccacttatctttcaatggacttttcagttgtttccatttttggctagtgtgagtaatgcttctctgtacatcagtgtacaaatatttcttcaaatttctttcaattctatagggagtatgtccagaaggggaattgctggatcaaatggtaatttattgtttaattttttgaaaaacagccacactactttttacattggctataacatttcccattcccatcagcaatgcactagagctccaatttttccatctacttggaaacacctgttgtttagtgttgctgtcattgttgttgtttatcaaagccatcctaaagtgtgtgaggtgttgtaacattgtggttttgatttgcatatctctaagtattcgtgatgctgaggaactttgcatgggctatataaaaggttttgatttttatgaagtctgatttatccattttatttgttgcctatgcttttgttgttacaaccaagaaatcattgtgaaatccactatcatgaagtttttcttctaagagttgtatagtttttactcttacatttagatctttgatctattgtgggttaatttttgtacatggtgttaggtaaaggttccactcttcttgcccttggatatccacctttcccaatatcatttggtgagaacactgtcccttccccattgaacgatcttggcacactcgatgaaaatcatttggccatatatgcaagcatttctttctgggctatgatatttcattaatttctatgtcctcctttatgccagtaccacactgtattgattactggggctttgtagtaaatgctgaaatcaggaagtgtgagtcctccagcttcattcttcctcttcaaagctgtgtgtctatttagagtcatgagatgcaatataaattttaggacagatttttctttttctgcaaaaatgtcactgagattctgataggaattgtattgaatctgcagctcactttgggcagcactgtcctcctaacaatattgagtcttccaattcatgaacacaaaatgtctttcaatttattgatgtcatctttcatttctttcagcaatactttgtagatttcaggtataatcatttcacctctttggttaaacttattcctaaatattttattctttttgatgtgaatataaattgaaattatttttcttaatttcccttcagattgttcatggttagtgtattgaaatacaactgatgtttgaatgttgattttgtattgtgcaacattactgaatttattaattctaataggtttgttccatctttaggattttctacaaataagttcaagttatctataaacagaaataattttactccttccttccaatttgaatgtctttttaaaaattcttccctaatttttctgattagacctttcactactatgttgaataaaagtgtcaatagcaggcatccttgtcttttcctgctcatacagggaaagttttcagtctttctctgttatgtaagatgttagcattgggtttttcacatattgcctttatgttgaggtggttgccttccattcttagaatgtttttattatgaaaaaatactgaatttcatcaaatgcttttattgattcaatcttcttactgattatagttatattcatatttttgtgtgtttctaggagtttgtctatttcatctaggttatccaatttattggcatacaattatttatagtactttcataatcattattttattagaattggtagtaatcgcttcatttttcttttttctttttcttttaagacagagagacaggctctcactctgtaggccaccctaggatggaatacagtggtgtgattatggctcactgcagcctcaacctcctgggctcaagcaattctccttcttcagcctcccaagatgctaggactacaggtgcatgtcaacatgcccagctaattggttttttttttttttgtagagacagcatctccccaggttacctatgctggtccaaacacctggtttcaagaaatccttctgctgtgacctcccaaagtgctaggattaaaacatgacccaccat

SEQ ID NO: 732623 - DNA, 1823 bp, Homo sapiens
agcacagaaggaggaaggacagcacacctgacagccctgctcaggaagtctctggatcctaggctcatctccacaggggagaacacacagacagcagagaccatgggacccctctcagcccctccctgcactcagcacatcacctggaaggggctcctgctcacagcatcacttttaaacttctggaacctgcccaccactgcccaagtaataattgaagccaagccacccaaagtttccgaggggaaggatgttcttctacttgtccacaatttgccccagaatcttactggctacatctggtacaaagggcaaatgacggacctctaccattacattacatcatatgtagtacacggtcaaattatatatgggcctgcctacagtggacgagaaacagtatattccaatgcatccctgctgatccagaatgtcacacaggaggatgcaggatcctacaccttacacatcataaagcgaggcgatgggactggaggagtaactggatatttcactgtcaccttatactcggagactcccaagccctccatctccagcagcaacttaaaccccagggaggtcatggaggctgtgcgcttaatctgtgatcctgagactccggatgcaagctacctgtggttgctgaatggtcagaacctccctatgactcacaggttgcagctgtccaaaaccaacaggaccctctatctatttggtgtcacaaagtatattgcaggaccctatgaatgtgaaatacggaacccagtgagtgccagccgcagtgacccagtcaccctgaatctcctccgtgagtatcttctgttcctctgtgagccaggctgccatcccaaatacaagtggccagaggccaggcctctcagtccctctcaggtccaagtacagagacctttatccctgaacatcaaagctggccatgactttctgctccaggcaaaccagagtaggcctaggcttgatcaacaataagagagaagaggcttctcctgtcatgggagactcaggttccacagcttgtgatggaagaaacaggtgaatgtctcaggctccagatcagtgaacacagcggggatttggctgggacttcagtgttgcaacttggctcacagggtcactgtgactgtgtcccttccacagaccaggattttcccttccctctgacaatatcgcctgtgacattattctctttgctccgcatggcctggatgctcccaccgtttcttcctcatacacctattaccatacaggggaagtccccaagctctcctgcctcacagactctcacccactggcagagcattcttggctgattgatgggaagttccagcaatcagcacaagtgttctttataccccaaatcactaaaacatatagaggggtctatgtctgtttcatccataactcagccactggtggaacaaatctcataatcaagaggatcatagtccctggtaagtggatccctggagcattggcaccatgttttccagtaaagtctatctagctgtcagggaagagccacctgctctctgcaaagggagagggaaaatcaaaacccaggaaagggaatatgtttctgctccaaaaccaccagcttctgcctgtccccttcactctttctagatcattctttagacaatacactaacaatgaacaatctgaaaggaagttaaggaaagaatttcaattcacattaacatcaaaaggaataaaatattttggaataagtttaaccaaaaaggtcaaatgattataccctgaaaactacaaaacattgctgaaagaaattaaagacgatatcaata

SEQ ID NO: 732624 - DNA, 1901 bp, Homo sapiens
agcacagaaggaggaaggacagcacacctgacagccctgctcaggaagtctctggatcctaggctcatctccacaggggagaacacacagacagcagagaccatgggacccctctcagcccctccctgcactcagcacatcacctggaaggggctcctgctcacagcatcacttttaaacttctggaacctgcccaccactgcccaagtaataattgaagccaagccacccaaagtttccgaggggaaggatgttcttctacttgtccacaatttgccccagaatcttactggctacatctggtacaaagggcaaatgacggacctctaccattacattacatcatatgtagtacacggtcaaattatatatgggcctgcctacagtggacgagaaacagtatattccaatgcatccctgctgatccagaatgtcacacaggaggatgcaggatcctacaccttacacatcataaagcgaggcgatgggactggaggagtaactggatatttcactgtcaccttatactatgtgggacaactacaaaggctgtcacatacacttaacgggaatacttgtggtttggggaccagatggaggtggccagcggagactcccaagccctccatctccagcagcaacttaaaccccagggaggtcatggaggctgtgcgcttaatctgtgatcctgagactccggatgcaagctacctgtggttgctgaatggtcagaacctccctatgactcacaggttgcagctgtccaaaaccaacaggaccctctatctatttggtgtcacaaagtatattgcaggaccctatgaatgtgaaatacggaacccagtgagtgccagccgcagtgacccagtcaccctgaatctcctccgtgagtatcttctgttcctctgtgagccaggctgccatcccaaatacaagtggccagaggccaggcctctcagtccctctcaggtccaagtacagagacctttatccctgaacatcaaagctggccatgactttctgctccaggcaaaccagagtaggcctaggcttgatcaacaataagagagaagaggcttctcctgtcatgggagactcaggttccacagcttgtgatggaagaaacaggtgaatgtctcaggctccagatcagtgaacacagcggggatttggctgggacttcagtgttgcaacttggctcacagggtcactgtgactgtgtcccttccacagaccaggattttcccttccctctgacaatatcgcctgtgacattattctctttgctccgcatggcctggatgctcccaccgtttcttcctcatacacctattaccatacaggggaagtccccaagctctcctgcctcacagactctcacccactggcagagcattcttggctgattgatgggaagttccagcaatcagcacaagtgttctttataccccaaatcactaaaacatatagaggggtctatgtctgtttcatccataactcagccactggtggaacaaatctcataatcaagaggatcatagtccctggtaagtggatccctggagcattggcaccatgttttccagtaaagtctatctagctgtcagggaagagccacctgctctctgcaaagggagagggaaaatcaaaacccaggaaagggaatatgtttctgctccaaaaccaccagcttctgcctgtccccttcactctttctagatcattctttagacaatacactaacaatgaacaatctgaaaggaagttaaggaaagaatttcaattcacattaacatcaaaaggaataaaatattttggaataagtttaaccaaaaaggtcaaatgattataccctgaaaactacaaaacattgctgaaagaaattaaagacgatatcaata

SEQ ID NO: 732625 - DNA, 4808 bp, Homo sapiens
agcacagaaggaggaaggacagcacacctgacagccctgctcaggaagtctctggatcctaggctcatctccacaggggagaacacacagacagcagagaccatgggacccctctcagcccctccctgcactcagcacatcacctggaaggggctcctgctcacagcatcacttttaaacttctggaacctgcccaccactgcccaagtaataattgaagccaagccacccaaagtttccgaggggaaggatgttcttctacttgtccacaatttgccccagaatcttactggctacatctggtacaaagggcaaatgacggacctctaccattacattacatcatatgtagtacacggtcaaattatatatgggcctgcctacagtggacgagaaacagtatattccaatgcatccctgctgatccagaatgtcacacaggaggatgcaggatcctacaccttacacatcataaagcgaggcgatgggactggaggagtaactggatatttcactgtcaccttatactatgtgggacaactacaaaggctgtcacatacacttaacgggaatacttgtggtttggggaccagatggaggtggccagcggagactcccaagccctccatctccagcagcaacttaaaccccagggaggtcatggaggctgtgcgcttaatctgtgatcctgagactccggatgcaagctacctgtggttgctgaatggtcagaacctccctatgactcacaggttgcagctgtccaaaaccaacaggaccctctatctatttggtgtcacaaagtatattgcaggaccctatgaatgtgaaatacggaacccagtgagtgccagccgcagtgacccagtcaccctgaatctcctccgtgggagatgccaactctgaatgaaggatgcctgtggaggaatcaaaggtgccacacaggacaatcttctgttatccacacagcgaagctgcccatgccttacatcaccatcaacaacttaaaccccagggagaagaaggatgtgttagccttcacctgtgaacctaagagtcggaactacacctacatttggtggctaaatggtcagagcctcccggtcagtccgagggtaaagcgacccattgaaaacaggatactcattctacccagtgtcacgagaaatgaaacaggaccctatcaatgtgaaatacgggaccgatatggtggcatccgcagtaacccagtcaccctgaatgtcctctatggtccagacctccccagaatttacccttcattcacctattaccgttcaggagaaaacctcgacttgtcctgctttgcggactctaacccaccggcagagtattcttggacaattaatgggaagtttcagctatcaggacaaaagctctttatcccccaaattactacaaatcatagcgggctctatgcttgctctgttcgtaactcagccactggcaaggaaatctccaaatccatgatagtcaaagtctctggtaagtggatcccagcatccttggcaatagggttttaggtggagtctatctggctttcagagaagagtcaggaaaacatttgtattcccagactgtgtcccatgggcacaagcaaatcccaaattctcctcctgaaccctcccaacttatctctacagactctcttctgcttgtttttctgttttctcatggctgaccttgtgtctggcctgagaaaggtagggagggggctttatcagccctgagccctatgtggtagaagaggcttcacagagggacaagaaggagagtcctcaagatcaagttgcttctcgctgtcacgaacacatccccttctgccatgtctttgttttcttgtacctattccatgagctacaaggaacatctgaggctttgaaacaagctcacacttttcccccaaatgagaggaggaagccctttgggtgagggaggagcagctcagactctgcttcctgctctgctccgggctcctctggtgactggcctggccctgcctgactccacctggggtggaaccaacatgtgtggagaaagggccctggtggcctgtcctgaagttggctaaatcgagctgccagttgaagccaagcctcccccgggccaggctgcagggaaataagaagagagggagcttcagggctgactcctgagctgcatcctggctctgaagtcaccagctgtatgaggctttgggcacagcacgtgggacacagcacggaggacagtgactgatgcagagctagagaaatagggagattcacccctggggctctgcatggcaggaaaggggcagtgccaaaaagtgtgtaattatagagagggcaagaccacgagacactttatatatatctaatattagacttaccattaactaagtgtgcaatttagtgttgtgtaactatcacactatccatttccagaactttttcctcttaccatattaaacctctgtacccaataaacagtaactctcactccttctccccctaacccttaacacccaccattctactttctgtctctatgtaactggctattctaactatcttttataaatggaattatataataattatccttttgtgtctggcttatttcagttggcataatatcttcaaggttcatccattttgcacgatgtattgtaattttcttccttgttaaggttgaataacatttcaatgtatagatacatctcatttgcctacccacttatctttcaatggacttttcagttgtttccatttttggctagtgtgagtaatgcttctctgtacatcagtgtacaaatatttcttcaaatttctttcaattctatagggagtatgtccagaaggggaattgctggatcaaatggtaatttattgtttaattttttgaaaaacagccacactactttttacattggctataacatttcccattcccatcagcaatgcactagagctccaatttttccatctacttggaaacacctgttgtttagtgttgctgtcattgttgttgtttatcaaagccatcctaaagtgtgtgaggtgttgtaacattgtggttttgatttgcatatctctaagtattcgtgatgctgaggaactttgcatgggctatataaaaggttttgatttttatgaagtctgatttatccattttatttgttgcctatgcttttgttgttacaaccaagaaatcattgtgaaatccactatcatgaagtttttcttctaagagttgtatagtttttactcttacatttagatctttgatctattgtgggttaatttttgtacatggtgttaggtaaaggttccactcttcttgcccttggatatccacctttcccaatatcatttggtgagaacactgtcccttccccattgaacgatcttggcacactcgatgaaaatcatttggccatatatgcaagcatttctttctgggctatgatatttcattaatttctatgtcctcctttatgccagtaccacactgtattgattactggggctttgtagtaaatgctgaaatcaggaagtgtgagtcctccagcttcattcttcctcttcaaagctgtgtgtctatttagagtcatgagatgcaatataaattttaggacagatttttctttttctgcaaaaatgtcactgagattctgataggaattgtattgaatctgcagctcactttgggcagcactgtcctcctaacaatattgagtcttccaattcatgaacacaaaatgtctttcaatttattgatgtcatctttcatttctttcagcaatactttgtagatttcaggtataatcatttcacctctttggttaaacttattcctaaatattttattctttttgatgtgaatataaattgaaattatttttcttaatttcccttcagattgttcatggttagtgtattgaaatacaactgatgtttgaatgttgattttgtattgtgcaacattactgaatttattaattctaataggtttgttccatctttaggattttctacaaataagttcaagttatctataaacagaaataattttactccttccttccaatttgaatgtctttttaaaaattcttccctaatttttctgattagacctttcactactatgttgaataaaagtgtcaatagcaggcatccttgtcttttcctgctcatacagggaaagttttcagtctttctctgttatgtaagatgttagcattgggtttttcacatattgcctttatgttgaggtggttgccttccattcttagaatgtttttattatgaaaaaatactgaatttcatcaaatgcttttattgattcaatcttcttactgattatagttatattcatatttttgtgtgtttctaggagtttgtctatttcatctaggttatccaatttattggcatacaattatttatagtactttcataatcattattttattagaattggtagtaatcgcttcatttttcttttttctttttcttttaagacagagagacaggctctcactctgtaggccaccctaggatggaatacagtggtgtgattatggctcactgcagcctcaacctcctgggctcaagcaattctccttcttcagcctcccaagatgctaggactacaggtgcatgtcaacatgcccagctaattggttttttttttttttgtagagacagcatctccccaggttacctatgctggtccaaacacctggtttcaagaaatccttctgctgtgacctcccaaagtgctaggattaaaacatgacccaccat

SEQ ID NO: 732626 - DNA, 4730 bp, Homo sapiens
agcacagaaggaggaaggacagcacacctgacagccctgctcaggaagtctctggatcctaggctcatctccacaggggagaacacacagacagcagagaccatgggacccctctcagcccctccctgcactcagcacatcacctggaaggggctcctgctcacagcatcacttttaaacttctggaacctgcccaccactgcccaagtaataattgaagccaagccacccaaagtttccgaggggaaggatgttcttctacttgtccacaatttgccccagaatcttactggctacatctggtacaaagggcaaatgacggacctctaccattacattacatcatatgtagtacacggtcaaattatatatgggcctgcctacagtggacgagaaacagtatattccaatgcatccctgctgatccagaatgtcacacaggaggatgcaggatcctacaccttacacatcataaagcgaggcgatgggactggaggagtaactggatatttcactgtcaccttatactcggagactcccaagccctccatctccagcagcaacttaaaccccagggaggtcatggaggctgtgcgcttaatctgtgatcctgagactccggatgcaagctacctgtggttgctgaatggtcagaacctccctatgactcacaggttgcagctgtccaaaaccaacaggaccctctatctatttggtgtcacaaagtatattgcaggaccctatgaatgtgaaatacggaacccagtgagtgccagccgcagtgacccagtcaccctgaatctcctccgtgggagatgccaactctgaatgaaggatgcctgtggaggaatcaaaggtgccacacaggacaatcttctgttatccacacagcgaagctgcccatgccttacatcaccatcaacaacttaaaccccagggagaagaaggatgtgttagccttcacctgtgaacctaagagtcggaactacacctacatttggtggctaaatggtcagagcctcccggtcagtccgagggtaaagcgacccattgaaaacaggatactcattctacccagtgtcacgagaaatgaaacaggaccctatcaatgtgaaatacgggaccgatatggtggcatccgcagtaacccagtcaccctgaatgtcctctatggtccagacctccccagaatttacccttcattcacctattaccgttcaggagaaaacctcgacttgtcctgctttgcggactctaacccaccggcagagtattcttggacaattaatgggaagtttcagctatcaggacaaaagctctttatcccccaaattactacaaatcatagcgggctctatgcttgctctgttcgtaactcagccactggcaaggaaatctccaaatccatgatagtcaaagtctctggtaagtggatcccagcatccttggcaatagggttttaggtggagtctatctggctttcagagaagagtcaggaaaacatttgtattcccagactgtgtcccatgggcacaagcaaatcccaaattctcctcctgaaccctcccaacttatctctacagactctcttctgcttgtttttctgttttctcatggctgaccttgtgtctggcctgagaaaggtagggagggggctttatcagccctgagccctatgtggtagaagaggcttcacagagggacaagaaggagagtcctcaagatcaagttgcttctcgctgtcacgaacacatccccttctgccatgtctttgttttcttgtacctattccatgagctacaaggaacatctgaggctttgaaacaagctcacacttttcccccaaatgagaggaggaagccctttgggtgagggaggagcagctcagactctgcttcctgctctgctccgggctcctctggtgactggcctggccctgcctgactccacctggggtggaaccaacatgtgtggagaaagggccctggtggcctgtcctgaagttggctaaatcgagctgccagttgaagccaagcctcccccgggccaggctgcagggaaataagaagagagggagcttcagggctgactcctgagctgcatcctggctctgaagtcaccagctgtatgaggctttgggcacagcacgtgggacacagcacggaggacagtgactgatgcagagctagagaaatagggagattcacccctggggctctgcatggcaggaaaggggcagtgccaaaaagtgtgtaattatagagagggcaagaccacgagacactttatatatatctaatattagacttaccattaactaagtgtgcaatttagtgttgtgtaactatcacactatccatttccagaactttttcctcttaccatattaaacctctgtacccaataaacagtaactctcactccttctccccctaacccttaacacccaccattctactttctgtctctatgtaactggctattctaactatcttttataaatggaattatataataattatccttttgtgtctggcttatttcagttggcataatatcttcaaggttcatccattttgcacgatgtattgtaattttcttccttgttaaggttgaataacatttcaatgtatagatacatctcatttgcctacccacttatctttcaatggacttttcagttgtttccatttttggctagtgtgagtaatgcttctctgtacatcagtgtacaaatatttcttcaaatttctttcaattctatagggagtatgtccagaaggggaattgctggatcaaatggtaatttattgtttaattttttgaaaaacagccacactactttttacattggctataacatttcccattcccatcagcaatgcactagagctccaatttttccatctacttggaaacacctgttgtttagtgttgctgtcattgttgttgtttatcaaagccatcctaaagtgtgtgaggtgttgtaacattgtggttttgatttgcatatctctaagtattcgtgatgctgaggaactttgcatgggctatataaaaggttttgatttttatgaagtctgatttatccattttatttgttgcctatgcttttgttgttacaaccaagaaatcattgtgaaatccactatcatgaagtttttcttctaagagttgtatagtttttactcttacatttagatctttgatctattgtgggttaatttttgtacatggtgttaggtaaaggttccactcttcttgcccttggatatccacctttcccaatatcatttggtgagaacactgtcccttccccattgaacgatcttggcacactcgatgaaaatcatttggccatatatgcaagcatttctttctgggctatgatatttcattaatttctatgtcctcctttatgccagtaccacactgtattgattactggggctttgtagtaaatgctgaaatcaggaagtgtgagtcctccagcttcattcttcctcttcaaagctgtgtgtctatttagagtcatgagatgcaatataaattttaggacagatttttctttttctgcaaaaatgtcactgagattctgataggaattgtattgaatctgcagctcactttgggcagcactgtcctcctaacaatattgagtcttccaattcatgaacacaaaatgtctttcaatttattgatgtcatctttcatttctttcagcaatactttgtagatttcaggtataatcatttcacctctttggttaaacttattcctaaatattttattctttttgatgtgaatataaattgaaattatttttcttaatttcccttcagattgttcatggttagtgtattgaaatacaactgatgtttgaatgttgattttgtattgtgcaacattactgaatttattaattctaataggtttgttccatctttaggattttctacaaataagttcaagttatctataaacagaaataattttactccttccttccaatttgaatgtctttttaaaaattcttccctaatttttctgattagacctttcactactatgttgaataaaagtgtcaatagcaggcatccttgtcttttcctgctcatacagggaaagttttcagtctttctctgttatgtaagatgttagcattgggtttttcacatattgcctttatgttgaggtggttgccttccattcttagaatgtttttattatgaaaaaatactgaatttcatcaaatgcttttattgattcaatcttcttactgattatagttatattcatatttttgtgtgtttctaggagtttgtctatttcatctaggttatccaatttattggcatacaattatttatagtactttcataatcattattttattagaattggtagtaatcgcttcatttttcttttttctttttcttttaagacagagagacaggctctcactctgtaggccaccctaggatggaatacagtggtgtgattatggctcactgcagcctcaacctcctgggctcaagcaattctccttcttcagcctcccaagatgctaggactacaggtgcatgtcaacatgcccagctaattggttttttttttttttgtagagacagcatctccccaggttacctatgctggtccaaacacctggtttcaagaaatccttctgctgtgacctcccaaagtgctaggattaaaacatgacccaccat

SEQ ID NO: 732627 - DNA, 1460 bp, Homo sapiens
agcacagaaggaggaaggacagcacacctgacagccctgctcaggaagtctctggatcctaggctcatctccacaggggagaacacacagacagcagagaccatgggacccctctcagcccctccctgcactcagcacatcacctggaaggggctcctgctcacagcggagactcccaagccctccatctccagcagcaacttaaaccccagggaggtcatggaggctgtgcgcttaatctgtgatcctgagactccggatgcaagctacctgtggttgctgaatggtcagaacctccctatgactcacaggttgcagctgtccaaaaccaacaggaccctctatctatttggtgtcacaaagtatattgcaggaccctatgaatgtgaaatacggaacccagtgagtgccagccgcagtgacccagtcaccctgaatctcctccgtgagtatcttctgttcctctgtgagccaggctgccatcccaaatacaagtggccagaggccaggcctctcagtccctctcaggtccaagtacagagacctttatccctgaacatcaaagctggccatgactttctgctccaggcaaaccagagtaggcctaggcttgatcaacaataagagagaagaggcttctcctgtcatgggagactcaggttccacagcttgtgatggaagaaacaggtgaatgtctcaggctccagatcagtgaacacagcggggatttggctgggacttcagtgttgcaacttggctcacagggtcactgtgactgtgtcccttccacagaccaggattttcccttccctctgacaatatcgcctgtgacattattctctttgctccgcatggcctggatgctcccaccgtttcttcctcatacacctattaccatacaggggaagtccccaagctctcctgcctcacagactctcacccactggcagagcattcttggctgattgatgggaagttccagcaatcagcacaagtgttctttataccccaaatcactaaaacatatagaggggtctatgtctgtttcatccataactcagccactggtggaacaaatctcataatcaagaggatcatagtccctggtaagtggatccctggagcattggcaccatgttttccagtaaagtctatctagctgtcagggaagagccacctgctctctgcaaagggagagggaaaatcaaaacccaggaaagggaatatgtttctgctccaaaaccaccagcttctgcctgtccccttcactctttctagatcattctttagacaatacactaacaatgaacaatctgaaaggaagttaaggaaagaatttcaattcacattaacatcaaaaggaataaaatattttggaataagtttaaccaaaaaggtcaaatgattataccctgaaaactacaaaacattgctgaaagaaattaaagacgatatcaata

SEQ ID NO: 732628 - DNA, 4367 bp, Homo sapiens
agcacagaaggaggaaggacagcacacctgacagccctgctcaggaagtctctggatcctaggctcatctccacaggggagaacacacagacagcagagaccatgggacccctctcagcccctccctgcactcagcacatcacctggaaggggctcctgctcacagcggagactcccaagccctccatctccagcagcaacttaaaccccagggaggtcatggaggctgtgcgcttaatctgtgatcctgagactccggatgcaagctacctgtggttgctgaatggtcagaacctccctatgactcacaggttgcagctgtccaaaaccaacaggaccctctatctatttggtgtcacaaagtatattgcaggaccctatgaatgtgaaatacggaacccagtgagtgccagccgcagtgacccagtcaccctgaatctcctccgtgggagatgccaactctgaatgaaggatgcctgtggaggaatcaaaggtgccacacaggacaatcttctgttatccacacagcgaagctgcccatgccttacatcaccatcaacaacttaaaccccagggagaagaaggatgtgttagccttcacctgtgaacctaagagtcggaactacacctacatttggtggctaaatggtcagagcctcccggtcagtccgagggtaaagcgacccattgaaaacaggatactcattctacccagtgtcacgagaaatgaaacaggaccctatcaatgtgaaatacgggaccgatatggtggcatccgcagtaacccagtcaccctgaatgtcctctatggtccagacctccccagaatttacccttcattcacctattaccgttcaggagaaaacctcgacttgtcctgctttgcggactctaacccaccggcagagtattcttggacaattaatgggaagtttcagctatcaggacaaaagctctttatcccccaaattactacaaatcatagcgggctctatgcttgctctgttcgtaactcagccactggcaaggaaatctccaaatccatgatagtcaaagtctctggtaagtggatcccagcatccttggcaatagggttttaggtggagtctatctggctttcagagaagagtcaggaaaacatttgtattcccagactgtgtcccatgggcacaagcaaatcccaaattctcctcctgaaccctcccaacttatctctacagactctcttctgcttgtttttctgttttctcatggctgaccttgtgtctggcctgagaaaggtagggagggggctttatcagccctgagccctatgtggtagaagaggcttcacagagggacaagaaggagagtcctcaagatcaagttgcttctcgctgtcacgaacacatccccttctgccatgtctttgttttcttgtacctattccatgagctacaaggaacatctgaggctttgaaacaagctcacacttttcccccaaatgagaggaggaagccctttgggtgagggaggagcagctcagactctgcttcctgctctgctccgggctcctctggtgactggcctggccctgcctgactccacctggggtggaaccaacatgtgtggagaaagggccctggtggcctgtcctgaagttggctaaatcgagctgccagttgaagccaagcctcccccgggccaggctgcagggaaataagaagagagggagcttcagggctgactcctgagctgcatcctggctctgaagtcaccagctgtatgaggctttgggcacagcacgtgggacacagcacggaggacagtgactgatgcagagctagagaaatagggagattcacccctggggctctgcatggcaggaaaggggcagtgccaaaaagtgtgtaattatagagagggcaagaccacgagacactttatatatatctaatattagacttaccattaactaagtgtgcaatttagtgttgtgtaactatcacactatccatttccagaactttttcctcttaccatattaaacctctgtacccaataaacagtaactctcactccttctccccctaacccttaacacccaccattctactttctgtctctatgtaactggctattctaactatcttttataaatggaattatataataattatccttttgtgtctggcttatttcagttggcataatatcttcaaggttcatccattttgcacgatgtattgtaattttcttccttgttaaggttgaataacatttcaatgtatagatacatctcatttgcctacccacttatctttcaatggacttttcagttgtttccatttttggctagtgtgagtaatgcttctctgtacatcagtgtacaaatatttcttcaaatttctttcaattctatagggagtatgtccagaaggggaattgctggatcaaatggtaatttattgtttaattttttgaaaaacagccacactactttttacattggctataacatttcccattcccatcagcaatgcactagagctccaatttttccatctacttggaaacacctgttgtttagtgttgctgtcattgttgttgtttatcaaagccatcctaaagtgtgtgaggtgttgtaacattgtggttttgatttgcatatctctaagtattcgtgatgctgaggaactttgcatgggctatataaaaggttttgatttttatgaagtctgatttatccattttatttgttgcctatgcttttgttgttacaaccaagaaatcattgtgaaatccactatcatgaagtttttcttctaagagttgtatagtttttactcttacatttagatctttgatctattgtgggttaatttttgtacatggtgttaggtaaaggttccactcttcttgcccttggatatccacctttcccaatatcatttggtgagaacactgtcccttccccattgaacgatcttggcacactcgatgaaaatcatttggccatatatgcaagcatttctttctgggctatgatatttcattaatttctatgtcctcctttatgccagtaccacactgtattgattactggggctttgtagtaaatgctgaaatcaggaagtgtgagtcctccagcttcattcttcctcttcaaagctgtgtgtctatttagagtcatgagatgcaatataaattttaggacagatttttctttttctgcaaaaatgtcactgagattctgataggaattgtattgaatctgcagctcactttgggcagcactgtcctcctaacaatattgagtcttccaattcatgaacacaaaatgtctttcaatttattgatgtcatctttcatttctttcagcaatactttgtagatttcaggtataatcatttcacctctttggttaaacttattcctaaatattttattctttttgatgtgaatataaattgaaattatttttcttaatttcccttcagattgttcatggttagtgtattgaaatacaactgatgtttgaatgttgattttgtattgtgcaacattactgaatttattaattctaataggtttgttccatctttaggattttctacaaataagttcaagttatctataaacagaaataattttactccttccttccaatttgaatgtctttttaaaaattcttccctaatttttctgattagacctttcactactatgttgaataaaagtgtcaatagcaggcatccttgtcttttcctgctcatacagggaaagttttcagtctttctctgttatgtaagatgttagcattgggtttttcacatattgcctttatgttgaggtggttgccttccattcttagaatgtttttattatgaaaaaatactgaatttcatcaaatgcttttattgattcaatcttcttactgattatagttatattcatatttttgtgtgtttctaggagtttgtctatttcatctaggttatccaatttattggcatacaattatttatagtactttcataatcattattttattagaattggtagtaatcgcttcatttttcttttttctttttcttttaagacagagagacaggctctcactctgtaggccaccctaggatggaatacagtggtgtgattatggctcactgcagcctcaacctcctgggctcaagcaattctccttcttcagcctcccaagatgctaggactacaggtgcatgtcaacatgcccagctaattggttttttttttttttgtagagacagcatctccccaggttacctatgctggtccaaacacctggtttcaagaaatccttctgctgtgacctcccaaagtgctaggattaaaacatgacccaccat

SEQ ID NO: 732629 - DNA, 3783 bp, Homo sapiens
  misc_feature (3625)..(3625): n is a, c, g, or t
  misc_feature (3627)..(3627): n is a, c, g, or t
  misc_feature (3633)..(3635): n is a, c, g, or t
atattaactgatgctgtctctaccacacatcacttttaaacttctggaacctgcccaccactgcccaagtaataattgaagccaagccacccaaagtttccgaggggaaggatgttcttctacttgtccacaatttgccccagaatcttactggctacatctggtacaaagggcaaatgacggacctctaccattacattacatcatatgtagtacacggtcaaattatatatgggcctgcctacagtggacgagaaacagtatattccaatgcatccctgctgatccagaatgtcacacaggaggatgcaggatcctacaccttacacatcataaagcgaggcgatgggactggaggagtaactggatatttcactgtcaccttatactatgtgggacaactacaaaggctgtcacatacacttaacgggaatacttgtggtttggggaccagatggaggtggccagcggagactcccaagccctccatctccagcagcaacttaaaccccagggaggtcatggaggctgtgcgcttaatctgtgatcctgagactccggatgcaagctacctgtggttgctgaatggtcagaacctccctatgactcacaggttgcagctgtccaaaaccaacaggaccctctatctatttggtgtcacaaagtatattgcaggaccctatgaatgtgaaatacggaacccagtgagtgccagccgcagtgacccagtcaccctgaatctcctccgtgagtatcttctgttcctctgtgagccaggctgccatcccaaatacaagtggccagaggccaggcctctcagtccctctcaggtccaagtacagagacctttatccctgaacatcaaagctggccatgactttctgctccaggcaaaccagagtaggcctaggcttgatcaacaataagagagaagaggcttctcctgtcatgggagactcaggttccacagcttgtgatggaagaaacaggtgaatgtctcaggctccagatcagtgaacacagcggggatttggctgggacttcagtgttgcaacttggctcacagggtcactgtgactgtgtcccttccacagaccaggattttcccttccctctgacaatatcgcctgtgacattattctctttgctccgcatggcctggatgctcccaccgtttcttcctcatacacctattaccatacaggggaagtccccaagctctcctgcctcacagactctcacccactggcagagcattcttggctgattgatgggaagttccagcaatcagcacaagtgttctttataccccaaatcactaaaacatatagaggggtctatgtctgtttcatccataactcagccactggtggaacaaatctcataatcaagaggatcatagtccctgcgaagctgcccatgccttacatcaccatcaacaacttaaaccccagggagaagaaggatgtgttagccttcacctgtgaacctaagagtcggaactacacctacatttggtggctaaatggtcagagcctcccggtcagtccgagggtaaagcgacccattgaaaacaggatactcattctacccagtgtcacgagaaatgaaacaggaccctatcaatgtgaaatacgggaccgatatggtggcatccgcagtaacccagtcaccctgaatgtcctctatggtccagacctccccagaatttacccttcattcacctattaccgttcaggagaaaacctcgacttgtcctgctttgcggactctaacccaccggcagagtattcttggacaattaatgggaagtttcagctatcaggacaaaagctctttatcccccaaattactacaaatcatagcgggctctatgcttgctctgttcgtaactcagccactggcaaggaaatctccaaatccatgatagtcaaagtctctgagacagcatctccccaggttacctatgctggtccaaacacctggtttcaagaaatccttctgctgtgacctcccaaagtgctaggattaaaacatgacccaccatgctcagagtccattttcatttatgatttgagtaattttatcttttctctttttttcttagccaatctagttaatggttgtcaattttgttgattttattttgaagaatcaacttttggtttcagtaatttcctctattctgtttccattctccattttatttatatccaccctaatacttattatttccctcattcactgtgcttgggtttagtttgttcttctttcgtatcctgaagtattaaagtaggttgttgacctgagctctttcttcttttttaatgtaagagtttacagttataaatttcttgcacaagactcaacttctctgaacccctgattcctcacctgaaaattgcaataagagtactttcttcataccattcttttaaaggtttaatgcagtcaatgaaacaagatgccacacaaagaggaaccaatgtcagctgctatattactaccatcatcattagccttgaggtcaaatagtcctagaatcaaatctcagatccacctgtcactagccatatgacaccaggaaagtttttacaccatgctaagcttctgtcttttcatcagcaaaatggaaataatgcctacctgacagggttattgtgtggattaaatgagatacaggtaaagtattgagcacagggcctggcacatagaaagtgcacctcaacagtacctacctttttccatagatatgaaaaaagcggtaacacataaaacactaggacatggttactgactaattgtgggagagaaagaaaaaaagctaagtgcaaagaatcaagtctggtatgttagtttttaccaactgagatgcatccaagatgggattagacatacaagataatttatcagggaagacacctgtgagggaatgtggggcaggcatgaaggtagtatgggagaacccacagaccgctatgcagagctgattcctgtgaaaaagaaagagaaagaagttttaggtaccaatgcagttctaagagtttttgcaaggctgatgaggaatcctccaaccagtcacccattggagttaaagagagcctcggagaactagacttgctttcacacccttgctgggagcctgtgggaaagaagctttctctgtaaaggaggtagtgaatttgaaatgcgctgacctgggccttctgtcaatcaggtccctgccatggaaaccagacagagtctcattaatggctgccacaatagagacactgagaaaaagaacaggttgataccttcatgaaattcaagacaaagaagaaaaaaactcaatgttattggactaaataatcaaaaggataatgttttcataattttttattggaaaatgtgctgattcttggaatgttttattctccagatttatgaactttttttcttcagcaattggtaaagtatacttttgtaaacaaaaattgaaacatttgcttttgctctctatctgagtgccccagaattgggaaactattcatgagtattcataggtttatggtaataaagttatttgcacaagttcaaaaaaaaaaaaaaaaaaacaaaaaaaaacagttgttggggcggcctngnggcccnnngaaaaagcttttctgagaacacattgctttgggacgccgcggggccccagtagggtcacggcggaacagtgggcgccacaacggtgtgttcctcagaggagaatcggggccaagagacataagggccgggggtttctcccataagaaa

SEQ ID NO: 732630 - DNA, 2508 bp, Homo sapiens
  misc_feature (2350)..(2350): n is a, c, g, or t
  misc_feature (2352)..(2352): n is a, c, g, or t
  misc_feature (2358)..(2360): n is a, c, g, or t
atattaactgatgctgtctctaccacacatcacttttaaacttctggaacctgcccaccactgcccaagtaataattgaagccaagccacccaaagtttccgaggggaaggatgttcttctacttgtccacaatttgccccagaatcttactggctacatctggtacaaagggcaaatgacggacctctaccattacattacatcatatgtagtacacggtcaaattatatatgggcctgcctacagtggacgagaaacagtatattccaatgcatccctgctgatccagaatgtcacacaggaggatgcaggatcctacaccttacacatcataaagcgaggcgatgggactggaggagtaactggatatttcactgtcaccttatactatgtgggacaactacaaaggctgtcacatacacttaacgggaatacttgtggtttggggaccagatggaggtggccagcggagactcccaagccctccatctccagcagcaacttaaaccccagggaggtcatggaggctgtgcgcttaatctgtgatcctgagactccggatgcaagctacctgtggttgctgaatggtcagaacctccctatgactcacaggttgcagctgtccaaaaccaacaggaccctctatctatttggtgtcacaaagtatattgcaggaccctatgaatgtgaaatacggaacccagtgagtgccagccgcagtgacccagtcaccctgaatctcctccgtgagtatcttctgttcctctgtgagccaggctgccatcccaaatacaagtggccagaggccaggcctctcagtccctctcaggtccaagtacagagacctttatccctgaacatcaaagctggccatgactttctgctccaggcaaaccagagtaggcctaggcttgatcaacaataagagagaagaggcttctcctgtcatgggagactcaggttccacagcttgtgatggaagaaacaggtgaatgtctcaggctccagatcagtgaacacagcggggatttggctgggacttcagtgttgcaacttggctcacagggtcactgtgactgtgtcccttccacagaccaggattttcccttccctctgacaatatcgcctgtgacattattctctttgctccgcatggcctggatgctcccaccgtttcttcctcatacacctattaccatacaggggaagtccccaagctctcctgcctcacagactctcacccactggcagagcattcttggctgattgatgggaagttccagcaatcagcacaagtgttctttataccccaaatcactaaaacatatagaggggtctatgtctgtttcatccataactcagccactggtggaacaaatctcataatcaagaggatcatagtccctgcgaagctgcccatgccttacatcaccatcaacaacttaaaccccagggagaagaaggatgtgttagccttcacctgtgaacctaagagtcggaactacacctacatttggtggctaaatggtcagagcctcccggtcagtccgagggtaaagcgacccattgaaaacaggatactcattctacccagtgtcacgagaaatgaaacaggaccctatcaatgtgaaatacgggaccgatatggtggcatccgcagtaacccagtcaccctgaatgtcctctatggtccagacctccccagaatttacccttcattcacctattaccgttcaggagaaaacctcgacttgtcctgctttgcggactctaacccaccggcagagtattcttggacaattaatgggaagtttcagctatcaggacaaaagctctttatcccccaaattactacaaatcatagcgggctctatgcttgctctgttcgtaactcagccactggcaaggaaatctccaaatccatgatagtcaaagtctctggtccctgccatggaaaccagacagagtctcattaatggctgccacaatagagacactgagaaaaagaacaggttgataccttcatgaaattcaagacaaagaagaaaaaaactcaatgttattggactaaataatcaaaaggataatgttttcataattttttattggaaaatgtgctgattcttggaatgttttattctccagatttatgaactttttttcttcagcaattggtaaagtatacttttgtaaacaaaaattgaaacatttgcttttgctctctatctgagtgccccagaattgggaaactattcatgagtattcataggtttatggtaataaagttatttgcacaagttcaaaaaaaaaaaaaaaaaaacaaaaaaaaacagttgttggggcggcctngnggcccnnngaaaaagcttttctgagaacacattgctttgggacgccgcggggccccagtagggtcacggcggaacagtgggcgccacaacggtgtgttcctcagaggagaatcggggccaagagacataagggccgggggtttctcccataagaaa

SEQ ID NO: 732631 - DNA, 5247 bp, Homo sapiens
atattaactgatgctgtctctaccacacatcacttttaaacttctggaacctgcccaccactgcccaagtaataattgaagccaagccacccaaagtttccgaggggaaggatgttcttctacttgtccacaatttgccccagaatcttactggctacatctggtacaaagggcaaatgacggacctctaccattacattacatcatatgtagtacacggtcaaattatatatgggcctgcctacagtggacgagaaacagtatattccaatgcatccctgctgatccagaatgtcacacaggaggatgcaggatcctacaccttacacatcataaagcgaggcgatgggactggaggagtaactggatatttcactgtcaccttatactatgtgggacaactacaaaggctgtcacatacacttaacgggaatacttgtggtttggggaccagatggaggtggccagcggagactcccaagccctccatctccagcagcaacttaaaccccagggaggtcatggaggctgtgcgcttaatctgtgatcctgagactccggatgcaagctacctgtggttgctgaatggtcagaacctccctatgactcacaggttgcagctgtccaaaaccaacaggaccctctatctatttggtgtcacaaagtatattgcaggaccctatgaatgtgaaatacggaacccagtgagtgccagccgcagtgacccagtcaccctgaatctcctccgtgagtatcttctgttcctctgtgagccaggctgccatcccaaatacaagtggccagaggccaggcctctcagtccctctcaggtccaagtacagagacctttatccctgaacatcaaagctggccatgactttctgctccaggcaaaccagagtaggcctaggcttgatcaacaataagagagaagaggcttctcctgtcatgggagactcaggttccacagcttgtgatggaagaaacaggtgaatgtctcaggctccagatcagtgaacacagcggggatttggctgggacttcagtgttgcaacttggctcacagggtcactgtgactgtgtcccttccacagaccaggattttcccttccctctgacaatatcgcctgtgacattattctctttgctccgcatggcctggatgctcccaccgtttcttcctcatacacctattaccatacaggggaagtccccaagctctcctgcctcacagactctcacccactggcagagcattcttggctgattgatgggaagttccagcaatcagcacaagtgttctttataccccaaatcactaaaacatatagaggggtctatgtctgtttcatccataactcagccactggtggaacaaatctcataatcaagaggatcatagtccctgcgaagctgcccatgccttacatcaccatcaacaacttaaaccccagggagaagaaggatgtgttagccttcacctgtgaacctaagagtcggaactacacctacatttggtggctaaatggtcagagcctcccggtcagtccgagggtaaagcgacccattgaaaacaggatactcattctacccagtgtcacgagaaatgaaacaggaccctatcaatgtgaaatacgggaccgatatggtggcatccgcagtaacccagtcaccctgaatgtcctctatggtccagacctccccagaatttacccttcattcacctattaccgttcaggagaaaacctcgacttgtcctgctttgcggactctaacccaccggcagagtattcttggacaattaatgggaagtttcagctatcaggacaaaagctctttatcccccaaattactacaaatcatagcgggctctatgcttgctctgttcgtaactcagccactggcaaggaaatctccaaatccatgatagtcaaagtctctggtaagtggatcccagcatccttggcaatagggttttaggtggagtctatctggctttcagagaagagtcaggaaaacatttgtattcccagactgtgtcccatgggcacaagcaaatcccaaattctcctcctgaaccctcccaacttatctctacagactctcttctgcttgtttttctgttttctcatggctgaccttgtgtctggcctgagaaaggtagggagggggctttatcagccctgagccctatgtggtagaagaggcttcacagagggacaagaaggagagtcctcaagatcaagttgcttctcgctgtcacgaacacatccccttctgccatgtctttgttttcttgtacctattccatgagctacaaggaacatctgaggctttgaaacaagctcacacttttcccccaaatgagaggaggaagccctttgggtgagggaggagcagctcagactctgcttcctgctctgctccgggctcctctggtgactggcctggccctgcctgactccacctggggtggaaccaacatgtgtggagaaagggccctggtggcctgtcctgaagttggctaaatcgagctgccagttgaagccaagcctcccccgggccaggctgcagggaaataagaagagagggagcttcagggctgactcctgagctgcatcctggctctgaagtcaccagctgtatgaggctttgggcacagcacgtgggacacagcacggaggacagtgactgatgcagagctagagaaatagggagattcacccctggggctctgcatggcaggaaaggggcagtgccaaaaagtgtgtaattatagagagggcaagaccacgagacactttatatatatctaatattagacttaccattaactaagtgtgcaatttagtgttgtgtaactatcacactatccatttccagaactttttcctcttaccatattaaacctctgtacccaataaacagtaactctcactccttctccccctaacccttaacacccaccattctactttctgtctctatgtaactggctattctaactatcttttataaatggaattatataataattatccttttgtgtctggcttatttcagttggcataatatcttcaaggttcatccattttgcacgatgtattgtaattttcttccttgttaaggttgaataacatttcaatgtatagatacatctcatttgcctacccacttatctttcaatggacttttcagttgtttccatttttggctagtgtgagtaatgcttctctgtacatcagtgtacaaatatttcttcaaatttctttcaattctatagggagtatgtccagaaggggaattgctggatcaaatggtaatttattgtttaattttttgaaaaacagccacactactttttacattggctataacatttcccattcccatcagcaatgcactagagctccaatttttccatctacttggaaacacctgttgtttagtgttgctgtcattgttgttgtttatcaaagccatcctaaagtgtgtgaggtgttgtaacattgtggttttgatttgcatatctctaagtattcgtgatgctgaggaactttgcatgggctatataaaaggttttgatttttatgaagtctgatttatccattttatttgttgcctatgcttttgttgttacaaccaagaaatcattgtgaaatccactatcatgaagtttttcttctaagagttgtatagtttttactcttacatttagatctttgatctattgtgggttaatttttgtacatggtgttaggtaaaggttccactcttcttgcccttggatatccacctttcccaatatcatttggtgagaacactgtcccttccccattgaacgatcttggcacactcgatgaaaatcatttggccatatatgcaagcatttctttctgggctatgatatttcattaatttctatgtcctcctttatgccagtaccacactgtattgattactggggctttgtagtaaatgctgaaatcaggaagtgtgagtcctccagcttcattcttcctcttcaaagctgtgtgtctatttagagtcatgagatgcaatataaattttaggacagatttttctttttctgcaaaaatgtcactgagattctgataggaattgtattgaatctgcagctcactttgggcagcactgtcctcctaacaatattgagtcttccaattcatgaacacaaaatgtctttcaatttattgatgtcatctttcatttctttcagcaatactttgtagatttcaggtataatcatttcacctctttggttaaacttattcctaaatattttattctttttgatgtgaatataaattgaaattatttttcttaatttcccttcagattgttcatggttagtgtattgaaatacaactgatgtttgaatgttgattttgtattgtgcaacattactgaatttattaattctaataggtttgttccatctttaggattttctacaaataagttcaagttatctataaacagaaataattttactccttccttccaatttgaatgtctttttaaaaattcttccctaatttttctgattagacctttcactactatgttgaataaaagtgtcaatagcaggcatccttgtcttttcctgctcatacagggaaagttttcagtctttctctgttatgtaagatgttagcattgggtttttcacatattgcctttatgttgaggtggttgccttccattcttagaatgtttttattatgaaaaaatactgaatttcatcaaatgcttttattgattcaatcttcttactgattatagttatattcatatttttgtgtgtttctaggagtttgtctatttcatctaggttatccaatttattggcatacaattatttatagtactttcataatcattattttattagaattggtagtaatcgcttcatttttcttttttctttttcttttaagacagagagacaggctctcactctgtaggccaccctaggatggaatacagtggtgtgattatggctcactgcagcctcaacctcctgggctcaagcaattctccttcttcagcctcccaagatgctaggactacaggtgcatgtcaacatgcccagctaattggttttttttttttttgtagagacagcatctccccaggttacctatgctggtccaaacacctggtttcaagaaatccttctgctgtgacctcccaaagtgctaggattaaaacatgacccaccat

SEQ ID NO: 732632 - DNA, 3705 bp, Homo sapiens
  misc_feature (3547)..(3547): n is a, c, g, or t
  misc_feature (3549)..(3549): n is a, c, g, or t
  misc_feature (3555)..(3557): n is a, c, g, or t
atattaactgatgctgtctctaccacacatcacttttaaacttctggaacctgcccaccactgcccaagtaataattgaagccaagccacccaaagtttccgaggggaaggatgttcttctacttgtccacaatttgccccagaatcttactggctacatctggtacaaagggcaaatgacggacctctaccattacattacatcatatgtagtacacggtcaaattatatatgggcctgcctacagtggacgagaaacagtatattccaatgcatccctgctgatccagaatgtcacacaggaggatgcaggatcctacaccttacacatcataaagcgaggcgatgggactggaggagtaactggatatttcactgtcaccttatactcggagactcccaagccctccatctccagcagcaacttaaaccccagggaggtcatggaggctgtgcgcttaatctgtgatcctgagactccggatgcaagctacctgtggttgctgaatggtcagaacctccctatgactcacaggttgcagctgtccaaaaccaacaggaccctctatctatttggtgtcacaaagtatattgcaggaccctatgaatgtgaaatacggaacccagtgagtgccagccgcagtgacccagtcaccctgaatctcctccgtgagtatcttctgttcctctgtgagccaggctgccatcccaaatacaagtggccagaggccaggcctctcagtccctctcaggtccaagtacagagacctttatccctgaacatcaaagctggccatgactttctgctccaggcaaaccagagtaggcctaggcttgatcaacaataagagagaagaggcttctcctgtcatgggagactcaggttccacagcttgtgatggaagaaacaggtgaatgtctcaggctccagatcagtgaacacagcggggatttggctgggacttcagtgttgcaacttggctcacagggtcactgtgactgtgtcccttccacagaccaggattttcccttccctctgacaatatcgcctgtgacattattctctttgctccgcatggcctggatgctcccaccgtttcttcctcatacacctattaccatacaggggaagtccccaagctctcctgcctcacagactctcacccactggcagagcattcttggctgattgatgggaagttccagcaatcagcacaagtgttctttataccccaaatcactaaaacatatagaggggtctatgtctgtttcatccataactcagccactggtggaacaaatctcataatcaagaggatcatagtccctgcgaagctgcccatgccttacatcaccatcaacaacttaaaccccagggagaagaaggatgtgttagccttcacctgtgaacctaagagtcggaactacacctacatttggtggctaaatggtcagagcctcccggtcagtccgagggtaaagcgacccattgaaaacaggatactcattctacccagtgtcacgagaaatgaaacaggaccctatcaatgtgaaatacgggaccgatatggtggcatccgcagtaacccagtcaccctgaatgtcctctatggtccagacctccccagaatttacccttcattcacctattaccgttcaggagaaaacctcgacttgtcctgctttgcggactctaacccaccggcagagtattcttggacaattaatgggaagtttcagctatcaggacaaaagctctttatcccccaaattactacaaatcatagcgggctctatgcttgctctgttcgtaactcagccactggcaaggaaatctccaaatccatgatagtcaaagtctctgagacagcatctccccaggttacctatgctggtccaaacacctggtttcaagaaatccttctgctgtgacctcccaaagtgctaggattaaaacatgacccaccatgctcagagtccattttcatttatgatttgagtaattttatcttttctctttttttcttagccaatctagttaatggttgtcaattttgttgattttattttgaagaatcaacttttggtttcagtaatttcctctattctgtttccattctccattttatttatatccaccctaatacttattatttccctcattcactgtgcttgggtttagtttgttcttctttcgtatcctgaagtattaaagtaggttgttgacctgagctctttcttcttttttaatgtaagagtttacagttataaatttcttgcacaagactcaacttctctgaacccctgattcctcacctgaaaattgcaataagagtactttcttcataccattcttttaaaggtttaatgcagtcaatgaaacaagatgccacacaaagaggaaccaatgtcagctgctatattactaccatcatcattagccttgaggtcaaatagtcctagaatcaaatctcagatccacctgtcactagccatatgacaccaggaaagtttttacaccatgctaagcttctgtcttttcatcagcaaaatggaaataatgcctacctgacagggttattgtgtggattaaatgagatacaggtaaagtattgagcacagggcctggcacatagaaagtgcacctcaacagtacctacctttttccatagatatgaaaaaagcggtaacacataaaacactaggacatggttactgactaattgtgggagagaaagaaaaaaagctaagtgcaaagaatcaagtctggtatgttagtttttaccaactgagatgcatccaagatgggattagacatacaagataatttatcagggaagacacctgtgagggaatgtggggcaggcatgaaggtagtatgggagaacccacagaccgctatgcagagctgattcctgtgaaaaagaaagagaaagaagttttaggtaccaatgcagttctaagagtttttgcaaggctgatgaggaatcctccaaccagtcacccattggagttaaagagagcctcggagaactagacttgctttcacacccttgctgggagcctgtgggaaagaagctttctctgtaaaggaggtagtgaatttgaaatgcgctgacctgggccttctgtcaatcaggtccctgccatggaaaccagacagagtctcattaatggctgccacaatagagacactgagaaaaagaacaggttgataccttcatgaaattcaagacaaagaagaaaaaaactcaatgttattggactaaataatcaaaaggataatgttttcataattttttattggaaaatgtgctgattcttggaatgttttattctccagatttatgaactttttttcttcagcaattggtaaagtatacttttgtaaacaaaaattgaaacatttgcttttgctctctatctgagtgccccagaattgggaaactattcatgagtattcataggtttatggtaataaagttatttgcacaagttcaaaaaaaaaaaaaaaaaaacaaaaaaaaacagttgttggggcggcctngnggcccnnngaaaaagcttttctgagaacacattgctttgggacgccgcggggccccagtagggtcacggcggaacagtgggcgccacaacggtgtgttcctcagaggagaatcggggccaagagacataagggccgggggtttctcccataagaaa

SEQ ID NO: 732633 - DNA, 2430 bp, Homo sapiens
  misc_feature (2272)..(2272): n is a, c, g, or t
  misc_feature (2274)..(2274): n is a, c, g, or t
  misc_feature (2280)..(2282): n is a, c, g, or t
atattaactgatgctgtctctaccacacatcacttttaaacttctggaacctgcccaccactgcccaagtaataattgaagccaagccacccaaagtttccgaggggaaggatgttcttctacttgtccacaatttgccccagaatcttactggctacatctggtacaaagggcaaatgacggacctctaccattacattacatcatatgtagtacacggtcaaattatatatgggcctgcctacagtggacgagaaacagtatattccaatgcatccctgctgatccagaatgtcacacaggaggatgcaggatcctacaccttacacatcataaagcgaggcgatgggactggaggagtaactggatatttcactgtcaccttatactcggagactcccaagccctccatctccagcagcaacttaaaccccagggaggtcatggaggctgtgcgcttaatctgtgatcctgagactccggatgcaagctacctgtggttgctgaatggtcagaacctccctatgactcacaggttgcagctgtccaaaaccaacaggaccctctatctatttggtgtcacaaagtatattgcaggaccctatgaatgtgaaatacggaacccagtgagtgccagccgcagtgacccagtcaccctgaatctcctccgtgagtatcttctgttcctctgtgagccaggctgccatcccaaatacaagtggccagaggccaggcctctcagtccctctcaggtccaagtacagagacctttatccctgaacatcaaagctggccatgactttctgctccaggcaaaccagagtaggcctaggcttgatcaacaataagagagaagaggcttctcctgtcatgggagactcaggttccacagcttgtgatggaagaaacaggtgaatgtctcaggctccagatcagtgaacacagcggggatttggctgggacttcagtgttgcaacttggctcacagggtcactgtgactgtgtcccttccacagaccaggattttcccttccctctgacaatatcgcctgtgacattattctctttgctccgcatggcctggatgctcccaccgtttcttcctcatacacctattaccatacaggggaagtccccaagctctcctgcctcacagactctcacccactggcagagcattcttggctgattgatgggaagttccagcaatcagcacaagtgttctttataccccaaatcactaaaacatatagaggggtctatgtctgtttcatccataactcagccactggtggaacaaatctcataatcaagaggatcatagtccctgcgaagctgcccatgccttacatcaccatcaacaacttaaaccccagggagaagaaggatgtgttagccttcacctgtgaacctaagagtcggaactacacctacatttggtggctaaatggtcagagcctcccggtcagtccgagggtaaagcgacccattgaaaacaggatactcattctacccagtgtcacgagaaatgaaacaggaccctatcaatgtgaaatacgggaccgatatggtggcatccgcagtaacccagtcaccctgaatgtcctctatggtccagacctccccagaatttacccttcattcacctattaccgttcaggagaaaacctcgacttgtcctgctttgcggactctaacccaccggcagagtattcttggacaattaatgggaagtttcagctatcaggacaaaagctctttatcccccaaattactacaaatcatagcgggctctatgcttgctctgttcgtaactcagccactggcaaggaaatctccaaatccatgatagtcaaagtctctggtccctgccatggaaaccagacagagtctcattaatggctgccacaatagagacactgagaaaaagaacaggttgataccttcatgaaattcaagacaaagaagaaaaaaactcaatgttattggactaaataatcaaaaggataatgttttcataattttttattggaaaatgtgctgattcttggaatgttttattctccagatttatgaactttttttcttcagcaattggtaaagtatacttttgtaaacaaaaattgaaacatttgcttttgctctctatctgagtgccccagaattgggaaactattcatgagtattcataggtttatggtaataaagttatttgcacaagttcaaaaaaaaaaaaaaaaaaacaaaaaaaaacagttgttggggcggcctngnggcccnnngaaaaagcttttctgagaacacattgctttgggacgccgcggggccccagtagggtcacggcggaacagtgggcgccacaacggtgtgttcctcagaggagaatcggggccaagagacataagggccgggggtttctcccataagaaa

SEQ ID NO: 732634 - DNA, 5169 bp, Homo sapiens
atattaactgatgctgtctctaccacacatcacttttaaacttctggaacctgcccaccactgcccaagtaataattgaagccaagccacccaaagtttccgaggggaaggatgttcttctacttgtccacaatttgccccagaatcttactggctacatctggtacaaagggcaaatgacggacctctaccattacattacatcatatgtagtacacggtcaaattatatatgggcctgcctacagtggacgagaaacagtatattccaatgcatccctgctgatccagaatgtcacacaggaggatgcaggatcctacaccttacacatcataaagcgaggcgatgggactggaggagtaactggatatttcactgtcaccttatactcggagactcccaagccctccatctccagcagcaacttaaaccccagggaggtcatggaggctgtgcgcttaatctgtgatcctgagactccggatgcaagctacctgtggttgctgaatggtcagaacctccctatgactcacaggttgcagctgtccaaaaccaacaggaccctctatctatttggtgtcacaaagtatattgcaggaccctatgaatgtgaaatacggaacccagtgagtgccagccgcagtgacccagtcaccctgaatctcctccgtgagtatcttctgttcctctgtgagccaggctgccatcccaaatacaagtggccagaggccaggcctctcagtccctctcaggtccaagtacagagacctttatccctgaacatcaaagctggccatgactttctgctccaggcaaaccagagtaggcctaggcttgatcaacaataagagagaagaggcttctcctgtcatgggagactcaggttccacagcttgtgatggaagaaacaggtgaatgtctcaggctccagatcagtgaacacagcggggatttggctgggacttcagtgttgcaacttggctcacagggtcactgtgactgtgtcccttccacagaccaggattttcccttccctctgacaatatcgcctgtgacattattctctttgctccgcatggcctggatgctcccaccgtttcttcctcatacacctattaccatacaggggaagtccccaagctctcctgcctcacagactctcacccactggcagagcattcttggctgattgatgggaagttccagcaatcagcacaagtgttctttataccccaaatcactaaaacatatagaggggtctatgtctgtttcatccataactcagccactggtggaacaaatctcataatcaagaggatcatagtccctgcgaagctgcccatgccttacatcaccatcaacaacttaaaccccagggagaagaaggatgtgttagccttcacctgtgaacctaagagtcggaactacacctacatttggtggctaaatggtcagagcctcccggtcagtccgagggtaaagcgacccattgaaaacaggatactcattctacccagtgtcacgagaaatgaaacaggaccctatcaatgtgaaatacgggaccgatatggtggcatccgcagtaacccagtcaccctgaatgtcctctatggtccagacctccccagaatttacccttcattcacctattaccgttcaggagaaaacctcgacttgtcctgctttgcggactctaacccaccggcagagtattcttggacaattaatgggaagtttcagctatcaggacaaaagctctttatcccccaaattactacaaatcatagcgggctctatgcttgctctgttcgtaactcagccactggcaaggaaatctccaaatccatgatagtcaaagtctctggtaagtggatcccagcatccttggcaatagggttttaggtggagtctatctggctttcagagaagagtcaggaaaacatttgtattcccagactgtgtcccatgggcacaagcaaatcccaaattctcctcctgaaccctcccaacttatctctacagactctcttctgcttgtttttctgttttctcatggctgaccttgtgtctggcctgagaaaggtagggagggggctttatcagccctgagccctatgtggtagaagaggcttcacagagggacaagaaggagagtcctcaagatcaagttgcttctcgctgtcacgaacacatccccttctgccatgtctttgttttcttgtacctattccatgagctacaaggaacatctgaggctttgaaacaagctcacacttttcccccaaatgagaggaggaagccctttgggtgagggaggagcagctcagactctgcttcctgctctgctccgggctcctctggtgactggcctggccctgcctgactccacctggggtggaaccaacatgtgtggagaaagggccctggtggcctgtcctgaagttggctaaatcgagctgccagttgaagccaagcctcccccgggccaggctgcagggaaataagaagagagggagcttcagggctgactcctgagctgcatcctggctctgaagtcaccagctgtatgaggctttgggcacagcacgtgggacacagcacggaggacagtgactgatgcagagctagagaaatagggagattcacccctggggctctgcatggcaggaaaggggcagtgccaaaaagtgtgtaattatagagagggcaagaccacgagacactttatatatatctaatattagacttaccattaactaagtgtgcaatttagtgttgtgtaactatcacactatccatttccagaactttttcctcttaccatattaaacctctgtacccaataaacagtaactctcactccttctccccctaacccttaacacccaccattctactttctgtctctatgtaactggctattctaactatcttttataaatggaattatataataattatccttttgtgtctggcttatttcagttggcataatatcttcaaggttcatccattttgcacgatgtattgtaattttcttccttgttaaggttgaataacatttcaatgtatagatacatctcatttgcctacccacttatctttcaatggacttttcagttgtttccatttttggctagtgtgagtaatgcttctctgtacatcagtgtacaaatatttcttcaaatttctttcaattctatagggagtatgtccagaaggggaattgctggatcaaatggtaatttattgtttaattttttgaaaaacagccacactactttttacattggctataacatttcccattcccatcagcaatgcactagagctccaatttttccatctacttggaaacacctgttgtttagtgttgctgtcattgttgttgtttatcaaagccatcctaaagtgtgtgaggtgttgtaacattgtggttttgatttgcatatctctaagtattcgtgatgctgaggaactttgcatgggctatataaaaggttttgatttttatgaagtctgatttatccattttatttgttgcctatgcttttgttgttacaaccaagaaatcattgtgaaatccactatcatgaagtttttcttctaagagttgtatagtttttactcttacatttagatctttgatctattgtgggttaatttttgtacatggtgttaggtaaaggttccactcttcttgcccttggatatccacctttcccaatatcatttggtgagaacactgtcccttccccattgaacgatcttggcacactcgatgaaaatcatttggccatatatgcaagcatttctttctgggctatgatatttcattaatttctatgtcctcctttatgccagtaccacactgtattgattactggggctttgtagtaaatgctgaaatcaggaagtgtgagtcctccagcttcattcttcctcttcaaagctgtgtgtctatttagagtcatgagatgcaatataaattttaggacagatttttctttttctgcaaaaatgtcactgagattctgataggaattgtattgaatctgcagctcactttgggcagcactgtcctcctaacaatattgagtcttccaattcatgaacacaaaatgtctttcaatttattgatgtcatctttcatttctttcagcaatactttgtagatttcaggtataatcatttcacctctttggttaaacttattcctaaatattttattctttttgatgtgaatataaattgaaattatttttcttaatttcccttcagattgttcatggttagtgtattgaaatacaactgatgtttgaatgttgattttgtattgtgcaacattactgaatttattaattctaataggtttgttccatctttaggattttctacaaataagttcaagttatctataaacagaaataattttactccttccttccaatttgaatgtctttttaaaaattcttccctaatttttctgattagacctttcactactatgttgaataaaagtgtcaatagcaggcatccttgtcttttcctgctcatacagggaaagttttcagtctttctctgttatgtaagatgttagcattgggtttttcacatattgcctttatgttgaggtggttgccttccattcttagaatgtttttattatgaaaaaatactgaatttcatcaaatgcttttattgattcaatcttcttactgattatagttatattcatatttttgtgtgtttctaggagtttgtctatttcatctaggttatccaatttattggcatacaattatttatagtactttcataatcattattttattagaattggtagtaatcgcttcatttttcttttttctttttcttttaagacagagagacaggctctcactctgtaggccaccctaggatggaatacagtggtgtgattatggctcactgcagcctcaacctcctgggctcaagcaattctccttcttcagcctcccaagatgctaggactacaggtgcatgtcaacatgcccagctaattggttttttttttttttgtagagacagcatctccccaggttacctatgctggtccaaacacctggtttcaagaaatccttctgctgtgacctcccaaagtgctaggattaaaacatgacccaccat

SEQ ID NO: 732635 - DNA, 2486 bp, Homo sapiens
  misc_feature (2328)..(2328): n is a, c, g, or t
  misc_feature (2330)..(2330): n is a, c, g, or t
  misc_feature (2336)..(2338): n is a, c, g, or t
atattaactgatgctgtctctaccacacatcacttttaaacttctggaacctgcccaccactgcccaagtaataattgaagccaagccacccaaagtttccgaggggaaggatgttcttctacttgtccacaatttgccccagaatcttactggctacatctggtacaaagggcaaatgacggacctctaccattacattacatcatatgtagtacacggtcaaattatatatgggcctgcctacagtggacgagaaacagtatattccaatgcatccctgctgatccagaatgtcacacaggaggatgcaggatcctacaccttacacatcataaagcgaggcgatgggactggaggagtaactggatatttcactgtcaccttatactatggtccagacctccccagaatttacccttcattcacctattaccgttcaggagaaaacctcgacttgtcctgctttgcggactctaacccaccggcagagtattcttggacaattaatgggaagtttcagctatcaggacaaaagctctttatcccccaaattactacaaatcatagcgggctctatgcttgctctgttcgtaactcagccactggcaaggaaatctccaaatccatgatagtcaaagtctctgagacagcatctccccaggttacctatgctggtccaaacacctggtttcaagaaatccttctgctgtgacctcccaaagtgctaggattaaaacatgacccaccatgctcagagtccattttcatttatgatttgagtaattttatcttttctctttttttcttagccaatctagttaatggttgtcaattttgttgattttattttgaagaatcaacttttggtttcagtaatttcctctattctgtttccattctccattttatttatatccaccctaatacttattatttccctcattcactgtgcttgggtttagtttgttcttctttcgtatcctgaagtattaaagtaggttgttgacctgagctctttcttcttttttaatgtaagagtttacagttataaatttcttgcacaagactcaacttctctgaacccctgattcctcacctgaaaattgcaataagagtactttcttcataccattcttttaaaggtttaatgcagtcaatgaaacaagatgccacacaaagaggaaccaatgtcagctgctatattactaccatcatcattagccttgaggtcaaatagtcctagaatcaaatctcagatccacctgtcactagccatatgacaccaggaaagtttttacaccatgctaagcttctgtcttttcatcagcaaaatggaaataatgcctacctgacagggttattgtgtggattaaatgagatacaggtaaagtattgagcacagggcctggcacatagaaagtgcacctcaacagtacctacctttttccatagatatgaaaaaagcggtaacacataaaacactaggacatggttactgactaattgtgggagagaaagaaaaaaagctaagtgcaaagaatcaagtctggtatgttagtttttaccaactgagatgcatccaagatgggattagacatacaagataatttatcagggaagacacctgtgagggaatgtggggcaggcatgaaggtagtatgggagaacccacagaccgctatgcagagctgattcctgtgaaaaagaaagagaaagaagttttaggtaccaatgcagttctaagagtttttgcaaggctgatgaggaatcctccaaccagtcacccattggagttaaagagagcctcggagaactagacttgctttcacacccttgctgggagcctgtgggaaagaagctttctctgtaaaggaggtagtgaatttgaaatgcgctgacctgggccttctgtcaatcaggtccctgccatggaaaccagacagagtctcattaatggctgccacaatagagacactgagaaaaagaacaggttgataccttcatgaaattcaagacaaagaagaaaaaaactcaatgttattggactaaataatcaaaaggataatgttttcataattttttattggaaaatgtgctgattcttggaatgttttattctccagatttatgaactttttttcttcagcaattggtaaagtatacttttgtaaacaaaaattgaaacatttgcttttgctctctatctgagtgccccagaattgggaaactattcatgagtattcataggtttatggtaataaagttatttgcacaagttcaaaaaaaaaaaaaaaaaaacaaaaaaaaacagttgttggggcggcctngnggcccnnngaaaaagcttttctgagaacacattgctttgggacgccgcggggccccagtagggtcacggcggaacagtgggcgccacaacggtgtgttcctcagaggagaatcggggccaagagacataagggccgggggtttctcccataagaaa

SEQ ID NO: 732636 - DNA, 1211 bp, Homo sapiens
  misc_feature (1053)..(1053): n is a, c, g, or t
  misc_feature (1055)..(1055): n is a, c, g, or t
  misc_feature (1061)..(1063): n is a, c, g, or t
atattaactgatgctgtctctaccacacatcacttttaaacttctggaacctgcccaccactgcccaagtaataattgaagccaagccacccaaagtttccgaggggaaggatgttcttctacttgtccacaatttgccccagaatcttactggctacatctggtacaaagggcaaatgacggacctctaccattacattacatcatatgtagtacacggtcaaattatatatgggcctgcctacagtggacgagaaacagtatattccaatgcatccctgctgatccagaatgtcacacaggaggatgcaggatcctacaccttacacatcataaagcgaggcgatgggactggaggagtaactggatatttcactgtcaccttatactatggtccagacctccccagaatttacccttcattcacctattaccgttcaggagaaaacctcgacttgtcctgctttgcggactctaacccaccggcagagtattcttggacaattaatgggaagtttcagctatcaggacaaaagctctttatcccccaaattactacaaatcatagcgggctctatgcttgctctgttcgtaactcagccactggcaaggaaatctccaaatccatgatagtcaaagtctctggtccctgccatggaaaccagacagagtctcattaatggctgccacaatagagacactgagaaaaagaacaggttgataccttcatgaaattcaagacaaagaagaaaaaaactcaatgttattggactaaataatcaaaaggataatgttttcataattttttattggaaaatgtgctgattcttggaatgttttattctccagatttatgaactttttttcttcagcaattggtaaagtatacttttgtaaacaaaaattgaaacatttgcttttgctctctatctgagtgccccagaattgggaaactattcatgagtattcataggtttatggtaataaagttatttgcacaagttcaaaaaaaaaaaaaaaaaaacaaaaaaaaacagttgttggggcggcctngnggcccnnngaaaaagcttttctgagaacacattgctttgggacgccgcggggccccagtagggtcacggcggaacagtgggcgccacaacggtgtgttcctcagaggagaatcggggccaagagacataagggccgggggtttctcccataagaaa

SEQ ID NO: 732637 - DNA, 3950 bp, Homo sapiens
atattaactgatgctgtctctaccacacatcacttttaaacttctggaacctgcccaccactgcccaagtaataattgaagccaagccacccaaagtttccgaggggaaggatgttcttctacttgtccacaatttgccccagaatcttactggctacatctggtacaaagggcaaatgacggacctctaccattacattacatcatatgtagtacacggtcaaattatatatgggcctgcctacagtggacgagaaacagtatattccaatgcatccctgctgatccagaatgtcacacaggaggatgcaggatcctacaccttacacatcataaagcgaggcgatgggactggaggagtaactggatatttcactgtcaccttatactatggtccagacctccccagaatttacccttcattcacctattaccgttcaggagaaaacctcgacttgtcctgctttgcggactctaacccaccggcagagtattcttggacaattaatgggaagtttcagctatcaggacaaaagctctttatcccccaaattactacaaatcatagcgggctctatgcttgctctgttcgtaactcagccactggcaaggaaatctccaaatccatgatagtcaaagtctctggtaagtggatcccagcatccttggcaatagggttttaggtggagtctatctggctttcagagaagagtcaggaaaacatttgtattcccagactgtgtcccatgggcacaagcaaatcccaaattctcctcctgaaccctcccaacttatctctacagactctcttctgcttgtttttctgttttctcatggctgaccttgtgtctggcctgagaaaggtagggagggggctttatcagccctgagccctatgtggtagaagaggcttcacagagggacaagaaggagagtcctcaagatcaagttgcttctcgctgtcacgaacacatccccttctgccatgtctttgttttcttgtacctattccatgagctacaaggaacatctgaggctttgaaacaagctcacacttttcccccaaatgagaggaggaagccctttgggtgagggaggagcagctcagactctgcttcctgctctgctccgggctcctctggtgactggcctggccctgcctgactccacctggggtggaaccaacatgtgtggagaaagggccctggtggcctgtcctgaagttggctaaatcgagctgccagttgaagccaagcctcccccgggccaggctgcagggaaataagaagagagggagcttcagggctgactcctgagctgcatcctggctctgaagtcaccagctgtatgaggctttgggcacagcacgtgggacacagcacggaggacagtgactgatgcagagctagagaaatagggagattcacccctggggctctgcatggcaggaaaggggcagtgccaaaaagtgtgtaattatagagagggcaagaccacgagacactttatatatatctaatattagacttaccattaactaagtgtgcaatttagtgttgtgtaactatcacactatccatttccagaactttttcctcttaccatattaaacctctgtacccaataaacagtaactctcactccttctccccctaacccttaacacccaccattctactttctgtctctatgtaactggctattctaactatcttttataaatggaattatataataattatccttttgtgtctggcttatttcagttggcataatatcttcaaggttcatccattttgcacgatgtattgtaattttcttccttgttaaggttgaataacatttcaatgtatagatacatctcatttgcctacccacttatctttcaatggacttttcagttgtttccatttttggctagtgtgagtaatgcttctctgtacatcagtgtacaaatatttcttcaaatttctttcaattctatagggagtatgtccagaaggggaattgctggatcaaatggtaatttattgtttaattttttgaaaaacagccacactactttttacattggctataacatttcccattcccatcagcaatgcactagagctccaatttttccatctacttggaaacacctgttgtttagtgttgctgtcattgttgttgtttatcaaagccatcctaaagtgtgtgaggtgttgtaacattgtggttttgatttgcatatctctaagtattcgtgatgctgaggaactttgcatgggctatataaaaggttttgatttttatgaagtctgatttatccattttatttgttgcctatgcttttgttgttacaaccaagaaatcattgtgaaatccactatcatgaagtttttcttctaagagttgtatagtttttactcttacatttagatctttgatctattgtgggttaatttttgtacatggtgttaggtaaaggttccactcttcttgcccttggatatccacctttcccaatatcatttggtgagaacactgtcccttccccattgaacgatcttggcacactcgatgaaaatcatttggccatatatgcaagcatttctttctgggctatgatatttcattaatttctatgtcctcctttatgccagtaccacactgtattgattactggggctttgtagtaaatgctgaaatcaggaagtgtgagtcctccagcttcattcttcctcttcaaagctgtgtgtctatttagagtcatgagatgcaatataaattttaggacagatttttctttttctgcaaaaatgtcactgagattctgataggaattgtattgaatctgcagctcactttgggcagcactgtcctcctaacaatattgagtcttccaattcatgaacacaaaatgtctttcaatttattgatgtcatctttcatttctttcagcaatactttgtagatttcaggtataatcatttcacctctttggttaaacttattcctaaatattttattctttttgatgtgaatataaattgaaattatttttcttaatttcccttcagattgttcatggttagtgtattgaaatacaactgatgtttgaatgttgattttgtattgtgcaacattactgaatttattaattctaataggtttgttccatctttaggattttctacaaataagttcaagttatctataaacagaaataattttactccttccttccaatttgaatgtctttttaaaaattcttccctaatttttctgattagacctttcactactatgttgaataaaagtgtcaatagcaggcatccttgtcttttcctgctcatacagggaaagttttcagtctttctctgttatgtaagatgttagcattgggtttttcacatattgcctttatgttgaggtggttgccttccattcttagaatgtttttattatgaaaaaatactgaatttcatcaaatgcttttattgattcaatcttcttactgattatagttatattcatatttttgtgtgtttctaggagtttgtctatttcatctaggttatccaatttattggcatacaattatttatagtactttcataatcattattttattagaattggtagtaatcgcttcatttttcttttttctttttcttttaagacagagagacaggctctcactctgtaggccaccctaggatggaatacagtggtgtgattatggctcactgcagcctcaacctcctgggctcaagcaattctccttcttcagcctcccaagatgctaggactacaggtgcatgtcaacatgcccagctaattggttttttttttttttgtagagacagcatctccccaggttacctatgctggtccaaacacctggtttcaagaaatccttctgctgtgacctcccaaagtgctaggattaaaacatgacccaccat

SEQ ID NO: 732638 - DNA, 3844 bp, Homo sapiens
  misc_feature (3686)..(3686): n is a, c, g, or t
  misc_feature (3688)..(3688): n is a, c, g, or t
  misc_feature (3694)..(3696): n is a, c, g, or t
agcacagaaggaggaaggacagcacacctgacagccctgctcaggaagtctctggatcctaggctcatctccacaggggagaacacacagacagcagagaccatgggacccctctcagcccctccctgcactcagcacatcacctggaaggggctcctgctcacagcatcacttttaaacttctggaacctgcccaccactgcccaagtaataattgaagccaagccacccaaagtttccgaggggaaggatgttcttctacttgtccacaatttgccccagaatcttactggctacatctggtacaaagggcaaatgacggacctctaccattacattacatcatatgtagtacacggtcaaattatatatgggcctgcctacagtggacgagaaacagtatattccaatgcatccctgctgatccagaatgtcacacaggaggatgcaggatcctacaccttacacatcataaagcgaggcgatgggactggaggagtaactggatatttcactgtcaccttatactcggagactcccaagccctccatctccagcagcaacttaaaccccagggaggtcatggaggctgtgcgcttaatctgtgatcctgagactccggatgcaagctacctgtggttgctgaatggtcagaacctccctatgactcacaggttgcagctgtccaaaaccaacaggaccctctatctatttggtgtcacaaagtatattgcaggaccctatgaatgtgaaatacggaacccagtgagtgccagccgcagtgacccagtcaccctgaatctcctccgtgagtatcttctgttcctctgtgagccaggctgccatcccaaatacaagtggccagaggccaggcctctcagtccctctcaggtccaagtacagagacctttatccctgaacatcaaagctggccatgactttctgctccaggcaaaccagagtaggcctaggcttgatcaacaataagagagaagaggcttctcctgtcatgggagactcaggttccacagcttgtgatggaagaaacaggtgaatgtctcaggctccagatcagtgaacacagcggggatttggctgggacttcagtgttgcaacttggctcacagggtcactgtgactgtgtcccttccacagaccaggattttcccttccctctgacaatatcgcctgtgacattattctctttgctccgcatggcctggatgctcccaccgtttcttcctcatacacctattaccatacaggggaagtccccaagctctcctgcctcacagactctcacccactggcagagcattcttggctgattgatgggaagttccagcaatcagcacaagtgttctttataccccaaatcactaaaacatatagaggggtctatgtctgtttcatccataactcagccactggtggaacaaatctcataatcaagaggatcatagtccctgcgaagctgcccatgccttacatcaccatcaacaacttaaaccccagggagaagaaggatgtgttagccttcacctgtgaacctaagagtcggaactacacctacatttggtggctaaatggtcagagcctcccggtcagtccgagggtaaagcgacccattgaaaacaggatactcattctacccagtgtcacgagaaatgaaacaggaccctatcaatgtgaaatacgggaccgatatggtggcatccgcagtaacccagtcaccctgaatgtcctctatggtccagacctccccagaatttacccttcattcacctattaccgttcaggagaaaacctcgacttgtcctgctttgcggactctaacccaccggcagagtattcttggacaattaatgggaagtttcagctatcaggacaaaagctctttatcccccaaattactacaaatcatagcgggctctatgcttgctctgttcgtaactcagccactggcaaggaaatctccaaatccatgatagtcaaagtctctgagacagcatctccccaggttacctatgctggtccaaacacctggtttcaagaaatccttctgctgtgacctcccaaagtgctaggattaaaacatgacccaccatgctcagagtccattttcatttatgatttgagtaattttatcttttctctttttttcttagccaatctagttaatggttgtcaattttgttgattttattttgaagaatcaacttttggtttcagtaatttcctctattctgtttccattctccattttatttatatccaccctaatacttattatttccctcattcactgtgcttgggtttagtttgttcttctttcgtatcctgaagtattaaagtaggttgttgacctgagctctttcttcttttttaatgtaagagtttacagttataaatttcttgcacaagactcaacttctctgaacccctgattcctcacctgaaaattgcaataagagtactttcttcataccattcttttaaaggtttaatgcagtcaatgaaacaagatgccacacaaagaggaaccaatgtcagctgctatattactaccatcatcattagccttgaggtcaaatagtcctagaatcaaatctcagatccacctgtcactagccatatgacaccaggaaagtttttacaccatgctaagcttctgtcttttcatcagcaaaatggaaataatgcctacctgacagggttattgtgtggattaaatgagatacaggtaaagtattgagcacagggcctggcacatagaaagtgcacctcaacagtacctacctttttccatagatatgaaaaaagcggtaacacataaaacactaggacatggttactgactaattgtgggagagaaagaaaaaaagctaagtgcaaagaatcaagtctggtatgttagtttttaccaactgagatgcatccaagatgggattagacatacaagataatttatcagggaagacacctgtgagggaatgtggggcaggcatgaaggtagtatgggagaacccacagaccgctatgcagagctgattcctgtgaaaaagaaagagaaagaagttttaggtaccaatgcagttctaagagtttttgcaaggctgatgaggaatcctccaaccagtcacccattggagttaaagagagcctcggagaactagacttgctttcacacccttgctgggagcctgtgggaaagaagctttctctgtaaaggaggtagtgaatttgaaatgcgctgacctgggccttctgtcaatcaggtccctgccatggaaaccagacagagtctcattaatggctgccacaatagagacactgagaaaaagaacaggttgataccttcatgaaattcaagacaaagaagaaaaaaactcaatgttattggactaaataatcaaaaggataatgttttcataattttttattggaaaatgtgctgattcttggaatgttttattctccagatttatgaactttttttcttcagcaattggtaaagtatacttttgtaaacaaaaattgaaacatttgcttttgctctctatctgagtgccccagaattgggaaactattcatgagtattcataggtttatggtaataaagttatttgcacaagttcaaaaaaaaaaaaaaaaaaacaaaaaaaaacagttgttggggcggcctngnggcccnnngaaaaagcttttctgagaacacattgctttgggacgccgcggggccccagtagggtcacggcggaacagtgggcgccacaacggtgtgttcctcagaggagaatcggggccaagagacataagggccgggggtttctcccataagaaa

SEQ ID NO: 732639 - DNA, 2569 bp, Homo sapiens
  misc_feature (2411)..(2411): n is a, c, g, or t
  misc_feature (2413)..(2413): n is a, c, g, or t
  misc_feature (2419)..(2421): n is a, c, g, or t
agcacagaaggaggaaggacagcacacctgacagccctgctcaggaagtctctggatcctaggctcatctccacaggggagaacacacagacagcagagaccatgggacccctctcagcccctccctgcactcagcacatcacctggaaggggctcctgctcacagcatcacttttaaacttctggaacctgcccaccactgcccaagtaataattgaagccaagccacccaaagtttccgaggggaaggatgttcttctacttgtccacaatttgccccagaatcttactggctacatctggtacaaagggcaaatgacggacctctaccattacattacatcatatgtagtacacggtcaaattatatatgggcctgcctacagtggacgagaaacagtatattccaatgcatccctgctgatccagaatgtcacacaggaggatgcaggatcctacaccttacacatcataaagcgaggcgatgggactggaggagtaactggatatttcactgtcaccttatactcggagactcccaagccctccatctccagcagcaacttaaaccccagggaggtcatggaggctgtgcgcttaatctgtgatcctgagactccggatgcaagctacctgtggttgctgaatggtcagaacctccctatgactcacaggttgcagctgtccaaaaccaacaggaccctctatctatttggtgtcacaaagtatattgcaggaccctatgaatgtgaaatacggaacccagtgagtgccagccgcagtgacccagtcaccctgaatctcctccgtgagtatcttctgttcctctgtgagccaggctgccatcccaaatacaagtggccagaggccaggcctctcagtccctctcaggtccaagtacagagacctttatccctgaacatcaaagctggccatgactttctgctccaggcaaaccagagtaggcctaggcttgatcaacaataagagagaagaggcttctcctgtcatgggagactcaggttccacagcttgtgatggaagaaacaggtgaatgtctcaggctccagatcagtgaacacagcggggatttggctgggacttcagtgttgcaacttggctcacagggtcactgtgactgtgtcccttccacagaccaggattttcccttccctctgacaatatcgcctgtgacattattctctttgctccgcatggcctggatgctcccaccgtttcttcctcatacacctattaccatacaggggaagtccccaagctctcctgcctcacagactctcacccactggcagagcattcttggctgattgatgggaagttccagcaatcagcacaagtgttctttataccccaaatcactaaaacatatagaggggtctatgtctgtttcatccataactcagccactggtggaacaaatctcataatcaagaggatcatagtccctgcgaagctgcccatgccttacatcaccatcaacaacttaaaccccagggagaagaaggatgtgttagccttcacctgtgaacctaagagtcggaactacacctacatttggtggctaaatggtcagagcctcccggtcagtccgagggtaaagcgacccattgaaaacaggatactcattctacccagtgtcacgagaaatgaaacaggaccctatcaatgtgaaatacgggaccgatatggtggcatccgcagtaacccagtcaccctgaatgtcctctatggtccagacctccccagaatttacccttcattcacctattaccgttcaggagaaaacctcgacttgtcctgctttgcggactctaacccaccggcagagtattcttggacaattaatgggaagtttcagctatcaggacaaaagctctttatcccccaaattactacaaatcatagcgggctctatgcttgctctgttcgtaactcagccactggcaaggaaatctccaaatccatgatagtcaaagtctctggtccctgccatggaaaccagacagagtctcattaatggctgccacaatagagacactgagaaaaagaacaggttgataccttcatgaaattcaagacaaagaagaaaaaaactcaatgttattggactaaataatcaaaaggataatgttttcataattttttattggaaaatgtgctgattcttggaatgttttattctccagatttatgaactttttttcttcagcaattggtaaagtatacttttgtaaacaaaaattgaaacatttgcttttgctctctatctgagtgccccagaattgggaaactattcatgagtattcataggtttatggtaataaagttatttgcacaagttcaaaaaaaaaaaaaaaaaaacaaaaaaaaacagttgttggggcggcctngnggcccnnngaaaaagcttttctgagaacacattgctttgggacgccgcggggccccagtagggtcacggcggaacagtgggcgccacaacggtgtgttcctcagaggagaatcggggccaagagacataagggccgggggtttctcccataagaaa

SEQ ID NO: 732640 - DNA, 5308 bp, Homo sapiens
agcacagaaggaggaaggacagcacacctgacagccctgctcaggaagtctctggatcctaggctcatctccacaggggagaacacacagacagcagagaccatgggacccctctcagcccctccctgcactcagcacatcacctggaaggggctcctgctcacagcatcacttttaaacttctggaacctgcccaccactgcccaagtaataattgaagccaagccacccaaagtttccgaggggaaggatgttcttctacttgtccacaatttgccccagaatcttactggctacatctggtacaaagggcaaatgacggacctctaccattacattacatcatatgtagtacacggtcaaattatatatgggcctgcctacagtggacgagaaacagtatattccaatgcatccctgctgatccagaatgtcacacaggaggatgcaggatcctacaccttacacatcataaagcgaggcgatgggactggaggagtaactggatatttcactgtcaccttatactcggagactcccaagccctccatctccagcagcaacttaaaccccagggaggtcatggaggctgtgcgcttaatctgtgatcctgagactccggatgcaagctacctgtggttgctgaatggtcagaacctccctatgactcacaggttgcagctgtccaaaaccaacaggaccctctatctatttggtgtcacaaagtatattgcaggaccctatgaatgtgaaatacggaacccagtgagtgccagccgcagtgacccagtcaccctgaatctcctccgtgagtatcttctgttcctctgtgagccaggctgccatcccaaatacaagtggccagaggccaggcctctcagtccctctcaggtccaagtacagagacctttatccctgaacatcaaagctggccatgactttctgctccaggcaaaccagagtaggcctaggcttgatcaacaataagagagaagaggcttctcctgtcatgggagactcaggttccacagcttgtgatggaagaaacaggtgaatgtctcaggctccagatcagtgaacacagcggggatttggctgggacttcagtgttgcaacttggctcacagggtcactgtgactgtgtcccttccacagaccaggattttcccttccctctgacaatatcgcctgtgacattattctctttgctccgcatggcctggatgctcccaccgtttcttcctcatacacctattaccatacaggggaagtccccaagctctcctgcctcacagactctcacccactggcagagcattcttggctgattgatgggaagttccagcaatcagcacaagtgttctttataccccaaatcactaaaacatatagaggggtctatgtctgtttcatccataactcagccactggtggaacaaatctcataatcaagaggatcatagtccctgcgaagctgcccatgccttacatcaccatcaacaacttaaaccccagggagaagaaggatgtgttagccttcacctgtgaacctaagagtcggaactacacctacatttggtggctaaatggtcagagcctcccggtcagtccgagggtaaagcgacccattgaaaacaggatactcattctacccagtgtcacgagaaatgaaacaggaccctatcaatgtgaaatacgggaccgatatggtggcatccgcagtaacccagtcaccctgaatgtcctctatggtccagacctccccagaatttacccttcattcacctattaccgttcaggagaaaacctcgacttgtcctgctttgcggactctaacccaccggcagagtattcttggacaattaatgggaagtttcagctatcaggacaaaagctctttatcccccaaattactacaaatcatagcgggctctatgcttgctctgttcgtaactcagccactggcaaggaaatctccaaatccatgatagtcaaagtctctggtaagtggatcccagcatccttggcaatagggttttaggtggagtctatctggctttcagagaagagtcaggaaaacatttgtattcccagactgtgtcccatgggcacaagcaaatcccaaattctcctcctgaaccctcccaacttatctctacagactctcttctgcttgtttttctgttttctcatggctgaccttgtgtctggcctgagaaaggtagggagggggctttatcagccctgagccctatgtggtagaagaggcttcacagagggacaagaaggagagtcctcaagatcaagttgcttctcgctgtcacgaacacatccccttctgccatgtctttgttttcttgtacctattccatgagctacaaggaacatctgaggctttgaaacaagctcacacttttcccccaaatgagaggaggaagccctttgggtgagggaggagcagctcagactctgcttcctgctctgctccgggctcctctggtgactggcctggccctgcctgactccacctggggtggaaccaacatgtgtggagaaagggccctggtggcctgtcctgaagttggctaaatcgagctgccagttgaagccaagcctcccccgggccaggctgcagggaaataagaagagagggagcttcagggctgactcctgagctgcatcctggctctgaagtcaccagctgtatgaggctttgggcacagcacgtgggacacagcacggaggacagtgactgatgcagagctagagaaatagggagattcacccctggggctctgcatggcaggaaaggggcagtgccaaaaagtgtgtaattatagagagggcaagaccacgagacactttatatatatctaatattagacttaccattaactaagtgtgcaatttagtgttgtgtaactatcacactatccatttccagaactttttcctcttaccatattaaacctctgtacccaataaacagtaactctcactccttctccccctaacccttaacacccaccattctactttctgtctctatgtaactggctattctaactatcttttataaatggaattatataataattatccttttgtgtctggcttatttcagttggcataatatcttcaaggttcatccattttgcacgatgtattgtaattttcttccttgttaaggttgaataacatttcaatgtatagatacatctcatttgcctacccacttatctttcaatggacttttcagttgtttccatttttggctagtgtgagtaatgcttctctgtacatcagtgtacaaatatttcttcaaatttctttcaattctatagggagtatgtccagaaggggaattgctggatcaaatggtaatttattgtttaattttttgaaaaacagccacactactttttacattggctataacatttcccattcccatcagcaatgcactagagctccaatttttccatctacttggaaacacctgttgtttagtgttgctgtcattgttgttgtttatcaaagccatcctaaagtgtgtgaggtgttgtaacattgtggttttgatttgcatatctctaagtattcgtgatgctgaggaactttgcatgggctatataaaaggttttgatttttatgaagtctgatttatccattttatttgttgcctatgcttttgttgttacaaccaagaaatcattgtgaaatccactatcatgaagtttttcttctaagagttgtatagtttttactcttacatttagatctttgatctattgtgggttaatttttgtacatggtgttaggtaaaggttccactcttcttgcccttggatatccacctttcccaatatcatttggtgagaacactgtcccttccccattgaacgatcttggcacactcgatgaaaatcatttggccatatatgcaagcatttctttctgggctatgatatttcattaatttctatgtcctcctttatgccagtaccacactgtattgattactggggctttgtagtaaatgctgaaatcaggaagtgtgagtcctccagcttcattcttcctcttcaaagctgtgtgtctatttagagtcatgagatgcaatataaattttaggacagatttttctttttctgcaaaaatgtcactgagattctgataggaattgtattgaatctgcagctcactttgggcagcactgtcctcctaacaatattgagtcttccaattcatgaacacaaaatgtctttcaatttattgatgtcatctttcatttctttcagcaatactttgtagatttcaggtataatcatttcacctctttggttaaacttattcctaaatattttattctttttgatgtgaatataaattgaaattatttttcttaatttcccttcagattgttcatggttagtgtattgaaatacaactgatgtttgaatgttgattttgtattgtgcaacattactgaatttattaattctaataggtttgttccatctttaggattttctacaaataagttcaagttatctataaacagaaataattttactccttccttccaatttgaatgtctttttaaaaattcttccctaatttttctgattagacctttcactactatgttgaataaaagtgtcaatagcaggcatccttgtcttttcctgctcatacagggaaagttttcagtctttctctgttatgtaagatgttagcattgggtttttcacatattgcctttatgttgaggtggttgccttccattcttagaatgtttttattatgaaaaaatactgaatttcatcaaatgcttttattgattcaatcttcttactgattatagttatattcatatttttgtgtgtttctaggagtttgtctatttcatctaggttatccaatttattggcatacaattatttatagtactttcataatcattattttattagaattggtagtaatcgcttcatttttcttttttctttttcttttaagacagagagacaggctctcactctgtaggccaccctaggatggaatacagtggtgtgattatggctcactgcagcctcaacctcctgggctcaagcaattctccttcttcagcctcccaagatgctaggactacaggtgcatgtcaacatgcccagctaattggttttttttttttttgtagagacagcatctccccaggttacctatgctggtccaaacacctggtttcaagaaatccttctgctgtgacctcccaaagtgctaggattaaaacatgacccaccat

SEQ ID NO: 732641 - DNA, 3922 bp, Homo sapiens
  misc_feature (3764)..(3764): n is a, c, g, or t
  misc_feature (3766)..(3766): n is a, c, g, or t
  misc_feature (3772)..(3774): n is a, c, g, or t
agcacagaaggaggaaggacagcacacctgacagccctgctcaggaagtctctggatcctaggctcatctccacaggggagaacacacagacagcagagaccatgggacccctctcagcccctccctgcactcagcacatcacctggaaggggctcctgctcacagcatcacttttaaacttctggaacctgcccaccactgcccaagtaataattgaagccaagccacccaaagtttccgaggggaaggatgttcttctacttgtccacaatttgccccagaatcttactggctacatctggtacaaagggcaaatgacggacctctaccattacattacatcatatgtagtacacggtcaaattatatatgggcctgcctacagtggacgagaaacagtatattccaatgcatccctgctgatccagaatgtcacacaggaggatgcaggatcctacaccttacacatcataaagcgaggcgatgggactggaggagtaactggatatttcactgtcaccttatactatgtgggacaactacaaaggctgtcacatacacttaacgggaatacttgtggtttggggaccagatggaggtggccagcggagactcccaagccctccatctccagcagcaacttaaaccccagggaggtcatggaggctgtgcgcttaatctgtgatcctgagactccggatgcaagctacctgtggttgctgaatggtcagaacctccctatgactcacaggttgcagctgtccaaaaccaacaggaccctctatctatttggtgtcacaaagtatattgcaggaccctatgaatgtgaaatacggaacccagtgagtgccagccgcagtgacccagtcaccctgaatctcctccgtgagtatcttctgttcctctgtgagccaggctgccatcccaaatacaagtggccagaggccaggcctctcagtccctctcaggtccaagtacagagacctttatccctgaacatcaaagctggccatgactttctgctccaggcaaaccagagtaggcctaggcttgatcaacaataagagagaagaggcttctcctgtcatgggagactcaggttccacagcttgtgatggaagaaacaggtgaatgtctcaggctccagatcagtgaacacagcggggatttggctgggacttcagtgttgcaacttggctcacagggtcactgtgactgtgtcccttccacagaccaggattttcccttccctctgacaatatcgcctgtgacattattctctttgctccgcatggcctggatgctcccaccgtttcttcctcatacacctattaccatacaggggaagtccccaagctctcctgcctcacagactctcacccactggcagagcattcttggctgattgatgggaagttccagcaatcagcacaagtgttctttataccccaaatcactaaaacatatagaggggtctatgtctgtttcatccataactcagccactggtggaacaaatctcataatcaagaggatcatagtccctgcgaagctgcccatgccttacatcaccatcaacaacttaaaccccagggagaagaaggatgtgttagccttcacctgtgaacctaagagtcggaactacacctacatttggtggctaaatggtcagagcctcccggtcagtccgagggtaaagcgacccattgaaaacaggatactcattctacccagtgtcacgagaaatgaaacaggaccctatcaatgtgaaatacgggaccgatatggtggcatccgcagtaacccagtcaccctgaatgtcctctatggtccagacctccccagaatttacccttcattcacctattaccgttcaggagaaaacctcgacttgtcctgctttgcggactctaacccaccggcagagtattcttggacaattaatgggaagtttcagctatcaggacaaaagctctttatcccccaaattactacaaatcatagcgggctctatgcttgctctgttcgtaactcagccactggcaaggaaatctccaaatccatgatagtcaaagtctctgagacagcatctccccaggttacctatgctggtccaaacacctggtttcaagaaatccttctgctgtgacctcccaaagtgctaggattaaaacatgacccaccatgctcagagtccattttcatttatgatttgagtaattttatcttttctctttttttcttagccaatctagttaatggttgtcaattttgttgattttattttgaagaatcaacttttggtttcagtaatttcctctattctgtttccattctccattttatttatatccaccctaatacttattatttccctcattcactgtgcttgggtttagtttgttcttctttcgtatcctgaagtattaaagtaggttgttgacctgagctctttcttcttttttaatgtaagagtttacagttataaatttcttgcacaagactcaacttctctgaacccctgattcctcacctgaaaattgcaataagagtactttcttcataccattcttttaaaggtttaatgcagtcaatgaaacaagatgccacacaaagaggaaccaatgtcagctgctatattactaccatcatcattagccttgaggtcaaatagtcctagaatcaaatctcagatccacctgtcactagccatatgacaccaggaaagtttttacaccatgctaagcttctgtcttttcatcagcaaaatggaaataatgcctacctgacagggttattgtgtggattaaatgagatacaggtaaagtattgagcacagggcctggcacatagaaagtgcacctcaacagtacctacctttttccatagatatgaaaaaagcggtaacacataaaacactaggacatggttactgactaattgtgggagagaaagaaaaaaagctaagtgcaaagaatcaagtctggtatgttagtttttaccaactgagatgcatccaagatgggattagacatacaagataatttatcagggaagacacctgtgagggaatgtggggcaggcatgaaggtagtatgggagaacccacagaccgctatgcagagctgattcctgtgaaaaagaaagagaaagaagttttaggtaccaatgcagttctaagagtttttgcaaggctgatgaggaatcctccaaccagtcacccattggagttaaagagagcctcggagaactagacttgctttcacacccttgctgggagcctgtgggaaagaagctttctctgtaaaggaggtagtgaatttgaaatgcgctgacctgggccttctgtcaatcaggtccctgccatggaaaccagacagagtctcattaatggctgccacaatagagacactgagaaaaagaacaggttgataccttcatgaaattcaagacaaagaagaaaaaaactcaatgttattggactaaataatcaaaaggataatgttttcataattttttattggaaaatgtgctgattcttggaatgttttattctccagatttatgaactttttttcttcagcaattggtaaagtatacttttgtaaacaaaaattgaaacatttgcttttgctctctatctgagtgccccagaattgggaaactattcatgagtattcataggtttatggtaataaagttatttgcacaagttcaaaaaaaaaaaaaaaaaaacaaaaaaaaacagttgttggggcggcctngnggcccnnngaaaaagcttttctgagaacacattgctttgggacgccgcggggccccagtagggtcacggcggaacagtgggcgccacaacggtgtgttcctcagaggagaatcggggccaagagacataagggccgggggtttctcccataagaaa

SEQ ID NO: 732642 - DNA, 2647 bp, Homo sapiens
  misc_feature (2489)..(2489): n is a, c, g, or t
  misc_feature (2491)..(2491): n is a, c, g, or t
  misc_feature (2497)..(2499): n is a, c, g, or t
agcacagaaggaggaaggacagcacacctgacagccctgctcaggaagtctctggatcctaggctcatctccacaggggagaacacacagacagcagagaccatgggacccctctcagcccctccctgcactcagcacatcacctggaaggggctcctgctcacagcatcacttttaaacttctggaacctgcccaccactgcccaagtaataattgaagccaagccacccaaagtttccgaggggaaggatgttcttctacttgtccacaatttgccccagaatcttactggctacatctggtacaaagggcaaatgacggacctctaccattacattacatcatatgtagtacacggtcaaattatatatgggcctgcctacagtggacgagaaacagtatattccaatgcatccctgctgatccagaatgtcacacaggaggatgcaggatcctacaccttacacatcataaagcgaggcgatgggactggaggagtaactggatatttcactgtcaccttatactatgtgggacaactacaaaggctgtcacatacacttaacgggaatacttgtggtttggggaccagatggaggtggccagcggagactcccaagccctccatctccagcagcaacttaaaccccagggaggtcatggaggctgtgcgcttaatctgtgatcctgagactccggatgcaagctacctgtggttgctgaatggtcagaacctccctatgactcacaggttgcagctgtccaaaaccaacaggaccctctatctatttggtgtcacaaagtatattgcaggaccctatgaatgtgaaatacggaacccagtgagtgccagccgcagtgacccagtcaccctgaatctcctccgtgagtatcttctgttcctctgtgagccaggctgccatcccaaatacaagtggccagaggccaggcctctcagtccctctcaggtccaagtacagagacctttatccctgaacatcaaagctggccatgactttctgctccaggcaaaccagagtaggcctaggcttgatcaacaataagagagaagaggcttctcctgtcatgggagactcaggttccacagcttgtgatggaagaaacaggtgaatgtctcaggctccagatcagtgaacacagcggggatttggctgggacttcagtgttgcaacttggctcacagggtcactgtgactgtgtcccttccacagaccaggattttcccttccctctgacaatatcgcctgtgacattattctctttgctccgcatggcctggatgctcccaccgtttcttcctcatacacctattaccatacaggggaagtccccaagctctcctgcctcacagactctcacccactggcagagcattcttggctgattgatgggaagttccagcaatcagcacaagtgttctttataccccaaatcactaaaacatatagaggggtctatgtctgtttcatccataactcagccactggtggaacaaatctcataatcaagaggatcatagtccctgcgaagctgcccatgccttacatcaccatcaacaacttaaaccccagggagaagaaggatgtgttagccttcacctgtgaacctaagagtcggaactacacctacatttggtggctaaatggtcagagcctcccggtcagtccgagggtaaagcgacccattgaaaacaggatactcattctacccagtgtcacgagaaatgaaacaggaccctatcaatgtgaaatacgggaccgatatggtggcatccgcagtaacccagtcaccctgaatgtcctctatggtccagacctccccagaatttacccttcattcacctattaccgttcaggagaaaacctcgacttgtcctgctttgcggactctaacccaccggcagagtattcttggacaattaatgggaagtttcagctatcaggacaaaagctctttatcccccaaattactacaaatcatagcgggctctatgcttgctctgttcgtaactcagccactggcaaggaaatctccaaatccatgatagtcaaagtctctggtccctgccatggaaaccagacagagtctcattaatggctgccacaatagagacactgagaaaaagaacaggttgataccttcatgaaattcaagacaaagaagaaaaaaactcaatgttattggactaaataatcaaaaggataatgttttcataattttttattggaaaatgtgctgattcttggaatgttttattctccagatttatgaactttttttcttcagcaattggtaaagtatacttttgtaaacaaaaattgaaacatttgcttttgctctctatctgagtgccccagaattgggaaactattcatgagtattcataggtttatggtaataaagttatttgcacaagttcaaaaaaaaaaaaaaaaaaacaaaaaaaaacagttgttggggcggcctngnggcccnnngaaaaagcttttctgagaacacattgctttgggacgccgcggggccccagtagggtcacggcggaacagtgggcgccacaacggtgtgttcctcagaggagaatcggggccaagagacataagggccgggggtttctcccataagaaa

SEQ ID NO: 732643 - DNA, 5386 bp, Homo sapiens
agcacagaaggaggaaggacagcacacctgacagccctgctcaggaagtctctggatcctaggctcatctccacaggggagaacacacagacagcagagaccatgggacccctctcagcccctccctgcactcagcacatcacctggaaggggctcctgctcacagcatcacttttaaacttctggaacctgcccaccactgcccaagtaataattgaagccaagccacccaaagtttccgaggggaaggatgttcttctacttgtccacaatttgccccagaatcttactggctacatctggtacaaagggcaaatgacggacctctaccattacattacatcatatgtagtacacggtcaaattatatatgggcctgcctacagtggacgagaaacagtatattccaatgcatccctgctgatccagaatgtcacacaggaggatgcaggatcctacaccttacacatcataaagcgaggcgatgggactggaggagtaactggatatttcactgtcaccttatactatgtgggacaactacaaaggctgtcacatacacttaacgggaatacttgtggtttggggaccagatggaggtggccagcggagactcccaagccctccatctccagcagcaacttaaaccccagggaggtcatggaggctgtgcgcttaatctgtgatcctgagactccggatgcaagctacctgtggttgctgaatggtcagaacctccctatgactcacaggttgcagctgtccaaaaccaacaggaccctctatctatttggtgtcacaaagtatattgcaggaccctatgaatgtgaaatacggaacccagtgagtgccagccgcagtgacccagtcaccctgaatctcctccgtgagtatcttctgttcctctgtgagccaggctgccatcccaaatacaagtggccagaggccaggcctctcagtccctctcaggtccaagtacagagacctttatccctgaacatcaaagctggccatgactttctgctccaggcaaaccagagtaggcctaggcttgatcaacaataagagagaagaggcttctcctgtcatgggagactcaggttccacagcttgtgatggaagaaacaggtgaatgtctcaggctccagatcagtgaacacagcggggatttggctgggacttcagtgttgcaacttggctcacagggtcactgtgactgtgtcccttccacagaccaggattttcccttccctctgacaatatcgcctgtgacattattctctttgctccgcatggcctggatgctcccaccgtttcttcctcatacacctattaccatacaggggaagtccccaagctctcctgcctcacagactctcacccactggcagagcattcttggctgattgatgggaagttccagcaatcagcacaagtgttctttataccccaaatcactaaaacatatagaggggtctatgtctgtttcatccataactcagccactggtggaacaaatctcataatcaagaggatcatagtccctgcgaagctgcccatgccttacatcaccatcaacaacttaaaccccagggagaagaaggatgtgttagccttcacctgtgaacctaagagtcggaactacacctacatttggtggctaaatggtcagagcctcccggtcagtccgagggtaaagcgacccattgaaaacaggatactcattctacccagtgtcacgagaaatgaaacaggaccctatcaatgtgaaatacgggaccgatatggtggcatccgcagtaacccagtcaccctgaatgtcctctatggtccagacctccccagaatttacccttcattcacctattaccgttcaggagaaaacctcgacttgtcctgctttgcggactctaacccaccggcagagtattcttggacaattaatgggaagtttcagctatcaggacaaaagctctttatcccccaaattactacaaatcatagcgggctctatgcttgctctgttcgtaactcagccactggcaaggaaatctccaaatccatgatagtcaaagtctctggtaagtggatcccagcatccttggcaatagggttttaggtggagtctatctggctttcagagaagagtcaggaaaacatttgtattcccagactgtgtcccatgggcacaagcaaatcccaaattctcctcctgaaccctcccaacttatctctacagactctcttctgcttgtttttctgttttctcatggctgaccttgtgtctggcctgagaaaggtagggagggggctttatcagccctgagccctatgtggtagaagaggcttcacagagggacaagaaggagagtcctcaagatcaagttgcttctcgctgtcacgaacacatccccttctgccatgtctttgttttcttgtacctattccatgagctacaaggaacatctgaggctttgaaacaagctcacacttttcccccaaatgagaggaggaagccctttgggtgagggaggagcagctcagactctgcttcctgctctgctccgggctcctctggtgactggcctggccctgcctgactccacctggggtggaaccaacatgtgtggagaaagggccctggtggcctgtcctgaagttggctaaatcgagctgccagttgaagccaagcctcccccgggccaggctgcagggaaataagaagagagggagcttcagggctgactcctgagctgcatcctggctctgaagtcaccagctgtatgaggctttgggcacagcacgtgggacacagcacggaggacagtgactgatgcagagctagagaaatagggagattcacccctggggctctgcatggcaggaaaggggcagtgccaaaaagtgtgtaattatagagagggcaagaccacgagacactttatatatatctaatattagacttaccattaactaagtgtgcaatttagtgttgtgtaactatcacactatccatttccagaactttttcctcttaccatattaaacctctgtacccaataaacagtaactctcactccttctccccctaacccttaacacccaccattctactttctgtctctatgtaactggctattctaactatcttttataaatggaattatataataattatccttttgtgtctggcttatttcagttggcataatatcttcaaggttcatccattttgcacgatgtattgtaattttcttccttgttaaggttgaataacatttcaatgtatagatacatctcatttgcctacccacttatctttcaatggacttttcagttgtttccatttttggctagtgtgagtaatgcttctctgtacatcagtgtacaaatatttcttcaaatttctttcaattctatagggagtatgtccagaaggggaattgctggatcaaatggtaatttattgtttaattttttgaaaaacagccacactactttttacattggctataacatttcccattcccatcagcaatgcactagagctccaatttttccatctacttggaaacacctgttgtttagtgttgctgtcattgttgttgtttatcaaagccatcctaaagtgtgtgaggtgttgtaacattgtggttttgatttgcatatctctaagtattcgtgatgctgaggaactttgcatgggctatataaaaggttttgatttttatgaagtctgatttatccattttatttgttgcctatgcttttgttgttacaaccaagaaatcattgtgaaatccactatcatgaagtttttcttctaagagttgtatagtttttactcttacatttagatctttgatctattgtgggttaatttttgtacatggtgttaggtaaaggttccactcttcttgcccttggatatccacctttcccaatatcatttggtgagaacactgtcccttccccattgaacgatcttggcacactcgatgaaaatcatttggccatatatgcaagcatttctttctgggctatgatatttcattaatttctatgtcctcctttatgccagtaccacactgtattgattactggggctttgtagtaaatgctgaaatcaggaagtgtgagtcctccagcttcattcttcctcttcaaagctgtgtgtctatttagagtcatgagatgcaatataaattttaggacagatttttctttttctgcaaaaatgtcactgagattctgataggaattgtattgaatctgcagctcactttgggcagcactgtcctcctaacaatattgagtcttccaattcatgaacacaaaatgtctttcaatttattgatgtcatctttcatttctttcagcaatactttgtagatttcaggtataatcatttcacctctttggttaaacttattcctaaatattttattctttttgatgtgaatataaattgaaattatttttcttaatttcccttcagattgttcatggttagtgtattgaaatacaactgatgtttgaatgttgattttgtattgtgcaacattactgaatttattaattctaataggtttgttccatctttaggattttctacaaataagttcaagttatctataaacagaaataattttactccttccttccaatttgaatgtctttttaaaaattcttccctaatttttctgattagacctttcactactatgttgaataaaagtgtcaatagcaggcatccttgtcttttcctgctcatacagggaaagttttcagtctttctctgttatgtaagatgttagcattgggtttttcacatattgcctttatgttgaggtggttgccttccattcttagaatgtttttattatgaaaaaatactgaatttcatcaaatgcttttattgattcaatcttcttactgattatagttatattcatatttttgtgtgtttctaggagtttgtctatttcatctaggttatccaatttattggcatacaattatttatagtactttcataatcattattttattagaattggtagtaatcgcttcatttttcttttttctttttcttttaagacagagagacaggctctcactctgtaggccaccctaggatggaatacagtggtgtgattatggctcactgcagcctcaacctcctgggctcaagcaattctccttcttcagcctcccaagatgctaggactacaggtgcatgtcaacatgcccagctaattggttttttttttttttgtagagacagcatctccccaggttacctatgctggtccaaacacctggtttcaagaaatccttctgctgtgacctcccaaagtgctaggattaaaacatgacccaccat

SEQ ID NO: 732644 - DNA, 2625 bp, Homo sapiens
  misc_feature (2467)..(2467): n is a, c, g, or t
  misc_feature (2469)..(2469): n is a, c, g, or t
  misc_feature (2475)..(2477): n is a, c, g, or t
agcacagaaggaggaaggacagcacacctgacagccctgctcaggaagtctctggatcctaggctcatctccacaggggagaacacacagacagcagagaccatgggacccctctcagcccctccctgcactcagcacatcacctggaaggggctcctgctcacagcatcacttttaaacttctggaacctgcccaccactgcccaagtaataattgaagccaagccacccaaagtttccgaggggaaggatgttcttctacttgtccacaatttgccccagaatcttactggctacatctggtacaaagggcaaatgacggacctctaccattacattacatcatatgtagtacacggtcaaattatatatgggcctgcctacagtggacgagaaacagtatattccaatgcatccctgctgatccagaatgtcacacaggaggatgcaggatcctacaccttacacatcataaagcgaggcgatgggactggaggagtaactggatatttcactgtcaccttatactatggtccagacctccccagaatttacccttcattcacctattaccgttcaggagaaaacctcgacttgtcctgctttgcggactctaacccaccggcagagtattcttggacaattaatgggaagtttcagctatcaggacaaaagctctttatcccccaaattactacaaatcatagcgggctctatgcttgctctgttcgtaactcagccactggcaaggaaatctccaaatccatgatagtcaaagtctctgagacagcatctccccaggttacctatgctggtccaaacacctggtttcaagaaatccttctgctgtgacctcccaaagtgctaggattaaaacatgacccaccatgctcagagtccattttcatttatgatttgagtaattttatcttttctctttttttcttagccaatctagttaatggttgtcaattttgttgattttattttgaagaatcaacttttggtttcagtaatttcctctattctgtttccattctccattttatttatatccaccctaatacttattatttccctcattcactgtgcttgggtttagtttgttcttctttcgtatcctgaagtattaaagtaggttgttgacctgagctctttcttcttttttaatgtaagagtttacagttataaatttcttgcacaagactcaacttctctgaacccctgattcctcacctgaaaattgcaataagagtactttcttcataccattcttttaaaggtttaatgcagtcaatgaaacaagatgccacacaaagaggaaccaatgtcagctgctatattactaccatcatcattagccttgaggtcaaatagtcctagaatcaaatctcagatccacctgtcactagccatatgacaccaggaaagtttttacaccatgctaagcttctgtcttttcatcagcaaaatggaaataatgcctacctgacagggttattgtgtggattaaatgagatacaggtaaagtattgagcacagggcctggcacatagaaagtgcacctcaacagtacctacctttttccatagatatgaaaaaagcggtaacacataaaacactaggacatggttactgactaattgtgggagagaaagaaaaaaagctaagtgcaaagaatcaagtctggtatgttagtttttaccaactgagatgcatccaagatgggattagacatacaagataatttatcagggaagacacctgtgagggaatgtggggcaggcatgaaggtagtatgggagaacccacagaccgctatgcagagctgattcctgtgaaaaagaaagagaaagaagttttaggtaccaatgcagttctaagagtttttgcaaggctgatgaggaatcctccaaccagtcacccattggagttaaagagagcctcggagaactagacttgctttcacacccttgctgggagcctgtgggaaagaagctttctctgtaaaggaggtagtgaatttgaaatgcgctgacctgggccttctgtcaatcaggtccctgccatggaaaccagacagagtctcattaatggctgccacaatagagacactgagaaaaagaacaggttgataccttcatgaaattcaagacaaagaagaaaaaaactcaatgttattggactaaataatcaaaaggataatgttttcataattttttattggaaaatgtgctgattcttggaatgttttattctccagatttatgaactttttttcttcagcaattggtaaagtatacttttgtaaacaaaaattgaaacatttgcttttgctctctatctgagtgccccagaattgggaaactattcatgagtattcataggtttatggtaataaagttatttgcacaagttcaaaaaaaaaaaaaaaaaaacaaaaaaaaacagttgttggggcggcctngnggcccnnngaaaaagcttttctgagaacacattgctttgggacgccgcggggccccagtagggtcacggcggaacagtgggcgccacaacggtgtgttcctcagaggagaatcggggccaagagacataagggccgggggtttctcccataagaaa

SEQ ID NO: 732645 - DNA, 1350 bp, Homo sapiens
  misc_feature (1192)..(1192): n is a, c, g, or t
  misc_feature (1194)..(1194): n is a, c, g, or t
  misc_feature (1200)..(1202): n is a, c, g, or t
agcacagaaggaggaaggacagcacacctgacagccctgctcaggaagtctctggatcctaggctcatctccacaggggagaacacacagacagcagagaccatgggacccctctcagcccctccctgcactcagcacatcacctggaaggggctcctgctcacagcatcacttttaaacttctggaacctgcccaccactgcccaagtaataattgaagccaagccacccaaagtttccgaggggaaggatgttcttctacttgtccacaatttgccccagaatcttactggctacatctggtacaaagggcaaatgacggacctctaccattacattacatcatatgtagtacacggtcaaattatatatgggcctgcctacagtggacgagaaacagtatattccaatgcatccctgctgatccagaatgtcacacaggaggatgcaggatcctacaccttacacatcataaagcgaggcgatgggactggaggagtaactggatatttcactgtcaccttatactatggtccagacctccccagaatttacccttcattcacctattaccgttcaggagaaaacctcgacttgtcctgctttgcggactctaacccaccggcagagtattcttggacaattaatgggaagtttcagctatcaggacaaaagctctttatcccccaaattactacaaatcatagcgggctctatgcttgctctgttcgtaactcagccactggcaaggaaatctccaaatccatgatagtcaaagtctctggtccctgccatggaaaccagacagagtctcattaatggctgccacaatagagacactgagaaaaagaacaggttgataccttcatgaaattcaagacaaagaagaaaaaaactcaatgttattggactaaataatcaaaaggataatgttttcataattttttattggaaaatgtgctgattcttggaatgttttattctccagatttatgaactttttttcttcagcaattggtaaagtatacttttgtaaacaaaaattgaaacatttgcttttgctctctatctgagtgccccagaattgggaaactattcatgagtattcataggtttatggtaataaagttatttgcacaagttcaaaaaaaaaaaaaaaaaaacaaaaaaaaacagttgttggggcggcctngnggcccnnngaaaaagcttttctgagaacacattgctttgggacgccgcggggccccagtagggtcacggcggaacagtgggcgccacaacggtgtgttcctcagaggagaatcggggccaagagacataagggccgggggtttctcccataagaaa

SEQ ID NO: 732646 - DNA, 4089 bp, Homo sapiens
agcacagaaggaggaaggacagcacacctgacagccctgctcaggaagtctctggatcctaggctcatctccacaggggagaacacacagacagcagagaccatgggacccctctcagcccctccctgcactcagcacatcacctggaaggggctcctgctcacagcatcacttttaaacttctggaacctgcccaccactgcccaagtaataattgaagccaagccacccaaagtttccgaggggaaggatgttcttctacttgtccacaatttgccccagaatcttactggctacatctggtacaaagggcaaatgacggacctctaccattacattacatcatatgtagtacacggtcaaattatatatgggcctgcctacagtggacgagaaacagtatattccaatgcatccctgctgatccagaatgtcacacaggaggatgcaggatcctacaccttacacatcataaagcgaggcgatgggactggaggagtaactggatatttcactgtcaccttatactatggtccagacctccccagaatttacccttcattcacctattaccgttcaggagaaaacctcgacttgtcctgctttgcggactctaacccaccggcagagtattcttggacaattaatgggaagtttcagctatcaggacaaaagctctttatcccccaaattactacaaatcatagcgggctctatgcttgctctgttcgtaactcagccactggcaaggaaatctccaaatccatgatagtcaaagtctctggtaagtggatcccagcatccttggcaatagggttttaggtggagtctatctggctttcagagaagagtcaggaaaacatttgtattcccagactgtgtcccatgggcacaagcaaatcccaaattctcctcctgaaccctcccaacttatctctacagactctcttctgcttgtttttctgttttctcatggctgaccttgtgtctggcctgagaaaggtagggagggggctttatcagccctgagccctatgtggtagaagaggcttcacagagggacaagaaggagagtcctcaagatcaagttgcttctcgctgtcacgaacacatccccttctgccatgtctttgttttcttgtacctattccatgagctacaaggaacatctgaggctttgaaacaagctcacacttttcccccaaatgagaggaggaagccctttgggtgagggaggagcagctcagactctgcttcctgctctgctccgggctcctctggtgactggcctggccctgcctgactccacctggggtggaaccaacatgtgtggagaaagggccctggtggcctgtcctgaagttggctaaatcgagctgccagttgaagccaagcctcccccgggccaggctgcagggaaataagaagagagggagcttcagggctgactcctgagctgcatcctggctctgaagtcaccagctgtatgaggctttgggcacagcacgtgggacacagcacggaggacagtgactgatgcagagctagagaaatagggagattcacccctggggctctgcatggcaggaaaggggcagtgccaaaaagtgtgtaattatagagagggcaagaccacgagacactttatatatatctaatattagacttaccattaactaagtgtgcaatttagtgttgtgtaactatcacactatccatttccagaactttttcctcttaccatattaaacctctgtacccaataaacagtaactctcactccttctccccctaacccttaacacccaccattctactttctgtctctatgtaactggctattctaactatcttttataaatggaattatataataattatccttttgtgtctggcttatttcagttggcataatatcttcaaggttcatccattttgcacgatgtattgtaattttcttccttgttaaggttgaataacatttcaatgtatagatacatctcatttgcctacccacttatctttcaatggacttttcagttgtttccatttttggctagtgtgagtaatgcttctctgtacatcagtgtacaaatatttcttcaaatttctttcaattctatagggagtatgtccagaaggggaattgctggatcaaatggtaatttattgtttaattttttgaaaaacagccacactactttttacattggctataacatttcccattcccatcagcaatgcactagagctccaatttttccatctacttggaaacacctgttgtttagtgttgctgtcattgttgttgtttatcaaagccatcctaaagtgtgtgaggtgttgtaacattgtggttttgatttgcatatctctaagtattcgtgatgctgaggaactttgcatgggctatataaaaggttttgatttttatgaagtctgatttatccattttatttgttgcctatgcttttgttgttacaaccaagaaatcattgtgaaatccactatcatgaagtttttcttctaagagttgtatagtttttactcttacatttagatctttgatctattgtgggttaatttttgtacatggtgttaggtaaaggttccactcttcttgcccttggatatccacctttcccaatatcatttggtgagaacactgtcccttccccattgaacgatcttggcacactcgatgaaaatcatttggccatatatgcaagcatttctttctgggctatgatatttcattaatttctatgtcctcctttatgccagtaccacactgtattgattactggggctttgtagtaaatgctgaaatcaggaagtgtgagtcctccagcttcattcttcctcttcaaagctgtgtgtctatttagagtcatgagatgcaatataaattttaggacagatttttctttttctgcaaaaatgtcactgagattctgataggaattgtattgaatctgcagctcactttgggcagcactgtcctcctaacaatattgagtcttccaattcatgaacacaaaatgtctttcaatttattgatgtcatctttcatttctttcagcaatactttgtagatttcaggtataatcatttcacctctttggttaaacttattcctaaatattttattctttttgatgtgaatataaattgaaattatttttcttaatttcccttcagattgttcatggttagtgtattgaaatacaactgatgtttgaatgttgattttgtattgtgcaacattactgaatttattaattctaataggtttgttccatctttaggattttctacaaataagttcaagttatctataaacagaaataattttactccttccttccaatttgaatgtctttttaaaaattcttccctaatttttctgattagacctttcactactatgttgaataaaagtgtcaatagcaggcatccttgtcttttcctgctcatacagggaaagttttcagtctttctctgttatgtaagatgttagcattgggtttttcacatattgcctttatgttgaggtggttgccttccattcttagaatgtttttattatgaaaaaatactgaatttcatcaaatgcttttattgattcaatcttcttactgattatagttatattcatatttttgtgtgtttctaggagtttgtctatttcatctaggttatccaatttattggcatacaattatttatagtactttcataatcattattttattagaattggtagtaatcgcttcatttttcttttttctttttcttttaagacagagagacaggctctcactctgtaggccaccctaggatggaatacagtggtgtgattatggctcactgcagcctcaacctcctgggctcaagcaattctccttcttcagcctcccaagatgctaggactacaggtgcatgtcaacatgcccagctaattggttttttttttttttgtagagacagcatctccccaggttacctatgctggtccaaacacctggtttcaagaaatccttctgctgtgacctcccaaagtgctaggattaaaacatgacccaccat

SEQ ID NO: 732647 - DNA, 3362 bp, Homo sapiens
  misc_feature (3204)..(3204): n is a, c, g, or t
  misc_feature (3206)..(3206): n is a, c, g, or t
  misc_feature (3212)..(3214): n is a, c, g, or t
agcacagaaggaggaaggacagcacacctgacagccctgctcaggaagtctctggatcctaggctcatctccacaggggagaacacacagacagcagagaccatgggacccctctcagcccctccctgcactcagcacatcacctggaaggggctcctgctcacagcatcacttttaaacttctggaacctgcccaccactgtccaaaaccaacaggaccctctatctatttggtgtcacaaagtatattgcaggaccctatgaatgtgaaatacggaacccagtgagtgccagccgcagtgacccagtcaccctgaatctcctccgtgagtatcttctgttcctctgtgagccaggctgccatcccaaatacaagtggccagaggccaggcctctcagtccctctcaggtccaagtacagagacctttatccctgaacatcaaagctggccatgactttctgctccaggcaaaccagagtaggcctaggcttgatcaacaataagagagaagaggcttctcctgtcatgggagactcaggttccacagcttgtgatggaagaaacaggtgaatgtctcaggctccagatcagtgaacacagcggggatttggctgggacttcagtgttgcaacttggctcacagggtcactgtgactgtgtcccttccacagaccaggattttcccttccctctgacaatatcgcctgtgacattattctctttgctccgcatggcctggatgctcccaccgtttcttcctcatacacctattaccatacaggggaagtccccaagctctcctgcctcacagactctcacccactggcagagcattcttggctgattgatgggaagttccagcaatcagcacaagtgttctttataccccaaatcactaaaacatatagaggggtctatgtctgtttcatccataactcagccactggtggaacaaatctcataatcaagaggatcatagtccctgcgaagctgcccatgccttacatcaccatcaacaacttaaaccccagggagaagaaggatgtgttagccttcacctgtgaacctaagagtcggaactacacctacatttggtggctaaatggtcagagcctcccggtcagtccgagggtaaagcgacccattgaaaacaggatactcattctacccagtgtcacgagaaatgaaacaggaccctatcaatgtgaaatacgggaccgatatggtggcatccgcagtaacccagtcaccctgaatgtcctctatggtccagacctccccagaatttacccttcattcacctattaccgttcaggagaaaacctcgacttgtcctgctttgcggactctaacccaccggcagagtattcttggacaattaatgggaagtttcagctatcaggacaaaagctctttatcccccaaattactacaaatcatagcgggctctatgcttgctctgttcgtaactcagccactggcaaggaaatctccaaatccatgatagtcaaagtctctgagacagcatctccccaggttacctatgctggtccaaacacctggtttcaagaaatccttctgctgtgacctcccaaagtgctaggattaaaacatgacccaccatgctcagagtccattttcatttatgatttgagtaattttatcttttctctttttttcttagccaatctagttaatggttgtcaattttgttgattttattttgaagaatcaacttttggtttcagtaatttcctctattctgtttccattctccattttatttatatccaccctaatacttattatttccctcattcactgtgcttgggtttagtttgttcttctttcgtatcctgaagtattaaagtaggttgttgacctgagctctttcttcttttttaatgtaagagtttacagttataaatttcttgcacaagactcaacttctctgaacccctgattcctcacctgaaaattgcaataagagtactttcttcataccattcttttaaaggtttaatgcagtcaatgaaacaagatgccacacaaagaggaaccaatgtcagctgctatattactaccatcatcattagccttgaggtcaaatagtcctagaatcaaatctcagatccacctgtcactagccatatgacaccaggaaagtttttacaccatgctaagcttctgtcttttcatcagcaaaatggaaataatgcctacctgacagggttattgtgtggattaaatgagatacaggtaaagtattgagcacagggcctggcacatagaaagtgcacctcaacagtacctacctttttccatagatatgaaaaaagcggtaacacataaaacactaggacatggttactgactaattgtgggagagaaagaaaaaaagctaagtgcaaagaatcaagtctggtatgttagtttttaccaactgagatgcatccaagatgggattagacatacaagataatttatcagggaagacacctgtgagggaatgtggggcaggcatgaaggtagtatgggagaacccacagaccgctatgcagagctgattcctgtgaaaaagaaagagaaagaagttttaggtaccaatgcagttctaagagtttttgcaaggctgatgaggaatcctccaaccagtcacccattggagttaaagagagcctcggagaactagacttgctttcacacccttgctgggagcctgtgggaaagaagctttctctgtaaaggaggtagtgaatttgaaatgcgctgacctgggccttctgtcaatcaggtccctgccatggaaaccagacagagtctcattaatggctgccacaatagagacactgagaaaaagaacaggttgataccttcatgaaattcaagacaaagaagaaaaaaactcaatgttattggactaaataatcaaaaggataatgttttcataattttttattggaaaatgtgctgattcttggaatgttttattctccagatttatgaactttttttcttcagcaattggtaaagtatacttttgtaaacaaaaattgaaacatttgcttttgctctctatctgagtgccccagaattgggaaactattcatgagtattcataggtttatggtaataaagttatttgcacaagttcaaaaaaaaaaaaaaaaaaacaaaaaaaaacagttgttggggcggcctngnggcccnnngaaaaagcttttctgagaacacattgctttgggacgccgcggggccccagtagggtcacggcggaacagtgggcgccacaacggtgtgttcctcagaggagaatcggggccaagagacataagggccgggggtttctcccataagaaa

SEQ ID NO: 732648 - DNA, 2087 bp, Homo sapiens
  misc_feature (1929)..(1929): n is a, c, g, or t
  misc_feature (1931)..(1931): n is a, c, g, or t
  misc_feature (1937)..(1939): n is a, c, g, or t
agcacagaaggaggaaggacagcacacctgacagccctgctcaggaagtctctggatcctaggctcatctccacaggggagaacacacagacagcagagaccatgggacccctctcagcccctccctgcactcagcacatcacctggaaggggctcctgctcacagcatcacttttaaacttctggaacctgcccaccactgtccaaaaccaacaggaccctctatctatttggtgtcacaaagtatattgcaggaccctatgaatgtgaaatacggaacccagtgagtgccagccgcagtgacccagtcaccctgaatctcctccgtgagtatcttctgttcctctgtgagccaggctgccatcccaaatacaagtggccagaggccaggcctctcagtccctctcaggtccaagtacagagacctttatccctgaacatcaaagctggccatgactttctgctccaggcaaaccagagtaggcctaggcttgatcaacaataagagagaagaggcttctcctgtcatgggagactcaggttccacagcttgtgatggaagaaacaggtgaatgtctcaggctccagatcagtgaacacagcggggatttggctgggacttcagtgttgcaacttggctcacagggtcactgtgactgtgtcccttccacagaccaggattttcccttccctctgacaatatcgcctgtgacattattctctttgctccgcatggcctggatgctcccaccgtttcttcctcatacacctattaccatacaggggaagtccccaagctctcctgcctcacagactctcacccactggcagagcattcttggctgattgatgggaagttccagcaatcagcacaagtgttctttataccccaaatcactaaaacatatagaggggtctatgtctgtttcatccataactcagccactggtggaacaaatctcataatcaagaggatcatagtccctgcgaagctgcccatgccttacatcaccatcaacaacttaaaccccagggagaagaaggatgtgttagccttcacctgtgaacctaagagtcggaactacacctacatttggtggctaaatggtcagagcctcccggtcagtccgagggtaaagcgacccattgaaaacaggatactcattctacccagtgtcacgagaaatgaaacaggaccctatcaatgtgaaatacgggaccgatatggtggcatccgcagtaacccagtcaccctgaatgtcctctatggtccagacctccccagaatttacccttcattcacctattaccgttcaggagaaaacctcgacttgtcctgctttgcggactctaacccaccggcagagtattcttggacaattaatgggaagtttcagctatcaggacaaaagctctttatcccccaaattactacaaatcatagcgggctctatgcttgctctgttcgtaactcagccactggcaaggaaatctccaaatccatgatagtcaaagtctctggtccctgccatggaaaccagacagagtctcattaatggctgccacaatagagacactgagaaaaagaacaggttgataccttcatgaaattcaagacaaagaagaaaaaaactcaatgttattggactaaataatcaaaaggataatgttttcataattttttattggaaaatgtgctgattcttggaatgttttattctccagatttatgaactttttttcttcagcaattggtaaagtatacttttgtaaacaaaaattgaaacatttgcttttgctctctatctgagtgccccagaattgggaaactattcatgagtattcataggtttatggtaataaagttatttgcacaagttcaaaaaaaaaaaaaaaaaaacaaaaaaaaacagttgttggggcggcctngnggcccnnngaaaaagcttttctgagaacacattgctttgggacgccgcggggccccagtagggtcacggcggaacagtgggcgccacaacggtgtgttcctcagaggagaatcggggccaagagacataagggccgggggtttctcccataagaaa

SEQ ID NO: 732649 - DNA, 4826 bp, Homo sapiens
agcacagaaggaggaaggacagcacacctgacagccctgctcaggaagtctctggatcctaggctcatctccacaggggagaacacacagacagcagagaccatgggacccctctcagcccctccctgcactcagcacatcacctggaaggggctcctgctcacagcatcacttttaaacttctggaacctgcccaccactgtccaaaaccaacaggaccctctatctatttggtgtcacaaagtatattgcaggaccctatgaatgtgaaatacggaacccagtgagtgccagccgcagtgacccagtcaccctgaatctcctccgtgagtatcttctgttcctctgtgagccaggctgccatcccaaatacaagtggccagaggccaggcctctcagtccctctcaggtccaagtacagagacctttatccctgaacatcaaagctggccatgactttctgctccaggcaaaccagagtaggcctaggcttgatcaacaataagagagaagaggcttctcctgtcatgggagactcaggttccacagcttgtgatggaagaaacaggtgaatgtctcaggctccagatcagtgaacacagcggggatttggctgggacttcagtgttgcaacttggctcacagggtcactgtgactgtgtcccttccacagaccaggattttcccttccctctgacaatatcgcctgtgacattattctctttgctccgcatggcctggatgctcccaccgtttcttcctcatacacctattaccatacaggggaagtccccaagctctcctgcctcacagactctcacccactggcagagcattcttggctgattgatgggaagttccagcaatcagcacaagtgttctttataccccaaatcactaaaacatatagaggggtctatgtctgtttcatccataactcagccactggtggaacaaatctcataatcaagaggatcatagtccctgcgaagctgcccatgccttacatcaccatcaacaacttaaaccccagggagaagaaggatgtgttagccttcacctgtgaacctaagagtcggaactacacctacatttggtggctaaatggtcagagcctcccggtcagtccgagggtaaagcgacccattgaaaacaggatactcattctacccagtgtcacgagaaatgaaacaggaccctatcaatgtgaaatacgggaccgatatggtggcatccgcagtaacccagtcaccctgaatgtcctctatggtccagacctccccagaatttacccttcattcacctattaccgttcaggagaaaacctcgacttgtcctgctttgcggactctaacccaccggcagagtattcttggacaattaatgggaagtttcagctatcaggacaaaagctctttatcccccaaattactacaaatcatagcgggctctatgcttgctctgttcgtaactcagccactggcaaggaaatctccaaatccatgatagtcaaagtctctggtaagtggatcccagcatccttggcaatagggttttaggtggagtctatctggctttcagagaagagtcaggaaaacatttgtattcccagactgtgtcccatgggcacaagcaaatcccaaattctcctcctgaaccctcccaacttatctctacagactctcttctgcttgtttttctgttttctcatggctgaccttgtgtctggcctgagaaaggtagggagggggctttatcagccctgagccctatgtggtagaagaggcttcacagagggacaagaaggagagtcctcaagatcaagttgcttctcgctgtcacgaacacatccccttctgccatgtctttgttttcttgtacctattccatgagctacaaggaacatctgaggctttgaaacaagctcacacttttcccccaaatgagaggaggaagccctttgggtgagggaggagcagctcagactctgcttcctgctctgctccgggctcctctggtgactggcctggccctgcctgactccacctggggtggaaccaacatgtgtggagaaagggccctggtggcctgtcctgaagttggctaaatcgagctgccagttgaagccaagcctcccccgggccaggctgcagggaaataagaagagagggagcttcagggctgactcctgagctgcatcctggctctgaagtcaccagctgtatgaggctttgggcacagcacgtgggacacagcacggaggacagtgactgatgcagagctagagaaatagggagattcacccctggggctctgcatggcaggaaaggggcagtgccaaaaagtgtgtaattatagagagggcaagaccacgagacactttatatatatctaatattagacttaccattaactaagtgtgcaatttagtgttgtgtaactatcacactatccatttccagaactttttcctcttaccatattaaacctctgtacccaataaacagtaactctcactccttctccccctaacccttaacacccaccattctactttctgtctctatgtaactggctattctaactatcttttataaatggaattatataataattatccttttgtgtctggcttatttcagttggcataatatcttcaaggttcatccattttgcacgatgtattgtaattttcttccttgttaaggttgaataacatttcaatgtatagatacatctcatttgcctacccacttatctttcaatggacttttcagttgtttccatttttggctagtgtgagtaatgcttctctgtacatcagtgtacaaatatttcttcaaatttctttcaattctatagggagtatgtccagaaggggaattgctggatcaaatggtaatttattgtttaattttttgaaaaacagccacactactttttacattggctataacatttcccattcccatcagcaatgcactagagctccaatttttccatctacttggaaacacctgttgtttagtgttgctgtcattgttgttgtttatcaaagccatcctaaagtgtgtgaggtgttgtaacattgtggttttgatttgcatatctctaagtattcgtgatgctgaggaactttgcatgggctatataaaaggttttgatttttatgaagtctgatttatccattttatttgttgcctatgcttttgttgttacaaccaagaaatcattgtgaaatccactatcatgaagtttttcttctaagagttgtatagtttttactcttacatttagatctttgatctattgtgggttaatttttgtacatggtgttaggtaaaggttccactcttcttgcccttggatatccacctttcccaatatcatttggtgagaacactgtcccttccccattgaacgatcttggcacactcgatgaaaatcatttggccatatatgcaagcatttctttctgggctatgatatttcattaatttctatgtcctcctttatgccagtaccacactgtattgattactggggctttgtagtaaatgctgaaatcaggaagtgtgagtcctccagcttcattcttcctcttcaaagctgtgtgtctatttagagtcatgagatgcaatataaattttaggacagatttttctttttctgcaaaaatgtcactgagattctgataggaattgtattgaatctgcagctcactttgggcagcactgtcctcctaacaatattgagtcttccaattcatgaacacaaaatgtctttcaatttattgatgtcatctttcatttctttcagcaatactttgtagatttcaggtataatcatttcacctctttggttaaacttattcctaaatattttattctttttgatgtgaatataaattgaaattatttttcttaatttcccttcagattgttcatggttagtgtattgaaatacaactgatgtttgaatgttgattttgtattgtgcaacattactgaatttattaattctaataggtttgttccatctttaggattttctacaaataagttcaagttatctataaacagaaataattttactccttccttccaatttgaatgtctttttaaaaattcttccctaatttttctgattagacctttcactactatgttgaataaaagtgtcaatagcaggcatccttgtcttttcctgctcatacagggaaagttttcagtctttctctgttatgtaagatgttagcattgggtttttcacatattgcctttatgttgaggtggttgccttccattcttagaatgtttttattatgaaaaaatactgaatttcatcaaatgcttttattgattcaatcttcttactgattatagttatattcatatttttgtgtgtttctaggagtttgtctatttcatctaggttatccaatttattggcatacaattatttatagtactttcataatcattattttattagaattggtagtaatcgcttcatttttcttttttctttttcttttaagacagagagacaggctctcactctgtaggccaccctaggatggaatacagtggtgtgattatggctcactgcagcctcaacctcctgggctcaagcaattctccttcttcagcctcccaagatgctaggactacaggtgcatgtcaacatgcccagctaattggttttttttttttttgtagagacagcatctccccaggttacctatgctggtccaaacacctggtttcaagaaatccttctgctgtgacctcccaaagtgctaggattaaaacatgacccaccat

SEQ ID NO: 732650 - DNA, 1341 bp, Homo sapiens
agcacagaaggaggaaggacagcacacctgacagccctgctcaggaagtctctggatcctaggctcatctccacaggggagaacacacagacagcagagaccatgggacccctctcagcccctccctgcactcagcacatcacctggaaggggctcctgctcacagcatcacttttaaacttctggaacctgcccaccactgtccaaaaccaacaggaccctctatctatttggtgtcacaaagtatattgcaggaccctatgaatgtgaaatacggaacccagtgagtgccagccgcagtgacccagtcaccctgaatctcctccgtgagtatcttctgttcctctgtgagccaggctgccatcccaaatacaagtggccagaggccaggcctctcagtccctctcaggtccaagtacagagacctttatccctgaacatcaaagctggccatgactttctgctccaggcaaaccagagtaggcctaggcttgatcaacaataagagagaagaggcttctcctgtcatgggagactcaggttccacagcttgtgatggaagaaacaggtgaatgtctcaggctccagatcagtgaacacagcggggatttggctgggacttcagtgttgcaacttggctcacagggtcactgtgactgtgtcccttccacagaccaggattttcccttccctctgacaatatcgcctgtgacattattctctttgctccgcatggcctggatgctcccaccgtttcttcctcatacacctattaccatacaggggaagtccccaagctctcctgcctcacagactctcacccactggcagagcattcttggctgattgatgggaagttccagcaatcagcacaagtgttctttataccccaaatcactaaaacatatagaggggtctatgtctgtttcatccataactcagccactggtggaacaaatctcataatcaagaggatcatagtccctggtaagtggatccctggagcattggcaccatgttttccagtaaagtctatctagctgtcagggaagagccacctgctctctgcaaagggagagggaaaatcaaaacccaggaaagggaatatgtttctgctccaaaaccaccagcttctgcctgtccccttcactctttctagatcattctttagacaatacactaacaatgaacaatctgaaaggaagttaaggaaagaatttcaattcacattaacatcaaaaggaataaaatattttggaataagtttaaccaaaaaggtcaaatgattataccctgaaaactacaaaacattgctgaaagaaattaaagacgatatcaata

SEQ ID NO: 732651 - DNA, 3481 bp, Homo sapiens
  misc_feature (3323)..(3323): n is a, c, g, or t
  misc_feature (3325)..(3325): n is a, c, g, or t
  misc_feature (3331)..(3333): n is a, c, g, or t
agcacagaaggaggaaggacagcacacctgacagccctgctcaggaagtctctggatcctaggctcatctccacaggggagaacacacagacagcagagaccatgggacccctctcagcccctccctgcactcagcacatcacctggaaggggctcctgctcacagcggagactcccaagccctccatctccagcagcaacttaaaccccagggaggtcatggaggctgtgcgcttaatctgtgatcctgagactccggatgcaagctacctgtggttgctgaatggtcagaacctccctatgactcacaggttgcagctgtccaaaaccaacaggaccctctatctatttggtgtcacaaagtatattgcaggaccctatgaatgtgaaatacggaacccagtgagtgccagccgcagtgacccagtcaccctgaatctcctccgtgagtatcttctgttcctctgtgagccaggctgccatcccaaatacaagtggccagaggccaggcctctcagtccctctcaggtccaagtacagagacctttatccctgaacatcaaagctggccatgactttctgctccaggcaaaccagagtaggcctaggcttgatcaacaataagagagaagaggcttctcctgtcatgggagactcaggttccacagcttgtgatggaagaaacaggtgaatgtctcaggctccagatcagtgaacacagcggggatttggctgggacttcagtgttgcaacttggctcacagggtcactgtgactgtgtcccttccacagaccaggattttcccttccctctgacaatatcgcctgtgacattattctctttgctccgcatggcctggatgctcccaccgtttcttcctcatacacctattaccatacaggggaagtccccaagctctcctgcctcacagactctcacccactggcagagcattcttggctgattgatgggaagttccagcaatcagcacaagtgttctttataccccaaatcactaaaacatatagaggggtctatgtctgtttcatccataactcagccactggtggaacaaatctcataatcaagaggatcatagtccctgcgaagctgcccatgccttacatcaccatcaacaacttaaaccccagggagaagaaggatgtgttagccttcacctgtgaacctaagagtcggaactacacctacatttggtggctaaatggtcagagcctcccggtcagtccgagggtaaagcgacccattgaaaacaggatactcattctacccagtgtcacgagaaatgaaacaggaccctatcaatgtgaaatacgggaccgatatggtggcatccgcagtaacccagtcaccctgaatgtcctctatggtccagacctccccagaatttacccttcattcacctattaccgttcaggagaaaacctcgacttgtcctgctttgcggactctaacccaccggcagagtattcttggacaattaatgggaagtttcagctatcaggacaaaagctctttatcccccaaattactacaaatcatagcgggctctatgcttgctctgttcgtaactcagccactggcaaggaaatctccaaatccatgatagtcaaagtctctgagacagcatctccccaggttacctatgctggtccaaacacctggtttcaagaaatccttctgctgtgacctcccaaagtgctaggattaaaacatgacccaccatgctcagagtccattttcatttatgatttgagtaattttatcttttctctttttttcttagccaatctagttaatggttgtcaattttgttgattttattttgaagaatcaacttttggtttcagtaatttcctctattctgtttccattctccattttatttatatccaccctaatacttattatttccctcattcactgtgcttgggtttagtttgttcttctttcgtatcctgaagtattaaagtaggttgttgacctgagctctttcttcttttttaatgtaagagtttacagttataaatttcttgcacaagactcaacttctctgaacccctgattcctcacctgaaaattgcaataagagtactttcttcataccattcttttaaaggtttaatgcagtcaatgaaacaagatgccacacaaagaggaaccaatgtcagctgctatattactaccatcatcattagccttgaggtcaaatagtcctagaatcaaatctcagatccacctgtcactagccatatgacaccaggaaagtttttacaccatgctaagcttctgtcttttcatcagcaaaatggaaataatgcctacctgacagggttattgtgtggattaaatgagatacaggtaaagtattgagcacagggcctggcacatagaaagtgcacctcaacagtacctacctttttccatagatatgaaaaaagcggtaacacataaaacactaggacatggttactgactaattgtgggagagaaagaaaaaaagctaagtgcaaagaatcaagtctggtatgttagtttttaccaactgagatgcatccaagatgggattagacatacaagataatttatcagggaagacacctgtgagggaatgtggggcaggcatgaaggtagtatgggagaacccacagaccgctatgcagagctgattcctgtgaaaaagaaagagaaagaagttttaggtaccaatgcagttctaagagtttttgcaaggctgatgaggaatcctccaaccagtcacccattggagttaaagagagcctcggagaactagacttgctttcacacccttgctgggagcctgtgggaaagaagctttctctgtaaaggaggtagtgaatttgaaatgcgctgacctgggccttctgtcaatcaggtccctgccatggaaaccagacagagtctcattaatggctgccacaatagagacactgagaaaaagaacaggttgataccttcatgaaattcaagacaaagaagaaaaaaactcaatgttattggactaaataatcaaaaggataatgttttcataattttttattggaaaatgtgctgattcttggaatgttttattctccagatttatgaactttttttcttcagcaattggtaaagtatacttttgtaaacaaaaattgaaacatttgcttttgctctctatctgagtgccccagaattgggaaactattcatgagtattcataggtttatggtaataaagttatttgcacaagttcaaaaaaaaaaaaaaaaaaacaaaaaaaaacagttgttggggcggcctngnggcccnnngaaaaagcttttctgagaacacattgctttgggacgccgcggggccccagtagggtcacggcggaacagtgggcgccacaacggtgtgttcctcagaggagaatcggggccaagagacataagggccgggggtttctcccataagaaa

SEQ ID NO: 732652 - DNA, 2206 bp, Homo sapiens
  misc_feature (2048)..(2048): n is a, c, g, or t
  misc_feature (2050)..(2050): n is a, c, g, or t
  misc_feature (2056)..(2058): n is a, c, g, or t
agcacagaaggaggaaggacagcacacctgacagccctgctcaggaagtctctggatcctaggctcatctccacaggggagaacacacagacagcagagaccatgggacccctctcagcccctccctgcactcagcacatcacctggaaggggctcctgctcacagcggagactcccaagccctccatctccagcagcaacttaaaccccagggaggtcatggaggctgtgcgcttaatctgtgatcctgagactccggatgcaagctacctgtggttgctgaatggtcagaacctccctatgactcacaggttgcagctgtccaaaaccaacaggaccctctatctatttggtgtcacaaagtatattgcaggaccctatgaatgtgaaatacggaacccagtgagtgccagccgcagtgacccagtcaccctgaatctcctccgtgagtatcttctgttcctctgtgagccaggctgccatcccaaatacaagtggccagaggccaggcctctcagtccctctcaggtccaagtacagagacctttatccctgaacatcaaagctggccatgactttctgctccaggcaaaccagagtaggcctaggcttgatcaacaataagagagaagaggcttctcctgtcatgggagactcaggttccacagcttgtgatggaagaaacaggtgaatgtctcaggctccagatcagtgaacacagcggggatttggctgggacttcagtgttgcaacttggctcacagggtcactgtgactgtgtcccttccacagaccaggattttcccttccctctgacaatatcgcctgtgacattattctctttgctccgcatggcctggatgctcccaccgtttcttcctcatacacctattaccatacaggggaagtccccaagctctcctgcctcacagactctcacccactggcagagcattcttggctgattgatgggaagttccagcaatcagcacaagtgttctttataccccaaatcactaaaacatatagaggggtctatgtctgtttcatccataactcagccactggtggaacaaatctcataatcaagaggatcatagtccctgcgaagctgcccatgccttacatcaccatcaacaacttaaaccccagggagaagaaggatgtgttagccttcacctgtgaacctaagagtcggaactacacctacatttggtggctaaatggtcagagcctcccggtcagtccgagggtaaagcgacccattgaaaacaggatactcattctacccagtgtcacgagaaatgaaacaggaccctatcaatgtgaaatacgggaccgatatggtggcatccgcagtaacccagtcaccctgaatgtcctctatggtccagacctccccagaatttacccttcattcacctattaccgttcaggagaaaacctcgacttgtcctgctttgcggactctaacccaccggcagagtattcttggacaattaatgggaagtttcagctatcaggacaaaagctctttatcccccaaattactacaaatcatagcgggctctatgcttgctctgttcgtaactcagccactggcaaggaaatctccaaatccatgatagtcaaagtctctggtccctgccatggaaaccagacagagtctcattaatggctgccacaatagagacactgagaaaaagaacaggttgataccttcatgaaattcaagacaaagaagaaaaaaactcaatgttattggactaaataatcaaaaggataatgttttcataattttttattggaaaatgtgctgattcttggaatgttttattctccagatttatgaactttttttcttcagcaattggtaaagtatacttttgtaaacaaaaattgaaacatttgcttttgctctctatctgagtgccccagaattgggaaactattcatgagtattcataggtttatggtaataaagttatttgcacaagttcaaaaaaaaaaaaaaaaaaacaaaaaaaaacagttgttggggcggcctngnggcccnnngaaaaagcttttctgagaacacattgctttgggacgccgcggggccccagtagggtcacggcggaacagtgggcgccacaacggtgtgttcctcagaggagaatcggggccaagagacataagggccgggggtttctcccataagaaa

SEQ ID NO: 732653 - DNA, 4945 bp, Homo sapiens
agcacagaaggaggaaggacagcacacctgacagccctgctcaggaagtctctggatcctaggctcatctccacaggggagaacacacagacagcagagaccatgggacccctctcagcccctccctgcactcagcacatcacctggaaggggctcctgctcacagcggagactcccaagccctccatctccagcagcaacttaaaccccagggaggtcatggaggctgtgcgcttaatctgtgatcctgagactccggatgcaagctacctgtggttgctgaatggtcagaacctccctatgactcacaggttgcagctgtccaaaaccaacaggaccctctatctatttggtgtcacaaagtatattgcaggaccctatgaatgtgaaatacggaacccagtgagtgccagccgcagtgacccagtcaccctgaatctcctccgtgagtatcttctgttcctctgtgagccaggctgccatcccaaatacaagtggccagaggccaggcctctcagtccctctcaggtccaagtacagagacctttatccctgaacatcaaagctggccatgactttctgctccaggcaaaccagagtaggcctaggcttgatcaacaataagagagaagaggcttctcctgtcatgggagactcaggttccacagcttgtgatggaagaaacaggtgaatgtctcaggctccagatcagtgaacacagcggggatttggctgggacttcagtgttgcaacttggctcacagggtcactgtgactgtgtcccttccacagaccaggattttcccttccctctgacaatatcgcctgtgacattattctctttgctccgcatggcctggatgctcccaccgtttcttcctcatacacctattaccatacaggggaagtccccaagctctcctgcctcacagactctcacccactggcagagcattcttggctgattgatgggaagttccagcaatcagcacaagtgttctttataccccaaatcactaaaacatatagaggggtctatgtctgtttcatccataactcagccactggtggaacaaatctcataatcaagaggatcatagtccctgcgaagctgcccatgccttacatcaccatcaacaacttaaaccccagggagaagaaggatgtgttagccttcacctgtgaacctaagagtcggaactacacctacatttggtggctaaatggtcagagcctcccggtcagtccgagggtaaagcgacccattgaaaacaggatactcattctacccagtgtcacgagaaatgaaacaggaccctatcaatgtgaaatacgggaccgatatggtggcatccgcagtaacccagtcaccctgaatgtcctctatggtccagacctccccagaatttacccttcattcacctattaccgttcaggagaaaacctcgacttgtcctgctttgcggactctaacccaccggcagagtattcttggacaattaatgggaagtttcagctatcaggacaaaagctctttatcccccaaattactacaaatcatagcgggctctatgcttgctctgttcgtaactcagccactggcaaggaaatctccaaatccatgatagtcaaagtctctggtaagtggatcccagcatccttggcaatagggttttaggtggagtctatctggctttcagagaagagtcaggaaaacatttgtattcccagactgtgtcccatgggcacaagcaaatcccaaattctcctcctgaaccctcccaacttatctctacagactctcttctgcttgtttttctgttttctcatggctgaccttgtgtctggcctgagaaaggtagggagggggctttatcagccctgagccctatgtggtagaagaggcttcacagagggacaagaaggagagtcctcaagatcaagttgcttctcgctgtcacgaacacatccccttctgccatgtctttgttttcttgtacctattccatgagctacaaggaacatctgaggctttgaaacaagctcacacttttcccccaaatgagaggaggaagccctttgggtgagggaggagcagctcagactctgcttcctgctctgctccgggctcctctggtgactggcctggccctgcctgactccacctggggtggaaccaacatgtgtggagaaagggccctggtggcctgtcctgaagttggctaaatcgagctgccagttgaagccaagcctcccccgggccaggctgcagggaaataagaagagagggagcttcagggctgactcctgagctgcatcctggctctgaagtcaccagctgtatgaggctttgggcacagcacgtgggacacagcacggaggacagtgactgatgcagagctagagaaatagggagattcacccctggggctctgcatggcaggaaaggggcagtgccaaaaagtgtgtaattatagagagggcaagaccacgagacactttatatatatctaatattagacttaccattaactaagtgtgcaatttagtgttgtgtaactatcacactatccatttccagaactttttcctcttaccatattaaacctctgtacccaataaacagtaactctcactccttctccccctaacccttaacacccaccattctactttctgtctctatgtaactggctattctaactatcttttataaatggaattatataataattatccttttgtgtctggcttatttcagttggcataatatcttcaaggttcatccattttgcacgatgtattgtaattttcttccttgttaaggttgaataacatttcaatgtatagatacatctcatttgcctacccacttatctttcaatggacttttcagttgtttccatttttggctagtgtgagtaatgcttctctgtacatcagtgtacaaatatttcttcaaatttctttcaattctatagggagtatgtccagaaggggaattgctggatcaaatggtaatttattgtttaattttttgaaaaacagccacactactttttacattggctataacatttcccattcccatcagcaatgcactagagctccaatttttccatctacttggaaacacctgttgtttagtgttgctgtcattgttgttgtttatcaaagccatcctaaagtgtgtgaggtgttgtaacattgtggttttgatttgcatatctctaagtattcgtgatgctgaggaactttgcatgggctatataaaaggttttgatttttatgaagtctgatttatccattttatttgttgcctatgcttttgttgttacaaccaagaaatcattgtgaaatccactatcatgaagtttttcttctaagagttgtatagtttttactcttacatttagatctttgatctattgtgggttaatttttgtacatggtgttaggtaaaggttccactcttcttgcccttggatatccacctttcccaatatcatttggtgagaacactgtcccttccccattgaacgatcttggcacactcgatgaaaatcatttggccatatatgcaagcatttctttctgggctatgatatttcattaatttctatgtcctcctttatgccagtaccacactgtattgattactggggctttgtagtaaatgctgaaatcaggaagtgtgagtcctccagcttcattcttcctcttcaaagctgtgtgtctatttagagtcatgagatgcaatataaattttaggacagatttttctttttctgcaaaaatgtcactgagattctgataggaattgtattgaatctgcagctcactttgggcagcactgtcctcctaacaatattgagtcttccaattcatgaacacaaaatgtctttcaatttattgatgtcatctttcatttctttcagcaatactttgtagatttcaggtataatcatttcacctctttggttaaacttattcctaaatattttattctttttgatgtgaatataaattgaaattatttttcttaatttcccttcagattgttcatggttagtgtattgaaatacaactgatgtttgaatgttgattttgtattgtgcaacattactgaatttattaattctaataggtttgttccatctttaggattttctacaaataagttcaagttatctataaacagaaataattttactccttccttccaatttgaatgtctttttaaaaattcttccctaatttttctgattagacctttcactactatgttgaataaaagtgtcaatagcaggcatccttgtcttttcctgctcatacagggaaagttttcagtctttctctgttatgtaagatgttagcattgggtttttcacatattgcctttatgttgaggtggttgccttccattcttagaatgtttttattatgaaaaaatactgaatttcatcaaatgcttttattgattcaatcttcttactgattatagttatattcatatttttgtgtgtttctaggagtttgtctatttcatctaggttatccaatttattggcatacaattatttatagtactttcataatcattattttattagaattggtagtaatcgcttcatttttcttttttctttttcttttaagacagagagacaggctctcactctgtaggccaccctaggatggaatacagtggtgtgattatggctcactgcagcctcaacctcctgggctcaagcaattctccttcttcagcctcccaagatgctaggactacaggtgcatgtcaacatgcccagctaattggttttttttttttttgtagagacagcatctccccaggttacctatgctggtccaaacacctggtttcaagaaatccttctgctgtgacctcccaaagtgctaggattaaaacatgacccaccat

SEQ ID NO: 732654 - DNA, 237 bp, Homo sapiens
cggtcagtccgagggtaaagcgacccattgaaaacaggatactcattctacccagtgtcacgagaaatgaaacaggaccctatcaatgtgaaatacgggaccgatatggtggcatccgcagtaacccagtcaccctgaatgtcctctgtgagtatcctttgttcctctgtgggccaggacaccagcttaactccaaacgaccagaggccaggcctctcagtctctctccggtccaag

SEQ ID NO: 732655 - DNA, 380 bp, Homo sapiens
aaagcatagagggctctatacttgctctgttcgtaactcagccactggcaaggaaagctccaaatccatgacagtcgaagtctctgctccttcaggaataggacgtcttcctctccttaatccaatatagcagccgtgaagtcatttctgtatttcaggaagactggcagacagttgctttgattcttcctcaaactacttacaatcacctacagtccaaaattgctttttcttcaaggagatttatggaaaagactctgacaaggactcttgaatacaagttcctgataacttcaagatcataccactggactaagaactttcaaaagttaatgcacaggctgataccatccttggttctcttagtacggtcgcaggta

SEQ ID NO: 732656 - DNA, 716 bp, Homo sapiens
agaaggaggaaggacagcacagcctacagccgtgctcaggaagtttctggatcctaggctcagctccacagaggagaacacgcaggcgcagagaccatggggcccctctcagcccctccctgcacacagcacatcacctggaaggggctcctgctcacagcatcacttttaaacttctggaacctgcctatcactgctcaagtcacgattgaagccctgccacccaaagtttccgaggggaaggatgttcttctacttgtccacaatttgcctcagaatcttgctggctacatctggtacaaaggacaactgatggacctctaccattacattacatcatatgtagtagacggtcaaataaatatatatgggcctgcatacactggacgagaaacagtatattccaatgcatccctgctgatccagaatgtcacccgggaagacgcaggatcctacaccttacacatcataaagcgaggtgataggactagaggagtaactggatatttcaccttcaacttataccaccctgctccagcacaggcccagcgagagacacacactcaggagctctcacataacaaatgaaggaatggaatgaagaaatgaatgatccaaaacctctttagagactggatgttggatgcagaatcctaggaggttctagccacacctgtcccttgtccttcagaggctgacatccatgtttcatcccc

SEQ ID NO: 732657 - DNA, 1591 bp, Homo sapiens
  misc_feature (6)..(6): n is a, c, g, or t
cagcanagaaggaggaaggacagcacagcctacagccgtgctcaggaagtttctggatcctaggctcagctccacagaggagaacacgcaggcagcagagaccatggggcccctctcagcccctccctgcacacagcacatcacctggaagggggtcctgctcacagcatcacttttaaacttctggaacctgcccatcactgctcaagtcacgattgaagcccagccacccaaagtttctgaggggaaggatgttcttctacttgtccacaatttgccccagaatcttgctggctacttctggtacaaagggcaaatgacggacctctaccattacattacatcatatgtagtagacggtcaaataattatatatgggcctgcatacagtggaagagaaacagtatattccaatgcatccctgctgatccagaatgtcacccgggaagatgcaggatcctacaccttacacatcataaagcgaggtgataggactagaggagtaactggatatttcaccttcaacttatacctgaagctgcccaagccctacatcaccatcaacaactcaaaacccagggagaataaggatgtcttagccttcacctgtgaacctaagagtgagaactacacctacatttggtggctaaatggtcagagcctcccggtcagtcccagggtaaagcgacccattgaaaacaggatcctcattctacccagtgtcacgagaaatgaaacaggaccctatgaatgtgaaatacgggaccgagatggtggcatgcacagtgacccagtcaccctgaatgtcctctatggtccagacctccccagcatttacccttcattcacctattaccgttcaggagaaaacctctacttgtcctgcttcgcggaatctaacccaccggcagagtatttttggacaattaatgggaagtttcagcaatcaggacaaaagctctctatcccccaaattactacaaagcatagagggctctatacttgctctgttcgtaactcagccactggcaaggaaagctccaaatccatgacagtcgaagtctctgctccttcaggaataggacgtcttcctctccttaatccaatatagcagccgtgaagtcatttctgtatttcaggaagactggcaggagatttatggaaaagactctgacaaggactcttgaatacaagttcctgataacttcaagatcataccactggactaagaactttcaaaattttaatgaacaggctgataccttcatgaaattctagacaaagaagaaaaaaactccatgttattggactaaataatcaaaagcataatgttttcataattttctatttgaaaatgtgctgattctttgaatgttttattctccagatttatgaactttttttcttgagcaattggtaaagtatacttttgtaaacaaaaattgaaacatttgcttttgctctctatctgagtgccccagaattgggaaactattcatgagtattcatatgtttatggtaataaagttatctgcacaagttcaaaaaaaaaaaaaaaagaaaaaaaaaaaaaaaaaaaaaaaaaaaaaaa

SEQ ID NO: 732658 - DNA, 1659 bp, Homo sapiens
  misc_feature (6)..(6): n is a, c, g, or t
cagcanagaaggaggaaggacagcacagcctacagccgtgctcaggaagtttctggatcctaggctcagctccacagaggagaacacgcaggcagcagagaccatggggcccctctcagcccctccctgcacacagcacatcacctggaagggggtcctgctcacagcatcacttttaaacttctggaacctgcccatcactgctcaagtcacgattgaagcccagccacccaaagtttctgaggggaaggatgttcttctacttgtccacaatttgccccagaatcttgctggctacttctggtacaaagggcaaatgacggacctctaccattacattacatcatatgtagtagacggtcaaataattatatatgggcctgcatacagtggaagagaaacagtatattccaatgcatccctgctgatccagaatgtcacccgggaagatgcaggatcctacaccttacacatcataaagcgaggtgataggactagaggagtaactggatatttcaccttcaacttatacctgaagctgcccaagccctacatcaccatcaacaactcaaaacccagggagaataaggatgtcttagccttcacctgtgaacctaagagtgagaactacacctacatttggtggctaaatggtcagagcctcccggtcagtcccagggtaaagcgacccattgaaaacaggatcctcattctacccagtgtcacgagaaatgaaacaggaccctatgaatgtgaaatacgggaccgagatggtggcatgcacagtgacccagtcaccctgaatgtcctctatggtccagacctccccagcatttacccttcattcacctattaccgttcaggagaaaacctctacttgtcctgcttcgcggaatctaacccaccggcagagtatttttggacaattaatgggaagtttcagcaatcaggacaaaagctctctatcccccaaattactacaaagcatagagggctctatacttgctctgttcgtaactcagccactggcaaggaaagctccaaatccatgacagtcgaagtctctgctccttcaggaataggacgtcttcctctccttaatccaatatagcagccgtgaagtcatttctgtatttcaggaagactggcagacagttgctttgattcttcctcaaactacttacaatcacctacagtccaaaattgctttttcttcaaggagatttatggaaaagactctgacaaggactcttgaatacaagttcctgataacttcaagatcataccactggactaagaactttcaaaattttaatgaacaggctgataccttcatgaaattctagacaaagaagaaaaaaactccatgttattggactaaataatcaaaagcataatgttttcataattttctatttgaaaatgtgctgattctttgaatgttttattctccagatttatgaactttttttcttgagcaattggtaaagtatacttttgtaaacaaaaattgaaacatttgcttttgctctctatctgagtgccccagaattgggaaactattcatgagtattcatatgtttatggtaataaagttatctgcacaagttcaaaaaaaaaaaaaaaagaaaaaaaaaaaaaaaaaaaaaaaaaaaaaaa

SEQ ID NO: 732659 - DNA, 1605 bp, Homo sapiens
  misc_feature (6)..(6): n is a, c, g, or t
cagcanagaaggaggaaggacagcacagcctacagccgtgctcaggaagtttctggatcctaggctcagctccacagaggagaacacgcaggcagcagagaccatggggcccctctcagcccctccctgcacacagcacatcacctggaagggggtcctgctcacagcatcacttttaaacttctggaacctgcccatcactgctcaagtcacgattgaagcccagccacccaaagtttctgaggggaaggatgttcttctacttgtccacaatttgccccagaatcttgctggctacttctggtacaaagggcaaatgacggacctctaccattacattacatcatatgtagtagacggtcaaataattatatatgggcctgcatacagtggaagagaaacagtatattccaatgcatccctgctgatccagaatgtcacccgggaagatgcaggatcctacaccttacacatcataaagcgaggtgataggactagaggagtaactggatatttcaccttcaacttatacctgaagctgcccaagccctacatcaccatcaacaactcaaaacccagggagaataaggatgtcttagccttcacctgtgaacctaagagtgagaactacacctacatttggtggctaaatggtcagagcctcccggtcagtcccagggtaaagcgacccattgaaaacaggatcctcattctacccagtgtcacgagaaatgaaacaggaccctatgaatgtgaaatacgggaccgagatggtggcatgcacagtgacccagtcaccctgaatgtcctctatggtccagacctccccagcatttacccttcattcacctattaccgttcaggagaaaacctctacttgtcctgcttcgcggaatctaacccaccggcagagtatttttggacaattaatgggaagtttcagcaatcaggacaaaagctctctatcccccaaattactacaaagcatagagggctctatacttgctctgttcgtaactcagccactggcaaggaaagctccaaatccatgacagtcgaagtctctggacagttgctttgattcttcctcaaactacttacaatcacctacagtccaaaattgctttttcttcaaggagatttatggaaaagactctgacaaggactcttgaatacaagttcctgataacttcaagatcataccactggactaagaactttcaaaattttaatgaacaggctgataccttcatgaaattctagacaaagaagaaaaaaactccatgttattggactaaataatcaaaagcataatgttttcataattttctatttgaaaatgtgctgattctttgaatgttttattctccagatttatgaactttttttcttgagcaattggtaaagtatacttttgtaaacaaaaattgaaacatttgcttttgctctctatctgagtgccccagaattgggaaactattcatgagtattcatatgtttatggtaataaagttatctgcacaagttcaaaaaaaaaaataaacaaaaaaaaaaaaaaaaaaaaaaaaaaaaagaaaaaaaaaaaaaaaaaaaaaaaaaaaaaaa

SEQ ID NO: 732660 - DNA, 1576 bp, Homo sapiens
  misc_feature (6)..(6): n is a, c, g, or t
cagcanagaaggaggaaggacagcacagcctacagccgtgctcaggaagtttctggatcctaggctcagctccacagaggagaacacgcaggcagcagagaccatggggcccctctcagcccctccctgcacacagcacatcacctggaagggggtcctgctcacagcatcacttttaaacttctggaacctgcccatcactgctcaagtcacgattgaagcccagccacccaaagtttctgaggggaaggatgttcttctacttgtccacaatttgccccagaatcttgctggctacttctggtacaaagggcaaatgacggacctctaccattacattacatcatatgtagtagacggtcaaataattatatatgggcctgcatacagtggaagagaaacagtatattccaatgcatccctgctgatccagaatgtcacccgggaagatgcaggatcctacaccttacacatcataaagcgaggtgataggactagaggagtaactggatatttcaccttcaacttatacctgaagctgcccaagccctacatcaccatcaacaactcaaaacccagggagaataaggatgtcttagccttcacctgtgaacctaagagtgagaactacacctacatttggtggctaaatggtcagagcctcccggtcagtcccagggtaaagcgacccattgaaaacaggatcctcattctacccagtgtcacgagaaatgaaacaggaccctatgaatgtgaaatacgggaccgagatggtggcatgcacagtgacccagtcaccctgaatgtcctctatggtccagacctccccagcatttacccttcattcacctattaccgttcaggagaaaacctctacttgtcctgcttcgcggaatctaacccaccggcagagtatttttggacaattaatgggaagtttcagcaatcaggacaaaagctctctatcccccaaattactacaaagcatagagggctctatacttgctctgttcgtaactcagccactggcaaggaaagctccaaatccatgacagtcgaagtctctggacagttgctttgattcttcctcaaactacttacaatcacctacagtccaaaattgctttttcttcaaggagatttatggaaaagactctgacaaggactcttgaatacaagttcctgataacttcaagatcataccactggactaagaactttcaaaattttaatgaacaggctgataccttcatgaaattctagacaaagaagaaaaaaactccatgttattggactaaataatcaaaagcataatgttttcataattttctatttgaaaatgtgctgattctttgaatgttttattctccagatttatgaactttttttcttgagcaattggtaaagtatacttttgtaaacaaaaattgaaacatttgcttttgctctctatctgagtgccccagaattgggaaactattcatgagtattcatatgtttatggtaataaagttatctgcacaagttcaaaaaaaaaaaaaaaagaaaaaaaaaaaaaaaaaaaaaaaaaaaaaaa

SEQ ID NO: 732661 - DNA, 1751 bp, Homo sapiens
  misc_feature (6)..(6): n is a, c, g, or t
  misc_feature (1662)..(1663): n is a, c, g, or t
  misc_feature (1669)..(1669): n is a, c, g, or t
  misc_feature (1673)..(1673): n is a, c, g, or t
  misc_feature (1678)..(1678): n is a, c, g, or t
  misc_feature (1681)..(1681): n is a, c, g, or t
cagcanagaaggaggaaggacagcacagcctacagccgtgctcaggaagtttctggatcctaggctcagctccacagaggagaacacgcaggcagcagagaccatggggcccctctcagcccctccctgcacacagcacatcacctggaagggggtcctgctcacagcatcacttttaaacttctggaacctgcccatcactgctcaagtcacgattgaagcccagccacccaaagtttctgaggggaaggatgttcttctacttgtccacaatttgccccagaatcttgctggctacttctggtacaaagggcaaatgacggacctctaccattacattacatcatatgtagtagacggtcaaataattatatatgggcctgcatacagtggaagagaaacagtatattccaatgcatccctgctgatccagaatgtcacccgggaagatgcaggatcctacaccttacacatcataaagcgaggtgataggactagaggagtaactggatatttcaccttcaacttatacctgaagctgcccaagccctacatcaccatcaacaactcaaaacccagggagaataaggatgtcttagccttcacctgtgaacctaagagtgagaactacacctacatttggtggctaaatggtcagagcctcccggtcagtcccagggtaaagcgacccattgaaaacaggatcctcattctacccagtgtcacgagaaatgaaacaggaccctatgaatgtgaaatacgggaccgagatggtggcatgcacagtgacccagtcaccctgaatgtcctctatggtccagacctccccagcatttacccttcattcacctattaccgttcaggagaaaacctctacttgtcctgcttcgcggaatctaacccaccggcagagtatttttggacaattaatgggaagtttcagcaatcaggacaaaagctctctatcccccaaattactacaaagcatagagggctctatacttgctctgttcgtaactcagccactggcaaggaaagctccaaatccatgacagtcgaagtctctgctccttcaggaataggacgtcttcctctccttaatccaatatagcagccgtgaagtcatttctgtatttcaggaagactggcagacagttgctttgattcttcctcaaactacttacaatcacctacagtccaaaattgctttttcttcaaggagatttatggaaaagactctgacaaggactcttgaatacaagttcctgataacttcaagatcataccactggactaagaactttcaaaattttaatgaacaggctgataccttcatgaaattctagacaaagaagaaaaaaactccatgttattggactaaataatcaaaagcataatgttttcataattttctatttgaaaatgtgctgattctttgaatgttttattctccagatttatgaactttttttcttgagcaattggtaaagtatacttttgtaaacaaaaattgaaacatttgcttttgctctctatctgagtgccccagaattgggaaactattcatgagtattcatatgtttatggtaataaagttatctgcacaagttcaaaaaaaaaaataaacaaaaaaaaaaaaaatttttgggcggcttgggcctnngaaagntttnttaanccntttgtttgggggccggggggctcattggtgttactctcacacagggccacaggggtcccagagaaaacct

SEQ ID NO: 732662 - DNA, 1688 bp, Homo sapiens
  misc_feature (6)..(6): n is a, c, g, or t
cagcanagaaggaggaaggacagcacagcctacagccgtgctcaggaagtttctggatcctaggctcagctccacagaggagaacacgcaggcagcagagaccatggggcccctctcagcccctccctgcacacagcacatcacctggaagggggtcctgctcacagcatcacttttaaacttctggaacctgcccatcactgctcaagtcacgattgaagcccagccacccaaagtttctgaggggaaggatgttcttctacttgtccacaatttgccccagaatcttgctggctacttctggtacaaagggcaaatgacggacctctaccattacattacatcatatgtagtagacggtcaaataattatatatgggcctgcatacagtggaagagaaacagtatattccaatgcatccctgctgatccagaatgtcacccgggaagatgcaggatcctacaccttacacatcataaagcgaggtgataggactagaggagtaactggatatttcaccttcaacttatacctgaagctgcccaagccctacatcaccatcaacaactcaaaacccagggagaataaggatgtcttagccttcacctgtgaacctaagagtgagaactacacctacatttggtggctaaatggtcagagcctcccggtcagtcccagggtaaagcgacccattgaaaacaggatcctcattctacccagtgtcacgagaaatgaaacaggaccctatgaatgtgaaatacgggaccgagatggtggcatgcacagtgacccagtcaccctgaatgtcctctatggtccagacctccccagcatttacccttcattcacctattaccgttcaggagaaaacctctacttgtcctgcttcgcggaatctaacccaccggcagagtatttttggacaattaatgggaagtttcagcaatcaggacaaaagctctctatcccccaaattactacaaagcatagagggctctatacttgctctgttcgtaactcagccactggcaaggaaagctccaaatccatgacagtcgaagtctctgctccttcaggaataggacgtcttcctctccttaatccaatatagcagccgtgaagtcatttctgtatttcaggaagactggcagacagttgctttgattcttcctcaaactacttacaatcacctacagtccaaaattgctttttcttcaaggagatttatggaaaagactctgacaaggactcttgaatacaagttcctgataacttcaagatcataccactggactaagaactttcaaaattttaatgaacaggctgataccttcatgaaattctagacaaagaagaaaaaaactccatgttattggactaaataatcaaaagcataatgttttcataattttctatttgaaaatgtgctgattctttgaatgttttattctccagatttatgaactttttttcttgagcaattggtaaagtatacttttgtaaacaaaaattgaaacatttgcttttgctctctatctgagtgccccagaattgggaaactattcatgagtattcatatgtttatggtaataaagttatctgcacaagttcaaaaaaaaaaataaacaaaaaaaaaaaaaaaaaaaaaaaaaaaaagaaaaaaaaaaaaaaaaaaaaaaaaaaaaaaa

SEQ ID NO: 732663 - DNA, 1620 bp, Homo sapiens
  misc_feature (6)..(6): n is a, c, g, or t
cagcanagaaggaggaaggacagcacagcctacagccgtgctcaggaagtttctggatcctaggctcagctccacagaggagaacacgcaggcagcagagaccatggggcccctctcagcccctccctgcacacagcacatcacctggaagggggtcctgctcacagcatcacttttaaacttctggaacctgcccatcactgctcaagtcacgattgaagcccagccacccaaagtttctgaggggaaggatgttcttctacttgtccacaatttgccccagaatcttgctggctacttctggtacaaagggcaaatgacggacctctaccattacattacatcatatgtagtagacggtcaaataattatatatgggcctgcatacagtggaagagaaacagtatattccaatgcatccctgctgatccagaatgtcacccgggaagatgcaggatcctacaccttacacatcataaagcgaggtgataggactagaggagtaactggatatttcaccttcaacttatacctgaagctgcccaagccctacatcaccatcaacaactcaaaacccagggagaataaggatgtcttagccttcacctgtgaacctaagagtgagaactacacctacatttggtggctaaatggtcagagcctcccggtcagtcccagggtaaagcgacccattgaaaacaggatcctcattctacccagtgtcacgagaaatgaaacaggaccctatgaatgtgaaatacgggaccgagatggtggcatgcacagtgacccagtcaccctgaatgtcctctatggtccagacctccccagcatttacccttcattcacctattaccgttcaggagaaaacctctacttgtcctgcttcgcggaatctaacccaccggcagagtatttttggacaattaatgggaagtttcagcaatcaggacaaaagctctctatcccccaaattactacaaagcatagagggctctatacttgctctgttcgtaactcagccactggcaaggaaagctccaaatccatgacagtcgaagtctctgctccttcaggaataggacgtcttcctctccttaatccaatatagcagccgtgaagtcatttctgtatttcaggaagactggcaggagatttatggaaaagactctgacaaggactcttgaatacaagttcctgataacttcaagatcataccactggactaagaactttcaaaattttaatgaacaggctgataccttcatgaaattctagacaaagaagaaaaaaactccatgttattggactaaataatcaaaagcataatgttttcataattttctatttgaaaatgtgctgattctttgaatgttttattctccagatttatgaactttttttcttgagcaattggtaaagtatacttttgtaaacaaaaattgaaacatttgcttttgctctctatctgagtgccccagaattgggaaactattcatgagtattcatatgtttatggtaataaagttatctgcacaagttcaaaaaaaaaaataaacaaaaaaaaaaaaaaaaaaaaaaaaaaaaagaaaaaaaaaaaaaaaaaaaaaaaaaaaaaaa

SEQ ID NO: 732664 - DNA, 1073 bp, Homo sapiens
  misc_feature (6)..(6): n is a, c, g, or t
cagcanagaaggaggaaggacagcacagcctacagccgtgctcaggaagtttctggatcctaggctcagctccacagaggagaacacgcaggcagcagagaccatggggcccctctcagcccctccctgcacacagcacatcacctggaagggggtcctgctcacagcatcacttttaaacttctggaacctgcccatcactgctcaagtcacgattgaagcccagccacccaaagtttctgaggggaaggatgttcttctacttgtccacaatttgccccagaatcttgctggctacttctggtacaaagggcaaatgacggacctctaccattacattacatcatatgtagtagacggtcaaataattatatatgggcctgcatacagtggaagagaaacagtatattccaatgcatccctgctgatccagaatgtcacccgggaagatgcaggatcctacaccttacacatcataaagcgaggtgataggactagaggagtaactggatatttcaccttcaacttatacctgaagctgcccaagccctacatcaccatcaacaactcaaaacccagggagaataaggatgtcttagccttcacctgtgaacctaagagtgagaactacacctacatttggtggctaaatggtcagagcctcccggtcagtcccagggtaaagcgacccattgaaaacaggatcctcattctacccagtgtcacgagaaatgaaacaggaccctatgaatgtgaaatacgggaccgagatggtggcatgcacagtgacccagtcaccctgaatgtcctctatggtccagacctccccagcatttacccttcattcacctattaccgttcaggagaaaacctctacttgtcctgcttcgcggaatctaacccaccggcagagtatttttggacaattaatgggaagtttcagcaatcaggacaaaagctctctatcccccaaattactacaaagcatagagggctctatacttgctctgttcgtaactcagccactggcgaggctaggacactggcgaggctagacactggcgaggctagga

SEQ ID NO: 732665 - DNA, 1366 bp, Homo sapiens
actgactacttgtgggagagaaggaaaaaaagctaagtgcaaagaatcaagcctgatatgttagtttttaccaactgagatgcacccaagatgggattagacatacaagataatttatcagggaggacacctgtgagggaatgtggggcagacatgaaggcagtatgggagaacccacagaccactatgcagagctgattcctgtgaaaaagaaagagaaagaagttttaggtaccaatgcagttctaagagtttttgcaaggctgagggggagtcctccaaccagtcaccctttagagttaaagagagcctcagagaactaggcttgctttcacgcccttcctgggagcctgtgggaaagaagctttctgtgcaaaggaggtgatgaatgtgaaatgcacggacgtgggccttctgtcaatcagctccctgccatggagacctgacagagtctcattcatggctgccacaacagagagactgagaaaaagatgcaaccatgaaaaggtgaaaaggtggtaagttctaatgacatagaaaatagcaatcagcctttcttatgtctgaaagccttccaaaatatctgagtgcagtagagatttgacagaggactgatcaccatcctagaaacatggtgagagggaaaaaaaaaactgcaagaatataatcatctcccatcaatttcccaagaggaataatgtagtacttgaagaaacaattatagagtacctcatgctacatgcctcttcctgaggctcccccatgtaaaataacatcaccttcattccttctttacttttctttccatgacagctccttcaggaataggacgtcttcctctccttaatccaatatagcagccgtgaagtcatttctgtatttcaggaagactggcaggagatttatggaaaagactctgacaaggactcttgaatacaagttcctgataacttcaagatcataccactggactaagaactttcaaaattttaatgaacaggctgataccttcatgaaattctagacaaagaagaaaaaaactccatgttattggactaaataatcaaaagcataatgttttcataattttctatttgaaaatgtgctgattctttgaatgttttattctccagatttatgaactttttttcttgagcaattggtaaagtatacttttgtaaacaaaaattgaaacatttgcttttgctctctatctgagtgccccagaattgggaaactattcatgagtattcatatgtttatggtaataaagttatctgcacaagttcaaaaaaaaaaataaacaaaaaaaaaaaaaaaaaaaaaaaaaaaaagaaaaaaaaaaaaaaaaaaaaaaaaaaaaaaa

SEQ ID NO: 732666 - DNA, 1497 bp, Homo sapiens
  misc_feature (1408)..(1409): n is a, c, g, or t
  misc_feature (1415)..(1415): n is a, c, g, or t
  misc_feature (1419)..(1419): n is a, c, g, or t
  misc_feature (1424)..(1424): n is a, c, g, or t
  misc_feature (1427)..(1427): n is a, c, g, or t
actgactacttgtgggagagaaggaaaaaaagctaagtgcaaagaatcaagcctgatatgttagtttttaccaactgagatgcacccaagatgggattagacatacaagataatttatcagggaggacacctgtgagggaatgtggggcagacatgaaggcagtatgggagaacccacagaccactatgcagagctgattcctgtgaaaaagaaagagaaagaagttttaggtaccaatgcagttctaagagtttttgcaaggctgagggggagtcctccaaccagtcaccctttagagttaaagagagcctcagagaactaggcttgctttcacgcccttcctgggagcctgtgggaaagaagctttctgtgcaaaggaggtgatgaatgtgaaatgcacggacgtgggccttctgtcaatcagctccctgccatggagacctgacagagtctcattcatggctgccacaacagagagactgagaaaaagatgcaaccatgaaaaggtgaaaaggtggtaagttctaatgacatagaaaatagcaatcagcctttcttatgtctgaaagccttccaaaatatctgagtgcagtagagatttgacagaggactgatcaccatcctagaaacatggtgagagggaaaaaaaaaactgcaagaatataatcatctcccatcaatttcccaagaggaataatgtagtacttgaagaaacaattatagagtacctcatgctacatgcctcttcctgaggctcccccatgtaaaataacatcaccttcattccttctttacttttctttccatgacagctccttcaggaataggacgtcttcctctccttaatccaatatagcagccgtgaagtcatttctgtatttcaggaagactggcagacagttgctttgattcttcctcaaactacttacaatcacctacagtccaaaattgctttttcttcaaggagatttatggaaaagactctgacaaggactcttgaatacaagttcctgataacttcaagatcataccactggactaagaactttcaaaattttaatgaacaggctgataccttcatgaaattctagacaaagaagaaaaaaactccatgttattggactaaataatcaaaagcataatgttttcataattttctatttgaaaatgtgctgattctttgaatgttttattctccagatttatgaactttttttcttgagcaattggtaaagtatacttttgtaaacaaaaattgaaacatttgcttttgctctctatctgagtgccccagaattgggaaactattcatgagtattcatatgtttatggtaataaagttatctgcacaagttcaaaaaaaaaaataaacaaaaaaaaaaaaaatttttgggcggcttgggcctnngaaagntttnttaanccntttgtttgggggccggggggctcattggtgttactctcacacagggccacaggggtcccagagaaaacct

SEQ ID NO: 732667 - DNA, 1337 bp, Homo sapiens
actgactacttgtgggagagaaggaaaaaaagctaagtgcaaagaatcaagcctgatatgttagtttttaccaactgagatgcacccaagatgggattagacatacaagataatttatcagggaggacacctgtgagggaatgtggggcagacatgaaggcagtatgggagaacccacagaccactatgcagagctgattcctgtgaaaaagaaagagaaagaagttttaggtaccaatgcagttctaagagtttttgcaaggctgagggggagtcctccaaccagtcaccctttagagttaaagagagcctcagagaactaggcttgctttcacgcccttcctgggagcctgtgggaaagaagctttctgtgcaaaggaggtgatgaatgtgaaatgcacggacgtgggccttctgtcaatcagctccctgccatggagacctgacagagtctcattcatggctgccacaacagagagactgagaaaaagatgcaaccatgaaaaggtgaaaaggtggtaagttctaatgacatagaaaatagcaatcagcctttcttatgtctgaaagccttccaaaatatctgagtgcagtagagatttgacagaggactgatcaccatcctagaaacatggtgagagggaaaaaaaaaactgcaagaatataatcatctcccatcaatttcccaagaggaataatgtagtacttgaagaaacaattatagagtacctcatgctacatgcctcttcctgaggctcccccatgtaaaataacatcaccttcattccttctttacttttctttccatgacagctccttcaggaataggacgtcttcctctccttaatccaatatagcagccgtgaagtcatttctgtatttcaggaagactggcaggagatttatggaaaagactctgacaaggactcttgaatacaagttcctgataacttcaagatcataccactggactaagaactttcaaaattttaatgaacaggctgataccttcatgaaattctagacaaagaagaaaaaaactccatgttattggactaaataatcaaaagcataatgttttcataattttctatttgaaaatgtgctgattctttgaatgttttattctccagatttatgaactttttttcttgagcaattggtaaagtatacttttgtaaacaaaaattgaaacatttgcttttgctctctatctgagtgccccagaattgggaaactattcatgagtattcatatgtttatggtaataaagttatctgcacaagttcaaaaaaaaaaaaaaaagaaaaaaaaaaaaaaaaaaaaaaaaaaaaaaa

SEQ ID NO: 732668 - DNA, 1434 bp, Homo sapiens
actgactacttgtgggagagaaggaaaaaaagctaagtgcaaagaatcaagcctgatatgttagtttttaccaactgagatgcacccaagatgggattagacatacaagataatttatcagggaggacacctgtgagggaatgtggggcagacatgaaggcagtatgggagaacccacagaccactatgcagagctgattcctgtgaaaaagaaagagaaagaagttttaggtaccaatgcagttctaagagtttttgcaaggctgagggggagtcctccaaccagtcaccctttagagttaaagagagcctcagagaactaggcttgctttcacgcccttcctgggagcctgtgggaaagaagctttctgtgcaaaggaggtgatgaatgtgaaatgcacggacgtgggccttctgtcaatcagctccctgccatggagacctgacagagtctcattcatggctgccacaacagagagactgagaaaaagatgcaaccatgaaaaggtgaaaaggtggtaagttctaatgacatagaaaatagcaatcagcctttcttatgtctgaaagccttccaaaatatctgagtgcagtagagatttgacagaggactgatcaccatcctagaaacatggtgagagggaaaaaaaaaactgcaagaatataatcatctcccatcaatttcccaagaggaataatgtagtacttgaagaaacaattatagagtacctcatgctacatgcctcttcctgaggctcccccatgtaaaataacatcaccttcattccttctttacttttctttccatgacagctccttcaggaataggacgtcttcctctccttaatccaatatagcagccgtgaagtcatttctgtatttcaggaagactggcagacagttgctttgattcttcctcaaactacttacaatcacctacagtccaaaattgctttttcttcaaggagatttatggaaaagactctgacaaggactcttgaatacaagttcctgataacttcaagatcataccactggactaagaactttcaaaattttaatgaacaggctgataccttcatgaaattctagacaaagaagaaaaaaactccatgttattggactaaataatcaaaagcataatgttttcataattttctatttgaaaatgtgctgattctttgaatgttttattctccagatttatgaactttttttcttgagcaattggtaaagtatacttttgtaaacaaaaattgaaacatttgcttttgctctctatctgagtgccccagaattgggaaactattcatgagtattcatatgtttatggtaataaagttatctgcacaagttcaaaaaaaaaaataaacaaaaaaaaaaaaaaaaaaaaaaaaaaaaagaaaaaaaaaaaaaaaaaaaaaaaaaaaaaaa

SEQ ID NO: 732669 - DNA, 1405 bp, Homo sapiens
actgactacttgtgggagagaaggaaaaaaagctaagtgcaaagaatcaagcctgatatgttagtttttaccaactgagatgcacccaagatgggattagacatacaagataatttatcagggaggacacctgtgagggaatgtggggcagacatgaaggcagtatgggagaacccacagaccactatgcagagctgattcctgtgaaaaagaaagagaaagaagttttaggtaccaatgcagttctaagagtttttgcaaggctgagggggagtcctccaaccagtcaccctttagagttaaagagagcctcagagaactaggcttgctttcacgcccttcctgggagcctgtgggaaagaagctttctgtgcaaaggaggtgatgaatgtgaaatgcacggacgtgggccttctgtcaatcagctccctgccatggagacctgacagagtctcattcatggctgccacaacagagagactgagaaaaagatgcaaccatgaaaaggtgaaaaggtggtaagttctaatgacatagaaaatagcaatcagcctttcttatgtctgaaagccttccaaaatatctgagtgcagtagagatttgacagaggactgatcaccatcctagaaacatggtgagagggaaaaaaaaaactgcaagaatataatcatctcccatcaatttcccaagaggaataatgtagtacttgaagaaacaattatagagtacctcatgctacatgcctcttcctgaggctcccccatgtaaaataacatcaccttcattccttctttacttttctttccatgacagctccttcaggaataggacgtcttcctctccttaatccaatatagcagccgtgaagtcatttctgtatttcaggaagactggcagacagttgctttgattcttcctcaaactacttacaatcacctacagtccaaaattgctttttcttcaaggagatttatggaaaagactctgacaaggactcttgaatacaagttcctgataacttcaagatcataccactggactaagaactttcaaaattttaatgaacaggctgataccttcatgaaattctagacaaagaagaaaaaaactccatgttattggactaaataatcaaaagcataatgttttcataattttctatttgaaaatgtgctgattctttgaatgttttattctccagatttatgaactttttttcttgagcaattggtaaagtatacttttgtaaacaaaaattgaaacatttgcttttgctctctatctgagtgccccagaattgggaaactattcatgagtattcatatgtttatggtaataaagttatctgcacaagttcaaaaaaaaaaaaaaaagaaaaaaaaaaaaaaaaaaaaaaaaaaaaaaa

SEQ ID NO: 732670 - DNA, 2694 bp, Homo sapiens
  misc_feature (1359)..(1360): n is a, c, g, or t
  misc_feature (1364)..(1364): n is a, c, g, or t
  misc_feature (1366)..(1366): n is a, c, g, or t
  misc_feature (1371)..(1371): n is a, c, g, or t
  misc_feature (1378)..(1378): n is a, c, g, or t
  misc_feature (1389)..(1389): n is a, c, g, or t
  misc_feature (1391)..(1391): n is a, c, g, or t
  misc_feature (1407)..(1409): n is a, c, g, or t
  misc_feature (1413)..(1413): n is a, c, g, or t
  misc_feature (1418)..(1418): n is a, c, g, or t
  misc_feature (1423)..(1423): n is a, c, g, or t
  misc_feature (1427)..(1428): n is a, c, g, or t
  misc_feature (1432)..(1435): n is a, c, g, or t
  misc_feature (1438)..(1439): n is a, c, g, or t
  misc_feature (1443)..(1443): n is a, c, g, or t
  misc_feature (1448)..(1448): n is a, c, g, or t
  misc_feature (1450)..(1450): n is a, c, g, or t
  misc_feature (1454)..(1454): n is a, c, g, or t
  misc_feature (1456)..(1456): n is a, c, g, or t
  misc_feature (1466)..(1466): n is a, c, g, or t
  misc_feature (1470)..(1471): n is a, c, g, or t
  misc_feature (1487)..(1488): n is a, c, g, or t
agcatcacttttaaacttctggaacctgcctatcactgctcaagtcacgattgaagccctgccacccaaagtttccgaggggaaggatgttcttctacttgtccacaatttgcctcagaatcttgctggctacatctggtacaaaggacaactgatggacctctaccattacattacatcatatgtagtagacggtcaaataaatatatatgggcctgcatacactggacgagaaacagtatattccaatgcatccctgctgatccagaatgtcacccgggaagacgcaggatcctacaccttacacatcataaagcgaggtgataggactagaggagtaactggatatttcaccttcaacttatacctgaagctgcccaagccctacatcaccatcaacaactcaaaacccagggagaataaggatgtcttagccttcacctgtgaacctaagagtgagaactacacctacatttggtggctaaatggtcagagcctcccggtcagtcccagggtaaagcgacccattgaaaacaggatcctcattctacccagtgtcacgagaaatgaaacaggaccctatgaatgtgaaatacgggaccgagatggtggcatgcgcagtgacccagtcaccctgaatgtcctctatggtccagacctccccagcatttacccttcattcacctattaccgttcaggagaaaacctctacttgtcctgcttcgcggaatctaacccaccggcagagtatttttggacaattaatgggaagtttcagcaatcaggacaaaagctctctatcccccaaattactacaaagcatagagggctctatacttgctctgttcgtaactcagctactggcaaggaaagctccaaatccatgacagtcgaagtctctggtaagtggatcccagcatccttggcaatagggttttaggtggagtctacctggctttcagagaagagttaggaaaacatttttattcccagcctgtgtcccatgggcacaagcaaatcccaaattctcctcctgaacccttccaatttgtctctacagactctcttctccttgtttttctgttttctcatggctgaccttgtgtctggcctaagaaagttagggagggggctttatcagccctgagccctatgtggtagaggaggcttcacagagggatgagaaggagagtcctcaagatcaagttgcttctcgatgtcaccaacacatccccttctgccatgtctttgtttccttgtacctattccatgagctacaaggaacatctgaggctctgaaacaagctcacacttttcccccaaatgagacgaggaagccccttgggtgagggaggaccnncccncnccccnccccccnccctcgccccncncccccccgcgcgaccnnncccnccccncccancccnncccnnnnccnncacnccccnanaaananccctcgcgcncccnnccccgaattccgcccnnatcgagctgccagttgaagccaagcctcccccgggccaggctgcagggaaataagaagagagggagcctcagggaagactcctgcgttgcgtcctggctctgaagtcaccggttgtatgaggttgtgggcacagcatgtgggacacagcacggaggatagtgactgatgcagagctggagaaatagagagattcacccctggggctctgcatggcaggaaaggggcagtgccaaaaagtgtgtaattatagagagggtaagactaccagacactttatatatatctaatataagacttaccattaactatttctatgtgtgcaatttagtgttgtgtaaccatcacactatccatttccagaactttttcctcttaccatattaaacctctgtacccaataaacagtaactcactccttctccccataacccttagcacacaccattctacattctgtctctatgtaactggctattctaactatcttttataaatggaattatatgataattatccttttgtgtctggtttatttcagttagcataatatcttcaaggttcatccattttgcatgatgtattggaattttattccttgttaaggttgaataacatttcaatgtatagatacacctcatttgcctacccacttatctttcaatggacttttcagttgtttccattttttcgctagtgtgagtaatgcttctctgaacatcagtgtacaaatatttgttcaaatttctttcaattctatggggagtatgtccagaagtggaattgctggatcaaatggtaatttattgtttaattttttgagaaacagccacaccactttttacagtggctataacatttcccattcccatcagcaatgcactagagctccaatttttccatctacttgaaaacacctgttgttttgtgttgttgtcattgttgttgtttatcaaagccatcctaaattgtgtgaggtggtgtagcattgtggttttgatttgcatatctctaagtattcgtgatgctgaggaactttgcatgggcttattggatatttgtatatcttccttggagaaaactccattttaatcctttgttcattttttaattgggtttttggatgtttgctgttgttgacttgtagcttttcatgtattctggaaattaatttcttatcacacatataatttgcaaatatttttatc

SEQ ID NO: 732671 - DNA, 2501 bp, Homo sapiens
  misc_feature (6)..(6): n is a, c, g, or t
cagcanagaaggaggaaggacagcacagcctacagccgtgctcaggaagtttctggatcctaggctcagctccacagaggagaacacgcaggcagcagagaccatggggcccctctcagcccctccctgcacacagcacatcacctggaagggggtcctgctcacagcatcacttttaaacttctggaacctgcccatcactgctcaagtcacgattgaagcccagccacccaaagtttctgaggggaaggatgttcttctacttgtccacaatttgccccagaatcttgctggctacttctggtacaaagggcaaatgacggacctctaccattacattacatcatatgtagtagacggtcaaataattatatatgggcctgcatacagtggaagagaaacagtatattccaatgcatccctgctgatccagaatgtcacccgggaagatgcaggatcctacaccttacacatcataaagcgaggtgataggactagaggagtaactggatatttcaccttcaacttatacctgaagctgcccaagccctacatcaccatcaacaactcaaaacccagggagaataaggatgtcttagccttcacctgtgaacctaagagtgagaactacacctacatttggtggctaaatggtcagagcctcccggtcagtcccagggtaaagcgacccattgaaaacaggatcctcattctacccagtgtcacgagaaatgaaacaggaccctatgaatgtgaaatacgggaccgagatggtggcatgcacagtgacccagtcaccctgaatgtcctctatggtccagacctccccagcatttacccttcattcacctattaccgttcaggagaaaacctctacttgtcctgcttcgcggaatctaacccaccggcagagtatttttggacaattaatgggaagtttcagcaatcaggacaaaagctctctatcccccaaattactacaaagcatagagggctctatacttgctctgttcgtaactcagccactggcaaggaaagctccaaatccatgacagtcgaagtctctggtaagtggatcccagcatccttggcagtagggttttatgtggagtctatctggctttcagagaagagtcaggaaaacatttttattcccagcctgtgtcccatgggcacaagcaaatcccaaattctcctcctgaaccctcccaatttgtctctacagactctcttctccttgtttttctgttttcttatggctgaccttgtgtctggcctgaaaaaggtagggagggggctttatcagccctgagccctatgtggtagaagaggcttcagagagggacaagaaggagagtcctcaagatcaagttgcttctcgctgtcaccgacacatccccttctgccacgtcttttttttcttgtacctattccatgagctacaaggaacagctgaggctttgaaacaagctcacacttttcccccagatgagaggaggaagccccttgggtgagggaggagcagctcagactctgcttcctgctctgctccgggctcctctggtgactggccctgcctcactcaacctggggtgggactagcgtgtgtgtagaaagggccctggtggcctgtcctgaatttggctaaattgagctgccagttgaagccaagcctcccccgggccaggctgcagggaaataagaagagagggagcctcagggcagactcctgagctgcgtcctggctctgaagtcaccagctgtatgaggctttgggcacagcacgtgggacacagcacggaggacagtgactgatgcagagctggaggaatagggagattcaccgttggggttattcatggcaggaaaggggcagtgccaaaaagtgtgtaattatagagagggtaagactaccagacactttatatatatctaatataagacttaccattaactatttctatgtgtgcaatttagtgttgtgtaaccatcacactatccatttccagaactttttcctcttaccatattaaacctctgtacccaataaacagtaactctcactccttcttcccctaacccttagcacccatcattctactttgtctctatgtaactggctattctaactatcttttataaatggaattacaaaaaaacaaaaaaaaaaaaaaaaaaaaaaaattgtgtggggcgcgcgcctgtgggcccctgagagaaaggttttttgagagaaacaattgggtgtgtgggggcgggggaccccaagatagaggtaaacggcaaacgtgggcacaaaaggggtgttccatgagagaaaccggggacacgacacaagggcggggaatccacacagaaatagaaaagcggcccgcggggaaacgacgaagcgttctgggaaaaacatcccaagaaggagaatcgagagaggacatcggagggaaacaaacaaaggagagtccaagggagaccgaatacacattaagcccggcgcgggagat

SEQ ID NO: 732672 - DNA, 1877 bp, Homo sapiens
  misc_feature (6)..(6): n is a, c, g, or t
cagcanagaaggaggaaggacagcacagcctacagccgtgctcaggaagtttctggatcctaggctcagctccacagaggagaacacgcaggcagcagagaccatggggcccctctcagcccctccctgcacacagcacatcacctggaagggggtcctgctcacagcatcacttttaaacttctggaacctgcccatcactgctcaagtcacgattgaagcccagccacccaaagtttctgaggggaaggatgttcttctacttgtccacaatttgccccagaatcttgctggctacttctggtacaaagggcaaatgacggacctctaccattacattacatcatatgtagtagacggtcaaataattatatatgggcctgcatacagtggaagagaaacagtatattccaatgcatccctgctgatccagaatgtcacccgggaagatgcaggatcctacaccttacacatcataaagcgaggtgataggactagaggagtaactggatatttcaccttcaacttatacctgaagctgcccaagccctacatcaccatcaacaactcaaaacccagggagaataaggatgtcttagccttcacctgtgaacctaagagtgagaactacacctacatttggtggctaaatggtcagagcctcccggtcagtcccagggtaaagcgacccattgaaaacaggatcctcattctacccagtgtcacgagaaatgaaacaggaccctatgaatgtgaaatacgggaccgagatggtggcatgcacagtgacccagtcaccctgaatgtcctctatggtccagacctccccagcatttacccttcattcacctattaccgttcaggagaaaacctctacttgtcctgcttcgcggaatctaacccaccggcagagtatttttggacaattaatgggaagtttcagcaatcaggacaaaagctctctatcccccaaattactacaaagcatagagggctctatacttgctctgttcgtaactcagccactggcaaggaaagctccaaatccatgacagtcgaagtctctggacagttgctttgattcttcctcaaactacttacaatcacctacagtccaaaattgctttttcttcaaggagatttatggaaaagactctgacaaggactcttgaatacaagttcctgataacttcaagatcataccactggactaagaactttcaaaattttaatgaacaggctgataccttcatgaaattctagacaaagaagaaaaaaactccatgttattggactaaataatcaaaagcataatgttttcataattttctatttgaaaatgtgctgattctttgaatgttttattctccagatttatgaactttttttcttgagcaattggtaaagtatacttttgtaaacaaaaattgaaacatttgcttttgctctctatctgagtgccccagaattgggaaactattcatgagtattcatatgtttatggtaataaagttatctgcacaagttcaaaaaaacaaaaaaaaaaaaaaaaaaaaaaaattgtgtggggcgcgcgcctgtgggcccctgagagaaaggttttttgagagaaacaattgggtgtgtgggggcgggggaccccaagatagaggtaaacggcaaacgtgggcacaaaaggggtgttccatgagagaaaccggggacacgacacaagggcggggaatccacacagaaatagaaaagcggcccgcggggaaacgacgaagcgttctgggaaaaacatcccaagaaggagaatcgagagaggacatcggagggaaacaaacaaaggagagtccaagggagaccgaatacacattaagcccggcgcgggagat

SEQ ID NO: 732673 - DNA, 1892 bp, Homo sapiens
  misc_feature (6)..(6): n is a, c, g, or t
cagcanagaaggaggaaggacagcacagcctacagccgtgctcaggaagtttctggatcctaggctcagctccacagaggagaacacgcaggcagcagagaccatggggcccctctcagcccctccctgcacacagcacatcacctggaagggggtcctgctcacagcatcacttttaaacttctggaacctgcccatcactgctcaagtcacgattgaagcccagccacccaaagtttctgaggggaaggatgttcttctacttgtccacaatttgccccagaatcttgctggctacttctggtacaaagggcaaatgacggacctctaccattacattacatcatatgtagtagacggtcaaataattatatatgggcctgcatacagtggaagagaaacagtatattccaatgcatccctgctgatccagaatgtcacccgggaagatgcaggatcctacaccttacacatcataaagcgaggtgataggactagaggagtaactggatatttcaccttcaacttatacctgaagctgcccaagccctacatcaccatcaacaactcaaaacccagggagaataaggatgtcttagccttcacctgtgaacctaagagtgagaactacacctacatttggtggctaaatggtcagagcctcccggtcagtcccagggtaaagcgacccattgaaaacaggatcctcattctacccagtgtcacgagaaatgaaacaggaccctatgaatgtgaaatacgggaccgagatggtggcatgcacagtgacccagtcaccctgaatgtcctctatggtccagacctccccagcatttacccttcattcacctattaccgttcaggagaaaacctctacttgtcctgcttcgcggaatctaacccaccggcagagtatttttggacaattaatgggaagtttcagcaatcaggacaaaagctctctatcccccaaattactacaaagcatagagggctctatacttgctctgttcgtaactcagccactggcaaggaaagctccaaatccatgacagtcgaagtctctgctccttcaggaataggacgtcttcctctccttaatccaatatagcagccgtgaagtcatttctgtatttcaggaagactggcaggagatttatggaaaagactctgacaaggactcttgaatacaagttcctgataacttcaagatcataccactggactaagaactttcaaaattttaatgaacaggctgataccttcatgaaattctagacaaagaagaaaaaaactccatgttattggactaaataatcaaaagcataatgttttcataattttctatttgaaaatgtgctgattctttgaatgttttattctccagatttatgaactttttttcttgagcaattggtaaagtatacttttgtaaacaaaaattgaaacatttgcttttgctctctatctgagtgccccagaattgggaaactattcatgagtattcatatgtttatggtaataaagttatctgcacaagttcaaaaaaacaaaaaaaaaaaaaaaaaaaaaaaattgtgtggggcgcgcgcctgtgggcccctgagagaaaggttttttgagagaaacaattgggtgtgtgggggcgggggaccccaagatagaggtaaacggcaaacgtgggcacaaaaggggtgttccatgagagaaaccggggacacgacacaagggcggggaatccacacagaaatagaaaagcggcccgcggggaaacgacgaagcgttctgggaaaaacatcccaagaaggagaatcgagagaggacatcggagggaaacaaacaaaggagagtccaagggagaccgaatacacattaagcccggcgcgggagat

SEQ ID NO: 732674 - DNA, 1960 bp, Homo sapiens
  misc_feature (6)..(6): n is a, c, g, or t
cagcanagaaggaggaaggacagcacagcctacagccgtgctcaggaagtttctggatcctaggctcagctccacagaggagaacacgcaggcagcagagaccatggggcccctctcagcccctccctgcacacagcacatcacctggaagggggtcctgctcacagcatcacttttaaacttctggaacctgcccatcactgctcaagtcacgattgaagcccagccacccaaagtttctgaggggaaggatgttcttctacttgtccacaatttgccccagaatcttgctggctacttctggtacaaagggcaaatgacggacctctaccattacattacatcatatgtagtagacggtcaaataattatatatgggcctgcatacagtggaagagaaacagtatattccaatgcatccctgctgatccagaatgtcacccgggaagatgcaggatcctacaccttacacatcataaagcgaggtgataggactagaggagtaactggatatttcaccttcaacttatacctgaagctgcccaagccctacatcaccatcaacaactcaaaacccagggagaataaggatgtcttagccttcacctgtgaacctaagagtgagaactacacctacatttggtggctaaatggtcagagcctcccggtcagtcccagggtaaagcgacccattgaaaacaggatcctcattctacccagtgtcacgagaaatgaaacaggaccctatgaatgtgaaatacgggaccgagatggtggcatgcacagtgacccagtcaccctgaatgtcctctatggtccagacctccccagcatttacccttcattcacctattaccgttcaggagaaaacctctacttgtcctgcttcgcggaatctaacccaccggcagagtatttttggacaattaatgggaagtttcagcaatcaggacaaaagctctctatcccccaaattactacaaagcatagagggctctatacttgctctgttcgtaactcagccactggcaaggaaagctccaaatccatgacagtcgaagtctctgctccttcaggaataggacgtcttcctctccttaatccaatatagcagccgtgaagtcatttctgtatttcaggaagactggcagacagttgctttgattcttcctcaaactacttacaatcacctacagtccaaaattgctttttcttcaaggagatttatggaaaagactctgacaaggactcttgaatacaagttcctgataacttcaagatcataccactggactaagaactttcaaaattttaatgaacaggctgataccttcatgaaattctagacaaagaagaaaaaaactccatgttattggactaaataatcaaaagcataatgttttcataattttctatttgaaaatgtgctgattctttgaatgttttattctccagatttatgaactttttttcttgagcaattggtaaagtatacttttgtaaacaaaaattgaaacatttgcttttgctctctatctgagtgccccagaattgggaaactattcatgagtattcatatgtttatggtaataaagttatctgcacaagttcaaaaaaacaaaaaaaaaaaaaaaaaaaaaaaattgtgtggggcgcgcgcctgtgggcccctgagagaaaggttttttgagagaaacaattgggtgtgtgggggcgggggaccccaagatagaggtaaacggcaaacgtgggcacaaaaggggtgttccatgagagaaaccggggacacgacacaagggcggggaatccacacagaaatagaaaagcggcccgcggggaaacgacgaagcgttctgggaaaaacatcccaagaaggagaatcgagagaggacatcggagggaaacaaacaaaggagagtccaagggagaccgaatacacattaagcccggcgcgggagat

SEQ ID NO: 732675 - DNA, 2206 bp, Homo sapiens
  misc_feature (6)..(6): n is a, c, g, or t
cagcanagaaggaggaaggacagcacagcctacagccgtgctcaggaagtttctggatcctaggctcagctccacagaggagaacacgcaggcagcagagaccatggggcccctctcagcccctccctgcacacagcacatcacctggaagggggtcctgctcacagcatcacttttaaacttctggaacctgcccatcactgctcaagtcacgattgaagcccagccacccaaagtttctgaggggaaggatgttcttctacttgtccacaatttgccccagaatcttgctggctacttctggtacaaagggcaaatgacggacctctaccattacattacatcatatgtagtagacggtcaaataattatatatgggcctgcatacagtggaagagaaacagtatattccaatgcatccctgctgatccagaatgtcacccgggaagatgcaggatcctacaccttacacatcataaagcgaggtgataggactagaggagtaactggatatttcaccttcaacttatacctgaagctgcccaagccctacatcaccatcaacaactcaaaacccagggagaataaggatgtcttagccttcacctgtgaacctaagagtgagaactacacctacatttggtggctaaatggtcagagcctcccggtcagtcccagggtaaagcgacccattgaaaacaggatcctcattctacccagtgtcacgagaaatgaaacaggaccctatgaatgtgaaatacgggaccgagatggtggcatgcacagtgacccagtcaccctgaatgtcctctatggtccagacctccccagcatttacccttcattcacctattaccgttcaggagaaaacctctacttgtcctgcttcgcggaatctaacccaccggcagagtatttttggacaattaatgggaagtttcagcaatcaggacaaaagctctctatcccccaaattactacaaagcatagagggctctatacttgctctgttcgtaactcagccactggcaaggaaagctccaaatccatgacagtcgaagtctctgtttgtccagaagtggaattgctggatcaaatgctccttcaggaataggacgtcttcctctccttaatccaatatagcagccgtgaagtcatttctgtatttcaggaagactggcagacagttgctttgattcttcctcaaactacttacaatcacctacagtccaaaattgctttttcttcaaggagatttatggaaaagactctgacaaggactcttgaatacaagttcctgataacttcaagatcataccactggactaagaactttcaaaagttaatgaacaggctgataccttcatgaaattcaagacaaagaagaaaaaaactcaatgttattggactaaataatcaaaaggataatgttttcataattttttattggaaaatgtgctgattccttgaatgttttattctccagatttatgaactttttttcttcagcaattggtaaagtatacttttgtaaacaaaaattgaaatatttgcttttgctgtctatctgaatgccccagaattgtgaaactattcatgagtattcataggtttatggtaataaagttatttgcacatgttccgtaagaatctgctctctttataacaggacacatttgaaaacattggttatattaccaaggctttgactgggatgttatatttgagaatatacatagaataaacccatagggaatgcaggcaaagtctgaagtgggccttggtttggcttcctagtctcaagaggtttttggaagtttcatctgagattcttattaaaaacttctagcaaagagaagtttaaaaagagcctctatggtccattgctactcttgccgcacttaggtaaaaaatctgggcaagttcggtgagactcaacctattttgcaagcaaattcatcttattggaattatctttggtaaaaatagagactccgatagagagaaaaactagctgaaaagaaaaactgtagtacacctgttaccagattgaaccactgttcattatctttgagtatttataatccactggtagactggactggaccctgaattcttttagttcttccaattcagttttctccaatgaaatcattaagaacaagagcggctctgttcctgaagccatataaggtggaggtggaca

SEQ ID NO: 732676 - DNA, 1278 bp, Homo sapiens
  misc_feature (6)..(6): n is a, c, g, or t
cagcanagaaggaggaaggacagcacagcctacagccgtgctcaggaagtttctggatcctaggctcagctccacagaggagaacacgcaggcagcagagaccatggggcccctctcagcccctccctgcacacagcacatcacctggaagggggtcctgctcacagcatcacttttaaacttctggaacctgcccatcactgctcaagtcacgattgaagcccagccacccaaagtttctgaggggaaggatgttcttctacttgtccacaatttgccccagaatcttgctggctacttctggtacaaagggcaaatgacggacctctaccattacattacatcatatgtagtagacggtcaaataattatatatgggcctgcatacagtggaagagaaacagtatattccaatgcatccctgctgatccagaatgtcacccgggaagatgcaggatcctacaccttacacatcataaagcgaggtgataggactagaggagtaactggatatttcaccttcaacttatacctgaagctgcccaagccctacatcaccatcaacaactcaaaacccagggagaataaggatgtcttagccttcacctgtgaacctaagagtgagaactacacctacatttggtggctaaatggtcagagcctcccggtcagtcccagggtaaagcgacccattgaaaacaggatcctcattctacccagtgtcacgagaaatgaaacaggaccctatgaatgtgaaatacgggaccgagatggtggcatgcacagtgacccagtcaccctgaatgtcctctatggtccagacctccccagcatttacccttcattcacctattaccgttcaggagaaaacctctacttgtcctgcttcgcggaatctaacccaccggcagagtatttttggacaattaatgggaagtttcagcaatcaggacaaaagctctctatcccccaaattactacaaagcatagagggctctatacttgctctgttcgtaactcagccactggcaaggaaagctccaaatccatgacagtcgaagtctctgtgctccttcaggaataggacgtcttcctctccttaatccaatatagcagccgtgaagtcatttctgtatttcaggaagactggcagacagttgctttgattcttcctcaaactacttacaatcacctacagtccaaaattgctttttcttcaaggagatttatggaaaagactctgacaaggactcttgaatacaagttcctgataacttc

SEQ ID NO: 732677 - DNA, 1157 bp, Homo sapiens
  misc_feature (6)..(6): n is a, c, g, or t
cagcanagaaggaggaaggacagcacagcctacagccgtgctcaggaagtttctggatcctaggctcagctccacagaggagaacacgcaggcagcagagaccatggggcccctctcagcccctccctgcacacagcacatcacctggaagggggtcctgctcacagcatcacttttaaacttctggaacctgcccatcactgctcaagtcacgattgaagcccagccacccaaagtttctgaggggaaggatgttcttctacttgtccacaatttgccccagaatcttgctggctacttctggtacaaagggcaaatgacggacctctaccattacattacatcatatgtagtagacggtcaaataattatatatgggcctgcatacagtggaagagaaacagtatattccaatgcatccctgctgatccagaatgtcacccgggaagatgcaggatcctacaccttacacatcataaagcgaggtgataggactagaggagtaactggatatttcaccttcaacttatacctgctccttcaggaataggacgtcttcctctccttaatccaatatagcagccgtgaagtcatttctgtatttcaggaagactggcagacagttgctttgattcttcctcaaactacttacaatcacctacagtccaaaattgctttttcttcaaggagatttatggaaaagactctgacaaggactcttgaatacaagttcctgataacttccaagatcataccactggactaagaactttcaaaattttaatgaacaggctgataccttcatgaaattctagacaaagaagaaaaaaactccatgttattggactaaataatcaaaagcataatgttttcataattttctatttgaaaatgtgctgattctttgaatgttttattctccagatttatgaactttttttcttgagcaattggtaaagtatacttttgtaaacaaaaattgaaacatttgcttttgctctctatctgagtgccccagaattgggaaactattcatgagtattcatatgtttatggtaataaagttatctgcacaagttcaaaaaaaaaaataaacaaaaaaaaaaaaaaaaaaaaaaaaaaaaagaaaaaaaaaaaaaaaaaaaaaaaaaaaaaaa

SEQ ID NO: 732678 - DNA, 1128 bp, Homo sapiens
  misc_feature (6)..(6): n is a, c, g, or t
cagcanagaaggaggaaggacagcacagcctacagccgtgctcaggaagtttctggatcctaggctcagctccacagaggagaacacgcaggcagcagagaccatggggcccctctcagcccctccctgcacacagcacatcacctggaagggggtcctgctcacagcatcacttttaaacttctggaacctgcccatcactgctcaagtcacgattgaagcccagccacccaaagtttctgaggggaaggatgttcttctacttgtccacaatttgccccagaatcttgctggctacttctggtacaaagggcaaatgacggacctctaccattacattacatcatatgtagtagacggtcaaataattatatatgggcctgcatacagtggaagagaaacagtatattccaatgcatccctgctgatccagaatgtcacccgggaagatgcaggatcctacaccttacacatcataaagcgaggtgataggactagaggagtaactggatatttcaccttcaacttatacctgctccttcaggaataggacgtcttcctctccttaatccaatatagcagccgtgaagtcatttctgtatttcaggaagactggcagacagttgctttgattcttcctcaaactacttacaatcacctacagtccaaaattgctttttcttcaaggagatttatggaaaagactctgacaaggactcttgaatacaagttcctgataacttccaagatcataccactggactaagaactttcaaaattttaatgaacaggctgataccttcatgaaattctagacaaagaagaaaaaaactccatgttattggactaaataatcaaaagcataatgttttcataattttctatttgaaaatgtgctgattctttgaatgttttattctccagatttatgaactttttttcttgagcaattggtaaagtatacttttgtaaacaaaaattgaaacatttgcttttgctctctatctgagtgccccagaattgggaaactattcatgagtattcatatgtttatggtaataaagttatctgcacaagttcaaaaaaaaaaaaaaaagaaaaaaaaaaaaaaaaaaaaaaaaaaaaaaa

SEQ ID NO: 732679 - DNA, 1706 bp, Homo sapiens
actgactacttgtgggagagaaggaaaaaaagctaagtgcaaagaatcaagcctgatatgttagtttttaccaactgagatgcacccaagatgggattagacatacaagataatttatcagggaggacacctgtgagggaatgtggggcagacatgaaggcagtatgggagaacccacagaccactatgcagagctgattcctgtgaaaaagaaagagaaagaagttttaggtaccaatgcagttctaagagtttttgcaaggctgagggggagtcctccaaccagtcaccctttagagttaaagagagcctcagagaactaggcttgctttcacgcccttcctgggagcctgtgggaaagaagctttctgtgcaaaggaggtgatgaatgtgaaatgcacggacgtgggccttctgtcaatcagctccctgccatggagacctgacagagtctcattcatggctgccacaacagagagactgagaaaaagatgcaaccatgaaaaggtgaaaaggtggtaagttctaatgacatagaaaatagcaatcagcctttcttatgtctgaaagccttccaaaatatctgagtgcagtagagatttgacagaggactgatcaccatcctagaaacatggtgagagggaaaaaaaaaactgcaagaatataatcatctcccatcaatttcccaagaggaataatgtagtacttgaagaaacaattatagagtacctcatgctacatgcctcttcctgaggctcccccatgtaaaataacatcaccttcattccttctttacttttctttccatgacagctccttcaggaataggacgtcttcctctccttaatccaatatagcagccgtgaagtcatttctgtatttcaggaagactggcagacagttgctttgattcttcctcaaactacttacaatcacctacagtccaaaattgctttttcttcaaggagatttatggaaaagactctgacaaggactcttgaatacaagttcctgataacttcaagatcataccactggactaagaactttcaaaattttaatgaacaggctgataccttcatgaaattctagacaaagaagaaaaaaactccatgttattggactaaataatcaaaagcataatgttttcataattttctatttgaaaatgtgctgattctttgaatgttttattctccagatttatgaactttttttcttgagcaattggtaaagtatacttttgtaaacaaaaattgaaacatttgcttttgctctctatctgagtgccccagaattgggaaactattcatgagtattcatatgtttatggtaataaagttatctgcacaagttcaaaaaaacaaaaaaaaaaaaaaaaaaaaaaaattgtgtggggcgcgcgcctgtgggcccctgagagaaaggttttttgagagaaacaattgggtgtgtgggggcgggggaccccaagatagaggtaaacggcaaacgtgggcacaaaaggggtgttccatgagagaaaccggggacacgacacaagggcggggaatccacacagaaatagaaaagcggcccgcggggaaacgacgaagcgttctgggaaaaacatcccaagaaggagaatcgagagaggacatcggagggaaacaaacaaaggagagtccaagggagaccgaatacacattaagcccggcgcgggagat

SEQ ID NO: 732680 - DNA, 1638 bp, Homo sapiens
actgactacttgtgggagagaaggaaaaaaagctaagtgcaaagaatcaagcctgatatgttagtttttaccaactgagatgcacccaagatgggattagacatacaagataatttatcagggaggacacctgtgagggaatgtggggcagacatgaaggcagtatgggagaacccacagaccactatgcagagctgattcctgtgaaaaagaaagagaaagaagttttaggtaccaatgcagttctaagagtttttgcaaggctgagggggagtcctccaaccagtcaccctttagagttaaagagagcctcagagaactaggcttgctttcacgcccttcctgggagcctgtgggaaagaagctttctgtgcaaaggaggtgatgaatgtgaaatgcacggacgtgggccttctgtcaatcagctccctgccatggagacctgacagagtctcattcatggctgccacaacagagagactgagaaaaagatgcaaccatgaaaaggtgaaaaggtggtaagttctaatgacatagaaaatagcaatcagcctttcttatgtctgaaagccttccaaaatatctgagtgcagtagagatttgacagaggactgatcaccatcctagaaacatggtgagagggaaaaaaaaaactgcaagaatataatcatctcccatcaatttcccaagaggaataatgtagtacttgaagaaacaattatagagtacctcatgctacatgcctcttcctgaggctcccccatgtaaaataacatcaccttcattccttctttacttttctttccatgacagctccttcaggaataggacgtcttcctctccttaatccaatatagcagccgtgaagtcatttctgtatttcaggaagactggcaggagatttatggaaaagactctgacaaggactcttgaatacaagttcctgataacttcaagatcataccactggactaagaactttcaaaattttaatgaacaggctgataccttcatgaaattctagacaaagaagaaaaaaactccatgttattggactaaataatcaaaagcataatgttttcataattttctatttgaaaatgtgctgattctttgaatgttttattctccagatttatgaactttttttcttgagcaattggtaaagtatacttttgtaaacaaaaattgaaacatttgcttttgctctctatctgagtgccccagaattgggaaactattcatgagtattcatatgtttatggtaataaagttatctgcacaagttcaaaaaaacaaaaaaaaaaaaaaaaaaaaaaaattgtgtggggcgcgcgcctgtgggcccctgagagaaaggttttttgagagaaacaattgggtgtgtgggggcgggggaccccaagatagaggtaaacggcaaacgtgggcacaaaaggggtgttccatgagagaaaccggggacacgacacaagggcggggaatccacacagaaatagaaaagcggcccgcggggaaacgacgaagcgttctgggaaaaacatcccaagaaggagaatcgagagaggacatcggagggaaacaaacaaaggagagtccaagggagaccgaatacacattaagcccggcgcgggagat

SEQ ID NO: 732681 - DNA, 1487 bp, Homo sapiens
actgactacttgtgggagagaaggaaaaaaagctaagtgcaaagaatcaagcctgatatgttagtttttaccaactgagatgcacccaagatgggattagacatacaagataatttatcagggaggacacctgtgagggaatgtggggcagacatgaaggcagtatgggagaacccacagaccactatgcagagctgattcctgtgaaaaagaaagagaaagaagttttaggtaccaatgcagttctaagagtttttgcaaggctgagggggagtcctccaaccagtcaccctttagagttaaagagagcctcagagaactaggcttgctttcacgcccttcctgggagcctgtgggaaagaagctttctgtgcaaaggaggtgatgaatgtgaaatgcacggacgtgggccttctgtcaatcagctccctgccatggagacctgacagagtctcattcatggctgccacaacagagagactgagaaaaagatgcaaccatgaaaaggtgaaaaggtggtaagttctaatgacatagaaaatagcaatcagcctttcttatgtctgaaagccttccaaaatatctgagtgcagtagagatttgacagaggactgatcaccatcctagaaacatggtgagagggaaaaaaaaaactgcaagaatataatcatctcccatcaatttcccaagaggaataatgtagtacttgaagaaacaattatagagtacctcatgctacatgcctcttcctgaggctcccccatgtaaaataacatcaccttcattccttctttacttttctttccatgacagctccttcaggaataggacgtcttcctctccttaatccaatatagcagccgtgaagtcatttctgtatttcaggaagactggcacaggcaacatctgacctcatggagaacggagactttaggattaacatgtgaacctgagactcagaacacaacctatgtgtggttgagatcttttcctgatgaccagttcatgtgttcaaaaaacatacagaaatgaagaaggcaaggtccctaccccaggagacataaagcctaagacaggaaatgagacctgaaaataatcatgataccaaaatagaaaaaattgaatgccacaagaaatcagagaaatctgatgggaaatagagctacacattggaatcactggaaagcatttttaaaagtggatgctcaagccccacccattagttccagtttaaaggtctggagagggaccaaggcattggtaatttttaagtcttccttgacactactaacatgtaacaaggatggagaactcttgttgtaataggtagaacttaaaactaaatgaatgattttcagctagaagtactggaattacctaaggacctttttcaacatacataagactatacatttttggccctatttatgaatgggctacaccaagaactcagtaatcctcttgagaaacagaagctgaatggaaaa

SEQ ID NO: 732682 - DNA, 2689 bp, Homo sapiens
agcatcacttttaaacttctggaacctgcctatcactgctcaagtcacgattgaagccctgccacccaaagtttccgaggggaaggatgttcttctacttgtccacaatttgcctcagaatcttgctggctacatctggtacaaaggacaactgatggacctctaccattacattacatcatatgtagtagacggtcaaataaatatatatgggcctgcatacactggacgagaaacagtatattccaatgcatccctgctgatccagaatgtcacccgggaagacgcaggatcctacaccttacacatcataaagcgaggtgataggactagaggagtaactggatatttcaccttcaacttatacctgaagctgcccaagccctacatcaccatcaacaactcaaaacccagggagaataaggatgtcttagccttcacctgtgaacctaagagtgagaactacacctacatttggtggctaaatggtcagagcctcccggtcagtcccagggtaaagcgacccattgaaaacaggatcctcattctacccagtgtcacgagaaatgaaacaggaccctatgaatgtgaaatacgggaccgagatggtggcatgcgcagtgacccagtcaccctgaatgtcctctatggtccagacctccccagcatttacccttcattcacctattaccgttcaggagaaaacctctacttgtcctgcttcgcggaatctaacccaccggcagagtatttttggacaattaatgggaagtttcagcaatcaggacaaaagctctctatcccccaaattactacaaagcatagagggctctatacttgctctgttcgtaactcagctactggcaaggaaagctccaaatccatgacagtcgaagtctctggtaagtggatcccagcatccttggcaatagggttttaggtggagtctacctggctttcagagaagagttaggaaaacatttttattcccagcctgtgtcccatgggcacaagcaaatcccaaattctcctcctgaacccttccaatttgtctctacagactctcttctccttgtttttctgttttctcatggctgaccttgtgtctggcctaagaaagttagggagggggctttatcagccctgagccctatgtggtagaggaggcttcacagagggatgagaaggagagtcctcaagatcaagttgcttctcgatgtcaccaacacatccccttctgccatgtctttgtttccttgtacctattccatgagctacaaggaacatctgaggctctgaaacaagctcacacttttcccccaaatgagacgaggaagccccttgggtgagggaggagcagctcagactctgcttcctgctctgctccatgcttctctggtgactgggcctgcctcactcaacctggggtgggaccagcatgtgtggagaaagagtcctggtggcctgtcctgaatttggctaaatcgagctgccagttgaagccaagcctcccccgggccaggctgcagggaaataagaagagagggagcctcagggaagactcctgcgttgcgtcctggctctgaagtcaccggttgtatgaggttgtgggcacagcatgtgggacacagcacggaggatagtgactgatgcagagctggagaaatagagagattcacccctggggctctgcatggcaggaaaggggcagtgccaaaaagtgtgtaattatagagagggtaagactaccagacactttatatatatctaatataagacttaccattaactatttctatgtgtgcaatttagtgttgtgtaaccatcacactatccatttccagaactttttcctcttaccatattaaacctctgtacccaataaacagtaactcactccttctccccataacccttagcacacaccattctacattctgtctctatgtaactggctattctaactatcttttataaatggaattatatgataattatccttttgtgtctggtttatttcagttagcataatatcttcaaggttcatccattttgcatgatgtattggaattttattccttgttaaggttgaataacatttcaatgtatagatacacctcatttgcctacccacttatctttcaatggacttttcagttgtttccattttttcgctagtgtgagtaatgcttctctgaacatcagtgtacaaatatttgttcaaatttctttcaattctatggggagtatgtccagaagtggaattgctggatcaaatggtaatttattgtttaattttttgagaaacagccacaccactttttacagtggctataacatttcccattcccatcagcaatgcactagagctccaatttttccatctacttgaaaacacctgttgttttgtgttgttgtcattgttgttgtttatcaaagccatcctaaattgtgtgaggtggtgtagcattgtggttttgatttgcatatctctaagtattcgtgatgctgaggaactttgcatgggcttattggatatttgtatatcttccttggagaaaactccattttaatcctttgttcattttttaattgggtttttggatgtttgctgttgttgacttgtagcttttcatgtattctggaaattaatttcttatcacacatataatttgcaaatatttttatc

SEQ ID NO: 732683 - DNA, 1741 bp, Homo sapiens
  misc_feature (6)..(6): n is a, c, g, or t
cagcanagaaggaggaaggacagcacagcctacagccgtgctcaggaagtttctggatcctaggctcagctccacagaggagaacacgcaggcagcagagaccatggggcccctctcagcccctccctgcacacagcacatcacctggaagggggtcctgctcacagcatcacttttaaacttctggaacctgcccatcactgctcaagtcacgattgaagcccagccacccaaagtttctgaggggaaggatgttcttctacttgtccacaatttgccccagaatcttgctggctacttctggtacaaagggcaaatgacggacctctaccattacattacatcatatgtagtagacggtcaaataattatatatgggcctgcatacagtggaagagaaacagtatattccaatgcatccctgctgatccagaatgtcacccgggaagatgcaggatcctacaccttacacatcataaagcgaggtgataggactagaggagtaactggatatttcaccttcaacttatacctgaagctgcccaagccctacatcaccatcaacaactcaaaacccagggagaataaggatgtcttagccttcacctgtgaacctaagagtgagaactacacctacatttggtggctaaatggtcagagcctcccggtcagtcccagggtaaagcgacccattgaaaacaggatcctcattctacccagtgtcacgagaaatgaaacaggaccctatgaatgtgaaatacgggaccgagatggtggcatgcacagtgacccagtcaccctgaatgtcctctatggtccagacctccccagcatttacccttcattcacctattaccgttcaggagaaaacctctacttgtcctgcttcgcggaatctaacccaccggcagagtatttttggacaattaatgggaagtttcagcaatcaggacaaaagctctctatcccccaaattactacaaagcatagagggctctatacttgctctgttcgtaactcagccactggcaaggaaagctccaaatccatgacagtcgaagtctctgctccttcaggaataggacgtcttcctctccttaatccaatatagcagccgtgaagtcatttctgtatttcaggaagactggcacaggcaacatctgacctcatggagaacggagactttaggattaacatgtgaacctgagactcagaacacaacctatgtgtggttgagatcttttcctgatgaccagttcatgtgttcaaaaaacatacagaaatgaagaaggcaaggtccctaccccaggagacataaagcctaagacaggaaatgagacctgaaaataatcatgataccaaaatagaaaaaattgaatgccacaagaaatcagagaaatctgatgggaaatagagctacacattggaatcactggaaagcatttttaaaagtggatgctcaagccccacccattagttccagtttaaaggtctggagagggaccaaggcattggtaatttttaagtcttccttgacactactaacatgtaacaaggatggagaactcttgttgtaataggtagaacttaaaactaaatgaatgattttcagctagaagtactggaattacctaaggacctttttcaacatacataagactatacatttttggccctatttatgaatgggctacaccaagaactcagtaatcctcttgagaaacagaagctgaatggaaaa

SEQ ID NO: 732684 - DNA, 2195 bp, Homo sapiens
gctctaacttggaggcagagacccaagcagctggaggctctgtgtgtgggtcgctgatttcttggagcctgaaaagaaggagcagcgactggacccagagccatgtggctgtgccctctggccctcaacctcatcttgatggcagcctctggtgctgcgtgcgaagtgaaggacgtttgtgttggaagccctggtatccccggcactcctggatcccacggcctgccaggcagggacgggagagatggtgtcaaaggagaccctggccctccaggccccatgggtccgcctggagaaacaccatgtcctcctgggaataatgggctgcctggagcccctggtgtccctggagagcgtggagagaagggggaggctggcgagagaggccctccagggcttccagctcatctagatgaggagctccaagccacactccacgacttcagacatcaaatcctgcagacaaggggagccctcagtctgcagggctccataatgacagtaggagagaaggtcttctccagcaatgggcagtccatcacttttgatgccattcaggaggcatgtgccagagcaggcggccgcattgctgtcccaaggaatccagaggaaaatgaggccattgcaagcttcgtgaagaagtacaacacatatgcctatgtaggcctgactgagggtcccagccctggagacttccgctactcagatgggacccctgtaaactacaccaactggtaccgaggggagcctgcaggtcggggaaaagagcagtgtgtggagatgtacacagatgggcagtggaatgacaggaactgcctgtactcccgactgaccatctgtgagttctgagaggcatttaggccatgggacagggaggatcctgtctggccttcagtttccatccccaggatccacttggtctgtgagatgctagaactccctttcaacagaattcacttgtggctattagagctggaggcacccttagccacttcattcccctgatgggccctgactcttccccataatcactgaccagccttgacactccccttgcaaaccatcccagcactgcaccccaggcagccactcctagccttggcctttggcatgagatggaggcctccttattccccatctggtccagttccttcacttacagatggcagcagtgaggccttggggtagaaggatcctccaaagtcacacagagtgcctgcctcctggtcccctcagctctgcctctgcagcccactgcctgcccagtgccatcaggatgagcagtaccggccaagcataatgacagagagaggcagatttcagggaagccctgactgtgtggagctaaggacacagtggagattctctggcactctgaggtctctgtggcaggcctggtcaggctctccaggtggtcagagggcccagtggtgccccagcacggtggtgcccaagccaaccctgtgactgacatgtacgattcactcctttgagtctttggatgccaactcagccccctgacctggaggcagccggccaaggcctctagggaagagccccccactgcagacatgacccgagtaactttctgctgatgaacaaatctgcaccccacttcagacctcggtgggcattcacaccaccccccatgccaccggctccactttccccttttattaatacattcacccagataatcattaaaattaacatgtgccaggtcttaggatgtgtcttggggtgggcacagtacccggtgactcttggggatatttatttattttccctgagcctatatcttcatctgtgaaatggggataaaaatacttgttgctgtcacaattattaccatctctccagctagcaaaattactaccagagccgttactacacacaaaggctattgaccgagcacataccatgtgccacacaccttgacaaaatcttttaatacagtttattatgtactattcaatctttacacaatgtcacgggaccagtattgtttacccaattttttataaggacactgaagcttagaggagtgaaatgttttgagtgttatttcagagagcaaatggcaaagactggatccaaacccatcttcctggacctgaagttcatgctcccagccaccccacccctgagctgaataaagatgatttaagcataaaaaatcgttagtgtgttcacat

SEQ ID NO: 732685 - DNA, 2032 bp, Homo sapiens
gctctaacttggaggcagagacccaagcagctggaggctctgtgtgtgggtcgctgatttcttggagcctgaaaagaaggagcagcgactggacccagagccatgtggctgtgccctctggccctcaacctcatcttgatggcagcctctggtgctgcgtgcgaagtgaaggacgtttgtgttggaagccctggtatccccggcactcctggatcccacggcctgccaggcagggacgggagagatggtgtcaaaggagaccctggccctccaggccccatgggtccgcctggagaaacaccatgtcctcctgggaataatgggctgcctggagcccctggtgtccctggagagcgtggagagaagggggaggctggcgagagaggccctccagggcttccagctcatctagatgaggagctccaagccacactccacgacttcagacatcaaatcctgcagacaaggggagccctcagtctgcagggctccataatgacagtaggagagaaggtcttctccagcaatgggcagtccatcacttttgatgccattcaggaggcatgtgccagagcaggcggccgcattgctgtcccaaggaatccagaggaaaatgaggccattgcaagcttcgtgaagaagtacaacacatatgcctatgtaggcctgactgagggtcccagccctggagacttccgctactcagatgggacccctgtaaactacaccaactggtaccgaggggagcctgcaggtcggggaaaagagcagtgtgtggagatgtacacagatgggcagtggaatgacaggaactgcctgtactcccgactgaccatctgtgagttctgagaggcatttaggccatgggacagggaggatcctgtctggccttcagtttccatccccaggatccacttggtctgtgagatgctagaactccctttcaacagaattcacttgtggctattagagctggaggcacccttagccacttcattcccctgatgggccctgactcttccccataatcactgaccagccttgacactccccttgcaaaccatcccagcactgcaccccaggcagccactcctagccttggcctttggcatgagatggaggcctccttattccccatctggtccagttccttcacttacagatggcagcagtgaggccttggggtagaaggatcctccaaagtcacacagagtgcctgcctcctggtcccctcagctctgcctctgcagcccactgcctgcccagtgccatcaggatgagcagtaccggccaagcataatgacagagagaggcagatttcagggaagccctgactgtgtggagctaaggacacagtggagattctctggcactctgaggtctctgtggcaggcctggtcaggctctccaggtggtcagagggcccagtggtgccccagcacggtggtgcccaagccaaccctgtgactgacatgtacgattcactcctttgagtctttggatgccaactcagccccctgacctggaggcagccggccaaggcctctagggaagagccccccactgcagacatgacccgagtaactttctgctgatgaacaaatctgcaccccacttcagacctcggtgggcattcacaccaccccccatgccaccggctccactttccccttttattaatacattcacccagataatcattaaaattaacatgtgccaggtcttaggatgtgtcttggggtgggcacagtacccggtgactcttggggatatttatttattttccctgagcctatatcttcatctgtgaaatggggataaaaatacttgttgctgtcacaattattaccatctctccagctagcaaaattactaccagagccgttactacacacaaaggctattgaccgagcacataccatgtgccacacaccttgacaaaatcttttaatacagtttattatgtactattcaatctttacacattccccgggggccggtattgcttacccggggagggggggtaccgaca

SEQ ID NO: 732686 - DNA, 1374 bp, Homo sapiens
gcgtctagaggatctccatctcaggcaggacgatctcaggccatgggacagggaggatcctgtctggccttcagtttccatccccaggatccacttggtctgtgagatgctagaactccctttcaacagaattcacttgtggctattagagctggaggcacccttagccacttcattcccctgatgggccctgactcttccccataatcactgaccagccttgacactccccttgcaaaccatcccagcactgcaccccaggcagccactcctagccttggcctttggcatgagatggaggcctccttattccccatctggtccagttccttcacttacagatggcagcagtgaggccttggggtagaaggatcctccaaagtcacacagagtgcctgcctcctggtcccctcagctctgcctctgcagcccactgcctgcccagtgccatcaggatgagcagtaccggccaagcataatgacagagagaggcagatttcagggaagccctgactgtgtggagctaaggacacagtggagattctctggcactctgaggtctctgtggcaggcctggtcaggctctccaggtggtcagagggcccagtggtgccccagcacggtggtgcccaagccaaccctgtgactgacatgtacgattcactcctttgagtctttggatgccaactcagccccctgacctggaggcagccggccaaggcctctagggaagagccccccactgcagacatgacccgagtaactttctgctgatgaacaaatctgcaccccacttcagacctcggtgggcattcacaccaccccccatgccaccggctccactttccccttttattaatacattcacccagataatcattaaaattaacatgtgccaggtcttaggatgtgtcttggggtgggcacagtacccggtgactcttggggatatttatttattttccctgagcctatatcttcatctgtgaaatggggataaaaatacttgttgctgtcacaattattaccatctctccagctagcaaaattactaccagagccgttactacacacaaaggctattgaccgagcacataccatgtgccacacaccttgacaaaatcttttaatacagtttattatgtactattcaatctttacacaatgtcacgggaccagtattgtttacccaattttttataaggacactgaagcttagaggagtgaaatgttttgagtgttatttcagagagcaaatggcaaagactggatccaaacccatcttcctggacctgaagttcatgctcccagccaccccacccctgagctgaataaagatgatttaagcataaaaaatcgttagtgtgttcacat

SEQ ID NO: 732687 - DNA, 1211 bp, Homo sapiens
gcgtctagaggatctccatctcaggcaggacgatctcaggccatgggacagggaggatcctgtctggccttcagtttccatccccaggatccacttggtctgtgagatgctagaactccctttcaacagaattcacttgtggctattagagctggaggcacccttagccacttcattcccctgatgggccctgactcttccccataatcactgaccagccttgacactccccttgcaaaccatcccagcactgcaccccaggcagccactcctagccttggcctttggcatgagatggaggcctccttattccccatctggtccagttccttcacttacagatggcagcagtgaggccttggggtagaaggatcctccaaagtcacacagagtgcctgcctcctggtcccctcagctctgcctctgcagcccactgcctgcccagtgccatcaggatgagcagtaccggccaagcataatgacagagagaggcagatttcagggaagccctgactgtgtggagctaaggacacagtggagattctctggcactctgaggtctctgtggcaggcctggtcaggctctccaggtggtcagagggcccagtggtgccccagcacggtggtgcccaagccaaccctgtgactgacatgtacgattcactcctttgagtctttggatgccaactcagccccctgacctggaggcagccggccaaggcctctagggaagagccccccactgcagacatgacccgagtaactttctgctgatgaacaaatctgcaccccacttcagacctcggtgggcattcacaccaccccccatgccaccggctccactttccccttttattaatacattcacccagataatcattaaaattaacatgtgccaggtcttaggatgtgtcttggggtgggcacagtacccggtgactcttggggatatttatttattttccctgagcctatatcttcatctgtgaaatggggataaaaatacttgttgctgtcacaattattaccatctctccagctagcaaaattactaccagagccgttactacacacaaaggctattgaccgagcacataccatgtgccacacaccttgacaaaatcttttaatacagtttattatgtactattcaatctttacacattccccgggggccggtattgcttacccggggagggggggtaccgaca

SEQ ID NO: 732688 - DNA, 1341 bp, Homo sapiens
gcgtctagaggatctccatctcaggcaggacgatctcaggccatgggacagggaggatcctgtctggccttcagtttccatccccaggatccacttggtctgtgagatgctagaactccctttcaacagaattcacttgtggctattagagctggaggcacccttagccacttcattcccctgatgggccctgactcttccccataatcactgaccagccttgacactccccttgcaaaccatcccagcactgcaccccaggcagccactcctagccttggcctttggcatgagatggaggcctccttattccccatctggtccagttccttcacttacagatggcagcagtgaggccttggggtagaaggatcctccaaagtcacacagagtgcctgcctcctggtcccctcagctctgcctctgcagcccactgcctgcccagtgccatcaggatgagcagtaccggccaagcataatgacagagagaggcagatttcagggaagccctgactgtgtggagctaaggacacagtggagattctctggcactctgaggtctctgtggcaggcctggtcaggctctccaggtggtcagagggcccagtggtgccccagcacggtggtgcccaagccaaccctgtgactgacatgtacgattcactcctttgagtctttggatgccaactcagccccctgacctggaggcagccggccaaggcctctagggaagagccccccactgcagacatgacccgagtaactttctgctgatgaacaaatctgcaccccacttcagacctcggtgggcattcacaccaccccccatgccaccggctccactttccccttttattaatacattcacccagataatcattaaaattaacatgtgccaggtcttaggatgtgtcttggggtgggcacagtacccggtgactcttggggatatttatttattttccctgagcctatatcttcatctgtgaaatggggataaaaatacttgttgctgtcacaattattaccatctctccagctagcaaaattactaccagagccgttactacacacaaaggctattgaccgagcacataccatgtgccacacaccttgacaaaatcttttaatacagtttattatgtactattcaatctttacacaatgtcacgggaccagtattgtttacccaattttttataaggacactgaagcttagaggagtgaaatgttttgagtgttatttcagagagcaaatggcaaagactggatccaaacccatcttcctggacctgaagttcatgctcccagccaaccgtgacaagtgggccgagctgatat

SEQ ID NO: 732689 - DNA, 2162 bp, Homo sapiens
gctctaacttggaggcagagacccaagcagctggaggctctgtgtgtgggtcgctgatttcttggagcctgaaaagaaggagcagcgactggacccagagccatgtggctgtgccctctggccctcaacctcatcttgatggcagcctctggtgctgcgtgcgaagtgaaggacgtttgtgttggaagccctggtatccccggcactcctggatcccacggcctgccaggcagggacgggagagatggtgtcaaaggagaccctggccctccaggccccatgggtccgcctggagaaacaccatgtcctcctgggaataatgggctgcctggagcccctggtgtccctggagagcgtggagagaagggggaggctggcgagagaggccctccagggcttccagctcatctagatgaggagctccaagccacactccacgacttcagacatcaaatcctgcagacaaggggagccctcagtctgcagggctccataatgacagtaggagagaaggtcttctccagcaatgggcagtccatcacttttgatgccattcaggaggcatgtgccagagcaggcggccgcattgctgtcccaaggaatccagaggaaaatgaggccattgcaagcttcgtgaagaagtacaacacatatgcctatgtaggcctgactgagggtcccagccctggagacttccgctactcagatgggacccctgtaaactacaccaactggtaccgaggggagcctgcaggtcggggaaaagagcagtgtgtggagatgtacacagatgggcagtggaatgacaggaactgcctgtactcccgactgaccatctgtgagttctgagaggcatttaggccatgggacagggaggatcctgtctggccttcagtttccatccccaggatccacttggtctgtgagatgctagaactccctttcaacagaattcacttgtggctattagagctggaggcacccttagccacttcattcccctgatgggccctgactcttccccataatcactgaccagccttgacactccccttgcaaaccatcccagcactgcaccccaggcagccactcctagccttggcctttggcatgagatggaggcctccttattccccatctggtccagttccttcacttacagatggcagcagtgaggccttggggtagaaggatcctccaaagtcacacagagtgcctgcctcctggtcccctcagctctgcctctgcagcccactgcctgcccagtgccatcaggatgagcagtaccggccaagcataatgacagagagaggcagatttcagggaagccctgactgtgtggagctaaggacacagtggagattctctggcactctgaggtctctgtggcaggcctggtcaggctctccaggtggtcagagggcccagtggtgccccagcacggtggtgcccaagccaaccctgtgactgacatgtacgattcactcctttgagtctttggatgccaactcagccccctgacctggaggcagccggccaaggcctctagggaagagccccccactgcagacatgacccgagtaactttctgctgatgaacaaatctgcaccccacttcagacctcggtgggcattcacaccaccccccatgccaccggctccactttccccttttattaatacattcacccagataatcattaaaattaacatgtgccaggtcttaggatgtgtcttggggtgggcacagtacccggtgactcttggggatatttatttattttccctgagcctatatcttcatctgtgaaatggggataaaaatacttgttgctgtcacaattattaccatctctccagctagcaaaattactaccagagccgttactacacacaaaggctattgaccgagcacataccatgtgccacacaccttgacaaaatcttttaatacagtttattatgtactattcaatctttacacaatgtcacgggaccagtattgtttacccaattttttataaggacactgaagcttagaggagtgaaatgttttgagtgttatttcagagagcaaatggcaaagactggatccaaacccatcttcctggacctgaagttcatgctcccagccaaccgtgacaagtgggccgagctgatat

SEQ ID NO: 732690 - DNA, 2235 bp, Homo sapiens
gctctaacttggaggcagagacccaagcagctggaggctctgtgtgtgggtcgctgatttcttggagcctgaaaagaaggtaactgggcatatgagggacagatggagtgagtcagtgagagcagcgactggacccagagccatgtggctgtgccctctggccctcaacctcatcttgatggcagcctctggtgctgcgtgcgaagtgaaggacgtttgtgttggaagccctggtatccccggcactcctggatcccacggcctgccaggcagggacgggagagatggtgtcaaaggagaccctggccctccaggccccatgggtccgcctggagaaacaccatgtcctcctgggaataatgggctgcctggagcccctggtgtccctggagagcgtggagagaagggggaggctggcgagagaggccctccagggcttccagctcatctagatgaggagctccaagccacactccacgacttcagacatcaaatcctgcagacaaggggagccctcagtctgcagggctccataatgacagtaggagagaaggtcttctccagcaatgggcagtccatcacttttgatgccattcaggaggcatgtgccagagcaggcggccgcattgctgtcccaaggaatccagaggaaaatgaggccattgcaagcttcgtgaagaagtacaacacatatgcctatgtaggcctgactgagggtcccagccctggagacttccgctactcagatgggacccctgtaaactacaccaactggtaccgaggggagcctgcaggtcggggaaaagagcagtgtgtggagatgtacacagatgggcagtggaatgacaggaactgcctgtactcccgactgaccatctgtgagttctgagaggcatttaggccatgggacagggaggatcctgtctggccttcagtttccatccccaggatccacttggtctgtgagatgctagaactccctttcaacagaattcacttgtggctattagagctggaggcacccttagccacttcattcccctgatgggccctgactcttccccataatcactgaccagccttgacactccccttgcaaaccatcccagcactgcaccccaggcagccactcctagccttggcctttggcatgagatggaggcctccttattccccatctggtccagttccttcacttacagatggcagcagtgaggccttggggtagaaggatcctccaaagtcacacagagtgcctgcctcctggtcccctcagctctgcctctgcagcccactgcctgcccagtgccatcaggatgagcagtaccggccaagcataatgacagagagaggcagatttcagggaagccctgactgtgtggagctaaggacacagtggagattctctggcactctgaggtctctgtggcaggcctggtcaggctctccaggtggtcagagggcccagtggtgccccagcacggtggtgcccaagccaaccctgtgactgacatgtacgattcactcctttgagtctttggatgccaactcagccccctgacctggaggcagccggccaaggcctctagggaagagccccccactgcagacatgacccgagtaactttctgctgatgaacaaatctgcaccccacttcagacctcggtgggcattcacaccaccccccatgccaccggctccactttccccttttattaatacattcacccagataatcattaaaattaacatgtgccaggtcttaggatgtgtcttggggtgggcacagtacccggtgactcttggggatatttatttattttccctgagcctatatcttcatctgtgaaatggggataaaaatacttgttgctgtcacaattattaccatctctccagctagcaaaattactaccagagccgttactacacacaaaggctattgaccgagcacataccatgtgccacacaccttgacaaaatcttttaatacagtttattatgtactattcaatctttacacaatgtcacgggaccagtattgtttacccaattttttataaggacactgaagcttagaggagtgaaatgttttgagtgttatttcagagagcaaatggcaaagactggatccaaacccatcttcctggacctgaagttcatgctcccagccaccccacccctgagctgaataaagatgatttaagcataaaaaatcgttagtgtgttcacat

SEQ ID NO: 732691 - DNA, 2202 bp, Homo sapiens
gctctaacttggaggcagagacccaagcagctggaggctctgtgtgtgggtcgctgatttcttggagcctgaaaagaaggtaactgggcatatgagggacagatggagtgagtcagtgagagcagcgactggacccagagccatgtggctgtgccctctggccctcaacctcatcttgatggcagcctctggtgctgcgtgcgaagtgaaggacgtttgtgttggaagccctggtatccccggcactcctggatcccacggcctgccaggcagggacgggagagatggtgtcaaaggagaccctggccctccaggccccatgggtccgcctggagaaacaccatgtcctcctgggaataatgggctgcctggagcccctggtgtccctggagagcgtggagagaagggggaggctggcgagagaggccctccagggcttccagctcatctagatgaggagctccaagccacactccacgacttcagacatcaaatcctgcagacaaggggagccctcagtctgcagggctccataatgacagtaggagagaaggtcttctccagcaatgggcagtccatcacttttgatgccattcaggaggcatgtgccagagcaggcggccgcattgctgtcccaaggaatccagaggaaaatgaggccattgcaagcttcgtgaagaagtacaacacatatgcctatgtaggcctgactgagggtcccagccctggagacttccgctactcagatgggacccctgtaaactacaccaactggtaccgaggggagcctgcaggtcggggaaaagagcagtgtgtggagatgtacacagatgggcagtggaatgacaggaactgcctgtactcccgactgaccatctgtgagttctgagaggcatttaggccatgggacagggaggatcctgtctggccttcagtttccatccccaggatccacttggtctgtgagatgctagaactccctttcaacagaattcacttgtggctattagagctggaggcacccttagccacttcattcccctgatgggccctgactcttccccataatcactgaccagccttgacactccccttgcaaaccatcccagcactgcaccccaggcagccactcctagccttggcctttggcatgagatggaggcctccttattccccatctggtccagttccttcacttacagatggcagcagtgaggccttggggtagaaggatcctccaaagtcacacagagtgcctgcctcctggtcccctcagctctgcctctgcagcccactgcctgcccagtgccatcaggatgagcagtaccggccaagcataatgacagagagaggcagatttcagggaagccctgactgtgtggagctaaggacacagtggagattctctggcactctgaggtctctgtggcaggcctggtcaggctctccaggtggtcagagggcccagtggtgccccagcacggtggtgcccaagccaaccctgtgactgacatgtacgattcactcctttgagtctttggatgccaactcagccccctgacctggaggcagccggccaaggcctctagggaagagccccccactgcagacatgacccgagtaactttctgctgatgaacaaatctgcaccccacttcagacctcggtgggcattcacaccaccccccatgccaccggctccactttccccttttattaatacattcacccagataatcattaaaattaacatgtgccaggtcttaggatgtgtcttggggtgggcacagtacccggtgactcttggggatatttatttattttccctgagcctatatcttcatctgtgaaatggggataaaaatacttgttgctgtcacaattattaccatctctccagctagcaaaattactaccagagccgttactacacacaaaggctattgaccgagcacataccatgtgccacacaccttgacaaaatcttttaatacagtttattatgtactattcaatctttacacaatgtcacgggaccagtattgtttacccaattttttataaggacactgaagcttagaggagtgaaatgttttgagtgttatttcagagagcaaatggcaaagactggatccaaacccatcttcctggacctgaagttcatgctcccagccaaccgtgacaagtgggccgagctgatat

SEQ ID NO: 732692 - DNA, 2072 bp, Homo sapiens
gctctaacttggaggcagagacccaagcagctggaggctctgtgtgtgggtcgctgatttcttggagcctgaaaagaaggtaactgggcatatgagggacagatggagtgagtcagtgagagcagcgactggacccagagccatgtggctgtgccctctggccctcaacctcatcttgatggcagcctctggtgctgcgtgcgaagtgaaggacgtttgtgttggaagccctggtatccccggcactcctggatcccacggcctgccaggcagggacgggagagatggtgtcaaaggagaccctggccctccaggccccatgggtccgcctggagaaacaccatgtcctcctgggaataatgggctgcctggagcccctggtgtccctggagagcgtggagagaagggggaggctggcgagagaggccctccagggcttccagctcatctagatgaggagctccaagccacactccacgacttcagacatcaaatcctgcagacaaggggagccctcagtctgcagggctccataatgacagtaggagagaaggtcttctccagcaatgggcagtccatcacttttgatgccattcaggaggcatgtgccagagcaggcggccgcattgctgtcccaaggaatccagaggaaaatgaggccattgcaagcttcgtgaagaagtacaacacatatgcctatgtaggcctgactgagggtcccagccctggagacttccgctactcagatgggacccctgtaaactacaccaactggtaccgaggggagcctgcaggtcggggaaaagagcagtgtgtggagatgtacacagatgggcagtggaatgacaggaactgcctgtactcccgactgaccatctgtgagttctgagaggcatttaggccatgggacagggaggatcctgtctggccttcagtttccatccccaggatccacttggtctgtgagatgctagaactccctttcaacagaattcacttgtggctattagagctggaggcacccttagccacttcattcccctgatgggccctgactcttccccataatcactgaccagccttgacactccccttgcaaaccatcccagcactgcaccccaggcagccactcctagccttggcctttggcatgagatggaggcctccttattccccatctggtccagttccttcacttacagatggcagcagtgaggccttggggtagaaggatcctccaaagtcacacagagtgcctgcctcctggtcccctcagctctgcctctgcagcccactgcctgcccagtgccatcaggatgagcagtaccggccaagcataatgacagagagaggcagatttcagggaagccctgactgtgtggagctaaggacacagtggagattctctggcactctgaggtctctgtggcaggcctggtcaggctctccaggtggtcagagggcccagtggtgccccagcacggtggtgcccaagccaaccctgtgactgacatgtacgattcactcctttgagtctttggatgccaactcagccccctgacctggaggcagccggccaaggcctctagggaagagccccccactgcagacatgacccgagtaactttctgctgatgaacaaatctgcaccccacttcagacctcggtgggcattcacaccaccccccatgccaccggctccactttccccttttattaatacattcacccagataatcattaaaattaacatgtgccaggtcttaggatgtgtcttggggtgggcacagtacccggtgactcttggggatatttatttattttccctgagcctatatcttcatctgtgaaatggggataaaaatacttgttgctgtcacaattattaccatctctccagctagcaaaattactaccagagccgttactacacacaaaggctattgaccgagcacataccatgtgccacacaccttgacaaaatcttttaatacagtttattatgtactattcaatctttacacattccccgggggccggtattgcttacccggggagggggggtaccgaca

SEQ ID NO: 732693 - DNA, 1091 bp, Homo sapiens
gcgtctagaggatctccatctcaggcaggacgatctcaggccatgggacagggaggatcctgtctggccttcagtttccatccccaggatccacttggtctgtgagatgctagaactccctttcaacagaattcacttgtggctattagagctggaggcacccttagccacttcattcccctgatgggccctgactcttccccataatcactgaccagccttgacactccccttgcaaaccatcccagcactgcaccccaggcagccactcctagccttggcctttggcatgagatggaggcctccttattccccatctggtccagttccttcacttacagatggcagcagtgaggccttggggtagaaggatcctccaaagtcacacagagtgcctgcctcctggtcccctcagctctgcctctgcagcccactgcctgcccagtgccatcaggatgagcagtaccggccaagcataatgacagagagaggcagatttcagggaagccctgactgtgtggagctaaggacacagtggagattctctggcactctgaggtctctgtggcaggcctggtcaggctctccaggtggtcagagggcccagtggtgccccagcacggtggtgcccaagccaaccctgtgactgacatgtacgattcactcctttgagtctttggatgccaactcagccccctgacctggaggcagccggccaaggcctctagggaagagccccccactgcagacatgacccgagtaactttctgctgatgaacaaatctgcaccccacttcagacctcggtgggcattcacaccaccccccatgccaccggctccactttccccttttattaatacattcacccagataatcattaaaatttattatgtactattcaatctttacacaatgtcacgggaccagtattgtttacccaattttttataaggacactgaagcttagaggagtgaaatgttttgagtgttatttcagagagcaaatggcaaagactggatccaaacccatcttcctggacctgaagttcatgctcccagccaaccgtgacaagtgggccgagctgatat

SEQ ID NO: 732694 - DNA, 1124 bp, Homo sapiens
gcgtctagaggatctccatctcaggcaggacgatctcaggccatgggacagggaggatcctgtctggccttcagtttccatccccaggatccacttggtctgtgagatgctagaactccctttcaacagaattcacttgtggctattagagctggaggcacccttagccacttcattcccctgatgggccctgactcttccccataatcactgaccagccttgacactccccttgcaaaccatcccagcactgcaccccaggcagccactcctagccttggcctttggcatgagatggaggcctccttattccccatctggtccagttccttcacttacagatggcagcagtgaggccttggggtagaaggatcctccaaagtcacacagagtgcctgcctcctggtcccctcagctctgcctctgcagcccactgcctgcccagtgccatcaggatgagcagtaccggccaagcataatgacagagagaggcagatttcagggaagccctgactgtgtggagctaaggacacagtggagattctctggcactctgaggtctctgtggcaggcctggtcaggctctccaggtggtcagagggcccagtggtgccccagcacggtggtgcccaagccaaccctgtgactgacatgtacgattcactcctttgagtctttggatgccaactcagccccctgacctggaggcagccggccaaggcctctagggaagagccccccactgcagacatgacccgagtaactttctgctgatgaacaaatctgcaccccacttcagacctcggtgggcattcacaccaccccccatgccaccggctccactttccccttttattaatacattcacccagataatcattaaaatttattatgtactattcaatctttacacaatgtcacgggaccagtattgtttacccaattttttataaggacactgaagcttagaggagtgaaatgttttgagtgttatttcagagagcaaatggcaaagactggatccaaacccatcttcctggacctgaagttcatgctcccagccaccccacccctgagctgaataaagatgatttaagcataaaaaatcgttagtgtgttcacat

SEQ ID NO: 732695 - DNA, 2142 bp, Homo sapiens
gctctaacttggaggcagagacccaagcagctggaggctctgtgtgtgggtcgctgatttcttggagcctgaaaagaaggagcagcgactggacccagagccatgtggctgtgccctctggccctcaacctcatcttgatggcagcctctggtgctgcgtgcgaagtgaaggacgtttgtgttggaagccctggtatccccggcactcctggatcccacggcctgccaggcagggacgggagagatggtgtcaaaggagaccctggccctccaggccccatgggtccgcctggagaaacaccatgtcctcctgggaataatgggctgcctggagcccctggtgtccctggagagcgtggagagaagggggaggctggcgagagaggccctccagggcttccagctcatctagatgaggagctccaagccacactccacgacttcagacatcaaatcctgcagacaaggggagccctcagtctgcagggctccataatgacagtaggagagaaggtcttctccagcaatgggcagtccatcacttttgatgccattcaggaggcatgtgccagagcaggcggccgcattgctgtcccaaggaatccagaggaaaatgaggccattgcaagcttcgtgaagaagtacaacacatatgcctatgtaggcctgactgagggtcccagccctggagacttccgctactcagatgggacccctgtaaactacaccaactggtaccgaggggagcctgcaggtcggggaaaagagcagtgtgtggagatgtacacagatgggcagtggaatgacaggaactgcctgtactcccgactgaccatctgtgagttctgagaggcatttaggccatgggacagggaggatcctgtctggccttcagtttccatccccaggatccacttggtctgtgagatgctagaactccctttcaacagaattcacttgtggctattagagctggaggcacccttagccacttcattcccctgatgggccctgactcttccccataatcactgaccagccttgacactccccttgcaaaccatcccagcactgcaccccaggcagccactcctagccttggcctttggcatgagatggaggcctccttattccccatctggtccagttccttcacttacagatggcagcagtgaggccttggggtagaaggatcctccaaagtcacacagagtgccatcaggatgagcagtaccggccaagcataatgacagagagaggcagatttcagggaagccctgactgtgtggagctaaggacacagtggagattctctggcactctgaggtctctgtggcaggcctggtcaggctctccaggtggtcagagggcccagtggtgccccagcacggtggtgcccaagccaaccctgtgactgacatgtacgattcactcctttgagtctttggatgccaactcagccccctgacctggaggcagccggccaaggcctctagggaagagccccccactgcagacatgacccgagtaactttctgctgatgaacaaatctgcaccccacttcagacctcggtgggcattcacaccaccccccatgccaccggctccactttccccttttattaatacattcacccagataatcattaaaattaacatgtgccaggtcttaggatgtgtcttggggtgggcacagtacccggtgactcttggggatatttatttattttccctgagcctatatcttcatctgtgaaatggggataaaaatacttgttgctgtcacaattattaccatctctccagctagcaaaattactaccagagccgttactacacacaaaggctattgaccgagcacataccatgtgccacacaccttgacaaaatcttttaatacagtttattatgtactattcaatctttacacaatgtcacgggaccagtattgtttacccaattttttataaggacactgaagcttagaggagtgaaatgttttgagtgttatttcagagagcaaatggcaaagactggatccaaacccatcttcctggacctgaagttcatgctcccagccaccccacccctgagctgaataaagatgatttaagcataaaaaatcgttagtgtgttcacat

SEQ ID NO: 732696 - DNA, 2109 bp, Homo sapiens
gctctaacttggaggcagagacccaagcagctggaggctctgtgtgtgggtcgctgatttcttggagcctgaaaagaaggagcagcgactggacccagagccatgtggctgtgccctctggccctcaacctcatcttgatggcagcctctggtgctgcgtgcgaagtgaaggacgtttgtgttggaagccctggtatccccggcactcctggatcccacggcctgccaggcagggacgggagagatggtgtcaaaggagaccctggccctccaggccccatgggtccgcctggagaaacaccatgtcctcctgggaataatgggctgcctggagcccctggtgtccctggagagcgtggagagaagggggaggctggcgagagaggccctccagggcttccagctcatctagatgaggagctccaagccacactccacgacttcagacatcaaatcctgcagacaaggggagccctcagtctgcagggctccataatgacagtaggagagaaggtcttctccagcaatgggcagtccatcacttttgatgccattcaggaggcatgtgccagagcaggcggccgcattgctgtcccaaggaatccagaggaaaatgaggccattgcaagcttcgtgaagaagtacaacacatatgcctatgtaggcctgactgagggtcccagccctggagacttccgctactcagatgggacccctgtaaactacaccaactggtaccgaggggagcctgcaggtcggggaaaagagcagtgtgtggagatgtacacagatgggcagtggaatgacaggaactgcctgtactcccgactgaccatctgtgagttctgagaggcatttaggccatgggacagggaggatcctgtctggccttcagtttccatccccaggatccacttggtctgtgagatgctagaactccctttcaacagaattcacttgtggctattagagctggaggcacccttagccacttcattcccctgatgggccctgactcttccccataatcactgaccagccttgacactccccttgcaaaccatcccagcactgcaccccaggcagccactcctagccttggcctttggcatgagatggaggcctccttattccccatctggtccagttccttcacttacagatggcagcagtgaggccttggggtagaaggatcctccaaagtcacacagagtgccatcaggatgagcagtaccggccaagcataatgacagagagaggcagatttcagggaagccctgactgtgtggagctaaggacacagtggagattctctggcactctgaggtctctgtggcaggcctggtcaggctctccaggtggtcagagggcccagtggtgccccagcacggtggtgcccaagccaaccctgtgactgacatgtacgattcactcctttgagtctttggatgccaactcagccccctgacctggaggcagccggccaaggcctctagggaagagccccccactgcagacatgacccgagtaactttctgctgatgaacaaatctgcaccccacttcagacctcggtgggcattcacaccaccccccatgccaccggctccactttccccttttattaatacattcacccagataatcattaaaattaacatgtgccaggtcttaggatgtgtcttggggtgggcacagtacccggtgactcttggggatatttatttattttccctgagcctatatcttcatctgtgaaatggggataaaaatacttgttgctgtcacaattattaccatctctccagctagcaaaattactaccagagccgttactacacacaaaggctattgaccgagcacataccatgtgccacacaccttgacaaaatcttttaatacagtttattatgtactattcaatctttacacaatgtcacgggaccagtattgtttacccaattttttataaggacactgaagcttagaggagtgaaatgttttgagtgttatttcagagagcaaatggcaaagactggatccaaacccatcttcctggacctgaagttcatgctcccagccaaccgtgacaagtgggccgagctgatat

SEQ ID NO: 732697 - DNA, 1979 bp, Homo sapiens
gctctaacttggaggcagagacccaagcagctggaggctctgtgtgtgggtcgctgatttcttggagcctgaaaagaaggagcagcgactggacccagagccatgtggctgtgccctctggccctcaacctcatcttgatggcagcctctggtgctgcgtgcgaagtgaaggacgtttgtgttggaagccctggtatccccggcactcctggatcccacggcctgccaggcagggacgggagagatggtgtcaaaggagaccctggccctccaggccccatgggtccgcctggagaaacaccatgtcctcctgggaataatgggctgcctggagcccctggtgtccctggagagcgtggagagaagggggaggctggcgagagaggccctccagggcttccagctcatctagatgaggagctccaagccacactccacgacttcagacatcaaatcctgcagacaaggggagccctcagtctgcagggctccataatgacagtaggagagaaggtcttctccagcaatgggcagtccatcacttttgatgccattcaggaggcatgtgccagagcaggcggccgcattgctgtcccaaggaatccagaggaaaatgaggccattgcaagcttcgtgaagaagtacaacacatatgcctatgtaggcctgactgagggtcccagccctggagacttccgctactcagatgggacccctgtaaactacaccaactggtaccgaggggagcctgcaggtcggggaaaagagcagtgtgtggagatgtacacagatgggcagtggaatgacaggaactgcctgtactcccgactgaccatctgtgagttctgagaggcatttaggccatgggacagggaggatcctgtctggccttcagtttccatccccaggatccacttggtctgtgagatgctagaactccctttcaacagaattcacttgtggctattagagctggaggcacccttagccacttcattcccctgatgggccctgactcttccccataatcactgaccagccttgacactccccttgcaaaccatcccagcactgcaccccaggcagccactcctagccttggcctttggcatgagatggaggcctccttattccccatctggtccagttccttcacttacagatggcagcagtgaggccttggggtagaaggatcctccaaagtcacacagagtgccatcaggatgagcagtaccggccaagcataatgacagagagaggcagatttcagggaagccctgactgtgtggagctaaggacacagtggagattctctggcactctgaggtctctgtggcaggcctggtcaggctctccaggtggtcagagggcccagtggtgccccagcacggtggtgcccaagccaaccctgtgactgacatgtacgattcactcctttgagtctttggatgccaactcagccccctgacctggaggcagccggccaaggcctctagggaagagccccccactgcagacatgacccgagtaactttctgctgatgaacaaatctgcaccccacttcagacctcggtgggcattcacaccaccccccatgccaccggctccactttccccttttattaatacattcacccagataatcattaaaattaacatgtgccaggtcttaggatgtgtcttggggtgggcacagtacccggtgactcttggggatatttatttattttccctgagcctatatcttcatctgtgaaatggggataaaaatacttgttgctgtcacaattattaccatctctccagctagcaaaattactaccagagccgttactacacacaaaggctattgaccgagcacataccatgtgccacacaccttgacaaaatcttttaatacagtttattatgtactattcaatctttacacattccccgggggccggtattgcttacccggggagggggggtaccgaca

SEQ ID NO: 732698 - DNA, 1859 bp, Homo sapiens
gctctaacttggaggcagagacccaagcagctggaggctctgtgtgtgggtcgctgatttcttggagcctgaaaagaaggagcagcgactggacccagagccatgtggctgtgccctctggccctcaacctcatcttgatggcagcctctggtgctgcgtgcgaagtgaaggacgtttgtgttggaagccctggtatccccggcactcctggatcccacggcctgccaggcagggacgggagagatggtgtcaaaggagaccctggccctccaggccccatgggtccgcctggagaaacaccatgtcctcctgggaataatgggctgcctggagcccctggtgtccctggagagcgtggagagaagggggaggctggcgagagaggccctccagggcttccagctcatctagatgaggagctccaagccacactccacgacttcagacatcaaatcctgcagacaaggggagccctcagtctgcagggctccataatgacagtaggagagaaggtcttctccagcaatgggcagtccatcacttttgatgccattcaggaggcatgtgccagagcaggcggccgcattgctgtcccaaggaatccagaggaaaatgaggccattgcaagcttcgtgaagaagtacaacacatatgcctatgtaggcctgactgagggtcccagccctggagacttccgctactcagatgggacccctgtaaactacaccaactggtaccgaggggagcctgcaggtcggggaaaagagcagtgtgtggagatgtacacagatgggcagtggaatgacaggaactgcctgtactcccgactgaccatctgtgagttctgagaggcatttaggccatgggacagggaggatcctgtctggccttcagtttccatccccaggatccacttggtctgtgagatgctagaactccctttcaacagaattcacttgtggctattagagctggaggcacccttagccacttcattcccctgatgggccctgactcttccccataatcactgaccagccttgacactccccttgcaaaccatcccagcactgcaccccaggcagccactcctagccttggcctttggcatgagatggaggcctccttattccccatctggtccagttccttcacttacagatggcagcagtgaggccttggggtagaaggatcctccaaagtcacacagagtgccatcaggatgagcagtaccggccaagcataatgacagagagaggcagatttcagggaagccctgactgtgtggagctaaggacacagtggagattctctggcactctgaggtctctgtggcaggcctggtcaggctctccaggtggtcagagggcccagtggtgccccagcacggtggtgcccaagccaaccctgtgactgacatgtacgattcactcctttgagtctttggatgccaactcagccccctgacctggaggcagccggccaaggcctctagggaagagccccccactgcagacatgacccgagtaactttctgctgatgaacaaatctgcaccccacttcagacctcggtgggcattcacaccaccccccatgccaccggctccactttccccttttattaatacattcacccagataatcattaaaatttattatgtactattcaatctttacacaatgtcacgggaccagtattgtttacccaattttttataaggacactgaagcttagaggagtgaaatgttttgagtgttatttcagagagcaaatggcaaagactggatccaaacccatcttcctggacctgaagttcatgctcccagccaaccgtgacaagtgggccgagctgatat

SEQ ID NO: 732699 - DNA, 1892 bp, Homo sapiens
gctctaacttggaggcagagacccaagcagctggaggctctgtgtgtgggtcgctgatttcttggagcctgaaaagaaggagcagcgactggacccagagccatgtggctgtgccctctggccctcaacctcatcttgatggcagcctctggtgctgcgtgcgaagtgaaggacgtttgtgttggaagccctggtatccccggcactcctggatcccacggcctgccaggcagggacgggagagatggtgtcaaaggagaccctggccctccaggccccatgggtccgcctggagaaacaccatgtcctcctgggaataatgggctgcctggagcccctggtgtccctggagagcgtggagagaagggggaggctggcgagagaggccctccagggcttccagctcatctagatgaggagctccaagccacactccacgacttcagacatcaaatcctgcagacaaggggagccctcagtctgcagggctccataatgacagtaggagagaaggtcttctccagcaatgggcagtccatcacttttgatgccattcaggaggcatgtgccagagcaggcggccgcattgctgtcccaaggaatccagaggaaaatgaggccattgcaagcttcgtgaagaagtacaacacatatgcctatgtaggcctgactgagggtcccagccctggagacttccgctactcagatgggacccctgtaaactacaccaactggtaccgaggggagcctgcaggtcggggaaaagagcagtgtgtggagatgtacacagatgggcagtggaatgacaggaactgcctgtactcccgactgaccatctgtgagttctgagaggcatttaggccatgggacagggaggatcctgtctggccttcagtttccatccccaggatccacttggtctgtgagatgctagaactccctttcaacagaattcacttgtggctattagagctggaggcacccttagccacttcattcccctgatgggccctgactcttccccataatcactgaccagccttgacactccccttgcaaaccatcccagcactgcaccccaggcagccactcctagccttggcctttggcatgagatggaggcctccttattccccatctggtccagttccttcacttacagatggcagcagtgaggccttggggtagaaggatcctccaaagtcacacagagtgccatcaggatgagcagtaccggccaagcataatgacagagagaggcagatttcagggaagccctgactgtgtggagctaaggacacagtggagattctctggcactctgaggtctctgtggcaggcctggtcaggctctccaggtggtcagagggcccagtggtgccccagcacggtggtgcccaagccaaccctgtgactgacatgtacgattcactcctttgagtctttggatgccaactcagccccctgacctggaggcagccggccaaggcctctagggaagagccccccactgcagacatgacccgagtaactttctgctgatgaacaaatctgcaccccacttcagacctcggtgggcattcacaccaccccccatgccaccggctccactttccccttttattaatacattcacccagataatcattaaaatttattatgtactattcaatctttacacaatgtcacgggaccagtattgtttacccaattttttataaggacactgaagcttagaggagtgaaatgttttgagtgttatttcagagagcaaatggcaaagactggatccaaacccatcttcctggacctgaagttcatgctcccagccaccccacccctgagctgaataaagatgatttaagcataaaaaatcgttagtgtgttcacat

SEQ ID NO: 732700 - DNA, 2288 bp, Homo sapiens
gctctaacttggaggcagagacccaagcagctggaggctctgtgtgtgggtgagtttagccacatcccctaggtgttctccagcttgaggatcgcaggcagagaggaccagcccagcagccacaggcctgaccaaggcccaggtcgctgatttcttggagcctgaaaagaaggagcagcgactggacccagagccatgtggctgtgccctctggccctcaacctcatcttgatggcagcctctggtgctgcgtgcgaagtgaaggacgtttgtgttggaagccctggtatccccggcactcctggatcccacggcctgccaggcagggacgggagagatggtgtcaaaggagaccctggccctccaggccccatgggtccgcctggagaaacaccatgtcctcctgggaataatgggctgcctggagcccctggtgtccctggagagcgtggagagaagggggaggctggcgagagaggccctccagggcttccagctcatctagatgaggagctccaagccacactccacgacttcagacatcaaatcctgcagacaaggggagccctcagtctgcagggctccataatgacagtaggagagaaggtcttctccagcaatgggcagtccatcacttttgatgccattcaggaggcatgtgccagagcaggcggccgcattgctgtcccaaggaatccagaggaaaatgaggccattgcaagcttcgtgaagaagtacaacacatatgcctatgtaggcctgactgagggtcccagccctggagacttccgctactcagatgggacccctgtaaactacaccaactggtaccgaggggagcctgcaggtcggggaaaagagcagtgtgtggagatgtacacagatgggcagtggaatgacaggaactgcctgtactcccgactgaccatctgtgagttctgagaggcatttaggccatgggacagggaggatcctgtctggccttcagtttccatccccaggatccacttggtctgtgagatgctagaactccctttcaacagaattcacttgtggctattagagctggaggcacccttagccacttcattcccctgatgggccctgactcttccccataatcactgaccagccttgacactccccttgcaaaccatcccagcactgcaccccaggcagccactcctagccttggcctttggcatgagatggaggcctccttattccccatctggtccagttccttcacttacagatggcagcagtgaggccttggggtagaaggatcctccaaagtcacacagagtgcctgcctcctggtcccctcagctctgcctctgcagcccactgcctgcccagtgccatcaggatgagcagtaccggccaagcataatgacagagagaggcagatttcagggaagccctgactgtgtggagctaaggacacagtggagattctctggcactctgaggtctctgtggcaggcctggtcaggctctccaggtggtcagagggcccagtggtgccccagcacggtggtgcccaagccaaccctgtgactgacatgtacgattcactcctttgagtctttggatgccaactcagccccctgacctggaggcagccggccaaggcctctagggaagagccccccactgcagacatgacccgagtaactttctgctgatgaacaaatctgcaccccacttcagacctcggtgggcattcacaccaccccccatgccaccggctccactttccccttttattaatacattcacccagataatcattaaaattaacatgtgccaggtcttaggatgtgtcttggggtgggcacagtacccggtgactcttggggatatttatttattttccctgagcctatatcttcatctgtgaaatggggataaaaatacttgttgctgtcacaattattaccatctctccagctagcaaaattactaccagagccgttactacacacaaaggctattgaccgagcacataccatgtgccacacaccttgacaaaatcttttaatacagtttattatgtactattcaatctttacacaatgtcacgggaccagtattgtttacccaattttttataaggacactgaagcttagaggagtgaaatgttttgagtgttatttcagagagcaaatggcaaagactggatccaaacccatcttcctggacctgaagttcatgctcccagccaccccacccctgagctgaataaagatgatttaagcataaaaaatcgttagtgtgttcacat

SEQ ID NO: 732701 - DNA, 2255 bp, Homo sapiens
gctctaacttggaggcagagacccaagcagctggaggctctgtgtgtgggtgagtttagccacatcccctaggtgttctccagcttgaggatcgcaggcagagaggaccagcccagcagccacaggcctgaccaaggcccaggtcgctgatttcttggagcctgaaaagaaggagcagcgactggacccagagccatgtggctgtgccctctggccctcaacctcatcttgatggcagcctctggtgctgcgtgcgaagtgaaggacgtttgtgttggaagccctggtatccccggcactcctggatcccacggcctgccaggcagggacgggagagatggtgtcaaaggagaccctggccctccaggccccatgggtccgcctggagaaacaccatgtcctcctgggaataatgggctgcctggagcccctggtgtccctggagagcgtggagagaagggggaggctggcgagagaggccctccagggcttccagctcatctagatgaggagctccaagccacactccacgacttcagacatcaaatcctgcagacaaggggagccctcagtctgcagggctccataatgacagtaggagagaaggtcttctccagcaatgggcagtccatcacttttgatgccattcaggaggcatgtgccagagcaggcggccgcattgctgtcccaaggaatccagaggaaaatgaggccattgcaagcttcgtgaagaagtacaacacatatgcctatgtaggcctgactgagggtcccagccctggagacttccgctactcagatgggacccctgtaaactacaccaactggtaccgaggggagcctgcaggtcggggaaaagagcagtgtgtggagatgtacacagatgggcagtggaatgacaggaactgcctgtactcccgactgaccatctgtgagttctgagaggcatttaggccatgggacagggaggatcctgtctggccttcagtttccatccccaggatccacttggtctgtgagatgctagaactccctttcaacagaattcacttgtggctattagagctggaggcacccttagccacttcattcccctgatgggccctgactcttccccataatcactgaccagccttgacactccccttgcaaaccatcccagcactgcaccccaggcagccactcctagccttggcctttggcatgagatggaggcctccttattccccatctggtccagttccttcacttacagatggcagcagtgaggccttggggtagaaggatcctccaaagtcacacagagtgcctgcctcctggtcccctcagctctgcctctgcagcccactgcctgcccagtgccatcaggatgagcagtaccggccaagcataatgacagagagaggcagatttcagggaagccctgactgtgtggagctaaggacacagtggagattctctggcactctgaggtctctgtggcaggcctggtcaggctctccaggtggtcagagggcccagtggtgccccagcacggtggtgcccaagccaaccctgtgactgacatgtacgattcactcctttgagtctttggatgccaactcagccccctgacctggaggcagccggccaaggcctctagggaagagccccccactgcagacatgacccgagtaactttctgctgatgaacaaatctgcaccccacttcagacctcggtgggcattcacaccaccccccatgccaccggctccactttccccttttattaatacattcacccagataatcattaaaattaacatgtgccaggtcttaggatgtgtcttggggtgggcacagtacccggtgactcttggggatatttatttattttccctgagcctatatcttcatctgtgaaatggggataaaaatacttgttgctgtcacaattattaccatctctccagctagcaaaattactaccagagccgttactacacacaaaggctattgaccgagcacataccatgtgccacacaccttgacaaaatcttttaatacagtttattatgtactattcaatctttacacaatgtcacgggaccagtattgtttacccaattttttataaggacactgaagcttagaggagtgaaatgttttgagtgttatttcagagagcaaatggcaaagactggatccaaacccatcttcctggacctgaagttcatgctcccagccaaccgtgacaagtgggccgagctgatat

SEQ ID NO: 732702 - DNA, 2125 bp, Homo sapiens
gctctaacttggaggcagagacccaagcagctggaggctctgtgtgtgggtgagtttagccacatcccctaggtgttctccagcttgaggatcgcaggcagagaggaccagcccagcagccacaggcctgaccaaggcccaggtcgctgatttcttggagcctgaaaagaaggagcagcgactggacccagagccatgtggctgtgccctctggccctcaacctcatcttgatggcagcctctggtgctgcgtgcgaagtgaaggacgtttgtgttggaagccctggtatccccggcactcctggatcccacggcctgccaggcagggacgggagagatggtgtcaaaggagaccctggccctccaggccccatgggtccgcctggagaaacaccatgtcctcctgggaataatgggctgcctggagcccctggtgtccctggagagcgtggagagaagggggaggctggcgagagaggccctccagggcttccagctcatctagatgaggagctccaagccacactccacgacttcagacatcaaatcctgcagacaaggggagccctcagtctgcagggctccataatgacagtaggagagaaggtcttctccagcaatgggcagtccatcacttttgatgccattcaggaggcatgtgccagagcaggcggccgcattgctgtcccaaggaatccagaggaaaatgaggccattgcaagcttcgtgaagaagtacaacacatatgcctatgtaggcctgactgagggtcccagccctggagacttccgctactcagatgggacccctgtaaactacaccaactggtaccgaggggagcctgcaggtcggggaaaagagcagtgtgtggagatgtacacagatgggcagtggaatgacaggaactgcctgtactcccgactgaccatctgtgagttctgagaggcatttaggccatgggacagggaggatcctgtctggccttcagtttccatccccaggatccacttggtctgtgagatgctagaactccctttcaacagaattcacttgtggctattagagctggaggcacccttagccacttcattcccctgatgggccctgactcttccccataatcactgaccagccttgacactccccttgcaaaccatcccagcactgcaccccaggcagccactcctagccttggcctttggcatgagatggaggcctccttattccccatctggtccagttccttcacttacagatggcagcagtgaggccttggggtagaaggatcctccaaagtcacacagagtgcctgcctcctggtcccctcagctctgcctctgcagcccactgcctgcccagtgccatcaggatgagcagtaccggccaagcataatgacagagagaggcagatttcagggaagccctgactgtgtggagctaaggacacagtggagattctctggcactctgaggtctctgtggcaggcctggtcaggctctccaggtggtcagagggcccagtggtgccccagcacggtggtgcccaagccaaccctgtgactgacatgtacgattcactcctttgagtctttggatgccaactcagccccctgacctggaggcagccggccaaggcctctagggaagagccccccactgcagacatgacccgagtaactttctgctgatgaacaaatctgcaccccacttcagacctcggtgggcattcacaccaccccccatgccaccggctccactttccccttttattaatacattcacccagataatcattaaaattaacatgtgccaggtcttaggatgtgtcttggggtgggcacagtacccggtgactcttggggatatttatttattttccctgagcctatatcttcatctgtgaaatggggataaaaatacttgttgctgtcacaattattaccatctctccagctagcaaaattactaccagagccgttactacacacaaaggctattgaccgagcacataccatgtgccacacaccttgacaaaatcttttaatacagtttattatgtactattcaatctttacacattccccgggggccggtattgcttacccggggagggggggtaccgaca

SEQ ID NO: 732703 - DNA, 2235 bp, Homo sapiens
gctctaacttggaggcagagacccaagcagctggaggctctgtgtgtgggtgagtttagccacatcccctaggtgttctccagcttgaggatcgcaggcagagaggaccagcccagcagccacaggcctgaccaaggcccaggtcgctgatttcttggagcctgaaaagaaggagcagcgactggacccagagccatgtggctgtgccctctggccctcaacctcatcttgatggcagcctctggtgctgcgtgcgaagtgaaggacgtttgtgttggaagccctggtatccccggcactcctggatcccacggcctgccaggcagggacgggagagatggtgtcaaaggagaccctggccctccaggccccatgggtccgcctggagaaacaccatgtcctcctgggaataatgggctgcctggagcccctggtgtccctggagagcgtggagagaagggggaggctggcgagagaggccctccagggcttccagctcatctagatgaggagctccaagccacactccacgacttcagacatcaaatcctgcagacaaggggagccctcagtctgcagggctccataatgacagtaggagagaaggtcttctccagcaatgggcagtccatcacttttgatgccattcaggaggcatgtgccagagcaggcggccgcattgctgtcccaaggaatccagaggaaaatgaggccattgcaagcttcgtgaagaagtacaacacatatgcctatgtaggcctgactgagggtcccagccctggagacttccgctactcagatgggacccctgtaaactacaccaactggtaccgaggggagcctgcaggtcggggaaaagagcagtgtgtggagatgtacacagatgggcagtggaatgacaggaactgcctgtactcccgactgaccatctgtgagttctgagaggcatttaggccatgggacagggaggatcctgtctggccttcagtttccatccccaggatccacttggtctgtgagatgctagaactccctttcaacagaattcacttgtggctattagagctggaggcacccttagccacttcattcccctgatgggccctgactcttccccataatcactgaccagccttgacactccccttgcaaaccatcccagcactgcaccccaggcagccactcctagccttggcctttggcatgagatggaggcctccttattccccatctggtccagttccttcacttacagatggcagcagtgaggccttggggtagaaggatcctccaaagtcacacagagtgccatcaggatgagcagtaccggccaagcataatgacagagagaggcagatttcagggaagccctgactgtgtggagctaaggacacagtggagattctctggcactctgaggtctctgtggcaggcctggtcaggctctccaggtggtcagagggcccagtggtgccccagcacggtggtgcccaagccaaccctgtgactgacatgtacgattcactcctttgagtctttggatgccaactcagccccctgacctggaggcagccggccaaggcctctagggaagagccccccactgcagacatgacccgagtaactttctgctgatgaacaaatctgcaccccacttcagacctcggtgggcattcacaccaccccccatgccaccggctccactttccccttttattaatacattcacccagataatcattaaaattaacatgtgccaggtcttaggatgtgtcttggggtgggcacagtacccggtgactcttggggatatttatttattttccctgagcctatatcttcatctgtgaaatggggataaaaatacttgttgctgtcacaattattaccatctctccagctagcaaaattactaccagagccgttactacacacaaaggctattgaccgagcacataccatgtgccacacaccttgacaaaatcttttaatacagtttattatgtactattcaatctttacacaatgtcacgggaccagtattgtttacccaattttttataaggacactgaagcttagaggagtgaaatgttttgagtgttatttcagagagcaaatggcaaagactggatccaaacccatcttcctggacctgaagttcatgctcccagccaccccacccctgagctgaataaagatgatttaagcataaaaaatcgttagtgtgttcacat

SEQ ID NO: 732704 - DNA, 2202 bp, Homo sapiens
gctctaacttggaggcagagacccaagcagctggaggctctgtgtgtgggtgagtttagccacatcccctaggtgttctccagcttgaggatcgcaggcagagaggaccagcccagcagccacaggcctgaccaaggcccaggtcgctgatttcttggagcctgaaaagaaggagcagcgactggacccagagccatgtggctgtgccctctggccctcaacctcatcttgatggcagcctctggtgctgcgtgcgaagtgaaggacgtttgtgttggaagccctggtatccccggcactcctggatcccacggcctgccaggcagggacgggagagatggtgtcaaaggagaccctggccctccaggccccatgggtccgcctggagaaacaccatgtcctcctgggaataatgggctgcctggagcccctggtgtccctggagagcgtggagagaagggggaggctggcgagagaggccctccagggcttccagctcatctagatgaggagctccaagccacactccacgacttcagacatcaaatcctgcagacaaggggagccctcagtctgcagggctccataatgacagtaggagagaaggtcttctccagcaatgggcagtccatcacttttgatgccattcaggaggcatgtgccagagcaggcggccgcattgctgtcccaaggaatccagaggaaaatgaggccattgcaagcttcgtgaagaagtacaacacatatgcctatgtaggcctgactgagggtcccagccctggagacttccgctactcagatgggacccctgtaaactacaccaactggtaccgaggggagcctgcaggtcggggaaaagagcagtgtgtggagatgtacacagatgggcagtggaatgacaggaactgcctgtactcccgactgaccatctgtgagttctgagaggcatttaggccatgggacagggaggatcctgtctggccttcagtttccatccccaggatccacttggtctgtgagatgctagaactccctttcaacagaattcacttgtggctattagagctggaggcacccttagccacttcattcccctgatgggccctgactcttccccataatcactgaccagccttgacactccccttgcaaaccatcccagcactgcaccccaggcagccactcctagccttggcctttggcatgagatggaggcctccttattccccatctggtccagttccttcacttacagatggcagcagtgaggccttggggtagaaggatcctccaaagtcacacagagtgccatcaggatgagcagtaccggccaagcataatgacagagagaggcagatttcagggaagccctgactgtgtggagctaaggacacagtggagattctctggcactctgaggtctctgtggcaggcctggtcaggctctccaggtggtcagagggcccagtggtgccccagcacggtggtgcccaagccaaccctgtgactgacatgtacgattcactcctttgagtctttggatgccaactcagccccctgacctggaggcagccggccaaggcctctagggaagagccccccactgcagacatgacccgagtaactttctgctgatgaacaaatctgcaccccacttcagacctcggtgggcattcacaccaccccccatgccaccggctccactttccccttttattaatacattcacccagataatcattaaaattaacatgtgccaggtcttaggatgtgtcttggggtgggcacagtacccggtgactcttggggatatttatttattttccctgagcctatatcttcatctgtgaaatggggataaaaatacttgttgctgtcacaattattaccatctctccagctagcaaaattactaccagagccgttactacacacaaaggctattgaccgagcacataccatgtgccacacaccttgacaaaatcttttaatacagtttattatgtactattcaatctttacacaatgtcacgggaccagtattgtttacccaattttttataaggacactgaagcttagaggagtgaaatgttttgagtgttatttcagagagcaaatggcaaagactggatccaaacccatcttcctggacctgaagttcatgctcccagccaaccgtgacaagtgggccgagctgatat

SEQ ID NO: 732705 - DNA, 2072 bp, Homo sapiens
gctctaacttggaggcagagacccaagcagctggaggctctgtgtgtgggtgagtttagccacatcccctaggtgttctccagcttgaggatcgcaggcagagaggaccagcccagcagccacaggcctgaccaaggcccaggtcgctgatttcttggagcctgaaaagaaggagcagcgactggacccagagccatgtggctgtgccctctggccctcaacctcatcttgatggcagcctctggtgctgcgtgcgaagtgaaggacgtttgtgttggaagccctggtatccccggcactcctggatcccacggcctgccaggcagggacgggagagatggtgtcaaaggagaccctggccctccaggccccatgggtccgcctggagaaacaccatgtcctcctgggaataatgggctgcctggagcccctggtgtccctggagagcgtggagagaagggggaggctggcgagagaggccctccagggcttccagctcatctagatgaggagctccaagccacactccacgacttcagacatcaaatcctgcagacaaggggagccctcagtctgcagggctccataatgacagtaggagagaaggtcttctccagcaatgggcagtccatcacttttgatgccattcaggaggcatgtgccagagcaggcggccgcattgctgtcccaaggaatccagaggaaaatgaggccattgcaagcttcgtgaagaagtacaacacatatgcctatgtaggcctgactgagggtcccagccctggagacttccgctactcagatgggacccctgtaaactacaccaactggtaccgaggggagcctgcaggtcggggaaaagagcagtgtgtggagatgtacacagatgggcagtggaatgacaggaactgcctgtactcccgactgaccatctgtgagttctgagaggcatttaggccatgggacagggaggatcctgtctggccttcagtttccatccccaggatccacttggtctgtgagatgctagaactccctttcaacagaattcacttgtggctattagagctggaggcacccttagccacttcattcccctgatgggccctgactcttccccataatcactgaccagccttgacactccccttgcaaaccatcccagcactgcaccccaggcagccactcctagccttggcctttggcatgagatggaggcctccttattccccatctggtccagttccttcacttacagatggcagcagtgaggccttggggtagaaggatcctccaaagtcacacagagtgccatcaggatgagcagtaccggccaagcataatgacagagagaggcagatttcagggaagccctgactgtgtggagctaaggacacagtggagattctctggcactctgaggtctctgtggcaggcctggtcaggctctccaggtggtcagagggcccagtggtgccccagcacggtggtgcccaagccaaccctgtgactgacatgtacgattcactcctttgagtctttggatgccaactcagccccctgacctggaggcagccggccaaggcctctagggaagagccccccactgcagacatgacccgagtaactttctgctgatgaacaaatctgcaccccacttcagacctcggtgggcattcacaccaccccccatgccaccggctccactttccccttttattaatacattcacccagataatcattaaaattaacatgtgccaggtcttaggatgtgtcttggggtgggcacagtacccggtgactcttggggatatttatttattttccctgagcctatatcttcatctgtgaaatggggataaaaatacttgttgctgtcacaattattaccatctctccagctagcaaaattactaccagagccgttactacacacaaaggctattgaccgagcacataccatgtgccacacaccttgacaaaatcttttaatacagtttattatgtactattcaatctttacacattccccgggggccggtattgcttacccggggagggggggtaccgaca

SEQ ID NO: 732706 - DNA, 1952 bp, Homo sapiens
gctctaacttggaggcagagacccaagcagctggaggctctgtgtgtgggtgagtttagccacatcccctaggtgttctccagcttgaggatcgcaggcagagaggaccagcccagcagccacaggcctgaccaaggcccaggtcgctgatttcttggagcctgaaaagaaggagcagcgactggacccagagccatgtggctgtgccctctggccctcaacctcatcttgatggcagcctctggtgctgcgtgcgaagtgaaggacgtttgtgttggaagccctggtatccccggcactcctggatcccacggcctgccaggcagggacgggagagatggtgtcaaaggagaccctggccctccaggccccatgggtccgcctggagaaacaccatgtcctcctgggaataatgggctgcctggagcccctggtgtccctggagagcgtggagagaagggggaggctggcgagagaggccctccagggcttccagctcatctagatgaggagctccaagccacactccacgacttcagacatcaaatcctgcagacaaggggagccctcagtctgcagggctccataatgacagtaggagagaaggtcttctccagcaatgggcagtccatcacttttgatgccattcaggaggcatgtgccagagcaggcggccgcattgctgtcccaaggaatccagaggaaaatgaggccattgcaagcttcgtgaagaagtacaacacatatgcctatgtaggcctgactgagggtcccagccctggagacttccgctactcagatgggacccctgtaaactacaccaactggtaccgaggggagcctgcaggtcggggaaaagagcagtgtgtggagatgtacacagatgggcagtggaatgacaggaactgcctgtactcccgactgaccatctgtgagttctgagaggcatttaggccatgggacagggaggatcctgtctggccttcagtttccatccccaggatccacttggtctgtgagatgctagaactccctttcaacagaattcacttgtggctattagagctggaggcacccttagccacttcattcccctgatgggccctgactcttccccataatcactgaccagccttgacactccccttgcaaaccatcccagcactgcaccccaggcagccactcctagccttggcctttggcatgagatggaggcctccttattccccatctggtccagttccttcacttacagatggcagcagtgaggccttggggtagaaggatcctccaaagtcacacagagtgccatcaggatgagcagtaccggccaagcataatgacagagagaggcagatttcagggaagccctgactgtgtggagctaaggacacagtggagattctctggcactctgaggtctctgtggcaggcctggtcaggctctccaggtggtcagagggcccagtggtgccccagcacggtggtgcccaagccaaccctgtgactgacatgtacgattcactcctttgagtctttggatgccaactcagccccctgacctggaggcagccggccaaggcctctagggaagagccccccactgcagacatgacccgagtaactttctgctgatgaacaaatctgcaccccacttcagacctcggtgggcattcacaccaccccccatgccaccggctccactttccccttttattaatacattcacccagataatcattaaaatttattatgtactattcaatctttacacaatgtcacgggaccagtattgtttacccaattttttataaggacactgaagcttagaggagtgaaatgttttgagtgttatttcagagagcaaatggcaaagactggatccaaacccatcttcctggacctgaagttcatgctcccagccaaccgtgacaagtgggccgagctgatat

SEQ ID NO: 732707 - DNA, 1985 bp, Homo sapiens
gctctaacttggaggcagagacccaagcagctggaggctctgtgtgtgggtgagtttagccacatcccctaggtgttctccagcttgaggatcgcaggcagagaggaccagcccagcagccacaggcctgaccaaggcccaggtcgctgatttcttggagcctgaaaagaaggagcagcgactggacccagagccatgtggctgtgccctctggccctcaacctcatcttgatggcagcctctggtgctgcgtgcgaagtgaaggacgtttgtgttggaagccctggtatccccggcactcctggatcccacggcctgccaggcagggacgggagagatggtgtcaaaggagaccctggccctccaggccccatgggtccgcctggagaaacaccatgtcctcctgggaataatgggctgcctggagcccctggtgtccctggagagcgtggagagaagggggaggctggcgagagaggccctccagggcttccagctcatctagatgaggagctccaagccacactccacgacttcagacatcaaatcctgcagacaaggggagccctcagtctgcagggctccataatgacagtaggagagaaggtcttctccagcaatgggcagtccatcacttttgatgccattcaggaggcatgtgccagagcaggcggccgcattgctgtcccaaggaatccagaggaaaatgaggccattgcaagcttcgtgaagaagtacaacacatatgcctatgtaggcctgactgagggtcccagccctggagacttccgctactcagatgggacccctgtaaactacaccaactggtaccgaggggagcctgcaggtcggggaaaagagcagtgtgtggagatgtacacagatgggcagtggaatgacaggaactgcctgtactcccgactgaccatctgtgagttctgagaggcatttaggccatgggacagggaggatcctgtctggccttcagtttccatccccaggatccacttggtctgtgagatgctagaactccctttcaacagaattcacttgtggctattagagctggaggcacccttagccacttcattcccctgatgggccctgactcttccccataatcactgaccagccttgacactccccttgcaaaccatcccagcactgcaccccaggcagccactcctagccttggcctttggcatgagatggaggcctccttattccccatctggtccagttccttcacttacagatggcagcagtgaggccttggggtagaaggatcctccaaagtcacacagagtgccatcaggatgagcagtaccggccaagcataatgacagagagaggcagatttcagggaagccctgactgtgtggagctaaggacacagtggagattctctggcactctgaggtctctgtggcaggcctggtcaggctctccaggtggtcagagggcccagtggtgccccagcacggtggtgcccaagccaaccctgtgactgacatgtacgattcactcctttgagtctttggatgccaactcagccccctgacctggaggcagccggccaaggcctctagggaagagccccccactgcagacatgacccgagtaactttctgctgatgaacaaatctgcaccccacttcagacctcggtgggcattcacaccaccccccatgccaccggctccactttccccttttattaatacattcacccagataatcattaaaatttattatgtactattcaatctttacacaatgtcacgggaccagtattgtttacccaattttttataaggacactgaagcttagaggagtgaaatgttttgagtgttatttcagagagcaaatggcaaagactggatccaaacccatcttcctggacctgaagttcatgctcccagccaccccacccctgagctgaataaagatgatttaagcataaaaaatcgttagtgtgttcacat

SEQ ID NO: 732708 - DNA, 2182 bp, Homo sapiens
gctctaacttggaggcagagacccaagcagctggaggctctgtgtgtgggtcgctgatttcttggagcctgaaaagaaggtaactgggcatatgagggacagatggagtgagtcagtgagagcagcgactggacccagagccatgtggctgtgccctctggccctcaacctcatcttgatggcagcctctggtgctgcgtgcgaagtgaaggacgtttgtgttggaagccctggtatccccggcactcctggatcccacggcctgccaggcagggacgggagagatggtgtcaaaggagaccctggccctccaggccccatgggtccgcctggagaaacaccatgtcctcctgggaataatgggctgcctggagcccctggtgtccctggagagcgtggagagaagggggaggctggcgagagaggccctccagggcttccagctcatctagatgaggagctccaagccacactccacgacttcagacatcaaatcctgcagacaaggggagccctcagtctgcagggctccataatgacagtaggagagaaggtcttctccagcaatgggcagtccatcacttttgatgccattcaggaggcatgtgccagagcaggcggccgcattgctgtcccaaggaatccagaggaaaatgaggccattgcaagcttcgtgaagaagtacaacacatatgcctatgtaggcctgactgagggtcccagccctggagacttccgctactcagatgggacccctgtaaactacaccaactggtaccgaggggagcctgcaggtcggggaaaagagcagtgtgtggagatgtacacagatgggcagtggaatgacaggaactgcctgtactcccgactgaccatctgtgagttctgagaggcatttaggccatgggacagggaggatcctgtctggccttcagtttccatccccaggatccacttggtctgtgagatgctagaactccctttcaacagaattcacttgtggctattagagctggaggcacccttagccacttcattcccctgatgggccctgactcttccccataatcactgaccagccttgacactccccttgcaaaccatcccagcactgcaccccaggcagccactcctagccttggcctttggcatgagatggaggcctccttattccccatctggtccagttccttcacttacagatggcagcagtgaggccttggggtagaaggatcctccaaagtcacacagagtgccatcaggatgagcagtaccggccaagcataatgacagagagaggcagatttcagggaagccctgactgtgtggagctaaggacacagtggagattctctggcactctgaggtctctgtggcaggcctggtcaggctctccaggtggtcagagggcccagtggtgccccagcacggtggtgcccaagccaaccctgtgactgacatgtacgattcactcctttgagtctttggatgccaactcagccccctgacctggaggcagccggccaaggcctctagggaagagccccccactgcagacatgacccgagtaactttctgctgatgaacaaatctgcaccccacttcagacctcggtgggcattcacaccaccccccatgccaccggctccactttccccttttattaatacattcacccagataatcattaaaattaacatgtgccaggtcttaggatgtgtcttggggtgggcacagtacccggtgactcttggggatatttatttattttccctgagcctatatcttcatctgtgaaatggggataaaaatacttgttgctgtcacaattattaccatctctccagctagcaaaattactaccagagccgttactacacacaaaggctattgaccgagcacataccatgtgccacacaccttgacaaaatcttttaatacagtttattatgtactattcaatctttacacaatgtcacgggaccagtattgtttacccaattttttataaggacactgaagcttagaggagtgaaatgttttgagtgttatttcagagagcaaatggcaaagactggatccaaacccatcttcctggacctgaagttcatgctcccagccaccccacccctgagctgaataaagatgatttaagcataaaaaatcgttagtgtgttcacat

SEQ ID NO: 732709 - DNA, 2149 bp, Homo sapiens
gctctaacttggaggcagagacccaagcagctggaggctctgtgtgtgggtcgctgatttcttggagcctgaaaagaaggtaactgggcatatgagggacagatggagtgagtcagtgagagcagcgactggacccagagccatgtggctgtgccctctggccctcaacctcatcttgatggcagcctctggtgctgcgtgcgaagtgaaggacgtttgtgttggaagccctggtatccccggcactcctggatcccacggcctgccaggcagggacgggagagatggtgtcaaaggagaccctggccctccaggccccatgggtccgcctggagaaacaccatgtcctcctgggaataatgggctgcctggagcccctggtgtccctggagagcgtggagagaagggggaggctggcgagagaggccctccagggcttccagctcatctagatgaggagctccaagccacactccacgacttcagacatcaaatcctgcagacaaggggagccctcagtctgcagggctccataatgacagtaggagagaaggtcttctccagcaatgggcagtccatcacttttgatgccattcaggaggcatgtgccagagcaggcggccgcattgctgtcccaaggaatccagaggaaaatgaggccattgcaagcttcgtgaagaagtacaacacatatgcctatgtaggcctgactgagggtcccagccctggagacttccgctactcagatgggacccctgtaaactacaccaactggtaccgaggggagcctgcaggtcggggaaaagagcagtgtgtggagatgtacacagatgggcagtggaatgacaggaactgcctgtactcccgactgaccatctgtgagttctgagaggcatttaggccatgggacagggaggatcctgtctggccttcagtttccatccccaggatccacttggtctgtgagatgctagaactccctttcaacagaattcacttgtggctattagagctggaggcacccttagccacttcattcccctgatgggccctgactcttccccataatcactgaccagccttgacactccccttgcaaaccatcccagcactgcaccccaggcagccactcctagccttggcctttggcatgagatggaggcctccttattccccatctggtccagttccttcacttacagatggcagcagtgaggccttggggtagaaggatcctccaaagtcacacagagtgccatcaggatgagcagtaccggccaagcataatgacagagagaggcagatttcagggaagccctgactgtgtggagctaaggacacagtggagattctctggcactctgaggtctctgtggcaggcctggtcaggctctccaggtggtcagagggcccagtggtgccccagcacggtggtgcccaagccaaccctgtgactgacatgtacgattcactcctttgagtctttggatgccaactcagccccctgacctggaggcagccggccaaggcctctagggaagagccccccactgcagacatgacccgagtaactttctgctgatgaacaaatctgcaccccacttcagacctcggtgggcattcacaccaccccccatgccaccggctccactttccccttttattaatacattcacccagataatcattaaaattaacatgtgccaggtcttaggatgtgtcttggggtgggcacagtacccggtgactcttggggatatttatttattttccctgagcctatatcttcatctgtgaaatggggataaaaatacttgttgctgtcacaattattaccatctctccagctagcaaaattactaccagagccgttactacacacaaaggctattgaccgagcacataccatgtgccacacaccttgacaaaatcttttaatacagtttattatgtactattcaatctttacacaatgtcacgggaccagtattgtttacccaattttttataaggacactgaagcttagaggagtgaaatgttttgagtgttatttcagagagcaaatggcaaagactggatccaaacccatcttcctggacctgaagttcatgctcccagccaaccgtgacaagtgggccgagctgatat

SEQ ID NO: 732710 - DNA, 2019 bp, Homo sapiens
gctctaacttggaggcagagacccaagcagctggaggctctgtgtgtgggtcgctgatttcttggagcctgaaaagaaggtaactgggcatatgagggacagatggagtgagtcagtgagagcagcgactggacccagagccatgtggctgtgccctctggccctcaacctcatcttgatggcagcctctggtgctgcgtgcgaagtgaaggacgtttgtgttggaagccctggtatccccggcactcctggatcccacggcctgccaggcagggacgggagagatggtgtcaaaggagaccctggccctccaggccccatgggtccgcctggagaaacaccatgtcctcctgggaataatgggctgcctggagcccctggtgtccctggagagcgtggagagaagggggaggctggcgagagaggccctccagggcttccagctcatctagatgaggagctccaagccacactccacgacttcagacatcaaatcctgcagacaaggggagccctcagtctgcagggctccataatgacagtaggagagaaggtcttctccagcaatgggcagtccatcacttttgatgccattcaggaggcatgtgccagagcaggcggccgcattgctgtcccaaggaatccagaggaaaatgaggccattgcaagcttcgtgaagaagtacaacacatatgcctatgtaggcctgactgagggtcccagccctggagacttccgctactcagatgggacccctgtaaactacaccaactggtaccgaggggagcctgcaggtcggggaaaagagcagtgtgtggagatgtacacagatgggcagtggaatgacaggaactgcctgtactcccgactgaccatctgtgagttctgagaggcatttaggccatgggacagggaggatcctgtctggccttcagtttccatccccaggatccacttggtctgtgagatgctagaactccctttcaacagaattcacttgtggctattagagctggaggcacccttagccacttcattcccctgatgggccctgactcttccccataatcactgaccagccttgacactccccttgcaaaccatcccagcactgcaccccaggcagccactcctagccttggcctttggcatgagatggaggcctccttattccccatctggtccagttccttcacttacagatggcagcagtgaggccttggggtagaaggatcctccaaagtcacacagagtgccatcaggatgagcagtaccggccaagcataatgacagagagaggcagatttcagggaagccctgactgtgtggagctaaggacacagtggagattctctggcactctgaggtctctgtggcaggcctggtcaggctctccaggtggtcagagggcccagtggtgccccagcacggtggtgcccaagccaaccctgtgactgacatgtacgattcactcctttgagtctttggatgccaactcagccccctgacctggaggcagccggccaaggcctctagggaagagccccccactgcagacatgacccgagtaactttctgctgatgaacaaatctgcaccccacttcagacctcggtgggcattcacaccaccccccatgccaccggctccactttccccttttattaatacattcacccagataatcattaaaattaacatgtgccaggtcttaggatgtgtcttggggtgggcacagtacccggtgactcttggggatatttatttattttccctgagcctatatcttcatctgtgaaatggggataaaaatacttgttgctgtcacaattattaccatctctccagctagcaaaattactaccagagccgttactacacacaaaggctattgaccgagcacataccatgtgccacacaccttgacaaaatcttttaatacagtttattatgtactattcaatctttacacattccccgggggccggtattgcttacccggggagggggggtaccgaca

SEQ ID NO: 732711 - DNA, 1899 bp, Homo sapiens
gctctaacttggaggcagagacccaagcagctggaggctctgtgtgtgggtcgctgatttcttggagcctgaaaagaaggtaactgggcatatgagggacagatggagtgagtcagtgagagcagcgactggacccagagccatgtggctgtgccctctggccctcaacctcatcttgatggcagcctctggtgctgcgtgcgaagtgaaggacgtttgtgttggaagccctggtatccccggcactcctggatcccacggcctgccaggcagggacgggagagatggtgtcaaaggagaccctggccctccaggccccatgggtccgcctggagaaacaccatgtcctcctgggaataatgggctgcctggagcccctggtgtccctggagagcgtggagagaagggggaggctggcgagagaggccctccagggcttccagctcatctagatgaggagctccaagccacactccacgacttcagacatcaaatcctgcagacaaggggagccctcagtctgcagggctccataatgacagtaggagagaaggtcttctccagcaatgggcagtccatcacttttgatgccattcaggaggcatgtgccagagcaggcggccgcattgctgtcccaaggaatccagaggaaaatgaggccattgcaagcttcgtgaagaagtacaacacatatgcctatgtaggcctgactgagggtcccagccctggagacttccgctactcagatgggacccctgtaaactacaccaactggtaccgaggggagcctgcaggtcggggaaaagagcagtgtgtggagatgtacacagatgggcagtggaatgacaggaactgcctgtactcccgactgaccatctgtgagttctgagaggcatttaggccatgggacagggaggatcctgtctggccttcagtttccatccccaggatccacttggtctgtgagatgctagaactccctttcaacagaattcacttgtggctattagagctggaggcacccttagccacttcattcccctgatgggccctgactcttccccataatcactgaccagccttgacactccccttgcaaaccatcccagcactgcaccccaggcagccactcctagccttggcctttggcatgagatggaggcctccttattccccatctggtccagttccttcacttacagatggcagcagtgaggccttggggtagaaggatcctccaaagtcacacagagtgccatcaggatgagcagtaccggccaagcataatgacagagagaggcagatttcagggaagccctgactgtgtggagctaaggacacagtggagattctctggcactctgaggtctctgtggcaggcctggtcaggctctccaggtggtcagagggcccagtggtgccccagcacggtggtgcccaagccaaccctgtgactgacatgtacgattcactcctttgagtctttggatgccaactcagccccctgacctggaggcagccggccaaggcctctagggaagagccccccactgcagacatgacccgagtaactttctgctgatgaacaaatctgcaccccacttcagacctcggtgggcattcacaccaccccccatgccaccggctccactttccccttttattaatacattcacccagataatcattaaaatttattatgtactattcaatctttacacaatgtcacgggaccagtattgtttacccaattttttataaggacactgaagcttagaggagtgaaatgttttgagtgttatttcagagagcaaatggcaaagactggatccaaacccatcttcctggacctgaagttcatgctcccagccaaccgtgacaagtgggccgagctgatat

SEQ ID NO: 732712 - DNA, 1932 bp, Homo sapiens
gctctaacttggaggcagagacccaagcagctggaggctctgtgtgtgggtcgctgatttcttggagcctgaaaagaaggtaactgggcatatgagggacagatggagtgagtcagtgagagcagcgactggacccagagccatgtggctgtgccctctggccctcaacctcatcttgatggcagcctctggtgctgcgtgcgaagtgaaggacgtttgtgttggaagccctggtatccccggcactcctggatcccacggcctgccaggcagggacgggagagatggtgtcaaaggagaccctggccctccaggccccatgggtccgcctggagaaacaccatgtcctcctgggaataatgggctgcctggagcccctggtgtccctggagagcgtggagagaagggggaggctggcgagagaggccctccagggcttccagctcatctagatgaggagctccaagccacactccacgacttcagacatcaaatcctgcagacaaggggagccctcagtctgcagggctccataatgacagtaggagagaaggtcttctccagcaatgggcagtccatcacttttgatgccattcaggaggcatgtgccagagcaggcggccgcattgctgtcccaaggaatccagaggaaaatgaggccattgcaagcttcgtgaagaagtacaacacatatgcctatgtaggcctgactgagggtcccagccctggagacttccgctactcagatgggacccctgtaaactacaccaactggtaccgaggggagcctgcaggtcggggaaaagagcagtgtgtggagatgtacacagatgggcagtggaatgacaggaactgcctgtactcccgactgaccatctgtgagttctgagaggcatttaggccatgggacagggaggatcctgtctggccttcagtttccatccccaggatccacttggtctgtgagatgctagaactccctttcaacagaattcacttgtggctattagagctggaggcacccttagccacttcattcccctgatgggccctgactcttccccataatcactgaccagccttgacactccccttgcaaaccatcccagcactgcaccccaggcagccactcctagccttggcctttggcatgagatggaggcctccttattccccatctggtccagttccttcacttacagatggcagcagtgaggccttggggtagaaggatcctccaaagtcacacagagtgccatcaggatgagcagtaccggccaagcataatgacagagagaggcagatttcagggaagccctgactgtgtggagctaaggacacagtggagattctctggcactctgaggtctctgtggcaggcctggtcaggctctccaggtggtcagagggcccagtggtgccccagcacggtggtgcccaagccaaccctgtgactgacatgtacgattcactcctttgagtctttggatgccaactcagccccctgacctggaggcagccggccaaggcctctagggaagagccccccactgcagacatgacccgagtaactttctgctgatgaacaaatctgcaccccacttcagacctcggtgggcattcacaccaccccccatgccaccggctccactttccccttttattaatacattcacccagataatcattaaaatttattatgtactattcaatctttacacaatgtcacgggaccagtattgtttacccaattttttataaggacactgaagcttagaggagtgaaatgttttgagtgttatttcagagagcaaatggcaaagactggatccaaacccatcttcctggacctgaagttcatgctcccagccaccccacccctgagctgaataaagatgatttaagcataaaaaatcgttagtgtgttcacat

SEQ ID NO: 732713 - DNA, 1321 bp, Homo sapiens
gcgtctagaggatctccatctcaggcaggacgatctcaggccatgggacagggaggatcctgtctggccttcagtttccatccccaggatccacttggtctgtgagatgctagaactccctttcaacagaattcacttgtggctattagagctggaggcacccttagccacttcattcccctgatgggccctgactcttccccataatcactgaccagccttgacactccccttgcaaaccatcccagcactgcaccccaggcagccactcctagccttggcctttggcatgagatggaggcctccttattccccatctggtccagttccttcacttacagatggcagcagtgaggccttggggtagaaggatcctccaaagtcacacagagtgccatcaggatgagcagtaccggccaagcataatgacagagagaggcagatttcagggaagccctgactgtgtggagctaaggacacagtggagattctctggcactctgaggtctctgtggcaggcctggtcaggctctccaggtggtcagagggcccagtggtgccccagcacggtggtgcccaagccaaccctgtgactgacatgtacgattcactcctttgagtctttggatgccaactcagccccctgacctggaggcagccggccaaggcctctagggaagagccccccactgcagacatgacccgagtaactttctgctgatgaacaaatctgcaccccacttcagacctcggtgggcattcacaccaccccccatgccaccggctccactttccccttttattaatacattcacccagataatcattaaaattaacatgtgccaggtcttaggatgtgtcttggggtgggcacagtacccggtgactcttggggatatttatttattttccctgagcctatatcttcatctgtgaaatggggataaaaatacttgttgctgtcacaattattaccatctctccagctagcaaaattactaccagagccgttactacacacaaaggctattgaccgagcacataccatgtgccacacaccttgacaaaatcttttaatacagtttattatgtactattcaatctttacacaatgtcacgggaccagtattgtttacccaattttttataaggacactgaagcttagaggagtgaaatgttttgagtgttatttcagagagcaaatggcaaagactggatccaaacccatcttcctggacctgaagttcatgctcccagccaccccacccctgagctgaataaagatgatttaagcataaaaaatcgttagtgtgttcacat

SEQ ID NO: 732714 - DNA, 1288 bp, Homo sapiens
gcgtctagaggatctccatctcaggcaggacgatctcaggccatgggacagggaggatcctgtctggccttcagtttccatccccaggatccacttggtctgtgagatgctagaactccctttcaacagaattcacttgtggctattagagctggaggcacccttagccacttcattcccctgatgggccctgactcttccccataatcactgaccagccttgacactccccttgcaaaccatcccagcactgcaccccaggcagccactcctagccttggcctttggcatgagatggaggcctccttattccccatctggtccagttccttcacttacagatggcagcagtgaggccttggggtagaaggatcctccaaagtcacacagagtgccatcaggatgagcagtaccggccaagcataatgacagagagaggcagatttcagggaagccctgactgtgtggagctaaggacacagtggagattctctggcactctgaggtctctgtggcaggcctggtcaggctctccaggtggtcagagggcccagtggtgccccagcacggtggtgcccaagccaaccctgtgactgacatgtacgattcactcctttgagtctttggatgccaactcagccccctgacctggaggcagccggccaaggcctctagggaagagccccccactgcagacatgacccgagtaactttctgctgatgaacaaatctgcaccccacttcagacctcggtgggcattcacaccaccccccatgccaccggctccactttccccttttattaatacattcacccagataatcattaaaattaacatgtgccaggtcttaggatgtgtcttggggtgggcacagtacccggtgactcttggggatatttatttattttccctgagcctatatcttcatctgtgaaatggggataaaaatacttgttgctgtcacaattattaccatctctccagctagcaaaattactaccagagccgttactacacacaaaggctattgaccgagcacataccatgtgccacacaccttgacaaaatcttttaatacagtttattatgtactattcaatctttacacaatgtcacgggaccagtattgtttacccaattttttataaggacactgaagcttagaggagtgaaatgttttgagtgttatttcagagagcaaatggcaaagactggatccaaacccatcttcctggacctgaagttcatgctcccagccaaccgtgacaagtgggccgagctgatat

SEQ ID NO: 732715 - DNA, 1158 bp, Homo sapiens
gcgtctagaggatctccatctcaggcaggacgatctcaggccatgggacagggaggatcctgtctggccttcagtttccatccccaggatccacttggtctgtgagatgctagaactccctttcaacagaattcacttgtggctattagagctggaggcacccttagccacttcattcccctgatgggccctgactcttccccataatcactgaccagccttgacactccccttgcaaaccatcccagcactgcaccccaggcagccactcctagccttggcctttggcatgagatggaggcctccttattccccatctggtccagttccttcacttacagatggcagcagtgaggccttggggtagaaggatcctccaaagtcacacagagtgccatcaggatgagcagtaccggccaagcataatgacagagagaggcagatttcagggaagccctgactgtgtggagctaaggacacagtggagattctctggcactctgaggtctctgtggcaggcctggtcaggctctccaggtggtcagagggcccagtggtgccccagcacggtggtgcccaagccaaccctgtgactgacatgtacgattcactcctttgagtctttggatgccaactcagccccctgacctggaggcagccggccaaggcctctagggaagagccccccactgcagacatgacccgagtaactttctgctgatgaacaaatctgcaccccacttcagacctcggtgggcattcacaccaccccccatgccaccggctccactttccccttttattaatacattcacccagataatcattaaaattaacatgtgccaggtcttaggatgtgtcttggggtgggcacagtacccggtgactcttggggatatttatttattttccctgagcctatatcttcatctgtgaaatggggataaaaatacttgttgctgtcacaattattaccatctctccagctagcaaaattactaccagagccgttactacacacaaaggctattgaccgagcacataccatgtgccacacaccttgacaaaatcttttaatacagtttattatgtactattcaatctttacacattccccgggggccggtattgcttacccggggagggggggtaccgaca

SEQ ID NO: 732716 - DNA, 1038 bp, Homo sapiens
gcgtctagaggatctccatctcaggcaggacgatctcaggccatgggacagggaggatcctgtctggccttcagtttccatccccaggatccacttggtctgtgagatgctagaactccctttcaacagaattcacttgtggctattagagctggaggcacccttagccacttcattcccctgatgggccctgactcttccccataatcactgaccagccttgacactccccttgcaaaccatcccagcactgcaccccaggcagccactcctagccttggcctttggcatgagatggaggcctccttattccccatctggtccagttccttcacttacagatggcagcagtgaggccttggggtagaaggatcctccaaagtcacacagagtgccatcaggatgagcagtaccggccaagcataatgacagagagaggcagatttcagggaagccctgactgtgtggagctaaggacacagtggagattctctggcactctgaggtctctgtggcaggcctggtcaggctctccaggtggtcagagggcccagtggtgccccagcacggtggtgcccaagccaaccctgtgactgacatgtacgattcactcctttgagtctttggatgccaactcagccccctgacctggaggcagccggccaaggcctctagggaagagccccccactgcagacatgacccgagtaactttctgctgatgaacaaatctgcaccccacttcagacctcggtgggcattcacaccaccccccatgccaccggctccactttccccttttattaatacattcacccagataatcattaaaatttattatgtactattcaatctttacacaatgtcacgggaccagtattgtttacccaattttttataaggacactgaagcttagaggagtgaaatgttttgagtgttatttcagagagcaaatggcaaagactggatccaaacccatcttcctggacctgaagttcatgctcccagccaaccgtgacaagtgggccgagctgatat

SEQ ID NO: 732717 - DNA, 1071 bp, Homo sapiens
gcgtctagaggatctccatctcaggcaggacgatctcaggccatgggacagggaggatcctgtctggccttcagtttccatccccaggatccacttggtctgtgagatgctagaactccctttcaacagaattcacttgtggctattagagctggaggcacccttagccacttcattcccctgatgggccctgactcttccccataatcactgaccagccttgacactccccttgcaaaccatcccagcactgcaccccaggcagccactcctagccttggcctttggcatgagatggaggcctccttattccccatctggtccagttccttcacttacagatggcagcagtgaggccttggggtagaaggatcctccaaagtcacacagagtgccatcaggatgagcagtaccggccaagcataatgacagagagaggcagatttcagggaagccctgactgtgtggagctaaggacacagtggagattctctggcactctgaggtctctgtggcaggcctggtcaggctctccaggtggtcagagggcccagtggtgccccagcacggtggtgcccaagccaaccctgtgactgacatgtacgattcactcctttgagtctttggatgccaactcagccccctgacctggaggcagccggccaaggcctctagggaagagccccccactgcagacatgacccgagtaactttctgctgatgaacaaatctgcaccccacttcagacctcggtgggcattcacaccaccccccatgccaccggctccactttccccttttattaatacattcacccagataatcattaaaatttattatgtactattcaatctttacacaatgtcacgggaccagtattgtttacccaattttttataaggacactgaagcttagaggagtgaaatgttttgagtgttatttcagagagcaaatggcaaagactggatccaaacccatcttcctggacctgaagttcatgctcccagccaccccacccctgagctgaataaagatgatttaagcataaaaaatcgttagtgtgttcacat

SEQ ID NO: 732718 - DNA, 1912 bp, Homo sapiens
gctctaacttggaggcagagacccaagcagctggaggctctgtgtgtgggtcgctgatttcttggagcctgaaaagaaggagcagcgactggacccagagccatgtggctgtgccctctggccctcaacctcatcttgatggcagcctctggtgctgcgtgcgaagtgaaggacgtttgtgttggaagccctggtatccccggcactcctggatcccacggcctgccaggcagggacgggagagatggtgtcaaaggagaccctggccctccaggccccatgggtccgcctggagaaacaccatgtcctcctgggaataatgggctgcctggagcccctggtgtccctggagagcgtggagagaagggggaggctggcgagagaggccctccagggcttccagctcatctagatgaggagctccaagccacactccacgacttcagacatcaaatcctgcagacaaggggagccctcagtctgcagggctccataatgacagtaggagagaaggtcttctccagcaatgggcagtccatcacttttgatgccattcaggaggcatgtgccagagcaggcggccgcattgctgtcccaaggaatccagaggaaaatgaggccattgcaagcttcgtgaagaagtacaacacatatgcctatgtaggcctgactgagggtcccagccctggagacttccgctactcagatgggacccctgtaaactacaccaactggtaccgaggggagcctgcaggtcggggaaaagagcagtgtgtggagatgtacacagatgggcagtggaatgacaggaactgcctgtactcccgactgaccatctgtgagttctgagaggcatttaggccatgggacagggaggatcctgtctggccttcagtttccatccccaggatccacttggtctgtgagatgctagaactccctttcaacagaattcacttgtggctattagagctggaggcacccttagccacttcattcccctgatgggccctgactcttccccataatcactgaccagccttgacactccccttgcaaaccatcccagcactgcaccccaggcagccactcctagccttggcctttggcatgagatggaggcctccttattccccatctggtccagttccttcacttacagatggcagcagtgaggccttggggtagaaggatcctccaaagtcacacagagtgcctgcctcctggtcccctcagctctgcctctgcagcccactgcctgcccagtgccatcaggatgagcagtaccggccaagcataatgacagagagaggcagatttcagggaagccctgactgtgtggagctaaggacacagtggagattctctggcactctgaggtctctgtggcaggcctggtcaggctctccaggtggtcagagggcccagtggtgccccagcacggtggtgcccaagccaaccctgtgactgacatgtacgattcactcctttgagtctttggatgccaactcagccccctgacctggaggcagccggccaaggcctctagggaagagccccccactgcagacatgacccgagtaactttctgctgatgaacaaatctgcaccccacttcagacctcggtgggcattcacaccaccccccatgccaccggctccactttccccttttattaatacattcacccagataatcattaaaatttattatgtactattcaatctttacacaatgtcacgggaccagtattgtttacccaattttttataaggacactgaagcttagaggagtgaaatgttttgagtgttatttcagagagcaaatggcaaagactggatccaaacccatcttcctggacctgaagttcatgctcccagccaaccgtgacaagtgggccgagctgatat

SEQ ID NO: 732719 - DNA, 1945 bp, Homo sapiens
gctctaacttggaggcagagacccaagcagctggaggctctgtgtgtgggtcgctgatttcttggagcctgaaaagaaggagcagcgactggacccagagccatgtggctgtgccctctggccctcaacctcatcttgatggcagcctctggtgctgcgtgcgaagtgaaggacgtttgtgttggaagccctggtatccccggcactcctggatcccacggcctgccaggcagggacgggagagatggtgtcaaaggagaccctggccctccaggccccatgggtccgcctggagaaacaccatgtcctcctgggaataatgggctgcctggagcccctggtgtccctggagagcgtggagagaagggggaggctggcgagagaggccctccagggcttccagctcatctagatgaggagctccaagccacactccacgacttcagacatcaaatcctgcagacaaggggagccctcagtctgcagggctccataatgacagtaggagagaaggtcttctccagcaatgggcagtccatcacttttgatgccattcaggaggcatgtgccagagcaggcggccgcattgctgtcccaaggaatccagaggaaaatgaggccattgcaagcttcgtgaagaagtacaacacatatgcctatgtaggcctgactgagggtcccagccctggagacttccgctactcagatgggacccctgtaaactacaccaactggtaccgaggggagcctgcaggtcggggaaaagagcagtgtgtggagatgtacacagatgggcagtggaatgacaggaactgcctgtactcccgactgaccatctgtgagttctgagaggcatttaggccatgggacagggaggatcctgtctggccttcagtttccatccccaggatccacttggtctgtgagatgctagaactccctttcaacagaattcacttgtggctattagagctggaggcacccttagccacttcattcccctgatgggccctgactcttccccataatcactgaccagccttgacactccccttgcaaaccatcccagcactgcaccccaggcagccactcctagccttggcctttggcatgagatggaggcctccttattccccatctggtccagttccttcacttacagatggcagcagtgaggccttggggtagaaggatcctccaaagtcacacagagtgcctgcctcctggtcccctcagctctgcctctgcagcccactgcctgcccagtgccatcaggatgagcagtaccggccaagcataatgacagagagaggcagatttcagggaagccctgactgtgtggagctaaggacacagtggagattctctggcactctgaggtctctgtggcaggcctggtcaggctctccaggtggtcagagggcccagtggtgccccagcacggtggtgcccaagccaaccctgtgactgacatgtacgattcactcctttgagtctttggatgccaactcagccccctgacctggaggcagccggccaaggcctctagggaagagccccccactgcagacatgacccgagtaactttctgctgatgaacaaatctgcaccccacttcagacctcggtgggcattcacaccaccccccatgccaccggctccactttccccttttattaatacattcacccagataatcattaaaatttattatgtactattcaatctttacacaatgtcacgggaccagtattgtttacccaattttttataaggacactgaagcttagaggagtgaaatgttttgagtgttatttcagagagcaaatggcaaagactggatccaaacccatcttcctggacctgaagttcatgctcccagccaccccacccctgagctgaataaagatgatttaagcataaaaaatcgttagtgtgttcacat

SEQ ID NO: 732720 - DNA, 2005 bp, Homo sapiens
gctctaacttggaggcagagacccaagcagctggaggctctgtgtgtgggtgagtttagccacatcccctaggtgttctccagcttgaggatcgcaggcagagaggaccagcccagcagccacaggcctgaccaaggcccaggtcgctgatttcttggagcctgaaaagaaggagcagcgactggacccagagccatgtggctgtgccctctggccctcaacctcatcttgatggcagcctctggtgctgcgtgcgaagtgaaggacgtttgtgttggaagccctggtatccccggcactcctggatcccacggcctgccaggcagggacgggagagatggtgtcaaaggagaccctggccctccaggccccatgggtccgcctggagaaacaccatgtcctcctgggaataatgggctgcctggagcccctggtgtccctggagagcgtggagagaagggggaggctggcgagagaggccctccagggcttccagctcatctagatgaggagctccaagccacactccacgacttcagacatcaaatcctgcagacaaggggagccctcagtctgcagggctccataatgacagtaggagagaaggtcttctccagcaatgggcagtccatcacttttgatgccattcaggaggcatgtgccagagcaggcggccgcattgctgtcccaaggaatccagaggaaaatgaggccattgcaagcttcgtgaagaagtacaacacatatgcctatgtaggcctgactgagggtcccagccctggagacttccgctactcagatgggacccctgtaaactacaccaactggtaccgaggggagcctgcaggtcggggaaaagagcagtgtgtggagatgtacacagatgggcagtggaatgacaggaactgcctgtactcccgactgaccatctgtgagttctgagaggcatttaggccatgggacagggaggatcctgtctggccttcagtttccatccccaggatccacttggtctgtgagatgctagaactccctttcaacagaattcacttgtggctattagagctggaggcacccttagccacttcattcccctgatgggccctgactcttccccataatcactgaccagccttgacactccccttgcaaaccatcccagcactgcaccccaggcagccactcctagccttggcctttggcatgagatggaggcctccttattccccatctggtccagttccttcacttacagatggcagcagtgaggccttggggtagaaggatcctccaaagtcacacagagtgcctgcctcctggtcccctcagctctgcctctgcagcccactgcctgcccagtgccatcaggatgagcagtaccggccaagcataatgacagagagaggcagatttcagggaagccctgactgtgtggagctaaggacacagtggagattctctggcactctgaggtctctgtggcaggcctggtcaggctctccaggtggtcagagggcccagtggtgccccagcacggtggtgcccaagccaaccctgtgactgacatgtacgattcactcctttgagtctttggatgccaactcagccccctgacctggaggcagccggccaaggcctctagggaagagccccccactgcagacatgacccgagtaactttctgctgatgaacaaatctgcaccccacttcagacctcggtgggcattcacaccaccccccatgccaccggctccactttccccttttattaatacattcacccagataatcattaaaatttattatgtactattcaatctttacacaatgtcacgggaccagtattgtttacccaattttttataaggacactgaagcttagaggagtgaaatgttttgagtgttatttcagagagcaaatggcaaagactggatccaaacccatcttcctggacctgaagttcatgctcccagccaaccgtgacaagtgggccgagctgatat

SEQ ID NO: 732721 - DNA, 2038 bp, Homo sapiens
gctctaacttggaggcagagacccaagcagctggaggctctgtgtgtgggtgagtttagccacatcccctaggtgttctccagcttgaggatcgcaggcagagaggaccagcccagcagccacaggcctgaccaaggcccaggtcgctgatttcttggagcctgaaaagaaggagcagcgactggacccagagccatgtggctgtgccctctggccctcaacctcatcttgatggcagcctctggtgctgcgtgcgaagtgaaggacgtttgtgttggaagccctggtatccccggcactcctggatcccacggcctgccaggcagggacgggagagatggtgtcaaaggagaccctggccctccaggccccatgggtccgcctggagaaacaccatgtcctcctgggaataatgggctgcctggagcccctggtgtccctggagagcgtggagagaagggggaggctggcgagagaggccctccagggcttccagctcatctagatgaggagctccaagccacactccacgacttcagacatcaaatcctgcagacaaggggagccctcagtctgcagggctccataatgacagtaggagagaaggtcttctccagcaatgggcagtccatcacttttgatgccattcaggaggcatgtgccagagcaggcggccgcattgctgtcccaaggaatccagaggaaaatgaggccattgcaagcttcgtgaagaagtacaacacatatgcctatgtaggcctgactgagggtcccagccctggagacttccgctactcagatgggacccctgtaaactacaccaactggtaccgaggggagcctgcaggtcggggaaaagagcagtgtgtggagatgtacacagatgggcagtggaatgacaggaactgcctgtactcccgactgaccatctgtgagttctgagaggcatttaggccatgggacagggaggatcctgtctggccttcagtttccatccccaggatccacttggtctgtgagatgctagaactccctttcaacagaattcacttgtggctattagagctggaggcacccttagccacttcattcccctgatgggccctgactcttccccataatcactgaccagccttgacactccccttgcaaaccatcccagcactgcaccccaggcagccactcctagccttggcctttggcatgagatggaggcctccttattccccatctggtccagttccttcacttacagatggcagcagtgaggccttggggtagaaggatcctccaaagtcacacagagtgcctgcctcctggtcccctcagctctgcctctgcagcccactgcctgcccagtgccatcaggatgagcagtaccggccaagcataatgacagagagaggcagatttcagggaagccctgactgtgtggagctaaggacacagtggagattctctggcactctgaggtctctgtggcaggcctggtcaggctctccaggtggtcagagggcccagtggtgccccagcacggtggtgcccaagccaaccctgtgactgacatgtacgattcactcctttgagtctttggatgccaactcagccccctgacctggaggcagccggccaaggcctctagggaagagccccccactgcagacatgacccgagtaactttctgctgatgaacaaatctgcaccccacttcagacctcggtgggcattcacaccaccccccatgccaccggctccactttccccttttattaatacattcacccagataatcattaaaatttattatgtactattcaatctttacacaatgtcacgggaccagtattgtttacccaattttttataaggacactgaagcttagaggagtgaaatgttttgagtgttatttcagagagcaaatggcaaagactggatccaaacccatcttcctggacctgaagttcatgctcccagccaccccacccctgagctgaataaagatgatttaagcataaaaaatcgttagtgtgttcacat

SEQ ID NO: 732722 - DNA, 1952 bp, Homo sapiens
gctctaacttggaggcagagacccaagcagctggaggctctgtgtgtgggtcgctgatttcttggagcctgaaaagaaggtaactgggcatatgagggacagatggagtgagtcagtgagagcagcgactggacccagagccatgtggctgtgccctctggccctcaacctcatcttgatggcagcctctggtgctgcgtgcgaagtgaaggacgtttgtgttggaagccctggtatccccggcactcctggatcccacggcctgccaggcagggacgggagagatggtgtcaaaggagaccctggccctccaggccccatgggtccgcctggagaaacaccatgtcctcctgggaataatgggctgcctggagcccctggtgtccctggagagcgtggagagaagggggaggctggcgagagaggccctccagggcttccagctcatctagatgaggagctccaagccacactccacgacttcagacatcaaatcctgcagacaaggggagccctcagtctgcagggctccataatgacagtaggagagaaggtcttctccagcaatgggcagtccatcacttttgatgccattcaggaggcatgtgccagagcaggcggccgcattgctgtcccaaggaatccagaggaaaatgaggccattgcaagcttcgtgaagaagtacaacacatatgcctatgtaggcctgactgagggtcccagccctggagacttccgctactcagatgggacccctgtaaactacaccaactggtaccgaggggagcctgcaggtcggggaaaagagcagtgtgtggagatgtacacagatgggcagtggaatgacaggaactgcctgtactcccgactgaccatctgtgagttctgagaggcatttaggccatgggacagggaggatcctgtctggccttcagtttccatccccaggatccacttggtctgtgagatgctagaactccctttcaacagaattcacttgtggctattagagctggaggcacccttagccacttcattcccctgatgggccctgactcttccccataatcactgaccagccttgacactccccttgcaaaccatcccagcactgcaccccaggcagccactcctagccttggcctttggcatgagatggaggcctccttattccccatctggtccagttccttcacttacagatggcagcagtgaggccttggggtagaaggatcctccaaagtcacacagagtgcctgcctcctggtcccctcagctctgcctctgcagcccactgcctgcccagtgccatcaggatgagcagtaccggccaagcataatgacagagagaggcagatttcagggaagccctgactgtgtggagctaaggacacagtggagattctctggcactctgaggtctctgtggcaggcctggtcaggctctccaggtggtcagagggcccagtggtgccccagcacggtggtgcccaagccaaccctgtgactgacatgtacgattcactcctttgagtctttggatgccaactcagccccctgacctggaggcagccggccaaggcctctagggaagagccccccactgcagacatgacccgagtaactttctgctgatgaacaaatctgcaccccacttcagacctcggtgggcattcacaccaccccccatgccaccggctccactttccccttttattaatacattcacccagataatcattaaaatttattatgtactattcaatctttacacaatgtcacgggaccagtattgtttacccaattttttataaggacactgaagcttagaggagtgaaatgttttgagtgttatttcagagagcaaatggcaaagactggatccaaacccatcttcctggacctgaagttcatgctcccagccaaccgtgacaagtgggccgagctgatat

SEQ ID NO: 732723 - DNA, 1985 bp, Homo sapiens
gctctaacttggaggcagagacccaagcagctggaggctctgtgtgtgggtcgctgatttcttggagcctgaaaagaaggtaactgggcatatgagggacagatggagtgagtcagtgagagcagcgactggacccagagccatgtggctgtgccctctggccctcaacctcatcttgatggcagcctctggtgctgcgtgcgaagtgaaggacgtttgtgttggaagccctggtatccccggcactcctggatcccacggcctgccaggcagggacgggagagatggtgtcaaaggagaccctggccctccaggccccatgggtccgcctggagaaacaccatgtcctcctgggaataatgggctgcctggagcccctggtgtccctggagagcgtggagagaagggggaggctggcgagagaggccctccagggcttccagctcatctagatgaggagctccaagccacactccacgacttcagacatcaaatcctgcagacaaggggagccctcagtctgcagggctccataatgacagtaggagagaaggtcttctccagcaatgggcagtccatcacttttgatgccattcaggaggcatgtgccagagcaggcggccgcattgctgtcccaaggaatccagaggaaaatgaggccattgcaagcttcgtgaagaagtacaacacatatgcctatgtaggcctgactgagggtcccagccctggagacttccgctactcagatgggacccctgtaaactacaccaactggtaccgaggggagcctgcaggtcggggaaaagagcagtgtgtggagatgtacacagatgggcagtggaatgacaggaactgcctgtactcccgactgaccatctgtgagttctgagaggcatttaggccatgggacagggaggatcctgtctggccttcagtttccatccccaggatccacttggtctgtgagatgctagaactccctttcaacagaattcacttgtggctattagagctggaggcacccttagccacttcattcccctgatgggccctgactcttccccataatcactgaccagccttgacactccccttgcaaaccatcccagcactgcaccccaggcagccactcctagccttggcctttggcatgagatggaggcctccttattccccatctggtccagttccttcacttacagatggcagcagtgaggccttggggtagaaggatcctccaaagtcacacagagtgcctgcctcctggtcccctcagctctgcctctgcagcccactgcctgcccagtgccatcaggatgagcagtaccggccaagcataatgacagagagaggcagatttcagggaagccctgactgtgtggagctaaggacacagtggagattctctggcactctgaggtctctgtggcaggcctggtcaggctctccaggtggtcagagggcccagtggtgccccagcacggtggtgcccaagccaaccctgtgactgacatgtacgattcactcctttgagtctttggatgccaactcagccccctgacctggaggcagccggccaaggcctctagggaagagccccccactgcagacatgacccgagtaactttctgctgatgaacaaatctgcaccccacttcagacctcggtgggcattcacaccaccccccatgccaccggctccactttccccttttattaatacattcacccagataatcattaaaatttattatgtactattcaatctttacacaatgtcacgggaccagtattgtttacccaattttttataaggacactgaagcttagaggagtgaaatgttttgagtgttatttcagagagcaaatggcaaagactggatccaaacccatcttcctggacctgaagttcatgctcccagccaccccacccctgagctgaataaagatgatttaagcataaaaaatcgttagtgtgttcacat

SEQ ID NO: 732724 - DNA, 954 bp, Homo sapiens; identical to SEQ ID NO: 67406

SEQ ID NO: 732725 - DNA, 773 bp, Homo sapiens
gcctgagaagccaactcagactcagccaacagagattgttgatttgcctcttaagcaagagattcattgcagctcagcatggctcagaccagctcatacttcatgctgatctcctgcctgatgtttctgtctcagagccaaggccaagaggcccagacagagttgccccaggcccggatcagctgcccagaaggcaccaatgcctatcgctcctactgctactactttaatgaagaccgtgagacctgggttgatgcagatctctattgccagaacatgaattcgggcaacctggtgtctgtgctcacccaggccgagggtgcctttgtggcctcactgattaaggagagtggcactgatgacttcaatgtctggattggcctccatgaccccaaaaagaaccgccgctggcactggagcagtgggtccctggtctcctacaagtcctggggcattggagccccaagcagtgttaatcctggctactgtgtgagcctgacctcaagcacaggattccagaaatggaaggatgtgccttgtgaagacaagttctcctttgtctgcaagttcaaaaactagaggcagctggaaaatacatgtctagaactgatccagcaattacaacggagtcaaaaattaaaccggaccatctctccaactcaactcaacctggacactctcttctctgctgagtttgccttgttaatcttcaatagttttacctaccccagtctttggaaccttaaataataaaaataaacatgtttccacta

SEQ ID NO: 732726 - DNA, 807 bp, Homo sapiens
gaggttttagctgtaatgaagcctcagtgggatccaaagttgtttttcagttactgagtctgtataatccccactctcaagagaaacatttgaaggtgtgggtgtctcagaggaccttcctggtctcagaaattctgagaggaggttttaaggaaggtaataggtgctttgctctccatctctcagaacccccttccctgtgttctcctacagagattgttgatttgcctcttaagcaagagattcattgcagctcagcatggctcagaccagctcatacttcatgctgatctcctgcctgatgtttctgtctcagagccaaggccaagaggcccagacagagttgccccaggcccggatcagctgcccagaaggcaccaatgcctatcgctcctactgctactactttaatgaagaccgtgagacctgggttgatgcagatctctattgccagaacatgaattcgggcaacctggtgtctgtgctcacccaggccgagggtgcctttgtggcctcactgattaaggagagtggcactgatgacttcaatgtctggattggcctccatgaccccaaaaagaaccgccgctggcactggagcagtgggtccctggtctcctacaagtcctggggcattggagccccaagcagtgttaatcctggctactgtgtgagcctgacctcaagcacaggattccagaaatggaaggatgtgccttgtgaagacaagttctcctttgtctgcaagttcaaaaactagaggcagctggaaaatacatgtctagaactgatccagcaattacaacg

SEQ ID NO: 732727 - DNA, 626 bp, Homo sapiens
gcctgagaagccaactcagactcagccaacagagattgttgatttgcctcttaagcaagagattcattgcagctcagcatggctcagaccagctcatacttcatgctgatctcctgcctgatgtttctgtctcagagccaaggccaagaggcccagacagagttgccccaggcccggatcagctgcccagaaggcaccaatgcctatcgctcctactgctactactttaatgaagaccgtgagacctgggttgatgcagatctctattgccagaacatgaattcgggcaacctggtgtctgtgctcacccaggccgagggtgcctttgtggcctcactgattaaggagagtggcactgatgacttcaatgtctggattggcctccatgaccccaaaaagaaccgccgctggcactggagcagtgggtccctggtctcctacaagtcctggggcattggagccccaagcagtgttaatcctggctactgtgtgagcctgacctcaagcacaggattccagaaatggaaggatgtgccttgtgaagacaagttctcctttgtctgcaagttcaaaaactagaggcagctggaaaatacatgtctagaactgatccagcaattacaacg

SEQ ID NO: 732728 - DNA, 549 bp, Homo sapiens
  misc_feature (82)..(82): n is a, c, g, or t
  misc_feature (145)..(145): n is a, c, g, or t
  misc_feature (156)..(156): n is a, c, g, or t
aaattttcgggggggccaaaaacctttggggtggtttcttggtgggctttcaaaaccccaaggggccggggagggggtgccnttttggtggggccttcaactgggattaaaggggaggagtggcaactggatggactttcaattntgggattggcntccatggaccccaaaaaggaaccgccgctggcactggagcagtgggtccctggtctcctacaagtcctggggcattggagccccaagcagtgttaatcctggctactgtgtgagcctgacctcaagcacaggattccagaaatggaaggatgtgccttgtgaagacaagttctcctttgtctgcaagttcaaaaactagaggcagctggaaaatacatgtctagaactgatccagcaattacaacggagtcaaaaattaaaccggaccatctctccaactcaactcaacctggacactctcttctctgctgagtttgccttgttaatcttcaatagttttacctaccccagtctttggaaccttaaataataaaaataaacatgtttccacta

SEQ ID NO: 732729 - DNA, 457 bp, Homo sapiens
gtgagaggcagagaatccatccacctgtttctgttctctcctgcttagctccagggatggaactgggactgggatagaggaaaggtgaactcctcattaaggaaatgaatgtttggtttttgtcctgagtcctaaagccaggagggtcatactctttcgggtctcccagttgtaactcttctcattgacttataggattccagaaatggaaggatgtgccttgtgaagacaagttctcctttgtctgcaagttcaaaaactagaggcagctggaaaatacatgtctagaactgatccagcaattacaacggagtcaaaaattaaaccggaccatctctccaactcaactcaacctggacactctcttctctgctgagtttgccttgttaatcttcaatagttttacctaccccagtctttggaaccttaaataataaaaataaacatgtttccacta

SEQ ID NO: 732730 - DNA, 1162 bp, Homo sapiens
ggcccttcgcgcgcagtcccttagggggcgcctggaagcccgcgcatgcgccctgagggctcgctgacctaccgggtgccagagaggctgcggcagggtttctgtggcgtgggtcgggcagcacaggccttggtgtgtgcgagtgccaaggagggcaccgccttcaggatggaggctgtgcaggagggggcggccggggtggagagtgagcaggcggctttgggggaggaggcggtgctgctgttggatgacataatggcggaggtggaggtggtggcggaggaggagggcctcgtggagcggcgggaggaggcccagccccgacagcaggctgtgcctggccctgggcccatgaccccagagtctgcactggaggagctgctggccgttcaggtggagctggagccggttaatgcccaagccaggaaggccttttctcggcagcgggaaaagatggagcggaggcgcaagccccacctagaccgcagaggcgccgtcatccagagcgtccctggcttctgggccaatgttattgcaaaccacccccagatgtcagccctgatcactgacgaagatgaagacatgctgagctacatggtcagcctggaggtggaagaagagaagcatcctgttcatctctgcaagatcatgttgttctttcggagtaacccctacttccagaataaagtgattaccaaggaatatctggtgaacatcacagaatacagggcttctcattccactccaattgagtggtatccggattatgaagtggaggcctatcgccgcagacaccacaacagcagccttaacttcttcaactggttctctgaccacaacttcgcaggatctaacaagattgctgagatcctatgtaaggacctgtggcgcaatcccctgcaatactacaagaggatgaagccacctgaagagggaacagagacgtcaggggactcccagttgttgagttgaatatgatggagcatcagattttacctaatacagcagaactcctaaaaagttacagccatatgcaggacggcagtactcagcatggtcttatgcacaggaactaaaggaaaaagagatcgagtcacaaaaattcaggaagagggggtaaatgtggattgtatggaatgaaaaataaacattctcaaggccg

SEQ ID NO: 732731 - DNA, 1993 bp, Homo sapiens
ggcccttcgcgcgcagtcccttagggggcgcctggaagcccgcgcatgcgccctgagggctcgctgacctaccgggtgccagagaggctgcggcagggtttctgtggcgtgggtcgggcagcacaggccttggtgtgtgcgagtgccaaggagggcaccgccttcaggatggaggctgtgcaggagggggcggccggggtggagagtgagcaggcggctttgggggaggaggcggtgctgctgttggatgacataatggcggaggtggaggtggtggcggaggaggagggcctcgtggagcggcgggaggaggcccagccccgacagcaggctgtgcctggccctgggcccatgaccccagagtctgcactggaggagctgctggccgttcaggtggagctggagccggttaatgcccaagccaggaaggccttttctcggcagcgggaaaagatggagcggaggcgcaagccccacctagaccgcagaggcgccgtcatccagagcgtccctggcttctgggccaatgttgtatccttctcagtgtttcttcggcctttctagtggagaggtgctctcggggaagtgtaagtgaccgatgggcagctcggcgtcgatgtgactctttggggaacaaaggggagttgccacggaccaatgtggctgtggaaagccggagcaggctgggtactattgtcctgcatgcggcagagaaacccttggtgatgccgagccgcagacgtttggggcatctttttgaagagcagaagcgagttcagagcggaagaggtttttcagtgaatgaagctatttttaagggagtgtgattgctgccccttgctagtccgatctgggactgggcgtcttcggctataagcagattctgccactcctcagacaccagcaagtctctgcaaatcgcgcctccccatgtcagtgcagtcagcctcagaatcatacaccctctgtgaacacaggaggccttagtttacggggacggggaggcgaaaggagatcatacatggaagcagatctgagaatccctacccagcctctggtgctcttaggccttcttccctgttgctcctcgctttcccttccatcgtgtgtaaagtctctttgacctaaatcagattgcaaaccacccccagatgtcagccctgatcactgacgaagatgaagacatgctgagctacatggtcagcctggaggtgaggccaggaagactggggctagagggtttagcgggggagggtaagggaaataattcattcctgtaagcaagagtgagcacctcacccgaaaacctatctaagctttctccaccttgtcctgacaggtggaagaagagaagcatcctgttcatctctgcaagatcatgttgttctttcggagtaacccctacttccagaataaagtgattaccaaggaatatctggtgaacatcacaggatgggtagtggaaggaagatgggtagtggaaggaagatggtgggtggatcattgccaacgggatccagcccccttcccacaaaaactcctgtctctgtagaatacagggcttctcattccactccaattgagtggtatccggattatgaagtggaggcctatcgccgcagacaccacaacagcagccttaacttcttcaactggttctctgaccacaacttcgcaggatctaacaagattgctgagatcctatgtaaggacctgtggcgcaatcccctgcaatactacaagaggatgaagccacctgaagagggaacagagacgtcaggggactcccagttgttgagttgaatatgatggagcatcagattttacctaatacagcagaactcctaaaaagttacagccatatgcaggacggcagtactcagcatggtcttatgcacaggaactaaaggaaaaagagatcgagtcacaaaaattcaggaagagggggtaaatgtggattgtatggaatgaaaaataaacattctcaaggccg

SEQ ID NO: 732732 - DNA, 600 bp, Homo sapiens
ttccccagggaccacatccagcttttcttccctcccaagagaccagcgaaggctcagtataaatagcagccaccgctccctggcaggagggacccgcagctcagctacagcacagatcagcaccatgaagcttctcacgggcctggttttctgctccttggtcctgggtgtcagcagccgaagcttcttttcgttccttggcgaggcttttgatggggctcgggacatgtggagagcctactctgacatgagagaagccaattacatcggctcagacaaatacttccatgctcgggggaactatgatgctgccaaaaggggacctgggggtgtctgggctgcagaagcgatcagcgatgccagagagaatatccagagattctttggccatggtgcggaggactcgctggccgatcaggctgccaatgaatggggcaggagtggcaaagaccccaatcacttccgacctgctggcctgcctgagaaatactgagcttcctcttcactctgctctcaggagatctggctgtgaggccctcagggcagggatacaaagcggggagagggtacacaatgggtatctaataaatacttaagagg

SEQ ID NO: 732733 - DNA, 552 bp, Homo sapiens
aagcagtggtatcaacgcagagtggccattacgtccgggagggacccgcagctcagctacagcacagatcagcaccatgaagcttctcacgggcctggttttctgctccttggtcctgggtgtcagcagccgaagcttcttttcgttccttggcgaggcttttgatggggctcgggacatgtggagagcctactctgacatgagagaagccaattacatcggctcagacaaatacttccatgctcgggggaactatgatgctgccaaaaggggacctgggggtgtctgggctgcagaagcgatcagcgatgccagagagaatatccagagattctttggccatggtgcggaggactcgctggccgatcaggctgccaatgaatggggcaggagtggcaaagaccccaatcacttccgacctgctggcctgcctgagaaatactgagcttcctcttcactctgctctcaggagatctggctgtgaggccctcagggcagggatacaaagcggggagagggtacacaatgggtatctaataaatacttaagagg

SEQ ID NO: 732734 - DNA, 882 bp, Homo sapiens
  misc_feature (848)..(848): n is a, c, g, or t
  misc_feature (852)..(853): n is a, c, g, or t
  misc_feature (855)..(855): n is a, c, g, or t
  misc_feature (866)..(866): n is a, c, g, or t
  misc_feature (869)..(870): n is a, c, g, or t
ttccccagggaccacatccagcttttcttccctcccaagagaccagcgaaggctcagtataaatagcagccaccgctccctggcaggagggacccgcagctcagctacagcacagatcagcaccatgaagcttctcacgggcctggttttctgctccttggtcctgggtgtcagcagccgaagcttcttttcgttccttggcgaggcttttgatggggctcgggacatgtggagagcctactctgacatgagagaagccaattacatcggctcagacaaatacttccatgctcgggggaactatgatgctgccaaaaggggacctgggggtgtctgggctgcagaagcgatcagcgatgccagagagaatatccagagattctttggccatggtgcggaggactcgctggccgatcaggctgccaatgaatggggcaggagtggcaaagaccccaatcacttccgacctgctggcctgcctgagaaatactgagcttcctcttcactctgctctcaggagatctggctgtgaggccctcagggcagggatacaaagcggggagagggtacacaatgggtatctaataaatacttaagaggcaaaaaaaaaaaaaaaaaaaaaaaaaaaaactttttggggcggcttgggccttgaaaaaggtttttaaaaccttcggttggggccgggggccccagaggggtaggcgaaccgtggccacaaggcgggtcccaaggagaaaccggggccaagacaaagggcgcggggatcccccccatataaaaaacgcccggggggacacggagggtctcgaacaaatcccaagggggtccgagagggcaacaggggnccanncngggggtccagngannccatataatttg

SEQ ID NO: 732735 - DNA, 677 bp, Homo sapiens
  misc_feature (578)..(578): n is a, c, g, or t
aagcagtggtatcaacgcagagtggccattacgtccgggagggacccgcagctcagctacagcacagatcagcaccatgaagcttctcacgggcctggttttctgctccttggtcctgggtgtcagcagccgaagcttcttttcgttccttggcgaggcttttgatggggctcgggacatgtggagagcctactctgacatgagagaagccaattacatcggctcagacaaatacttccatgctcgggggaactatgatgctgccaaaaggggacctgggggtgtctgggctgcagaagcgatcagcgatgccagagagaatatccagagattctttggccatggtgcggaggactcgctggccgatcaggctgccaatgaatggggcaggagtggcaaagaccccaatcacttccgacctgctggcctgcctgagaaatactgagcttcctcttcactctgctctcaggagatctggctgtgaggccctcagggcagggatacaaagcggggagagggtacacaatgggtatctaataaatacttaagaggaaaccaccacacaaaaaaacaacaanacaaccacaaaaaacaccacaccccccacaacaaaaaaccacagcacaaaaaaacttgtggggcgcgcgccgccccccacaaaaaaatctccaaacccc

SEQ ID NO: 732736 - DNA, 747 bp, Homo sapiens
ttccccagggaccacatccagcttttcttccctcccaagagaccagcgaaggctcagtataaatagcagccaccgctccctggcaggagggacccgcagctcagctacagcacagatcaggtgaggagcacaccaaggagtgatttttaaaacttactctgttttctctttcccaacaagattatcatttcctttaaaaaaaatagttatcctggggcatacagccataccattctgaaggtgtcttatctcctctgatctagagagcaccatgaagcttctcacgggcctggttttctgctccttggtcctgggtgtcagcagccgaagcttcttttcgttccttggcgaggcttttgatggggctcgggacatgtggagagcctactctgacatgagagaagccaattacatcggctcagacaaatacttccatgctcgggggaactatgatgctgccaaaaggggacctgggggtgtctgggctgcagaagcgatcagcgatgccagagagaatatccagagattctttggccatggtgcggaggactcgctggccgatcaggctgccaatgaatggggcaggagtggcaaagaccccaatcacttccgacctgctggcctgcctgagaaatactgagcttcctcttcactctgctctcaggagatctggctgtgaggccctcagggcagggatacaaagcggggagagggtacacaatgggtatctaataaatacttaagagg

SEQ ID NO: 732737 - DNA, 661 bp, Homo sapiens
ttccccagggaccacatccagcttttcttccctcccaagagaccagcgaaggctcagtataaatagcagccaccgctccctggcaggagggacccgcagctcagctacagcacagatcagttatcctggggcatacagccataccattctgaaggtgtcttatctcctctgatctagagagcaccatgaagcttctcacgggcctggttttctgctccttggtcctgggtgtcagcagccgaagcttcttttcgttccttggcgaggcttttgatggggctcgggacatgtggagagcctactctgacatgagagaagccaattacatcggctcagacaaatacttccatgctcgggggaactatgatgctgccaaaaggggacctgggggtgtctgggctgcagaagcgatcagcgatgccagagagaatatccagagattctttggccatggtgcggaggactcgctggccgatcaggctgccaatgaatggggcaggagtggcaaagaccccaatcacttccgacctgctggcctgcctgagaaatactgagcttcctcttcactctgctctcaggagatctggctgtgaggccctcagggcagggatacaaagcggggagagggtacacaatgggtatctaataaatacttaagagg

SEQ ID NO: 732738 - DNA, 928 bp, Homo sapiens
ttccccagggaccacatccagcttttcttccctcccaagagaccagcgaaggctcagtataaatagcagccaccgctccctggcaggagggacccgcagctcagctacagcacagatcagcaccatgaagcttctcacgggcctggttttctgctccttggtcctgggtgtcagcagccgaagcttcttttcgttccttggcgaggcttttgatggggctcgggacatgtggagagcctactctgacatgagagaagccaattacatcggctcagacaaatacttccatgctcgggggaactatgatgctgccaaaaggggacctgggggtgtctgggctgcagaagcgatcagcgatgccagagagaatatccagagattctttggccatggtgcggaggactcgctggccgatcaggctgccaatgaatggggcaggagtggcaaagaccccaatcacttccgacctgctggcctgcctgagaaatactgagcttcctcttcactctgctctcaggagatctggctgtgaggccctcagggcagggatacaaagcggggagagggtacacaatgggtatctaataaatacttaagaggcaaaacgctaaacaacaggagaatggacgggtacctttttgggaccgtgcatctggcccctggaaaagggttttcaaagaccgatcgttgtggggaccgggggctcccctcaggaggcagagcaaacaggtgcaaagagcaggtatgctgaaggaaaacacaccgtggtattaagcaataggcggtggagacttcctgcccgaatttaaacatccgcccgggggagtaacgcggacgctgtctgacaactatctccgaagggctcctagggggccattaacgggagcctttgcacgcggggccccggcgggtcgcgtttaagataccg

SEQ ID NO: 732739 - DNA, 866 bp, Homo sapiens
  misc_feature (632)..(632): n is a, c, g, or t
  misc_feature (639)..(639): n is a, c, g, or t
  misc_feature (643)..(643): n is a, c, g, or t
  misc_feature (649)..(649): n is a, c, g, or t
ttccccagggaccacatccagcttttcttccctcccaagagaccagcgaaggctcagtataaatagcagccaccgctccctggcaggagggacccgcagctcagctacagcacagatcagcaccatgaagcttctcacgggcctggttttctgctccttggtcctgggtgtcagcagccgaagcttcttttcgttccttggcgaggcttttgatggggctcgggacatgtggagagcctactctgacatgagagaagccaattacatcggctcagacaaatacttccatgctcgggggaactatgatgctgccaaaaggggacctgggggtgtctgggctgcagaagcgatcagcgatgccagagagaatatccagagattctttggccatggtgcggaggactcgctggccgatcaggctgccaatgaatggggcaggagtggcaaagaccccaatcacttccgacctgctggcctgcctgagaaatactgagcttcctcttcactctgctctcaggagatctggctgtgaggccctcagggcagggatacaaattagtgaggtctatgtccagagaagctgagatatggcatataataggcatctaataaatgcttaagaaggtggaaanaccaccnccanccaccncacaacacaacacaccacacacaacaccctcgggccgcccccgccccgttaagaaagccctcttgaccagacaaaccatggatgtggagcacgggccccacggagtggcgcagcgaaagcgtcgcccacgagcgggacaccagggacaacaagccggcggatgaagacacgcgtgggggataatctcacccgtttaaaaagcacccgcggggacacc

SEQ ID NO: 732740 - DNA, 898 bp, Homo sapiens
ttccccagggaccacatccagcttttcttccctcccaagagaccagcgaaggctcagtataaatagcagccaccgctccctggcaggagggacccgcagctcagctacagcacagatcaggtgaggagcacaccaaggagtgatttttaaaacttactctgttttctctttcccaacaagattatcatttcctttaaaaaaaatagttatcctggggcatacagccataccattctgaaggtgtcttatctcctctgatctagagaggtaagcagggtcgggcctggtagtacttggatgggagaacacctgggaataccaggtgctaaaggctttaagaataaaaaataatgatcctgctttgtgtttatcccatgttgagttctgtgcggggcagagggaacacacggtaaatgcgttatggggaattataggctacttgagggagtgacagtctggtggtaactcctgccttcctccatcagtgccacgttggcatcctcttatgcagtcaggcttcagggctgatgggttcagaaccgagggcttctggctctgagtgaggtcctgctgcaaggtttcctagatgagccactgagactctaataagatccagtggaaataaccaggctctcgtcggaatataagtcccaagggaagctgtgccagtcttgtgggcgactgcctgacttactcctttcatttcagcaccatgaagcttctcacgggcctggttttctgctccttggtcctgggtgtcagcagccgaagcttcttttcgttccttggcgaggcttttgatggttatgaatctcaggcacaccttggcatcacctgaaatacccatgccttcaactccccagcagagtctgcagaaactggcctggggtgtggcctg

SEQ ID NO: 732741 - DNA, 418 bp, Homo sapiens
ttccccagggaccacatccagcttttcttccctcccaagagaccagcgaaggctcagtataaatagcagccaccgctccctggcaggagggacccgcagctcagctacagcacagatcagcaccatgaagcttctcacgggcctggttttctgctccttggtcctgggtgtcagcagccgaagcttcttttcgttccttggcgaggcttttgatggggctcgggacatgtggagagcctactctgacatgagagaagccaattacatcggctcagacaaatacttccatgctcgggggaactatgatgctgccaaaaggggacctgggggtgtctgggctgcagaagcgatcagctcagggcagggatacaaagcggggagagggtacacaatgggtatctaataaatacttaagagg

SEQ ID NO: 732742 - DNA, 748 bp, Homo sapiens
ttccccagggaccacatccagcttttcttccctcccaagagaccagcgaaggctcagtataaatagcagccaccgctccctggcaggagggacccgcagctcagctacagcacagatcagcaccatgaagcttctcacgggcctggttttctgctccttggtcctgggtgtcagcagccgaagcttcttttcgttccttggcgaggcttttgatggggctcgggacatgtggagagcctactctgacatgagagaagccaattacatcggctcagacaaatacttccatgctcgggggaactatgatgctgccaaaaggggacctgggggtgtctgggctgcagaagcgatcaggcgatgccagagagaatatccagagattctttggcctgcctcagccttccgagtagatggtgtcaggcctctgagcccaagctaagccatcatatcccctgtgatctgcacgtatacatccagatggcctgaagtaactgaataatcacaaaaggagtgaaaatggcctgttcctgccttaactgatgacattccaccacaaaagaagtgaaaatggccagtccctgccttaactgatgacattacctcgtgaaattccttctgctggcctgcctgagaaatactgagcttcctcttcactctgctctcaggagatctggctgtgaggccctcagggcagggatacaaagcggggagagggtacacaatgggtatctaataaatacttaagagg

SEQ ID NO: 732743 - DNA, 777 bp, Homo sapiens
ttccccagggaccacatccagcttttcttccctcccaagagaccagcgaaggctcagtataaatagcagccaccgctccctggcaggagggacccgcagctcagctacagcacagatcaggtgaggagcacaccaaggagtgatttttaaaacttactctgttttctctttcccaacaagattatcatttcctttaaaaaaaatagttatcctggggcatacagccataccattctgaaggtgtcttatctcctctgatctagagagcaccatgaagcttctcacgggcctggttttctgctccttggtcctgggtgtcagcagccgaagcttcttttcgttccttggcgaggcttttgatggggctcgggacatgtggagagcctactctgacatgagagaagccaattacatcggctcagacaaatacttccatgctcgggggaactatgatgctgccaaaaggggacctgggggtgtctgggctgcagaagcgatcagcgatgccagagagaatatccagagattctttggccatggtgcggaggactcgctggccgatcaggctgccaatgaatggggcaggagtggcaaagaccccaatcacttccgacctgctggcctgcctgagaaatactgagcttcctcttcactctgctctcaggagatctggctgtgaggccctcagggcagggatacaaagcggggagagggtacacaatgggtatctaataaatacttaagaggcaaaaaaaaaaaaaaaaaaaaaaaaaaaaa

SEQ ID NO: 732744 - DNA, 1075 bp, Homo sapiens
ttccccagggaccacatccagcttttcttccctcccaagagaccagcgaaggctcagtataaatagcagccaccgctccctggcaggagggacccgcagctcagctacagcacagatcaggtgaggagcacaccaaggagtgatttttaaaacttactctgttttctctttcccaacaagattatcatttcctttaaaaaaaatagttatcctggggcatacagccataccattctgaaggtgtcttatctcctctgatctagagagcaccatgaagcttctcacgggcctggttttctgctccttggtcctgggtgtcagcagccgaagcttcttttcgttccttggcgaggcttttgatggggctcgggacatgtggagagcctactctgacatgagagaagccaattacatcggctcagacaaatacttccatgctcgggggaactatgatgctgccaaaaggggacctgggggtgtctgggctgcagaagcgatcagcgatgccagagagaatatccagagattctttggccatggtgcggaggactcgctggccgatcaggctgccaatgaatggggcaggagtggcaaagaccccaatcacttccgacctgctggcctgcctgagaaatactgagcttcctcttcactctgctctcaggagatctggctgtgaggccctcagggcagggatacaaagcggggagagggtacacaatgggtatctaataaatacttaagaggcaaaacgctaaacaacaggagaatggacgggtacctttttgggaccgtgcatctggcccctggaaaagggttttcaaagaccgatcgttgtggggaccgggggctcccctcaggaggcagagcaaacaggtgcaaagagcaggtatgctgaaggaaaacacaccgtggtattaagcaataggcggtggagacttcctgcccgaatttaaacatccgcccgggggagtaacgcggacgctgtctgacaactatctccgaagggctcctagggggccattaacgggagcctttgcacgcggggccccggcgggtcgcgtttaagataccg

SEQ ID NO: 732745 - DNA, 743 bp, Homo sapiens
gtgaggagcacaccaaggagtgatttttaaaacttactctgttttctctttcccaacaagattatcatttcctttaaaaaaaatagttatcctggggcatacagccataccattctgaaggtgtcttatctcctctgatctagagagcaccatgaagcttctcacgggcctggttttctgctccttggtcctgggtgtcagcagccgaagcttcttttcgttccttggcgaggcttttgatggggctcgggacatgtggagagcctactctgacatgagagaagccaattacatcggctcagacaaatacttccatgctcgggggaactatgatgctgccaaaaggggacctgggggtgtctgggctgcagaagcgatcagcagtacaggctagataacccaccaatttccccactgtcctctgatcccctcgtgacagaacctttcagcataacgcctcacatcccaagtctatacccttactgaagaatgctgctctgagcttctgcccccagaatcattccaacgaccacactgcaaagcctatgacagcatcaaatttcaggacctgcagggggcaggagtggcaaagaccccaatcacttccgacctgctggcctgcctgagaaatactgagcttcctcttcactctgctctcaggagatctggctgtgaggccctcagggcagggatacaaagcggggagagggtacacaatgggtatctaataaatacttaagagg

SEQ ID NO: 732746 - DNA, 819 bp, Homo sapiens
ttccccagggaccacatccagcttttcttccctcccaagagaccagcgaaggctcagtataaatagcagccaccgctccctggcaggagggacccgcagctcagctacagcacagatcaggtgaggagcacaccaaggagtgatttttaaaacttactctgttttctctttcccaacaagattatcatttcctttaaaaaaaatagttatcctggggcatacagccataccattctgaaggtgtcttatctcctctgatctagagagcaccatgaagcttctcacgggcctggttttctgctccttggtcctgggtgtcagcagccgaagcttcttttcgttccttggcgaggcttttgatggggctcgggacatgtggagagcctactctgacatgagagaagccaattacatcggctcagacaaatacttccatgctcgggggaactatgatgctgccaaaaggggacctgggggtgtctgggctgcagaagcgatcagcgatgccagagagaatatccagagattctttggccatggtgcggaggactcgctggccgatcaggctgccaatgaatggggcaggagtggcaaagaccccaatcacttccgacctgctggcctgcctgagaaatactgagcttcctcttcactctgctctcaggagatctggctgtgaggccctcagggcagggatacaaagcggggagagggtacacaatgggtatctaataaatacttaagaggaaaaaaaaaaaaacaaaaaaaaaaaaaaaaaaaaaaaaaaaccaaaaaaaaaaaaaaaaaaaaaaaaaaaaa

SEQ ID NO: 732747 - DNA, 672 bp, Homo sapiens
ttccccagggaccacatccagcttttcttccctcccaagagaccagcgaaggctcagtataaatagcagccaccgctccctggcaggagggacccgcagctcagctacagcacagatcagcaccatgaagcttctcacgggcctggttttctgctccttggtcctgggtgtcagcagccgaagcttcttttcgttccttggcgaggcttttgatggggctcgggacatgtggagagcctactctgacatgagagaagccaattacatcggctcagacaaatacttccatgctcgggggaactatgatgctgccaaaaggggacctgggggtgtctgggctgcagaagcgatcagcgatgccagagagaatatccagagattctttggccatggtgcggaggactcgctggccgatcaggctgccaatgaatggggcaggagtggcaaagaccccaatcacttccgacctgctggcctgcctgagaaatactgagcttcctcttcactctgctctcaggagatctggctgtgaggccctcagggcagggatacaaagcggggagagggtacacaatgggtatctaataaatacttaagaggaaaaaaaaaaaaacaaaaaaaaaaaaaaaaaaaaaaaaaaaccaaaaaaaaaaaaaaaaaaaaaaaaaaaaa

SEQ ID NO: 732748 - DNA, 665 bp, Homo sapiens
ttccccagggaccacatccagcttttcttccctcccaagagaccagcgaaggctcagtataaatagcagccaccgctccctggcaggagggacccgcagctcagctacagcacagatcagcaccatgaagcttctcacgggcctggttttctgctccttggtcctgggtgtcagcagccgaagcttcttttcgttccttggcgaggcttttgatggggctcgggacatgtggagagcctactctgacatgagagaagccaattacatcggctcagacaaatacttccatgctcgggggaactatgatgctgccaaaaggggacctgggggtgtctgggctgcagaagcgatcagcgatgccagagagaatatccagagattctttggccatggtgcggaggactcgctggccgatcaggctgccaatgaatggtcgctggtcccctagcactgggcatgctccctgcggccctgttcactagctgtcctctgcctggaacagatctgtcacctctcacttcctcttcactctgctctcaggagatctggctgtgaggccctcagggcagggatacaaagcggggagagggtacacaatgggtatctaataaatacttaagaggaaaaaaaaaaaaacaaaaaaaaaaaaaaaaaaaaaaaaaaac

SEQ ID NO: 732749 - DNA, 716 bp, Homo sapiens
ttccccagggaccacatccagcttttcttccctcccaagagaccagcgaaggctcagtataaatagcagccaccgctccctggcaggagggacccgcagctcagctacagcacagatcagcaccatgaagcttctcacgggcctggttttctgctccttggtcctgggtgtcagcagccgaagcttcttttcgttccttggcgaggcttttgatggggctcgggacatgtggagagcctactctgacatgagagaagccaattacatcggctcagacaaatacttccatgctcgggggaactatgatgctgccaaaaggggacctgggggtgtctgggctgcagaagcgatcagcagtacaggctagataacccaccaatttccccactgtcctctgatcccctcgtgacagaacctttcagcataacgcctcacatcccaagtctatacccttactgaagaatgctgctctgagcttctgcccccagaatcattccaacgaccacactgcaaagcctatgacagcatcaaatttcaggacctgcagggggcaggagtggcaaagaccccaatcacttccgacctgctggcctgcctgagaaatactgagcttcctcttcactctgctctcaggagatctggctgtgaggccctcagggcagggatacaaagcggggagagggtacacaatgggtatctaataaatacttaagagg

SEQ ID NO: 732750 - DNA, 311 bp, Homo sapiens
ttccccagggaccacatccagcttttcttccctcccaagagaccagcgaaggctcagtataaatagcagccaccgctccctggcaggagggacccgcagctcagctacagcacagatcagcaccatgaagcttctcacgggcctggttttctgctccttggtcctgggtgtcagcagccgaagcttcttttcgttccttggcgaggcttttgatggggctcgggacatgtggagagcctactctgacatgagagaagccaattacatcggctcagacaaatcaaaaaaaaaaaaaaaaaaaaaaaaaaaaa

SEQ ID NO: 732751 - DNA, 1068 bp, Homo sapiens
gtgaggagcacaccaaggagtgatttttaaaacttactctgttttctctttcccaacaagattatcatttcctttaaaaaaaatagttatcctggggcatacagccataccattctgaaggtgtcttatctcctctgatctagagaggtaagcagggtcgggcctggtagtacttggatgggagaacacctgggaataccaggtgctaaaggctttaagaataaaaaataatgatcctgctttgtgtttatcccatgttgagttctgtgcggggcagagggaacacacggtaaatgcgttatggggaattataggctacttgagggagtgacagtctggtggtaactcctgccttcctccatcagtgccacgttggcatcctcttatgcagtcaggcttcagggctgatgggttcagaaccgagggcttctggctctgagtgaggtcctgctgcaaggtttcctagatgagccactgagactctaataagatccagtggaaataaccaggctctcgtcggaatataagtcccaagggaagctgtgccagtcttgtgggcgactgcctgacttactcctttcatttcagcaccatgaagcttctcacgggcctggttttctgctccttggtcctgggtgtcagcagccgaagcttcttttcgttccttggcgaggcttttgatggggctcgggacatgtggagagcctactctgacatgagagaagccaattacatcggctcagacaaatacttccatgctcgggggaactatgatgctgccaaaaggggacctgggggtgtctgggctgcagaagcgatcagcgatgccagagagaatatccagagattctttggccatggtgcggaggactcgctggccgatcaggctgccaatgaatggggcaggagtggcaaagaccccaatcacttccgacctgctggcctgcctgagaaatactgagcttcctcttcactctgctctcaggagatctggctgtgaggccctcagggcagggatacaaagcggggagagggtacacaatgggtatctaataaatacttaagagg

SEQ ID NO: 732752 - DNA, 1098 bp, Homo sapiens
gtgaggagcacaccaaggagtgatttttaaaacttactctgttttctctttcccaacaagattatcatttcctttaaaaaaaatagttatcctggggcatacagccataccattctgaaggtgtcttatctcctctgatctagagaggtaagcagggtcgggcctggtagtacttggatgggagaacacctgggaataccaggtgctaaaggctttaagaataaaaaataatgatcctgctttgtgtttatcccatgttgagttctgtgcggggcagagggaacacacggtaaatgcgttatggggaattataggctacttgagggagtgacagtctggtggtaactcctgccttcctccatcagtgccacgttggcatcctcttatgcagtcaggcttcagggctgatgggttcagaaccgagggcttctggctctgagtgaggtcctgctgcaaggtttcctagatgagccactgagactctaataagatccagtggaaataaccaggctctcgtcggaatataagtcccaagggaagctgtgccagtcttgtgggcgactgcctgacttactcctttcatttcagcaccatgaagcttctcacgggcctggttttctgctccttggtcctgggtgtcagcagccgaagcttcttttcgttccttggcgaggcttttgatggggctcgggacatgtggagagcctactctgacatgagagaagccaattacatcggctcagacaaatacttccatgctcgggggaactatgatgctgccaaaaggggacctgggggtgtctgggctgcagaagcgatcagcgatgccagagagaatatccagagattctttggccatggtgcggaggactcgctggccgatcaggctgccaatgaatggggcaggagtggcaaagaccccaatcacttccgacctgctggcctgcctgagaaatactgagcttcctcttcactctgctctcaggagatctggctgtgaggccctcagggcagggatacaaagcggggagagggtacacaatgggtatctaataaatacttaagaggcaaaaaaaaaaaaaaaaaaaaaaaaaaaaa

SEQ ID NO: 732753 - DNA, 1396 bp, Homo sapiens
gtgaggagcacaccaaggagtgatttttaaaacttactctgttttctctttcccaacaagattatcatttcctttaaaaaaaatagttatcctggggcatacagccataccattctgaaggtgtcttatctcctctgatctagagaggtaagcagggtcgggcctggtagtacttggatgggagaacacctgggaataccaggtgctaaaggctttaagaataaaaaataatgatcctgctttgtgtttatcccatgttgagttctgtgcggggcagagggaacacacggtaaatgcgttatggggaattataggctacttgagggagtgacagtctggtggtaactcctgccttcctccatcagtgccacgttggcatcctcttatgcagtcaggcttcagggctgatgggttcagaaccgagggcttctggctctgagtgaggtcctgctgcaaggtttcctagatgagccactgagactctaataagatccagtggaaataaccaggctctcgtcggaatataagtcccaagggaagctgtgccagtcttgtgggcgactgcctgacttactcctttcatttcagcaccatgaagcttctcacgggcctggttttctgctccttggtcctgggtgtcagcagccgaagcttcttttcgttccttggcgaggcttttgatggggctcgggacatgtggagagcctactctgacatgagagaagccaattacatcggctcagacaaatacttccatgctcgggggaactatgatgctgccaaaaggggacctgggggtgtctgggctgcagaagcgatcagcgatgccagagagaatatccagagattctttggccatggtgcggaggactcgctggccgatcaggctgccaatgaatggggcaggagtggcaaagaccccaatcacttccgacctgctggcctgcctgagaaatactgagcttcctcttcactctgctctcaggagatctggctgtgaggccctcagggcagggatacaaagcggggagagggtacacaatgggtatctaataaatacttaagaggcaaaacgctaaacaacaggagaatggacgggtacctttttgggaccgtgcatctggcccctggaaaagggttttcaaagaccgatcgttgtggggaccgggggctcccctcaggaggcagagcaaacaggtgcaaagagcaggtatgctgaaggaaaacacaccgtggtattaagcaataggcggtggagacttcctgcccgaatttaaacatccgcccgggggagtaacgcggacgctgtctgacaactatctccgaagggctcctagggggccattaacgggagcctttgcacgcggggccccggcgggtcgcgtttaagataccg

SEQ ID NO: 732754 - DNA, 1184 bp, Homo sapiens
gtgaggagcacaccaaggagtgatttttaaaacttactctgttttctctttcccaacaagattatcatttcctttaaaaaaaatagttatcctggggcatacagccataccattctgaaggtgtcttatctcctctgatctagagaggtaagcagggtcgggcctggtagtacttggatgggagaacacctgggaataccaggtgctaaaggctttaagaataaaaaataatgatcctgctttgtgtttatcccatgttgagttctgtgcggggcagagggaacacacggtaaatgcgttatggggaattataggctacttgagggagtgacagtctggtggtaactcctgccttcctccatcagtgccacgttggcatcctcttatgcagtcaggcttcagggctgatgggttcagaaccgagggcttctggctctgagtgaggtcctgctgcaaggtttcctagatgagccactgagactctaataagatccagtggaaataaccaggctctcgtcggaatataagtcccaagggaagctgtgccagtcttgtgggcgactgcctgacttactcctttcatttcagcaccatgaagcttctcacgggcctggttttctgctccttggtcctgggtgtcagcagccgaagcttcttttcgttccttggcgaggcttttgatggggctcgggacatgtggagagcctactctgacatgagagaagccaattacatcggctcagacaaatacttccatgctcgggggaactatgatgctgccaaaaggggacctgggggtgtctgggctgcagaagcgatcagcagtacaggctagataacccaccaatttccccactgtcctctgatcccctcgtgacagaacctttcagcataacgcctcacatcccaagtctatacccttactgaagaatgctgctctgagcttctgcccccagaatcattccaacgaccacactgcaaagcctatgacagcatcaaatttcaggacctgcagggggcaggagtggcaaagaccccaatcacttccgacctgctggcctgcctgagaaatactgagcttcctcttcactctgctctcaggagatctggctgtgaggccctcagggcagggatacaaagcggggagagggtacacaatgggtatctaataaatacttaagagg

SEQ ID NO: 732755 - DNA, 1140 bp, Homo sapiens
gtgaggagcacaccaaggagtgatttttaaaacttactctgttttctctttcccaacaagattatcatttcctttaaaaaaaatagttatcctggggcatacagccataccattctgaaggtgtcttatctcctctgatctagagaggtaagcagggtcgggcctggtagtacttggatgggagaacacctgggaataccaggtgctaaaggctttaagaataaaaaataatgatcctgctttgtgtttatcccatgttgagttctgtgcggggcagagggaacacacggtaaatgcgttatggggaattataggctacttgagggagtgacagtctggtggtaactcctgccttcctccatcagtgccacgttggcatcctcttatgcagtcaggcttcagggctgatgggttcagaaccgagggcttctggctctgagtgaggtcctgctgcaaggtttcctagatgagccactgagactctaataagatccagtggaaataaccaggctctcgtcggaatataagtcccaagggaagctgtgccagtcttgtgggcgactgcctgacttactcctttcatttcagcaccatgaagcttctcacgggcctggttttctgctccttggtcctgggtgtcagcagccgaagcttcttttcgttccttggcgaggcttttgatggggctcgggacatgtggagagcctactctgacatgagagaagccaattacatcggctcagacaaatacttccatgctcgggggaactatgatgctgccaaaaggggacctgggggtgtctgggctgcagaagcgatcagcgatgccagagagaatatccagagattctttggccatggtgcggaggactcgctggccgatcaggctgccaatgaatggggcaggagtggcaaagaccccaatcacttccgacctgctggcctgcctgagaaatactgagcttcctcttcactctgctctcaggagatctggctgtgaggccctcagggcagggatacaaagcggggagagggtacacaatgggtatctaataaatacttaagaggaaaaaaaaaaaaacaaaaaaaaaaaaaaaaaaaaaaaaaaaccaaaaaaaaaaaaaaaaaaaaaaaaaaaaa

SEQ ID NO: 732756 - DNA, 659 bp, Homo sapiens
taatttttaaaatacccaaagaattgagcaaaaaggactttggcaaggcaggttgttggatttaaaaccgttctcccattaatgccaaagccagcagaggtaccaactatagctccacggccagaagataccagcagctctgcctttactgaaatttcagctggagaaaggtccacaggtgaggtttcttccaaggagtaatttctcttatttgactcttttgagatccttttctcacataattgtcaaatttcaattggagagaaactgtgttttctacctcattacggggtcagtgctgaggagagtaggaactcaggaaatgcttcttgattgactttagtctgctgtattgggtgacaaattgaccacagaccaaataacacgttggaatcctcttattctttctagagatctgggctgagaattaagggtttatgcttcttcttaaaacccgtttcaatctttcatgcagttatgattctcatacaaacaaatggaaatggggaattagtctttcaaattcagtcctttggctggcacagtggctcatgcctgtaatcctttgggaggttgaggtaggaagattgcttgaggccaggagttcgagactagcctgggccgaacatacataccaagaccttgtctctaccaaaaaa

SEQ ID NO: 732757 - DNA, 717 bp, Homo sapiens
taatttttaaaatacccaaagaattgagcaaaaaggactttggcaaggcaggttgttggatttaaaaccgttctcccattaatgccaaagccagcagaggtaccaactatagctccacggccagaagataccagcagctctgcctttactgaaatttcagctggagaaaggtccacagcacaatgaggcttttcacaggcattgttttctgctccttggtcatgggagtcaccagtgaaagctggcgttcgtttttcaaggaggctctccaaggggttggggacatgggcagagcctattgggacataatgatatccaatcaccaaaattcaaacagatatctctatgctcggggaaactatgatgctgcccaaagaggacctgggggtgtctgggctgctaaactcatcagccgttccagggtctatcttcagggattaatagactactatttatttggaaacagcagcactgtattggaggactcgaagtccaacgagaaagctgaggaatggggccggagtggcaaagaccccgaccgcttcagacctgacggcctgcctaagaaatactgagcttcctgctcctctgctctcagggaaactgggctgtgagccacacacttctccccccagacagggacacagggtcactgagctttgtgtccccaggaactggtatagggcacctagaggtgttcaataaatgtttgtcaaa

SEQ ID NO: 732758 - DNA, 786 bp, Homo sapiens
taatttttaaaatacccaaagaattgagcaaaaaggactttggcaaggcaggttgttggatttaaaaccgttctcccattaatgccaaagccagcagaggtaccaactatagctccacggccagaagataccagcagctctgcctttactgaaatttcagctggagaaaggtccacagcacaatgaggcttttcacaggcattgttttctgctccttggtcatgggagtcaccagtgaaagctggcgttcgtttttcaaggaggctctccaaggggttggggacatgggcagagcctattgggacataatgatatccaatcaccaaaattcaaacagatatctctatgctcggggaaactatgatgctgcccaaagaggacctgggggtgtctgggctgctaaactcatcagccgttccagggtctatcttcagggattaatagactactatttatttggaaacagcagcactgtattggaggactcgaagtccaacgagaaagctgaggaatggggccggagtggcaaagaccccgaccgcttcagacctgacggcctgcctaagaaatactgagcttcctgctcctctgctctcagggaaactgggctgtgagccacacacttctccccccagacagggacacagggtcactgagctttgtgtccccaggaactggtatagggcacctagaggtgttcaataaatgtttgtcaaacacacaacacaacaacaacacccaaaacatgtgtcaccaccactgagccctacgaaaccctttcataaa

SEQ ID NO: 732759 - DNA, 736 bp, Homo sapiens
taatttttaaaatacccaaagaattgagcaaaaaggactttggcaaggcaggttgttggatttaaaaccgttctcccattaatgccaaagccagcagaggtaccaactatagctccacggccagaagataccagcagctctgcctttactgaaatttcagctggagaaaggtccacagcacaatgaggcttttcacaggcattgttttctgctccttggtcatgggagtcaccagtgaaagctggcgttcgtttttcaaggaggctctccaaggggttggggacatgggcagagcctattgggacataatgatatccaatcaccaaaattcaaacagatatctctatgctcggggaaactatgatgctgcccaaagaggacctgggggtgtctgggctgctaaactcatcagccgttccagggtctatcttcagggattaatagactactatttatttggaaacagcagcactgtattggaggactcgaagtccaacgagaaagctgaggaatggggccggagtggcaaagaccccgaccgcttcagacctgacggcctgcctaagaaatactgagcttcctgctcctctgctctcagggaaactgggctgtgagccacacacttctccccccagacagggacacagggtcactgagctttgtgtccccaggaactggtatagggcacctagaggtgttcaataaatgtttgtcaaattgaatttgttggtggaaa

SEQ ID NO: 732760 - DNA, 717 bp, Homo sapiens
taatttttaaaatacccaaagaattgagcaaaaaggactttggcaaggcaggttgttggatttaaaaccgttctcccattaatgccaaagccagcagaggtaccaactatagctccacggccagaagataccagcagctctgcctttactgaaatttcagctggagaaaggtccacagcacagtgaggcttttcacaggcattgttttctgctccttggtcatgggagtcaccagtgaaagctggcgttcgtttttcaaggaggctctccaaggggttggggacatgggcagagcctattgggacataatgatatccaatcaccaaaattcaaacagatatctctatgctcggggaaactatgatgctgcccaaagaggacctgggggtgtctgggctgctaaactcatcagccgttccagggtctatcttcagggattaatagactactatttatttggaaacagcagcactgtattggaggactcgaagtccaacgagaaagctgaggaatggggccggagtggcaaagaccccgaccgcttcagacctgacggcctgcctaagaaatactgagcttcctgctcctctgctctcagggaaactgggctgtgagccacacacttctccccccagacagggacacagggtcactgagctttgtgtccccaggaactggtatagggcacctagaggtgttcaataaatgtttgtcaaa

SEQ ID NO: 732761 - DNA, 750 bp, Homo sapiens
gagggacccgcagctcagctacagcacagatcagcaccatgaagcttctcacgggcctggttttctgctccttggtcctgagtgtcagcagccgaagcttcttttcgttccttggcgaggcttttgatggggctcgggacatgtggagagcctactctgacatgagagaagccaattacatcggctcagacaaatacttccatgctcgggggaactatgatgctgccaaaaggggacctgggggtgcctgggccgcagaagtgatcagtttattttcagctgaactgtagagagtgaaggaagaagccttttttcttcactcctacatgacccaggcattgatccaggcaatgaagattcagtgtaaataaccaccactaacaagaccatggcctttggaacctgtgctaagaggcatggatgagctccctcagcatgtggatggagactgaagagaggtctgaaggctcagtgtggtgtctccattctctaagaagtttggaggagaagctggatacagcaaaacagactgagaaggagcagctgttgggaaaggaggaaaactaggaaagcatggtgttccagaatccctgatggagatattgattagtagtatcagattctgcttagcagttgaggagttcacctttggcttaagcaacatggagtcattgactatctcgtgaaggtggttgcaggagaaggtctggagaactaaatggagcagtgataagagagaatgggagatgg

SEQ ID NO: 732762 - DNA, 663 bp, Homo sapiens
taatttttaaaatacccaaagaattgagcaaaaaggactttggcaaggcaggttgttggatttaaaaccgttctcccattaatgccaaagccagcagaggtaccaactatagctccacggccagaagataccagcagctctgcctttactgaaatttcagctggagaaaggtccacagcacaatgaggcttttcacaggcattgttttctgctccttggtcatgggagtcaccagtgaaagctggcgttcgtttttcaaggaggctctccaaggggttggggacatgggcagagcctattgggacataatgatatccaatcaccgacctgggggtgtctgggctgctaaactcatcagccgttccagggtctatcttcagggattaatagactactatttatttggaaacagcagcactgtattggaggactcgaagtccaacgagaaagctgaggaatggggccggagtggcaaagaccccgaccgcttcagacctgacggcctgcctaagaaatactgagcttcctgctcctctgctctcagggaaactgggctgtgagccacacacttctccccccagacagggacacagggtcactgagctttgtgtccccaggaactggtatagggcacctagaggtgttcaataaatgtttgtcaaa

SEQ ID NO: 732763 - DNA, 807 bp, Homo sapiens
gagggacccgcagctcagctacagcacagatcagcaccatgaagcttctcacgggcctggttttctgctccttggtcctgagtgtcagcagccgaagcttcttttcgttccttggcgaggcttttgatggggctcgggacatgtggagagcctactctgacatgagagaagccaattacatcggctcagacaaatacttccatgctcgggggaactatgatgctgccaaaaggggacctgggggtgcctgggccgcagaagtgatcagcacaatgaggcttttcacaggcattgttttctgctccttggtcatgggagtcaccagtgaaagctggcgttcgtttttcaaggaggctctccaaggggttggggacatgggcagagcctattgggacataatgatatccaatcaccaaaattcaaacagatatctctatgctcggggaaactatgatgctgcccaaagaggacctgggggtgtctgggctgctaaactcatcagccgttccagggtctatcttcagggattaatagactactatttatttggaaacagcagcactgtattggaggactcgaagtccaacgagaaagctgaggaatggggccggagtggcaaagaccccgaccgcttcagacctgacggcctgcctaagaaatactgagcttcctgctcctctgctctcagggaaactgggctgtgagccacacacttctccccccagacagggacacagggtcactgagctttgtgtccccaggaactggtatagggcacctagaggtgttcaataaatgtttgtcaaa

SEQ ID NO: 732764 - DNA, 967 bp, Homo sapiens; identical to SEQ ID NO: 78141

SEQ ID NO: 732765 - DNA, 1536 bp, Homo sapiens; identical to SEQ ID NO: 78146

SEQ ID NO: 732766 - DNA, 1284 bp, Homo sapiens
ggcatgaatatcagacgctagggggacagccactgtgttgtctgctaccctcatcctggtcactgcttctgctataacagccctaggccaggaatatgaacaagccgctgctttggatctctgtcctcaccagcctcctggaagcctttgctcacacagacctcagtgggaaggtgtttgtatttcctagagaatctgttactgatcatgtaaacttgatcacaccgctggagaagctcctcatcaggtattgctgaattttggatcaatgggacacctttggtgaaaaagggtctgcgacagggttactttgtggaagctcagcccaagattgtcctggggcaggaacaggattcctatgggggcaagtttgataggagccagtcctttgtgggagagattggggatttgtacatgtgggactctgtgctgcccccagaaaatatcctgtctgcctatcagggtacccctctccctgccaatatcctggactggcaggctctgaactatgaaatcagaggatatgtcatcatcaaacccttggtgtgggtctgaggtcttgactcaacgagagcacttgaaaatgaaatgactgtctaagagatctggtcaaagcaactggatactagatcttacatctgcagctctttcttctttgaatttcctatctgtatgtctgcctaattaaaaaaatatatattgtattatgctacctgcatttgtttagtgcttgtcatagtcccatatctttatcttatgtctactacttatctatctactaattggtgtttcattggtaattggtgtttcattatcctgaaaactccaattgccaagtacggggaggaaaacctgtaagtaactagaaagatatatcgcaaagccagagcactcaatgagcacaacagtggcaatacttaaaagctactaacaatcattttaatgacgattcaaaatatgtgtggaattgtaatcacaattctcctatttgtttttccagctacaaatcgatcaaaaaggggtctgaggttgcatcagggagacaactgtaatgatataagtaagcaatagttgagaacctgacagcaagtaataagacaggaagaataaaactagaagaagtcagaatgaaaaccaaaaaagtatgagactgggatcattttgtatgaagacaaacataactttatgtctcaaaaacctcagtaggactgtacaatgcttgattttcataatgttctcttgatgtcatcaaaaaatattatactctgaatattgctcacatga

SEQ ID NO: 732767 - DNA, 715 bp, Homo sapiens
ggcatgaatatcagacgctagggggacagccactgtgttgtctgctaccctcatcctggtcactgcttctgctataacagccctaggccaggaatatgaacaagccgctgctttggatctctgtcctcaccagcctcctggaagcctttgctcacacagacctcagtgggaaggtgtttgtatttcctagagaatctgttactgatcatgtaaacttgatcacaccgctggagaagctcctcatcaggtattgctgaattttggatcaatgggacacctttggtgaaaaagggtctgcgacagggttactttgtggaagctcagcccaagattgtcctggggcaggaacaggattcctatgggggcaagtttgataggagccagtcctttgtgggagagattggggatttgtacatgtgggactctgtgctgcccccagaaaatatcctgtctgcctatcagggtacccctctccctgccaatatcctggactggcaggctctgaactatgaaatcagaggatatgtcatcatcaaacccttggtgtgggtctgaggtcttgactcaacgagagcacttgaaaatgaaatgactgtctaagagatctggtcaaagcaactggatactagatcttacatctgcagctctttcttctttgaatttcctatctgtatgtctgcctaattaaaaaaatatatattgtattatgctacct

SEQ ID NO: 732768 - DNA, 600 bp, Homo sapiens
ggcatgaatatcagacgctagggggacagccactgtgttgtctgctaccctcatcctggtcactgcttctgctataacagccctaggccaggaatatgaacaagccgctgctttggatctcttcctcatcaggtattgctgaattttggatcaatgggacacctttggtgaaaaagggtctgcgacagggttactttgtggaagctcagcccaagattgtcctggggcaggaacaggattcctatgggggcaagtttgataggagccagtcctttgtgggagagattggggatttgtacatgtgggactctgtgctgcccccagaaaatatcctgtctgcctatcagggtacccctctccctgccaatatcctggactggcaggctctgaactatgaaatcagaggatatgtcatcatcaaacccttggtgtgggtctgaggtcttgactcaacgagagcacttgaaaatgaaatgactgtctaagagatctggtcaaagcaactggatactagatcttacatctgcagctctttcttctttgaatttcctatctgtatgtctgcctaattaaaaaaatatatattgtattatgctacct

SEQ ID NO: 732769 - DNA, 1418 bp, Homo sapiens; identical to SEQ ID NO: 78147

SEQ ID NO: 732770 - DNA, 849 bp, Homo sapiens
aagactggtatcaacgcagagtgcccattacggccgggagggcatgaatatcagacgctagggggacagccactgtgttgtctgctaccctcatcctggtcactgcttctgctataacagccctaggccaggaatatgaacaagccgctgctttggatctctgtcctcaccagcctcctggaagcctttgctcacacagacctcagtgggaaggtgtttgtatttcctagagaatctgttactgatcatgtaaacttgatcacaccgctggagaagcctctacagaactttaccttgtgttttcgagcctatagtgatctctctcgtgcctacagcctcttctcctacaatacccaaggcagggataatgagctactagtttataaagaaagagttggagagtatagtctatacattggaagacacaaagttacatccaaagttatcgaaaagttcccggctccagtgcacatctgtgtgagctgggagtcctcatcaggtattgctgaattttggatcaatgggacacctttattggggatttgtacatgtgggactctgtgctgcccccagaaaatatcctgtctgcctatcagggtacccctctccctgccaatatcctggactggcaggctctgaactatgaaatcagaggatatgtcatcatcaaacccttggtgtgggtctgaggtcttgactcaacgagagcacttgaaaatgaaatgactgtctaagagatctggtcaaagcaactggatactagatcttacatctgcagctctttcttctttgaatttcctatctgtatgtctgcctaattaaaaaaatatatattgtattatgctacct

SEQ ID NO: 732771 - DNA, 1477 bp, Homo sapiens; identical to SEQ ID NO: 78144

SEQ ID NO: 732772 - DNA, 908 bp, Homo sapiens
aagactggtatcaacgcagagtgcccattacggccgggagggcatgaatatcagacgctagggggacagccactgtgttgtctgctaccctcatcctggtcactgcttctgctataacagccctaggccaggaatatgaacaagccgctgctttggatctctgtcctcaccagcctcctggaagcctttgctcacacagacctcagtgggaaggtgtttgtatttcctagagaatctgttactgatcatgtaaacttgatcacaccgctggagaagcctctacagaactttaccttgtgttttcgagcctatagtgatctctctcgtgcctacagcctcttctcctacaatacccaaggcagggataatgagctactagtttataaagaaagagttggagagtatagtctatacattggaagacacaaagttacatccaaagttatcgaaaagttcccggctccagtgcacatctgtgtgagctgggagtcctcatcaggtattgctgaattttggatcaatgggacacctttggcaggaacaggattcctatgggggcaagtttgataggagccagtcctttgtgggagagattggggatttgtacatgtgggactctgtgctgcccccagaaaatatcctgtctgcctatcagggtacccctctccctgccaatatcctggactggcaggctctgaactatgaaatcagaggatatgtcatcatcaaacccttggtgtgggtctgaggtcttgactcaacgagagcacttgaaaatgaaatgactgtctaagagatctggtcaaagcaactggatactagatcttacatctgcagctctttcttctttgaatttcctatctgtatgtctgcctaattaaaaaaatatatattgtattatgctacct

SEQ ID NO: 732773 - DNA, 1656 bp, Homo sapiens
caaggaagatataaatgacaaggtcggctcagctctcagacaaggttttccaagcaagatgaagcccaacatcatctttgtactttccctgctcctcatcttggagaagcaagcagctgtgatgggacaaaaaggtggatcaaaaggccgattaccaagtgaattttcccaatttccacacggacaaaagggccagcactattctggacaaaaaggcaagcaacaaactgaatccaaaggcagtttttctattcaatacacatatcatgtagatgccaatgatcatgaccagtcccgaaaaagtcagcaatatgatttgaatgccctacataagacgacaaaatcacaacgacatctaggtggaagtcaacaactgctccataataaacaagaaggcagagaccatgataaatcaaaaggtcattttcacagggtagttatacaccataaaggaggcaaagctcatcgtgggacacaaaatccttctcaagatcaggggaatagcccatctggaaagggaatatccagtcaatattcaaacacagaagaaaggctgtgggttcatggactaagtaaagaacaaacttccgtctctggtgcacaaaaaggtagaaaacaaggcggatcccaaagcagttatgttctccaaactgaagagctagtagctaacaaacaacaacgtgagactaaaaattctcatcaaaataagggcttaccaaaatgtggttgaagtgagagaggaacattcaagtaaagtacaaactcactctgtcctgcgcaccaagacaaactccaacatggatccaaagacattttttctacccaagatgagctcctagtatataacaagaatcaacaccagacaaaaaatctcaatcaagatcaacagcatggccgaaaggcaaataaaatatcataccaatcttcaagtacagaagaaagacgactccactatggagaaaatggtgtgcagaaagatgtatcccaaagcagtatttatagccaaactgaagagaaagcacagggcaagtctcaaaaacagataacaattcccagtcaagagcaagagcatagccaaaaggcaaataaaatatcataccaatcttcaagtacggaagaaagacgactccactatggagaaaatggtgtgcagaaagatgtatcccaacgcagtatttatagccaaactgaaaagctagtagcaggcaagtctcaaatccaggcaccaaatcctaagcaagagccatggcatggtgaaaatgcaaaaggagagtctggccaatctacaaatagagaacaagacctactcagtcatgaacaaaaaggcagacaccaacatggatctcatgggggattggatattgtaattatagagcaggaagatgacagtgatcgtcatttggcacaacatcttaacaacgaccgaaacccattatttacataaacctaccattcggtaaccatgtgaaaggatggaccaatatcaaggtgtcagttgacctcagtgaattctgtgatgtttctgagatgcagactcccgtgtagtttcagattcttggtccatggatgacaccacctgcccatgcttccttgaattaggctttcctaacctgaagcgccttcaaacttccaataaagagatcattttctgcttca

SEQ ID NO: 732774 - DNA, 1473 bp, Homo sapiens
caaggaagatataaatgacaaggtcggctcagctctcagacaaggttttccaagcaagatgaagcccaacatcatctttgtactttccctgctcctcatcttggagaagcaagcagctgtgatgggacaaaaaggtggatcaaaaggccgattaccaagtgaattttcccaatttccacacggacaaaagggccagcactattctggacaaaaaggcaagcaacaaactgaatccaaaggcagtttttctattcaatacacatatcatgtagatgccaatgatcatgaccagtcccgaaaaagtcagcaatatgatttgaatgccctacataagacgacaaaatcacaacgacatctaggtggaagtcaacaactgctccataataaacaagaaggcagagaccatgataaatcaaaaggtcattttcacagggtagttatacaccataaaggaggcaaagctcatcgtgggacacaaaatccttctcaagatcaggggaatagcccatctggaaagggaatatccagtcaatattcaaacacagaagaaaggctgtgggttcatggactaagtaaagaacaaacttccgtctctggtgcacaaaaaggtagaaaacaaggcggatcccaaagcagttatgttctccaaactgaagagctagtagctaacaaacaacaacgtgagactaaaaattctcatcaaaataagggcttaccaaaatgtggttgaagtgagagaggaacattcaagtaaagtacaaactcactctgtcctgcgcaccaagacaaactccaacatggatccaaagacattttttctacccaagatgagctcctagtatataacaagaatcaacaccagacaaaaaatctcaatcaagatcaacagcatggccgaaagaataaaatatcataccaatcttcaagtacggaagaaagacgactccactatggagaaaatggtgtgcagaaagatgtatcccaacgcagtatttatagccaaactgaaaagctagtagcaggcaagtctcaaatccaggcaccaaatcctaagcaagagccatggcatggtgaaaatgcaaaaggagagtctggccaatctacaaatagagaacaagacctactcagtcatgaacaaaaaggcagacaccaacatggatctcatgggggattggatattgtaattatagagcaggaagatgacagtgatcgtcatttggcacaacatcttaacaacgaccgaaacccattatttacataaacctaccattcggtaaccatgtgaaaggatggaccaatatcaaggtgtcagttgacctcagtgaattctgtgatgtttctgagatgcagactcccgtgtagtttcagattcttggtccatggatgacaccacctgcccatgcttccttgaattaggctttcctaacctgaagcgccttcaaacttccaataaagagatcattttctgcttca

SEQ ID NO: 732775 - DNA, 953 bp, Homo sapiens
  misc_feature (838)..(838): n is a, c, g, or t
  misc_feature (840)..(841): n is a, c, g, or t
  misc_feature (846)..(846): n is a, c, g, or t
caaggaagatataaatgacaaggtcggctcagctctcagacaaggttttccaagcaagatgaagcccaacatcatctttgtactttccctgctcctcatcttggagaagcaagcagctgtgatgggacaaaaaggtggatcaaaaggccgattaccaagtgaattttcccaatttccacacggacaaaagggccagcactattctggacaaaaaggcaagcaacaaactgaatccaaaggcagtttttctattcaatacacatatcatgtagatgccaatgatcatgaccagtcccgaaaaagtcagcaatatgatttgaatgccctacataagacgacaaaatcacaacgacatctaggtggaagtcaacaactgctccataataaacaagaaggcagagaccatgataaatcaaaaggtcattttcacagggtagttatacaccataaaggaggcaaagctcatcgtgggacacaaaatccttctcaagatcaggggaatagcccatctggaaagggaatatccagtcaatattcaaacacagaagaaaggctgtgggttcatggactaagtaaagaacaaacttccgtctctggtgcacaaaaaggtagaaaacaaggcggatcccaaagcagttatgttctccaaactgaagagctagtagctaacaaacaacaacgtgagactaaaaattctcatcaaaataagggcttaccaaaatgtggttgaagtgagagaggaacattcaagtaaagtaaactcaattgtctgggccagaaaaatccaatggtccacgaattttttaccagagggcctgtttaagagaacgaaaatttnannaaggnggaggaaatatacactgaaaaagcccggaaggggaggtcccgttaaaaaaaaggcggcggaatggcggggggtgtttttctactatctatcgctccttactccctta

SEQ ID NO: 732776 - DNA, 362 bp, Homo sapiens
  misc_feature (8)..(8): n is a, c, g, or t
cgggtcgnctactactactactaaattcgcggccgcgtcgacacattttttctacccaagatgagctcctagtatataacaagaatcaacaccagacaaaaaatctcaatcaagatcaacagcatggccgaaaggcaaataaaatatcataccaatcttcaagtacagaagaaagacgactccactatggagaaaatggtgtgcagaaagatgtatcccaaagcagtatttatagccaaactgaagagaaagcacagggcaagtctcaaaaacagataacaattcccagtcaagagcaagagcatagccaaaaggcaaaaaaaaagtcgacgcggccgcgaatttagtagtagtagtcgacc

SEQ ID NO: 732777 - DNA, 430 bp, Homo sapiens; identical to SEQ ID NO: 321567
  misc_feature (8)..(8): n is a, c, g, or t

SEQ ID NO: 732778 - DNA, 1862 bp, Homo sapiens
caaggaagatataaatgacaaggtcggctcagctctcagacaaggttttccaagcaagatgaagcccaacatcatctttgtactttccctgctcctcatcttggagaagcaagcagctgtgatgggacaaaaaggtggatcaaaaggccgattaccaagtgaattttcccaatttccacacggacaaaagggccagcactattctggacaaaaaggcaagcaacaaactgaatccaaaggcagtttttctattcaatacacatatcatgtagatgccaatgatcatgaccagtcccgaaaaagtcagcaatatgatttgaatgccctacataagacgacaaaatcacaacgacatctaggtggaagtcaacaactgctccataataaacaagaaggcagagaccatgataaatcaaaaggtcattttcacagggtagttatacaccataaaggaggcaaagctcatcgtgggacacaaaatccttctcaagatcaggggaatagcccatctggaaagggaatatccagtcaatattcaaacacagaagaaaggctgtgggttcatggactaagtaaagaacaaacttccgtctctggtgcacaaaaaggtagaaaacaaggcggatcccaaagcagttatgttctccaaactgaagagctagtagctaacaaacaacaacgtgagactaaaaattctcatcaaaataagggcttaccaaaatgtggttgaagtgagagaggaacattcaagtaaagtacaaactcactctgtcctgcgcaccaagacaaactccaacatggatccaaagacattttttctacccaagatgagctcctagtatataacaagaatcaacaccagacaaaaaatctcaatcaagatcaacagcatggccgaaaggcaaataaaatatcataccaatcttcaagtacagaagaaagacgactccactatggagaaaatggtgtgcagaaagatgtatcccaaagcagtatttatagccaaactgaagagaaagcacagggcaagtctcaaaaacagataacaattcccagtcaagagcaagagcatagccaaaaggcaaataaaatatcataccaatcttcaagtacggaagaaagacgactccactatggagaaaatggtgtgcagaaagatgtatcccaacgcagtatttatagccaaactgaaaagctagtagcaggcaagtctcaaatccaggcaccaaatcctaagcaagagccatggcatggtgaaaatgcaaaaggagagtctggccaatctacaaatagagaacaagacctactcagtcatgaacaaaaaggcagacaccaacatggatctcatgggggattggatattgtaattatagagcaggaagatgacagtgatcgtcatttggcacaacatcttaacaacgaccgaaacccattatttacataaacctaccattcggtaaccatgtgaaaggatggaccaatatcaaggtgtcagttgacctcagtgaattctgtgatgtttctgagatgcagactcccgtgtagtttcagattcttggtccatggatgacaccacctgcccatgcttccttgaattaggctttcctaacctgaagcgccttcaaacttccaataaagagatcattttctgcttcaaaaaacaaaacaaaaaaaacaccaacatgtgtgggcgcgcgtcgcaccggaaagagtatacaacttgtgtggggcggcgccaaagaaagaacatgtgagaatggcctgcgacactggggcacaaggtgggtccacacaaacacgcggggacagagttgacacaacgggtggcggcacaaggaacaagagacagcactcaacccggg

SEQ ID NO: 732779 - DNA, 1433 bp, Homo sapiens; identical to SEQ ID NO: 321572

SEQ ID NO: 732780 - DNA, 1639 bp, Homo sapiens
caaggaagatataaatgacaaggtcggctcagctctcagacaaggttttccaagcaagatgaagcccaacatcatctttgtactttccctgctcctcatcttggagaagcaagcagctgtgatgggacaaaaaggtggatcaaaaggccgattaccaagtgaattttcccaatttccacacggacaaaagggccagcactattctggacaaaaaggcaagcaacaaactgaatccaaaggcagtttttctattcaatacacatatcatgtagatgccaatgatcatgaccagtcccgaaaaagtcagcaatatgatttgaatgccctacataagacgacaaaatcacaacgacatctaggtggaagtcaacaactgctccataataaacaagaaggcagagaccatgataaatcaaaaggtcattttcacagggtagttatacaccataaaggaggcaaagctcatcgtgggacacaaaatccttctcaagatcaggggaatagcccatctggaaagggaatatccagtcaatattcaaacacagaagaaaggctgtgggttcatggatccaacatggatccaaagacattttttctacccaagatgagctcctagtatataacaagaatcaacaccagacaaaaaatctcaatcaagatcaacagcatggccgaaaggcaaataaaatatcataccaatcttcaagtacagaagaaagacgactccactatggagaaaatggtgtgcagaaagatgtatcccaaagcagtatttatagccaaactgaagagaaagcacagggcaagtctcaaaaacagataacaattcccagtcaagagcaagagcatagccaaaaggcaaataaaatatcataccaatcttcaagtacggaagaaagacgactccactatggagaaaatggtgtgcagaaagatgtatcccaacgcagtatttatagccaaactgaaaagctagtagcaggcaagtctcaaatccaggcaccaaatcctaagcaagagccatggcatggtgaaaatgcaaaaggagagtctggccaatctacaaatagagaacaagacctactcagtcatgaacaaaaaggcagacaccaacatggatctcatgggggattggatattgtaattatagagcaggaagatgacagtgatcgtcatttggcacaacatcttaacaacgaccgaaacccattatttacataaacctaccattcggtaaccatgtgaaaggatggaccaatatcaaggtgtcagttgacctcagtgaattctgtgatgtttctgagatgcagactcccgtgtagtttcagattcttggtccatggatgacaccacctgcccatgcttccttgaattaggctttcctaacctgaagcgccttcaaacttccaataaagagatcattttctgcttcaaaaaacaaaacaaaaaaaacaccaacatgtgtgggcgcgcgtcgcaccggaaagagtatacaacttgtgtggggcggcgccaaagaaagaacatgtgagaatggcctgcgacactggggcacaaggtgggtccacacaaacacgcggggacagagttgacacaacgggtggcggcacaaggaacaagagacagcactcaacccggg

SEQ ID NO: 732781 - DNA, 1683 bp, Homo sapiens
caaggaagatataaatgacaaggtcggctcagctctcagacaaggttttccaagcaagatgaagcccaacatcatctttgtactttccctgctcctcatcttggagaagcaagcagctgtgatgggacaaaaaggtggatcaaaaggccgattaccaagtgaattttcccaatttccacacggacaaaagggccagcactattctggacaaaaaggcaagcaacaaactgaatccaaaggcagtttttctattcaatacacatatcatgtagatgccaatgatcatgaccagtcccgaaaaagtcagcaatatgatttgaatgccctacataagacgacaaaatcacaacgacatctaggtggaagtcaacaactgctccataataaacaagaaggcagagaccatgataaatcaaaaggtcattttcacagggtagttatacaccataaaggaggcaaagctcatcgtgggacacaaaatccttctcaagatcaggggaatagcccatctggaaagggaatatccagtcaatattcaaacacagaagaaaggctgtgggttcatggactaagtaaagaacaaacttccgtctctggtgcacaaaaaggtagaaaacaaggcggatcccaaagcagttatgttctccaaactgaagagctagtagctaacaaacaacaacgtgagactaaaaattctcatcaaaataagggcttaccaaaatgtggttgaagtgagagaggaacattcaagtaaagtacaaactcactctgtcctgcgcaccaagacaaactccaacatggatccaaagacattttttctacccaagatgagctcctagtatataacaagaatcaacaccagacaaaaaatctcaatcaagatcaacagcatggccgaaaggcaaataaaatatcataccaatcttcaagtacagaagaaagacgactccactatggagaaaatggtgtgcagaaagatgtatcccaaagcagtatttatagccaaactgaagagaaagcacagggcaagtctcaaaaacagataacaattcccagtcaagagcaagagcatagccaaaaggcaaataaaatatcataccaatcttcaagtacggaagaaagacgactccactatggagaaaatggtgtgcagaaagatgtatcccaacgcagtatttatagccaaactgaaaagctagtagcaggcaagtctcaaatccaggcaccaaatcctaagcaagagccatggcatggtgaaaatgcaaaaggagagtctggccaatctacaaatagagaacaagacctactcagtcatgaacaaaaaggcagacaccaacatggatctcatgggggattggatattgtaattatagagcaggaagatgacagtgatcgtcatttggcacaacatcttaacaacgaccgaaacccattatttacataaacctaccattcggtaaccatgtgaaaggatggaccaatatcaaggtgtcagttgacctcagtgaattctgtgatgtttctgagatgcagactcccgtgtagtttcagattcttggtccatggatgacaccacctgcccatgcttccttgaattaggctttcctaacctgaagcgccttcaaacttccaataaagagatcattttctgcttcaaaaaaaaaaaaaaaaaaaaaaaaaaaa

SEQ ID NO: 732782 - DNA, 1624 bp, Homo sapiens
caaggaagatataaatgacaaggtcggctcagctctcagacaaggttttccaagcaagatgaagcccaacatcatctttgtactttccctgctcctcatcttggagaagcaagcagctgtgatgggacaaaaaggtggatcaaaaggccgattaccaagtgaattttcccaatttccacacggacaaaagggccagcactattctggacaaaaaggcaagcaacaaactgaatccaaaggcagtttttctattcaatacacatatcatgtagatgccaatgatcatgaccagtcccgaaaaagtcagcaatatgatttgaatgccctacataagacgacaaaatcacaacgacatctaggtggaagtcaacaactgctccataataaacaagaaggcagagaccatgataaatcaaaaggtcattttcacagggtagttatacaccataaaggaggcaaagctcatcgtgggacacaaaatccttctcaagatcaggggaatagcccatctggaaagggaatatccagtcaatattcaaacacagaagaaaggctgtgggttcatggactaagtaaagaacaaacttccgtctctggtgcacaaaaaggtagaaaacaaggcggatcccaaagcagttatgttctccaaactgaagagctagtagctaacaaacaacaacgtgagactaaaaattctcatcaaaataagggcttaccaaaatgtggttgaagtgagagaggaacattcaagtaaagtacaaactcactctgtcctgcgcaccaagacaaactccaacatggatccaaagacattttttctacccaagatgagctcctagtatataacaagaatcaacaccagacaaaaaatctcaatcaagatcaacagcatggccgaaaggcaaataaaatatcataccaatcttcaagtacagaagaaagacgactccactatggagaaaatggtgtgcagaaagatgtatcccaaagcagtatttatagccaaactgaagagaaagcacagggcaagtctcaaaaacagataacaattcccagtcaagagcaagagcatagccaaaaggcaaataaaatatcataccaatcttcaagtacggaagaaagacgactccactatggagaaaatggtgtgcagaaagatgtatcccaacgcagtatttatagccaaactgaaaagctagtagcaggcaagtctcaaatccaggcaccaaatcctaagcaagagccatggcatggtgaaaatgcaaaaggagagtctggccaatctacaaatagagaacaagacctactcagtcatgaacaaaaaggcagacaccaacatggatctcatgggggattggatattgtaattatagagcaggaagatgacagtgatcgtcatttggcacaacatcttaacaacgaccgaaacccattatttacataaacctaccattcggtgtcagttgacctcagtgaattctgtgatgtttctgagatgcagactcccgtgtagtttcagattcttggtccatggatgacaccacctgcccatgcttccttgaattaggctttcctaacctgaagcgccttcaaacttccaataaagagatcattttctgcttca

SEQ ID NO: 732783 - DNA, 1460 bp, Homo sapiens
caaggaagatataaatgacaaggtcggctcagctctcagacaaggttttccaagcaagatgaagcccaacatcatctttgtactttccctgctcctcatcttggagaagcaagcagctgtgatgggacaaaaaggtggatcaaaaggccgattaccaagtgaattttcccaatttccacacggacaaaagggccagcactattctggacaaaaaggcaagcaacaaactgaatccaaaggcagtttttctattcaatacacatatcatgtagatgccaatgatcatgaccagtcccgaaaaagtcagcaatatgatttgaatgccctacataagacgacaaaatcacaacgacatctaggtggaagtcaacaactgctccataataaacaagaaggcagagaccatgataaatcaaaaggtcattttcacagggtagttatacaccataaaggaggcaaagctcatcgtgggacacaaaatccttctcaagatcaggggaatagcccatctggaaagggaatatccagtcaatattcaaacacagaagaaaggctgtgggttcatggatccaacatggatccaaagacattttttctacccaagatgagctcctagtatataacaagaatcaacaccagacaaaaaatctcaatcaagatcaacagcatggccgaaaggcaaataaaatatcataccaatcttcaagtacagaagaaagacgactccactatggagaaaatggtgtgcagaaagatgtatcccaaagcagtatttatagccaaactgaagagaaagcacagggcaagtctcaaaaacagataacaattcccagtcaagagcaagagcatagccaaaaggcaaataaaatatcataccaatcttcaagtacggaagaaagacgactccactatggagaaaatggtgtgcagaaagatgtatcccaacgcagtatttatagccaaactgaaaagctagtagcaggcaagtctcaaatccaggcaccaaatcctaagcaagagccatggcatggtgaaaatgcaaaaggagagtctggccaatctacaaatagagaacaagacctactcagtcatgaacaaaaaggcagacaccaacatggatctcatgggggattggatattgtaattatagagcaggaagatgacagtgatcgtcatttggcacaacatcttaacaacgaccgaaacccattatttacataaacctaccattcggtaaccatgtgaaaggatggaccaatatcaaggtgtcagttgacctcagtgaattctgtgatgtttctgagatgcagactcccgtgtagtttcagattcttggtccatggatgacaccacctgcccatgcttccttgaattaggctttcctaacctgaagcgccttcaaacttccaataaagagatcattttctgcttcaaaaaaaaaaaaaaaaaaaaaaaaaaaa

SEQ ID NO: 732784 - DNA, 1401 bp, Homo sapiens
caaggaagatataaatgacaaggtcggctcagctctcagacaaggttttccaagcaagatgaagcccaacatcatctttgtactttccctgctcctcatcttggagaagcaagcagctgtgatgggacaaaaaggtggatcaaaaggccgattaccaagtgaattttcccaatttccacacggacaaaagggccagcactattctggacaaaaaggcaagcaacaaactgaatccaaaggcagtttttctattcaatacacatatcatgtagatgccaatgatcatgaccagtcccgaaaaagtcagcaatatgatttgaatgccctacataagacgacaaaatcacaacgacatctaggtggaagtcaacaactgctccataataaacaagaaggcagagaccatgataaatcaaaaggtcattttcacagggtagttatacaccataaaggaggcaaagctcatcgtgggacacaaaatccttctcaagatcaggggaatagcccatctggaaagggaatatccagtcaatattcaaacacagaagaaaggctgtgggttcatggatccaacatggatccaaagacattttttctacccaagatgagctcctagtatataacaagaatcaacaccagacaaaaaatctcaatcaagatcaacagcatggccgaaaggcaaataaaatatcataccaatcttcaagtacagaagaaagacgactccactatggagaaaatggtgtgcagaaagatgtatcccaaagcagtatttatagccaaactgaagagaaagcacagggcaagtctcaaaaacagataacaattcccagtcaagagcaagagcatagccaaaaggcaaataaaatatcataccaatcttcaagtacggaagaaagacgactccactatggagaaaatggtgtgcagaaagatgtatcccaacgcagtatttatagccaaactgaaaagctagtagcaggcaagtctcaaatccaggcaccaaatcctaagcaagagccatggcatggtgaaaatgcaaaaggagagtctggccaatctacaaatagagaacaagacctactcagtcatgaacaaaaaggcagacaccaacatggatctcatgggggattggatattgtaattatagagcaggaagatgacagtgatcgtcatttggcacaacatcttaacaacgaccgaaacccattatttacataaacctaccattcggtgtcagttgacctcagtgaattctgtgatgtttctgagatgcagactcccgtgtagtttcagattcttggtccatggatgacaccacctgcccatgcttccttgaattaggctttcctaacctgaagcgccttcaaacttccaataaagagatcattttctgcttca

SEQ ID NO: 732785 - DNA, 1348 bp, Homo sapiens
  misc_feature (8)..(8): n is a, c, g, or t
cgggtcgnctactactactactaaattcgcggccgcgtcgaccccaatttccacacggacaaaagggccagcactattctggacaaaaaggcaagcaacaaactgaatccaaaggcagtttttctattcaatacacatatcatgtagatgccaatgatcatgaccagtcccgaaaaagtcagcaatatgatttgaatgccctacataagacgacaaaatcacaacgacatctaggtggaagtcaacaactgctccataataaacaagaaggcagagaccatgataaatcaaaaggtcattttcacagggtagttatacaccataaaggaggcaaagctcatcgtgggacacaaaatccttctcaagatcaggggaatagcccatctggaaagggaatatccagtcaatattcaaacacagaagaaaggctgtgggttcatggactaagtaaagaacaaacttccgtctctggtgcacaaaaaggtagaaaacaaggcggatcccaaagcagttatgttctccaaactgaagagctagtagctaacaaacaacaacgtgagactaaaaattctcatcaaaataagggcttaccaaaatgtggttgaagtgagagaggaacattcaagtaaagtacaaactcactctgtcctgcgcaccaagacaaactccaacatggatccaaagacattttttctacccaagatgagctcctagtatataacaagaatcaacaccagacaaaaaatctcaatcaagatcaacagcatggccgaaagaataaaatatcataccaatcttcaagtacggaagaaagacgactccactatggagaaaatggtgtgcagaaagatgtatcccaacgcagtatttatagccaaactgaaaagctagtagcaggcaagtctcaaatccaggcaccaaatcctaagcaagagccatggcatggtgaaaatgcaaaaggagagtctggccaatctacaaatagagaacaagacctactcagtcatgaacaaaaaggcagacaccaacatggatctcatgggggattggatattgtaattatagagcaggaagatgacagtgatcgtcatttggcacaacatcttaacaacgaccgaaacccattatttacataaacctaccattcggtaaccatgtgaaaggatggaccaatatcaaggtgtcagttgacctcagtgaattctgtgatgtttctgagatgcagactcccgtgtagtttcagattcttggtccatggatgacaccacctgcccatgcttccttgaattaggctttcctaacctgaagcgccttcaaacttccaataaagagatcattttctgcttca

SEQ ID NO: 732786 - DNA, 1500 bp, Homo sapiens
caaggaagatataaatgacaaggtcggctcagctctcagacaaggttttccaagcaagatgaagcccaacatcatctttgtactttccctgctcctcatcttggagaagcaagcagctgtgatgggacaaaaaggtggatcaaaaggccgattaccaagtgaattttcccaatttccacacggacaaaagggccagcactattctggacaaaaaggcaagcaacaaactgaatccaaaggcagtttttctattcaatacacatatcatgtagatgccaatgatcatgaccagtcccgaaaaagtcagcaatatgatttgaatgccctacataagacgacaaaatcacaacgacatctaggtggaagtcaacaactgctccataataaacaagaaggcagagaccatgataaatcaaaaggtcattttcacagggtagttatacaccataaaggaggcaaagctcatcgtgggacacaaaatccttctcaagatcaggggaatagcccatctggaaagggaatatccagtcaatattcaaacacagaagaaaggctgtgggttcatggactaagtaaagaacaaacttccgtctctggtgcacaaaaaggtagaaaacaaggcggatcccaaagcagttatgttctccaaactgaagagctagtagctaacaaacaacaacgtgagactaaaaattctcatcaaaataagggcttaccaaaatgtggttgaagtgagagaggaacattcaagtaaagtacaaactcactctgtcctgcgcaccaagacaaactccaacatggatccaaagacattttttctacccaagatgagctcctagtatataacaagaatcaacaccagacaaaaaatctcaatcaagatcaacagcatggccgaaagaataaaatatcataccaatcttcaagtacggaagaaagacgactccactatggagaaaatggtgtgcagaaagatgtatcccaacgcagtatttatagccaaactgaaaagctagtagcaggcaagtctcaaatccaggcaccaaatcctaagcaagagccatggcatggtgaaaatgcaaaaggagagtctggccaatctacaaatagagaacaagacctactcagtcatgaacaaaaaggcagacaccaacatggatctcatgggggattggatattgtaattatagagcaggaagatgacagtgatcgtcatttggcacaacatcttaacaacgaccgaaacccattatttacataaacctaccattcggtaaccatgtgaaaggatggaccaatatcaaggtgtcagttgacctcagtgaattctgtgatgtttctgagatgcagactcccgtgtagtttcagattcttggtccatggatgacaccacctgcccatgcttccttgaattaggctttcctaacctgaagcgccttcaaacttccaataaagagatcattttctgcttcaaaaaaaaaaaaaaaaaaaaaaaaaaaa

SEQ ID NO: 732787 - DNA, 1468 bp, Homo sapiens
caaggaagatataaatgacaaggtcggctcagctctcagacaaggttttccaagcaagatgaagcccaacatcatctttgtactttccctgctcctcatcttggagaagcaagcagctgtgatgggacaaaaaggtggatcaaaaggccgattaccaagtgaattttcccaatttccacacggacaaaagggccagcactattctggacaaaaaggcaagcaacaaactgaatccaaaggcagtttttctattcaatacacatatcatgtagatgccaatgatcatgaccagtcccgaaaaagtcagcaatatgatttgaatgccctacataagacgacaaaatcacaacgacatctaggtggaagtcaacaactgctccataataaacaagaaggcagagaccatgataaatcaaaaggtcattttcacagggtagttatacaccataaaggaggcaaagctcatcgtgggacacaaaatccttctcaagatcaggggaatagcccatctggaaagggaatatccagtcaatattcaaacacagaagaaaggctgtgggttcatggactaagtaaagaacaaacttccgtctctggtgcacaaaaaggtagaaaacaaggcggatcccaaagcagttatgttctccaaactgaagagctagtagctaacaaacaacaacgtgagactaaaaattctcatcaaaataagggcttaccaaaatgtggttgaagtgagagaggaacattcaagtaaagtacaaactcactctgtcctgcgcaccaagacaaactccaacatggatccaaagacattttttctacccaagatgagctcctagtatataacaagaatcaacaccagacaaaaaatctcaatcaagatcaacagcatggccgaaagaataaaatatcataccaatcttcaagtacggaagaaagacgactccactatggagaaaatggtgtgcagaaagatgtatcccaacgcagtatttatagccaaactgaaaagctagtagcaggcaagtctcaaatccaggcaccaaatcctaagcaagagccatggcatggtgaaaatgcaaaaggagagtctggccaatctacaaatagagaacaagacctactcagtcatgaacaaaaaggcagacaccaacatggatctcatgggggattggatattgtaattatagagcaggaagatgacagtgatcgtcatttggcacaacatcttaacaacgaccgaaacccattatttacataaacctaccattcggtgtcagttgacctcagtgaattctgtgatgtttctgagatgcagactcccgtgtagtttcagattcttggtccatggatgacaccacctgcccatgcttccttgaattaggctttcctaacctgaagcgccttcaaacttccaataaagagatcattttctgcttcaaaaaaaaaaaaaaaaaaaaaaaaaaaa

SEQ ID NO: 732788 - DNA, 1651 bp, Homo sapiens
caaggaagatataaatgacaaggtcggctcagctctcagacaaggttttccaagcaagatgaagcccaacatcatctttgtactttccctgctcctcatcttggagaagcaagcagctgtgatgggacaaaaaggtggatcaaaaggccgattaccaagtgaattttcccaatttccacacggacaaaagggccagcactattctggacaaaaaggcaagcaacaaactgaatccaaaggcagtttttctattcaatacacatatcatgtagatgccaatgatcatgaccagtcccgaaaaagtcagcaatatgatttgaatgccctacataagacgacaaaatcacaacgacatctaggtggaagtcaacaactgctccataataaacaagaaggcagagaccatgataaatcaaaaggtcattttcacagggtagttatacaccataaaggaggcaaagctcatcgtgggacacaaaatccttctcaagatcaggggaatagcccatctggaaagggaatatccagtcaatattcaaacacagaagaaaggctgtgggttcatggactaagtaaagaacaaacttccgtctctggtgcacaaaaaggtagaaaacaaggcggatcccaaagcagttatgttctccaaactgaagagctagtagctaacaaacaacaacgtgagactaaaaattctcatcaaaataagggcttaccaaaatgtggttgaagtgagagaggaacattcaagtaaagtacaaactcactctgtcctgcgcaccaagacaaactccaacatggatccaaagacattttttctacccaagatgagctcctagtatataacaagaatcaacaccagacaaaaaatctcaatcaagatcaacagcatggccgaaaggcaaataaaatatcataccaatcttcaagtacagaagaaagacgactccactatggagaaaatggtgtgcagaaagatgtatcccaaagcagtatttatagccaaactgaagagaaagcacagggcaagtctcaaaaacagataacaattcccagtcaagagcaagagcatagccaaaaggcaaataaaatatcataccaatcttcaagtacggaagaaagacgactccactatggagaaaatggtgtgcagaaagatgtatcccaacgcagtatttatagccaaactgaaaagctagtagcaggcaagtctcaaatccaggcaccaaatcctaagcaagagccatggcatggtgaaaatgcaaaaggagagtctggccaatctacaaatagagaacaagacctactcagtcatgaacaaaaaggcagacaccaacatggatctcatgggggattggatattgtaattatagagcaggaagatgacagtgatcgtcatttggcacaacatcttaacaacgaccgaaacccattatttacataaacctaccattcggtgtcagttgacctcagtgaattctgtgatgtttctgagatgcagactcccgtgtagtttcagattcttggtccatggatgacaccacctgcccatgcttccttgaattaggctttcctaacctgaagcgccttcaaacttccaataaagagatcattttctgcttcaaaaaaaaaaaaaaaaaaaaaaaaaaaa

SEQ ID NO: 732789 - DNA, 1428 bp, Homo sapiens
caaggaagatataaatgacaaggtcggctcagctctcagacaaggttttccaagcaagatgaagcccaacatcatctttgtactttccctgctcctcatcttggagaagcaagcagctgtgatgggacaaaaaggtggatcaaaaggccgattaccaagtgaattttcccaatttccacacggacaaaagggccagcactattctggacaaaaaggcaagcaacaaactgaatccaaaggcagtttttctattcaatacacatatcatgtagatgccaatgatcatgaccagtcccgaaaaagtcagcaatatgatttgaatgccctacataagacgacaaaatcacaacgacatctaggtggaagtcaacaactgctccataataaacaagaaggcagagaccatgataaatcaaaaggtcattttcacagggtagttatacaccataaaggaggcaaagctcatcgtgggacacaaaatccttctcaagatcaggggaatagcccatctggaaagggaatatccagtcaatattcaaacacagaagaaaggctgtgggttcatggatccaacatggatccaaagacattttttctacccaagatgagctcctagtatataacaagaatcaacaccagacaaaaaatctcaatcaagatcaacagcatggccgaaaggcaaataaaatatcataccaatcttcaagtacagaagaaagacgactccactatggagaaaatggtgtgcagaaagatgtatcccaaagcagtatttatagccaaactgaagagaaagcacagggcaagtctcaaaaacagataacaattcccagtcaagagcaagagcatagccaaaaggcaaataaaatatcataccaatcttcaagtacggaagaaagacgactccactatggagaaaatggtgtgcagaaagatgtatcccaacgcagtatttatagccaaactgaaaagctagtagcaggcaagtctcaaatccaggcaccaaatcctaagcaagagccatggcatggtgaaaatgcaaaaggagagtctggccaatctacaaatagagaacaagacctactcagtcatgaacaaaaaggcagacaccaacatggatctcatgggggattggatattgtaattatagagcaggaagatgacagtgatcgtcatttggcacaacatcttaacaacgaccgaaacccattatttacataaacctaccattcggtgtcagttgacctcagtgaattctgtgatgtttctgagatgcagactcccgtgtagtttcagattcttggtccatggatgacaccacctgcccatgcttccttgaattaggctttcctaacctgaagcgccttcaaacttccaataaagagatcattttctgcttcaaaaaaaaaaaaaaaaaaaaaaaaaaaa

SEQ ID NO: 732790 - DNA, 1375 bp, Homo sapiens
  misc_feature (8)..(8): n is a, c, g, or t
cgggtcgnctactactactactaaattcgcggccgcgtcgaccccaatttccacacggacaaaagggccagcactattctggacaaaaaggcaagcaacaaactgaatccaaaggcagtttttctattcaatacacatatcatgtagatgccaatgatcatgaccagtcccgaaaaagtcagcaatatgatttgaatgccctacataagacgacaaaatcacaacgacatctaggtggaagtcaacaactgctccataataaacaagaaggcagagaccatgataaatcaaaaggtcattttcacagggtagttatacaccataaaggaggcaaagctcatcgtgggacacaaaatccttctcaagatcaggggaatagcccatctggaaagggaatatccagtcaatattcaaacacagaagaaaggctgtgggttcatggactaagtaaagaacaaacttccgtctctggtgcacaaaaaggtagaaaacaaggcggatcccaaagcagttatgttctccaaactgaagagctagtagctaacaaacaacaacgtgagactaaaaattctcatcaaaataagggcttaccaaaatgtggttgaagtgagagaggaacattcaagtaaagtacaaactcactctgtcctgcgcaccaagacaaactccaacatggatccaaagacattttttctacccaagatgagctcctagtatataacaagaatcaacaccagacaaaaaatctcaatcaagatcaacagcatggccgaaagaataaaatatcataccaatcttcaagtacggaagaaagacgactccactatggagaaaatggtgtgcagaaagatgtatcccaacgcagtatttatagccaaactgaaaagctagtagcaggcaagtctcaaatccaggcaccaaatcctaagcaagagccatggcatggtgaaaatgcaaaaggagagtctggccaatctacaaatagagaacaagacctactcagtcatgaacaaaaaggcagacaccaacatggatctcatgggggattggatattgtaattatagagcaggaagatgacagtgatcgtcatttggcacaacatcttaacaacgaccgaaacccattatttacataaacctaccattcggtaaccatgtgaaaggatggaccaatatcaaggtgtcagttgacctcagtgaattctgtgatgtttctgagatgcagactcccgtgtagtttcagattcttggtccatggatgacaccacctgcccatgcttccttgaattaggctttcctaacctgaagcgccttcaaacttccaataaagagatcattttctgcttcaaaaaaaaaaaaaaaaaaaaaaaaaaaa

SEQ ID NO: 732791 - DNA, 1343 bp, Homo sapiens
  misc_feature (8)..(8): n is a, c, g, or t
cgggtcgnctactactactactaaattcgcggccgcgtcgaccccaatttccacacggacaaaagggccagcactattctggacaaaaaggcaagcaacaaactgaatccaaaggcagtttttctattcaatacacatatcatgtagatgccaatgatcatgaccagtcccgaaaaagtcagcaatatgatttgaatgccctacataagacgacaaaatcacaacgacatctaggtggaagtcaacaactgctccataataaacaagaaggcagagaccatgataaatcaaaaggtcattttcacagggtagttatacaccataaaggaggcaaagctcatcgtgggacacaaaatccttctcaagatcaggggaatagcccatctggaaagggaatatccagtcaatattcaaacacagaagaaaggctgtgggttcatggactaagtaaagaacaaacttccgtctctggtgcacaaaaaggtagaaaacaaggcggatcccaaagcagttatgttctccaaactgaagagctagtagctaacaaacaacaacgtgagactaaaaattctcatcaaaataagggcttaccaaaatgtggttgaagtgagagaggaacattcaagtaaagtacaaactcactctgtcctgcgcaccaagacaaactccaacatggatccaaagacattttttctacccaagatgagctcctagtatataacaagaatcaacaccagacaaaaaatctcaatcaagatcaacagcatggccgaaagaataaaatatcataccaatcttcaagtacggaagaaagacgactccactatggagaaaatggtgtgcagaaagatgtatcccaacgcagtatttatagccaaactgaaaagctagtagcaggcaagtctcaaatccaggcaccaaatcctaagcaagagccatggcatggtgaaaatgcaaaaggagagtctggccaatctacaaatagagaacaagacctactcagtcatgaacaaaaaggcagacaccaacatggatctcatgggggattggatattgtaattatagagcaggaagatgacagtgatcgtcatttggcacaacatcttaacaacgaccgaaacccattatttacataaacctaccattcggtgtcagttgacctcagtgaattctgtgatgtttctgagatgcagactcccgtgtagtttcagattcttggtccatggatgacaccacctgcccatgcttccttgaattaggctttcctaacctgaagcgccttcaaacttccaataaagagatcattttctgcttcaaaaaaaaaaaaaaaaaaaaaaaaaaaa

SEQ ID NO: 732792 - DNA, 2280 bp, Homo sapiens
gggggcagatcctggggagaatggaggagcacacagaggcaggctcggcaccagagatgggggcccagaaggccctgattgacaatcctgctgacatcctagtcattgctgcatatttcctgctggtcattggcgttggcttgtggtccatgtgcagaaccaacagaggcactgtgggcggctacttcctggcaggacgcagcatggtgtggtggccggttggggcctctctcttcgccagcaacatcggcagtggccactttgtgggcctggcagggactggcgctgcaagtggcttggctgttgctggattcgagtggaatgcgctcttcgtggtgctgctactgggctggctgtttgcacccgtgtacctgacagcgggggtcatcacgatgccacagtacctgcgcaagcgcttcggcggccgccgcatccgcctctacctgtctgtgctctcccttttcctgtacatcttcaccaagatctcagtggacatgttctccggagctgtattcatccagcaggctctgggctggaacatctatgcctccgtcatcgcgcttctgggcatcaccatgatttacacggtgacaggagggctggccgcgctgatgtacacggacacggtacagaccttcgtcattctggggggcgcctgcatcctcatgggttacgccttccacgaggtgggcgggtattcgggtctcttcgacaaatacctgggagcagcgacttcgctgacggtgtccgaggatccagccgtgggaaacatctccagcttctgctatcgaccccggcccgactcctaccacctgctccggcaccccgtgaccggggatctgccgtggcccgcgctgctcctcggactcacaatcgtctcgggctggtactggtgcagcgaccaggtcatcgtgcagcgctgcctggccgggaagagcctgacccacatcaaggcgggctgcatcctgtgtgggtacctgaagctgacgcccatgtttctcatggtcatgccaggcatgatcagccgcattctgtacccagacgaggtggcgtgcgtggtgcctgaggtgtgcaggcgcgtgtgcggcacggaggtgggctgctccaacatcgcctacccgcggctcgtcgtgaagctcatgcccaacggtctgcgcggactcatgctggcggtcatgctggccgcgctcatgtcctcgctggcctccatcttcaacagcagcagcacgctcttcaccatggacatctacacgcgcctgcggccacgcgccggcgaccgcgagctgctgctggtgggacggctctgggtggtgttcatcgtggtagtgtcggtggcctggcttcccgtggtgcaggcggcacagggcgggcagctcttcgattacatccaggcagtctctagctacctggcaccgcccgtgtccgccgtcttcgtgctggcgctcttcgtgccgcgcgttaatgagcagggcgccttctggggactcatcgggggcctgctgatgggcctggcacgcctgattcccgagttctccttcggctcgggcagctgtgtgcagccctcggcgtgcccagctttcctctgcggcgtgcactacctctacttcgccattgtgctgttcttctgctctggcctcctcaccctcacggtctccctgtgcaccgcgcccatccccagaaagcacctccaccgcctggtcttcagtctccggcatagcaaggaggaacgggaggacctggatgctgatgagcagcaaggctcctcactccctgtacagaatgggtgcccagagagtgccatggagatgaatgagccccaggccccggcaccaagcctcttccgccagtgcctgctctggttttgtggaatgagcagaggtggggtgggcagtcctccgccccttacccaggaggaggcagcggcagcagccaggcggctggaggacatcagcgaggacccgagctgggcccgtgtggtcaacctcaatgccctgctcatgatggcagtggccgtgttcctctggggcttctatgcctaagaccaactgcgttggacaccataagccacagcctcacaggaagtgggggtgaggagcctgcggtgctccccagaaaaggggaaggggcagtggggtgagaaggtcctggctccccttctcccggccttcctctgcctggggcccactgcatctgattggcagtcacttcccatgagggcctggcccacccgctgcagttgccctaaggaaaaataaagctgcctttcccctgtcctgctgt

SEQ ID NO: 732793 - DNA, 531 bp, Homo sapiens
gtgagacgggctgggccgggaacgggaggggcctggagaagcagccctgctcactccctcctctggccacccaggttggggcctctctcttcgccagcaacatcggcagtggccactttgtgggcctggcagggactggcgctgcaagtggcttggctgttgctggattcgagtggaatgcgctcttcgtggtgctgctactgggctggctgtttgcacccgtgtacctgacagcgggggtcatcacgatgccacagtacctgcgcaagcgcttcggcggccgccgcatccgcctctacctgtctgtgctctcccttttcctgtacatcttcaccaagatctcagtggacatgttctccggagctgtattcatccagcaggctctgggctggaacatctatgcctccgtcatcgcgcttctgggcatcaccatgatttacacggtgacaggagggctggccgcgctgatgtacacggacacggtacagaccttcgtcattctggggggcgcctgcatcctcatgggttacg

SEQ ID NO: 732794 - DNA, 1138 bp, Homo sapiens
aagctctgggactgaggctcctgttggaggggagattgggctttgagctcagggcttcctggaggaggagactgctgagctgatccttgagggacacaaggtttgggtggctttggctcaggtcagtctgaggggtctatgctggggttcatatctagatgatcatagggacaacattgggaaaaacgggccagaagtgatagcctggggagacaaggagggctccagttaagagcccaggagggtgtcagctctgttccttggtgcccagggccccggggccatcacctgcagttgtcctctgggccccagatgtggcccttcccagggccacttgcttggagtagcaccttcacgaagaggtcagatcctcagggatgagggcaaagccaccctcagcggcagtactgccccccgtaggcgctcttcgtggtgctgctactgggctggctgtttgcacccgtgtacctgacagcgggggtcatcacgatgccacagtacctgcgcaagcgcttcggcggccgccgcatccgcctctacctgtctgtgctctcccttttcctgtacatcttcaccaagatctcagtggacatgttctccggagctgtattcatccagcaggctctgggctggaacatctatgcctccgtcatcgcgcttctgggcatcaccatgatttacacggtgacaggagggctggccgcgctgatgtacacggacacggtacagaccttcgtcattctggggggcgcctgcatcctcatgggttacgccttccacgaggtgggcgggtattcgggtctcttcgacaaatacctgggagcagcgacttcgctgacggtgtccgaggatccagccgtgggaaacatctccagcttctgctatcgaccccggcccgactcctaccacctgctccggcaccccgtgaccggggatctgccgtggcccgcgctgctcctcggactcacaatcgtctcgggctggtactggtgcagcgaccaggtcatcgtgcagcgctgcctggccgggaagagcctgacccacatcaaggcgggctgcatcctgtgtgggtacctgaagctgacgcccatgtttctcatggtcatgccaggcatgatcagccgcattctgtacccag

SEQ ID NO: 732795 - DNA, 974 bp, Homo sapiens
tgatatgacctgattcagctaaacaaagctggggagcgggaatgagacctgggggacttgtcggctcagtgcccctgagtccatgtgcagaaccaacagaggcactgtgggcggctacttcctggcaggacgcagcatggtgtggtggccggttggggcctctctcttcgccagcaacatcggcagtggccactttgtgggcctggcagggactggcgctgcaagtggcttggctgttgctggattcgagtggaatgcgctcttcgtggtgctgctactgggctggctgtttgcacccgtgtacctgacagcgggggtcatcacgatgccacagtacctgcgcaagcgcttcggcggccgccgcatccgcctctacctgtctgtgctctcccttttcctgtacatcttcaccaagatctcagtggacatgttctccggagctgtattcatccagcaggctctgggctggaacatctatgcctccgtcatcgcgcttctgggcatcaccatgatttacacggtgacaggagggctggccgcgctgatgtacacggacacggtacagaccttcgtcattctggggggcgcctgcatcctcatgggttacgccttccacgaggtgggcgggtattcgggtctcttcgacaaatacctgggagcagcgacttcgctgacggtgtccgaggatccagccgtgggaaacatctccagcttctgctatcgaccccggcccgactcctaccacctgctccggcaccccgtgaccggggatctgccgtggcccgcgctgctcctcggactcacaatcgtctcgggctggtactggtgcagcgaccaggtcatcgtgcagcgctgcctggccgggaagagcctgacccacatcaaggcgggctgcatcctgtgtgggtacctgaagctgacgcccatgtttctcatggtcatgccaggcatgatcagccgcattctgtacccag

SEQ ID NO: 732796 - DNA, 598 bp, Homo sapiens; identical to SEQ ID NO: 280347

SEQ ID NO: 732797 - DNA, 2920 bp, Homo sapiens
  misc_feature (2571)..(2571): n is a, c, g, or t
acagggcagcaggagccttagagcatggacggtgccatggggcctcgggggctgctgttgtgcatgtacctggtatctctcctcatcctgcaggccatgcctgccctgggctcggctacaggcaggtccaagagcagcgagaagcgacaggctgtggacaccgctgtcgatggcgtgttcatccggagtttgaaagtcaactgcaaagtcacctctcgcttcgcccactatgttgtcaccagccaagtggtcaacactgccaatgaagccagggaagtggccttcgacctggaaatccccaagacagcattcatcagtgactttgccgttacagcagatggaaacgcatttatcggagacataaaggacaaggtgactgcatggaagcagtaccggaaagcagctatctcaggagagaatgccggccttgtcagggcctcggggagaactatggagcaattcaccatccacctcaccgtcaatccccagagcaaggtcacgtttcagctgacttatgaggaagtgctgaagagaaaccatatgcagtatgaaattgtcatcaaagtcaagcccaagcagctggtgcatcattttgagattgatgtggacatcttcgagccccaggggatcagcaagctggatgcccaggcctctttcctgccgaaggaactggcagcccaaactatcaagaagtccttctcaggaaaaaagggtcatgtgctgttccgtcccaccgtgagccagcagcagtcctgccccacatgctctacatccttactgaacgggcacttcaaggtgacctacgatgtcactcgagacgagatctgcgacctcctggtggccaataaccactttgcccacttctttgccccccaaaacctgacaaacatgaacaagaacgtggtttttgtgattgacatcagtggctccatgagaggccagaaagtgaagcagaccaaggaggcactccttaaaattctgggggacatgcagccaggggactactttgacctggttctttttgggactcgagtacaatcgtggaagggctcgctggtgcaagcatctgaggccaacctacaagcagctcaagactttgtgcggggcttttccctggatgaggccacaaacctgaatggaggtttgctccggggaattgagatcttgaaccaagttcaggaaagcctcccagaactcagcaaccatgcctcaatactcatcatgttgacagatggcgatcccacagagggggtgacggaccgttcccaaatcctcaagaacgtccgcaacgccatccggggcaggttcccgctctacaacctgggtttcggccacaatgtggactttaactttctggaggtcatgtccatggagaacaacggacgggcccagagaatctacgaggaccatgatgccacccagcagctgcagggtttctacagccaggtagccaaacccctgctggtggatgtggatttgcagtacccccaggatgctgtcttggccctgacccagaaccaccataaacagtactacgaaggctcagagattgtggtggccgggcgcattgctgacaacaaacagagcagcttcaaggctgatgtgcaggcccatggggagggacaagaattcagtataacctgcctagtggatgaggaggagatgaagaaactgctccgagagcgtggccacatgctggagaaccacgtcgagcgcctctgggcctacctcaccatccaggagctgctggccaagcggatgaaggtggacagggaggtgagggccaacctgtcatcccaggccctgcggatgtcgctggactatgggtttgtgaccccactgacctccatgagcatcaggggcatggcggaccaggacggcctgaagcccaccatcgacaagccctcagaggattctccgcctttggagatgctgggacccagaaggacgttcgtgctgtcagccttgcagccttctcctactcattccagctccaatacccagcggctgccagaccgagtgaccggcgtggacacagaccctcacttcatcatccacgtgccccagaaagaggacaccctgtgcttcaacatcaatgaggagcctggtgttatcctgagcctggtacaggaccccaacacaggcttctcagtgaatggacagctcattggcaacaaggccaggagccctgggcagcatgacggcacgtacttcgggcggctgggaatcgcaaaccctgccacggactttcagttggaagtgactcctcagaacattacgctgaaccccggctttggtgggcctgtgttttcctggagggaccaagctgtgctgcggcaggacggggtggtggtgaccatcaacaagaagaggaacctggtggtgtctgtggacgacggtggcacctttgaggttgttttgcaccgagtgtggaaggggagctcggtccaccaggacttcctgggcttctatgtgctggacagtcatcggatgtcagcccggacgcacgggctgctggggcaatttttccaccccatcggttttgaagtgtctgacatccacccaggctcngaccccacaaagccagatgccacgatggtggtgaggaaccgccggctcacggtcaccaggggtttgcaaaaagactacagcaaggacccgtggcatggggccgaggtgtcctgctggttcattcacaacaatggggctggactcatcgatggtgcctacactgattatatcgtccccgacatcttctgagccctctggccagcacgcctgtcctcccccggggccaaggcagaggaggaggacgacatcctgacctgctgctgaggctgtacctccttgactaagctggttccttgtgtcaaagcacctcatgccttccattaaagagaggccgtgtccaaaaaaaaaa

SEQ ID NO: 732798 - DNA, 2891 bp, Homo sapiens
  misc_feature (2571)..(2571): n is a, c, g, or t
acagggcagcaggagccttagagcatggacggtgccatggggcctcgggggctgctgttgtgcatgtacctggtatctctcctcatcctgcaggccatgcctgccctgggctcggctacaggcaggtccaagagcagcgagaagcgacaggctgtggacaccgctgtcgatggcgtgttcatccggagtttgaaagtcaactgcaaagtcacctctcgcttcgcccactatgttgtcaccagccaagtggtcaacactgccaatgaagccagggaagtggccttcgacctggaaatccccaagacagcattcatcagtgactttgccgttacagcagatggaaacgcatttatcggagacataaaggacaaggtgactgcatggaagcagtaccggaaagcagctatctcaggagagaatgccggccttgtcagggcctcggggagaactatggagcaattcaccatccacctcaccgtcaatccccagagcaaggtcacgtttcagctgacttatgaggaagtgctgaagagaaaccatatgcagtatgaaattgtcatcaaagtcaagcccaagcagctggtgcatcattttgagattgatgtggacatcttcgagccccaggggatcagcaagctggatgcccaggcctctttcctgccgaaggaactggcagcccaaactatcaagaagtccttctcaggaaaaaagggtcatgtgctgttccgtcccaccgtgagccagcagcagtcctgccccacatgctctacatccttactgaacgggcacttcaaggtgacctacgatgtcactcgagacgagatctgcgacctcctggtggccaataaccactttgcccacttctttgccccccaaaacctgacaaacatgaacaagaacgtggtttttgtgattgacatcagtggctccatgagaggccagaaagtgaagcagaccaaggaggcactccttaaaattctgggggacatgcagccaggggactactttgacctggttctttttgggactcgagtacaatcgtggaagggctcgctggtgcaagcatctgaggccaacctacaagcagctcaagactttgtgcggggcttttccctggatgaggccacaaacctgaatggaggtttgctccggggaattgagatcttgaaccaagttcaggaaagcctcccagaactcagcaaccatgcctcaatactcatcatgttgacagatggcgatcccacagagggggtgacggaccgttcccaaatcctcaagaacgtccgcaacgccatccggggcaggttcccgctctacaacctgggtttcggccacaatgtggactttaactttctggaggtcatgtccatggagaacaacggacgggcccagagaatctacgaggaccatgatgccacccagcagctgcagggtttctacagccaggtagccaaacccctgctggtggatgtggatttgcagtacccccaggatgctgtcttggccctgacccagaaccaccataaacagtactacgaaggctcagagattgtggtggccgggcgcattgctgacaacaaacagagcagcttcaaggctgatgtgcaggcccatggggagggacaagaattcagtataacctgcctagtggatgaggaggagatgaagaaactgctccgagagcgtggccacatgctggagaaccacgtcgagcgcctctgggcctacctcaccatccaggagctgctggccaagcggatgaaggtggacagggaggtgagggccaacctgtcatcccaggccctgcggatgtcgctggactatgggtttgtgaccccactgacctccatgagcatcaggggcatggcggaccaggacggcctgaagcccaccatcgacaagccctcagaggattctccgcctttggagatgctgggacccagaaggacgttcgtgctgtcagccttgcagccttctcctactcattccagctccaatacccagcggctgccagaccgagtgaccggcgtggacacagaccctcacttcatcatccacgtgccccagaaagaggacaccctgtgcttcaacatcaatgaggagcctggtgttatcctgagcctggtacaggaccccaacacaggcttctcagtgaatggacagctcattggcaacaaggccaggagccctgggcagcatgacggcacgtacttcgggcggctgggaatcgcaaaccctgccacggactttcagttggaagtgactcctcagaacattacgctgaaccccggctttggtgggcctgtgttttcctggagggaccaagctgtgctgcggcaggacggggtggtggtgaccatcaacaagaagaggaacctggtggtgtctgtggacgacggtggcacctttgaggttgttttgcaccgagtgtggaaggggagctcggtccaccaggacttcctgggcttctatgtgctggacagtcatcggatgtcagcccggacgcacgggctgctggggcaatttttccaccccatcggttttgaagtgtctgacatccacccaggctcngaccccacaaagccagatgccacgatggtggggtttgcaaaaagactacagcaaggacccgtggcatggggccgaggtgtcctgctggttcattcacaacaatggggctggactcatcgatggtgcctacactgattatatcgtccccgacatcttctgagccctctggccagcacgcctgtcctcccccggggccaaggcagaggaggaggacgacatcctgacctgctgctgaggctgtacctccttgactaagctggttccttgtgtcaaagcacctcatgccttccattaaagagaggccgtgtccaaaaaaaaaa

SEQ ID NO: 732799 - DNA, 2052 bp, Homo sapiens
tgacatttcagctccacccatagcacacccactcaaggaacatataaatgaagagatccgctcagttctcagacaagatttttcaagcaagatgaagtccatcatcctctttgtcctttccctgctccttatcttggagaagcaagcagctgtgatgggacaaaaaggtggatcaaaaggccaattgccaagcggatcttcccaatttccacatggacaaaagggccagcactattttggacaaaaagaccaacaacatactaaatccaaaggcagtttttctattcaacacacatatcatgtagacatcaatgatcatgactggacccgaaaaagtcagcaatatgatttgaatgccctacataaggcgacaaaatcaaaacaacacctaggtggaagtcaacaactgctcaattataaacaagaaggcagagaccatgataaatcaaaaggtcattttcacatgatagttatacatcataaaggaggccaagctcatcatgggacacaaaatccttctcaagatcaggggaatagcccatctggaaagggattatccagtcaatgttcaaacacagaaaaaaggctatgggttcatggactaagtaaagaacaagcttcagcctctggtgcacaaaaaggtagaacacaaggtggatcccaaagcagttatgttctccaaactgaagaactagtagttaacaaacaacaacgtgagactaaaaattctcatcaaaataaagggcattaccaaaatgtggttgacgtgagagaggaacattcaagtaaactacaaacttcactccatcctgcacatcaagacagactccaacatggacccaaagacatttttactacccaagatgagctcctagtatataacaagaatcaacaccagacaaaaaatctcaatcaagatcaagagcatggccggaaggcacataaaatatcatacccgtcttcacgtacagaagaaagacaacttcaccatggagaaaagagtgtacagaaagatgtatccaaaggcagcatttctatccaaactgaagagaaaatacatggcaagtctcaaaaccaggtaacaattcatagtcaagatcaagagcatggccataaggaaaataaaatatcataccaatcttcaagtacagaagaaagacatctcaactgtggagaaaagggcatccagaaaggtgtatccaaaggcagtatttcgatccaaactgaagagcaaatacatggcaagtctcaaaaccaggtaagaattcctagtcaagctcaagagtatggccataaggaaaataaaatatcataccaatcttcgagtacagaagaaagacgtctcaacagtggagaaaaggatgtacagaaaggtgtatccaaaggcagtatttctatccaaactgaagagaaaatacatggcaagtctcaaaaccaggtaacaattcctagtcaagatcaagagcatggccataaggaaaataaaatgtcataccaatcttcaagtacagaagaaagacgactcaactatggaggaaagagcacgcagaaagatgtatcccaaagcagtatttctttccaaattgaaaagctagtagaaggcaagtctcaaatccagacaccaaatcctaatcaagatcaatggtctggccaaaatgcaaaaggaaagtctggtcaatctgcagatagcaaacaagacctactcagtcatgaacaaaaaggcagatacaaacaggaatccagtgagtcacataatattgtaattactgagcatgaggttgcccaagatgatcatttgacacaacaatataatgaagacagaaatccaatatctacatagccctgttgcttagcaaccacttgaaaagctggaccaatagcaaggtgtcacccgacctcagtgaagtctttgatgtttctgagaggcagactcccatgtggtcccagatccttggtccatggatgacaccaccttcccatgcttccttgcattaggctttctaaacccggagccccttcaaacttccaataaagggatcattttctgcttta

SEQ ID NO: 732800 - DNA, 2207 bp, Homo sapiens
  misc_feature (1651)..(1651): n is a, c, g, or t
  misc_feature (1656)..(1656): n is a, c, g, or t
  misc_feature (1659)..(1659): n is a, c, g, or t
gtggatcaaaaggccaattgccaagcggatcttcccaatttccacatggacaaaagggccagcactattttggacaaaaagaccaacaacatactaaatccaaaggcagtttttctattcaacacacatatcatgtagacatcaatgttcaaacacagaaaaaaggctatgggttcatggactaagtaaagaacaagcttcagcctctggtgcacaaaaaggtagaacacaaggtggatcccaaagcagttatgttctccaaactgaagaactagtagttaacaaacaacaacgtgagactaaaaattctcatcaaaataaagggcattaccaaaatgtggttgacgtgagagaggaacattcaagtaaactacaaacttcactccatcctgcacatcaagacagactccaacatggacccaaagacatttttactacccaagatgagctcctagtatataacaagaatcaacaccagacaaaaaatctcaatcaagatcaagagcatggccggaaggcacataaaatatcatacccgtcttcacgtacagaagaaagacaacttcaccatggagaaaagagtgtacagaaagatgtatccaaaggcagcatttctatccaaactgaagagaaaatacatggcaagtctcaaaaccaggtaacaattcatagtcaagatcaagagcatggccataaggaaaataaaatatcataccaatcttcaagtacagaagaaagacatctcaactgtggagaaaagggcatccagaaaggtgtatccaaaggcagtatttcgatccaaactgaagagcaaatacatggcaagtctcaaaaccaggtaagaattcctagtcaagctcaagagtatggccataaggaaaataaaatatcataccaatcttcgagtacagaagaaagacgtctcaacagtggagaaaaggatgtacagaaaggtgtatccaaaggcagtatttctatccaaactgaagagaaaatacatggcaagtctcaaaaccaggtaacaattcctagtcaagatcaagagcatggccataaggaaaataaaatgtcataccaatcttcaagtacagaagaaagacgactcaactatggaggaaagagcacgcagaaagatgtatcccaaagcagtatttctttccaaattgaaaagctagtagaaggcaagtctcaaatccagacaccaaatcctaatcaagatcaatggtctggccaaaatgcaaaaggaaagtctggtcaatctgcagatagcaaacaagacctactcagtcatgaacaaaaaggcagatacaaacaggaatccagtgagtcacataatattgtaattactgagcatgaggttgcccaagatgatcatttgacacaacaatataatgaagacagaaatccaatatctacatagccctgttgcttagcaaccacttgaaaagctggaccaatagcaaggtgtcacccgacctcagtgaagtctttgatgtttctgagaggcagactcccatgtggtcccagatccttggtccatggatgacaccaccttcccatgcttccttgcattaggctttctaaacccggagccccttcaaacttccaataaagggatcattttctgctttaaaaaaaaaaaacacaacanacacnacnacaaaaacaaaagacacaaacacagtggtggcgggccggccgcgcccagaaaagaaagtttctcctccaacccacttgcttgggggggccgcgggcccccagaggataagcaggaaccagtggctcacagctggccgcccaggagagatcggcggcgcgaacgacagtgggtctggttttcccaccaacaaaaaagccgcggcggggaacaccgaggcgtctggaacacacccgagggggcctgccggcggcgacacacgccgtccaacacaagggggccccagagggcccagtaaaaatcccccccccgacgggtgcgtaaaagagacgaaaagactagaaacacaacaagcacgaaagaagaaaagaccaaacgacaagacagcaaggagaccaacaagagaagagacagaaacagcagaagagaacgaaaaaggaaagacagcagaaacacaaatcgtaacacaacagacgataagacacacatacagcgagaacaacagaacacaaacgatcgcaacagaaagcgacgtcaagcagcccgcgac

SEQ ID NO: 732801 - DNA, 1632 bp, Homo sapiens
gtggatcaaaaggccaattgccaagcggatcttcccaatttccacatggacaaaagggccagcactattttggacaaaaagaccaacaacatactaaatccaaaggcagtttttctattcaacacacatatcatgtagacatcaatgttcaaacacagaaaaaaggctatgggttcatggactaagtaaagaacaagcttcagcctctggtgcacaaaaaggtagaacacaaggtggatcccaaagcagttatgttctccaaactgaagaactagtagttaacaaacaacaacgtgagactaaaaattctcatcaaaataaagggcattaccaaaatgtggttgacgtgagagaggaacattcaagtaaactacaaacttcactccatcctgcacatcaagacagactccaacatggacccaaagacatttttactacccaagatgagctcctagtatataacaagaatcaacaccagacaaaaaatctcaatcaagatcaagagcatggccggaaggcacataaaatatcatacccgtcttcacgtacagaagaaagacaacttcaccatggagaaaagagtgtacagaaagatgtatccaaaggcagcatttctatccaaactgaagagaaaatacatggcaagtctcaaaaccaggtaacaattcatagtcaagatcaagagcatggccataaggaaaataaaatatcataccaatcttcaagtacagaagaaagacatctcaactgtggagaaaagggcatccagaaaggtgtatccaaaggcagtatttcgatccaaactgaagagcaaatacatggcaagtctcaaaaccaggtaagaattcctagtcaagctcaagagtatggccataaggaaaataaaatatcataccaatcttcgagtacagaagaaagacgtctcaacagtggagaaaaggatgtacagaaaggtgtatccaaaggcagtatttctatccaaactgaagagaaaatacatggcaagtctcaaaaccaggtaacaattcctagtcaagatcaagagcatggccataaggaaaataaaatgtcataccaatcttcaagtacagaagaaagacgactcaactatggaggaaagagcacgcagaaagatgtatcccaaagcagtatttctttccaaattgaaaagctagtagaaggcaagtctcaaatccagacaccaaatcctaatcaagatcaatggtctggccaaaatgcaaaaggaaagtctggtcaatctgcagatagcaaacaagacctactcagtcatgaacaaaaaggcagatacaaacaggaatccagtgagtcacataatattgtaattactgagcatgaggttgcccaagatgatcatttgacacaacaatataatgaagacagaaatccaatatctacatagccctgttgcttagcaaccacttgaaaagctggaccaatagcaaggtgtcacccgacctcagtgaagtctttgatgtttctgagaggcagactcccatgtggtcccagatccttggtccatggatgacaccaccttcccatgcttccttgcattaggctttctaaacccggagccccttcaaacttccaataaagggatcattttctgcttta

SEQ ID NO: 732802 - DNA, 2627 bp, Homo sapiens
  misc_feature (2071)..(2071): n is a, c, g, or t
  misc_feature (2076)..(2076): n is a, c, g, or t
  misc_feature (2079)..(2079): n is a, c, g, or t
tgacatttcagctccacccatagcacacccactcaaggaacatataaatgaagagatccgctcagttctcagacaagatttttcaagcaagatgaagtccatcatcctctttgtcctttccctgctccttatcttggagaagcaagcagctgtgatgggacaaaaaggtggatcaaaaggccaattgccaagcggatcttcccaatttccacatggacaaaagggccagcactattttggacaaaaagaccaacaacatactaaatccaaaggcagtttttctattcaacacacatatcatgtagacatcaatgatcatgactggacccgaaaaagtcagcaatatgatttgaatgccctacataaggcgacaaaatcaaaacaacacctaggtggaagtcaacaactgctcaattataaacaagaaggcagagaccatgataaatcaaaaggtcattttcacatgatagttatacatcataaaggaggccaagctcatcatgggacacaaaatccttctcaagatcaggggaatagcccatctggaaagggattatccagtcaatgttcaaacacagaaaaaaggctatgggttcatggactaagtaaagaacaagcttcagcctctggtgcacaaaaaggtagaacacaaggtggatcccaaagcagttatgttctccaaactgaagaactagtagttaacaaacaacaacgtgagactaaaaattctcatcaaaataaagggcattaccaaaatgtggttgacgtgagagaggaacattcaagtaaactacaaacttcactccatcctgcacatcaagacagactccaacatggacccaaagacatttttactacccaagatgagctcctagtatataacaagaatcaacaccagacaaaaaatctcaatcaagatcaagagcatggccggaaggcacataaaatatcatacccgtcttcacgtacagaagaaagacaacttcaccatggagaaaagagtgtacagaaagatgtatccaaaggcagcatttctatccaaactgaagagaaaatacatggcaagtctcaaaaccaggtaacaattcatagtcaagatcaagagcatggccataaggaaaataaaatatcataccaatcttcaagtacagaagaaagacatctcaactgtggagaaaagggcatccagaaaggtgtatccaaaggcagtatttcgatccaaactgaagagcaaatacatggcaagtctcaaaaccaggtaagaattcctagtcaagctcaagagtatggccataaggaaaataaaatatcataccaatcttcgagtacagaagaaagacgtctcaacagtggagaaaaggatgtacagaaaggtgtatccaaaggcagtatttctatccaaactgaagagaaaatacatggcaagtctcaaaaccaggtaacaattcctagtcaagatcaagagcatggccataaggaaaataaaatgtcataccaatcttcaagtacagaagaaagacgactcaactatggaggaaagagcacgcagaaagatgtatcccaaagcagtatttctttccaaattgaaaagctagtagaaggcaagtctcaaatccagacaccaaatcctaatcaagatcaatggtctggccaaaatgcaaaaggaaagtctggtcaatctgcagatagcaaacaagacctactcagtcatgaacaaaaaggcagatacaaacaggaatccagtgagtcacataatattgtaattactgagcatgaggttgcccaagatgatcatttgacacaacaatataatgaagacagaaatccaatatctacatagccctgttgcttagcaaccacttgaaaagctggaccaatagcaaggtgtcacccgacctcagtgaagtctttgatgtttctgagaggcagactcccatgtggtcccagatccttggtccatggatgacaccaccttcccatgcttccttgcattaggctttctaaacccggagccccttcaaacttccaataaagggatcattttctgctttaaaaaaaaaaaacacaacanacacnacnacaaaaacaaaagacacaaacacagtggtggcgggccggccgcgcccagaaaagaaagtttctcctccaacccacttgcttgggggggccgcgggcccccagaggataagcaggaaccagtggctcacagctggccgcccaggagagatcggcggcgcgaacgacagtgggtctggttttcccaccaacaaaaaagccgcggcggggaacaccgaggcgtctggaacacacccgagggggcctgccggcggcgacacacgccgtccaacacaagggggccccagagggcccagtaaaaatcccccccccgacgggtgcgtaaaagagacgaaaagactagaaacacaacaagcacgaaagaagaaaagaccaaacgacaagacagcaaggagaccaacaagagaagagacagaaacagcagaagagaacgaaaaaggaaagacagcagaaacacaaatcgtaacacaacagacgataagacacacatacagcgagaacaacagaacacaaacgatcgcaacagaaagcgacgtcaagcagcccgcgac

SEQ ID NO: 732803 - DNA, 673 bp, Homo sapiens
aaattgatatggatgagatgggacaagttgggctggtgggcagctgcatgtgccttggagtgctctgttggcctcttcctaagagaacctccccattggagctgggagcctcccccactcatgtgtcctccaccttggggcccctccatccccaggatgacctatgccaagagtgtgaggacatcgtccacatccttaacaagatggccaaggaggccattttccaggacacgatgaggaagttcctggagcaggagtgcaacgtcctccccttgaagctgctcatgccccagtgcaaccaagtgcttgacgactacttccccctggtcatcgactacttccagaaccagattgtgagggctgcaagctcacctcctgcctgcctccccacgcaggcccctgtgcccacccatggggagccacacacacagcaccccagccagccagacacacacacacacacacacacacacagcacccaagccggccagacacaaacacacagcaccccagccagccggaacacacacacacacacacacaacaccccagctggccggacacacacacacacagtaccccagctggccggacacacacacacacagcaccctatccagacacatacacacacacagtaccccagccagctggaaacacacacacacacagc

SEQ ID NO: 732804 - DNA, 476 bp, Homo sapiens
aaattgatatggatgagatgggacaagttgggctggtgggcagctgcatgtgccttggagtgctctgttggcctcttcctaagagaacctccccattggagctgggagcctcccccactcatgtgtcctccaccttggggcccctccatccccaggatgacctatgccaagagtgtgaggacatcgtccacatccttaacaagatggccaaggaggccattttccaggacacgatgaggaagttcctggagcaggagtgcaacgtcctccccttgaagctgctcatgccccagtgcaaccaagtgcttgacgactacttccccctggtcatcgactacttccagaaccagattgactcaaacggcatctgtatgcacctgggcctgtgcaaatcccggcagccagagccagagcaggagccagggatgtcagaccccctgcccaaacctctgcgggaccctctgccagaccctctg

SEQ ID NO: 732805 - DNA, 504 bp, Homo sapiens
  misc_feature (44)..(44): n is a, c, g, or t
cgtacccacggaaggttagactcacatcttacaagatggccaangaggcattttccaggacacgatgaggaagttcctggagcaggagtgcaacgtcctccccttgaagctgctcatgccccagtgcaaccaagtgcttgacgactacttccccctggtcatcgactacttccagaaccagattgtgagggctgcaagctcacctcctgcctgcctccccacgcaggcccctgtgcccacccatggggagccacacacacagcaccccagccagccagacacacacacacacacacacacacacagcacccaagccggccagacacaaacacacagcaccccagccagccggaacacacacacacacacacacaacaccccagctggccggacacacacacacacagtaccccagctggccggacacacacacacacagcaccctatccagacacatacacacacacagtaccccagccagctggaaacacacacacacacagc

SEQ ID NO: 732806 - DNA, 3572 bp, Homo sapiens; identical to SEQ ID NO: 322994

SEQ ID NO: 732807 - DNA, 2642 bp, Homo sapiens
caggaggcggaggttgcagtgagccgacatcacgccactgtactctagcctgggtgacagagcaagactctgtctcaaaaaaaaagaaagaaggaaagatcactgcagagattgcagtgagaggtgatgggacagggacggagctgagggctggcctggggatgcatttgggaggtgggcccactgctattgggcatggatgggcctggagcgtgaggaccagggaggactccaaagtgacttttacacactggccagagcaaccagccctctgtaatgccagcagctgagatggggagactaaagaagaaaacaggtttgagcaaaaaaacagagagctccctcctggccatgttgagttcaagatgcctgtgtgaagtgcaggagaggagagtcaggcaagcagctgaatcccaagcattgggggaaggtcaggtccaccatgtcagtctgagagtcactagctgtgggccagagcctttggggccagacgtaggtctgaagctggctcctacactcagtgaccctgtgtgagtcccctgcatcccctggactctctgatccccagtgtccttatttgtgaatagccttgccctcccttctagaagagaatgagggaatgcgtaggaagtgcccagctgggtgctgggcagagagtggaggcttgccaagtgaaggtcccatgctggcctctctccgcccccgccccagggtgcgctagctgtggcagtggcccaggtgtgccgcgtggtacctctggtggcgggcggcatctgccagtgcctggctgagcgctactccgtcatcctgctcgacacgctgctgggccgcatgctgccccagctggtctgccgcctcgtcctccggtgctccatggatgacagcgctggcccaaggtcgccgacaggagaatggctgccgcgagactctgagtgccacctctgcatgtccgtgaccacccaggccgggaacagcagcgagcaggccataccacaggcaatgctccaggcctgtgttggctcctggctggacagggaaaagtgcaagcaatttgtggagcagcacacgccccagctgctgaccctggtgcccaggggctgggatgcccacaccacctgccaggccctcggggtgtgtgggaccatgtccagccctctccagtgtatccacagccccgacctttgatgagaactcagctgtccagctgcaaaggaaaagccaagtgagacgggctctgggaccatggtgaccaggctcttcccctgctccctggccctcgccagctgccaggctgaaaagaagcctcagctcccacaccgccctcctcaccgcccttcctcggcagtcacttccactggtggaccacgggcccccagccctgtgtcggccttgtctgtctcagctcaaccacagtctgacaccagagcccacttccatcctctctggtgtgaggcacagcgagggcagcatctggaggagctctgcagcctccacacctaccacgacctcccagggctgggctcaggaaaaaccagccactgctttacaggacagggggttgaagctgagccccgcctcacacccacccccatgcactcaaagattggattttacagctacttgcaattcaaaattcagaagaataaaaaatgggaacatacagaactctaaaagatagacatcagaaattgttaagttaagctttttcaaaaaatcagcaattccccagcgtagtcaagggtggacactgcacgctctggcatgatgggatggcgaccgggcaagctttcttcctcgagatgctctgctgcttgagagctattgctttgttaagatataaaaaggggtttctttttgtctttctgtaaggtggacttccagcttttgattgaaagtcctagggtgattctatttctgctgtgatttatctgctgaaagctcagctggggttgtgcaagctagggacccattcctgtgtaatacaatgtctgcaccaatgctaataaagtcctattctcttttatgagaaagaaaaaagacaccgtcctttaaagtgctgcagtatggccagacgtggtggctcacacctgcaatcccagcaccttaggaggccgaggcaggaggatccttgaggtcaggagttcgagaccagcctcgccaacatggtgaaaccccatttctactaaaaatacaaaaaattagccaagtgtggtggcatatgcctgtaatcccaactactcagaaggccgaggcaggagaattacttgaacgcaggagaatcactgcagcccaggaggcagaggttgcagtgagccgagattgcaccactgcactccagcctgggtgacagagcaagactccatctcagtaaataaataaataaataaaaagcgctgcagtagctgtggcctcaccctgaagtcagcgggcccaggcctacctcactctctcccttggcagagaagcagacgtccatagctcctctccctcacaagcgctcccagcctgccctccagctgctgctctcccctcccagtctctactcactgggatgaggttaggtcatgaggacaccaaaaacctaaaaataaacaaaaagccaaacaagccttagcttttcttaaagactgaaatgcctggaa

SEQ ID NO: 732808 - DNA, 2032 bp, Homo sapiens
caggaggcggaggttgcagtgagccgacatcacgccactgtactctagcctgggtgacagagcaagactctgtctcaaaaaaaaagaaagaaggaaagatcactgcagagattgcagtgagaggtgatgggacagggacggagctgagggctggcctggggatgcatttgggaggtgggcccactgctattgggcatggatgggcctggagcgtgaggaccagggaggactccaaagtgacttttacacactggccagagcaaccagccctctgtaatgccagcagctgagatggggagactaaagaagaaaacaggtttgagcaaaaaaacagagagctccctcctggccatgttgagttcaagatgcctgtgtgaagtgcaggagaggagagtcaggcaagcagctgaatcccaagcattgggggaaggtcaggtccaccatgtcagtctgagagtcactagctgtgggccagagcctttggggccagacgtaggtctgaagctggctcctacactcagtgaccctgtgtgagtcccctgcatcccctggactctctgatccccagtgtccttatttgtgaatagccttgccctcccttctagaagagaatgagggaatgcgtaggaagtgcccagctgggtgctgggcagagagtggaggcttgccaagtgaaggtcccatgctggcctctctccgcccccgccccagggtgcgctagctgtggcagtggcccaggtgtgccgcgtggtacctctggtggcgggcggcatctgccagtgcctggctgagcgctactccgtcatcctgctcgacacgctgctgggccgcatgctgccccagctggtctgccgcctcgtcctccggtgctccatggatgacagcgctggcccaaggtcgccgacaggagaatggctgccgcgagactctgagtgccacctctgcatgtccgtgaccacccaggccgggaacagcagcgagcaggccataccacaggcaatgctccaggcctgtgttggctcctggctggacagggaaaagtgcaagcaatttgtggagcagcacacgccccagctgctgaccctggtgcccaggggctgggatgcccacaccacctgccaggccctcggggtgtgtgggaccatgtccagccctctccagtgtatccacagccccgacctttgatgagaactcagctgtccagctgcaaaggaaaagccaagtgagacgggctctgggaccatggtgaccaggctcttcccctgctccctggccctcgccagctgccaggctgaaaagaagcctcagctcccacaccgccctcctcaccgcccttcctcggcagtcacttccactggtggaccacgggcccccagccctgtgtcggccttgtctgtctcagctcaaccacagtctgacaccagagcccacttccatcctctctggtgtgaggcacagcgagggcagcatctggaggagctctgcagcctccacacctaccacgacctcccagggctgggctcaggaaaaaccagccactgctttacaggacagggggttgaagctgagccccgcctcacacccacccccatgcactcaaagattggattttacagctacttgcaattcaaaattcagaagaataaaaaatgggaacatacagaactctaaaagatagacatcagaaattgttaagttaagctttttcaaaaaatcagcaattccccagcgtagtcaagggtggacactgcacgctctggcatgatgggatggcgaccgggcaagctttcttcctcgagatgctctgctgcttgagagctattgctttgttaagatataaaaaggggtttctttttgtctttctgtaaggtggacttccagcttttgattgaaagtcctagggtgattctatttctgctgtgatttatctgctgaaagctcagctggggttgtgcaagctagggacccattcctgtgtaatacaatgtctgcaccaatgctaataaagtcctattctcttttatgagaaaga

SEQ ID NO: 732809 - DNA, 1867 bp, Homo sapiens
caggaggcggaggttgcagtgagccgacatcacgccactgtactctagcctgggtgacagagcaagactctgtctcaaaaaaaaagaaagaaggaaagatcactgcagagattgcagtgagaggtgatgggacagggacggagctgagggctggcctggggatgcatttgggaggtgggcccactgctattgggcatggatgggcctggagcgtgaggaccagggaggactccaaagtgacttttacacactggccagagcaaccagccctctgtaatgccagcagctgagatggggagactaaagaagaaaacaggtttgagcaaaaaaacagagagctccctcctggccatgttgagttcaagatgcctgtgtgaagtgcaggagaggagagtcaggcaagcagctgaatcccaagcattgggggaaggtcaggtccaccatgtcagtctgagagtcactagctgtgggccagagcctttggggccagacgtaggtctgaagctggctcctacactcagtgaccctgtgtgagtcccctgcatcccctggactctctgatccccagtgtccttatttgtgaatagccttgccctcccttctagaagagaatgagggaatgcgtaggaagtgcccagctgggtgctgggcagagagtggaggcttgccaagtgaaggtcccatgctggcctctctccgcccccgccccagggtgcgctagctgtggcagtggcccaggtgtgccgcgtggtacctctggtggcgggcggcatctgccagtgcctggctgagcgctactccgtcatcctgctcgacacgctgctgggccgcatgctgccccagctggtctgccgcctcgtcctccggtgctccatggatgacagcgctggcccaaggtcgccgacaggagaatggctgccgcgagactctgagtgccacctctgcatgtccgtgaccacccaggccgggaacagcagcgagcaggccataccacaggcaatgctccaggcctgtgttggctcctggctggacagggaaaagtgcaagcaatttgtggagcagcacacgccccagctgctgaccctggtgcccaggggctgggatgcccacaccacctgccaggccctcggggtgtgtgggaccatgtccagccctctccagtgtatccacagccccgacctttgatgagaactcagctgtccagctgcaaaggaaaagccaagtgagacgggctctgggaccatggtgaccaggctcttcccctgctccctggccctcgccagctgccaggctgaaaagaagcctcagctcccacaccgccctcctcaccgcccttcctcggcagtcacttccactggtggaccacgggcccccagccctgtgtcggccttgtctgtctcagctcaaccacagtctgacaccagagcccacttccatcctctctggtgtgaggcacagcgagggcagcatctggaggagctctgcagcctccacacctaccacgacctcccagggctgggctcaggaaaaaccagccactgctttacaggacagggggttgaagctgagccccgcctcacacccacccccatgcactcaaagattggattttacagctacttgcaattcaaaattcagaagaataaaaaatgggaacatacagaactctaaaagatagacatcagaaattgttaagttaagctttttcaaaaaatcagcaattccccagcgtagtcaagggtggacactgcacgctctggcatgatgggatggcgaccgggcaagctttcttcctcgagatgctctgctgcttgagagctattgctttgttaagatataaaaaggggtttctttttgtctttctgta

SEQ ID NO: 732810 - DNA, 1814 bp, Homo sapiens
caggaggcggaggttgcagtgagccgacatcacgccactgtactctagcctgggtgacagagcaagactctgtctcaaaaaaaaagaaagaaggaaagatcactgcagagattgcagtgagaggtgatgggacagggacggagctgagggctggcctggggatgcatttgggaggtgggcccactgctattgggcatggatgggcctggagcgtgaggaccagggaggactccaaagtgacttttacacactggccagagcaaccagccctctgtaatgccagcagctgagatggggagactaaagaagaaaacaggtttgagcaaaaaaacagagagctccctcctggccatgttgagttcaagatgcctgtgtgaagtgcaggagaggagagtcaggcaagcagctgaatcccaagcattgggggaaggtcaggtccaccatgtcagtctgagagtcactagctgtgggccagagcctttggggccagacgtaggtctgaagctggctcctacactcagtgaccctgtgtgagtcccctgcatcccctggactctctgatccccagtgtccttatttgtgaatagccttgccctcccttctagaagagaatgagggaatgcgtaggaagtgcccagctgggtgctgggcagagagtggaggcttgccaagtgaaggtcccatgctggcctctctccgcccccgccccagggtgcgctagctgtggcagtggcccaggtgtgccgcgtggtacctctggtggcgggcggcatctgccagtgcctggctgagcgctactccgtcatcctgctcgacacgctgctgggccgcatgctgccccagctggtctgccgcctcgtcctccggtgctccatggatgacagcgctggcccaaggtcgccgacaggagaatggctgccgcgagactctgagtgccacctctgcatgtccgtgaccacccaggccgggaacagcagcgagcaggccataccacaggcaatgctccaggcctgtgttggctcctggctggacagggaaaagtgcaagcaatttgtggagcagcacacgccccagctgctgaccctggtgcccaggggctgggatgcccacaccacctgccaggccctcggggtgtgtgggaccatgtccagccctctccagtgtatccacagccccgacctttgatgagaactcagctgtccagaaaaagacaccgtcctttaaagtgctgcagtatggccagacgtggtggctcacacctgcaatcccagcaccttaggaggccgaggcaggaggatccttgaggtcaggagttcgagaccagcctcgccaacatggtgaaaccccatttctactaaaaatacaaaaaattagccaagtgtggtggcatatgcctgtaatcccaactactcagaaggccgaggcaggagaattacttgaacgcaggagaatcactgcagcccaggaggcagaggttgcagtgagccgagattgcaccactgcactccagcctgggtgacagagcaagactccatctcagtaaataaataaataaataaaaagcgctgcagtagctgtggcctcaccctgaagtcagcgggcccaggcctacctcactctctcccttggcagagaagcagacgtccatagctcctctccctcacaagcgctcccagcctgccctccagctgctgctctcccctcccagtctctactcactgggatgaggttaggtcatgaggacaccaaaaacctaaaaataaacaaaaagccaaacaagccttagcttttcttaaagactgaaatgcctggaa

SEQ ID NO: 732811 - DNA, 2744 bp, Homo sapiens
caggaggcggaggttgcagtgagccgacatcacgccactgtactctagcctgggtgacagagcaagactctgtctcaaaaaaaaagaaagaaggaaagatcactgcagagattgcagtgagaggtgatgggacagggacggagctgagggctggcctggggatgcatttgggaggtgggcccactgctattgggcatggatgggcctggagcgtgaggaccagggaggactccaaagtgacttttacacactggccagagcaaccagccctctgtaatgccagcagctgagatggggagactaaagaagaaaacaggtttgagcaaaaaaacagagagctccctcctggccatgttgagttcaagatgcctgtgtgaagtgcaggagaggagagtcaggcaagcagctgaatcccaagcattgggggaaggtcaggtccaccatgtcagtctgagagtcactagctgtgggccagagcctttggggccagacgtaggtctgaagctggctcctacactcagtgaccctgtgtgagtcccctgcatcccctggactctctgatccccagtgtccttatttgtgaatagccttgccctcccttctagaagagaatgagggaatgcgtaggaagtgcccagctgggtgctgggcagagagtggaggcttgccaagtgaaggtcccatgctggcctctctccgcccccgccccagggtgcgctagctgtggcagtggcccaggtgtgccgcgtggtacctctggtggcgggcggcatctgccagtgcctggctgagcgctactccgtcatcctgctcgacacgctgctgggccgcatgctgccccagctggtctgccgcctcgtcctccggtgctccatggatgacagcgctggcccaaggtcgccgacaggagaatggctgccgcgagactctgagtgccacctctgcatgtccgtgaccacccaggccgggaacagcagcgagcaggccataccacaggcaatgctccaggcctgtgttggctcctggctggacagggaaaagtgcaagcaatttgtggagcagcacacgccccagctgctgaccctggtgcccaggggctgggatgcccacaccacctgccaggccctcggggtgtgtgggaccatgtccagccctctccagtgtatccacagccccgacctttgatgagaactcagctgtccagaaaaagacaccgtcctttaaagtgctgcagtatggccagacgtggtggctcacacctgcaatcccagcaccttaggaggccgaggcaggaggatccttgaggtcaggagttcgagaccagcctcgccaacatggtgaaaccccatttctactaaaaatacaaaaaattagccaagtgtggtggcatatgcctgtaatcccaactactcagaaggccgaggcaggagaattacttgaacgcaggagaatcactgcagcccaggaggcagaggttgcagtgagccgagattgcaccactgcactccagcctgggtgacagagcaagactccatctcagtaaataaataaataaataaaaagcgctgcagtagctgtggcctcaccctgaagtcagcgggcccaggcctacctcactctctcccttggcagagaagcagacgtccatagctcctctccctcacaagcgctcccagcctgccctccagctgctgctctcccctcccagtctctactcactgggatgaggttaggtcatgaggacaccaaaaacctaaaaataaacaaaaagccaaacaagccttagcttttcttaaagactgaaatgcctggaagtgtccctttatttataaaataacttttgtcatatttcttatacatgtttcttgtaagaaattcagaaactacagacaaagagagtggaaattacccactgtcaggcctctgagcccaagctaagccatcatatcccctgtgccctgcacgtatacacccagatggcctgaagcaactgaagatccacaaaagaagtgaaaatagccagttcctgccttaactgatgacattccaccattgtgatttgttcctgccccaccctaactgatcaattgaccttgtgacaatacaccttccccacccttgagaaggtgctttgtaatattctccccacccaccccacgcccgcacccccgcacccttaagaaggtattttgtaatattctctccgccattgagaatgtgctttgtaagatccaccccctgcccacaaaaaattgctcctaactccaccgcctatcccaaacctacaagaactaatgataatcccaccaccctttgctgactctttttggactcagcccacctgcacccaggtgattaaaaagctttattgttcacacaaagcctgtttggtagtctcttcacagggaagcatgtgacacccacaatcccacctagcccaggagagagctacggcagggtgtgtgttttgacactgagcttggggctttttccatcttctccccacagcctctggctccacacctccaccgttcaagcgccagaaagagctgtctatgcagcctgctcttgggcctggggatgagacacacaattcattggctcctggattttaagtagacatttgtaaatctatagctaactactgtccttaaagccattgtttccattacaaaatccaactctctgagagaaaagggtgttttaaatttaaaaaaataaaaacaaaaaagtttgattgagac

SEQ ID NO: 732812 - DNA, 2744 bp, Homo sapiens; identical to SEQ ID NO: 323008

SEQ ID NO: 732813 - DNA, 1814 bp, Homo sapiens
ggagctcacagccaagtccacttcttccatctgaggcggggaagccagccctgttcctgaaaccctgcatcacaagcccctgtgggaggcagtggggaggggaggtcctcccccactcagacctgacccacagggaccagtttaatgtgtccttgccccagtgatgacagctggggatctgggggtggggagtcacccaggacccgggcagtcgcctttccccagctcctagggctcccggccttccctgctgaaacagcaagaccagtgggttggcgtgggaggcctgggcttcaaaccacctctgctatcacctggctgtgggtccccaggcaggacatacacacagtccctctctggccctcatcctcctcagctgcaaaggaaaagccaagtgagacgggctctgggaccatggtgaccaggctcttcccctgctccctggccctcgccagctgccaggctgaaaagaagcctcagctcccacaccgccctcctcaccgcccttcctcggcagtcacttccactggtggaccacgggcccccagccctgtgtcggccttgtctgtctcagctcaaccacagtctgacaccagagcccacttccatcctctctggtgtgaggcacagcgagggcagcatctggaggagctctgcagcctccacacctaccacgacctcccagggctgggctcaggaaaaaccagccactgctttacaggacagggggttgaagctgagccccgcctcacacccacccccatgcactcaaagattggattttacagctacttgcaattcaaaattcagaagaataaaaaatgggaacatacagaactctaaaagatagacatcagaaattgttaagttaagctttttcaaaaaatcagcaattccccagcgtagtcaagggtggacactgcacgctctggcatgatgggatggcgaccgggcaagctttcttcctcgagatgctctgctgcttgagagctattgctttgttaagatataaaaaggggtttctttttgtctttctgtaaggtggacttccagcttttgattgaaagtcctagggtgattctatttctgctgtgatttatctgctgaaagctcagctggggttgtgcaagctagggacccattcctgtgtaatacaatgtctgcaccaatgctaataaagtcctattctcttttatgagaaagaaaaaagacaccgtcctttaaagtgctgcagtatggccagacgtggtggctcacacctgcaatcccagcaccttaggaggccgaggcaggaggatccttgaggtcaggagttcgagaccagcctcgccaacatggtgaaaccccatttctactaaaaatacaaaaaattagccaagtgtggtggcatatgcctgtaatcccaactactcagaaggccgaggcaggagaattacttgaacgcaggagaatcactgcagcccaggaggcagaggttgcagtgagccgagattgcaccactgcactccagcctgggtgacagagcaagactccatctcagtaaataaataaataaataaaaagcgctgcagtagctgtggcctcaccctgaagtcagcgggcccaggcctacctcactctctcccttggcagagaagcagacgtccatagctcctctccctcacaagcgctcccagcctgccctccagctgctgctctcccctcccagtctctactcactgggatgaggttaggtcatgaggacaccaaaaacctaaaaataaacaaaaagccaaacaagccttagcttttcttaaagactgaaatgcctggaa

SEQ ID NO: 732814 - DNA, 1204 bp, Homo sapiens
ggagctcacagccaagtccacttcttccatctgaggcggggaagccagccctgttcctgaaaccctgcatcacaagcccctgtgggaggcagtggggaggggaggtcctcccccactcagacctgacccacagggaccagtttaatgtgtccttgccccagtgatgacagctggggatctgggggtggggagtcacccaggacccgggcagtcgcctttccccagctcctagggctcccggccttccctgctgaaacagcaagaccagtgggttggcgtgggaggcctgggcttcaaaccacctctgctatcacctggctgtgggtccccaggcaggacatacacacagtccctctctggccctcatcctcctcagctgcaaaggaaaagccaagtgagacgggctctgggaccatggtgaccaggctcttcccctgctccctggccctcgccagctgccaggctgaaaagaagcctcagctcccacaccgccctcctcaccgcccttcctcggcagtcacttccactggtggaccacgggcccccagccctgtgtcggccttgtctgtctcagctcaaccacagtctgacaccagagcccacttccatcctctctggtgtgaggcacagcgagggcagcatctggaggagctctgcagcctccacacctaccacgacctcccagggctgggctcaggaaaaaccagccactgctttacaggacagggggttgaagctgagccccgcctcacacccacccccatgcactcaaagattggattttacagctacttgcaattcaaaattcagaagaataaaaaatgggaacatacagaactctaaaagatagacatcagaaattgttaagttaagctttttcaaaaaatcagcaattccccagcgtagtcaagggtggacactgcacgctctggcatgatgggatggcgaccgggcaagctttcttcctcgagatgctctgctgcttgagagctattgctttgttaagatataaaaaggggtttctttttgtctttctgtaaggtggacttccagcttttgattgaaagtcctagggtgattctatttctgctgtgatttatctgctgaaagctcagctggggttgtgcaagctagggacccattcctgtgtaatacaatgtctgcaccaatgctaataaagtcctattctcttttatgagaaaga

SEQ ID NO: 732815 - DNA, 1039 bp, Homo sapiens
ggagctcacagccaagtccacttcttccatctgaggcggggaagccagccctgttcctgaaaccctgcatcacaagcccctgtgggaggcagtggggaggggaggtcctcccccactcagacctgacccacagggaccagtttaatgtgtccttgccccagtgatgacagctggggatctgggggtggggagtcacccaggacccgggcagtcgcctttccccagctcctagggctcccggccttccctgctgaaacagcaagaccagtgggttggcgtgggaggcctgggcttcaaaccacctctgctatcacctggctgtgggtccccaggcaggacatacacacagtccctctctggccctcatcctcctcagctgcaaaggaaaagccaagtgagacgggctctgggaccatggtgaccaggctcttcccctgctccctggccctcgccagctgccaggctgaaaagaagcctcagctcccacaccgccctcctcaccgcccttcctcggcagtcacttccactggtggaccacgggcccccagccctgtgtcggccttgtctgtctcagctcaaccacagtctgacaccagagcccacttccatcctctctggtgtgaggcacagcgagggcagcatctggaggagctctgcagcctccacacctaccacgacctcccagggctgggctcaggaaaaaccagccactgctttacaggacagggggttgaagctgagccccgcctcacacccacccccatgcactcaaagattggattttacagctacttgcaattcaaaattcagaagaataaaaaatgggaacatacagaactctaaaagatagacatcagaaattgttaagttaagctttttcaaaaaatcagcaattccccagcgtagtcaagggtggacactgcacgctctggcatgatgggatggcgaccgggcaagctttcttcctcgagatgctctgctgcttgagagctattgctttgttaagatataaaaaggggtttctttttgtctttctgta

SEQ ID NO: 732816 - DNA, 2735 bp, Homo sapiens; identical to SEQ ID NO: 322996

SEQ ID NO: 732817 - DNA, 1805 bp, Homo sapiens
gaggagtgcggctggatgtccattataggatggggctgtgttccctggccagtgtgtgctggtggggtgggggtacaaagtgggtgttctggagtgaacatctcacctcctcaggctctaaaccctaaggcctgtggctcagggagtggcccgaggggtctacagagtcacactggtagcacccactaggcgggaggtggagtgagtgctgttctttcccggaagagctgggtgtggggagctgagggggcccaggcctcagccctggtgctgtccctgtgacaggccctcggggtgtgtgggaccatgtccagccctctccagtgtatccacagccccgacctttgatgagaactcagctgtccagctgcaaaggaaaagccaagtgagacgggctctgggaccatggtgaccaggctcttcccctgctccctggccctcgccagctgccaggctgaaaagaagcctcagctcccacaccgccctcctcaccgcccttcctcggcagtcacttccactggtggaccacgggcccccagccctgtgtcggccttgtctgtctcagctcaaccacagtctgacaccagagcccacttccatcctctctggtgtgaggcacagcgagggcagcatctggaggagctctgcagcctccacacctaccacgacctcccagggctgggctcaggaaaaaccagccactgctttacaggacagggggttgaagctgagccccgcctcacacccacccccatgcactcaaagattggattttacagctacttgcaattcaaaattcagaagaataaaaaatgggaacatacagaactctaaaagatagacatcagaaattgttaagttaagctttttcaaaaaatcagcaattccccagcgtagtcaagggtggacactgcacgctctggcatgatgggatggcgaccgggcaagctttcttcctcgagatgctctgctgcttgagagctattgctttgttaagatataaaaaggggtttctttttgtctttctgtaaggtggacttccagcttttgattgaaagtcctagggtgattctatttctgctgtgatttatctgctgaaagctcagctggggttgtgcaagctagggacccattcctgtgtaatacaatgtctgcaccaatgctaataaagtcctattctcttttatgagaaagaaaaaagacaccgtcctttaaagtgctgcagtatggccagacgtggtggctcacacctgcaatcccagcaccttaggaggccgaggcaggaggatccttgaggtcaggagttcgagaccagcctcgccaacatggtgaaaccccatttctactaaaaatacaaaaaattagccaagtgtggtggcatatgcctgtaatcccaactactcagaaggccgaggcaggagaattacttgaacgcaggagaatcactgcagcccaggaggcagaggttgcagtgagccgagattgcaccactgcactccagcctgggtgacagagcaagactccatctcagtaaataaataaataaataaaaagcgctgcagtagctgtggcctcaccctgaagtcagcgggcccaggcctacctcactctctcccttggcagagaagcagacgtccatagctcctctccctcacaagcgctcccagcctgccctccagctgctgctctcccctcccagtctctactcactgggatgaggttaggtcatgaggacaccaaaaacctaaaaataaacaaaaagccaaacaagccttagcttttcttaaagactgaaatgcctggaa

SEQ ID NO: 732818 - DNA, 1195 bp, Homo sapiens
gaggagtgcggctggatgtccattataggatggggctgtgttccctggccagtgtgtgctggtggggtgggggtacaaagtgggtgttctggagtgaacatctcacctcctcaggctctaaaccctaaggcctgtggctcagggagtggcccgaggggtctacagagtcacactggtagcacccactaggcgggaggtggagtgagtgctgttctttcccggaagagctgggtgtggggagctgagggggcccaggcctcagccctggtgctgtccctgtgacaggccctcggggtgtgtgggaccatgtccagccctctccagtgtatccacagccccgacctttgatgagaactcagctgtccagctgcaaaggaaaagccaagtgagacgggctctgggaccatggtgaccaggctcttcccctgctccctggccctcgccagctgccaggctgaaaagaagcctcagctcccacaccgccctcctcaccgcccttcctcggcagtcacttccactggtggaccacgggcccccagccctgtgtcggccttgtctgtctcagctcaaccacagtctgacaccagagcccacttccatcctctctggtgtgaggcacagcgagggcagcatctggaggagctctgcagcctccacacctaccacgacctcccagggctgggctcaggaaaaaccagccactgctttacaggacagggggttgaagctgagccccgcctcacacccacccccatgcactcaaagattggattttacagctacttgcaattcaaaattcagaagaataaaaaatgggaacatacagaactctaaaagatagacatcagaaattgttaagttaagctttttcaaaaaatcagcaattccccagcgtagtcaagggtggacactgcacgctctggcatgatgggatggcgaccgggcaagctttcttcctcgagatgctctgctgcttgagagctattgctttgttaagatataaaaaggggtttctttttgtctttctgtaaggtggacttccagcttttgattgaaagtcctagggtgattctatttctgctgtgatttatctgctgaaagctcagctggggttgtgcaagctagggacccattcctgtgtaatacaatgtctgcaccaatgctaataaagtcctattctcttttatgagaaaga

SEQ ID NO: 732819 - DNA, 1030 bp, Homo sapiens
gaggagtgcggctggatgtccattataggatggggctgtgttccctggccagtgtgtgctggtggggtgggggtacaaagtgggtgttctggagtgaacatctcacctcctcaggctctaaaccctaaggcctgtggctcagggagtggcccgaggggtctacagagtcacactggtagcacccactaggcgggaggtggagtgagtgctgttctttcccggaagagctgggtgtggggagctgagggggcccaggcctcagccctggtgctgtccctgtgacaggccctcggggtgtgtgggaccatgtccagccctctccagtgtatccacagccccgacctttgatgagaactcagctgtccagctgcaaaggaaaagccaagtgagacgggctctgggaccatggtgaccaggctcttcccctgctccctggccctcgccagctgccaggctgaaaagaagcctcagctcccacaccgccctcctcaccgcccttcctcggcagtcacttccactggtggaccacgggcccccagccctgtgtcggccttgtctgtctcagctcaaccacagtctgacaccagagcccacttccatcctctctggtgtgaggcacagcgagggcagcatctggaggagctctgcagcctccacacctaccacgacctcccagggctgggctcaggaaaaaccagccactgctttacaggacagggggttgaagctgagccccgcctcacacccacccccatgcactcaaagattggattttacagctacttgcaattcaaaattcagaagaataaaaaatgggaacatacagaactctaaaagatagacatcagaaattgttaagttaagctttttcaaaaaatcagcaattccccagcgtagtcaagggtggacactgcacgctctggcatgatgggatggcgaccgggcaagctttcttcctcgagatgctctgctgcttgagagctattgctttgttaagatataaaaaggggtttctttttgtctttctgta

SEQ ID NO: 732820 - DNA, 2215 bp, Homo sapiens
caggaggcggaggttgcagtgagccgacatcacgccactgtactctagcctgggtgacagagcaagactctgtctcaaaaaaaaagaaagaaggaaagatcactgcagagattgcagtgagaggtgatgggacagggacggagctgagggctggcctggggatgcatttgggaggtgggcccactgctattgggcatggatgggcctggagcgtgaggaccagggaggactccaaagtgacttttacacactggccagagcaaccagccctctgtaatgccagcagctgagatggggagactaaagaagaaaacaggtttgagcaaaaaaacagagagctccctcctggccatgttgagttcaagatgcctgtgtgaagtgcaggagaggagagtcaggcaagcagctgaatcccaagcattgggggaaggtcaggtccaccatgtcagtctgagagtcactagctgtgggccagagcctttggggccagacgtaggtctgaagctggctcctacactcagtgaccctgtgtgagtcccctgcatcccctggactctctgatccccagtgtccttatttgtgaatagccttgccctcccttctagaagagaatgagggaatgcgtaggaagtgcccagctgggtgctgggcagagagtggaggcttgccaagtgaaggtcccatgctggcctctctccgcccccgccccagggtgcgctagctgtggcagtggcccaggtgtgccgcgtggtacctctggtggcgggcggcatctgccagtgcctggctgagcgctactccgtcatcctgctcgacacgctgctgggccgcatgctgccccagctggtctgccgcctcgtcctccggtgctccatggatgacagcgctggcccaaggtcgccgacaggagaatggctgccgcgagactctgagtgccacctctgcatgtccgtgaccacccaggccgggaacagcagcgagcaggccataccacaggcaatgctccaggcctgtgttggctcctggctggacagggaaaagtgcaagcaatttgtggagcagcacacgccccagctgctgaccctggtgcccaggggctgggatgcccacaccacctgccaggccctcggggtgtgtgggaccatgtccagccctctccagtgtatccacagccccgacctttgatgagaactcagctgtccaggtgagtccaggcccccagttgcggggaggtaagggggcaggtcctgaccatcagggcatgggaggcccttctgctccccaagcaggaagaggcggccactcctgccggctgctccatcctccctctcaccgcacagctggaggctcctgagggcttctggctggccatcaggaaaacaccctttccggaccccgagcactgccccgcccagaaccccagtcactgagtgcccaacccccagcttcccccccaaccccccgccctgccctgtcccaggcctccctctcagagcttgccccagggactctctggccctcagggttcaatgtattctgaccaaggccaagctttcctggggctcagggaaaatcacactttgctacccgaagctgtatcccctcagatgccaggaaggccgtgatcatctgactccaccctcctgagacacattctctccctgactgtcctgttctaagtcagcggagcaccttaggatggaggggtggaggcgaggccagatgcagcctctgtgaacaggtgcctggaggctgggaaatgaccctgagagggcaggacacagcaaccgtgggcttaaggtgaccttgagagcaagcttggcccactttacaattctgttcagagccagcccctaacatggtggtcatttattcatttgttccctcattttaaaaaatgtaaggccaggcatggtggctcacgccggtaatcccagcactttgggaggccgaggcaggcagatcacctgaggtcaggagttcgagactagcctggccaacatggcgaaaccctgtctctactaaaaatattttttaaaaattagctgagcatggtggcaggtgcctgtaatcccagctactcaggacgcttaggcaggagaatcacttgaacctgggaggcgaaggttgcggtgtgccgagatcgtgccactgcactctagcctaggcaacagagcacaactctgtctcaggaaaaaaaaaaaaaaaaaaaagg

SEQ ID NO: 732821 - DNA, 1378 bp, Homo sapiens; identical to SEQ ID NO: 323000

SEQ ID NO: 732822 - DNA, 3744 bp, Homo sapiens; identical to SEQ ID NO: 322995

SEQ ID NO: 732823 - DNA, 2814 bp, Homo sapiens
caggaggcggaggttgcagtgagccgacatcacgccactgtactctagcctgggtgacagagcaagactctgtctcaaaaaaaaagaaagaaggaaagatcactgcagagattgcagtgagaggtgatgggacagggacggagctgagggctggcctggggatgcatttgggaggtgggcccactgctattgggcatggatgggcctggagcgtgaggaccagggaggactccaaagtgacttttacacactggccagagcaaccagccctctgtaatgccagcagctgagatggggagactaaagaagaaaacaggtttgagcaaaaaaacagagagctccctcctggccatgttgagttcaagatgcctgtgtgaagtgcaggagaggagagtcaggcaagcagctgaatcccaagcattgggggaaggtcaggtccaccatgtcagtctgagagtcactagctgtgggccagagcctttggggccagacgtaggtctgaagctggctcctacactcagtgaccctgtgtgagtcccctgcatcccctggactctctgatccccagtgtccttatttgtgaatagccttgccctcccttctagaagagaatgagggaatgcgtaggaagtgcccagctgggtgctgggcagagagtggaggcttgccaagtgaaggtcccatgctggcctctctccgcccccgccccagggtgcgctagctgtggcagtggcccaggtgtgccgcgtggtacctctggtggcgggcggcatctgccagtgcctggctgagcgctactccgtcatcctgctcgacacgctgctgggccgcatgctgccccagctggtctgccgcctcgtcctccggtgctccatggatgacagcgctggcccaagtgagcccactgccccctccttagcccaatgcctgctctcctcctccccctaccctgccactgcatgaccctctccctctgtggtcccactgcaatgcaccaaggaggacagaaaccaaacacctctgtagggtggccttgcctgctttccccctaatgctcacatctccagggtcgccgacaggagaatggctgccgcgagactctgagtgccacctctgcatgtccgtgaccacccaggccgggaacagcagcgagcaggccataccacaggcaatgctccaggcctgtgttggctcctggctggacagggaaaagtgcaagcaatttgtggagcagcacacgccccagctgctgaccctggtgcccaggggctgggatgcccacaccacctgccaggccctcggggtgtgtgggaccatgtccagccctctccagtgtatccacagccccgacctttgatgagaactcagctgtccagctgcaaaggaaaagccaagtgagacgggctctgggaccatggtgaccaggctcttcccctgctccctggccctcgccagctgccaggctgaaaagaagcctcagctcccacaccgccctcctcaccgcccttcctcggcagtcacttccactggtggaccacgggcccccagccctgtgtcggccttgtctgtctcagctcaaccacagtctgacaccagagcccacttccatcctctctggtgtgaggcacagcgagggcagcatctggaggagctctgcagcctccacacctaccacgacctcccagggctgggctcaggaaaaaccagccactgctttacaggacagggggttgaagctgagccccgcctcacacccacccccatgcactcaaagattggattttacagctacttgcaattcaaaattcagaagaataaaaaatgggaacatacagaactctaaaagatagacatcagaaattgttaagttaagctttttcaaaaaatcagcaattccccagcgtagtcaagggtggacactgcacgctctggcatgatgggatggcgaccgggcaagctttcttcctcgagatgctctgctgcttgagagctattgctttgttaagatataaaaaggggtttctttttgtctttctgtaaggtggacttccagcttttgattgaaagtcctagggtgattctatttctgctgtgatttatctgctgaaagctcagctggggttgtgcaagctagggacccattcctgtgtaatacaatgtctgcaccaatgctaataaagtcctattctcttttatgagaaagaaaaaagacaccgtcctttaaagtgctgcagtatggccagacgtggtggctcacacctgcaatcccagcaccttaggaggccgaggcaggaggatccttgaggtcaggagttcgagaccagcctcgccaacatggtgaaaccccatttctactaaaaatacaaaaaattagccaagtgtggtggcatatgcctgtaatcccaactactcagaaggccgaggcaggagaattacttgaacgcaggagaatcactgcagcccaggaggcagaggttgcagtgagccgagattgcaccactgcactccagcctgggtgacagagcaagactccatctcagtaaataaataaataaataaaaagcgctgcagtagctgtggcctcaccctgaagtcagcgggcccaggcctacctcactctctcccttggcagagaagcagacgtccatagctcctctccctcacaagcgctcccagcctgccctccagctgctgctctcccctcccagtctctactcactgggatgaggttaggtcatgaggacaccaaaaacctaaaaataaacaaaaagccaaacaagccttagcttttcttaaagactgaaatgcctggaa

SEQ ID NO: 732824 - DNA, 2204 bp, Homo sapiens
caggaggcggaggttgcagtgagccgacatcacgccactgtactctagcctgggtgacagagcaagactctgtctcaaaaaaaaagaaagaaggaaagatcactgcagagattgcagtgagaggtgatgggacagggacggagctgagggctggcctggggatgcatttgggaggtgggcccactgctattgggcatggatgggcctggagcgtgaggaccagggaggactccaaagtgacttttacacactggccagagcaaccagccctctgtaatgccagcagctgagatggggagactaaagaagaaaacaggtttgagcaaaaaaacagagagctccctcctggccatgttgagttcaagatgcctgtgtgaagtgcaggagaggagagtcaggcaagcagctgaatcccaagcattgggggaaggtcaggtccaccatgtcagtctgagagtcactagctgtgggccagagcctttggggccagacgtaggtctgaagctggctcctacactcagtgaccctgtgtgagtcccctgcatcccctggactctctgatccccagtgtccttatttgtgaatagccttgccctcccttctagaagagaatgagggaatgcgtaggaagtgcccagctgggtgctgggcagagagtggaggcttgccaagtgaaggtcccatgctggcctctctccgcccccgccccagggtgcgctagctgtggcagtggcccaggtgtgccgcgtggtacctctggtggcgggcggcatctgccagtgcctggctgagcgctactccgtcatcctgctcgacacgctgctgggccgcatgctgccccagctggtctgccgcctcgtcctccggtgctccatggatgacagcgctggcccaagtgagcccactgccccctccttagcccaatgcctgctctcctcctccccctaccctgccactgcatgaccctctccctctgtggtcccactgcaatgcaccaaggaggacagaaaccaaacacctctgtagggtggccttgcctgctttccccctaatgctcacatctccagggtcgccgacaggagaatggctgccgcgagactctgagtgccacctctgcatgtccgtgaccacccaggccgggaacagcagcgagcaggccataccacaggcaatgctccaggcctgtgttggctcctggctggacagggaaaagtgcaagcaatttgtggagcagcacacgccccagctgctgaccctggtgcccaggggctgggatgcccacaccacctgccaggccctcggggtgtgtgggaccatgtccagccctctccagtgtatccacagccccgacctttgatgagaactcagctgtccagctgcaaaggaaaagccaagtgagacgggctctgggaccatggtgaccaggctcttcccctgctccctggccctcgccagctgccaggctgaaaagaagcctcagctcccacaccgccctcctcaccgcccttcctcggcagtcacttccactggtggaccacgggcccccagccctgtgtcggccttgtctgtctcagctcaaccacagtctgacaccagagcccacttccatcctctctggtgtgaggcacagcgagggcagcatctggaggagctctgcagcctccacacctaccacgacctcccagggctgggctcaggaaaaaccagccactgctttacaggacagggggttgaagctgagccccgcctcacacccacccccatgcactcaaagattggattttacagctacttgcaattcaaaattcagaagaataaaaaatgggaacatacagaactctaaaagatagacatcagaaattgttaagttaagctttttcaaaaaatcagcaattccccagcgtagtcaagggtggacactgcacgctctggcatgatgggatggcgaccgggcaagctttcttcctcgagatgctctgctgcttgagagctattgctttgttaagatataaaaaggggtttctttttgtctttctgtaaggtggacttccagcttttgattgaaagtcctagggtgattctatttctgctgtgatttatctgctgaaagctcagctggggttgtgcaagctagggacccattcctgtgtaatacaatgtctgcaccaatgctaataaagtcctattctcttttatgagaaaga

SEQ ID NO: 732825 - DNA, 2039 bp, Homo sapiens
caggaggcggaggttgcagtgagccgacatcacgccactgtactctagcctgggtgacagagcaagactctgtctcaaaaaaaaagaaagaaggaaagatcactgcagagattgcagtgagaggtgatgggacagggacggagctgagggctggcctggggatgcatttgggaggtgggcccactgctattgggcatggatgggcctggagcgtgaggaccagggaggactccaaagtgacttttacacactggccagagcaaccagccctctgtaatgccagcagctgagatggggagactaaagaagaaaacaggtttgagcaaaaaaacagagagctccctcctggccatgttgagttcaagatgcctgtgtgaagtgcaggagaggagagtcaggcaagcagctgaatcccaagcattgggggaaggtcaggtccaccatgtcagtctgagagtcactagctgtgggccagagcctttggggccagacgtaggtctgaagctggctcctacactcagtgaccctgtgtgagtcccctgcatcccctggactctctgatccccagtgtccttatttgtgaatagccttgccctcccttctagaagagaatgagggaatgcgtaggaagtgcccagctgggtgctgggcagagagtggaggcttgccaagtgaaggtcccatgctggcctctctccgcccccgccccagggtgcgctagctgtggcagtggcccaggtgtgccgcgtggtacctctggtggcgggcggcatctgccagtgcctggctgagcgctactccgtcatcctgctcgacacgctgctgggccgcatgctgccccagctggtctgccgcctcgtcctccggtgctccatggatgacagcgctggcccaagtgagcccactgccccctccttagcccaatgcctgctctcctcctccccctaccctgccactgcatgaccctctccctctgtggtcccactgcaatgcaccaaggaggacagaaaccaaacacctctgtagggtggccttgcctgctttccccctaatgctcacatctccagggtcgccgacaggagaatggctgccgcgagactctgagtgccacctctgcatgtccgtgaccacccaggccgggaacagcagcgagcaggccataccacaggcaatgctccaggcctgtgttggctcctggctggacagggaaaagtgcaagcaatttgtggagcagcacacgccccagctgctgaccctggtgcccaggggctgggatgcccacaccacctgccaggccctcggggtgtgtgggaccatgtccagccctctccagtgtatccacagccccgacctttgatgagaactcagctgtccagctgcaaaggaaaagccaagtgagacgggctctgggaccatggtgaccaggctcttcccctgctccctggccctcgccagctgccaggctgaaaagaagcctcagctcccacaccgccctcctcaccgcccttcctcggcagtcacttccactggtggaccacgggcccccagccctgtgtcggccttgtctgtctcagctcaaccacagtctgacaccagagcccacttccatcctctctggtgtgaggcacagcgagggcagcatctggaggagctctgcagcctccacacctaccacgacctcccagggctgggctcaggaaaaaccagccactgctttacaggacagggggttgaagctgagccccgcctcacacccacccccatgcactcaaagattggattttacagctacttgcaattcaaaattcagaagaataaaaaatgggaacatacagaactctaaaagatagacatcagaaattgttaagttaagctttttcaaaaaatcagcaattccccagcgtagtcaagggtggacactgcacgctctggcatgatgggatggcgaccgggcaagctttcttcctcgagatgctctgctgcttgagagctattgctttgttaagatataaaaaggggtttctttttgtctttctgta

SEQ ID NO: 732826 - DNA, 1986 bp, Homo sapiens
caggaggcggaggttgcagtgagccgacatcacgccactgtactctagcctgggtgacagagcaagactctgtctcaaaaaaaaagaaagaaggaaagatcactgcagagattgcagtgagaggtgatgggacagggacggagctgagggctggcctggggatgcatttgggaggtgggcccactgctattgggcatggatgggcctggagcgtgaggaccagggaggactccaaagtgacttttacacactggccagagcaaccagccctctgtaatgccagcagctgagatggggagactaaagaagaaaacaggtttgagcaaaaaaacagagagctccctcctggccatgttgagttcaagatgcctgtgtgaagtgcaggagaggagagtcaggcaagcagctgaatcccaagcattgggggaaggtcaggtccaccatgtcagtctgagagtcactagctgtgggccagagcctttggggccagacgtaggtctgaagctggctcctacactcagtgaccctgtgtgagtcccctgcatcccctggactctctgatccccagtgtccttatttgtgaatagccttgccctcccttctagaagagaatgagggaatgcgtaggaagtgcccagctgggtgctgggcagagagtggaggcttgccaagtgaaggtcccatgctggcctctctccgcccccgccccagggtgcgctagctgtggcagtggcccaggtgtgccgcgtggtacctctggtggcgggcggcatctgccagtgcctggctgagcgctactccgtcatcctgctcgacacgctgctgggccgcatgctgccccagctggtctgccgcctcgtcctccggtgctccatggatgacagcgctggcccaagtgagcccactgccccctccttagcccaatgcctgctctcctcctccccctaccctgccactgcatgaccctctccctctgtggtcccactgcaatgcaccaaggaggacagaaaccaaacacctctgtagggtggccttgcctgctttccccctaatgctcacatctccagggtcgccgacaggagaatggctgccgcgagactctgagtgccacctctgcatgtccgtgaccacccaggccgggaacagcagcgagcaggccataccacaggcaatgctccaggcctgtgttggctcctggctggacagggaaaagtgcaagcaatttgtggagcagcacacgccccagctgctgaccctggtgcccaggggctgggatgcccacaccacctgccaggccctcggggtgtgtgggaccatgtccagccctctccagtgtatccacagccccgacctttgatgagaactcagctgtccagaaaaagacaccgtcctttaaagtgctgcagtatggccagacgtggtggctcacacctgcaatcccagcaccttaggaggccgaggcaggaggatccttgaggtcaggagttcgagaccagcctcgccaacatggtgaaaccccatttctactaaaaatacaaaaaattagccaagtgtggtggcatatgcctgtaatcccaactactcagaaggccgaggcaggagaattacttgaacgcaggagaatcactgcagcccaggaggcagaggttgcagtgagccgagattgcaccactgcactccagcctgggtgacagagcaagactccatctcagtaaataaataaataaataaaaagcgctgcagtagctgtggcctcaccctgaagtcagcgggcccaggcctacctcactctctcccttggcagagaagcagacgtccatagctcctctccctcacaagcgctcccagcctgccctccagctgctgctctcccctcccagtctctactcactgggatgaggttaggtcatgaggacaccaaaaacctaaaaataaacaaaaagccaaacaagccttagcttttcttaaagactgaaatgcctggaa

SEQ ID NO: 732827 - DNA, 2916 bp, Homo sapiens
caggaggcggaggttgcagtgagccgacatcacgccactgtactctagcctgggtgacagagcaagactctgtctcaaaaaaaaagaaagaaggaaagatcactgcagagattgcagtgagaggtgatgggacagggacggagctgagggctggcctggggatgcatttgggaggtgggcccactgctattgggcatggatgggcctggagcgtgaggaccagggaggactccaaagtgacttttacacactggccagagcaaccagccctctgtaatgccagcagctgagatggggagactaaagaagaaaacaggtttgagcaaaaaaacagagagctccctcctggccatgttgagttcaagatgcctgtgtgaagtgcaggagaggagagtcaggcaagcagctgaatcccaagcattgggggaaggtcaggtccaccatgtcagtctgagagtcactagctgtgggccagagcctttggggccagacgtaggtctgaagctggctcctacactcagtgaccctgtgtgagtcccctgcatcccctggactctctgatccccagtgtccttatttgtgaatagccttgccctcccttctagaagagaatgagggaatgcgtaggaagtgcccagctgggtgctgggcagagagtggaggcttgccaagtgaaggtcccatgctggcctctctccgcccccgccccagggtgcgctagctgtggcagtggcccaggtgtgccgcgtggtacctctggtggcgggcggcatctgccagtgcctggctgagcgctactccgtcatcctgctcgacacgctgctgggccgcatgctgccccagctggtctgccgcctcgtcctccggtgctccatggatgacagcgctggcccaagtgagcccactgccccctccttagcccaatgcctgctctcctcctccccctaccctgccactgcatgaccctctccctctgtggtcccactgcaatgcaccaaggaggacagaaaccaaacacctctgtagggtggccttgcctgctttccccctaatgctcacatctccagggtcgccgacaggagaatggctgccgcgagactctgagtgccacctctgcatgtccgtgaccacccaggccgggaacagcagcgagcaggccataccacaggcaatgctccaggcctgtgttggctcctggctggacagggaaaagtgcaagcaatttgtggagcagcacacgccccagctgctgaccctggtgcccaggggctgggatgcccacaccacctgccaggccctcggggtgtgtgggaccatgtccagccctctccagtgtatccacagccccgacctttgatgagaactcagctgtccagaaaaagacaccgtcctttaaagtgctgcagtatggccagacgtggtggctcacacctgcaatcccagcaccttaggaggccgaggcaggaggatccttgaggtcaggagttcgagaccagcctcgccaacatggtgaaaccccatttctactaaaaatacaaaaaattagccaagtgtggtggcatatgcctgtaatcccaactactcagaaggccgaggcaggagaattacttgaacgcaggagaatcactgcagcccaggaggcagaggttgcagtgagccgagattgcaccactgcactccagcctgggtgacagagcaagactccatctcagtaaataaataaataaataaaaagcgctgcagtagctgtggcctcaccctgaagtcagcgggcccaggcctacctcactctctcccttggcagagaagcagacgtccatagctcctctccctcacaagcgctcccagcctgccctccagctgctgctctcccctcccagtctctactcactgggatgaggttaggtcatgaggacaccaaaaacctaaaaataaacaaaaagccaaacaagccttagcttttcttaaagactgaaatgcctggaagtgtccctttatttataaaataacttttgtcatatttcttatacatgtttcttgtaagaaattcagaaactacagacaaagagagtggaaattacccactgtcaggcctctgagcccaagctaagccatcatatcccctgtgccctgcacgtatacacccagatggcctgaagcaactgaagatccacaaaagaagtgaaaatagccagttcctgccttaactgatgacattccaccattgtgatttgttcctgccccaccctaactgatcaattgaccttgtgacaatacaccttccccacccttgagaaggtgctttgtaatattctccccacccaccccacgcccgcacccccgcacccttaagaaggtattttgtaatattctctccgccattgagaatgtgctttgtaagatccaccccctgcccacaaaaaattgctcctaactccaccgcctatcccaaacctacaagaactaatgataatcccaccaccctttgctgactctttttggactcagcccacctgcacccaggtgattaaaaagctttattgttcacacaaagcctgtttggtagtctcttcacagggaagcatgtgacacccacaatcccacctagcccaggagagagctacggcagggtgtgtgttttgacactgagcttggggctttttccatcttctccccacagcctctggctccacacctccaccgttcaagcgccagaaagagctgtctatgcagcctgctcttgggcctggggatgagacacacaattcattggctcctggattttaagtagacatttgtaaatctatagctaactactgtccttaaagccattgtttccattacaaaatccaactctctgagagaaaagggtgttttaaatttaaaaaaataaaaacaaaaaagtttgattgagac

SEQ ID NO: 732828 - DNA, 2387 bp, Homo sapiens
caggaggcggaggttgcagtgagccgacatcacgccactgtactctagcctgggtgacagagcaagactctgtctcaaaaaaaaagaaagaaggaaagatcactgcagagattgcagtgagaggtgatgggacagggacggagctgagggctggcctggggatgcatttgggaggtgggcccactgctattgggcatggatgggcctggagcgtgaggaccagggaggactccaaagtgacttttacacactggccagagcaaccagccctctgtaatgccagcagctgagatggggagactaaagaagaaaacaggtttgagcaaaaaaacagagagctccctcctggccatgttgagttcaagatgcctgtgtgaagtgcaggagaggagagtcaggcaagcagctgaatcccaagcattgggggaaggtcaggtccaccatgtcagtctgagagtcactagctgtgggccagagcctttggggccagacgtaggtctgaagctggctcctacactcagtgaccctgtgtgagtcccctgcatcccctggactctctgatccccagtgtccttatttgtgaatagccttgccctcccttctagaagagaatgagggaatgcgtaggaagtgcccagctgggtgctgggcagagagtggaggcttgccaagtgaaggtcccatgctggcctctctccgcccccgccccagggtgcgctagctgtggcagtggcccaggtgtgccgcgtggtacctctggtggcgggcggcatctgccagtgcctggctgagcgctactccgtcatcctgctcgacacgctgctgggccgcatgctgccccagctggtctgccgcctcgtcctccggtgctccatggatgacagcgctggcccaagtgagcccactgccccctccttagcccaatgcctgctctcctcctccccctaccctgccactgcatgaccctctccctctgtggtcccactgcaatgcaccaaggaggacagaaaccaaacacctctgtagggtggccttgcctgctttccccctaatgctcacatctccagggtcgccgacaggagaatggctgccgcgagactctgagtgccacctctgcatgtccgtgaccacccaggccgggaacagcagcgagcaggccataccacaggcaatgctccaggcctgtgttggctcctggctggacagggaaaagtgcaagcaatttgtggagcagcacacgccccagctgctgaccctggtgcccaggggctgggatgcccacaccacctgccaggccctcggggtgtgtgggaccatgtccagccctctccagtgtatccacagccccgacctttgatgagaactcagctgtccaggtgagtccaggcccccagttgcggggaggtaagggggcaggtcctgaccatcagggcatgggaggcccttctgctccccaagcaggaagaggcggccactcctgccggctgctccatcctccctctcaccgcacagctggaggctcctgagggcttctggctggccatcaggaaaacaccctttccggaccccgagcactgccccgcccagaaccccagtcactgagtgcccaacccccagcttcccccccaaccccccgccctgccctgtcccaggcctccctctcagagcttgccccagggactctctggccctcagggttcaatgtattctgaccaaggccaagctttcctggggctcagggaaaatcacactttgctacccgaagctgtatcccctcagatgccaggaaggccgtgatcatctgactccaccctcctgagacacattctctccctgactgtcctgttctaagtcagcggagcaccttaggatggaggggtggaggcgaggccagatgcagcctctgtgaacaggtgcctggaggctgggaaatgaccctgagagggcaggacacagcaaccgtgggcttaaggtgaccttgagagcaagcttggcccactttacaattctgttcagagccagcccctaacatggtggtcatttattcatttgttccctcattttaaaaaatgtaaggccaggcatggtggctcacgccggtaatcccagcactttgggaggccgaggcaggcagatcacctgaggtcaggagttcgagactagcctggccaacatggcgaaaccctgtctctactaaaaatattttttaaaaattagctgagcatggtggcaggtgcctgtaatcccagctactcaggacgcttaggcaggagaatcacttgaacctgggaggcgaaggttgcggtgtgccgagatcgtgccactgcactctagcctaggcaacagagcacaactctgtctcaggaaaaaaaaaaaaaaaaaaaagg

SEQ ID NO: 732829 - DNA, 3788 bp, Homo sapiens
caggaggcggaggttgcagtgagccgacatcacgccactgtactctagcctgggtgacagagcaagactctgtctcaaaaaaaaagaaagaaggaaagatcactgcagagattgcagtgagaggtgatgggacagggacggagctgagggctggcctggggatgcatttgggaggtgggcccactgctattgggcatggatgggcctggagcgtgaggaccagggaggactccaaagtgacttttacacactggccagagcaaccagccctctgtaatgccagcagctgagatggggagactaaagaagaaaacaggtttgagcaaaaaaacagagagctccctcctggccatgttgagttcaagatgcctgtgtgaagtgcaggagaggagagtcaggcaagcagctgaatcccaagcattgggggaaggtcaggtccaccatgtcagtctgagagtcactagctgtgggccagagcctttggggccagacgtaggtctgaagctggctcctacactcagtgaccctgtgtgagtcccctgcatcccctggactctctgatccccagtgtccttatttgtgaatagccttgccctcccttctagaagagaatgagggaatgcgtaggaagtgcccagctgggtgctgggcagagagtggaggcttgccaagtgaaggtcccatgctggcctctctccgcccccgccccagggtgcgctagctgtggcagtggcccaggtgtgccgcgtggtacctctggtggcgggcggcatctgccagtgcctggctgagcgctactccgtcatcctgctcgacacgctgctgggccgcatgctgccccagctggtctgccgcctcgtcctccggtgctccatggatgacagcgctggcccaagtgagcccactgccccctccttagcccaatgcctgctctcctcctccccctaccctgccactgcatgaccctctccctctgtggtcccactgcaatgcaccaaggaggacagaaaccaaacacctctgtagggtggccttgcctgctttccccctaatgctcacatctccagggtcgccgacaggagaatggctgccgcgagactctgagtgccacctctgcatgtccgtgaccacccaggccgggaacagcagcgagcaggccataccacaggcaatgctccaggcctgtgttggctcctggctggacagggaaaagtgcaagcaatttgtggagcagcacacgccccagctgctgaccctggtgcccaggggctgggatgcccacaccacctgccaggccctcggggtgtgtgggaccatgtccagccctctccagtgtatccacagccccgacctttgatgagaactcagctgtccaggcaggacatacacacagtccctctctggccctcatcctcctcagctgcaaaggaaaagccaagtgagacgggctctgggaccatggtgaccaggctcttcccctgctccctggccctcgccagctgccaggctgaaaagaagcctcagctcccacaccgccctcctcaccgcccttcctcggcagtcacttccactggtggaccacgggcccccagccctgtgtcggccttgtctgtctcagctcaaccacagtctgacaccagagcccacttccatcctctctggtgtgaggcacagcgagggcagcatctggaggagctctgcagcctccacacctaccacgacctcccagggctgggctcaggaaaaaccagccactgctttacaggacagggggttgaagctgagccccgcctcacacccacccccatgcactcaaagattggattttacagctacttgcaattcaaaattcagaagaataaaaaatgggaacatacagaactctaaaagatagacatcagaaattgttaagttaagctttttcaaaaaatcagcaattccccagcgtagtcaagggtggacactgcacgctctggcatgatgggatggcgaccgggcaagctttcttcctcgagatgctctgctgcttgagagctattgctttgttaagatataaaaaggggtttctttttgtctttctgtaaggtggacttccagcttttgattgaaagtcctagggtgattctatttctgctgtgatttatctgctgaaagctcagctggggttgtgcaagctagggacccattcctgtgtaatacaatgtctgcaccaatgctaataaagtcctattctcttttatgagaaagaaaaaagacaccgtcctttaaagtgctgcagtatggccagacgtggtggctcacacctgcaatcccagcaccttaggaggccgaggcaggaggatccttgaggtcaggagttcgagaccagcctcgccaacatggtgaaaccccatttctactaaaaatacaaaaaattagccaagtgtggtggcatatgcctgtaatcccaactactcagaaggccgaggcaggagaattacttgaacgcaggagaatcactgcagcccaggaggcagaggttgcagtgagccgagattgcaccactgcactccagcctgggtgacagagcaagactccatctcagtaaataaataaataaataaaaagcgctgcagtagctgtggcctcaccctgaagtcagcgggcccaggcctacctcactctctcccttggcagagaagcagacgtccatagctcctctccctcacaagcgctcccagcctgccctccagctgctgctctcccctcccagtctctactcactgggatgaggttaggtcatgaggacaccaaaaacctaaaaataaacaaaaagccaaacaagccttagcttttcttaaagactgaaatgcctggaagtgtccctttatttataaaataacttttgtcatatttcttatacatgtttcttgtaagaaattcagaaactacagacaaagagagtggaaattacccactgtcaggcctctgagcccaagctaagccatcatatcccctgtgccctgcacgtatacacccagatggcctgaagcaactgaagatccacaaaagaagtgaaaatagccagttcctgccttaactgatgacattccaccattgtgatttgttcctgccccaccctaactgatcaattgaccttgtgacaatacaccttccccacccttgagaaggtgctttgtaatattctccccacccaccccacgcccgcacccccgcacccttaagaaggtattttgtaatattctctccgccattgagaatgtgctttgtaagatccaccccctgcccacaaaaaattgctcctaactccaccgcctatcccaaacctacaagaactaatgataatcccaccaccctttgctgactctttttggactcagcccacctgcacccaggtgattaaaaagctttattgttcacacaaagcctgtttggtagtctcttcacagggaagcatgtgacacccacaatcccacctagcccaggagagagctacggcagggtgtgtgttttgacactgagcttggggctttttccatcttctccccacagcctctggctccacacctccaccgttcaagcgccagaaagagctgtctatgcagcctgctcttgggcctggggatgagacacacaattcattggctcctggattttaagtagacatttgtaaatctatagctaactactgtccttaaagccattgtttccattacaaaatccaactctctgagagaaaagggtgttttaaatttaaaaaaataaaaacaaaaaagtttgattgagac

SEQ ID NO: 732830 - DNA, 2858 bp, Homo sapiens
caggaggcggaggttgcagtgagccgacatcacgccactgtactctagcctgggtgacagagcaagactctgtctcaaaaaaaaagaaagaaggaaagatcactgcagagattgcagtgagaggtgatgggacagggacggagctgagggctggcctggggatgcatttgggaggtgggcccactgctattgggcatggatgggcctggagcgtgaggaccagggaggactccaaagtgacttttacacactggccagagcaaccagccctctgtaatgccagcagctgagatggggagactaaagaagaaaacaggtttgagcaaaaaaacagagagctccctcctggccatgttgagttcaagatgcctgtgtgaagtgcaggagaggagagtcaggcaagcagctgaatcccaagcattgggggaaggtcaggtccaccatgtcagtctgagagtcactagctgtgggccagagcctttggggccagacgtaggtctgaagctggctcctacactcagtgaccctgtgtgagtcccctgcatcccctggactctctgatccccagtgtccttatttgtgaatagccttgccctcccttctagaagagaatgagggaatgcgtaggaagtgcccagctgggtgctgggcagagagtggaggcttgccaagtgaaggtcccatgctggcctctctccgcccccgccccagggtgcgctagctgtggcagtggcccaggtgtgccgcgtggtacctctggtggcgggcggcatctgccagtgcctggctgagcgctactccgtcatcctgctcgacacgctgctgggccgcatgctgccccagctggtctgccgcctcgtcctccggtgctccatggatgacagcgctggcccaagtgagcccactgccccctccttagcccaatgcctgctctcctcctccccctaccctgccactgcatgaccctctccctctgtggtcccactgcaatgcaccaaggaggacagaaaccaaacacctctgtagggtggccttgcctgctttccccctaatgctcacatctccagggtcgccgacaggagaatggctgccgcgagactctgagtgccacctctgcatgtccgtgaccacccaggccgggaacagcagcgagcaggccataccacaggcaatgctccaggcctgtgttggctcctggctggacagggaaaagtgcaagcaatttgtggagcagcacacgccccagctgctgaccctggtgcccaggggctgggatgcccacaccacctgccaggccctcggggtgtgtgggaccatgtccagccctctccagtgtatccacagccccgacctttgatgagaactcagctgtccaggcaggacatacacacagtccctctctggccctcatcctcctcagctgcaaaggaaaagccaagtgagacgggctctgggaccatggtgaccaggctcttcccctgctccctggccctcgccagctgccaggctgaaaagaagcctcagctcccacaccgccctcctcaccgcccttcctcggcagtcacttccactggtggaccacgggcccccagccctgtgtcggccttgtctgtctcagctcaaccacagtctgacaccagagcccacttccatcctctctggtgtgaggcacagcgagggcagcatctggaggagctctgcagcctccacacctaccacgacctcccagggctgggctcaggaaaaaccagccactgctttacaggacagggggttgaagctgagccccgcctcacacccacccccatgcactcaaagattggattttacagctacttgcaattcaaaattcagaagaataaaaaatgggaacatacagaactctaaaagatagacatcagaaattgttaagttaagctttttcaaaaaatcagcaattccccagcgtagtcaagggtggacactgcacgctctggcatgatgggatggcgaccgggcaagctttcttcctcgagatgctctgctgcttgagagctattgctttgttaagatataaaaaggggtttctttttgtctttctgtaaggtggacttccagcttttgattgaaagtcctagggtgattctatttctgctgtgatttatctgctgaaagctcagctggggttgtgcaagctagggacccattcctgtgtaatacaatgtctgcaccaatgctaataaagtcctattctcttttatgagaaagaaaaaagacaccgtcctttaaagtgctgcagtatggccagacgtggtggctcacacctgcaatcccagcaccttaggaggccgaggcaggaggatccttgaggtcaggagttcgagaccagcctcgccaacatggtgaaaccccatttctactaaaaatacaaaaaattagccaagtgtggtggcatatgcctgtaatcccaactactcagaaggccgaggcaggagaattacttgaacgcaggagaatcactgcagcccaggaggcagaggttgcagtgagccgagattgcaccactgcactccagcctgggtgacagagcaagactccatctcagtaaataaataaataaataaaaagcgctgcagtagctgtggcctcaccctgaagtcagcgggcccaggcctacctcactctctcccttggcagagaagcagacgtccatagctcctctccctcacaagcgctcccagcctgccctccagctgctgctctcccctcccagtctctactcactgggatgaggttaggtcatgaggacaccaaaaacctaaaaataaacaaaaagccaaacaagccttagcttttcttaaagactgaaatgcctggaa

SEQ ID NO: 732831 - DNA, 2248 bp, Homo sapiens
caggaggcggaggttgcagtgagccgacatcacgccactgtactctagcctgggtgacagagcaagactctgtctcaaaaaaaaagaaagaaggaaagatcactgcagagattgcagtgagaggtgatgggacagggacggagctgagggctggcctggggatgcatttgggaggtgggcccactgctattgggcatggatgggcctggagcgtgaggaccagggaggactccaaagtgacttttacacactggccagagcaaccagccctctgtaatgccagcagctgagatggggagactaaagaagaaaacaggtttgagcaaaaaaacagagagctccctcctggccatgttgagttcaagatgcctgtgtgaagtgcaggagaggagagtcaggcaagcagctgaatcccaagcattgggggaaggtcaggtccaccatgtcagtctgagagtcactagctgtgggccagagcctttggggccagacgtaggtctgaagctggctcctacactcagtgaccctgtgtgagtcccctgcatcccctggactctctgatccccagtgtccttatttgtgaatagccttgccctcccttctagaagagaatgagggaatgcgtaggaagtgcccagctgggtgctgggcagagagtggaggcttgccaagtgaaggtcccatgctggcctctctccgcccccgccccagggtgcgctagctgtggcagtggcccaggtgtgccgcgtggtacctctggtggcgggcggcatctgccagtgcctggctgagcgctactccgtcatcctgctcgacacgctgctgggccgcatgctgccccagctggtctgccgcctcgtcctccggtgctccatggatgacagcgctggcccaagtgagcccactgccccctccttagcccaatgcctgctctcctcctccccctaccctgccactgcatgaccctctccctctgtggtcccactgcaatgcaccaaggaggacagaaaccaaacacctctgtagggtggccttgcctgctttccccctaatgctcacatctccagggtcgccgacaggagaatggctgccgcgagactctgagtgccacctctgcatgtccgtgaccacccaggccgggaacagcagcgagcaggccataccacaggcaatgctccaggcctgtgttggctcctggctggacagggaaaagtgcaagcaatttgtggagcagcacacgccccagctgctgaccctggtgcccaggggctgggatgcccacaccacctgccaggccctcggggtgtgtgggaccatgtccagccctctccagtgtatccacagccccgacctttgatgagaactcagctgtccaggcaggacatacacacagtccctctctggccctcatcctcctcagctgcaaaggaaaagccaagtgagacgggctctgggaccatggtgaccaggctcttcccctgctccctggccctcgccagctgccaggctgaaaagaagcctcagctcccacaccgccctcctcaccgcccttcctcggcagtcacttccactggtggaccacgggcccccagccctgtgtcggccttgtctgtctcagctcaaccacagtctgacaccagagcccacttccatcctctctggtgtgaggcacagcgagggcagcatctggaggagctctgcagcctccacacctaccacgacctcccagggctgggctcaggaaaaaccagccactgctttacaggacagggggttgaagctgagccccgcctcacacccacccccatgcactcaaagattggattttacagctacttgcaattcaaaattcagaagaataaaaaatgggaacatacagaactctaaaagatagacatcagaaattgttaagttaagctttttcaaaaaatcagcaattccccagcgtagtcaagggtggacactgcacgctctggcatgatgggatggcgaccgggcaagctttcttcctcgagatgctctgctgcttgagagctattgctttgttaagatataaaaaggggtttctttttgtctttctgtaaggtggacttccagcttttgattgaaagtcctagggtgattctatttctgctgtgatttatctgctgaaagctcagctggggttgtgcaagctagggacccattcctgtgtaatacaatgtctgcaccaatgctaataaagtcctattctcttttatgagaaaga

SEQ ID NO: 732832 - DNA, 2083 bp, Homo sapiens
caggaggcggaggttgcagtgagccgacatcacgccactgtactctagcctgggtgacagagcaagactctgtctcaaaaaaaaagaaagaaggaaagatcactgcagagattgcagtgagaggtgatgggacagggacggagctgagggctggcctggggatgcatttgggaggtgggcccactgctattgggcatggatgggcctggagcgtgaggaccagggaggactccaaagtgacttttacacactggccagagcaaccagccctctgtaatgccagcagctgagatggggagactaaagaagaaaacaggtttgagcaaaaaaacagagagctccctcctggccatgttgagttcaagatgcctgtgtgaagtgcaggagaggagagtcaggcaagcagctgaatcccaagcattgggggaaggtcaggtccaccatgtcagtctgagagtcactagctgtgggccagagcctttggggccagacgtaggtctgaagctggctcctacactcagtgaccctgtgtgagtcccctgcatcccctggactctctgatccccagtgtccttatttgtgaatagccttgccctcccttctagaagagaatgagggaatgcgtaggaagtgcccagctgggtgctgggcagagagtggaggcttgccaagtgaaggtcccatgctggcctctctccgcccccgccccagggtgcgctagctgtggcagtggcccaggtgtgccgcgtggtacctctggtggcgggcggcatctgccagtgcctggctgagcgctactccgtcatcctgctcgacacgctgctgggccgcatgctgccccagctggtctgccgcctcgtcctccggtgctccatggatgacagcgctggcccaagtgagcccactgccccctccttagcccaatgcctgctctcctcctccccctaccctgccactgcatgaccctctccctctgtggtcccactgcaatgcaccaaggaggacagaaaccaaacacctctgtagggtggccttgcctgctttccccctaatgctcacatctccagggtcgccgacaggagaatggctgccgcgagactctgagtgccacctctgcatgtccgtgaccacccaggccgggaacagcagcgagcaggccataccacaggcaatgctccaggcctgtgttggctcctggctggacagggaaaagtgcaagcaatttgtggagcagcacacgccccagctgctgaccctggtgcccaggggctgggatgcccacaccacctgccaggccctcggggtgtgtgggaccatgtccagccctctccagtgtatccacagccccgacctttgatgagaactcagctgtccaggcaggacatacacacagtccctctctggccctcatcctcctcagctgcaaaggaaaagccaagtgagacgggctctgggaccatggtgaccaggctcttcccctgctccctggccctcgccagctgccaggctgaaaagaagcctcagctcccacaccgccctcctcaccgcccttcctcggcagtcacttccactggtggaccacgggcccccagccctgtgtcggccttgtctgtctcagctcaaccacagtctgacaccagagcccacttccatcctctctggtgtgaggcacagcgagggcagcatctggaggagctctgcagcctccacacctaccacgacctcccagggctgggctcaggaaaaaccagccactgctttacaggacagggggttgaagctgagccccgcctcacacccacccccatgcactcaaagattggattttacagctacttgcaattcaaaattcagaagaataaaaaatgggaacatacagaactctaaaagatagacatcagaaattgttaagttaagctttttcaaaaaatcagcaattccccagcgtagtcaagggtggacactgcacgctctggcatgatgggatggcgaccgggcaagctttcttcctcgagatgctctgctgcttgagagctattgctttgttaagatataaaaaggggtttctttttgtctttctgta

SEQ ID NO: 732833 - DNA, 3616 bp, Homo sapiens
caggaggcggaggttgcagtgagccgacatcacgccactgtactctagcctgggtgacagagcaagactctgtctcaaaaaaaaagaaagaaggaaagatcactgcagagattgcagtgagaggtgatgggacagggacggagctgagggctggcctggggatgcatttgggaggtgggcccactgctattgggcatggatgggcctggagcgtgaggaccagggaggactccaaagtgacttttacacactggccagagcaaccagccctctgtaatgccagcagctgagatggggagactaaagaagaaaacaggtttgagcaaaaaaacagagagctccctcctggccatgttgagttcaagatgcctgtgtgaagtgcaggagaggagagtcaggcaagcagctgaatcccaagcattgggggaaggtcaggtccaccatgtcagtctgagagtcactagctgtgggccagagcctttggggccagacgtaggtctgaagctggctcctacactcagtgaccctgtgtgagtcccctgcatcccctggactctctgatccccagtgtccttatttgtgaatagccttgccctcccttctagaagagaatgagggaatgcgtaggaagtgcccagctgggtgctgggcagagagtggaggcttgccaagtgaaggtcccatgctggcctctctccgcccccgccccagggtgcgctagctgtggcagtggcccaggtgtgccgcgtggtacctctggtggcgggcggcatctgccagtgcctggctgagcgctactccgtcatcctgctcgacacgctgctgggccgcatgctgccccagctggtctgccgcctcgtcctccggtgctccatggatgacagcgctggcccaaggtcgccgacaggagaatggctgccgcgagactctgagtgccacctctgcatgtccgtgaccacccaggccgggaacagcagcgagcaggccataccacaggcaatgctccaggcctgtgttggctcctggctggacagggaaaagtgcaagcaatttgtggagcagcacacgccccagctgctgaccctggtgcccaggggctgggatgcccacaccacctgccaggccctcggggtgtgtgggaccatgtccagccctctccagtgtatccacagccccgacctttgatgagaactcagctgtccaggcaggacatacacacagtccctctctggccctcatcctcctcagctgcaaaggaaaagccaagtgagacgggctctgggaccatggtgaccaggctcttcccctgctccctggccctcgccagctgccaggctgaaaagaagcctcagctcccacaccgccctcctcaccgcccttcctcggcagtcacttccactggtggaccacgggcccccagccctgtgtcggccttgtctgtctcagctcaaccacagtctgacaccagagcccacttccatcctctctggtgtgaggcacagcgagggcagcatctggaggagctctgcagcctccacacctaccacgacctcccagggctgggctcaggaaaaaccagccactgctttacaggacagggggttgaagctgagccccgcctcacacccacccccatgcactcaaagattggattttacagctacttgcaattcaaaattcagaagaataaaaaatgggaacatacagaactctaaaagatagacatcagaaattgttaagttaagctttttcaaaaaatcagcaattccccagcgtagtcaagggtggacactgcacgctctggcatgatgggatggcgaccgggcaagctttcttcctcgagatgctctgctgcttgagagctattgctttgttaagatataaaaaggggtttctttttgtctttctgtaaggtggacttccagcttttgattgaaagtcctagggtgattctatttctgctgtgatttatctgctgaaagctcagctggggttgtgcaagctagggacccattcctgtgtaatacaatgtctgcaccaatgctaataaagtcctattctcttttatgagaaagaaaaaagacaccgtcctttaaagtgctgcagtatggccagacgtggtggctcacacctgcaatcccagcaccttaggaggccgaggcaggaggatccttgaggtcaggagttcgagaccagcctcgccaacatggtgaaaccccatttctactaaaaatacaaaaaattagccaagtgtggtggcatatgcctgtaatcccaactactcagaaggccgaggcaggagaattacttgaacgcaggagaatcactgcagcccaggaggcagaggttgcagtgagccgagattgcaccactgcactccagcctgggtgacagagcaagactccatctcagtaaataaataaataaataaaaagcgctgcagtagctgtggcctcaccctgaagtcagcgggcccaggcctacctcactctctcccttggcagagaagcagacgtccatagctcctctccctcacaagcgctcccagcctgccctccagctgctgctctcccctcccagtctctactcactgggatgaggttaggtcatgaggacaccaaaaacctaaaaataaacaaaaagccaaacaagccttagcttttcttaaagactgaaatgcctggaagtgtccctttatttataaaataacttttgtcatatttcttatacatgtttcttgtaagaaattcagaaactacagacaaagagagtggaaattacccactgtcaggcctctgagcccaagctaagccatcatatcccctgtgccctgcacgtatacacccagatggcctgaagcaactgaagatccacaaaagaagtgaaaatagccagttcctgccttaactgatgacattccaccattgtgatttgttcctgccccaccctaactgatcaattgaccttgtgacaatacaccttccccacccttgagaaggtgctttgtaatattctccccacccaccccacgcccgcacccccgcacccttaagaaggtattttgtaatattctctccgccattgagaatgtgctttgtaagatccaccccctgcccacaaaaaattgctcctaactccaccgcctatcccaaacctacaagaactaatgataatcccaccaccctttgctgactctttttggactcagcccacctgcacccaggtgattaaaaagctttattgttcacacaaagcctgtttggtagtctcttcacagggaagcatgtgacacccacaatcccacctagcccaggagagagctacggcagggtgtgtgttttgacactgagcttggggctttttccatcttctccccacagcctctggctccacacctccaccgttcaagcgccagaaagagctgtctatgcagcctgctcttgggcctggggatgagacacacaattcattggctcctggattttaagtagacatttgtaaatctatagctaactactgtccttaaagccattgtttccattacaaaatccaactctctgagagaaaagggtgttttaaatttaaaaaaataaaaacaaaaaagtttgattgagac

SEQ ID NO: 732834 - DNA, 2686 bp, Homo sapiens
caggaggcggaggttgcagtgagccgacatcacgccactgtactctagcctgggtgacagagcaagactctgtctcaaaaaaaaagaaagaaggaaagatcactgcagagattgcagtgagaggtgatgggacagggacggagctgagggctggcctggggatgcatttgggaggtgggcccactgctattgggcatggatgggcctggagcgtgaggaccagggaggactccaaagtgacttttacacactggccagagcaaccagccctctgtaatgccagcagctgagatggggagactaaagaagaaaacaggtttgagcaaaaaaacagagagctccctcctggccatgttgagttcaagatgcctgtgtgaagtgcaggagaggagagtcaggcaagcagctgaatcccaagcattgggggaaggtcaggtccaccatgtcagtctgagagtcactagctgtgggccagagcctttggggccagacgtaggtctgaagctggctcctacactcagtgaccctgtgtgagtcccctgcatcccctggactctctgatccccagtgtccttatttgtgaatagccttgccctcccttctagaagagaatgagggaatgcgtaggaagtgcccagctgggtgctgggcagagagtggaggcttgccaagtgaaggtcccatgctggcctctctccgcccccgccccagggtgcgctagctgtggcagtggcccaggtgtgccgcgtggtacctctggtggcgggcggcatctgccagtgcctggctgagcgctactccgtcatcctgctcgacacgctgctgggccgcatgctgccccagctggtctgccgcctcgtcctccggtgctccatggatgacagcgctggcccaaggtcgccgacaggagaatggctgccgcgagactctgagtgccacctctgcatgtccgtgaccacccaggccgggaacagcagcgagcaggccataccacaggcaatgctccaggcctgtgttggctcctggctggacagggaaaagtgcaagcaatttgtggagcagcacacgccccagctgctgaccctggtgcccaggggctgggatgcccacaccacctgccaggccctcggggtgtgtgggaccatgtccagccctctccagtgtatccacagccccgacctttgatgagaactcagctgtccaggcaggacatacacacagtccctctctggccctcatcctcctcagctgcaaaggaaaagccaagtgagacgggctctgggaccatggtgaccaggctcttcccctgctccctggccctcgccagctgccaggctgaaaagaagcctcagctcccacaccgccctcctcaccgcccttcctcggcagtcacttccactggtggaccacgggcccccagccctgtgtcggccttgtctgtctcagctcaaccacagtctgacaccagagcccacttccatcctctctggtgtgaggcacagcgagggcagcatctggaggagctctgcagcctccacacctaccacgacctcccagggctgggctcaggaaaaaccagccactgctttacaggacagggggttgaagctgagccccgcctcacacccacccccatgcactcaaagattggattttacagctacttgcaattcaaaattcagaagaataaaaaatgggaacatacagaactctaaaagatagacatcagaaattgttaagttaagctttttcaaaaaatcagcaattccccagcgtagtcaagggtggacactgcacgctctggcatgatgggatggcgaccgggcaagctttcttcctcgagatgctctgctgcttgagagctattgctttgttaagatataaaaaggggtttctttttgtctttctgtaaggtggacttccagcttttgattgaaagtcctagggtgattctatttctgctgtgatttatctgctgaaagctcagctggggttgtgcaagctagggacccattcctgtgtaatacaatgtctgcaccaatgctaataaagtcctattctcttttatgagaaagaaaaaagacaccgtcctttaaagtgctgcagtatggccagacgtggtggctcacacctgcaatcccagcaccttaggaggccgaggcaggaggatccttgaggtcaggagttcgagaccagcctcgccaacatggtgaaaccccatttctactaaaaatacaaaaaattagccaagtgtggtggcatatgcctgtaatcccaactactcagaaggccgaggcaggagaattacttgaacgcaggagaatcactgcagcccaggaggcagaggttgcagtgagccgagattgcaccactgcactccagcctgggtgacagagcaagactccatctcagtaaataaataaataaataaaaagcgctgcagtagctgtggcctcaccctgaagtcagcgggcccaggcctacctcactctctcccttggcagagaagcagacgtccatagctcctctccctcacaagcgctcccagcctgccctccagctgctgctctcccctcccagtctctactcactgggatgaggttaggtcatgaggacaccaaaaacctaaaaataaacaaaaagccaaacaagccttagcttttcttaaagactgaaatgcctggaa

SEQ ID NO: 732835 - DNA, 2076 bp, Homo sapiens
caggaggcggaggttgcagtgagccgacatcacgccactgtactctagcctgggtgacagagcaagactctgtctcaaaaaaaaagaaagaaggaaagatcactgcagagattgcagtgagaggtgatgggacagggacggagctgagggctggcctggggatgcatttgggaggtgggcccactgctattgggcatggatgggcctggagcgtgaggaccagggaggactccaaagtgacttttacacactggccagagcaaccagccctctgtaatgccagcagctgagatggggagactaaagaagaaaacaggtttgagcaaaaaaacagagagctccctcctggccatgttgagttcaagatgcctgtgtgaagtgcaggagaggagagtcaggcaagcagctgaatcccaagcattgggggaaggtcaggtccaccatgtcagtctgagagtcactagctgtgggccagagcctttggggccagacgtaggtctgaagctggctcctacactcagtgaccctgtgtgagtcccctgcatcccctggactctctgatccccagtgtccttatttgtgaatagccttgccctcccttctagaagagaatgagggaatgcgtaggaagtgcccagctgggtgctgggcagagagtggaggcttgccaagtgaaggtcccatgctggcctctctccgcccccgccccagggtgcgctagctgtggcagtggcccaggtgtgccgcgtggtacctctggtggcgggcggcatctgccagtgcctggctgagcgctactccgtcatcctgctcgacacgctgctgggccgcatgctgccccagctggtctgccgcctcgtcctccggtgctccatggatgacagcgctggcccaaggtcgccgacaggagaatggctgccgcgagactctgagtgccacctctgcatgtccgtgaccacccaggccgggaacagcagcgagcaggccataccacaggcaatgctccaggcctgtgttggctcctggctggacagggaaaagtgcaagcaatttgtggagcagcacacgccccagctgctgaccctggtgcccaggggctgggatgcccacaccacctgccaggccctcggggtgtgtgggaccatgtccagccctctccagtgtatccacagccccgacctttgatgagaactcagctgtccaggcaggacatacacacagtccctctctggccctcatcctcctcagctgcaaaggaaaagccaagtgagacgggctctgggaccatggtgaccaggctcttcccctgctccctggccctcgccagctgccaggctgaaaagaagcctcagctcccacaccgccctcctcaccgcccttcctcggcagtcacttccactggtggaccacgggcccccagccctgtgtcggccttgtctgtctcagctcaaccacagtctgacaccagagcccacttccatcctctctggtgtgaggcacagcgagggcagcatctggaggagctctgcagcctccacacctaccacgacctcccagggctgggctcaggaaaaaccagccactgctttacaggacagggggttgaagctgagccccgcctcacacccacccccatgcactcaaagattggattttacagctacttgcaattcaaaattcagaagaataaaaaatgggaacatacagaactctaaaagatagacatcagaaattgttaagttaagctttttcaaaaaatcagcaattccccagcgtagtcaagggtggacactgcacgctctggcatgatgggatggcgaccgggcaagctttcttcctcgagatgctctgctgcttgagagctattgctttgttaagatataaaaaggggtttctttttgtctttctgtaaggtggacttccagcttttgattgaaagtcctagggtgattctatttctgctgtgatttatctgctgaaagctcagctggggttgtgcaagctagggacccattcctgtgtaatacaatgtctgcaccaatgctaataaagtcctattctcttttatgagaaaga

SEQ ID NO: 732836 - DNA, 1911 bp, Homo sapiens
caggaggcggaggttgcagtgagccgacatcacgccactgtactctagcctgggtgacagagcaagactctgtctcaaaaaaaaagaaagaaggaaagatcactgcagagattgcagtgagaggtgatgggacagggacggagctgagggctggcctggggatgcatttgggaggtgggcccactgctattgggcatggatgggcctggagcgtgaggaccagggaggactccaaagtgacttttacacactggccagagcaaccagccctctgtaatgccagcagctgagatggggagactaaagaagaaaacaggtttgagcaaaaaaacagagagctccctcctggccatgttgagttcaagatgcctgtgtgaagtgcaggagaggagagtcaggcaagcagctgaatcccaagcattgggggaaggtcaggtccaccatgtcagtctgagagtcactagctgtgggccagagcctttggggccagacgtaggtctgaagctggctcctacactcagtgaccctgtgtgagtcccctgcatcccctggactctctgatccccagtgtccttatttgtgaatagccttgccctcccttctagaagagaatgagggaatgcgtaggaagtgcccagctgggtgctgggcagagagtggaggcttgccaagtgaaggtcccatgctggcctctctccgcccccgccccagggtgcgctagctgtggcagtggcccaggtgtgccgcgtggtacctctggtggcgggcggcatctgccagtgcctggctgagcgctactccgtcatcctgctcgacacgctgctgggccgcatgctgccccagctggtctgccgcctcgtcctccggtgctccatggatgacagcgctggcccaaggtcgccgacaggagaatggctgccgcgagactctgagtgccacctctgcatgtccgtgaccacccaggccgggaacagcagcgagcaggccataccacaggcaatgctccaggcctgtgttggctcctggctggacagggaaaagtgcaagcaatttgtggagcagcacacgccccagctgctgaccctggtgcccaggggctgggatgcccacaccacctgccaggccctcggggtgtgtgggaccatgtccagccctctccagtgtatccacagccccgacctttgatgagaactcagctgtccaggcaggacatacacacagtccctctctggccctcatcctcctcagctgcaaaggaaaagccaagtgagacgggctctgggaccatggtgaccaggctcttcccctgctccctggccctcgccagctgccaggctgaaaagaagcctcagctcccacaccgccctcctcaccgcccttcctcggcagtcacttccactggtggaccacgggcccccagccctgtgtcggccttgtctgtctcagctcaaccacagtctgacaccagagcccacttccatcctctctggtgtgaggcacagcgagggcagcatctggaggagctctgcagcctccacacctaccacgacctcccagggctgggctcaggaaaaaccagccactgctttacaggacagggggttgaagctgagccccgcctcacacccacccccatgcactcaaagattggattttacagctacttgcaattcaaaattcagaagaataaaaaatgggaacatacagaactctaaaagatagacatcagaaattgttaagttaagctttttcaaaaaatcagcaattccccagcgtagtcaagggtggacactgcacgctctggcatgatgggatggcgaccgggcaagctttcttcctcgagatgctctgctgcttgagagctattgctttgttaagatataaaaaggggtttctttttgtctttctgta

SEQ ID NO: 732837 - DNA, 3773 bp, Homo sapiens
agcccccacgccccgcccagctataaggggccatgcaccaagcagggtacccaggctgcagaggtgccatggctgagtcacacctgctgcagtggctgctgctgctgctgcccacgctctgtggcccaggcactgctgcctggaccacctcatccttggcctgtgcccagggccctgagttctggtgccaaagcctggagcaagcattgcagtgcagagccctagggcattgcctacaggaagtctggggacatgtgggagccgatgacctatgccaagagtgtgaggacatcgtccacatccttaacaagatggccaaggaggccattttccaggacacgatgaggaagttcctggagcaggagtgcaacgtcctccccttgaagctgctcatgccccagtgcaaccaagtgcttgacgactacttccccctggtcatcgactacttccagaaccagattgactcaaacggcatctgtatgcacctgggcctgtgcaaatcccggcagccagagccagagcaggagccagggatgtcagaccccctgcccaaacctctgcgggaccctctgccagaccctctgctggacaagctcgtcctccctgtgctgcccggggccctccaggcgaggcctgggcctcacacacaggatctctccgagcagcaattccccattcctctcccctattgctggctctgcagggctctgatcaagcggatccaagccatgattcccaagggtgcgctagctgtggcagtggcccaggtgtgccgcgtggtacctctggtggcgggcggcatctgccagtgcctggctgagcgctactccgtcatcctgctcgacacgctgctgggccgcatgctgccccagctggtctgccgcctcgtcctccggtgctccatggatgacagcgctggcccaagtgagcccactgccccctccttagcccaatgcctgctctcctcctccccctaccctgccactgcatgaccctctccctctgtggtcccactgcaatgcaccaaggaggacagaaaccaaacacctctgtagggtggccttgcctgctttccccctaatgctcacatctccagggtcgccgacaggagaatggctgccgcgagactctgagtgccacctctgcatgtccgtgaccacccaggccgggaacagcagcgagcaggccataccacaggcaatgctccaggcctgtgttggctcctggctggacagggaaaagtgcaagcaatttgtggagcagcacacgccccagctgctgaccctggtgcccaggggctgggatgcccacaccacctgccaggccctcggggtgtgtgggaccatgtccagccctctccagtgtatccacagccccgacctttgatgagaactcagctgtccagctgcaaaggaaaagccaagtgagacgggctctgggaccatggtgaccaggctcttcccctgctccctggccctcgccagctgccaggctgaaaagaagcctcagctcccacaccgccctcctcaccgcccttcctcggcagtcacttccactggtggaccacgggcccccagccctgtgtcggccttgtctgtctcagctcaaccacagtctgacaccagagcccacttccatcctctctggtgtgaggcacagcgagggcagcatctggaggagctctgcagcctccacacctaccacgacctcccagggctgggctcaggaaaaaccagccactgctttacaggacagggggttgaagctgagccccgcctcacacccacccccatgcactcaaagattggattttacagctacttgcaattcaaaattcagaagaataaaaaatgggaacatacagaactctaaaagatagacatcagaaattgttaagttaagctttttcaaaaaatcagcaattccccagcgtagtcaagggtggacactgcacgctctggcatgatgggatggcgaccgggcaagctttcttcctcgagatgctctgctgcttgagagctattgctttgttaagatataaaaaggggtttctttttgtctttctgtaaggtggacttccagcttttgattgaaagtcctagggtgattctatttctgctgtgatttatctgctgaaagctcagctggggttgtgcaagctagggacccattcctgtgtaatacaatgtctgcaccaatgctaataaagtcctattctcttttatgagaaagaaaaaagacaccgtcctttaaagtgctgcagtatggccagacgtggtggctcacacctgcaatcccagcaccttaggaggccgaggcaggaggatccttgaggtcaggagttcgagaccagcctcgccaacatggtgaaaccccatttctactaaaaatacaaaaaattagccaagtgtggtggcatatgcctgtaatcccaactactcagaaggccgaggcaggagaattacttgaacgcaggagaatcactgcagcccaggaggcagaggttgcagtgagccgagattgcaccactgcactccagcctgggtgacagagcaagactccatctcagtaaataaataaataaataaaaagcgctgcagtagctgtggcctcaccctgaagtcagcgggcccaggcctacctcactctctcccttggcagagaagcagacgtccatagctcctctccctcacaagcgctcccagcctgccctccagctgctgctctcccctcccagtctctactcactgggatgaggttaggtcatgaggacaccaaaaacctaaaaataaacaaaaagccaaacaagccttagcttttcttaaagactgaaatgcctggaagtgtccctttatttataaaataacttttgtcatatttcttatacatgtttcttgtaagaaattcagaaactacagacaaagagagtggaaattacccactgtcaggcctctgagcccaagctaagccatcatatcccctgtgccctgcacgtatacacccagatggcctgaagcaactgaagatccacaaaagaagtgaaaatagccagttcctgccttaactgatgacattccaccattgtgatttgttcctgccccaccctaactgatcaattgaccttgtgacaatacaccttccccacccttgagaaggtgctttgtaatattctccccacccaccccacgcccgcacccccgcacccttaagaaggtattttgtaatattctctccgccattgagaatgtgctttgtaagatccaccccctgcccacaaaaaattgctcctaactccaccgcctatcccaaacctacaagaactaatgataatcccaccaccctttgctgactctttttggactcagcccacctgcacccaggtgattaaaaagctttattgttcacacaaagcctgtttggtagtctcttcacagggaagcatgtgacacccacaatcccacctagcccaggagagagctacggcagggtgtgtgttttgacactgagcttggggctttttccatcttctccccacagcctctggctccacacctccaccgttcaagcgccagaaagagctgtctatgcagcctgctcttgggcctggggatgagacacacaattcattggctcctggattttaagtagacatttgtaaatctatagctaactactgtccttaaagccattgtttccattacaaaatccaactctctgagagaaaagggtgttttaaatttaaaaaaataaaaacaaaaaagtttgattgagac

SEQ ID NO: 732838 - DNA, 2843 bp, Homo sapiens
agcccccacgccccgcccagctataaggggccatgcaccaagcagggtacccaggctgcagaggtgccatggctgagtcacacctgctgcagtggctgctgctgctgctgcccacgctctgtggcccaggcactgctgcctggaccacctcatccttggcctgtgcccagggccctgagttctggtgccaaagcctggagcaagcattgcagtgcagagccctagggcattgcctacaggaagtctggggacatgtgggagccgatgacctatgccaagagtgtgaggacatcgtccacatccttaacaagatggccaaggaggccattttccaggacacgatgaggaagttcctggagcaggagtgcaacgtcctccccttgaagctgctcatgccccagtgcaaccaagtgcttgacgactacttccccctggtcatcgactacttccagaaccagattgactcaaacggcatctgtatgcacctgggcctgtgcaaatcccggcagccagagccagagcaggagccagggatgtcagaccccctgcccaaacctctgcgggaccctctgccagaccctctgctggacaagctcgtcctccctgtgctgcccggggccctccaggcgaggcctgggcctcacacacaggatctctccgagcagcaattccccattcctctcccctattgctggctctgcagggctctgatcaagcggatccaagccatgattcccaagggtgcgctagctgtggcagtggcccaggtgtgccgcgtggtacctctggtggcgggcggcatctgccagtgcctggctgagcgctactccgtcatcctgctcgacacgctgctgggccgcatgctgccccagctggtctgccgcctcgtcctccggtgctccatggatgacagcgctggcccaagtgagcccactgccccctccttagcccaatgcctgctctcctcctccccctaccctgccactgcatgaccctctccctctgtggtcccactgcaatgcaccaaggaggacagaaaccaaacacctctgtagggtggccttgcctgctttccccctaatgctcacatctccagggtcgccgacaggagaatggctgccgcgagactctgagtgccacctctgcatgtccgtgaccacccaggccgggaacagcagcgagcaggccataccacaggcaatgctccaggcctgtgttggctcctggctggacagggaaaagtgcaagcaatttgtggagcagcacacgccccagctgctgaccctggtgcccaggggctgggatgcccacaccacctgccaggccctcggggtgtgtgggaccatgtccagccctctccagtgtatccacagccccgacctttgatgagaactcagctgtccagctgcaaaggaaaagccaagtgagacgggctctgggaccatggtgaccaggctcttcccctgctccctggccctcgccagctgccaggctgaaaagaagcctcagctcccacaccgccctcctcaccgcccttcctcggcagtcacttccactggtggaccacgggcccccagccctgtgtcggccttgtctgtctcagctcaaccacagtctgacaccagagcccacttccatcctctctggtgtgaggcacagcgagggcagcatctggaggagctctgcagcctccacacctaccacgacctcccagggctgggctcaggaaaaaccagccactgctttacaggacagggggttgaagctgagccccgcctcacacccacccccatgcactcaaagattggattttacagctacttgcaattcaaaattcagaagaataaaaaatgggaacatacagaactctaaaagatagacatcagaaattgttaagttaagctttttcaaaaaatcagcaattccccagcgtagtcaagggtggacactgcacgctctggcatgatgggatggcgaccgggcaagctttcttcctcgagatgctctgctgcttgagagctattgctttgttaagatataaaaaggggtttctttttgtctttctgtaaggtggacttccagcttttgattgaaagtcctagggtgattctatttctgctgtgatttatctgctgaaagctcagctggggttgtgcaagctagggacccattcctgtgtaatacaatgtctgcaccaatgctaataaagtcctattctcttttatgagaaagaaaaaagacaccgtcctttaaagtgctgcagtatggccagacgtggtggctcacacctgcaatcccagcaccttaggaggccgaggcaggaggatccttgaggtcaggagttcgagaccagcctcgccaacatggtgaaaccccatttctactaaaaatacaaaaaattagccaagtgtggtggcatatgcctgtaatcccaactactcagaaggccgaggcaggagaattacttgaacgcaggagaatcactgcagcccaggaggcagaggttgcagtgagccgagattgcaccactgcactccagcctgggtgacagagcaagactccatctcagtaaataaataaataaataaaaagcgctgcagtagctgtggcctcaccctgaagtcagcgggcccaggcctacctcactctctcccttggcagagaagcagacgtccatagctcctctccctcacaagcgctcccagcctgccctccagctgctgctctcccctcccagtctctactcactgggatgaggttaggtcatgaggacaccaaaaacctaaaaataaacaaaaagccaaacaagccttagcttttcttaaagactgaaatgcctggaa

SEQ ID NO: 732839 - DNA, 2233 bp, Homo sapiens
agcccccacgccccgcccagctataaggggccatgcaccaagcagggtacccaggctgcagaggtgccatggctgagtcacacctgctgcagtggctgctgctgctgctgcccacgctctgtggcccaggcactgctgcctggaccacctcatccttggcctgtgcccagggccctgagttctggtgccaaagcctggagcaagcattgcagtgcagagccctagggcattgcctacaggaagtctggggacatgtgggagccgatgacctatgccaagagtgtgaggacatcgtccacatccttaacaagatggccaaggaggccattttccaggacacgatgaggaagttcctggagcaggagtgcaacgtcctccccttgaagctgctcatgccccagtgcaaccaagtgcttgacgactacttccccctggtcatcgactacttccagaaccagattgactcaaacggcatctgtatgcacctgggcctgtgcaaatcccggcagccagagccagagcaggagccagggatgtcagaccccctgcccaaacctctgcgggaccctctgccagaccctctgctggacaagctcgtcctccctgtgctgcccggggccctccaggcgaggcctgggcctcacacacaggatctctccgagcagcaattccccattcctctcccctattgctggctctgcagggctctgatcaagcggatccaagccatgattcccaagggtgcgctagctgtggcagtggcccaggtgtgccgcgtggtacctctggtggcgggcggcatctgccagtgcctggctgagcgctactccgtcatcctgctcgacacgctgctgggccgcatgctgccccagctggtctgccgcctcgtcctccggtgctccatggatgacagcgctggcccaagtgagcccactgccccctccttagcccaatgcctgctctcctcctccccctaccctgccactgcatgaccctctccctctgtggtcccactgcaatgcaccaaggaggacagaaaccaaacacctctgtagggtggccttgcctgctttccccctaatgctcacatctccagggtcgccgacaggagaatggctgccgcgagactctgagtgccacctctgcatgtccgtgaccacccaggccgggaacagcagcgagcaggccataccacaggcaatgctccaggcctgtgttggctcctggctggacagggaaaagtgcaagcaatttgtggagcagcacacgccccagctgctgaccctggtgcccaggggctgggatgcccacaccacctgccaggccctcggggtgtgtgggaccatgtccagccctctccagtgtatccacagccccgacctttgatgagaactcagctgtccagctgcaaaggaaaagccaagtgagacgggctctgggaccatggtgaccaggctcttcccctgctccctggccctcgccagctgccaggctgaaaagaagcctcagctcccacaccgccctcctcaccgcccttcctcggcagtcacttccactggtggaccacgggcccccagccctgtgtcggccttgtctgtctcagctcaaccacagtctgacaccagagcccacttccatcctctctggtgtgaggcacagcgagggcagcatctggaggagctctgcagcctccacacctaccacgacctcccagggctgggctcaggaaaaaccagccactgctttacaggacagggggttgaagctgagccccgcctcacacccacccccatgcactcaaagattggattttacagctacttgcaattcaaaattcagaagaataaaaaatgggaacatacagaactctaaaagatagacatcagaaattgttaagttaagctttttcaaaaaatcagcaattccccagcgtagtcaagggtggacactgcacgctctggcatgatgggatggcgaccgggcaagctttcttcctcgagatgctctgctgcttgagagctattgctttgttaagatataaaaaggggtttctttttgtctttctgtaaggtggacttccagcttttgattgaaagtcctagggtgattctatttctgctgtgatttatctgctgaaagctcagctggggttgtgcaagctagggacccattcctgtgtaatacaatgtctgcaccaatgctaataaagtcctattctcttttatgagaaaga

SEQ ID NO: 732840 - DNA, 2068 bp, Homo sapiens
agcccccacgccccgcccagctataaggggccatgcaccaagcagggtacccaggctgcagaggtgccatggctgagtcacacctgctgcagtggctgctgctgctgctgcccacgctctgtggcccaggcactgctgcctggaccacctcatccttggcctgtgcccagggccctgagttctggtgccaaagcctggagcaagcattgcagtgcagagccctagggcattgcctacaggaagtctggggacatgtgggagccgatgacctatgccaagagtgtgaggacatcgtccacatccttaacaagatggccaaggaggccattttccaggacacgatgaggaagttcctggagcaggagtgcaacgtcctccccttgaagctgctcatgccccagtgcaaccaagtgcttgacgactacttccccctggtcatcgactacttccagaaccagattgactcaaacggcatctgtatgcacctgggcctgtgcaaatcccggcagccagagccagagcaggagccagggatgtcagaccccctgcccaaacctctgcgggaccctctgccagaccctctgctggacaagctcgtcctccctgtgctgcccggggccctccaggcgaggcctgggcctcacacacaggatctctccgagcagcaattccccattcctctcccctattgctggctctgcagggctctgatcaagcggatccaagccatgattcccaagggtgcgctagctgtggcagtggcccaggtgtgccgcgtggtacctctggtggcgggcggcatctgccagtgcctggctgagcgctactccgtcatcctgctcgacacgctgctgggccgcatgctgccccagctggtctgccgcctcgtcctccggtgctccatggatgacagcgctggcccaagtgagcccactgccccctccttagcccaatgcctgctctcctcctccccctaccctgccactgcatgaccctctccctctgtggtcccactgcaatgcaccaaggaggacagaaaccaaacacctctgtagggtggccttgcctgctttccccctaatgctcacatctccagggtcgccgacaggagaatggctgccgcgagactctgagtgccacctctgcatgtccgtgaccacccaggccgggaacagcagcgagcaggccataccacaggcaatgctccaggcctgtgttggctcctggctggacagggaaaagtgcaagcaatttgtggagcagcacacgccccagctgctgaccctggtgcccaggggctgggatgcccacaccacctgccaggccctcggggtgtgtgggaccatgtccagccctctccagtgtatccacagccccgacctttgatgagaactcagctgtccagctgcaaaggaaaagccaagtgagacgggctctgggaccatggtgaccaggctcttcccctgctccctggccctcgccagctgccaggctgaaaagaagcctcagctcccacaccgccctcctcaccgcccttcctcggcagtcacttccactggtggaccacgggcccccagccctgtgtcggccttgtctgtctcagctcaaccacagtctgacaccagagcccacttccatcctctctggtgtgaggcacagcgagggcagcatctggaggagctctgcagcctccacacctaccacgacctcccagggctgggctcaggaaaaaccagccactgctttacaggacagggggttgaagctgagccccgcctcacacccacccccatgcactcaaagattggattttacagctacttgcaattcaaaattcagaagaataaaaaatgggaacatacagaactctaaaagatagacatcagaaattgttaagttaagctttttcaaaaaatcagcaattccccagcgtagtcaagggtggacactgcacgctctggcatgatgggatggcgaccgggcaagctttcttcctcgagatgctctgctgcttgagagctattgctttgttaagatataaaaaggggtttctttttgtctttctgta

SEQ ID NO: 732841 - DNA, 2015 bp, Homo sapiens
agcccccacgccccgcccagctataaggggccatgcaccaagcagggtacccaggctgcagaggtgccatggctgagtcacacctgctgcagtggctgctgctgctgctgcccacgctctgtggcccaggcactgctgcctggaccacctcatccttggcctgtgcccagggccctgagttctggtgccaaagcctggagcaagcattgcagtgcagagccctagggcattgcctacaggaagtctggggacatgtgggagccgatgacctatgccaagagtgtgaggacatcgtccacatccttaacaagatggccaaggaggccattttccaggacacgatgaggaagttcctggagcaggagtgcaacgtcctccccttgaagctgctcatgccccagtgcaaccaagtgcttgacgactacttccccctggtcatcgactacttccagaaccagattgactcaaacggcatctgtatgcacctgggcctgtgcaaatcccggcagccagagccagagcaggagccagggatgtcagaccccctgcccaaacctctgcgggaccctctgccagaccctctgctggacaagctcgtcctccctgtgctgcccggggccctccaggcgaggcctgggcctcacacacaggatctctccgagcagcaattccccattcctctcccctattgctggctctgcagggctctgatcaagcggatccaagccatgattcccaagggtgcgctagctgtggcagtggcccaggtgtgccgcgtggtacctctggtggcgggcggcatctgccagtgcctggctgagcgctactccgtcatcctgctcgacacgctgctgggccgcatgctgccccagctggtctgccgcctcgtcctccggtgctccatggatgacagcgctggcccaagtgagcccactgccccctccttagcccaatgcctgctctcctcctccccctaccctgccactgcatgaccctctccctctgtggtcccactgcaatgcaccaaggaggacagaaaccaaacacctctgtagggtggccttgcctgctttccccctaatgctcacatctccagggtcgccgacaggagaatggctgccgcgagactctgagtgccacctctgcatgtccgtgaccacccaggccgggaacagcagcgagcaggccataccacaggcaatgctccaggcctgtgttggctcctggctggacagggaaaagtgcaagcaatttgtggagcagcacacgccccagctgctgaccctggtgcccaggggctgggatgcccacaccacctgccaggccctcggggtgtgtgggaccatgtccagccctctccagtgtatccacagccccgacctttgatgagaactcagctgtccagaaaaagacaccgtcctttaaagtgctgcagtatggccagacgtggtggctcacacctgcaatcccagcaccttaggaggccgaggcaggaggatccttgaggtcaggagttcgagaccagcctcgccaacatggtgaaaccccatttctactaaaaatacaaaaaattagccaagtgtggtggcatatgcctgtaatcccaactactcagaaggccgaggcaggagaattacttgaacgcaggagaatcactgcagcccaggaggcagaggttgcagtgagccgagattgcaccactgcactccagcctgggtgacagagcaagactccatctcagtaaataaataaataaataaaaagcgctgcagtagctgtggcctcaccctgaagtcagcgggcccaggcctacctcactctctcccttggcagagaagcagacgtccatagctcctctccctcacaagcgctcccagcctgccctccagctgctgctctcccctcccagtctctactcactgggatgaggttaggtcatgaggacaccaaaaacctaaaaataaacaaaaagccaaacaagccttagcttttcttaaagactgaaatgcctggaa

SEQ ID NO: 732842 - DNA, 2945 bp, Homo sapiens
agcccccacgccccgcccagctataaggggccatgcaccaagcagggtacccaggctgcagaggtgccatggctgagtcacacctgctgcagtggctgctgctgctgctgcccacgctctgtggcccaggcactgctgcctggaccacctcatccttggcctgtgcccagggccctgagttctggtgccaaagcctggagcaagcattgcagtgcagagccctagggcattgcctacaggaagtctggggacatgtgggagccgatgacctatgccaagagtgtgaggacatcgtccacatccttaacaagatggccaaggaggccattttccaggacacgatgaggaagttcctggagcaggagtgcaacgtcctccccttgaagctgctcatgccccagtgcaaccaagtgcttgacgactacttccccctggtcatcgactacttccagaaccagattgactcaaacggcatctgtatgcacctgggcctgtgcaaatcccggcagccagagccagagcaggagccagggatgtcagaccccctgcccaaacctctgcgggaccctctgccagaccctctgctggacaagctcgtcctccctgtgctgcccggggccctccaggcgaggcctgggcctcacacacaggatctctccgagcagcaattccccattcctctcccctattgctggctctgcagggctctgatcaagcggatccaagccatgattcccaagggtgcgctagctgtggcagtggcccaggtgtgccgcgtggtacctctggtggcgggcggcatctgccagtgcctggctgagcgctactccgtcatcctgctcgacacgctgctgggccgcatgctgccccagctggtctgccgcctcgtcctccggtgctccatggatgacagcgctggcccaagtgagcccactgccccctccttagcccaatgcctgctctcctcctccccctaccctgccactgcatgaccctctccctctgtggtcccactgcaatgcaccaaggaggacagaaaccaaacacctctgtagggtggccttgcctgctttccccctaatgctcacatctccagggtcgccgacaggagaatggctgccgcgagactctgagtgccacctctgcatgtccgtgaccacccaggccgggaacagcagcgagcaggccataccacaggcaatgctccaggcctgtgttggctcctggctggacagggaaaagtgcaagcaatttgtggagcagcacacgccccagctgctgaccctggtgcccaggggctgggatgcccacaccacctgccaggccctcggggtgtgtgggaccatgtccagccctctccagtgtatccacagccccgacctttgatgagaactcagctgtccagaaaaagacaccgtcctttaaagtgctgcagtatggccagacgtggtggctcacacctgcaatcccagcaccttaggaggccgaggcaggaggatccttgaggtcaggagttcgagaccagcctcgccaacatggtgaaaccccatttctactaaaaatacaaaaaattagccaagtgtggtggcatatgcctgtaatcccaactactcagaaggccgaggcaggagaattacttgaacgcaggagaatcactgcagcccaggaggcagaggttgcagtgagccgagattgcaccactgcactccagcctgggtgacagagcaagactccatctcagtaaataaataaataaataaaaagcgctgcagtagctgtggcctcaccctgaagtcagcgggcccaggcctacctcactctctcccttggcagagaagcagacgtccatagctcctctccctcacaagcgctcccagcctgccctccagctgctgctctcccctcccagtctctactcactgggatgaggttaggtcatgaggacaccaaaaacctaaaaataaacaaaaagccaaacaagccttagcttttcttaaagactgaaatgcctggaagtgtccctttatttataaaataacttttgtcatatttcttatacatgtttcttgtaagaaattcagaaactacagacaaagagagtggaaattacccactgtcaggcctctgagcccaagctaagccatcatatcccctgtgccctgcacgtatacacccagatggcctgaagcaactgaagatccacaaaagaagtgaaaatagccagttcctgccttaactgatgacattccaccattgtgatttgttcctgccccaccctaactgatcaattgaccttgtgacaatacaccttccccacccttgagaaggtgctttgtaatattctccccacccaccccacgcccgcacccccgcacccttaagaaggtattttgtaatattctctccgccattgagaatgtgctttgtaagatccaccccctgcccacaaaaaattgctcctaactccaccgcctatcccaaacctacaagaactaatgataatcccaccaccctttgctgactctttttggactcagcccacctgcacccaggtgattaaaaagctttattgttcacacaaagcctgtttggtagtctcttcacagggaagcatgtgacacccacaatcccacctagcccaggagagagctacggcagggtgtgtgttttgacactgagcttggggctttttccatcttctccccacagcctctggctccacacctccaccgttcaagcgccagaaagagctgtctatgcagcctgctcttgggcctggggatgagacacacaattcattggctcctggattttaagtagacatttgtaaatctatagctaactactgtccttaaagccattgtttccattacaaaatccaactctctgagagaaaagggtgttttaaatttaaaaaaataaaaacaaaaaagtttgattgagac

SEQ ID NO: 732843 - DNA, 2416 bp, Homo sapiens
agcccccacgccccgcccagctataaggggccatgcaccaagcagggtacccaggctgcagaggtgccatggctgagtcacacctgctgcagtggctgctgctgctgctgcccacgctctgtggcccaggcactgctgcctggaccacctcatccttggcctgtgcccagggccctgagttctggtgccaaagcctggagcaagcattgcagtgcagagccctagggcattgcctacaggaagtctggggacatgtgggagccgatgacctatgccaagagtgtgaggacatcgtccacatccttaacaagatggccaaggaggccattttccaggacacgatgaggaagttcctggagcaggagtgcaacgtcctccccttgaagctgctcatgccccagtgcaaccaagtgcttgacgactacttccccctggtcatcgactacttccagaaccagattgactcaaacggcatctgtatgcacctgggcctgtgcaaatcccggcagccagagccagagcaggagccagggatgtcagaccccctgcccaaacctctgcgggaccctctgccagaccctctgctggacaagctcgtcctccctgtgctgcccggggccctccaggcgaggcctgggcctcacacacaggatctctccgagcagcaattccccattcctctcccctattgctggctctgcagggctctgatcaagcggatccaagccatgattcccaagggtgcgctagctgtggcagtggcccaggtgtgccgcgtggtacctctggtggcgggcggcatctgccagtgcctggctgagcgctactccgtcatcctgctcgacacgctgctgggccgcatgctgccccagctggtctgccgcctcgtcctccggtgctccatggatgacagcgctggcccaagtgagcccactgccccctccttagcccaatgcctgctctcctcctccccctaccctgccactgcatgaccctctccctctgtggtcccactgcaatgcaccaaggaggacagaaaccaaacacctctgtagggtggccttgcctgctttccccctaatgctcacatctccagggtcgccgacaggagaatggctgccgcgagactctgagtgccacctctgcatgtccgtgaccacccaggccgggaacagcagcgagcaggccataccacaggcaatgctccaggcctgtgttggctcctggctggacagggaaaagtgcaagcaatttgtggagcagcacacgccccagctgctgaccctggtgcccaggggctgggatgcccacaccacctgccaggccctcggggtgtgtgggaccatgtccagccctctccagtgtatccacagccccgacctttgatgagaactcagctgtccaggtgagtccaggcccccagttgcggggaggtaagggggcaggtcctgaccatcagggcatgggaggcccttctgctccccaagcaggaagaggcggccactcctgccggctgctccatcctccctctcaccgcacagctggaggctcctgagggcttctggctggccatcaggaaaacaccctttccggaccccgagcactgccccgcccagaaccccagtcactgagtgcccaacccccagcttcccccccaaccccccgccctgccctgtcccaggcctccctctcagagcttgccccagggactctctggccctcagggttcaatgtattctgaccaaggccaagctttcctggggctcagggaaaatcacactttgctacccgaagctgtatcccctcagatgccaggaaggccgtgatcatctgactccaccctcctgagacacattctctccctgactgtcctgttctaagtcagcggagcaccttaggatggaggggtggaggcgaggccagatgcagcctctgtgaacaggtgcctggaggctgggaaatgaccctgagagggcaggacacagcaaccgtgggcttaaggtgaccttgagagcaagcttggcccactttacaattctgttcagagccagcccctaacatggtggtcatttattcatttgttccctcattttaaaaaatgtaaggccaggcatggtggctcacgccggtaatcccagcactttgggaggccgaggcaggcagatcacctgaggtcaggagttcgagactagcctggccaacatggcgaaaccctgtctctactaaaaatattttttaaaaattagctgagcatggtggcaggtgcctgtaatcccagctactcaggacgcttaggcaggagaatcacttgaacctgggaggcgaaggttgcggtgtgccgagatcgtgccactgcactctagcctaggcaacagagcacaactctgtctcaggaaaaaaaaaaaaaaaaaaaagg

SEQ ID NO: 732844 - DNA, 3817 bp, Homo sapiens
agcccccacgccccgcccagctataaggggccatgcaccaagcagggtacccaggctgcagaggtgccatggctgagtcacacctgctgcagtggctgctgctgctgctgcccacgctctgtggcccaggcactgctgcctggaccacctcatccttggcctgtgcccagggccctgagttctggtgccaaagcctggagcaagcattgcagtgcagagccctagggcattgcctacaggaagtctggggacatgtgggagccgatgacctatgccaagagtgtgaggacatcgtccacatccttaacaagatggccaaggaggccattttccaggacacgatgaggaagttcctggagcaggagtgcaacgtcctccccttgaagctgctcatgccccagtgcaaccaagtgcttgacgactacttccccctggtcatcgactacttccagaaccagattgactcaaacggcatctgtatgcacctgggcctgtgcaaatcccggcagccagagccagagcaggagccagggatgtcagaccccctgcccaaacctctgcgggaccctctgccagaccctctgctggacaagctcgtcctccctgtgctgcccggggccctccaggcgaggcctgggcctcacacacaggatctctccgagcagcaattccccattcctctcccctattgctggctctgcagggctctgatcaagcggatccaagccatgattcccaagggtgcgctagctgtggcagtggcccaggtgtgccgcgtggtacctctggtggcgggcggcatctgccagtgcctggctgagcgctactccgtcatcctgctcgacacgctgctgggccgcatgctgccccagctggtctgccgcctcgtcctccggtgctccatggatgacagcgctggcccaagtgagcccactgccccctccttagcccaatgcctgctctcctcctccccctaccctgccactgcatgaccctctccctctgtggtcccactgcaatgcaccaaggaggacagaaaccaaacacctctgtagggtggccttgcctgctttccccctaatgctcacatctccagggtcgccgacaggagaatggctgccgcgagactctgagtgccacctctgcatgtccgtgaccacccaggccgggaacagcagcgagcaggccataccacaggcaatgctccaggcctgtgttggctcctggctggacagggaaaagtgcaagcaatttgtggagcagcacacgccccagctgctgaccctggtgcccaggggctgggatgcccacaccacctgccaggccctcggggtgtgtgggaccatgtccagccctctccagtgtatccacagccccgacctttgatgagaactcagctgtccaggcaggacatacacacagtccctctctggccctcatcctcctcagctgcaaaggaaaagccaagtgagacgggctctgggaccatggtgaccaggctcttcccctgctccctggccctcgccagctgccaggctgaaaagaagcctcagctcccacaccgccctcctcaccgcccttcctcggcagtcacttccactggtggaccacgggcccccagccctgtgtcggccttgtctgtctcagctcaaccacagtctgacaccagagcccacttccatcctctctggtgtgaggcacagcgagggcagcatctggaggagctctgcagcctccacacctaccacgacctcccagggctgggctcaggaaaaaccagccactgctttacaggacagggggttgaagctgagccccgcctcacacccacccccatgcactcaaagattggattttacagctacttgcaattcaaaattcagaagaataaaaaatgggaacatacagaactctaaaagatagacatcagaaattgttaagttaagctttttcaaaaaatcagcaattccccagcgtagtcaagggtggacactgcacgctctggcatgatgggatggcgaccgggcaagctttcttcctcgagatgctctgctgcttgagagctattgctttgttaagatataaaaaggggtttctttttgtctttctgtaaggtggacttccagcttttgattgaaagtcctagggtgattctatttctgctgtgatttatctgctgaaagctcagctggggttgtgcaagctagggacccattcctgtgtaatacaatgtctgcaccaatgctaataaagtcctattctcttttatgagaaagaaaaaagacaccgtcctttaaagtgctgcagtatggccagacgtggtggctcacacctgcaatcccagcaccttaggaggccgaggcaggaggatccttgaggtcaggagttcgagaccagcctcgccaacatggtgaaaccccatttctactaaaaatacaaaaaattagccaagtgtggtggcatatgcctgtaatcccaactactcagaaggccgaggcaggagaattacttgaacgcaggagaatcactgcagcccaggaggcagaggttgcagtgagccgagattgcaccactgcactccagcctgggtgacagagcaagactccatctcagtaaataaataaataaataaaaagcgctgcagtagctgtggcctcaccctgaagtcagcgggcccaggcctacctcactctctcccttggcagagaagcagacgtccatagctcctctccctcacaagcgctcccagcctgccctccagctgctgctctcccctcccagtctctactcactgggatgaggttaggtcatgaggacaccaaaaacctaaaaataaacaaaaagccaaacaagccttagcttttcttaaagactgaaatgcctggaagtgtccctttatttataaaataacttttgtcatatttcttatacatgtttcttgtaagaaattcagaaactacagacaaagagagtggaaattacccactgtcaggcctctgagcccaagctaagccatcatatcccctgtgccctgcacgtatacacccagatggcctgaagcaactgaagatccacaaaagaagtgaaaatagccagttcctgccttaactgatgacattccaccattgtgatttgttcctgccccaccctaactgatcaattgaccttgtgacaatacaccttccccacccttgagaaggtgctttgtaatattctccccacccaccccacgcccgcacccccgcacccttaagaaggtattttgtaatattctctccgccattgagaatgtgctttgtaagatccaccccctgcccacaaaaaattgctcctaactccaccgcctatcccaaacctacaagaactaatgataatcccaccaccctttgctgactctttttggactcagcccacctgcacccaggtgattaaaaagctttattgttcacacaaagcctgtttggtagtctcttcacagggaagcatgtgacacccacaatcccacctagcccaggagagagctacggcagggtgtgtgttttgacactgagcttggggctttttccatcttctccccacagcctctggctccacacctccaccgttcaagcgccagaaagagctgtctatgcagcctgctcttgggcctggggatgagacacacaattcattggctcctggattttaagtagacatttgtaaatctatagctaactactgtccttaaagccattgtttccattacaaaatccaactctctgagagaaaagggtgttttaaatttaaaaaaataaaaacaaaaaagtttgattgagac

SEQ ID NO: 732845 - DNA, 2887 bp, Homo sapiens
agcccccacgccccgcccagctataaggggccatgcaccaagcagggtacccaggctgcagaggtgccatggctgagtcacacctgctgcagtggctgctgctgctgctgcccacgctctgtggcccaggcactgctgcctggaccacctcatccttggcctgtgcccagggccctgagttctggtgccaaagcctggagcaagcattgcagtgcagagccctagggcattgcctacaggaagtctggggacatgtgggagccgatgacctatgccaagagtgtgaggacatcgtccacatccttaacaagatggccaaggaggccattttccaggacacgatgaggaagttcctggagcaggagtgcaacgtcctccccttgaagctgctcatgccccagtgcaaccaagtgcttgacgactacttccccctggtcatcgactacttccagaaccagattgactcaaacggcatctgtatgcacctgggcctgtgcaaatcccggcagccagagccagagcaggagccagggatgtcagaccccctgcccaaacctctgcgggaccctctgccagaccctctgctggacaagctcgtcctccctgtgctgcccggggccctccaggcgaggcctgggcctcacacacaggatctctccgagcagcaattccccattcctctcccctattgctggctctgcagggctctgatcaagcggatccaagccatgattcccaagggtgcgctagctgtggcagtggcccaggtgtgccgcgtggtacctctggtggcgggcggcatctgccagtgcctggctgagcgctactccgtcatcctgctcgacacgctgctgggccgcatgctgccccagctggtctgccgcctcgtcctccggtgctccatggatgacagcgctggcccaagtgagcccactgccccctccttagcccaatgcctgctctcctcctccccctaccctgccactgcatgaccctctccctctgtggtcccactgcaatgcaccaaggaggacagaaaccaaacacctctgtagggtggccttgcctgctttccccctaatgctcacatctccagggtcgccgacaggagaatggctgccgcgagactctgagtgccacctctgcatgtccgtgaccacccaggccgggaacagcagcgagcaggccataccacaggcaatgctccaggcctgtgttggctcctggctggacagggaaaagtgcaagcaatttgtggagcagcacacgccccagctgctgaccctggtgcccaggggctgggatgcccacaccacctgccaggccctcggggtgtgtgggaccatgtccagccctctccagtgtatccacagccccgacctttgatgagaactcagctgtccaggcaggacatacacacagtccctctctggccctcatcctcctcagctgcaaaggaaaagccaagtgagacgggctctgggaccatggtgaccaggctcttcccctgctccctggccctcgccagctgccaggctgaaaagaagcctcagctcccacaccgccctcctcaccgcccttcctcggcagtcacttccactggtggaccacgggcccccagccctgtgtcggccttgtctgtctcagctcaaccacagtctgacaccagagcccacttccatcctctctggtgtgaggcacagcgagggcagcatctggaggagctctgcagcctccacacctaccacgacctcccagggctgggctcaggaaaaaccagccactgctttacaggacagggggttgaagctgagccccgcctcacacccacccccatgcactcaaagattggattttacagctacttgcaattcaaaattcagaagaataaaaaatgggaacatacagaactctaaaagatagacatcagaaattgttaagttaagctttttcaaaaaatcagcaattccccagcgtagtcaagggtggacactgcacgctctggcatgatgggatggcgaccgggcaagctttcttcctcgagatgctctgctgcttgagagctattgctttgttaagatataaaaaggggtttctttttgtctttctgtaaggtggacttccagcttttgattgaaagtcctagggtgattctatttctgctgtgatttatctgctgaaagctcagctggggttgtgcaagctagggacccattcctgtgtaatacaatgtctgcaccaatgctaataaagtcctattctcttttatgagaaagaaaaaagacaccgtcctttaaagtgctgcagtatggccagacgtggtggctcacacctgcaatcccagcaccttaggaggccgaggcaggaggatccttgaggtcaggagttcgagaccagcctcgccaacatggtgaaaccccatttctactaaaaatacaaaaaattagccaagtgtggtggcatatgcctgtaatcccaactactcagaaggccgaggcaggagaattacttgaacgcaggagaatcactgcagcccaggaggcagaggttgcagtgagccgagattgcaccactgcactccagcctgggtgacagagcaagactccatctcagtaaataaataaataaataaaaagcgctgcagtagctgtggcctcaccctgaagtcagcgggcccaggcctacctcactctctcccttggcagagaagcagacgtccatagctcctctccctcacaagcgctcccagcctgccctccagctgctgctctcccctcccagtctctactcactgggatgaggttaggtcatgaggacaccaaaaacctaaaaataaacaaaaagccaaacaagccttagcttttcttaaagactgaaatgcctggaa

SEQ ID NO: 732846 - DNA, 2277 bp, Homo sapiens
agcccccacgccccgcccagctataaggggccatgcaccaagcagggtacccaggctgcagaggtgccatggctgagtcacacctgctgcagtggctgctgctgctgctgcccacgctctgtggcccaggcactgctgcctggaccacctcatccttggcctgtgcccagggccctgagttctggtgccaaagcctggagcaagcattgcagtgcagagccctagggcattgcctacaggaagtctggggacatgtgggagccgatgacctatgccaagagtgtgaggacatcgtccacatccttaacaagatggccaaggaggccattttccaggacacgatgaggaagttcctggagcaggagtgcaacgtcctccccttgaagctgctcatgccccagtgcaaccaagtgcttgacgactacttccccctggtcatcgactacttccagaaccagattgactcaaacggcatctgtatgcacctgggcctgtgcaaatcccggcagccagagccagagcaggagccagggatgtcagaccccctgcccaaacctctgcgggaccctctgccagaccctctgctggacaagctcgtcctccctgtgctgcccggggccctccaggcgaggcctgggcctcacacacaggatctctccgagcagcaattccccattcctctcccctattgctggctctgcagggctctgatcaagcggatccaagccatgattcccaagggtgcgctagctgtggcagtggcccaggtgtgccgcgtggtacctctggtggcgggcggcatctgccagtgcctggctgagcgctactccgtcatcctgctcgacacgctgctgggccgcatgctgccccagctggtctgccgcctcgtcctccggtgctccatggatgacagcgctggcccaagtgagcccactgccccctccttagcccaatgcctgctctcctcctccccctaccctgccactgcatgaccctctccctctgtggtcccactgcaatgcaccaaggaggacagaaaccaaacacctctgtagggtggccttgcctgctttccccctaatgctcacatctccagggtcgccgacaggagaatggctgccgcgagactctgagtgccacctctgcatgtccgtgaccacccaggccgggaacagcagcgagcaggccataccacaggcaatgctccaggcctgtgttggctcctggctggacagggaaaagtgcaagcaatttgtggagcagcacacgccccagctgctgaccctggtgcccaggggctgggatgcccacaccacctgccaggccctcggggtgtgtgggaccatgtccagccctctccagtgtatccacagccccgacctttgatgagaactcagctgtccaggcaggacatacacacagtccctctctggccctcatcctcctcagctgcaaaggaaaagccaagtgagacgggctctgggaccatggtgaccaggctcttcccctgctccctggccctcgccagctgccaggctgaaaagaagcctcagctcccacaccgccctcctcaccgcccttcctcggcagtcacttccactggtggaccacgggcccccagccctgtgtcggccttgtctgtctcagctcaaccacagtctgacaccagagcccacttccatcctctctggtgtgaggcacagcgagggcagcatctggaggagctctgcagcctccacacctaccacgacctcccagggctgggctcaggaaaaaccagccactgctttacaggacagggggttgaagctgagccccgcctcacacccacccccatgcactcaaagattggattttacagctacttgcaattcaaaattcagaagaataaaaaatgggaacatacagaactctaaaagatagacatcagaaattgttaagttaagctttttcaaaaaatcagcaattccccagcgtagtcaagggtggacactgcacgctctggcatgatgggatggcgaccgggcaagctttcttcctcgagatgctctgctgcttgagagctattgctttgttaagatataaaaaggggtttctttttgtctttctgtaaggtggacttccagcttttgattgaaagtcctagggtgattctatttctgctgtgatttatctgctgaaagctcagctggggttgtgcaagctagggacccattcctgtgtaatacaatgtctgcaccaatgctaataaagtcctattctcttttatgagaaaga

SEQ ID NO: 732847 - DNA, 2112 bp, Homo sapiens
agcccccacgccccgcccagctataaggggccatgcaccaagcagggtacccaggctgcagaggtgccatggctgagtcacacctgctgcagtggctgctgctgctgctgcccacgctctgtggcccaggcactgctgcctggaccacctcatccttggcctgtgcccagggccctgagttctggtgccaaagcctggagcaagcattgcagtgcagagccctagggcattgcctacaggaagtctggggacatgtgggagccgatgacctatgccaagagtgtgaggacatcgtccacatccttaacaagatggccaaggaggccattttccaggacacgatgaggaagttcctggagcaggagtgcaacgtcctccccttgaagctgctcatgccccagtgcaaccaagtgcttgacgactacttccccctggtcatcgactacttccagaaccagattgactcaaacggcatctgtatgcacctgggcctgtgcaaatcccggcagccagagccagagcaggagccagggatgtcagaccccctgcccaaacctctgcgggaccctctgccagaccctctgctggacaagctcgtcctccctgtgctgcccggggccctccaggcgaggcctgggcctcacacacaggatctctccgagcagcaattccccattcctctcccctattgctggctctgcagggctctgatcaagcggatccaagccatgattcccaagggtgcgctagctgtggcagtggcccaggtgtgccgcgtggtacctctggtggcgggcggcatctgccagtgcctggctgagcgctactccgtcatcctgctcgacacgctgctgggccgcatgctgccccagctggtctgccgcctcgtcctccggtgctccatggatgacagcgctggcccaagtgagcccactgccccctccttagcccaatgcctgctctcctcctccccctaccctgccactgcatgaccctctccctctgtggtcccactgcaatgcaccaaggaggacagaaaccaaacacctctgtagggtggccttgcctgctttccccctaatgctcacatctccagggtcgccgacaggagaatggctgccgcgagactctgagtgccacctctgcatgtccgtgaccacccaggccgggaacagcagcgagcaggccataccacaggcaatgctccaggcctgtgttggctcctggctggacagggaaaagtgcaagcaatttgtggagcagcacacgccccagctgctgaccctggtgcccaggggctgggatgcccacaccacctgccaggccctcggggtgtgtgggaccatgtccagccctctccagtgtatccacagccccgacctttgatgagaactcagctgtccaggcaggacatacacacagtccctctctggccctcatcctcctcagctgcaaaggaaaagccaagtgagacgggctctgggaccatggtgaccaggctcttcccctgctccctggccctcgccagctgccaggctgaaaagaagcctcagctcccacaccgccctcctcaccgcccttcctcggcagtcacttccactggtggaccacgggcccccagccctgtgtcggccttgtctgtctcagctcaaccacagtctgacaccagagcccacttccatcctctctggtgtgaggcacagcgagggcagcatctggaggagctctgcagcctccacacctaccacgacctcccagggctgggctcaggaaaaaccagccactgctttacaggacagggggttgaagctgagccccgcctcacacccacccccatgcactcaaagattggattttacagctacttgcaattcaaaattcagaagaataaaaaatgggaacatacagaactctaaaagatagacatcagaaattgttaagttaagctttttcaaaaaatcagcaattccccagcgtagtcaagggtggacactgcacgctctggcatgatgggatggcgaccgggcaagctttcttcctcgagatgctctgctgcttgagagctattgctttgttaagatataaaaaggggtttctttttgtctttctgta

SEQ ID NO: 732848 - DNA, 2415 bp, Homo sapiens; identical to SEQ ID NO: 322997

SEQ ID NO: 732849 - DNA, 1485 bp, Homo sapiens
gtctctagagttccctgcagctctctgatgacaactctgctgtccagctgcaaaggaaaagccaagtgagacgggctctgggaccatggtgaccaggctcttcccctgctccctggccctcgccagctgccaggctgaaaagaagcctcagctcccacaccgccctcctcaccgcccttcctcggcagtcacttccactggtggaccacgggcccccagccctgtgtcggccttgtctgtctcagctcaaccacagtctgacaccagagcccacttccatcctctctggtgtgaggcacagcgagggcagcatctggaggagctctgcagcctccacacctaccacgacctcccagggctgggctcaggaaaaaccagccactgctttacaggacagggggttgaagctgagccccgcctcacacccacccccatgcactcaaagattggattttacagctacttgcaattcaaaattcagaagaataaaaaatgggaacatacagaactctaaaagatagacatcagaaattgttaagttaagctttttcaaaaaatcagcaattccccagcgtagtcaagggtggacactgcacgctctggcatgatgggatggcgaccgggcaagctttcttcctcgagatgctctgctgcttgagagctattgctttgttaagatataaaaaggggtttctttttgtctttctgtaaggtggacttccagcttttgattgaaagtcctagggtgattctatttctgctgtgatttatctgctgaaagctcagctggggttgtgcaagctagggacccattcctgtgtaatacaatgtctgcaccaatgctaataaagtcctattctcttttatgagaaagaaaaaagacaccgtcctttaaagtgctgcagtatggccagacgtggtggctcacacctgcaatcccagcaccttaggaggccgaggcaggaggatccttgaggtcaggagttcgagaccagcctcgccaacatggtgaaaccccatttctactaaaaatacaaaaaattagccaagtgtggtggcatatgcctgtaatcccaactactcagaaggccgaggcaggagaattacttgaacgcaggagaatcactgcagcccaggaggcagaggttgcagtgagccgagattgcaccactgcactccagcctgggtgacagagcaagactccatctcagtaaataaataaataaataaaaagcgctgcagtagctgtggcctcaccctgaagtcagcgggcccaggcctacctcactctctcccttggcagagaagcagacgtccatagctcctctccctcacaagcgctcccagcctgccctccagctgctgctctcccctcccagtctctactcactgggatgaggttaggtcatgaggacaccaaaaacctaaaaataaacaaaaagccaaacaagccttagcttttcttaaagactgaaatgcctggaa

SEQ ID NO: 732850 - DNA, 875 bp, Homo sapiens
gtctctagagttccctgcagctctctgatgacaactctgctgtccagctgcaaaggaaaagccaagtgagacgggctctgggaccatggtgaccaggctcttcccctgctccctggccctcgccagctgccaggctgaaaagaagcctcagctcccacaccgccctcctcaccgcccttcctcggcagtcacttccactggtggaccacgggcccccagccctgtgtcggccttgtctgtctcagctcaaccacagtctgacaccagagcccacttccatcctctctggtgtgaggcacagcgagggcagcatctggaggagctctgcagcctccacacctaccacgacctcccagggctgggctcaggaaaaaccagccactgctttacaggacagggggttgaagctgagccccgcctcacacccacccccatgcactcaaagattggattttacagctacttgcaattcaaaattcagaagaataaaaaatgggaacatacagaactctaaaagatagacatcagaaattgttaagttaagctttttcaaaaaatcagcaattccccagcgtagtcaagggtggacactgcacgctctggcatgatgggatggcgaccgggcaagctttcttcctcgagatgctctgctgcttgagagctattgctttgttaagatataaaaaggggtttctttttgtctttctgtaaggtggacttccagcttttgattgaaagtcctagggtgattctatttctgctgtgatttatctgctgaaagctcagctggggttgtgcaagctagggacccattcctgtgtaatacaatgtctgcaccaatgctaataaagtcctattctcttttatgagaaaga

SEQ ID NO: 732851 - DNA, 710 bp, Homo sapiens
gtctctagagttccctgcagctctctgatgacaactctgctgtccagctgcaaaggaaaagccaagtgagacgggctctgggaccatggtgaccaggctcttcccctgctccctggccctcgccagctgccaggctgaaaagaagcctcagctcccacaccgccctcctcaccgcccttcctcggcagtcacttccactggtggaccacgggcccccagccctgtgtcggccttgtctgtctcagctcaaccacagtctgacaccagagcccacttccatcctctctggtgtgaggcacagcgagggcagcatctggaggagctctgcagcctccacacctaccacgacctcccagggctgggctcaggaaaaaccagccactgctttacaggacagggggttgaagctgagccccgcctcacacccacccccatgcactcaaagattggattttacagctacttgcaattcaaaattcagaagaataaaaaatgggaacatacagaactctaaaagatagacatcagaaattgttaagttaagctttttcaaaaaatcagcaattccccagcgtagtcaagggtggacactgcacgctctggcatgatgggatggcgaccgggcaagctttcttcctcgagatgctctgctgcttgagagctattgctttgttaagatataaaaaggggtttctttttgtctttctgta

SEQ ID NO: 732852 - DNA, 3629 bp, Homo sapiens; identical to SEQ ID NO: 323006

SEQ ID NO: 732853 - DNA, 2699 bp, Homo sapiens
gacacatacccacacagtaccccagccagccagacacacacacacacacacacacacacacacacacagcacacacacagcaccccagctggccacacacacacacacacacaccctgtccacaaagggcctaggaaactacgtgcccttcagccatgcacccgaccatgggcccccaggttcaggtgcacacggtgggcctgtacgctcacacacccttacaccctcactctcacacacatgcttacacacttattcattctcacatatatgctcatgctcattcacacacaatcccggccacctgccctaaagtccccacacagccctatctttgccttttgtccccccacatagagttctaaaccacagcacccccactaggcctgcttcctcccattccagtggtccctgagcccttgggccggcctgaataggggtgggcttccctcccagaccctaacactcccaccctgtgctgtgccccaggactcaaacggcatctgtatgcacctgggcctgtgcaaatcccggcagccagagccagagcaggagccagggatgtcagaccccctgcccaaacctctgcgggaccctctgccagaccctctgctggacaagctcgtcctccctgtgctgcccggggccctccaggcgaggcctgggcctcacacacaggatctctccgagcagcaattccccattcctctcccctattgctggctctgcagggctctgatcaagcggatccaagccatgattcccaagggtgcgctagctgtggcagtggcccaggtgtgccgcgtggtacctctggtggcgggcggcatctgccagtgcctggctgagcgctactccgtcatcctgctcgacacgctgctgggccgcatgctgccccagctggtctgccgcctcgtcctccggtgctccatggatgacagcgctggcccaaggtcgccgacaggagaatggctgccgcgagactctgagtgccacctctgcatgtccgtgaccacccaggccgggaacagcagcgagcaggccataccacaggcaatgctccaggcctgtgttggctcctggctggacagggaaaagtgcaagcaatttgtggagcagcacacgccccagctgctgaccctggtgcccaggggctgggatgcccacaccacctgccaggccctcggggtgtgtgggaccatgtccagccctctccagtgtatccacagccccgacctttgatgagaactcagctgtccagctgcaaaggaaaagccaagtgagacgggctctgggaccatggtgaccaggctcttcccctgctccctggccctcgccagctgccaggctgaaaagaagcctcagctcccacaccgccctcctcaccgcccttcctcggcagtcacttccactggtggaccacgggcccccagccctgtgtcggccttgtctgtctcagctcaaccacagtctgacaccagagcccacttccatcctctctggtgtgaggcacagcgagggcagcatctggaggagctctgcagcctccacacctaccacgacctcccagggctgggctcaggaaaaaccagccactgctttacaggacagggggttgaagctgagccccgcctcacacccacccccatgcactcaaagattggattttacagctacttgcaattcaaaattcagaagaataaaaaatgggaacatacagaactctaaaagatagacatcagaaattgttaagttaagctttttcaaaaaatcagcaattccccagcgtagtcaagggtggacactgcacgctctggcatgatgggatggcgaccgggcaagctttcttcctcgagatgctctgctgcttgagagctattgctttgttaagatataaaaaggggtttctttttgtctttctgtaaggtggacttccagcttttgattgaaagtcctagggtgattctatttctgctgtgatttatctgctgaaagctcagctggggttgtgcaagctagggacccattcctgtgtaatacaatgtctgcaccaatgctaataaagtcctattctcttttatgagaaagaaaaaagacaccgtcctttaaagtgctgcagtatggccagacgtggtggctcacacctgcaatcccagcaccttaggaggccgaggcaggaggatccttgaggtcaggagttcgagaccagcctcgccaacatggtgaaaccccatttctactaaaaatacaaaaaattagccaagtgtggtggcatatgcctgtaatcccaactactcagaaggccgaggcaggagaattacttgaacgcaggagaatcactgcagcccaggaggcagaggttgcagtgagccgagattgcaccactgcactccagcctgggtgacagagcaagactccatctcagtaaataaataaataaataaaaagcgctgcagtagctgtggcctcaccctgaagtcagcgggcccaggcctacctcactctctcccttggcagagaagcagacgtccatagctcctctccctcacaagcgctcccagcctgccctccagctgctgctctcccctcccagtctctactcactgggatgaggttaggtcatgaggacaccaaaaacctaaaaataaacaaaaagccaaacaagccttagcttttcttaaagactgaaatgcctggaa

SEQ ID NO: 732854 - DNA, 2089 bp, Homo sapiens
gacacatacccacacagtaccccagccagccagacacacacacacacacacacacacacacacacacagcacacacacagcaccccagctggccacacacacacacacacacaccctgtccacaaagggcctaggaaactacgtgcccttcagccatgcacccgaccatgggcccccaggttcaggtgcacacggtgggcctgtacgctcacacacccttacaccctcactctcacacacatgcttacacacttattcattctcacatatatgctcatgctcattcacacacaatcccggccacctgccctaaagtccccacacagccctatctttgccttttgtccccccacatagagttctaaaccacagcacccccactaggcctgcttcctcccattccagtggtccctgagcccttgggccggcctgaataggggtgggcttccctcccagaccctaacactcccaccctgtgctgtgccccaggactcaaacggcatctgtatgcacctgggcctgtgcaaatcccggcagccagagccagagcaggagccagggatgtcagaccccctgcccaaacctctgcgggaccctctgccagaccctctgctggacaagctcgtcctccctgtgctgcccggggccctccaggcgaggcctgggcctcacacacaggatctctccgagcagcaattccccattcctctcccctattgctggctctgcagggctctgatcaagcggatccaagccatgattcccaagggtgcgctagctgtggcagtggcccaggtgtgccgcgtggtacctctggtggcgggcggcatctgccagtgcctggctgagcgctactccgtcatcctgctcgacacgctgctgggccgcatgctgccccagctggtctgccgcctcgtcctccggtgctccatggatgacagcgctggcccaaggtcgccgacaggagaatggctgccgcgagactctgagtgccacctctgcatgtccgtgaccacccaggccgggaacagcagcgagcaggccataccacaggcaatgctccaggcctgtgttggctcctggctggacagggaaaagtgcaagcaatttgtggagcagcacacgccccagctgctgaccctggtgcccaggggctgggatgcccacaccacctgccaggccctcggggtgtgtgggaccatgtccagccctctccagtgtatccacagccccgacctttgatgagaactcagctgtccagctgcaaaggaaaagccaagtgagacgggctctgggaccatggtgaccaggctcttcccctgctccctggccctcgccagctgccaggctgaaaagaagcctcagctcccacaccgccctcctcaccgcccttcctcggcagtcacttccactggtggaccacgggcccccagccctgtgtcggccttgtctgtctcagctcaaccacagtctgacaccagagcccacttccatcctctctggtgtgaggcacagcgagggcagcatctggaggagctctgcagcctccacacctaccacgacctcccagggctgggctcaggaaaaaccagccactgctttacaggacagggggttgaagctgagccccgcctcacacccacccccatgcactcaaagattggattttacagctacttgcaattcaaaattcagaagaataaaaaatgggaacatacagaactctaaaagatagacatcagaaattgttaagttaagctttttcaaaaaatcagcaattccccagcgtagtcaagggtggacactgcacgctctggcatgatgggatggcgaccgggcaagctttcttcctcgagatgctctgctgcttgagagctattgctttgttaagatataaaaaggggtttctttttgtctttctgtaaggtggacttccagcttttgattgaaagtcctagggtgattctatttctgctgtgatttatctgctgaaagctcagctggggttgtgcaagctagggacccattcctgtgtaatacaatgtctgcaccaatgctaataaagtcctattctcttttatgagaaaga

SEQ ID NO: 732855 - DNA, 1924 bp, Homo sapiens
gacacatacccacacagtaccccagccagccagacacacacacacacacacacacacacacacacacagcacacacacagcaccccagctggccacacacacacacacacacaccctgtccacaaagggcctaggaaactacgtgcccttcagccatgcacccgaccatgggcccccaggttcaggtgcacacggtgggcctgtacgctcacacacccttacaccctcactctcacacacatgcttacacacttattcattctcacatatatgctcatgctcattcacacacaatcccggccacctgccctaaagtccccacacagccctatctttgccttttgtccccccacatagagttctaaaccacagcacccccactaggcctgcttcctcccattccagtggtccctgagcccttgggccggcctgaataggggtgggcttccctcccagaccctaacactcccaccctgtgctgtgccccaggactcaaacggcatctgtatgcacctgggcctgtgcaaatcccggcagccagagccagagcaggagccagggatgtcagaccccctgcccaaacctctgcgggaccctctgccagaccctctgctggacaagctcgtcctccctgtgctgcccggggccctccaggcgaggcctgggcctcacacacaggatctctccgagcagcaattccccattcctctcccctattgctggctctgcagggctctgatcaagcggatccaagccatgattcccaagggtgcgctagctgtggcagtggcccaggtgtgccgcgtggtacctctggtggcgggcggcatctgccagtgcctggctgagcgctactccgtcatcctgctcgacacgctgctgggccgcatgctgccccagctggtctgccgcctcgtcctccggtgctccatggatgacagcgctggcccaaggtcgccgacaggagaatggctgccgcgagactctgagtgccacctctgcatgtccgtgaccacccaggccgggaacagcagcgagcaggccataccacaggcaatgctccaggcctgtgttggctcctggctggacagggaaaagtgcaagcaatttgtggagcagcacacgccccagctgctgaccctggtgcccaggggctgggatgcccacaccacctgccaggccctcggggtgtgtgggaccatgtccagccctctccagtgtatccacagccccgacctttgatgagaactcagctgtccagctgcaaaggaaaagccaagtgagacgggctctgggaccatggtgaccaggctcttcccctgctccctggccctcgccagctgccaggctgaaaagaagcctcagctcccacaccgccctcctcaccgcccttcctcggcagtcacttccactggtggaccacgggcccccagccctgtgtcggccttgtctgtctcagctcaaccacagtctgacaccagagcccacttccatcctctctggtgtgaggcacagcgagggcagcatctggaggagctctgcagcctccacacctaccacgacctcccagggctgggctcaggaaaaaccagccactgctttacaggacagggggttgaagctgagccccgcctcacacccacccccatgcactcaaagattggattttacagctacttgcaattcaaaattcagaagaataaaaaatgggaacatacagaactctaaaagatagacatcagaaattgttaagttaagctttttcaaaaaatcagcaattccccagcgtagtcaagggtggacactgcacgctctggcatgatgggatggcgaccgggcaagctttcttcctcgagatgctctgctgcttgagagctattgctttgttaagatataaaaaggggtttctttttgtctttctgta

SEQ ID NO: 732856 - DNA, 1871 bp, Homo sapiens
gacacatacccacacagtaccccagccagccagacacacacacacacacacacacacacacacacacagcacacacacagcaccccagctggccacacacacacacacacacaccctgtccacaaagggcctaggaaactacgtgcccttcagccatgcacccgaccatgggcccccaggttcaggtgcacacggtgggcctgtacgctcacacacccttacaccctcactctcacacacatgcttacacacttattcattctcacatatatgctcatgctcattcacacacaatcccggccacctgccctaaagtccccacacagccctatctttgccttttgtccccccacatagagttctaaaccacagcacccccactaggcctgcttcctcccattccagtggtccctgagcccttgggccggcctgaataggggtgggcttccctcccagaccctaacactcccaccctgtgctgtgccccaggactcaaacggcatctgtatgcacctgggcctgtgcaaatcccggcagccagagccagagcaggagccagggatgtcagaccccctgcccaaacctctgcgggaccctctgccagaccctctgctggacaagctcgtcctccctgtgctgcccggggccctccaggcgaggcctgggcctcacacacaggatctctccgagcagcaattccccattcctctcccctattgctggctctgcagggctctgatcaagcggatccaagccatgattcccaagggtgcgctagctgtggcagtggcccaggtgtgccgcgtggtacctctggtggcgggcggcatctgccagtgcctggctgagcgctactccgtcatcctgctcgacacgctgctgggccgcatgctgccccagctggtctgccgcctcgtcctccggtgctccatggatgacagcgctggcccaaggtcgccgacaggagaatggctgccgcgagactctgagtgccacctctgcatgtccgtgaccacccaggccgggaacagcagcgagcaggccataccacaggcaatgctccaggcctgtgttggctcctggctggacagggaaaagtgcaagcaatttgtggagcagcacacgccccagctgctgaccctggtgcccaggggctgggatgcccacaccacctgccaggccctcggggtgtgtgggaccatgtccagccctctccagtgtatccacagccccgacctttgatgagaactcagctgtccagaaaaagacaccgtcctttaaagtgctgcagtatggccagacgtggtggctcacacctgcaatcccagcaccttaggaggccgaggcaggaggatccttgaggtcaggagttcgagaccagcctcgccaacatggtgaaaccccatttctactaaaaatacaaaaaattagccaagtgtggtggcatatgcctgtaatcccaactactcagaaggccgaggcaggagaattacttgaacgcaggagaatcactgcagcccaggaggcagaggttgcagtgagccgagattgcaccactgcactccagcctgggtgacagagcaagactccatctcagtaaataaataaataaataaaaagcgctgcagtagctgtggcctcaccctgaagtcagcgggcccaggcctacctcactctctcccttggcagagaagcagacgtccatagctcctctccctcacaagcgctcccagcctgccctccagctgctgctctcccctcccagtctctactcactgggatgaggttaggtcatgaggacaccaaaaacctaaaaataaacaaaaagccaaacaagccttagcttttcttaaagactgaaatgcctggaa

SEQ ID NO: 732857 - DNA, 2801 bp, Homo sapiens
gacacatacccacacagtaccccagccagccagacacacacacacacacacacacacacacacacacagcacacacacagcaccccagctggccacacacacacacacacacaccctgtccacaaagggcctaggaaactacgtgcccttcagccatgcacccgaccatgggcccccaggttcaggtgcacacggtgggcctgtacgctcacacacccttacaccctcactctcacacacatgcttacacacttattcattctcacatatatgctcatgctcattcacacacaatcccggccacctgccctaaagtccccacacagccctatctttgccttttgtccccccacatagagttctaaaccacagcacccccactaggcctgcttcctcccattccagtggtccctgagcccttgggccggcctgaataggggtgggcttccctcccagaccctaacactcccaccctgtgctgtgccccaggactcaaacggcatctgtatgcacctgggcctgtgcaaatcccggcagccagagccagagcaggagccagggatgtcagaccccctgcccaaacctctgcgggaccctctgccagaccctctgctggacaagctcgtcctccctgtgctgcccggggccctccaggcgaggcctgggcctcacacacaggatctctccgagcagcaattccccattcctctcccctattgctggctctgcagggctctgatcaagcggatccaagccatgattcccaagggtgcgctagctgtggcagtggcccaggtgtgccgcgtggtacctctggtggcgggcggcatctgccagtgcctggctgagcgctactccgtcatcctgctcgacacgctgctgggccgcatgctgccccagctggtctgccgcctcgtcctccggtgctccatggatgacagcgctggcccaaggtcgccgacaggagaatggctgccgcgagactctgagtgccacctctgcatgtccgtgaccacccaggccgggaacagcagcgagcaggccataccacaggcaatgctccaggcctgtgttggctcctggctggacagggaaaagtgcaagcaatttgtggagcagcacacgccccagctgctgaccctggtgcccaggggctgggatgcccacaccacctgccaggccctcggggtgtgtgggaccatgtccagccctctccagtgtatccacagccccgacctttgatgagaactcagctgtccagaaaaagacaccgtcctttaaagtgctgcagtatggccagacgtggtggctcacacctgcaatcccagcaccttaggaggccgaggcaggaggatccttgaggtcaggagttcgagaccagcctcgccaacatggtgaaaccccatttctactaaaaatacaaaaaattagccaagtgtggtggcatatgcctgtaatcccaactactcagaaggccgaggcaggagaattacttgaacgcaggagaatcactgcagcccaggaggcagaggttgcagtgagccgagattgcaccactgcactccagcctgggtgacagagcaagactccatctcagtaaataaataaataaataaaaagcgctgcagtagctgtggcctcaccctgaagtcagcgggcccaggcctacctcactctctcccttggcagagaagcagacgtccatagctcctctccctcacaagcgctcccagcctgccctccagctgctgctctcccctcccagtctctactcactgggatgaggttaggtcatgaggacaccaaaaacctaaaaataaacaaaaagccaaacaagccttagcttttcttaaagactgaaatgcctggaagtgtccctttatttataaaataacttttgtcatatttcttatacatgtttcttgtaagaaattcagaaactacagacaaagagagtggaaattacccactgtcaggcctctgagcccaagctaagccatcatatcccctgtgccctgcacgtatacacccagatggcctgaagcaactgaagatccacaaaagaagtgaaaatagccagttcctgccttaactgatgacattccaccattgtgatttgttcctgccccaccctaactgatcaattgaccttgtgacaatacaccttccccacccttgagaaggtgctttgtaatattctccccacccaccccacgcccgcacccccgcacccttaagaaggtattttgtaatattctctccgccattgagaatgtgctttgtaagatccaccccctgcccacaaaaaattgctcctaactccaccgcctatcccaaacctacaagaactaatgataatcccaccaccctttgctgactctttttggactcagcccacctgcacccaggtgattaaaaagctttattgttcacacaaagcctgtttggtagtctcttcacagggaagcatgtgacacccacaatcccacctagcccaggagagagctacggcagggtgtgtgttttgacactgagcttggggctttttccatcttctccccacagcctctggctccacacctccaccgttcaagcgccagaaagagctgtctatgcagcctgctcttgggcctggggatgagacacacaattcattggctcctggattttaagtagacatttgtaaatctatagctaactactgtccttaaagccattgtttccattacaaaatccaactctctgagagaaaagggtgttttaaatttaaaaaaataaaaacaaaaaagtttgattgagac

SEQ ID NO: 732858 - DNA, 2272 bp, Homo sapiens
gacacatacccacacagtaccccagccagccagacacacacacacacacacacacacacacacacacagcacacacacagcaccccagctggccacacacacacacacacacaccctgtccacaaagggcctaggaaactacgtgcccttcagccatgcacccgaccatgggcccccaggttcaggtgcacacggtgggcctgtacgctcacacacccttacaccctcactctcacacacatgcttacacacttattcattctcacatatatgctcatgctcattcacacacaatcccggccacctgccctaaagtccccacacagccctatctttgccttttgtccccccacatagagttctaaaccacagcacccccactaggcctgcttcctcccattccagtggtccctgagcccttgggccggcctgaataggggtgggcttccctcccagaccctaacactcccaccctgtgctgtgccccaggactcaaacggcatctgtatgcacctgggcctgtgcaaatcccggcagccagagccagagcaggagccagggatgtcagaccccctgcccaaacctctgcgggaccctctgccagaccctctgctggacaagctcgtcctccctgtgctgcccggggccctccaggcgaggcctgggcctcacacacaggatctctccgagcagcaattccccattcctctcccctattgctggctctgcagggctctgatcaagcggatccaagccatgattcccaagggtgcgctagctgtggcagtggcccaggtgtgccgcgtggtacctctggtggcgggcggcatctgccagtgcctggctgagcgctactccgtcatcctgctcgacacgctgctgggccgcatgctgccccagctggtctgccgcctcgtcctccggtgctccatggatgacagcgctggcccaaggtcgccgacaggagaatggctgccgcgagactctgagtgccacctctgcatgtccgtgaccacccaggccgggaacagcagcgagcaggccataccacaggcaatgctccaggcctgtgttggctcctggctggacagggaaaagtgcaagcaatttgtggagcagcacacgccccagctgctgaccctggtgcccaggggctgggatgcccacaccacctgccaggccctcggggtgtgtgggaccatgtccagccctctccagtgtatccacagccccgacctttgatgagaactcagctgtccaggtgagtccaggcccccagttgcggggaggtaagggggcaggtcctgaccatcagggcatgggaggcccttctgctccccaagcaggaagaggcggccactcctgccggctgctccatcctccctctcaccgcacagctggaggctcctgagggcttctggctggccatcaggaaaacaccctttccggaccccgagcactgccccgcccagaaccccagtcactgagtgcccaacccccagcttcccccccaaccccccgccctgccctgtcccaggcctccctctcagagcttgccccagggactctctggccctcagggttcaatgtattctgaccaaggccaagctttcctggggctcagggaaaatcacactttgctacccgaagctgtatcccctcagatgccaggaaggccgtgatcatctgactccaccctcctgagacacattctctccctgactgtcctgttctaagtcagcggagcaccttaggatggaggggtggaggcgaggccagatgcagcctctgtgaacaggtgcctggaggctgggaaatgaccctgagagggcaggacacagcaaccgtgggcttaaggtgaccttgagagcaagcttggcccactttacaattctgttcagagccagcccctaacatggtggtcatttattcatttgttccctcattttaaaaaatgtaaggccaggcatggtggctcacgccggtaatcccagcactttgggaggccgaggcaggcagatcacctgaggtcaggagttcgagactagcctggccaacatggcgaaaccctgtctctactaaaaatattttttaaaaattagctgagcatggtggcaggtgcctgtaatcccagctactcaggacgcttaggcaggagaatcacttgaacctgggaggcgaaggttgcggtgtgccgagatcgtgccactgcactctagcctaggcaacagagcacaactctgtctcaggaaaaaaaaaaaaaaaaaaaagg

SEQ ID NO: 732859 - DNA, 3673 bp, Homo sapiens
gacacatacccacacagtaccccagccagccagacacacacacacacacacacacacacacacacacagcacacacacagcaccccagctggccacacacacacacacacacaccctgtccacaaagggcctaggaaactacgtgcccttcagccatgcacccgaccatgggcccccaggttcaggtgcacacggtgggcctgtacgctcacacacccttacaccctcactctcacacacatgcttacacacttattcattctcacatatatgctcatgctcattcacacacaatcccggccacctgccctaaagtccccacacagccctatctttgccttttgtccccccacatagagttctaaaccacagcacccccactaggcctgcttcctcccattccagtggtccctgagcccttgggccggcctgaataggggtgggcttccctcccagaccctaacactcccaccctgtgctgtgccccaggactcaaacggcatctgtatgcacctgggcctgtgcaaatcccggcagccagagccagagcaggagccagggatgtcagaccccctgcccaaacctctgcgggaccctctgccagaccctctgctggacaagctcgtcctccctgtgctgcccggggccctccaggcgaggcctgggcctcacacacaggatctctccgagcagcaattccccattcctctcccctattgctggctctgcagggctctgatcaagcggatccaagccatgattcccaagggtgcgctagctgtggcagtggcccaggtgtgccgcgtggtacctctggtggcgggcggcatctgccagtgcctggctgagcgctactccgtcatcctgctcgacacgctgctgggccgcatgctgccccagctggtctgccgcctcgtcctccggtgctccatggatgacagcgctggcccaaggtcgccgacaggagaatggctgccgcgagactctgagtgccacctctgcatgtccgtgaccacccaggccgggaacagcagcgagcaggccataccacaggcaatgctccaggcctgtgttggctcctggctggacagggaaaagtgcaagcaatttgtggagcagcacacgccccagctgctgaccctggtgcccaggggctgggatgcccacaccacctgccaggccctcggggtgtgtgggaccatgtccagccctctccagtgtatccacagccccgacctttgatgagaactcagctgtccaggcaggacatacacacagtccctctctggccctcatcctcctcagctgcaaaggaaaagccaagtgagacgggctctgggaccatggtgaccaggctcttcccctgctccctggccctcgccagctgccaggctgaaaagaagcctcagctcccacaccgccctcctcaccgcccttcctcggcagtcacttccactggtggaccacgggcccccagccctgtgtcggccttgtctgtctcagctcaaccacagtctgacaccagagcccacttccatcctctctggtgtgaggcacagcgagggcagcatctggaggagctctgcagcctccacacctaccacgacctcccagggctgggctcaggaaaaaccagccactgctttacaggacagggggttgaagctgagccccgcctcacacccacccccatgcactcaaagattggattttacagctacttgcaattcaaaattcagaagaataaaaaatgggaacatacagaactctaaaagatagacatcagaaattgttaagttaagctttttcaaaaaatcagcaattccccagcgtagtcaagggtggacactgcacgctctggcatgatgggatggcgaccgggcaagctttcttcctcgagatgctctgctgcttgagagctattgctttgttaagatataaaaaggggtttctttttgtctttctgtaaggtggacttccagcttttgattgaaagtcctagggtgattctatttctgctgtgatttatctgctgaaagctcagctggggttgtgcaagctagggacccattcctgtgtaatacaatgtctgcaccaatgctaataaagtcctattctcttttatgagaaagaaaaaagacaccgtcctttaaagtgctgcagtatggccagacgtggtggctcacacctgcaatcccagcaccttaggaggccgaggcaggaggatccttgaggtcaggagttcgagaccagcctcgccaacatggtgaaaccccatttctactaaaaatacaaaaaattagccaagtgtggtggcatatgcctgtaatcccaactactcagaaggccgaggcaggagaattacttgaacgcaggagaatcactgcagcccaggaggcagaggttgcagtgagccgagattgcaccactgcactccagcctgggtgacagagcaagactccatctcagtaaataaataaataaataaaaagcgctgcagtagctgtggcctcaccctgaagtcagcgggcccaggcctacctcactctctcccttggcagagaagcagacgtccatagctcctctccctcacaagcgctcccagcctgccctccagctgctgctctcccctcccagtctctactcactgggatgaggttaggtcatgaggacaccaaaaacctaaaaataaacaaaaagccaaacaagccttagcttttcttaaagactgaaatgcctggaagtgtccctttatttataaaataacttttgtcatatttcttatacatgtttcttgtaagaaattcagaaactacagacaaagagagtggaaattacccactgtcaggcctctgagcccaagctaagccatcatatcccctgtgccctgcacgtatacacccagatggcctgaagcaactgaagatccacaaaagaagtgaaaatagccagttcctgccttaactgatgacattccaccattgtgatttgttcctgccccaccctaactgatcaattgaccttgtgacaatacaccttccccacccttgagaaggtgctttgtaatattctccccacccaccccacgcccgcacccccgcacccttaagaaggtattttgtaatattctctccgccattgagaatgtgctttgtaagatccaccccctgcccacaaaaaattgctcctaactccaccgcctatcccaaacctacaagaactaatgataatcccaccaccctttgctgactctttttggactcagcccacctgcacccaggtgattaaaaagctttattgttcacacaaagcctgtttggtagtctcttcacagggaagcatgtgacacccacaatcccacctagcccaggagagagctacggcagggtgtgtgttttgacactgagcttggggctttttccatcttctccccacagcctctggctccacacctccaccgttcaagcgccagaaagagctgtctatgcagcctgctcttgggcctggggatgagacacacaattcattggctcctggattttaagtagacatttgtaaatctatagctaactactgtccttaaagccattgtttccattacaaaatccaactctctgagagaaaagggtgttttaaatttaaaaaaataaaaacaaaaaagtttgattgagac

SEQ ID NO: 732860 - DNA, 2743 bp, Homo sapiens
gacacatacccacacagtaccccagccagccagacacacacacacacacacacacacacacacacacagcacacacacagcaccccagctggccacacacacacacacacacaccctgtccacaaagggcctaggaaactacgtgcccttcagccatgcacccgaccatgggcccccaggttcaggtgcacacggtgggcctgtacgctcacacacccttacaccctcactctcacacacatgcttacacacttattcattctcacatatatgctcatgctcattcacacacaatcccggccacctgccctaaagtccccacacagccctatctttgccttttgtccccccacatagagttctaaaccacagcacccccactaggcctgcttcctcccattccagtggtccctgagcccttgggccggcctgaataggggtgggcttccctcccagaccctaacactcccaccctgtgctgtgccccaggactcaaacggcatctgtatgcacctgggcctgtgcaaatcccggcagccagagccagagcaggagccagggatgtcagaccccctgcccaaacctctgcgggaccctctgccagaccctctgctggacaagctcgtcctccctgtgctgcccggggccctccaggcgaggcctgggcctcacacacaggatctctccgagcagcaattccccattcctctcccctattgctggctctgcagggctctgatcaagcggatccaagccatgattcccaagggtgcgctagctgtggcagtggcccaggtgtgccgcgtggtacctctggtggcgggcggcatctgccagtgcctggctgagcgctactccgtcatcctgctcgacacgctgctgggccgcatgctgccccagctggtctgccgcctcgtcctccggtgctccatggatgacagcgctggcccaaggtcgccgacaggagaatggctgccgcgagactctgagtgccacctctgcatgtccgtgaccacccaggccgggaacagcagcgagcaggccataccacaggcaatgctccaggcctgtgttggctcctggctggacagggaaaagtgcaagcaatttgtggagcagcacacgccccagctgctgaccctggtgcccaggggctgggatgcccacaccacctgccaggccctcggggtgtgtgggaccatgtccagccctctccagtgtatccacagccccgacctttgatgagaactcagctgtccaggcaggacatacacacagtccctctctggccctcatcctcctcagctgcaaaggaaaagccaagtgagacgggctctgggaccatggtgaccaggctcttcccctgctccctggccctcgccagctgccaggctgaaaagaagcctcagctcccacaccgccctcctcaccgcccttcctcggcagtcacttccactggtggaccacgggcccccagccctgtgtcggccttgtctgtctcagctcaaccacagtctgacaccagagcccacttccatcctctctggtgtgaggcacagcgagggcagcatctggaggagctctgcagcctccacacctaccacgacctcccagggctgggctcaggaaaaaccagccactgctttacaggacagggggttgaagctgagccccgcctcacacccacccccatgcactcaaagattggattttacagctacttgcaattcaaaattcagaagaataaaaaatgggaacatacagaactctaaaagatagacatcagaaattgttaagttaagctttttcaaaaaatcagcaattccccagcgtagtcaagggtggacactgcacgctctggcatgatgggatggcgaccgggcaagctttcttcctcgagatgctctgctgcttgagagctattgctttgttaagatataaaaaggggtttctttttgtctttctgtaaggtggacttccagcttttgattgaaagtcctagggtgattctatttctgctgtgatttatctgctgaaagctcagctggggttgtgcaagctagggacccattcctgtgtaatacaatgtctgcaccaatgctaataaagtcctattctcttttatgagaaagaaaaaagacaccgtcctttaaagtgctgcagtatggccagacgtggtggctcacacctgcaatcccagcaccttaggaggccgaggcaggaggatccttgaggtcaggagttcgagaccagcctcgccaacatggtgaaaccccatttctactaaaaatacaaaaaattagccaagtgtggtggcatatgcctgtaatcccaactactcagaaggccgaggcaggagaattacttgaacgcaggagaatcactgcagcccaggaggcagaggttgcagtgagccgagattgcaccactgcactccagcctgggtgacagagcaagactccatctcagtaaataaataaataaataaaaagcgctgcagtagctgtggcctcaccctgaagtcagcgggcccaggcctacctcactctctcccttggcagagaagcagacgtccatagctcctctccctcacaagcgctcccagcctgccctccagctgctgctctcccctcccagtctctactcactgggatgaggttaggtcatgaggacaccaaaaacctaaaaataaacaaaaagccaaacaagccttagcttttcttaaagactgaaatgcctggaa

SEQ ID NO: 732861 - DNA, 2133 bp, Homo sapiens
gacacatacccacacagtaccccagccagccagacacacacacacacacacacacacacacacacacagcacacacacagcaccccagctggccacacacacacacacacacaccctgtccacaaagggcctaggaaactacgtgcccttcagccatgcacccgaccatgggcccccaggttcaggtgcacacggtgggcctgtacgctcacacacccttacaccctcactctcacacacatgcttacacacttattcattctcacatatatgctcatgctcattcacacacaatcccggccacctgccctaaagtccccacacagccctatctttgccttttgtccccccacatagagttctaaaccacagcacccccactaggcctgcttcctcccattccagtggtccctgagcccttgggccggcctgaataggggtgggcttccctcccagaccctaacactcccaccctgtgctgtgccccaggactcaaacggcatctgtatgcacctgggcctgtgcaaatcccggcagccagagccagagcaggagccagggatgtcagaccccctgcccaaacctctgcgggaccctctgccagaccctctgctggacaagctcgtcctccctgtgctgcccggggccctccaggcgaggcctgggcctcacacacaggatctctccgagcagcaattccccattcctctcccctattgctggctctgcagggctctgatcaagcggatccaagccatgattcccaagggtgcgctagctgtggcagtggcccaggtgtgccgcgtggtacctctggtggcgggcggcatctgccagtgcctggctgagcgctactccgtcatcctgctcgacacgctgctgggccgcatgctgccccagctggtctgccgcctcgtcctccggtgctccatggatgacagcgctggcccaaggtcgccgacaggagaatggctgccgcgagactctgagtgccacctctgcatgtccgtgaccacccaggccgggaacagcagcgagcaggccataccacaggcaatgctccaggcctgtgttggctcctggctggacagggaaaagtgcaagcaatttgtggagcagcacacgccccagctgctgaccctggtgcccaggggctgggatgcccacaccacctgccaggccctcggggtgtgtgggaccatgtccagccctctccagtgtatccacagccccgacctttgatgagaactcagctgtccaggcaggacatacacacagtccctctctggccctcatcctcctcagctgcaaaggaaaagccaagtgagacgggctctgggaccatggtgaccaggctcttcccctgctccctggccctcgccagctgccaggctgaaaagaagcctcagctcccacaccgccctcctcaccgcccttcctcggcagtcacttccactggtggaccacgggcccccagccctgtgtcggccttgtctgtctcagctcaaccacagtctgacaccagagcccacttccatcctctctggtgtgaggcacagcgagggcagcatctggaggagctctgcagcctccacacctaccacgacctcccagggctgggctcaggaaaaaccagccactgctttacaggacagggggttgaagctgagccccgcctcacacccacccccatgcactcaaagattggattttacagctacttgcaattcaaaattcagaagaataaaaaatgggaacatacagaactctaaaagatagacatcagaaattgttaagttaagctttttcaaaaaatcagcaattccccagcgtagtcaagggtggacactgcacgctctggcatgatgggatggcgaccgggcaagctttcttcctcgagatgctctgctgcttgagagctattgctttgttaagatataaaaaggggtttctttttgtctttctgtaaggtggacttccagcttttgattgaaagtcctagggtgattctatttctgctgtgatttatctgctgaaagctcagctggggttgtgcaagctagggacccattcctgtgtaatacaatgtctgcaccaatgctaataaagtcctattctcttttatgagaaaga

SEQ ID NO: 732862 - DNA, 1968 bp, Homo sapiens
gacacatacccacacagtaccccagccagccagacacacacacacacacacacacacacacacacacagcacacacacagcaccccagctggccacacacacacacacacacaccctgtccacaaagggcctaggaaactacgtgcccttcagccatgcacccgaccatgggcccccaggttcaggtgcacacggtgggcctgtacgctcacacacccttacaccctcactctcacacacatgcttacacacttattcattctcacatatatgctcatgctcattcacacacaatcccggccacctgccctaaagtccccacacagccctatctttgccttttgtccccccacatagagttctaaaccacagcacccccactaggcctgcttcctcccattccagtggtccctgagcccttgggccggcctgaataggggtgggcttccctcccagaccctaacactcccaccctgtgctgtgccccaggactcaaacggcatctgtatgcacctgggcctgtgcaaatcccggcagccagagccagagcaggagccagggatgtcagaccccctgcccaaacctctgcgggaccctctgccagaccctctgctggacaagctcgtcctccctgtgctgcccggggccctccaggcgaggcctgggcctcacacacaggatctctccgagcagcaattccccattcctctcccctattgctggctctgcagggctctgatcaagcggatccaagccatgattcccaagggtgcgctagctgtggcagtggcccaggtgtgccgcgtggtacctctggtggcgggcggcatctgccagtgcctggctgagcgctactccgtcatcctgctcgacacgctgctgggccgcatgctgccccagctggtctgccgcctcgtcctccggtgctccatggatgacagcgctggcccaaggtcgccgacaggagaatggctgccgcgagactctgagtgccacctctgcatgtccgtgaccacccaggccgggaacagcagcgagcaggccataccacaggcaatgctccaggcctgtgttggctcctggctggacagggaaaagtgcaagcaatttgtggagcagcacacgccccagctgctgaccctggtgcccaggggctgggatgcccacaccacctgccaggccctcggggtgtgtgggaccatgtccagccctctccagtgtatccacagccccgacctttgatgagaactcagctgtccaggcaggacatacacacagtccctctctggccctcatcctcctcagctgcaaaggaaaagccaagtgagacgggctctgggaccatggtgaccaggctcttcccctgctccctggccctcgccagctgccaggctgaaaagaagcctcagctcccacaccgccctcctcaccgcccttcctcggcagtcacttccactggtggaccacgggcccccagccctgtgtcggccttgtctgtctcagctcaaccacagtctgacaccagagcccacttccatcctctctggtgtgaggcacagcgagggcagcatctggaggagctctgcagcctccacacctaccacgacctcccagggctgggctcaggaaaaaccagccactgctttacaggacagggggttgaagctgagccccgcctcacacccacccccatgcactcaaagattggattttacagctacttgcaattcaaaattcagaagaataaaaaatgggaacatacagaactctaaaagatagacatcagaaattgttaagttaagctttttcaaaaaatcagcaattccccagcgtagtcaagggtggacactgcacgctctggcatgatgggatggcgaccgggcaagctttcttcctcgagatgctctgctgcttgagagctattgctttgttaagatataaaaaggggtttctttttgtctttctgta

SEQ ID NO: 732863 - DNA, 416 bp, Homo sapiens
acctgcagtggctattgtccaatggccccgccagcccagggctaccttgcccaaattggggcccaaatgaggaaaggccctgccccctcagcctttcccagatagggttgcgtgggccaccaggggcacaaggcagcaggtgaggttcctgctgaggcaggtggttcacttgagcccaggagttcaagaccagctggccaacatggcgaaaccctgtctctactaaaaatattttttaaaaattagctgagcatggtggcaggtgcctgtaatcccagctactcaggacgcttaggcaggagaatcacttgaacctgggaggcgaaggttgcggtgtgccgagatcgtgccactgcactctagcctaggcaacagagcacaactctgtctcaggaaaaaaaaaaaaaaaaaaaagg

SEQ ID NO: 732864 - DNA, 2120 bp, Homo sapiens
tcttctgactaatgcaaaccatgtgtccatagaaccagaagatttttccaggggaaaagagcccccacgccccgcccagctataaggggccatgcaccaagcagggtacccaggctgcagaggtgccatggctgagtcacacctgctgcagtggctgctgctgctgctgcccacgctctgtggcccaggcactgctgcctggaccacctcatccttggcctgtgcccagggccctgagttctggtgccaaagcctggagcaagcattgcagtgcagagccctagggcattgcctacaggaagtctggggacatgtgggagccgatgacctatgccaagagtgtgaggacatcgtccacatccttaacaagatggccaaggaggccattttccaggacacgatgaggaagttcctggagcaggagtgcaacgtcctccccttgaagctgctcatgccccagtgcaaccaagtgcttgacgactacttccccctggtcatcgactacttccagaaccagattgactcaaacggcatctgtatgcacctgggcctgtgcaaatcccggcagccagagccagagcaggagccagggatgtcagaccccctgcccaaacctctgcgggaccctctgccagaccctctgctggacaagctcgtcctccctgtgctgcccggggccctccaggcgaggcctgggcctcacacacaggatctctccgagcagcaattccccattcctctcccctattgctggctctgcagggctctgatcaagcggatccaagccatgattcccaagggtgcgctagctgtggcagtggcccaggtgtgccgcgtggtacctctggtggcgggcggcatctgccagtgcctggctgagcgctactccgtcatcctgctcgacacgctgctgggccgcatgctgccccagctggtctgccgcctcgtcctccggtgctccatggatgacagcgctggcccaaggtcgccgacaggagaatggctgccgcgagactctgagtgccacctctgcatgtccgtgaccacccaggccgggaacagcagcgagcaggccataccacaggcaatgctccaggcctgtgttggctcctggctggacagggaaaagtgcaagcaatttgtggagcagcacacgccccagctgctgaccctggtgcccaggggctgggatgcccacaccacctgccaggccctcggggtgtgtgggaccatgtccagccctctccagtgtatccacagccccgacctttgatgagaactcagctgtccagctgcaaaggaaaagccaagtgagacgggctctgggaccatggtgaccaggctcttcccctgctccctggccctcgccagctgccaggctgaaaagaagcctcagctcccacaccgccctcctcaccgcccttcctcggcagtcacttccactggtggaccacgggcccccagccctgtgtcggccttgtctgtctcagctcaaccacagtctgacaccagagcccacttccatcctctctggtgtgaggcacagcgagggcagcatctggaggagctctgcagcctccacacctaccacgacctcccagggctgggctcaggaaaaaccagccactgctttacaggacagggggttgaagctgagccccgcctcacacccacccccatgcactcaaagattggattttacagctacttgcaattcaaaattcagaagaataaaaaatgggaacatacagaactctaaaagatagacatcagaaattgttaagttaagctttttcaaaaaatcagcaattccccagcgtagtcaagggtggacactgcacgctctggcatgatgggatggcgaccgggcaagctttcttcctcgagatgctctgctgcttgagagctattgctttgttaagatataaaaaggggtttctttttgtctttctgtaaggtggacttccagcttttgattgaaagtcctagggtgattctatttctgctgtgatttatctgctgaaagctcagctggggttgtgcaagctagggacccattcctgtgtaatacaatgtctgcaccaatgctaataaagtcctattctcttttatgagaaaga

SEQ ID NO: 732865 - DNA, 3660 bp, Homo sapiens
tcttctgactaatgcaaaccatgtgtccatagaaccagaagatttttccaggggaaaagagcccccacgccccgcccagctataaggggccatgcaccaagcagggtacccaggctgcagaggtgccatggctgagtcacacctgctgcagtggctgctgctgctgctgcccacgctctgtggcccaggcactgctgcctggaccacctcatccttggcctgtgcccagggccctgagttctggtgccaaagcctggagcaagcattgcagtgcagagccctagggcattgcctacaggaagtctggggacatgtgggagccgatgacctatgccaagagtgtgaggacatcgtccacatccttaacaagatggccaaggaggccattttccaggacacgatgaggaagttcctggagcaggagtgcaacgtcctccccttgaagctgctcatgccccagtgcaaccaagtgcttgacgactacttccccctggtcatcgactacttccagaaccagattgactcaaacggcatctgtatgcacctgggcctgtgcaaatcccggcagccagagccagagcaggagccagggatgtcagaccccctgcccaaacctctgcgggaccctctgccagaccctctgctggacaagctcgtcctccctgtgctgcccggggccctccaggcgaggcctgggcctcacacacaggatctctccgagcagcaattccccattcctctcccctattgctggctctgcagggctctgatcaagcggatccaagccatgattcccaagggtgcgctagctgtggcagtggcccaggtgtgccgcgtggtacctctggtggcgggcggcatctgccagtgcctggctgagcgctactccgtcatcctgctcgacacgctgctgggccgcatgctgccccagctggtctgccgcctcgtcctccggtgctccatggatgacagcgctggcccaaggtcgccgacaggagaatggctgccgcgagactctgagtgccacctctgcatgtccgtgaccacccaggccgggaacagcagcgagcaggccataccacaggcaatgctccaggcctgtgttggctcctggctggacagggaaaagtgcaagcaatttgtggagcagcacacgccccagctgctgaccctggtgcccaggggctgggatgcccacaccacctgccaggccctcggggtgtgtgggaccatgtccagccctctccagtgtatccacagccccgacctttgatgagaactcagctgtccagctgcaaaggaaaagccaagtgagacgggctctgggaccatggtgaccaggctcttcccctgctccctggccctcgccagctgccaggctgaaaagaagcctcagctcccacaccgccctcctcaccgcccttcctcggcagtcacttccactggtggaccacgggcccccagccctgtgtcggccttgtctgtctcagctcaaccacagtctgacaccagagcccacttccatcctctctggtgtgaggcacagcgagggcagcatctggaggagctctgcagcctccacacctaccacgacctcccagggctgggctcaggaaaaaccagccactgctttacaggacagggggttgaagctgagccccgcctcacacccacccccatgcactcaaagattggattttacagctacttgcaattcaaaattcagaagaataaaaaatgggaacatacagaactctaaaagatagacatcagaaattgttaagttaagctttttcaaaaaatcagcaattccccagcgtagtcaagggtggacactgcacgctctggcatgatgggatggcgaccgggcaagctttcttcctcgagatgctctgctgcttgagagctattgctttgttaagatataaaaaggggtttctttttgtctttctgtaaggtggacttccagcttttgattgaaagtcctagggtgattctatttctgctgtgatttatctgctgaaagctcagctggggttgtgcaagctagggacccattcctgtgtaatacaatgtctgcaccaatgctaataaagtcctattctcttttatgagaaagaaaaaagacaccgtcctttaaagtgctgcagtatggccagacgtggtggctcacacctgcaatcccagcaccttaggaggccgaggcaggaggatccttgaggtcaggagttcgagaccagcctcgccaacatggtgaaaccccatttctactaaaaatacaaaaaattagccaagtgtggtggcatatgcctgtaatcccaactactcagaaggccgaggcaggagaattacttgaacgcaggagaatcactgcagcccaggaggcagaggttgcagtgagccgagattgcaccactgcactccagcctgggtgacagagcaagactccatctcagtaaataaataaataaataaaaagcgctgcagtagctgtggcctcaccctgaagtcagcgggcccaggcctacctcactctctcccttggcagagaagcagacgtccatagctcctctccctcacaagcgctcccagcctgccctccagctgctgctctcccctcccagtctctactcactgggatgaggttaggtcatgaggacaccaaaaacctaaaaataaacaaaaagccaaacaagccttagcttttcttaaagactgaaatgcctggaagtgtccctttatttataaaataacttttgtcatatttcttatacatgtttcttgtaagaaattcagaaactacagacaaagagagtggaaattacccactgtcaggcctctgagcccaagctaagccatcatatcccctgtgccctgcacgtatacacccagatggcctgaagcaactgaagatccacaaaagaagtgaaaatagccagttcctgccttaactgatgacattccaccattgtgatttgttcctgccccaccctaactgatcaattgaccttgtgacaatacaccttccccacccttgagaaggtgctttgtaatattctccccacccaccccacgcccgcacccccgcacccttaagaaggtattttgtaatattctctccgccattgagaatgtgctttgtaagatccaccccctgcccacaaaaaattgctcctaactccaccgcctatcccaaacctacaagaactaatgataatcccaccaccctttgctgactctttttggactcagcccacctgcacccaggtgattaaaaagctttattgttcacacaaagcctgtttggtagtctcttcacagggaagcatgtgacacccacaatcccacctagcccaggagagagctacggcagggtgtgtgttttgacactgagcttggggctttttccatcttctccccacagcctctggctccacacctccaccgttcaagcgccagaaagagctgtctatgcagcctgctcttgggcctggggatgagacacacaattcattggctcctggattttaagtagacatttgtaaatctatagctaactactgtccttaaagccattgtttccattacaaaatccaactctctgagagaaaagggtgttttaaatttaaaaaaataaaaacaaaaaagtttgattgagac

SEQ ID NO: 732866 - DNA, 2931 bp, Homo sapiens
tcttctgactaatgcaaaccatgtgtccatagaaccagaagatttttccaggggaaaagagcccccacgccccgcccagctataaggggccatgcaccaagcagggtacccaggctgcagaggtgccatggctgagtcacacctgctgcagtggctgctgctgctgctgcccacgctctgtggcccaggcactgctgcctggaccacctcatccttggcctgtgcccagggccctgagttctggtgccaaagcctggagcaagcattgcagtgcagagccctagggcattgcctacaggaagtctggggacatgtgggagccgatgacctatgccaagagtgtgaggacatcgtccacatccttaacaagatggccaaggaggccattttccaggacacgatgaggaagttcctggagcaggagtgcaacgtcctccccttgaagctgctcatgccccagtgcaaccaagtgcttgacgactacttccccctggtcatcgactacttccagaaccagattgactcaaacggcatctgtatgcacctgggcctgtgcaaatcccggcagccagagccagagcaggagccagggatgtcagaccccctgcccaaacctctgcgggaccctctgccagaccctctgctggacaagctcgtcctccctgtgctgcccggggccctccaggcgaggcctgggcctcacacacaggatctctccgagcagcaattccccattcctctcccctattgctggctctgcagggctctgatcaagcggatccaagccatgattcccaagggtgcgctagctgtggcagtggcccaggtgtgccgcgtggtacctctggtggcgggcggcatctgccagtgcctggctgagcgctactccgtcatcctgctcgacacgctgctgggccgcatgctgccccagctggtctgccgcctcgtcctccggtgctccatggatgacagcgctggcccaaggtcgccgacaggagaatggctgccgcgagactctgagtgccacctctgcatgtccgtgaccacccaggccgggaacagcagcgagcaggccataccacaggcaatgctccaggcctgtgttggctcctggctggacagggaaaagtgcaagcaatttgtggagcagcacacgccccagctgctgaccctggtgcccaggggctgggatgcccacaccacctgccaggccctcggggtgtgtgggaccatgtccagccctctccagtgtatccacagccccgacctttgatgagaactcagctgtccagctgcaaaggaaaagccaagtgagacgggctctgggaccatggtgaccaggctcttcccctgctccctggccctcgccagctgccaggctgaaaagaagcctcagctcccacaccgccctcctcaccgcccttcctcggcagtcacttccactggtggaccacgggcccccagccctgtgtcggccttgtctgtctcagctcaaccacagtctgacaccagagcccacttccatcctctctggtgtgaggcacagcgagggcagcatctggaggagctctgcagcctccacacctaccacgacctcccagggctgggctcaggaaaaaccagccactgctttacaggacagggggttgaagctgagccccgcctcacacccacccccatgcactcaaagattggattttacagctacttgcaattcaaaattcagaagaataaaaaatgggaacatacagaactctaaaagatagacatcagaaattgttaagttaagctttttcaaaaaatcagcaattccccagcgtagtcaagggtggacactgcacgctctggcatgatgggatggcgaccgggcaagctttcttcctcgagatgctctgctgcttgagagctattgctttgttaagatataaaaaggggtttctttttgtctttctgtaaggtggacttccagcttttgattgaaagtcctagggtgattctatttctgctgtgatttatctgctgaaagctcagctggggttgtgcaagctagggacccattcctgtgtaatacaatgtctgcaccaatgctaataaagtcctattctcttttatgagaaagaaaaaagacaccgtcctttaaagtgctgcagtatggccagacgtggtggctcacacctgcaatcccagcaccttaggaggccgaggcaggaggatccttgaggtcaggagttcgagaccagcctcgccaacatggtgaaaccccatttctactaaaaatacaaaaaattagccaagtgtggtggcatatgcctgtaatcccaactactcagaaggccgaggcaggagaattacttgaacgcaggagaatcactgcagcccaggaggcagaggttgcagtgagccgagattgcaccactgcactccagcctgggtgacagagcaagactccatctcagtaaataaataaataaataaaaagcgctgcagtagctgtggcctcaccctgaagtcagcgggcccaggcctacctcactctctcccttggcagagaagcagacgtccatagctcctctccctcacaagcgctcccagcctgccctccagctgctgctctcccctcccagtctctactcactgggatgaggttaggtcatgaggacaccaaaaacctaaaaataaacaaaaagccaaacaagccttagcttttcttaaagactgaaatgcctggaagagttccagaccagcctaacatggtgaaaccacatatctactaaaaaaaatacaaaattagctggatgtggtagtgcatgcctgttatcccagctacttggaaggctgagacaggagaattgcttgaacccaggaggcagaggctgcagtgagccaggattgcgccactgcactccagcctgggcaacaagagcaaaactc

SEQ ID NO: 732867 - DNA, 2730 bp, Homo sapiens
tcttctgactaatgcaaaccatgtgtccatagaaccagaagatttttccaggggaaaagagcccccacgccccgcccagctataaggggccatgcaccaagcagggtacccaggctgcagaggtgccatggctgagtcacacctgctgcagtggctgctgctgctgctgcccacgctctgtggcccaggcactgctgcctggaccacctcatccttggcctgtgcccagggccctgagttctggtgccaaagcctggagcaagcattgcagtgcagagccctagggcattgcctacaggaagtctggggacatgtgggagccgatgacctatgccaagagtgtgaggacatcgtccacatccttaacaagatggccaaggaggccattttccaggacacgatgaggaagttcctggagcaggagtgcaacgtcctccccttgaagctgctcatgccccagtgcaaccaagtgcttgacgactacttccccctggtcatcgactacttccagaaccagattgactcaaacggcatctgtatgcacctgggcctgtgcaaatcccggcagccagagccagagcaggagccagggatgtcagaccccctgcccaaacctctgcgggaccctctgccagaccctctgctggacaagctcgtcctccctgtgctgcccggggccctccaggcgaggcctgggcctcacacacaggatctctccgagcagcaattccccattcctctcccctattgctggctctgcagggctctgatcaagcggatccaagccatgattcccaagggtgcgctagctgtggcagtggcccaggtgtgccgcgtggtacctctggtggcgggcggcatctgccagtgcctggctgagcgctactccgtcatcctgctcgacacgctgctgggccgcatgctgccccagctggtctgccgcctcgtcctccggtgctccatggatgacagcgctggcccaaggtcgccgacaggagaatggctgccgcgagactctgagtgccacctctgcatgtccgtgaccacccaggccgggaacagcagcgagcaggccataccacaggcaatgctccaggcctgtgttggctcctggctggacagggaaaagtgcaagcaatttgtggagcagcacacgccccagctgctgaccctggtgcccaggggctgggatgcccacaccacctgccaggccctcggggtgtgtgggaccatgtccagccctctccagtgtatccacagccccgacctttgatgagaactcagctgtccagctgcaaaggaaaagccaagtgagacgggctctgggaccatggtgaccaggctcttcccctgctccctggccctcgccagctgccaggctgaaaagaagcctcagctcccacaccgccctcctcaccgcccttcctcggcagtcacttccactggtggaccacgggcccccagccctgtgtcggccttgtctgtctcagctcaaccacagtctgacaccagagcccacttccatcctctctggtgtgaggcacagcgagggcagcatctggaggagctctgcagcctccacacctaccacgacctcccagggctgggctcaggaaaaaccagccactgctttacaggacagggggttgaagctgagccccgcctcacacccacccccatgcactcaaagattggattttacagctacttgcaattcaaaattcagaagaataaaaaatgggaacatacagaactctaaaagatagacatcagaaattgttaagttaagctttttcaaaaaatcagcaattccccagcgtagtcaagggtggacactgcacgctctggcatgatgggatggcgaccgggcaagctttcttcctcgagatgctctgctgcttgagagctattgctttgttaagatataaaaaggggtttctttttgtctttctgtaaggtggacttccagcttttgattgaaagtcctagggtgattctatttctgctgtgatttatctgctgaaagctcagctggggttgtgcaagctagggacccattcctgtgtaatacaatgtctgcaccaatgctaataaagtcctattctcttttatgagaaagaaaaaagacaccgtcctttaaagtgctgcagtatggccagacgtggtggctcacacctgcaatcccagcaccttaggaggccgaggcaggaggatccttgaggtcaggagttcgagaccagcctcgccaacatggtgaaaccccatttctactaaaaatacaaaaaattagccaagtgtggtggcatatgcctgtaatcccaactactcagaaggccgaggcaggagaattacttgaacgcaggagaatcactgcagcccaggaggcagaggttgcagtgagccgagattgcaccactgcactccagcctgggtgacagagcaagactccatctcagtaaataaataaataaataaaaagcgctgcagtagctgtggcctcaccctgaagtcagcgggcccaggcctacctcactctctcccttggcagagaagcagacgtccatagctcctctccctcacaagcgctcccagcctgccctccagctgctgctctcccctcccagtctctactcactgggatgaggttaggtcatgaggacaccaaaaacctaaaaataaacaaaaagccaaacaagccttagcttttcttaaagactgaaatgcctggaa

SEQ ID NO: 732868 - DNA, 1955 bp, Homo sapiens
tcttctgactaatgcaaaccatgtgtccatagaaccagaagatttttccaggggaaaagagcccccacgccccgcccagctataaggggccatgcaccaagcagggtacccaggctgcagaggtgccatggctgagtcacacctgctgcagtggctgctgctgctgctgcccacgctctgtggcccaggcactgctgcctggaccacctcatccttggcctgtgcccagggccctgagttctggtgccaaagcctggagcaagcattgcagtgcagagccctagggcattgcctacaggaagtctggggacatgtgggagccgatgacctatgccaagagtgtgaggacatcgtccacatccttaacaagatggccaaggaggccattttccaggacacgatgaggaagttcctggagcaggagtgcaacgtcctccccttgaagctgctcatgccccagtgcaaccaagtgcttgacgactacttccccctggtcatcgactacttccagaaccagattgactcaaacggcatctgtatgcacctgggcctgtgcaaatcccggcagccagagccagagcaggagccagggatgtcagaccccctgcccaaacctctgcgggaccctctgccagaccctctgctggacaagctcgtcctccctgtgctgcccggggccctccaggcgaggcctgggcctcacacacaggatctctccgagcagcaattccccattcctctcccctattgctggctctgcagggctctgatcaagcggatccaagccatgattcccaagggtgcgctagctgtggcagtggcccaggtgtgccgcgtggtacctctggtggcgggcggcatctgccagtgcctggctgagcgctactccgtcatcctgctcgacacgctgctgggccgcatgctgccccagctggtctgccgcctcgtcctccggtgctccatggatgacagcgctggcccaaggtcgccgacaggagaatggctgccgcgagactctgagtgccacctctgcatgtccgtgaccacccaggccgggaacagcagcgagcaggccataccacaggcaatgctccaggcctgtgttggctcctggctggacagggaaaagtgcaagcaatttgtggagcagcacacgccccagctgctgaccctggtgcccaggggctgggatgcccacaccacctgccaggccctcggggtgtgtgggaccatgtccagccctctccagtgtatccacagccccgacctttgatgagaactcagctgtccagctgcaaaggaaaagccaagtgagacgggctctgggaccatggtgaccaggctcttcccctgctccctggccctcgccagctgccaggctgaaaagaagcctcagctcccacaccgccctcctcaccgcccttcctcggcagtcacttccactggtggaccacgggcccccagccctgtgtcggccttgtctgtctcagctcaaccacagtctgacaccagagcccacttccatcctctctggtgtgaggcacagcgagggcagcatctggaggagctctgcagcctccacacctaccacgacctcccagggctgggctcaggaaaaaccagccactgctttacaggacagggggttgaagctgagccccgcctcacacccacccccatgcactcaaagattggattttacagctacttgcaattcaaaattcagaagaataaaaaatgggaacatacagaactctaaaagatagacatcagaaattgttaagttaagctttttcaaaaaatcagcaattccccagcgtagtcaagggtggacactgcacgctctggcatgatgggatggcgaccgggcaagctttcttcctcgagatgctctgctgcttgagagctattgctttgttaagatataaaaaggggtttctttttgtctttctgta

SEQ ID NO: 732869 - DNA, 1902 bp, Homo sapiens
tcttctgactaatgcaaaccatgtgtccatagaaccagaagatttttccaggggaaaagagcccccacgccccgcccagctataaggggccatgcaccaagcagggtacccaggctgcagaggtgccatggctgagtcacacctgctgcagtggctgctgctgctgctgcccacgctctgtggcccaggcactgctgcctggaccacctcatccttggcctgtgcccagggccctgagttctggtgccaaagcctggagcaagcattgcagtgcagagccctagggcattgcctacaggaagtctggggacatgtgggagccgatgacctatgccaagagtgtgaggacatcgtccacatccttaacaagatggccaaggaggccattttccaggacacgatgaggaagttcctggagcaggagtgcaacgtcctccccttgaagctgctcatgccccagtgcaaccaagtgcttgacgactacttccccctggtcatcgactacttccagaaccagattgactcaaacggcatctgtatgcacctgggcctgtgcaaatcccggcagccagagccagagcaggagccagggatgtcagaccccctgcccaaacctctgcgggaccctctgccagaccctctgctggacaagctcgtcctccctgtgctgcccggggccctccaggcgaggcctgggcctcacacacaggatctctccgagcagcaattccccattcctctcccctattgctggctctgcagggctctgatcaagcggatccaagccatgattcccaagggtgcgctagctgtggcagtggcccaggtgtgccgcgtggtacctctggtggcgggcggcatctgccagtgcctggctgagcgctactccgtcatcctgctcgacacgctgctgggccgcatgctgccccagctggtctgccgcctcgtcctccggtgctccatggatgacagcgctggcccaaggtcgccgacaggagaatggctgccgcgagactctgagtgccacctctgcatgtccgtgaccacccaggccgggaacagcagcgagcaggccataccacaggcaatgctccaggcctgtgttggctcctggctggacagggaaaagtgcaagcaatttgtggagcagcacacgccccagctgctgaccctggtgcccaggggctgggatgcccacaccacctgccaggccctcggggtgtgtgggaccatgtccagccctctccagtgtatccacagccccgacctttgatgagaactcagctgtccagaaaaagacaccgtcctttaaagtgctgcagtatggccagacgtggtggctcacacctgcaatcccagcaccttaggaggccgaggcaggaggatccttgaggtcaggagttcgagaccagcctcgccaacatggtgaaaccccatttctactaaaaatacaaaaaattagccaagtgtggtggcatatgcctgtaatcccaactactcagaaggccgaggcaggagaattacttgaacgcaggagaatcactgcagcccaggaggcagaggttgcagtgagccgagattgcaccactgcactccagcctgggtgacagagcaagactccatctcagtaaataaataaataaataaaaagcgctgcagtagctgtggcctcaccctgaagtcagcgggcccaggcctacctcactctctcccttggcagagaagcagacgtccatagctcctctccctcacaagcgctcccagcctgccctccagctgctgctctcccctcccagtctctactcactgggatgaggttaggtcatgaggacaccaaaaacctaaaaataaacaaaaagccaaacaagccttagcttttcttaaagactgaaatgcctggaa

SEQ ID NO: 732870 - DNA, 2832 bp, Homo sapiens
tcttctgactaatgcaaaccatgtgtccatagaaccagaagatttttccaggggaaaagagcccccacgccccgcccagctataaggggccatgcaccaagcagggtacccaggctgcagaggtgccatggctgagtcacacctgctgcagtggctgctgctgctgctgcccacgctctgtggcccaggcactgctgcctggaccacctcatccttggcctgtgcccagggccctgagttctggtgccaaagcctggagcaagcattgcagtgcagagccctagggcattgcctacaggaagtctggggacatgtgggagccgatgacctatgccaagagtgtgaggacatcgtccacatccttaacaagatggccaaggaggccattttccaggacacgatgaggaagttcctggagcaggagtgcaacgtcctccccttgaagctgctcatgccccagtgcaaccaagtgcttgacgactacttccccctggtcatcgactacttccagaaccagattgactcaaacggcatctgtatgcacctgggcctgtgcaaatcccggcagccagagccagagcaggagccagggatgtcagaccccctgcccaaacctctgcgggaccctctgccagaccctctgctggacaagctcgtcctccctgtgctgcccggggccctccaggcgaggcctgggcctcacacacaggatctctccgagcagcaattccccattcctctcccctattgctggctctgcagggctctgatcaagcggatccaagccatgattcccaagggtgcgctagctgtggcagtggcccaggtgtgccgcgtggtacctctggtggcgggcggcatctgccagtgcctggctgagcgctactccgtcatcctgctcgacacgctgctgggccgcatgctgccccagctggtctgccgcctcgtcctccggtgctccatggatgacagcgctggcccaaggtcgccgacaggagaatggctgccgcgagactctgagtgccacctctgcatgtccgtgaccacccaggccgggaacagcagcgagcaggccataccacaggcaatgctccaggcctgtgttggctcctggctggacagggaaaagtgcaagcaatttgtggagcagcacacgccccagctgctgaccctggtgcccaggggctgggatgcccacaccacctgccaggccctcggggtgtgtgggaccatgtccagccctctccagtgtatccacagccccgacctttgatgagaactcagctgtccagaaaaagacaccgtcctttaaagtgctgcagtatggccagacgtggtggctcacacctgcaatcccagcaccttaggaggccgaggcaggaggatccttgaggtcaggagttcgagaccagcctcgccaacatggtgaaaccccatttctactaaaaatacaaaaaattagccaagtgtggtggcatatgcctgtaatcccaactactcagaaggccgaggcaggagaattacttgaacgcaggagaatcactgcagcccaggaggcagaggttgcagtgagccgagattgcaccactgcactccagcctgggtgacagagcaagactccatctcagtaaataaataaataaataaaaagcgctgcagtagctgtggcctcaccctgaagtcagcgggcccaggcctacctcactctctcccttggcagagaagcagacgtccatagctcctctccctcacaagcgctcccagcctgccctccagctgctgctctcccctcccagtctctactcactgggatgaggttaggtcatgaggacaccaaaaacctaaaaataaacaaaaagccaaacaagccttagcttttcttaaagactgaaatgcctggaagtgtccctttatttataaaataacttttgtcatatttcttatacatgtttcttgtaagaaattcagaaactacagacaaagagagtggaaattacccactgtcaggcctctgagcccaagctaagccatcatatcccctgtgccctgcacgtatacacccagatggcctgaagcaactgaagatccacaaaagaagtgaaaatagccagttcctgccttaactgatgacattccaccattgtgatttgttcctgccccaccctaactgatcaattgaccttgtgacaatacaccttccccacccttgagaaggtgctttgtaatattctccccacccaccccacgcccgcacccccgcacccttaagaaggtattttgtaatattctctccgccattgagaatgtgctttgtaagatccaccccctgcccacaaaaaattgctcctaactccaccgcctatcccaaacctacaagaactaatgataatcccaccaccctttgctgactctttttggactcagcccacctgcacccaggtgattaaaaagctttattgttcacacaaagcctgtttggtagtctcttcacagggaagcatgtgacacccacaatcccacctagcccaggagagagctacggcagggtgtgtgttttgacactgagcttggggctttttccatcttctccccacagcctctggctccacacctccaccgttcaagcgccagaaagagctgtctatgcagcctgctcttgggcctggggatgagacacacaattcattggctcctggattttaagtagacatttgtaaatctatagctaactactgtccttaaagccattgtttccattacaaaatccaactctctgagagaaaagggtgttttaaatttaaaaaaataaaaacaaaaaagtttgattgagac

SEQ ID NO: 732871 - DNA, 2103 bp, Homo sapiens
tcttctgactaatgcaaaccatgtgtccatagaaccagaagatttttccaggggaaaagagcccccacgccccgcccagctataaggggccatgcaccaagcagggtacccaggctgcagaggtgccatggctgagtcacacctgctgcagtggctgctgctgctgctgcccacgctctgtggcccaggcactgctgcctggaccacctcatccttggcctgtgcccagggccctgagttctggtgccaaagcctggagcaagcattgcagtgcagagccctagggcattgcctacaggaagtctggggacatgtgggagccgatgacctatgccaagagtgtgaggacatcgtccacatccttaacaagatggccaaggaggccattttccaggacacgatgaggaagttcctggagcaggagtgcaacgtcctccccttgaagctgctcatgccccagtgcaaccaagtgcttgacgactacttccccctggtcatcgactacttccagaaccagattgactcaaacggcatctgtatgcacctgggcctgtgcaaatcccggcagccagagccagagcaggagccagggatgtcagaccccctgcccaaacctctgcgggaccctctgccagaccctctgctggacaagctcgtcctccctgtgctgcccggggccctccaggcgaggcctgggcctcacacacaggatctctccgagcagcaattccccattcctctcccctattgctggctctgcagggctctgatcaagcggatccaagccatgattcccaagggtgcgctagctgtggcagtggcccaggtgtgccgcgtggtacctctggtggcgggcggcatctgccagtgcctggctgagcgctactccgtcatcctgctcgacacgctgctgggccgcatgctgccccagctggtctgccgcctcgtcctccggtgctccatggatgacagcgctggcccaaggtcgccgacaggagaatggctgccgcgagactctgagtgccacctctgcatgtccgtgaccacccaggccgggaacagcagcgagcaggccataccacaggcaatgctccaggcctgtgttggctcctggctggacagggaaaagtgcaagcaatttgtggagcagcacacgccccagctgctgaccctggtgcccaggggctgggatgcccacaccacctgccaggccctcggggtgtgtgggaccatgtccagccctctccagtgtatccacagccccgacctttgatgagaactcagctgtccagaaaaagacaccgtcctttaaagtgctgcagtatggccagacgtggtggctcacacctgcaatcccagcaccttaggaggccgaggcaggaggatccttgaggtcaggagttcgagaccagcctcgccaacatggtgaaaccccatttctactaaaaatacaaaaaattagccaagtgtggtggcatatgcctgtaatcccaactactcagaaggccgaggcaggagaattacttgaacgcaggagaatcactgcagcccaggaggcagaggttgcagtgagccgagattgcaccactgcactccagcctgggtgacagagcaagactccatctcagtaaataaataaataaataaaaagcgctgcagtagctgtggcctcaccctgaagtcagcgggcccaggcctacctcactctctcccttggcagagaagcagacgtccatagctcctctccctcacaagcgctcccagcctgccctccagctgctgctctcccctcccagtctctactcactgggatgaggttaggtcatgaggacaccaaaaacctaaaaataaacaaaaagccaaacaagccttagcttttcttaaagactgaaatgcctggaagagttccagaccagcctaacatggtgaaaccacatatctactaaaaaaaatacaaaattagctggatgtggtagtgcatgcctgttatcccagctacttggaaggctgagacaggagaattgcttgaacccaggaggcagaggctgcagtgagccaggattgcgccactgcactccagcctgggcaacaagagcaaaactc

SEQ ID NO: 732872 - DNA, 2303 bp, Homo sapiens
tcttctgactaatgcaaaccatgtgtccatagaaccagaagatttttccaggggaaaagagcccccacgccccgcccagctataaggggccatgcaccaagcagggtacccaggctgcagaggtgccatggctgagtcacacctgctgcagtggctgctgctgctgctgcccacgctctgtggcccaggcactgctgcctggaccacctcatccttggcctgtgcccagggccctgagttctggtgccaaagcctggagcaagcattgcagtgcagagccctagggcattgcctacaggaagtctggggacatgtgggagccgatgacctatgccaagagtgtgaggacatcgtccacatccttaacaagatggccaaggaggccattttccaggacacgatgaggaagttcctggagcaggagtgcaacgtcctccccttgaagctgctcatgccccagtgcaaccaagtgcttgacgactacttccccctggtcatcgactacttccagaaccagattgactcaaacggcatctgtatgcacctgggcctgtgcaaatcccggcagccagagccagagcaggagccagggatgtcagaccccctgcccaaacctctgcgggaccctctgccagaccctctgctggacaagctcgtcctccctgtgctgcccggggccctccaggcgaggcctgggcctcacacacaggatctctccgagcagcaattccccattcctctcccctattgctggctctgcagggctctgatcaagcggatccaagccatgattcccaagggtgcgctagctgtggcagtggcccaggtgtgccgcgtggtacctctggtggcgggcggcatctgccagtgcctggctgagcgctactccgtcatcctgctcgacacgctgctgggccgcatgctgccccagctggtctgccgcctcgtcctccggtgctccatggatgacagcgctggcccaaggtcgccgacaggagaatggctgccgcgagactctgagtgccacctctgcatgtccgtgaccacccaggccgggaacagcagcgagcaggccataccacaggcaatgctccaggcctgtgttggctcctggctggacagggaaaagtgcaagcaatttgtggagcagcacacgccccagctgctgaccctggtgcccaggggctgggatgcccacaccacctgccaggccctcggggtgtgtgggaccatgtccagccctctccagtgtatccacagccccgacctttgatgagaactcagctgtccaggtgagtccaggcccccagttgcggggaggtaagggggcaggtcctgaccatcagggcatgggaggcccttctgctccccaagcaggaagaggcggccactcctgccggctgctccatcctccctctcaccgcacagctggaggctcctgagggcttctggctggccatcaggaaaacaccctttccggaccccgagcactgccccgcccagaaccccagtcactgagtgcccaacccccagcttcccccccaaccccccgccctgccctgtcccaggcctccctctcagagcttgccccagggactctctggccctcagggttcaatgtattctgaccaaggccaagctttcctggggctcagggaaaatcacactttgctacccgaagctgtatcccctcagatgccaggaaggccgtgatcatctgactccaccctcctgagacacattctctccctgactgtcctgttctaagtcagcggagcaccttaggatggaggggtggaggcgaggccagatgcagcctctgtgaacaggtgcctggaggctgggaaatgaccctgagagggcaggacacagcaaccgtgggcttaaggtgaccttgagagcaagcttggcccactttacaattctgttcagagccagcccctaacatggtggtcatttattcatttgttccctcattttaaaaaatgtaaggccaggcatggtggctcacgccggtaatcccagcactttgggaggccgaggcaggcagatcacctgaggtcaggagttcgagactagcctggccaacatggcgaaaccctgtctctactaaaaatattttttaaaaattagctgagcatggtggcaggtgcctgtaatcccagctactcaggacgcttaggcaggagaatcacttgaacctgggaggcgaaggttgcggtgtgccgagatcgtgccactgcactctagcctaggcaacagagcacaactctgtctcaggaaaaaaaaaaaaaaaaaaaagg

SEQ ID NO: 732873 - DNA, 3704 bp, Homo sapiens
tcttctgactaatgcaaaccatgtgtccatagaaccagaagatttttccaggggaaaagagcccccacgccccgcccagctataaggggccatgcaccaagcagggtacccaggctgcagaggtgccatggctgagtcacacctgctgcagtggctgctgctgctgctgcccacgctctgtggcccaggcactgctgcctggaccacctcatccttggcctgtgcccagggccctgagttctggtgccaaagcctggagcaagcattgcagtgcagagccctagggcattgcctacaggaagtctggggacatgtgggagccgatgacctatgccaagagtgtgaggacatcgtccacatccttaacaagatggccaaggaggccattttccaggacacgatgaggaagttcctggagcaggagtgcaacgtcctccccttgaagctgctcatgccccagtgcaaccaagtgcttgacgactacttccccctggtcatcgactacttccagaaccagattgactcaaacggcatctgtatgcacctgggcctgtgcaaatcccggcagccagagccagagcaggagccagggatgtcagaccccctgcccaaacctctgcgggaccctctgccagaccctctgctggacaagctcgtcctccctgtgctgcccggggccctccaggcgaggcctgggcctcacacacaggatctctccgagcagcaattccccattcctctcccctattgctggctctgcagggctctgatcaagcggatccaagccatgattcccaagggtgcgctagctgtggcagtggcccaggtgtgccgcgtggtacctctggtggcgggcggcatctgccagtgcctggctgagcgctactccgtcatcctgctcgacacgctgctgggccgcatgctgccccagctggtctgccgcctcgtcctccggtgctccatggatgacagcgctggcccaaggtcgccgacaggagaatggctgccgcgagactctgagtgccacctctgcatgtccgtgaccacccaggccgggaacagcagcgagcaggccataccacaggcaatgctccaggcctgtgttggctcctggctggacagggaaaagtgcaagcaatttgtggagcagcacacgccccagctgctgaccctggtgcccaggggctgggatgcccacaccacctgccaggccctcggggtgtgtgggaccatgtccagccctctccagtgtatccacagccccgacctttgatgagaactcagctgtccaggcaggacatacacacagtccctctctggccctcatcctcctcagctgcaaaggaaaagccaagtgagacgggctctgggaccatggtgaccaggctcttcccctgctccctggccctcgccagctgccaggctgaaaagaagcctcagctcccacaccgccctcctcaccgcccttcctcggcagtcacttccactggtggaccacgggcccccagccctgtgtcggccttgtctgtctcagctcaaccacagtctgacaccagagcccacttccatcctctctggtgtgaggcacagcgagggcagcatctggaggagctctgcagcctccacacctaccacgacctcccagggctgggctcaggaaaaaccagccactgctttacaggacagggggttgaagctgagccccgcctcacacccacccccatgcactcaaagattggattttacagctacttgcaattcaaaattcagaagaataaaaaatgggaacatacagaactctaaaagatagacatcagaaattgttaagttaagctttttcaaaaaatcagcaattccccagcgtagtcaagggtggacactgcacgctctggcatgatgggatggcgaccgggcaagctttcttcctcgagatgctctgctgcttgagagctattgctttgttaagatataaaaaggggtttctttttgtctttctgtaaggtggacttccagcttttgattgaaagtcctagggtgattctatttctgctgtgatttatctgctgaaagctcagctggggttgtgcaagctagggacccattcctgtgtaatacaatgtctgcaccaatgctaataaagtcctattctcttttatgagaaagaaaaaagacaccgtcctttaaagtgctgcagtatggccagacgtggtggctcacacctgcaatcccagcaccttaggaggccgaggcaggaggatccttgaggtcaggagttcgagaccagcctcgccaacatggtgaaaccccatttctactaaaaatacaaaaaattagccaagtgtggtggcatatgcctgtaatcccaactactcagaaggccgaggcaggagaattacttgaacgcaggagaatcactgcagcccaggaggcagaggttgcagtgagccgagattgcaccactgcactccagcctgggtgacagagcaagactccatctcagtaaataaataaataaataaaaagcgctgcagtagctgtggcctcaccctgaagtcagcgggcccaggcctacctcactctctcccttggcagagaagcagacgtccatagctcctctccctcacaagcgctcccagcctgccctccagctgctgctctcccctcccagtctctactcactgggatgaggttaggtcatgaggacaccaaaaacctaaaaataaacaaaaagccaaacaagccttagcttttcttaaagactgaaatgcctggaagtgtccctttatttataaaataacttttgtcatatttcttatacatgtttcttgtaagaaattcagaaactacagacaaagagagtggaaattacccactgtcaggcctctgagcccaagctaagccatcatatcccctgtgccctgcacgtatacacccagatggcctgaagcaactgaagatccacaaaagaagtgaaaatagccagttcctgccttaactgatgacattccaccattgtgatttgttcctgccccaccctaactgatcaattgaccttgtgacaatacaccttccccacccttgagaaggtgctttgtaatattctccccacccaccccacgcccgcacccccgcacccttaagaaggtattttgtaatattctctccgccattgagaatgtgctttgtaagatccaccccctgcccacaaaaaattgctcctaactccaccgcctatcccaaacctacaagaactaatgataatcccaccaccctttgctgactctttttggactcagcccacctgcacccaggtgattaaaaagctttattgttcacacaaagcctgtttggtagtctcttcacagggaagcatgtgacacccacaatcccacctagcccaggagagagctacggcagggtgtgtgttttgacactgagcttggggctttttccatcttctccccacagcctctggctccacacctccaccgttcaagcgccagaaagagctgtctatgcagcctgctcttgggcctggggatgagacacacaattcattggctcctggattttaagtagacatttgtaaatctatagctaactactgtccttaaagccattgtttccattacaaaatccaactctctgagagaaaagggtgttttaaatttaaaaaaataaaaacaaaaaagtttgattgagac

SEQ ID NO: 732874 - DNA, 2975 bp, Homo sapiens
tcttctgactaatgcaaaccatgtgtccatagaaccagaagatttttccaggggaaaagagcccccacgccccgcccagctataaggggccatgcaccaagcagggtacccaggctgcagaggtgccatggctgagtcacacctgctgcagtggctgctgctgctgctgcccacgctctgtggcccaggcactgctgcctggaccacctcatccttggcctgtgcccagggccctgagttctggtgccaaagcctggagcaagcattgcagtgcagagccctagggcattgcctacaggaagtctggggacatgtgggagccgatgacctatgccaagagtgtgaggacatcgtccacatccttaacaagatggccaaggaggccattttccaggacacgatgaggaagttcctggagcaggagtgcaacgtcctccccttgaagctgctcatgccccagtgcaaccaagtgcttgacgactacttccccctggtcatcgactacttccagaaccagattgactcaaacggcatctgtatgcacctgggcctgtgcaaatcccggcagccagagccagagcaggagccagggatgtcagaccccctgcccaaacctctgcgggaccctctgccagaccctctgctggacaagctcgtcctccctgtgctgcccggggccctccaggcgaggcctgggcctcacacacaggatctctccgagcagcaattccccattcctctcccctattgctggctctgcagggctctgatcaagcggatccaagccatgattcccaagggtgcgctagctgtggcagtggcccaggtgtgccgcgtggtacctctggtggcgggcggcatctgccagtgcctggctgagcgctactccgtcatcctgctcgacacgctgctgggccgcatgctgccccagctggtctgccgcctcgtcctccggtgctccatggatgacagcgctggcccaaggtcgccgacaggagaatggctgccgcgagactctgagtgccacctctgcatgtccgtgaccacccaggccgggaacagcagcgagcaggccataccacaggcaatgctccaggcctgtgttggctcctggctggacagggaaaagtgcaagcaatttgtggagcagcacacgccccagctgctgaccctggtgcccaggggctgggatgcccacaccacctgccaggccctcggggtgtgtgggaccatgtccagccctctccagtgtatccacagccccgacctttgatgagaactcagctgtccaggcaggacatacacacagtccctctctggccctcatcctcctcagctgcaaaggaaaagccaagtgagacgggctctgggaccatggtgaccaggctcttcccctgctccctggccctcgccagctgccaggctgaaaagaagcctcagctcccacaccgccctcctcaccgcccttcctcggcagtcacttccactggtggaccacgggcccccagccctgtgtcggccttgtctgtctcagctcaaccacagtctgacaccagagcccacttccatcctctctggtgtgaggcacagcgagggcagcatctggaggagctctgcagcctccacacctaccacgacctcccagggctgggctcaggaaaaaccagccactgctttacaggacagggggttgaagctgagccccgcctcacacccacccccatgcactcaaagattggattttacagctacttgcaattcaaaattcagaagaataaaaaatgggaacatacagaactctaaaagatagacatcagaaattgttaagttaagctttttcaaaaaatcagcaattccccagcgtagtcaagggtggacactgcacgctctggcatgatgggatggcgaccgggcaagctttcttcctcgagatgctctgctgcttgagagctattgctttgttaagatataaaaaggggtttctttttgtctttctgtaaggtggacttccagcttttgattgaaagtcctagggtgattctatttctgctgtgatttatctgctgaaagctcagctggggttgtgcaagctagggacccattcctgtgtaatacaatgtctgcaccaatgctaataaagtcctattctcttttatgagaaagaaaaaagacaccgtcctttaaagtgctgcagtatggccagacgtggtggctcacacctgcaatcccagcaccttaggaggccgaggcaggaggatccttgaggtcaggagttcgagaccagcctcgccaacatggtgaaaccccatttctactaaaaatacaaaaaattagccaagtgtggtggcatatgcctgtaatcccaactactcagaaggccgaggcaggagaattacttgaacgcaggagaatcactgcagcccaggaggcagaggttgcagtgagccgagattgcaccactgcactccagcctgggtgacagagcaagactccatctcagtaaataaataaataaataaaaagcgctgcagtagctgtggcctcaccctgaagtcagcgggcccaggcctacctcactctctcccttggcagagaagcagacgtccatagctcctctccctcacaagcgctcccagcctgccctccagctgctgctctcccctcccagtctctactcactgggatgaggttaggtcatgaggacaccaaaaacctaaaaataaacaaaaagccaaacaagccttagcttttcttaaagactgaaatgcctggaagagttccagaccagcctaacatggtgaaaccacatatctactaaaaaaaatacaaaattagctggatgtggtagtgcatgcctgttatcccagctacttggaaggctgagacaggagaattgcttgaacccaggaggcagaggctgcagtgagccaggattgcgccactgcactccagcctgggcaacaagagcaaaactc

SEQ ID NO: 732875 - DNA, 2774 bp, Homo sapiens
tcttctgactaatgcaaaccatgtgtccatagaaccagaagatttttccaggggaaaagagcccccacgccccgcccagctataaggggccatgcaccaagcagggtacccaggctgcagaggtgccatggctgagtcacacctgctgcagtggctgctgctgctgctgcccacgctctgtggcccaggcactgctgcctggaccacctcatccttggcctgtgcccagggccctgagttctggtgccaaagcctggagcaagcattgcagtgcagagccctagggcattgcctacaggaagtctggggacatgtgggagccgatgacctatgccaagagtgtgaggacatcgtccacatccttaacaagatggccaaggaggccattttccaggacacgatgaggaagttcctggagcaggagtgcaacgtcctccccttgaagctgctcatgccccagtgcaaccaagtgcttgacgactacttccccctggtcatcgactacttccagaaccagattgactcaaacggcatctgtatgcacctgggcctgtgcaaatcccggcagccagagccagagcaggagccagggatgtcagaccccctgcccaaacctctgcgggaccctctgccagaccctctgctggacaagctcgtcctccctgtgctgcccggggccctccaggcgaggcctgggcctcacacacaggatctctccgagcagcaattccccattcctctcccctattgctggctctgcagggctctgatcaagcggatccaagccatgattcccaagggtgcgctagctgtggcagtggcccaggtgtgccgcgtggtacctctggtggcgggcggcatctgccagtgcctggctgagcgctactccgtcatcctgctcgacacgctgctgggccgcatgctgccccagctggtctgccgcctcgtcctccggtgctccatggatgacagcgctggcccaaggtcgccgacaggagaatggctgccgcgagactctgagtgccacctctgcatgtccgtgaccacccaggccgggaacagcagcgagcaggccataccacaggcaatgctccaggcctgtgttggctcctggctggacagggaaaagtgcaagcaatttgtggagcagcacacgccccagctgctgaccctggtgcccaggggctgggatgcccacaccacctgccaggccctcggggtgtgtgggaccatgtccagccctctccagtgtatccacagccccgacctttgatgagaactcagctgtccaggcaggacatacacacagtccctctctggccctcatcctcctcagctgcaaaggaaaagccaagtgagacgggctctgggaccatggtgaccaggctcttcccctgctccctggccctcgccagctgccaggctgaaaagaagcctcagctcccacaccgccctcctcaccgcccttcctcggcagtcacttccactggtggaccacgggcccccagccctgtgtcggccttgtctgtctcagctcaaccacagtctgacaccagagcccacttccatcctctctggtgtgaggcacagcgagggcagcatctggaggagctctgcagcctccacacctaccacgacctcccagggctgggctcaggaaaaaccagccactgctttacaggacagggggttgaagctgagccccgcctcacacccacccccatgcactcaaagattggattttacagctacttgcaattcaaaattcagaagaataaaaaatgggaacatacagaactctaaaagatagacatcagaaattgttaagttaagctttttcaaaaaatcagcaattccccagcgtagtcaagggtggacactgcacgctctggcatgatgggatggcgaccgggcaagctttcttcctcgagatgctctgctgcttgagagctattgctttgttaagatataaaaaggggtttctttttgtctttctgtaaggtggacttccagcttttgattgaaagtcctagggtgattctatttctgctgtgatttatctgctgaaagctcagctggggttgtgcaagctagggacccattcctgtgtaatacaatgtctgcaccaatgctaataaagtcctattctcttttatgagaaagaaaaaagacaccgtcctttaaagtgctgcagtatggccagacgtggtggctcacacctgcaatcccagcaccttaggaggccgaggcaggaggatccttgaggtcaggagttcgagaccagcctcgccaacatggtgaaaccccatttctactaaaaatacaaaaaattagccaagtgtggtggcatatgcctgtaatcccaactactcagaaggccgaggcaggagaattacttgaacgcaggagaatcactgcagcccaggaggcagaggttgcagtgagccgagattgcaccactgcactccagcctgggtgacagagcaagactccatctcagtaaataaataaataaataaaaagcgctgcagtagctgtggcctcaccctgaagtcagcgggcccaggcctacctcactctctcccttggcagagaagcagacgtccatagctcctctccctcacaagcgctcccagcctgccctccagctgctgctctcccctcccagtctctactcactgggatgaggttaggtcatgaggacaccaaaaacctaaaaataaacaaaaagccaaacaagccttagcttttcttaaagactgaaatgcctggaa

SEQ ID NO: 732876 - DNA, 2164 bp, Homo sapiens
tcttctgactaatgcaaaccatgtgtccatagaaccagaagatttttccaggggaaaagagcccccacgccccgcccagctataaggggccatgcaccaagcagggtacccaggctgcagaggtgccatggctgagtcacacctgctgcagtggctgctgctgctgctgcccacgctctgtggcccaggcactgctgcctggaccacctcatccttggcctgtgcccagggccctgagttctggtgccaaagcctggagcaagcattgcagtgcagagccctagggcattgcctacaggaagtctggggacatgtgggagccgatgacctatgccaagagtgtgaggacatcgtccacatccttaacaagatggccaaggaggccattttccaggacacgatgaggaagttcctggagcaggagtgcaacgtcctccccttgaagctgctcatgccccagtgcaaccaagtgcttgacgactacttccccctggtcatcgactacttccagaaccagattgactcaaacggcatctgtatgcacctgggcctgtgcaaatcccggcagccagagccagagcaggagccagggatgtcagaccccctgcccaaacctctgcgggaccctctgccagaccctctgctggacaagctcgtcctccctgtgctgcccggggccctccaggcgaggcctgggcctcacacacaggatctctccgagcagcaattccccattcctctcccctattgctggctctgcagggctctgatcaagcggatccaagccatgattcccaagggtgcgctagctgtggcagtggcccaggtgtgccgcgtggtacctctggtggcgggcggcatctgccagtgcctggctgagcgctactccgtcatcctgctcgacacgctgctgggccgcatgctgccccagctggtctgccgcctcgtcctccggtgctccatggatgacagcgctggcccaaggtcgccgacaggagaatggctgccgcgagactctgagtgccacctctgcatgtccgtgaccacccaggccgggaacagcagcgagcaggccataccacaggcaatgctccaggcctgtgttggctcctggctggacagggaaaagtgcaagcaatttgtggagcagcacacgccccagctgctgaccctggtgcccaggggctgggatgcccacaccacctgccaggccctcggggtgtgtgggaccatgtccagccctctccagtgtatccacagccccgacctttgatgagaactcagctgtccaggcaggacatacacacagtccctctctggccctcatcctcctcagctgcaaaggaaaagccaagtgagacgggctctgggaccatggtgaccaggctcttcccctgctccctggccctcgccagctgccaggctgaaaagaagcctcagctcccacaccgccctcctcaccgcccttcctcggcagtcacttccactggtggaccacgggcccccagccctgtgtcggccttgtctgtctcagctcaaccacagtctgacaccagagcccacttccatcctctctggtgtgaggcacagcgagggcagcatctggaggagctctgcagcctccacacctaccacgacctcccagggctgggctcaggaaaaaccagccactgctttacaggacagggggttgaagctgagccccgcctcacacccacccccatgcactcaaagattggattttacagctacttgcaattcaaaattcagaagaataaaaaatgggaacatacagaactctaaaagatagacatcagaaattgttaagttaagctttttcaaaaaatcagcaattccccagcgtagtcaagggtggacactgcacgctctggcatgatgggatggcgaccgggcaagctttcttcctcgagatgctctgctgcttgagagctattgctttgttaagatataaaaaggggtttctttttgtctttctgtaaggtggacttccagcttttgattgaaagtcctagggtgattctatttctgctgtgatttatctgctgaaagctcagctggggttgtgcaagctagggacccattcctgtgtaatacaatgtctgcaccaatgctaataaagtcctattctcttttatgagaaaga

SEQ ID NO: 732877 - DNA, 1999 bp, Homo sapiens
tcttctgactaatgcaaaccatgtgtccatagaaccagaagatttttccaggggaaaagagcccccacgccccgcccagctataaggggccatgcaccaagcagggtacccaggctgcagaggtgccatggctgagtcacacctgctgcagtggctgctgctgctgctgcccacgctctgtggcccaggcactgctgcctggaccacctcatccttggcctgtgcccagggccctgagttctggtgccaaagcctggagcaagcattgcagtgcagagccctagggcattgcctacaggaagtctggggacatgtgggagccgatgacctatgccaagagtgtgaggacatcgtccacatccttaacaagatggccaaggaggccattttccaggacacgatgaggaagttcctggagcaggagtgcaacgtcctccccttgaagctgctcatgccccagtgcaaccaagtgcttgacgactacttccccctggtcatcgactacttccagaaccagattgactcaaacggcatctgtatgcacctgggcctgtgcaaatcccggcagccagagccagagcaggagccagggatgtcagaccccctgcccaaacctctgcgggaccctctgccagaccctctgctggacaagctcgtcctccctgtgctgcccggggccctccaggcgaggcctgggcctcacacacaggatctctccgagcagcaattccccattcctctcccctattgctggctctgcagggctctgatcaagcggatccaagccatgattcccaagggtgcgctagctgtggcagtggcccaggtgtgccgcgtggtacctctggtggcgggcggcatctgccagtgcctggctgagcgctactccgtcatcctgctcgacacgctgctgggccgcatgctgccccagctggtctgccgcctcgtcctccggtgctccatggatgacagcgctggcccaaggtcgccgacaggagaatggctgccgcgagactctgagtgccacctctgcatgtccgtgaccacccaggccgggaacagcagcgagcaggccataccacaggcaatgctccaggcctgtgttggctcctggctggacagggaaaagtgcaagcaatttgtggagcagcacacgccccagctgctgaccctggtgcccaggggctgggatgcccacaccacctgccaggccctcggggtgtgtgggaccatgtccagccctctccagtgtatccacagccccgacctttgatgagaactcagctgtccaggcaggacatacacacagtccctctctggccctcatcctcctcagctgcaaaggaaaagccaagtgagacgggctctgggaccatggtgaccaggctcttcccctgctccctggccctcgccagctgccaggctgaaaagaagcctcagctcccacaccgccctcctcaccgcccttcctcggcagtcacttccactggtggaccacgggcccccagccctgtgtcggccttgtctgtctcagctcaaccacagtctgacaccagagcccacttccatcctctctggtgtgaggcacagcgagggcagcatctggaggagctctgcagcctccacacctaccacgacctcccagggctgggctcaggaaaaaccagccactgctttacaggacagggggttgaagctgagccccgcctcacacccacccccatgcactcaaagattggattttacagctacttgcaattcaaaattcagaagaataaaaaatgggaacatacagaactctaaaagatagacatcagaaattgttaagttaagctttttcaaaaaatcagcaattccccagcgtagtcaagggtggacactgcacgctctggcatgatgggatggcgaccgggcaagctttcttcctcgagatgctctgctgcttgagagctattgctttgttaagatataaaaaggggtttctttttgtctttctgta

SEQ ID NO: 732878 - DNA, 1279 bp, Homo sapiens
caggaggcggaggttgcagtgagccgacatcacgccactgtactctagcctgggtgacagagcaagactctgtctcaaaaaaaaagaaagaaggaaagatcactgcagagattgcagtgagaggtgatgggacagggacggagctgagggctggcctggggatgcatttgggaggtgggcccactgctattgggcatggatgggcctggagcgtgaggaccagggaggactccaaagtgacttttacacactggccagagcaaccagccctctgtaatgccagcagctgagatggggagactaaagaagaaaacaggtttgagcaaaaaaacagagagctccctcctggccatgttgagttcaagatgcctgtgtgaagtgcaggagaggagagtcaggcaagcagctgaatcccaagcattgggggaaggtcaggtccaccatgtcagtctgagagtcactagctgtgggccagagcctttggggccagacgtaggtctgaagctggctcctacactcagtgaccctgtgtgagtcccctgcatcccctggactctctgatccccagtgtccttatttgtgaatagccttgccctcccttctagaagagaatgagggaatgcgtaggaagtgcccagctgggtgctgggcagagagtggaggcttgccaagtgaaggtcccatgctggcctctctccgcccccgccccagggtgcgctagctgtggcagtggcccaggtgtgccgcgtggtacctctggtggcgggcggcatctgccagtgcctggctgagcgctactccgtcatcctgctcgacacgctgctgggccgcatgctgccccagctggtctgccgcctcgtcctccggtgctccatggatgacagcgctggcccaagtgagcccactgccccctccttagcccaatgcctgctctcctcctccccctaccctgccactgcatgaccctctccctctgtggtcccactgcaatgcaccaaggaggacagaaaccaaacacctctgtagggtggccttgcctgctttccccctaatgctcacatctccagggtcgccgacaggagaatggctgccgcgagactctgagtgccacctctgcatgtccgtgaccacccaggccgggaacagcagcgagcaggccataccacaggcaatgctccaggcctgtgttggctcctggctggacagggaaaagctggctccagtttgttaagggtttcaactgcagccagaggtgttccgtgagggctgatggaggagt

SEQ ID NO: 732879 - DNA, 3015 bp, Homo sapiens
caggaggcggaggttgcagtgagccgacatcacgccactgtactctagcctgggtgacagagcaagactctgtctcaaaaaaaaagaaagaaggaaagatcactgcagagattgcagtgagaggtgatgggacagggacggagctgagggctggcctggggatgcatttgggaggtgggcccactgctattgggcatggatgggcctggagcgtgaggaccagggaggactccaaagtgacttttacacactggccagagcaaccagccctctgtaatgccagcagctgagatggggagactaaagaagaaaacaggtttgagcaaaaaaacagagagctccctcctggccatgttgagttcaagatgcctgtgtgaagtgcaggagaggagagtcaggcaagcagctgaatcccaagcattgggggaaggtcaggtccaccatgtcagtctgagagtcactagctgtgggccagagcctttggggccagacgtaggtctgaagctggctcctacactcagtgaccctgtgtgagtcccctgcatcccctggactctctgatccccagtgtccttatttgtgaatagccttgccctcccttctagaagagaatgagggaatgcgtaggaagtgcccagctgggtgctgggcagagagtggaggcttgccaagtgaaggtcccatgctggcctctctccgcccccgccccagggtgcgctagctgtggcagtggcccaggtgtgccgcgtggtacctctggtggcgggcggcatctgccagtgcctggctgagcgctactccgtcatcctgctcgacacgctgctgggccgcatgctgccccagctggtctgccgcctcgtcctccggtgctccatggatgacagcgctggcccaagtgagcccactgccccctccttagcccaatgcctgctctcctcctccccctaccctgccactgcatgaccctctccctctgtggtcccactgcaatgcaccaaggaggacagaaaccaaacacctctgtagggtggccttgcctgctttccccctaatgctcacatctccagggtcgccgacaggagaatggctgccgcgagactctgagtgccacctctgcatgtccgtgaccacccaggccgggaacagcagcgagcaggccataccacaggcaatgctccaggcctgtgttggctcctggctggacagggaaaagtgcaagcaatttgtggagcagcacacgccccagctgctgaccctggtgcccaggggctgggatgcccacaccacctgccaggccctcggggtgtgtgggaccatgtccagccctctccagtgtatccacagccccgacctttgatgagaactcagctgtccagctgcaaaggaaaagccaagtgagacgggctctgggaccatggtgaccaggctcttcccctgctccctggccctcgccagctgccaggctgaaaagaagcctcagctcccacaccgccctcctcaccgcccttcctcggcagtcacttccactggtggaccacgggcccccagccctgtgtcggccttgtctgtctcagctcaaccacagtctgacaccagagcccacttccatcctctctggtgtgaggcacagcgagggcagcatctggaggagctctgcagcctccacacctaccacgacctcccagggctgggctcaggaaaaaccagccactgctttacaggacagggggttgaagctgagccccgcctcacacccacccccatgcactcaaagattggattttacagctacttgcaattcaaaattcagaagaataaaaaatgggaacatacagaactctaaaagatagacatcagaaattgttaagttaagctttttcaaaaaatcagcaattccccagcgtagtcaagggtggacactgcacgctctggcatgatgggatggcgaccgggcaagctttcttcctcgagatgctctgctgcttgagagctattgctttgttaagatataaaaaggggtttctttttgtctttctgtaaggtggacttccagcttttgattgaaagtcctagggtgattctatttctgctgtgatttatctgctgaaagctcagctggggttgtgcaagctagggacccattcctgtgtaatacaatgtctgcaccaatgctaataaagtcctattctcttttatgagaaagaaaaaagacaccgtcctttaaagtgctgcagtatggccagacgtggtggctcacacctgcaatcccagcaccttaggaggccgaggcaggaggatccttgaggtcaggagttcgagaccagcctcgccaacatggtgaaaccccatttctactaaaaatacaaaaaattagccaagtgtggtggcatatgcctgtaatcccaactactcagaaggccgaggcaggagaattacttgaacgcaggagaatcactgcagcccaggaggcagaggttgcagtgagccgagattgcaccactgcactccagcctgggtgacagagcaagactccatctcagtaaataaataaataaataaaaagcgctgcagtagctgtggcctcaccctgaagtcagcgggcccaggcctacctcactctctcccttggcagagaagcagacgtccatagctcctctccctcacaagcgctcccagcctgccctccagctgctgctctcccctcccagtctctactcactgggatgaggttaggtcatgaggacaccaaaaacctaaaaataaacaaaaagccaaacaagccttagcttttcttaaagactgaaatgcctggaagagttccagaccagcctaacatggtgaaaccacatatctactaaaaaaaatacaaaattagctggatgtggtagtgcatgcctgttatcccagctacttggaaggctgagacaggagaattgcttgaacccaggaggcagaggctgcagtgagccaggattgcgccactgcactccagcctgggcaacaagagcaaaactc

SEQ ID NO: 732880 - DNA, 2187 bp, Homo sapiens
caggaggcggaggttgcagtgagccgacatcacgccactgtactctagcctgggtgacagagcaagactctgtctcaaaaaaaaagaaagaaggaaagatcactgcagagattgcagtgagaggtgatgggacagggacggagctgagggctggcctggggatgcatttgggaggtgggcccactgctattgggcatggatgggcctggagcgtgaggaccagggaggactccaaagtgacttttacacactggccagagcaaccagccctctgtaatgccagcagctgagatggggagactaaagaagaaaacaggtttgagcaaaaaaacagagagctccctcctggccatgttgagttcaagatgcctgtgtgaagtgcaggagaggagagtcaggcaagcagctgaatcccaagcattgggggaaggtcaggtccaccatgtcagtctgagagtcactagctgtgggccagagcctttggggccagacgtaggtctgaagctggctcctacactcagtgaccctgtgtgagtcccctgcatcccctggactctctgatccccagtgtccttatttgtgaatagccttgccctcccttctagaagagaatgagggaatgcgtaggaagtgcccagctgggtgctgggcagagagtggaggcttgccaagtgaaggtcccatgctggcctctctccgcccccgccccagggtgcgctagctgtggcagtggcccaggtgtgccgcgtggtacctctggtggcgggcggcatctgccagtgcctggctgagcgctactccgtcatcctgctcgacacgctgctgggccgcatgctgccccagctggtctgccgcctcgtcctccggtgctccatggatgacagcgctggcccaagtgagcccactgccccctccttagcccaatgcctgctctcctcctccccctaccctgccactgcatgaccctctccctctgtggtcccactgcaatgcaccaaggaggacagaaaccaaacacctctgtagggtggccttgcctgctttccccctaatgctcacatctccagggtcgccgacaggagaatggctgccgcgagactctgagtgccacctctgcatgtccgtgaccacccaggccgggaacagcagcgagcaggccataccacaggcaatgctccaggcctgtgttggctcctggctggacagggaaaagtgcaagcaatttgtggagcagcacacgccccagctgctgaccctggtgcccaggggctgggatgcccacaccacctgccaggccctcggggtgtgtgggaccatgtccagccctctccagtgtatccacagccccgacctttgatgagaactcagctgtccagaaaaagacaccgtcctttaaagtgctgcagtatggccagacgtggtggctcacacctgcaatcccagcaccttaggaggccgaggcaggaggatccttgaggtcaggagttcgagaccagcctcgccaacatggtgaaaccccatttctactaaaaatacaaaaaattagccaagtgtggtggcatatgcctgtaatcccaactactcagaaggccgaggcaggagaattacttgaacgcaggagaatcactgcagcccaggaggcagaggttgcagtgagccgagattgcaccactgcactccagcctgggtgacagagcaagactccatctcagtaaataaataaataaataaaaagcgctgcagtagctgtggcctcaccctgaagtcagcgggcccaggcctacctcactctctcccttggcagagaagcagacgtccatagctcctctccctcacaagcgctcccagcctgccctccagctgctgctctcccctcccagtctctactcactgggatgaggttaggtcatgaggacaccaaaaacctaaaaataaacaaaaagccaaacaagccttagcttttcttaaagactgaaatgcctggaagagttccagaccagcctaacatggtgaaaccacatatctactaaaaaaaatacaaaattagctggatgtggtagtgcatgcctgttatcccagctacttggaaggctgagacaggagaattgcttgaacccaggaggcagaggctgcagtgagccaggattgcgccactgcactccagcctgggcaacaagagcaaaactc

SEQ ID NO: 732881 - DNA, 3059 bp, Homo sapiens
caggaggcggaggttgcagtgagccgacatcacgccactgtactctagcctgggtgacagagcaagactctgtctcaaaaaaaaagaaagaaggaaagatcactgcagagattgcagtgagaggtgatgggacagggacggagctgagggctggcctggggatgcatttgggaggtgggcccactgctattgggcatggatgggcctggagcgtgaggaccagggaggactccaaagtgacttttacacactggccagagcaaccagccctctgtaatgccagcagctgagatggggagactaaagaagaaaacaggtttgagcaaaaaaacagagagctccctcctggccatgttgagttcaagatgcctgtgtgaagtgcaggagaggagagtcaggcaagcagctgaatcccaagcattgggggaaggtcaggtccaccatgtcagtctgagagtcactagctgtgggccagagcctttggggccagacgtaggtctgaagctggctcctacactcagtgaccctgtgtgagtcccctgcatcccctggactctctgatccccagtgtccttatttgtgaatagccttgccctcccttctagaagagaatgagggaatgcgtaggaagtgcccagctgggtgctgggcagagagtggaggcttgccaagtgaaggtcccatgctggcctctctccgcccccgccccagggtgcgctagctgtggcagtggcccaggtgtgccgcgtggtacctctggtggcgggcggcatctgccagtgcctggctgagcgctactccgtcatcctgctcgacacgctgctgggccgcatgctgccccagctggtctgccgcctcgtcctccggtgctccatggatgacagcgctggcccaagtgagcccactgccccctccttagcccaatgcctgctctcctcctccccctaccctgccactgcatgaccctctccctctgtggtcccactgcaatgcaccaaggaggacagaaaccaaacacctctgtagggtggccttgcctgctttccccctaatgctcacatctccagggtcgccgacaggagaatggctgccgcgagactctgagtgccacctctgcatgtccgtgaccacccaggccgggaacagcagcgagcaggccataccacaggcaatgctccaggcctgtgttggctcctggctggacagggaaaagtgcaagcaatttgtggagcagcacacgccccagctgctgaccctggtgcccaggggctgggatgcccacaccacctgccaggccctcggggtgtgtgggaccatgtccagccctctccagtgtatccacagccccgacctttgatgagaactcagctgtccaggcaggacatacacacagtccctctctggccctcatcctcctcagctgcaaaggaaaagccaagtgagacgggctctgggaccatggtgaccaggctcttcccctgctccctggccctcgccagctgccaggctgaaaagaagcctcagctcccacaccgccctcctcaccgcccttcctcggcagtcacttccactggtggaccacgggcccccagccctgtgtcggccttgtctgtctcagctcaaccacagtctgacaccagagcccacttccatcctctctggtgtgaggcacagcgagggcagcatctggaggagctctgcagcctccacacctaccacgacctcccagggctgggctcaggaaaaaccagccactgctttacaggacagggggttgaagctgagccccgcctcacacccacccccatgcactcaaagattggattttacagctacttgcaattcaaaattcagaagaataaaaaatgggaacatacagaactctaaaagatagacatcagaaattgttaagttaagctttttcaaaaaatcagcaattccccagcgtagtcaagggtggacactgcacgctctggcatgatgggatggcgaccgggcaagctttcttcctcgagatgctctgctgcttgagagctattgctttgttaagatataaaaaggggtttctttttgtctttctgtaaggtggacttccagcttttgattgaaagtcctagggtgattctatttctgctgtgatttatctgctgaaagctcagctggggttgtgcaagctagggacccattcctgtgtaatacaatgtctgcaccaatgctaataaagtcctattctcttttatgagaaagaaaaaagacaccgtcctttaaagtgctgcagtatggccagacgtggtggctcacacctgcaatcccagcaccttaggaggccgaggcaggaggatccttgaggtcaggagttcgagaccagcctcgccaacatggtgaaaccccatttctactaaaaatacaaaaaattagccaagtgtggtggcatatgcctgtaatcccaactactcagaaggccgaggcaggagaattacttgaacgcaggagaatcactgcagcccaggaggcagaggttgcagtgagccgagattgcaccactgcactccagcctgggtgacagagcaagactccatctcagtaaataaataaataaataaaaagcgctgcagtagctgtggcctcaccctgaagtcagcgggcccaggcctacctcactctctcccttggcagagaagcagacgtccatagctcctctccctcacaagcgctcccagcctgccctccagctgctgctctcccctcccagtctctactcactgggatgaggttaggtcatgaggacaccaaaaacctaaaaataaacaaaaagccaaacaagccttagcttttcttaaagactgaaatgcctggaagagttccagaccagcctaacatggtgaaaccacatatctactaaaaaaaatacaaaattagctggatgtggtagtgcatgcctgttatcccagctacttggaaggctgagacaggagaattgcttgaacccaggaggcagaggctgcagtgagccaggattgcgccactgcactccagcctgggcaacaagagcaaaactc

SEQ ID NO: 732882 - DNA, 2843 bp, Homo sapiens
caggaggcggaggttgcagtgagccgacatcacgccactgtactctagcctgggtgacagagcaagactctgtctcaaaaaaaaagaaagaaggaaagatcactgcagagattgcagtgagaggtgatgggacagggacggagctgagggctggcctggggatgcatttgggaggtgggcccactgctattgggcatggatgggcctggagcgtgaggaccagggaggactccaaagtgacttttacacactggccagagcaaccagccctctgtaatgccagcagctgagatggggagactaaagaagaaaacaggtttgagcaaaaaaacagagagctccctcctggccatgttgagttcaagatgcctgtgtgaagtgcaggagaggagagtcaggcaagcagctgaatcccaagcattgggggaaggtcaggtccaccatgtcagtctgagagtcactagctgtgggccagagcctttggggccagacgtaggtctgaagctggctcctacactcagtgaccctgtgtgagtcccctgcatcccctggactctctgatccccagtgtccttatttgtgaatagccttgccctcccttctagaagagaatgagggaatgcgtaggaagtgcccagctgggtgctgggcagagagtggaggcttgccaagtgaaggtcccatgctggcctctctccgcccccgccccagggtgcgctagctgtggcagtggcccaggtgtgccgcgtggtacctctggtggcgggcggcatctgccagtgcctggctgagcgctactccgtcatcctgctcgacacgctgctgggccgcatgctgccccagctggtctgccgcctcgtcctccggtgctccatggatgacagcgctggcccaaggtcgccgacaggagaatggctgccgcgagactctgagtgccacctctgcatgtccgtgaccacccaggccgggaacagcagcgagcaggccataccacaggcaatgctccaggcctgtgttggctcctggctggacagggaaaagtgcaagcaatttgtggagcagcacacgccccagctgctgaccctggtgcccaggggctgggatgcccacaccacctgccaggccctcggggtgtgtgggaccatgtccagccctctccagtgtatccacagccccgacctttgatgagaactcagctgtccagctgcaaaggaaaagccaagtgagacgggctctgggaccatggtgaccaggctcttcccctgctccctggccctcgccagctgccaggctgaaaagaagcctcagctcccacaccgccctcctcaccgcccttcctcggcagtcacttccactggtggaccacgggcccccagccctgtgtcggccttgtctgtctcagctcaaccacagtctgacaccagagcccacttccatcctctctggtgtgaggcacagcgagggcagcatctggaggagctctgcagcctccacacctaccacgacctcccagggctgggctcaggaaaaaccagccactgctttacaggacagggggttgaagctgagccccgcctcacacccacccccatgcactcaaagattggattttacagctacttgcaattcaaaattcagaagaataaaaaatgggaacatacagaactctaaaagatagacatcagaaattgttaagttaagctttttcaaaaaatcagcaattccccagcgtagtcaagggtggacactgcacgctctggcatgatgggatggcgaccgggcaagctttcttcctcgagatgctctgctgcttgagagctattgctttgttaagatataaaaaggggtttctttttgtctttctgtaaggtggacttccagcttttgattgaaagtcctagggtgattctatttctgctgtgatttatctgctgaaagctcagctggggttgtgcaagctagggacccattcctgtgtaatacaatgtctgcaccaatgctaataaagtcctattctcttttatgagaaagaaaaaagacaccgtcctttaaagtgctgcagtatggccagacgtggtggctcacacctgcaatcccagcaccttaggaggccgaggcaggaggatccttgaggtcaggagttcgagaccagcctcgccaacatggtgaaaccccatttctactaaaaatacaaaaaattagccaagtgtggtggcatatgcctgtaatcccaactactcagaaggccgaggcaggagaattacttgaacgcaggagaatcactgcagcccaggaggcagaggttgcagtgagccgagattgcaccactgcactccagcctgggtgacagagcaagactccatctcagtaaataaataaataaataaaaagcgctgcagtagctgtggcctcaccctgaagtcagcgggcccaggcctacctcactctctcccttggcagagaagcagacgtccatagctcctctccctcacaagcgctcccagcctgccctccagctgctgctctcccctcccagtctctactcactgggatgaggttaggtcatgaggacaccaaaaacctaaaaataaacaaaaagccaaacaagccttagcttttcttaaagactgaaatgcctggaagagttccagaccagcctaacatggtgaaaccacatatctactaaaaaaaatacaaaattagctggatgtggtagtgcatgcctgttatcccagctacttggaaggctgagacaggagaattgcttgaacccaggaggcagaggctgcagtgagccaggattgcgccactgcactccagcctgggcaacaagagcaaaactc

SEQ ID NO: 732883 - DNA, 2015 bp, Homo sapiens
caggaggcggaggttgcagtgagccgacatcacgccactgtactctagcctgggtgacagagcaagactctgtctcaaaaaaaaagaaagaaggaaagatcactgcagagattgcagtgagaggtgatgggacagggacggagctgagggctggcctggggatgcatttgggaggtgggcccactgctattgggcatggatgggcctggagcgtgaggaccagggaggactccaaagtgacttttacacactggccagagcaaccagccctctgtaatgccagcagctgagatggggagactaaagaagaaaacaggtttgagcaaaaaaacagagagctccctcctggccatgttgagttcaagatgcctgtgtgaagtgcaggagaggagagtcaggcaagcagctgaatcccaagcattgggggaaggtcaggtccaccatgtcagtctgagagtcactagctgtgggccagagcctttggggccagacgtaggtctgaagctggctcctacactcagtgaccctgtgtgagtcccctgcatcccctggactctctgatccccagtgtccttatttgtgaatagccttgccctcccttctagaagagaatgagggaatgcgtaggaagtgcccagctgggtgctgggcagagagtggaggcttgccaagtgaaggtcccatgctggcctctctccgcccccgccccagggtgcgctagctgtggcagtggcccaggtgtgccgcgtggtacctctggtggcgggcggcatctgccagtgcctggctgagcgctactccgtcatcctgctcgacacgctgctgggccgcatgctgccccagctggtctgccgcctcgtcctccggtgctccatggatgacagcgctggcccaaggtcgccgacaggagaatggctgccgcgagactctgagtgccacctctgcatgtccgtgaccacccaggccgggaacagcagcgagcaggccataccacaggcaatgctccaggcctgtgttggctcctggctggacagggaaaagtgcaagcaatttgtggagcagcacacgccccagctgctgaccctggtgcccaggggctgggatgcccacaccacctgccaggccctcggggtgtgtgggaccatgtccagccctctccagtgtatccacagccccgacctttgatgagaactcagctgtccagaaaaagacaccgtcctttaaagtgctgcagtatggccagacgtggtggctcacacctgcaatcccagcaccttaggaggccgaggcaggaggatccttgaggtcaggagttcgagaccagcctcgccaacatggtgaaaccccatttctactaaaaatacaaaaaattagccaagtgtggtggcatatgcctgtaatcccaactactcagaaggccgaggcaggagaattacttgaacgcaggagaatcactgcagcccaggaggcagaggttgcagtgagccgagattgcaccactgcactccagcctgggtgacagagcaagactccatctcagtaaataaataaataaataaaaagcgctgcagtagctgtggcctcaccctgaagtcagcgggcccaggcctacctcactctctcccttggcagagaagcagacgtccatagctcctctccctcacaagcgctcccagcctgccctccagctgctgctctcccctcccagtctctactcactgggatgaggttaggtcatgaggacaccaaaaacctaaaaataaacaaaaagccaaacaagccttagcttttcttaaagactgaaatgcctggaagagttccagaccagcctaacatggtgaaaccacatatctactaaaaaaaatacaaaattagctggatgtggtagtgcatgcctgttatcccagctacttggaaggctgagacaggagaattgcttgaacccaggaggcagaggctgcagtgagccaggattgcgccactgcactccagcctgggcaacaagagcaaaactc

SEQ ID NO: 732884 - DNA, 2887 bp, Homo sapiens
caggaggcggaggttgcagtgagccgacatcacgccactgtactctagcctgggtgacagagcaagactctgtctcaaaaaaaaagaaagaaggaaagatcactgcagagattgcagtgagaggtgatgggacagggacggagctgagggctggcctggggatgcatttgggaggtgggcccactgctattgggcatggatgggcctggagcgtgaggaccagggaggactccaaagtgacttttacacactggccagagcaaccagccctctgtaatgccagcagctgagatggggagactaaagaagaaaacaggtttgagcaaaaaaacagagagctccctcctggccatgttgagttcaagatgcctgtgtgaagtgcaggagaggagagtcaggcaagcagctgaatcccaagcattgggggaaggtcaggtccaccatgtcagtctgagagtcactagctgtgggccagagcctttggggccagacgtaggtctgaagctggctcctacactcagtgaccctgtgtgagtcccctgcatcccctggactctctgatccccagtgtccttatttgtgaatagccttgccctcccttctagaagagaatgagggaatgcgtaggaagtgcccagctgggtgctgggcagagagtggaggcttgccaagtgaaggtcccatgctggcctctctccgcccccgccccagggtgcgctagctgtggcagtggcccaggtgtgccgcgtggtacctctggtggcgggcggcatctgccagtgcctggctgagcgctactccgtcatcctgctcgacacgctgctgggccgcatgctgccccagctggtctgccgcctcgtcctccggtgctccatggatgacagcgctggcccaaggtcgccgacaggagaatggctgccgcgagactctgagtgccacctctgcatgtccgtgaccacccaggccgggaacagcagcgagcaggccataccacaggcaatgctccaggcctgtgttggctcctggctggacagggaaaagtgcaagcaatttgtggagcagcacacgccccagctgctgaccctggtgcccaggggctgggatgcccacaccacctgccaggccctcggggtgtgtgggaccatgtccagccctctccagtgtatccacagccccgacctttgatgagaactcagctgtccaggcaggacatacacacagtccctctctggccctcatcctcctcagctgcaaaggaaaagccaagtgagacgggctctgggaccatggtgaccaggctcttcccctgctccctggccctcgccagctgccaggctgaaaagaagcctcagctcccacaccgccctcctcaccgcccttcctcggcagtcacttccactggtggaccacgggcccccagccctgtgtcggccttgtctgtctcagctcaaccacagtctgacaccagagcccacttccatcctctctggtgtgaggcacagcgagggcagcatctggaggagctctgcagcctccacacctaccacgacctcccagggctgggctcaggaaaaaccagccactgctttacaggacagggggttgaagctgagccccgcctcacacccacccccatgcactcaaagattggattttacagctacttgcaattcaaaattcagaagaataaaaaatgggaacatacagaactctaaaagatagacatcagaaattgttaagttaagctttttcaaaaaatcagcaattccccagcgtagtcaagggtggacactgcacgctctggcatgatgggatggcgaccgggcaagctttcttcctcgagatgctctgctgcttgagagctattgctttgttaagatataaaaaggggtttctttttgtctttctgtaaggtggacttccagcttttgattgaaagtcctagggtgattctatttctgctgtgatttatctgctgaaagctcagctggggttgtgcaagctagggacccattcctgtgtaatacaatgtctgcaccaatgctaataaagtcctattctcttttatgagaaagaaaaaagacaccgtcctttaaagtgctgcagtatggccagacgtggtggctcacacctgcaatcccagcaccttaggaggccgaggcaggaggatccttgaggtcaggagttcgagaccagcctcgccaacatggtgaaaccccatttctactaaaaatacaaaaaattagccaagtgtggtggcatatgcctgtaatcccaactactcagaaggccgaggcaggagaattacttgaacgcaggagaatcactgcagcccaggaggcagaggttgcagtgagccgagattgcaccactgcactccagcctgggtgacagagcaagactccatctcagtaaataaataaataaataaaaagcgctgcagtagctgtggcctcaccctgaagtcagcgggcccaggcctacctcactctctcccttggcagagaagcagacgtccatagctcctctccctcacaagcgctcccagcctgccctccagctgctgctctcccctcccagtctctactcactgggatgaggttaggtcatgaggacaccaaaaacctaaaaataaacaaaaagccaaacaagccttagcttttcttaaagactgaaatgcctggaagagttccagaccagcctaacatggtgaaaccacatatctactaaaaaaaatacaaaattagctggatgtggtagtgcatgcctgttatcccagctacttggaaggctgagacaggagaattgcttgaacccaggaggcagaggctgcagtgagccaggattgcgccactgcactccagcctgggcaacaagagcaaaactc

SEQ ID NO: 732885 - DNA, 1308 bp, Homo sapiens
agcccccacgccccgcccagctataaggggccatgcaccaagcagggtacccaggctgcagaggtgccatggctgagtcacacctgctgcagtggctgctgctgctgctgcccacgctctgtggcccaggcactgctgcctggaccacctcatccttggcctgtgcccagggccctgagttctggtgccaaagcctggagcaagcattgcagtgcagagccctagggcattgcctacaggaagtctggggacatgtgggagccgatgacctatgccaagagtgtgaggacatcgtccacatccttaacaagatggccaaggaggccattttccaggacacgatgaggaagttcctggagcaggagtgcaacgtcctccccttgaagctgctcatgccccagtgcaaccaagtgcttgacgactacttccccctggtcatcgactacttccagaaccagattgactcaaacggcatctgtatgcacctgggcctgtgcaaatcccggcagccagagccagagcaggagccagggatgtcagaccccctgcccaaacctctgcgggaccctctgccagaccctctgctggacaagctcgtcctccctgtgctgcccggggccctccaggcgaggcctgggcctcacacacaggatctctccgagcagcaattccccattcctctcccctattgctggctctgcagggctctgatcaagcggatccaagccatgattcccaagggtgcgctagctgtggcagtggcccaggtgtgccgcgtggtacctctggtggcgggcggcatctgccagtgcctggctgagcgctactccgtcatcctgctcgacacgctgctgggccgcatgctgccccagctggtctgccgcctcgtcctccggtgctccatggatgacagcgctggcccaagtgagcccactgccccctccttagcccaatgcctgctctcctcctccccctaccctgccactgcatgaccctctccctctgtggtcccactgcaatgcaccaaggaggacagaaaccaaacacctctgtagggtggccttgcctgctttccccctaatgctcacatctccagggtcgccgacaggagaatggctgccgcgagactctgagtgccacctctgcatgtccgtgaccacccaggccgggaacagcagcgagcaggccataccacaggcaatgctccaggcctgtgttggctcctggctggacagggaaaagctggctccagtttgttaagggtttcaactgcagccagaggtgttccgtgagggctgatggaggagt

SEQ ID NO: 732886 - DNA, 3044 bp, Homo sapiens
agcccccacgccccgcccagctataaggggccatgcaccaagcagggtacccaggctgcagaggtgccatggctgagtcacacctgctgcagtggctgctgctgctgctgcccacgctctgtggcccaggcactgctgcctggaccacctcatccttggcctgtgcccagggccctgagttctggtgccaaagcctggagcaagcattgcagtgcagagccctagggcattgcctacaggaagtctggggacatgtgggagccgatgacctatgccaagagtgtgaggacatcgtccacatccttaacaagatggccaaggaggccattttccaggacacgatgaggaagttcctggagcaggagtgcaacgtcctccccttgaagctgctcatgccccagtgcaaccaagtgcttgacgactacttccccctggtcatcgactacttccagaaccagattgactcaaacggcatctgtatgcacctgggcctgtgcaaatcccggcagccagagccagagcaggagccagggatgtcagaccccctgcccaaacctctgcgggaccctctgccagaccctctgctggacaagctcgtcctccctgtgctgcccggggccctccaggcgaggcctgggcctcacacacaggatctctccgagcagcaattccccattcctctcccctattgctggctctgcagggctctgatcaagcggatccaagccatgattcccaagggtgcgctagctgtggcagtggcccaggtgtgccgcgtggtacctctggtggcgggcggcatctgccagtgcctggctgagcgctactccgtcatcctgctcgacacgctgctgggccgcatgctgccccagctggtctgccgcctcgtcctccggtgctccatggatgacagcgctggcccaagtgagcccactgccccctccttagcccaatgcctgctctcctcctccccctaccctgccactgcatgaccctctccctctgtggtcccactgcaatgcaccaaggaggacagaaaccaaacacctctgtagggtggccttgcctgctttccccctaatgctcacatctccagggtcgccgacaggagaatggctgccgcgagactctgagtgccacctctgcatgtccgtgaccacccaggccgggaacagcagcgagcaggccataccacaggcaatgctccaggcctgtgttggctcctggctggacagggaaaagtgcaagcaatttgtggagcagcacacgccccagctgctgaccctggtgcccaggggctgggatgcccacaccacctgccaggccctcggggtgtgtgggaccatgtccagccctctccagtgtatccacagccccgacctttgatgagaactcagctgtccagctgcaaaggaaaagccaagtgagacgggctctgggaccatggtgaccaggctcttcccctgctccctggccctcgccagctgccaggctgaaaagaagcctcagctcccacaccgccctcctcaccgcccttcctcggcagtcacttccactggtggaccacgggcccccagccctgtgtcggccttgtctgtctcagctcaaccacagtctgacaccagagcccacttccatcctctctggtgtgaggcacagcgagggcagcatctggaggagctctgcagcctccacacctaccacgacctcccagggctgggctcaggaaaaaccagccactgctttacaggacagggggttgaagctgagccccgcctcacacccacccccatgcactcaaagattggattttacagctacttgcaattcaaaattcagaagaataaaaaatgggaacatacagaactctaaaagatagacatcagaaattgttaagttaagctttttcaaaaaatcagcaattccccagcgtagtcaagggtggacactgcacgctctggcatgatgggatggcgaccgggcaagctttcttcctcgagatgctctgctgcttgagagctattgctttgttaagatataaaaaggggtttctttttgtctttctgtaaggtggacttccagcttttgattgaaagtcctagggtgattctatttctgctgtgatttatctgctgaaagctcagctggggttgtgcaagctagggacccattcctgtgtaatacaatgtctgcaccaatgctaataaagtcctattctcttttatgagaaagaaaaaagacaccgtcctttaaagtgctgcagtatggccagacgtggtggctcacacctgcaatcccagcaccttaggaggccgaggcaggaggatccttgaggtcaggagttcgagaccagcctcgccaacatggtgaaaccccatttctactaaaaatacaaaaaattagccaagtgtggtggcatatgcctgtaatcccaactactcagaaggccgaggcaggagaattacttgaacgcaggagaatcactgcagcccaggaggcagaggttgcagtgagccgagattgcaccactgcactccagcctgggtgacagagcaagactccatctcagtaaataaataaataaataaaaagcgctgcagtagctgtggcctcaccctgaagtcagcgggcccaggcctacctcactctctcccttggcagagaagcagacgtccatagctcctctccctcacaagcgctcccagcctgccctccagctgctgctctcccctcccagtctctactcactgggatgaggttaggtcatgaggacaccaaaaacctaaaaataaacaaaaagccaaacaagccttagcttttcttaaagactgaaatgcctggaagagttccagaccagcctaacatggtgaaaccacatatctactaaaaaaaatacaaaattagctggatgtggtagtgcatgcctgttatcccagctacttggaaggctgagacaggagaattgcttgaacccaggaggcagaggctgcagtgagccaggattgcgccactgcactccagcctgggcaacaagagcaaaactc

SEQ ID NO: 732887 - DNA, 2216 bp, Homo sapiens
agcccccacgccccgcccagctataaggggccatgcaccaagcagggtacccaggctgcagaggtgccatggctgagtcacacctgctgcagtggctgctgctgctgctgcccacgctctgtggcccaggcactgctgcctggaccacctcatccttggcctgtgcccagggccctgagttctggtgccaaagcctggagcaagcattgcagtgcagagccctagggcattgcctacaggaagtctggggacatgtgggagccgatgacctatgccaagagtgtgaggacatcgtccacatccttaacaagatggccaaggaggccattttccaggacacgatgaggaagttcctggagcaggagtgcaacgtcctccccttgaagctgctcatgccccagtgcaaccaagtgcttgacgactacttccccctggtcatcgactacttccagaaccagattgactcaaacggcatctgtatgcacctgggcctgtgcaaatcccggcagccagagccagagcaggagccagggatgtcagaccccctgcccaaacctctgcgggaccctctgccagaccctctgctggacaagctcgtcctccctgtgctgcccggggccctccaggcgaggcctgggcctcacacacaggatctctccgagcagcaattccccattcctctcccctattgctggctctgcagggctctgatcaagcggatccaagccatgattcccaagggtgcgctagctgtggcagtggcccaggtgtgccgcgtggtacctctggtggcgggcggcatctgccagtgcctggctgagcgctactccgtcatcctgctcgacacgctgctgggccgcatgctgccccagctggtctgccgcctcgtcctccggtgctccatggatgacagcgctggcccaagtgagcccactgccccctccttagcccaatgcctgctctcctcctccccctaccctgccactgcatgaccctctccctctgtggtcccactgcaatgcaccaaggaggacagaaaccaaacacctctgtagggtggccttgcctgctttccccctaatgctcacatctccagggtcgccgacaggagaatggctgccgcgagactctgagtgccacctctgcatgtccgtgaccacccaggccgggaacagcagcgagcaggccataccacaggcaatgctccaggcctgtgttggctcctggctggacagggaaaagtgcaagcaatttgtggagcagcacacgccccagctgctgaccctggtgcccaggggctgggatgcccacaccacctgccaggccctcggggtgtgtgggaccatgtccagccctctccagtgtatccacagccccgacctttgatgagaactcagctgtccagaaaaagacaccgtcctttaaagtgctgcagtatggccagacgtggtggctcacacctgcaatcccagcaccttaggaggccgaggcaggaggatccttgaggtcaggagttcgagaccagcctcgccaacatggtgaaaccccatttctactaaaaatacaaaaaattagccaagtgtggtggcatatgcctgtaatcccaactactcagaaggccgaggcaggagaattacttgaacgcaggagaatcactgcagcccaggaggcagaggttgcagtgagccgagattgcaccactgcactccagcctgggtgacagagcaagactccatctcagtaaataaataaataaataaaaagcgctgcagtagctgtggcctcaccctgaagtcagcgggcccaggcctacctcactctctcccttggcagagaagcagacgtccatagctcctctccctcacaagcgctcccagcctgccctccagctgctgctctcccctcccagtctctactcactgggatgaggttaggtcatgaggacaccaaaaacctaaaaataaacaaaaagccaaacaagccttagcttttcttaaagactgaaatgcctggaagagttccagaccagcctaacatggtgaaaccacatatctactaaaaaaaatacaaaattagctggatgtggtagtgcatgcctgttatcccagctacttggaaggctgagacaggagaattgcttgaacccaggaggcagaggctgcagtgagccaggattgcgccactgcactccagcctgggcaacaagagcaaaactc

SEQ ID NO: 732888 - DNA, 3088 bp, Homo sapiens
agcccccacgccccgcccagctataaggggccatgcaccaagcagggtacccaggctgcagaggtgccatggctgagtcacacctgctgcagtggctgctgctgctgctgcccacgctctgtggcccaggcactgctgcctggaccacctcatccttggcctgtgcccagggccctgagttctggtgccaaagcctggagcaagcattgcagtgcagagccctagggcattgcctacaggaagtctggggacatgtgggagccgatgacctatgccaagagtgtgaggacatcgtccacatccttaacaagatggccaaggaggccattttccaggacacgatgaggaagttcctggagcaggagtgcaacgtcctccccttgaagctgctcatgccccagtgcaaccaagtgcttgacgactacttccccctggtcatcgactacttccagaaccagattgactcaaacggcatctgtatgcacctgggcctgtgcaaatcccggcagccagagccagagcaggagccagggatgtcagaccccctgcccaaacctctgcgggaccctctgccagaccctctgctggacaagctcgtcctccctgtgctgcccggggccctccaggcgaggcctgggcctcacacacaggatctctccgagcagcaattccccattcctctcccctattgctggctctgcagggctctgatcaagcggatccaagccatgattcccaagggtgcgctagctgtggcagtggcccaggtgtgccgcgtggtacctctggtggcgggcggcatctgccagtgcctggctgagcgctactccgtcatcctgctcgacacgctgctgggccgcatgctgccccagctggtctgccgcctcgtcctccggtgctccatggatgacagcgctggcccaagtgagcccactgccccctccttagcccaatgcctgctctcctcctccccctaccctgccactgcatgaccctctccctctgtggtcccactgcaatgcaccaaggaggacagaaaccaaacacctctgtagggtggccttgcctgctttccccctaatgctcacatctccagggtcgccgacaggagaatggctgccgcgagactctgagtgccacctctgcatgtccgtgaccacccaggccgggaacagcagcgagcaggccataccacaggcaatgctccaggcctgtgttggctcctggctggacagggaaaagtgcaagcaatttgtggagcagcacacgccccagctgctgaccctggtgcccaggggctgggatgcccacaccacctgccaggccctcggggtgtgtgggaccatgtccagccctctccagtgtatccacagccccgacctttgatgagaactcagctgtccaggcaggacatacacacagtccctctctggccctcatcctcctcagctgcaaaggaaaagccaagtgagacgggctctgggaccatggtgaccaggctcttcccctgctccctggccctcgccagctgccaggctgaaaagaagcctcagctcccacaccgccctcctcaccgcccttcctcggcagtcacttccactggtggaccacgggcccccagccctgtgtcggccttgtctgtctcagctcaaccacagtctgacaccagagcccacttccatcctctctggtgtgaggcacagcgagggcagcatctggaggagctctgcagcctccacacctaccacgacctcccagggctgggctcaggaaaaaccagccactgctttacaggacagggggttgaagctgagccccgcctcacacccacccccatgcactcaaagattggattttacagctacttgcaattcaaaattcagaagaataaaaaatgggaacatacagaactctaaaagatagacatcagaaattgttaagttaagctttttcaaaaaatcagcaattccccagcgtagtcaagggtggacactgcacgctctggcatgatgggatggcgaccgggcaagctttcttcctcgagatgctctgctgcttgagagctattgctttgttaagatataaaaaggggtttctttttgtctttctgtaaggtggacttccagcttttgattgaaagtcctagggtgattctatttctgctgtgatttatctgctgaaagctcagctggggttgtgcaagctagggacccattcctgtgtaatacaatgtctgcaccaatgctaataaagtcctattctcttttatgagaaagaaaaaagacaccgtcctttaaagtgctgcagtatggccagacgtggtggctcacacctgcaatcccagcaccttaggaggccgaggcaggaggatccttgaggtcaggagttcgagaccagcctcgccaacatggtgaaaccccatttctactaaaaatacaaaaaattagccaagtgtggtggcatatgcctgtaatcccaactactcagaaggccgaggcaggagaattacttgaacgcaggagaatcactgcagcccaggaggcagaggttgcagtgagccgagattgcaccactgcactccagcctgggtgacagagcaagactccatctcagtaaataaataaataaataaaaagcgctgcagtagctgtggcctcaccctgaagtcagcgggcccaggcctacctcactctctcccttggcagagaagcagacgtccatagctcctctccctcacaagcgctcccagcctgccctccagctgctgctctcccctcccagtctctactcactgggatgaggttaggtcatgaggacaccaaaaacctaaaaataaacaaaaagccaaacaagccttagcttttcttaaagactgaaatgcctggaagagttccagaccagcctaacatggtgaaaccacatatctactaaaaaaaatacaaaattagctggatgtggtagtgcatgcctgttatcccagctacttggaaggctgagacaggagaattgcttgaacccaggaggcagaggctgcagtgagccaggattgcgccactgcactccagcctgggcaacaagagcaaaactc

SEQ ID NO: 732889 - DNA, 1686 bp, Homo sapiens
gtctctagagttccctgcagctctctgatgacaactctgctgtccagctgcaaaggaaaagccaagtgagacgggctctgggaccatggtgaccaggctcttcccctgctccctggccctcgccagctgccaggctgaaaagaagcctcagctcccacaccgccctcctcaccgcccttcctcggcagtcacttccactggtggaccacgggcccccagccctgtgtcggccttgtctgtctcagctcaaccacagtctgacaccagagcccacttccatcctctctggtgtgaggcacagcgagggcagcatctggaggagctctgcagcctccacacctaccacgacctcccagggctgggctcaggaaaaaccagccactgctttacaggacagggggttgaagctgagccccgcctcacacccacccccatgcactcaaagattggattttacagctacttgcaattcaaaattcagaagaataaaaaatgggaacatacagaactctaaaagatagacatcagaaattgttaagttaagctttttcaaaaaatcagcaattccccagcgtagtcaagggtggacactgcacgctctggcatgatgggatggcgaccgggcaagctttcttcctcgagatgctctgctgcttgagagctattgctttgttaagatataaaaaggggtttctttttgtctttctgtaaggtggacttccagcttttgattgaaagtcctagggtgattctatttctgctgtgatttatctgctgaaagctcagctggggttgtgcaagctagggacccattcctgtgtaatacaatgtctgcaccaatgctaataaagtcctattctcttttatgagaaagaaaaaagacaccgtcctttaaagtgctgcagtatggccagacgtggtggctcacacctgcaatcccagcaccttaggaggccgaggcaggaggatccttgaggtcaggagttcgagaccagcctcgccaacatggtgaaaccccatttctactaaaaatacaaaaaattagccaagtgtggtggcatatgcctgtaatcccaactactcagaaggccgaggcaggagaattacttgaacgcaggagaatcactgcagcccaggaggcagaggttgcagtgagccgagattgcaccactgcactccagcctgggtgacagagcaagactccatctcagtaaataaataaataaataaaaagcgctgcagtagctgtggcctcaccctgaagtcagcgggcccaggcctacctcactctctcccttggcagagaagcagacgtccatagctcctctccctcacaagcgctcccagcctgccctccagctgctgctctcccctcccagtctctactcactgggatgaggttaggtcatgaggacaccaaaaacctaaaaataaacaaaaagccaaacaagccttagcttttcttaaagactgaaatgcctggaagagttccagaccagcctaacatggtgaaaccacatatctactaaaaaaaatacaaaattagctggatgtggtagtgcatgcctgttatcccagctacttggaaggctgagacaggagaattgcttgaacccaggaggcagaggctgcagtgagccaggattgcgccactgcactccagcctgggcaacaagagcaaaactc

SEQ ID NO: 732890 - DNA, 2015 bp, Homo sapiens
ggagctcacagccaagtccacttcttccatctgaggcggggaagccagccctgttcctgaaaccctgcatcacaagcccctgtgggaggcagtggggaggggaggtcctcccccactcagacctgacccacagggaccagtttaatgtgtccttgccccagtgatgacagctggggatctgggggtggggagtcacccaggacccgggcagtcgcctttccccagctcctagggctcccggccttccctgctgaaacagcaagaccagtgggttggcgtgggaggcctgggcttcaaaccacctctgctatcacctggctgtgggtccccaggcaggacatacacacagtccctctctggccctcatcctcctcagctgcaaaggaaaagccaagtgagacgggctctgggaccatggtgaccaggctcttcccctgctccctggccctcgccagctgccaggctgaaaagaagcctcagctcccacaccgccctcctcaccgcccttcctcggcagtcacttccactggtggaccacgggcccccagccctgtgtcggccttgtctgtctcagctcaaccacagtctgacaccagagcccacttccatcctctctggtgtgaggcacagcgagggcagcatctggaggagctctgcagcctccacacctaccacgacctcccagggctgggctcaggaaaaaccagccactgctttacaggacagggggttgaagctgagccccgcctcacacccacccccatgcactcaaagattggattttacagctacttgcaattcaaaattcagaagaataaaaaatgggaacatacagaactctaaaagatagacatcagaaattgttaagttaagctttttcaaaaaatcagcaattccccagcgtagtcaagggtggacactgcacgctctggcatgatgggatggcgaccgggcaagctttcttcctcgagatgctctgctgcttgagagctattgctttgttaagatataaaaaggggtttctttttgtctttctgtaaggtggacttccagcttttgattgaaagtcctagggtgattctatttctgctgtgatttatctgctgaaagctcagctggggttgtgcaagctagggacccattcctgtgtaatacaatgtctgcaccaatgctaataaagtcctattctcttttatgagaaagaaaaaagacaccgtcctttaaagtgctgcagtatggccagacgtggtggctcacacctgcaatcccagcaccttaggaggccgaggcaggaggatccttgaggtcaggagttcgagaccagcctcgccaacatggtgaaaccccatttctactaaaaatacaaaaaattagccaagtgtggtggcatatgcctgtaatcccaactactcagaaggccgaggcaggagaattacttgaacgcaggagaatcactgcagcccaggaggcagaggttgcagtgagccgagattgcaccactgcactccagcctgggtgacagagcaagactccatctcagtaaataaataaataaataaaaagcgctgcagtagctgtggcctcaccctgaagtcagcgggcccaggcctacctcactctctcccttggcagagaagcagacgtccatagctcctctccctcacaagcgctcccagcctgccctccagctgctgctctcccctcccagtctctactcactgggatgaggttaggtcatgaggacaccaaaaacctaaaaataaacaaaaagccaaacaagccttagcttttcttaaagactgaaatgcctggaagagttccagaccagcctaacatggtgaaaccacatatctactaaaaaaaatacaaaattagctggatgtggtagtgcatgcctgttatcccagctacttggaaggctgagacaggagaattgcttgaacccaggaggcagaggctgcagtgagccaggattgcgccactgcactccagcctgggcaacaagagcaaaactc

SEQ ID NO: 732891 - DNA, 2006 bp, Homo sapiens
gaggagtgcggctggatgtccattataggatggggctgtgttccctggccagtgtgtgctggtggggtgggggtacaaagtgggtgttctggagtgaacatctcacctcctcaggctctaaaccctaaggcctgtggctcagggagtggcccgaggggtctacagagtcacactggtagcacccactaggcgggaggtggagtgagtgctgttctttcccggaagagctgggtgtggggagctgagggggcccaggcctcagccctggtgctgtccctgtgacaggccctcggggtgtgtgggaccatgtccagccctctccagtgtatccacagccccgacctttgatgagaactcagctgtccagctgcaaaggaaaagccaagtgagacgggctctgggaccatggtgaccaggctcttcccctgctccctggccctcgccagctgccaggctgaaaagaagcctcagctcccacaccgccctcctcaccgcccttcctcggcagtcacttccactggtggaccacgggcccccagccctgtgtcggccttgtctgtctcagctcaaccacagtctgacaccagagcccacttccatcctctctggtgtgaggcacagcgagggcagcatctggaggagctctgcagcctccacacctaccacgacctcccagggctgggctcaggaaaaaccagccactgctttacaggacagggggttgaagctgagccccgcctcacacccacccccatgcactcaaagattggattttacagctacttgcaattcaaaattcagaagaataaaaaatgggaacatacagaactctaaaagatagacatcagaaattgttaagttaagctttttcaaaaaatcagcaattccccagcgtagtcaagggtggacactgcacgctctggcatgatgggatggcgaccgggcaagctttcttcctcgagatgctctgctgcttgagagctattgctttgttaagatataaaaaggggtttctttttgtctttctgtaaggtggacttccagcttttgattgaaagtcctagggtgattctatttctgctgtgatttatctgctgaaagctcagctggggttgtgcaagctagggacccattcctgtgtaatacaatgtctgcaccaatgctaataaagtcctattctcttttatgagaaagaaaaaagacaccgtcctttaaagtgctgcagtatggccagacgtggtggctcacacctgcaatcccagcaccttaggaggccgaggcaggaggatccttgaggtcaggagttcgagaccagcctcgccaacatggtgaaaccccatttctactaaaaatacaaaaaattagccaagtgtggtggcatatgcctgtaatcccaactactcagaaggccgaggcaggagaattacttgaacgcaggagaatcactgcagcccaggaggcagaggttgcagtgagccgagattgcaccactgcactccagcctgggtgacagagcaagactccatctcagtaaataaataaataaataaaaagcgctgcagtagctgtggcctcaccctgaagtcagcgggcccaggcctacctcactctctcccttggcagagaagcagacgtccatagctcctctccctcacaagcgctcccagcctgccctccagctgctgctctcccctcccagtctctactcactgggatgaggttaggtcatgaggacaccaaaaacctaaaaataaacaaaaagccaaacaagccttagcttttcttaaagactgaaatgcctggaagagttccagaccagcctaacatggtgaaaccacatatctactaaaaaaaatacaaaattagctggatgtggtagtgcatgcctgttatcccagctacttggaaggctgagacaggagaattgcttgaacccaggaggcagaggctgcagtgagccaggattgcgccactgcactccagcctgggcaacaagagcaaaactc

SEQ ID NO: 732892 - DNA, 2900 bp, Homo sapiens
gacacatacccacacagtaccccagccagccagacacacacacacacacacacacacacacacacacagcacacacacagcaccccagctggccacacacacacacacacacaccctgtccacaaagggcctaggaaactacgtgcccttcagccatgcacccgaccatgggcccccaggttcaggtgcacacggtgggcctgtacgctcacacacccttacaccctcactctcacacacatgcttacacacttattcattctcacatatatgctcatgctcattcacacacaatcccggccacctgccctaaagtccccacacagccctatctttgccttttgtccccccacatagagttctaaaccacagcacccccactaggcctgcttcctcccattccagtggtccctgagcccttgggccggcctgaataggggtgggcttccctcccagaccctaacactcccaccctgtgctgtgccccaggactcaaacggcatctgtatgcacctgggcctgtgcaaatcccggcagccagagccagagcaggagccagggatgtcagaccccctgcccaaacctctgcgggaccctctgccagaccctctgctggacaagctcgtcctccctgtgctgcccggggccctccaggcgaggcctgggcctcacacacaggatctctccgagcagcaattccccattcctctcccctattgctggctctgcagggctctgatcaagcggatccaagccatgattcccaagggtgcgctagctgtggcagtggcccaggtgtgccgcgtggtacctctggtggcgggcggcatctgccagtgcctggctgagcgctactccgtcatcctgctcgacacgctgctgggccgcatgctgccccagctggtctgccgcctcgtcctccggtgctccatggatgacagcgctggcccaaggtcgccgacaggagaatggctgccgcgagactctgagtgccacctctgcatgtccgtgaccacccaggccgggaacagcagcgagcaggccataccacaggcaatgctccaggcctgtgttggctcctggctggacagggaaaagtgcaagcaatttgtggagcagcacacgccccagctgctgaccctggtgcccaggggctgggatgcccacaccacctgccaggccctcggggtgtgtgggaccatgtccagccctctccagtgtatccacagccccgacctttgatgagaactcagctgtccagctgcaaaggaaaagccaagtgagacgggctctgggaccatggtgaccaggctcttcccctgctccctggccctcgccagctgccaggctgaaaagaagcctcagctcccacaccgccctcctcaccgcccttcctcggcagtcacttccactggtggaccacgggcccccagccctgtgtcggccttgtctgtctcagctcaaccacagtctgacaccagagcccacttccatcctctctggtgtgaggcacagcgagggcagcatctggaggagctctgcagcctccacacctaccacgacctcccagggctgggctcaggaaaaaccagccactgctttacaggacagggggttgaagctgagccccgcctcacacccacccccatgcactcaaagattggattttacagctacttgcaattcaaaattcagaagaataaaaaatgggaacatacagaactctaaaagatagacatcagaaattgttaagttaagctttttcaaaaaatcagcaattccccagcgtagtcaagggtggacactgcacgctctggcatgatgggatggcgaccgggcaagctttcttcctcgagatgctctgctgcttgagagctattgctttgttaagatataaaaaggggtttctttttgtctttctgtaaggtggacttccagcttttgattgaaagtcctagggtgattctatttctgctgtgatttatctgctgaaagctcagctggggttgtgcaagctagggacccattcctgtgtaatacaatgtctgcaccaatgctaataaagtcctattctcttttatgagaaagaaaaaagacaccgtcctttaaagtgctgcagtatggccagacgtggtggctcacacctgcaatcccagcaccttaggaggccgaggcaggaggatccttgaggtcaggagttcgagaccagcctcgccaacatggtgaaaccccatttctactaaaaatacaaaaaattagccaagtgtggtggcatatgcctgtaatcccaactactcagaaggccgaggcaggagaattacttgaacgcaggagaatcactgcagcccaggaggcagaggttgcagtgagccgagattgcaccactgcactccagcctgggtgacagagcaagactccatctcagtaaataaataaataaataaaaagcgctgcagtagctgtggcctcaccctgaagtcagcgggcccaggcctacctcactctctcccttggcagagaagcagacgtccatagctcctctccctcacaagcgctcccagcctgccctccagctgctgctctcccctcccagtctctactcactgggatgaggttaggtcatgaggacaccaaaaacctaaaaataaacaaaaagccaaacaagccttagcttttcttaaagactgaaatgcctggaagagttccagaccagcctaacatggtgaaaccacatatctactaaaaaaaatacaaaattagctggatgtggtagtgcatgcctgttatcccagctacttggaaggctgagacaggagaattgcttgaacccaggaggcagaggctgcagtgagccaggattgcgccactgcactccagcctgggcaacaagagcaaaactc

SEQ ID NO: 732893 - DNA, 2072 bp, Homo sapiens
gacacatacccacacagtaccccagccagccagacacacacacacacacacacacacacacacacacagcacacacacagcaccccagctggccacacacacacacacacacaccctgtccacaaagggcctaggaaactacgtgcccttcagccatgcacccgaccatgggcccccaggttcaggtgcacacggtgggcctgtacgctcacacacccttacaccctcactctcacacacatgcttacacacttattcattctcacatatatgctcatgctcattcacacacaatcccggccacctgccctaaagtccccacacagccctatctttgccttttgtccccccacatagagttctaaaccacagcacccccactaggcctgcttcctcccattccagtggtccctgagcccttgggccggcctgaataggggtgggcttccctcccagaccctaacactcccaccctgtgctgtgccccaggactcaaacggcatctgtatgcacctgggcctgtgcaaatcccggcagccagagccagagcaggagccagggatgtcagaccccctgcccaaacctctgcgggaccctctgccagaccctctgctggacaagctcgtcctccctgtgctgcccggggccctccaggcgaggcctgggcctcacacacaggatctctccgagcagcaattccccattcctctcccctattgctggctctgcagggctctgatcaagcggatccaagccatgattcccaagggtgcgctagctgtggcagtggcccaggtgtgccgcgtggtacctctggtggcgggcggcatctgccagtgcctggctgagcgctactccgtcatcctgctcgacacgctgctgggccgcatgctgccccagctggtctgccgcctcgtcctccggtgctccatggatgacagcgctggcccaaggtcgccgacaggagaatggctgccgcgagactctgagtgccacctctgcatgtccgtgaccacccaggccgggaacagcagcgagcaggccataccacaggcaatgctccaggcctgtgttggctcctggctggacagggaaaagtgcaagcaatttgtggagcagcacacgccccagctgctgaccctggtgcccaggggctgggatgcccacaccacctgccaggccctcggggtgtgtgggaccatgtccagccctctccagtgtatccacagccccgacctttgatgagaactcagctgtccagaaaaagacaccgtcctttaaagtgctgcagtatggccagacgtggtggctcacacctgcaatcccagcaccttaggaggccgaggcaggaggatccttgaggtcaggagttcgagaccagcctcgccaacatggtgaaaccccatttctactaaaaatacaaaaaattagccaagtgtggtggcatatgcctgtaatcccaactactcagaaggccgaggcaggagaattacttgaacgcaggagaatcactgcagcccaggaggcagaggttgcagtgagccgagattgcaccactgcactccagcctgggtgacagagcaagactccatctcagtaaataaataaataaataaaaagcgctgcagtagctgtggcctcaccctgaagtcagcgggcccaggcctacctcactctctcccttggcagagaagcagacgtccatagctcctctccctcacaagcgctcccagcctgccctccagctgctgctctcccctcccagtctctactcactgggatgaggttaggtcatgaggacaccaaaaacctaaaaataaacaaaaagccaaacaagccttagcttttcttaaagactgaaatgcctggaagagttccagaccagcctaacatggtgaaaccacatatctactaaaaaaaatacaaaattagctggatgtggtagtgcatgcctgttatcccagctacttggaaggctgagacaggagaattgcttgaacccaggaggcagaggctgcagtgagccaggattgcgccactgcactccagcctgggcaacaagagcaaaactc

SEQ ID NO: 732894 - DNA, 2944 bp, Homo sapiens
gacacatacccacacagtaccccagccagccagacacacacacacacacacacacacacacacacacagcacacacacagcaccccagctggccacacacacacacacacacaccctgtccacaaagggcctaggaaactacgtgcccttcagccatgcacccgaccatgggcccccaggttcaggtgcacacggtgggcctgtacgctcacacacccttacaccctcactctcacacacatgcttacacacttattcattctcacatatatgctcatgctcattcacacacaatcccggccacctgccctaaagtccccacacagccctatctttgccttttgtccccccacatagagttctaaaccacagcacccccactaggcctgcttcctcccattccagtggtccctgagcccttgggccggcctgaataggggtgggcttccctcccagaccctaacactcccaccctgtgctgtgccccaggactcaaacggcatctgtatgcacctgggcctgtgcaaatcccggcagccagagccagagcaggagccagggatgtcagaccccctgcccaaacctctgcgggaccctctgccagaccctctgctggacaagctcgtcctccctgtgctgcccggggccctccaggcgaggcctgggcctcacacacaggatctctccgagcagcaattccccattcctctcccctattgctggctctgcagggctctgatcaagcggatccaagccatgattcccaagggtgcgctagctgtggcagtggcccaggtgtgccgcgtggtacctctggtggcgggcggcatctgccagtgcctggctgagcgctactccgtcatcctgctcgacacgctgctgggccgcatgctgccccagctggtctgccgcctcgtcctccggtgctccatggatgacagcgctggcccaaggtcgccgacaggagaatggctgccgcgagactctgagtgccacctctgcatgtccgtgaccacccaggccgggaacagcagcgagcaggccataccacaggcaatgctccaggcctgtgttggctcctggctggacagggaaaagtgcaagcaatttgtggagcagcacacgccccagctgctgaccctggtgcccaggggctgggatgcccacaccacctgccaggccctcggggtgtgtgggaccatgtccagccctctccagtgtatccacagccccgacctttgatgagaactcagctgtccaggcaggacatacacacagtccctctctggccctcatcctcctcagctgcaaaggaaaagccaagtgagacgggctctgggaccatggtgaccaggctcttcccctgctccctggccctcgccagctgccaggctgaaaagaagcctcagctcccacaccgccctcctcaccgcccttcctcggcagtcacttccactggtggaccacgggcccccagccctgtgtcggccttgtctgtctcagctcaaccacagtctgacaccagagcccacttccatcctctctggtgtgaggcacagcgagggcagcatctggaggagctctgcagcctccacacctaccacgacctcccagggctgggctcaggaaaaaccagccactgctttacaggacagggggttgaagctgagccccgcctcacacccacccccatgcactcaaagattggattttacagctacttgcaattcaaaattcagaagaataaaaaatgggaacatacagaactctaaaagatagacatcagaaattgttaagttaagctttttcaaaaaatcagcaattccccagcgtagtcaagggtggacactgcacgctctggcatgatgggatggcgaccgggcaagctttcttcctcgagatgctctgctgcttgagagctattgctttgttaagatataaaaaggggtttctttttgtctttctgtaaggtggacttccagcttttgattgaaagtcctagggtgattctatttctgctgtgatttatctgctgaaagctcagctggggttgtgcaagctagggacccattcctgtgtaatacaatgtctgcaccaatgctaataaagtcctattctcttttatgagaaagaaaaaagacaccgtcctttaaagtgctgcagtatggccagacgtggtggctcacacctgcaatcccagcaccttaggaggccgaggcaggaggatccttgaggtcaggagttcgagaccagcctcgccaacatggtgaaaccccatttctactaaaaatacaaaaaattagccaagtgtggtggcatatgcctgtaatcccaactactcagaaggccgaggcaggagaattacttgaacgcaggagaatcactgcagcccaggaggcagaggttgcagtgagccgagattgcaccactgcactccagcctgggtgacagagcaagactccatctcagtaaataaataaataaataaaaagcgctgcagtagctgtggcctcaccctgaagtcagcgggcccaggcctacctcactctctcccttggcagagaagcagacgtccatagctcctctccctcacaagcgctcccagcctgccctccagctgctgctctcccctcccagtctctactcactgggatgaggttaggtcatgaggacaccaaaaacctaaaaataaacaaaaagccaaacaagccttagcttttcttaaagactgaaatgcctggaagagttccagaccagcctaacatggtgaaaccacatatctactaaaaaaaatacaaaattagctggatgtggtagtgcatgcctgttatcccagctacttggaaggctgagacaggagaattgcttgaacccaggaggcagaggctgcagtgagccaggattgcgccactgcactccagcctgggcaacaagagcaaaactc

SEQ ID NO: 732895 - DNA, 2779 bp, Homo sapiens
gaggagtgcggctggatgtccattataggatggggctgtgttccctggccagtgtgtgctggtggggtgggggtacaaagtgggtgttctggagtgaacatctcacctcctcaggctctaaaccctaaggcctgtggctcagggagtggcccgaggggtctacagagtcacactggtagcacccactaggcgggaggtggagtgagtgctgttctttcccggaagagctgggtgtggggagctgagggggcccaggcctcagccctggtgctgtccctgtgacaggccctcggggtgtgtgggaccatgtccagccctctccagtgtatccacagccccgacctttgatgagaactcagctgtccaggcaggacatacacacagtccctctctggccctcatcctcctcagctgcaaaggaaaagccaagtgagacgggctctgggaccatggtgaccaggctcttcccctgctccctggccctcgccagctgccaggctgaaaagaagcctcagctcccacaccgccctcctcaccgcccttcctcggcagtcacttccactggtggaccacgggcccccagccctgtgtcggccttgtctgtctcagctcaaccacagtctgacaccagagcccacttccatcctctctggtgtgaggcacagcgagggcagcatctggaggagctctgcagcctccacacctaccacgacctcccagggctgggctcaggaaaaaccagccactgctttacaggacagggggttgaagctgagccccgcctcacacccacccccatgcactcaaagattggattttacagctacttgcaattcaaaattcagaagaataaaaaatgggaacatacagaactctaaaagatagacatcagaaattgttaagttaagctttttcaaaaaatcagcaattccccagcgtagtcaagggtggacactgcacgctctggcatgatgggatggcgaccgggcaagctttcttcctcgagatgctctgctgcttgagagctattgctttgttaagatataaaaaggggtttctttttgtctttctgtaaggtggacttccagcttttgattgaaagtcctagggtgattctatttctgctgtgatttatctgctgaaagctcagctggggttgtgcaagctagggacccattcctgtgtaatacaatgtctgcaccaatgctaataaagtcctattctcttttatgagaaagaaaaaagacaccgtcctttaaagtgctgcagtatggccagacgtggtggctcacacctgcaatcccagcaccttaggaggccgaggcaggaggatccttgaggtcaggagttcgagaccagcctcgccaacatggtgaaaccccatttctactaaaaatacaaaaaattagccaagtgtggtggcatatgcctgtaatcccaactactcagaaggccgaggcaggagaattacttgaacgcaggagaatcactgcagcccaggaggcagaggttgcagtgagccgagattgcaccactgcactccagcctgggtgacagagcaagactccatctcagtaaataaataaataaataaaaagcgctgcagtagctgtggcctcaccctgaagtcagcgggcccaggcctacctcactctctcccttggcagagaagcagacgtccatagctcctctccctcacaagcgctcccagcctgccctccagctgctgctctcccctcccagtctctactcactgggatgaggttaggtcatgaggacaccaaaaacctaaaaataaacaaaaagccaaacaagccttagcttttcttaaagactgaaatgcctggaagtgtccctttatttataaaataacttttgtcatatttcttatacatgtttcttgtaagaaattcagaaactacagacaaagagagtggaaattacccactgtcaggcctctgagcccaagctaagccatcatatcccctgtgccctgcacgtatacacccagatggcctgaagcaactgaagatccacaaaagaagtgaaaatagccagttcctgccttaactgatgacattccaccattgtgatttgttcctgccccaccctaactgatcaattgaccttgtgacaatacaccttccccacccttgagaaggtgctttgtaatattctccccacccaccccacgcccgcacccccgcacccttaagaaggtattttgtaatattctctccgccattgagaatgtgctttgtaagatccaccccctgcccacaaaaaattgctcctaactccaccgcctatcccaaacctacaagaactaatgataatcccaccaccctttgctgactctttttggactcagcccacctgcacccaggtgattaaaaagctttattgttcacacaaagcctgtttggtagtctcttcacagggaagcatgtgacacccacaatcccacctagcccaggagagagctacggcagggtgtgtgttttgacactgagcttggggctttttccatcttctccccacagcctctggctccacacctccaccgttcaagcgccagaaagagctgtctatgcagcctgctcttgggcctggggatgagacacacaattcattggctcctggattttaagtagacatttgtaaatctatagctaactactgtccttaaagccattgtttccattacaaaatccaactctctgagagaaaagggtgttttaaatttaaaaaaataaaaacaaaaaagtttgattgagac

SEQ ID NO: 732896 - DNA, 1849 bp, Homo sapiens
gaggagtgcggctggatgtccattataggatggggctgtgttccctggccagtgtgtgctggtggggtgggggtacaaagtgggtgttctggagtgaacatctcacctcctcaggctctaaaccctaaggcctgtggctcagggagtggcccgaggggtctacagagtcacactggtagcacccactaggcgggaggtggagtgagtgctgttctttcccggaagagctgggtgtggggagctgagggggcccaggcctcagccctggtgctgtccctgtgacaggccctcggggtgtgtgggaccatgtccagccctctccagtgtatccacagccccgacctttgatgagaactcagctgtccaggcaggacatacacacagtccctctctggccctcatcctcctcagctgcaaaggaaaagccaagtgagacgggctctgggaccatggtgaccaggctcttcccctgctccctggccctcgccagctgccaggctgaaaagaagcctcagctcccacaccgccctcctcaccgcccttcctcggcagtcacttccactggtggaccacgggcccccagccctgtgtcggccttgtctgtctcagctcaaccacagtctgacaccagagcccacttccatcctctctggtgtgaggcacagcgagggcagcatctggaggagctctgcagcctccacacctaccacgacctcccagggctgggctcaggaaaaaccagccactgctttacaggacagggggttgaagctgagccccgcctcacacccacccccatgcactcaaagattggattttacagctacttgcaattcaaaattcagaagaataaaaaatgggaacatacagaactctaaaagatagacatcagaaattgttaagttaagctttttcaaaaaatcagcaattccccagcgtagtcaagggtggacactgcacgctctggcatgatgggatggcgaccgggcaagctttcttcctcgagatgctctgctgcttgagagctattgctttgttaagatataaaaaggggtttctttttgtctttctgtaaggtggacttccagcttttgattgaaagtcctagggtgattctatttctgctgtgatttatctgctgaaagctcagctggggttgtgcaagctagggacccattcctgtgtaatacaatgtctgcaccaatgctaataaagtcctattctcttttatgagaaagaaaaaagacaccgtcctttaaagtgctgcagtatggccagacgtggtggctcacacctgcaatcccagcaccttaggaggccgaggcaggaggatccttgaggtcaggagttcgagaccagcctcgccaacatggtgaaaccccatttctactaaaaatacaaaaaattagccaagtgtggtggcatatgcctgtaatcccaactactcagaaggccgaggcaggagaattacttgaacgcaggagaatcactgcagcccaggaggcagaggttgcagtgagccgagattgcaccactgcactccagcctgggtgacagagcaagactccatctcagtaaataaataaataaataaaaagcgctgcagtagctgtggcctcaccctgaagtcagcgggcccaggcctacctcactctctcccttggcagagaagcagacgtccatagctcctctccctcacaagcgctcccagcctgccctccagctgctgctctcccctcccagtctctactcactgggatgaggttaggtcatgaggacaccaaaaacctaaaaataaacaaaaagccaaacaagccttagcttttcttaaagactgaaatgcctggaa

SEQ ID NO: 732897 - DNA, 1239 bp, Homo sapiens
gaggagtgcggctggatgtccattataggatggggctgtgttccctggccagtgtgtgctggtggggtgggggtacaaagtgggtgttctggagtgaacatctcacctcctcaggctctaaaccctaaggcctgtggctcagggagtggcccgaggggtctacagagtcacactggtagcacccactaggcgggaggtggagtgagtgctgttctttcccggaagagctgggtgtggggagctgagggggcccaggcctcagccctggtgctgtccctgtgacaggccctcggggtgtgtgggaccatgtccagccctctccagtgtatccacagccccgacctttgatgagaactcagctgtccaggcaggacatacacacagtccctctctggccctcatcctcctcagctgcaaaggaaaagccaagtgagacgggctctgggaccatggtgaccaggctcttcccctgctccctggccctcgccagctgccaggctgaaaagaagcctcagctcccacaccgccctcctcaccgcccttcctcggcagtcacttccactggtggaccacgggcccccagccctgtgtcggccttgtctgtctcagctcaaccacagtctgacaccagagcccacttccatcctctctggtgtgaggcacagcgagggcagcatctggaggagctctgcagcctccacacctaccacgacctcccagggctgggctcaggaaaaaccagccactgctttacaggacagggggttgaagctgagccccgcctcacacccacccccatgcactcaaagattggattttacagctacttgcaattcaaaattcagaagaataaaaaatgggaacatacagaactctaaaagatagacatcagaaattgttaagttaagctttttcaaaaaatcagcaattccccagcgtagtcaagggtggacactgcacgctctggcatgatgggatggcgaccgggcaagctttcttcctcgagatgctctgctgcttgagagctattgctttgttaagatataaaaaggggtttctttttgtctttctgtaaggtggacttccagcttttgattgaaagtcctagggtgattctatttctgctgtgatttatctgctgaaagctcagctggggttgtgcaagctagggacccattcctgtgtaatacaatgtctgcaccaatgctaataaagtcctattctcttttatgagaaaga

SEQ ID NO: 732898 - DNA, 1074 bp, Homo sapiens
gaggagtgcggctggatgtccattataggatggggctgtgttccctggccagtgtgtgctggtggggtgggggtacaaagtgggtgttctggagtgaacatctcacctcctcaggctctaaaccctaaggcctgtggctcagggagtggcccgaggggtctacagagtcacactggtagcacccactaggcgggaggtggagtgagtgctgttctttcccggaagagctgggtgtggggagctgagggggcccaggcctcagccctggtgctgtccctgtgacaggccctcggggtgtgtgggaccatgtccagccctctccagtgtatccacagccccgacctttgatgagaactcagctgtccaggcaggacatacacacagtccctctctggccctcatcctcctcagctgcaaaggaaaagccaagtgagacgggctctgggaccatggtgaccaggctcttcccctgctccctggccctcgccagctgccaggctgaaaagaagcctcagctcccacaccgccctcctcaccgcccttcctcggcagtcacttccactggtggaccacgggcccccagccctgtgtcggccttgtctgtctcagctcaaccacagtctgacaccagagcccacttccatcctctctggtgtgaggcacagcgagggcagcatctggaggagctctgcagcctccacacctaccacgacctcccagggctgggctcaggaaaaaccagccactgctttacaggacagggggttgaagctgagccccgcctcacacccacccccatgcactcaaagattggattttacagctacttgcaattcaaaattcagaagaataaaaaatgggaacatacagaactctaaaagatagacatcagaaattgttaagttaagctttttcaaaaaatcagcaattccccagcgtagtcaagggtggacactgcacgctctggcatgatgggatggcgaccgggcaagctttcttcctcgagatgctctgctgcttgagagctattgctttgttaagatataaaaaggggtttctttttgtctttctgta

SEQ ID NO: 732899 - DNA, 2050 bp, Homo sapiens
gaggagtgcggctggatgtccattataggatggggctgtgttccctggccagtgtgtgctggtggggtgggggtacaaagtgggtgttctggagtgaacatctcacctcctcaggctctaaaccctaaggcctgtggctcagggagtggcccgaggggtctacagagtcacactggtagcacccactaggcgggaggtggagtgagtgctgttctttcccggaagagctgggtgtggggagctgagggggcccaggcctcagccctggtgctgtccctgtgacaggccctcggggtgtgtgggaccatgtccagccctctccagtgtatccacagccccgacctttgatgagaactcagctgtccaggcaggacatacacacagtccctctctggccctcatcctcctcagctgcaaaggaaaagccaagtgagacgggctctgggaccatggtgaccaggctcttcccctgctccctggccctcgccagctgccaggctgaaaagaagcctcagctcccacaccgccctcctcaccgcccttcctcggcagtcacttccactggtggaccacgggcccccagccctgtgtcggccttgtctgtctcagctcaaccacagtctgacaccagagcccacttccatcctctctggtgtgaggcacagcgagggcagcatctggaggagctctgcagcctccacacctaccacgacctcccagggctgggctcaggaaaaaccagccactgctttacaggacagggggttgaagctgagccccgcctcacacccacccccatgcactcaaagattggattttacagctacttgcaattcaaaattcagaagaataaaaaatgggaacatacagaactctaaaagatagacatcagaaattgttaagttaagctttttcaaaaaatcagcaattccccagcgtagtcaagggtggacactgcacgctctggcatgatgggatggcgaccgggcaagctttcttcctcgagatgctctgctgcttgagagctattgctttgttaagatataaaaaggggtttctttttgtctttctgtaaggtggacttccagcttttgattgaaagtcctagggtgattctatttctgctgtgatttatctgctgaaagctcagctggggttgtgcaagctagggacccattcctgtgtaatacaatgtctgcaccaatgctaataaagtcctattctcttttatgagaaagaaaaaagacaccgtcctttaaagtgctgcagtatggccagacgtggtggctcacacctgcaatcccagcaccttaggaggccgaggcaggaggatccttgaggtcaggagttcgagaccagcctcgccaacatggtgaaaccccatttctactaaaaatacaaaaaattagccaagtgtggtggcatatgcctgtaatcccaactactcagaaggccgaggcaggagaattacttgaacgcaggagaatcactgcagcccaggaggcagaggttgcagtgagccgagattgcaccactgcactccagcctgggtgacagagcaagactccatctcagtaaataaataaataaataaaaagcgctgcagtagctgtggcctcaccctgaagtcagcgggcccaggcctacctcactctctcccttggcagagaagcagacgtccatagctcctctccctcacaagcgctcccagcctgccctccagctgctgctctcccctcccagtctctactcactgggatgaggttaggtcatgaggacaccaaaaacctaaaaataaacaaaaagccaaacaagccttagcttttcttaaagactgaaatgcctggaagagttccagaccagcctaacatggtgaaaccacatatctactaaaaaaaatacaaaattagctggatgtggtagtgcatgcctgttatcccagctacttggaaggctgagacaggagaattgcttgaacccaggaggcagaggctgcagtgagccaggattgcgccactgcactccagcctgggcaacaagagcaaaactc

SEQ ID NO: 732900 - DNA, 348 bp, Homo sapiens; identical to SEQ ID NO: 323001

SEQ ID NO: 732901 - DNA, 1050 bp, Homo sapiens
  misc_feature (1007)..(1007): n is a, c, g, or t
  misc_feature (1010)..(1010): n is a, c, g, or t
  misc_feature (1016)..(1016): n is a, c, g, or t
  misc_feature (1019)..(1019): n is a, c, g, or t
cttatctcggcttcgtttctggagggccaggaacaaacaggcttcaaagccaagggcttggctggcacacagggggcttggtccttcacctctgtcccctctccctacggacacatataagaccctggtcacacctgggagaggaggagaggagagcatagcacctgcagcaagatggatgtgggcagcaaagaggtcctgatggagagcccgccggactactccgcagctccccggggccgatttggcattccctgctgcccagtgcacctgaaacgccttcttatcgtggtggtggtggtggtcctcatcgtcgtggtgattgtgggagccctgctcatgggtctccacatgagccagaaacacacggagatggttctggagatgagcattggggcgccggaagcccagcaacgcctggccctgagtgagcacctggttaccactgccaccttctccatcggctccactggcctcgtggtgtatgactaccagcagctgctgatcgcctacaagccagcccctggcacctgctgctacatcatgaagatagctccagagagcatccccagtcttgaggctctcactagaaaagtccacaacttccagatggaatgctctctgcaggccaagcccgcagtgcctacgtctaagctgggccaggcagaggggcgagatgcaggctcagcaccctccggaggggacccggccttcctgggcatggccgtgagcaccctgtgtggcgaggtgccgctctactacatctaggacgcctccggtgagcagggtcagtggaagccccaacgggaaaggaaacgccccgggcaaagggtcttttgcagcttttgcagacgggcaagaagctgcttctgcccacaccgcagggacaagccctggagaaatgggagcttggggagaggatgggagtgggcagaggtggcgcccaggggcccgggaactcctgccacaacagaataaagcagcctgattgaaaagcaaaaaaaaanaanaaacanaanacgtgcgggagctggcaccgaagatcaagac

SEQ ID NO: 732902 - DNA, 220 bp, Homo sapiens; identical to SEQ ID NO: 484722
  misc_feature (1)..(1): n is a, c, g, or t
  misc_feature (28)..(28): n is a, c, g, or t
  misc_feature (33)..(33): n is a, c, g, or t

SEQ ID NO: 732903 - DNA, 390 bp, Homo sapiens; identical to SEQ ID NO: 484723
  misc_feature (1)..(1): n is a, c, g, or t
  misc_feature (28)..(28): n is a, c, g, or t
  misc_feature (33)..(33): n is a, c, g, or t

SEQ ID NO: 732904 - DNA, 275 bp, Homo sapiens; identical to SEQ ID NO: 484727
  misc_feature (1)..(1): n is a, c, g, or t
  misc_feature (28)..(28): n is a, c, g, or t
  misc_feature (33)..(33): n is a, c, g, or t
  misc_feature (256)..(256): n is a, c, g, or t

SEQ ID NO: 732905 - DNA, 311 bp, Homo sapiens; identical to SEQ ID NO: 484725
  misc_feature (1)..(1): n is a, c, g, or t
  misc_feature (28)..(28): n is a, c, g, or t
  misc_feature (33)..(33): n is a, c, g, or t

SEQ ID NO: 732906 - DNA, 1028 bp, Homo sapiens
  misc_feature (985)..(985): n is a, c, g, or t
  misc_feature (988)..(988): n is a, c, g, or t
  misc_feature (994)..(994): n is a, c, g, or t
  misc_feature (997)..(997): n is a, c, g, or t
cttatctcggcttcgtttctggagggccaggaacaaacaggcttcaaagccaagggcttggctggcacacagggggcttggtccttcacctctgtcccctctccctacggacacatataagaccctggtcacacctgggagaggaggagaggagagcatagcacctgcagcaagatggatgtgggcagcaaagaggtcctgatggagagcccgccggactactccgcagctccccggggccgatttggcattccctgctgcccagtgcacctgaaacgccttcttatcgtggtggtggtggtggtcctcatcgtcgtggtgattgtgggagccctgctcatgggtctccacatgagccagaaacacacggagatggttctggagatgagcattggggcgccggaagcccagcaacgcctggccctgagtgagcacctggttaccactgccaccttctccatcggctccactggcctcgtggtgtatgactaccagcagctgctgatcgcctacaagccagcccctggcacctgctgctacatcatgaagatagctccagagagcatccccagtcttgaggctctcactagaaaagtccacaacaggccaagcccgcagtgcctacgtctaagctgggccaggcagaggggcgagatgcaggctcagcaccctccggaggggacccggccttcctgggcatggccgtgagcaccctgtgtggcgaggtgccgctctactacatctaggacgcctccggtgagcagggtcagtggaagccccaacgggaaaggaaacgccccgggcaaagggtcttttgcagcttttgcagacgggcaagaagctgcttctgcccacaccgcagggacaagccctggagaaatgggagcttggggagaggatgggagtgggcagaggtggcgcccaggggcccgggaactcctgccacaacagaataaagcagcctgattgaaaagcaaaaaaaaanaanaaacanaanacgtgcgggagctggcaccgaagatcaagac

SEQ ID NO: 732907 - DNA, 1257 bp, Homo sapiens
  misc_feature (1214)..(1214): n is a, c, g, or t
  misc_feature (1217)..(1217): n is a, c, g, or t
  misc_feature (1223)..(1223): n is a, c, g, or t
  misc_feature (1226)..(1226): n is a, c, g, or t
cttatctcggcttcgtttctggagggccaggaacaaacaggcttcaaagccaagggcttggctggcacacagggggcttggtccttcacctctgtcccctctccctacggacacatataagaccctggtcacacctgggagaggaggagaggagagcatagcacctgcagcaagatggatgtgggcagcaaagaggtcctgatggagagcccgccggactactccgcagctccccggggccgatttggcattccctgctgcccagtgcacctgaaacgccttcttatcgtggtggtggtggtggtcctcatcgtcgtggtgattgtgggagccctgctcatgggtctccacatgagccagaaacacacggagatggttctggagatgagcattggggcgccggaagcccagcaacgcctggccctgagtgagcacctggttaccactgccaccttctccatcggctccactggcctcgtggtgtatgactaccagcagctgctgatcgcctacaagccagcccctggcacctgctgctacatcatgaagatagctccagagagcatccccagtcttgaggctctcactagaaaagtccacaacttccagatggaatgctctctgcaggccaagcccgcagtgcctacgtctaagctgggccaggcagaggggcgagatgcaggctcagcaccctccggaggggacccggccttcctgggcatggccgtgagcaccctgtgtggcgaggtgccgctctactacatctaggacgcctccggtgagcaggtgtgatcccagggcccctgatcagcagcggaggagcgctcgggccacctgcccgggctgtggaggagcgctcgcgctgaccaggcgctggggcgtccactgaagcggggtcatccaggcaactcgggggaggggaagctcacagaccggtacttcccactcccctgaattctctctgtccatcctcaacattcctttgcttcacagggtcagtggaagccccaacgggaaaggaaacgccccgggcaaagggtcttttgcagcttttgcagacgggcaagaagctgcttctgcccacaccgcagggacaagccctggagaaatgggagcttggggagaggatgggagtgggcagaggtggcgcccaggggcccgggaactcctgccacaacagaataaagcagcctgattgaaaagcaaaaaaaaanaanaaacanaanacgtgcgggagctggcaccgaagatcaagac

SEQ ID NO: 732908 - DNA, 1235 bp, Homo sapiens
  misc_feature (1192)..(1192): n is a, c, g, or t
  misc_feature (1195)..(1195): n is a, c, g, or t
  misc_feature (1201)..(1201): n is a, c, g, or t
  misc_feature (1204)..(1204): n is a, c, g, or t
cttatctcggcttcgtttctggagggccaggaacaaacaggcttcaaagccaagggcttggctggcacacagggggcttggtccttcacctctgtcccctctccctacggacacatataagaccctggtcacacctgggagaggaggagaggagagcatagcacctgcagcaagatggatgtgggcagcaaagaggtcctgatggagagcccgccggactactccgcagctccccggggccgatttggcattccctgctgcccagtgcacctgaaacgccttcttatcgtggtggtggtggtggtcctcatcgtcgtggtgattgtgggagccctgctcatgggtctccacatgagccagaaacacacggagatggttctggagatgagcattggggcgccggaagcccagcaacgcctggccctgagtgagcacctggttaccactgccaccttctccatcggctccactggcctcgtggtgtatgactaccagcagctgctgatcgcctacaagccagcccctggcacctgctgctacatcatgaagatagctccagagagcatccccagtcttgaggctctcactagaaaagtccacaacaggccaagcccgcagtgcctacgtctaagctgggccaggcagaggggcgagatgcaggctcagcaccctccggaggggacccggccttcctgggcatggccgtgagcaccctgtgtggcgaggtgccgctctactacatctaggacgcctccggtgagcaggtgtgatcccagggcccctgatcagcagcggaggagcgctcgggccacctgcccgggctgtggaggagcgctcgcgctgaccaggcgctggggcgtccactgaagcggggtcatccaggcaactcgggggaggggaagctcacagaccggtacttcccactcccctgaattctctctgtccatcctcaacattcctttgcttcacagggtcagtggaagccccaacgggaaaggaaacgccccgggcaaagggtcttttgcagcttttgcagacgggcaagaagctgcttctgcccacaccgcagggacaagccctggagaaatgggagcttggggagaggatgggagtgggcagaggtggcgcccaggggcccgggaactcctgccacaacagaataaagcagcctgattgaaaagcaaaaaaaaanaanaaacanaanacgtgcgggagctggcaccgaagatcaagac

SEQ ID NO: 732909 - DNA, 1050 bp, Homo sapiens; identical to SEQ ID NO: 732901
  misc_feature (1007)..(1007): n is a, c, g, or t
  misc_feature (1010)..(1010): n is a, c, g, or t
  misc_feature (1016)..(1016): n is a, c, g, or t
  misc_feature (1019)..(1019): n is a, c, g, or t

SEQ ID NO: 732910 - DNA, 1257 bp, Homo sapiens; identical to SEQ ID NO: 732907
  misc_feature (1214)..(1214): n is a, c, g, or t
  misc_feature (1217)..(1217): n is a, c, g, or t
  misc_feature (1223)..(1223): n is a, c, g, or t
  misc_feature (1226)..(1226): n is a, c, g, or t

SEQ ID NO: 732911 - DNA, 787 bp, Homo sapiens
  misc_feature (744)..(744): n is a, c, g, or t
  misc_feature (747)..(747): n is a, c, g, or t
  misc_feature (753)..(753): n is a, c, g, or t
  misc_feature (756)..(756): n is a, c, g, or t
atcagctcgctaccttaacttagaagttgtggtggtggtggtcctcatcgtcgtggtgattgtgggagccctgctcatgggtctccacatgagccagaaacacacggagatggttctggagatgagcattggggcgccggaagcccagcaacgcctggccctgagtgagcacctggttaccactgccaccttctccatcggctccactggcctcgtggtgtatgactaccagcagctgctgatcgcctacaagccagcccctggcacctgctgctacatcatgaagatagctccagagagcatccccagtcttgaggctctcactagaaaagtccacaacttccagatggaatgctctctgcaggccaagcccgcagtgcctacgtctaagctgggccaggcagaggggcgagatgcaggctcagcaccctccggaggggacccggccttcctgggcatggccgtgagcaccctgtgtggcgaggtgccgctctactacatctaggacgcctccggtgagcagggtcagtggaagccccaacgggaaaggaaacgccccgggcaaagggtcttttgcagcttttgcagacgggcaagaagctgcttctgcccacaccgcagggacaagccctggagaaatgggagcttggggagaggatgggagtgggcagaggtggcgcccaggggcccgggaactcctgccacaacagaataaagcagcctgattgaaaagcaaaaaaaaanaanaaacanaanacgtgcgggagctggcaccgaagatcaagac

SEQ ID NO: 732912 - DNA, 972 bp, Homo sapiens
  misc_feature (929)..(929): n is a, c, g, or t
  misc_feature (932)..(932): n is a, c, g, or t
  misc_feature (938)..(938): n is a, c, g, or t
  misc_feature (941)..(941): n is a, c, g, or t
atcagctcgctaccttaacttagaagttgtggtggtggtggtcctcatcgtcgtggtgattgtgggagccctgctcatgggtctccacatgagccagaaacacacggagatggttctggagatgagcattggggcgccggaagcccagcaacgcctggccctgagtgagcacctggttaccactgccaccttctccatcggctccactggcctcgtggtgtatgactaccagcagctgctgatcgcctacaagccagcccctggcacctgctgctacatcatgaagatagctccagagagcatccccagtcttgaggctctcactagaaaagtccacaacaggccaagcccgcagtgcctacgtctaagctgggccaggcagaggggcgagatgcaggctcagcaccctccggaggggacccggccttcctgggcatggccgtgagcaccctgtgtggcgaggtgccgctctactacatctaggacgcctccggtgagcaggtgtgatcccagggcccctgatcagcagcggaggagcgctcgggccacctgcccgggctgtggaggagcgctcgcgctgaccaggcgctggggcgtccactgaagcggggtcatccaggcaactcgggggaggggaagctcacagaccggtacttcccactcccctgaattctctctgtccatcctcaacattcctttgcttcacagggtcagtggaagccccaacgggaaaggaaacgccccgggcaaagggtcttttgcagcttttgcagacgggcaagaagctgcttctgcccacaccgcagggacaagccctggagaaatgggagcttggggagaggatgggagtgggcagaggtggcgcccaggggcccgggaactcctgccacaacagaataaagcagcctgattgaaaagcaaaaaaaaanaanaaacanaanacgtgcgggagctggcaccgaagatcaagac

SEQ ID NO: 732913 - DNA, 994 bp, Homo sapiens
  misc_feature (951)..(951): n is a, c, g, or t
  misc_feature (954)..(954): n is a, c, g, or t
  misc_feature (960)..(960): n is a, c, g, or t
  misc_feature (963)..(963): n is a, c, g, or t
atcagctcgctaccttaacttagaagttgtggtggtggtggtcctcatcgtcgtggtgattgtgggagccctgctcatgggtctccacatgagccagaaacacacggagatggttctggagatgagcattggggcgccggaagcccagcaacgcctggccctgagtgagcacctggttaccactgccaccttctccatcggctccactggcctcgtggtgtatgactaccagcagctgctgatcgcctacaagccagcccctggcacctgctgctacatcatgaagatagctccagagagcatccccagtcttgaggctctcactagaaaagtccacaacttccagatggaatgctctctgcaggccaagcccgcagtgcctacgtctaagctgggccaggcagaggggcgagatgcaggctcagcaccctccggaggggacccggccttcctgggcatggccgtgagcaccctgtgtggcgaggtgccgctctactacatctaggacgcctccggtgagcaggtgtgatcccagggcccctgatcagcagcggaggagcgctcgggccacctgcccgggctgtggaggagcgctcgcgctgaccaggcgctggggcgtccactgaagcggggtcatccaggcaactcgggggaggggaagctcacagaccggtacttcccactcccctgaattctctctgtccatcctcaacattcctttgcttcacagggtcagtggaagccccaacgggaaaggaaacgccccgggcaaagggtcttttgcagcttttgcagacgggcaagaagctgcttctgcccacaccgcagggacaagccctggagaaatgggagcttggggagaggatgggagtgggcagaggtggcgcccaggggcccgggaactcctgccacaacagaataaagcagcctgattgaaaagcaaaaaaaaanaanaaacanaanacgtgcgggagctggcaccgaagatcaagac

SEQ ID NO: 732914 - DNA, 765 bp, Homo sapiens
  misc_feature (722)..(722): n is a, c, g, or t
  misc_feature (725)..(725): n is a, c, g, or t
  misc_feature (731)..(731): n is a, c, g, or t
  misc_feature (734)..(734): n is a, c, g, or t
atcagctcgctaccttaacttagaagttgtggtggtggtggtcctcatcgtcgtggtgattgtgggagccctgctcatgggtctccacatgagccagaaacacacggagatggttctggagatgagcattggggcgccggaagcccagcaacgcctggccctgagtgagcacctggttaccactgccaccttctccatcggctccactggcctcgtggtgtatgactaccagcagctgctgatcgcctacaagccagcccctggcacctgctgctacatcatgaagatagctccagagagcatccccagtcttgaggctctcactagaaaagtccacaacaggccaagcccgcagtgcctacgtctaagctgggccaggcagaggggcgagatgcaggctcagcaccctccggaggggacccggccttcctgggcatggccgtgagcaccctgtgtggcgaggtgccgctctactacatctaggacgcctccggtgagcagggtcagtggaagccccaacgggaaaggaaacgccccgggcaaagggtcttttgcagcttttgcagacgggcaagaagctgcttctgcccacaccgcagggacaagccctggagaaatgggagcttggggagaggatgggagtgggcagaggtggcgcccaggggcccgggaactcctgccacaacagaataaagcagcctgattgaaaagcaaaaaaaaanaanaaacanaanacgtgcgggagctggcaccgaagatcaagac

SEQ ID NO: 732915 - DNA, 1050 bp, Homo sapiens
  misc_feature (592)..(592): n is a, c, g, or t
  misc_feature (1007)..(1007): n is a, c, g, or t
  misc_feature (1010)..(1010): n is a, c, g, or t
  misc_feature (1016)..(1016): n is a, c, g, or t
  misc_feature (1019)..(1019): n is a, c, g, or t
cttatctcggcttcgtttctggagggccaggaacaaacaggcttcaaagccaagggcttggctggcacacagggggcttggtccttcacctctgtcccctctccctacggacacatataagaccctggtcacacctgggagaggaggagaggagagcatagcacctgcagcaagatggatgtgggcagcaaagaggtcctgatggagagcccgccggactactccgcagctccccggggccgatttggcattccctgctgcccagtgcacctgaaacgccttcttatcgtggtggtggtggtggtcctcatcgtcgtggtgattgtgggagccctgctcatgggtctccacatgagccagaaacacacggagatggttctggagatgagcattggggcgccggaagcccagcaacgcctggccctgagtgagcacctggttaccactgccaccttctccatcggctccactggcctcgtggtgtatgactaccagcagctgctgatcgcctacaagccagcccctggcacctgctgctacatcatgaagatagctccagagagcatccccagtcttgaggctctcactaganaagtccacaacttccagatggaatgctctctgcaggccaagcccgcagtgcctacgtctaagctgggccaggcagaggggcgagatgcaggctcagcaccctccggaggggacccggccttcctgggcatggccgtgagcaccctgtgtggcgaggtgccgctctactacatctaggacgcctccggtgagcagggtcagtggaagccccaacgggaaaggaaacgccccgggcaaagggtcttttgcagcttttgcagacgggcaagaagctgcttctgcccacaccgcagggacaagccctggagaaatgggagcttggggagaggatgggagtgggcagaggtggcgcccaggggcccgggaactcctgccacaacagaataaagcagcctgattgaaaagcaaaaaaaaanaanaaacanaanacgtgcgggagctggcaccgaagatcaagac

SEQ ID NO: 732916 - DNA, 1257 bp, Homo sapiens
  misc_feature (592)..(592): n is a, c, g, or t
  misc_feature (1214)..(1214): n is a, c, g, or t
  misc_feature (1217)..(1217): n is a, c, g, or t
  misc_feature (1223)..(1223): n is a, c, g, or t
  misc_feature (1226)..(1226): n is a, c, g, or t
cttatctcggcttcgtttctggagggccaggaacaaacaggcttcaaagccaagggcttggctggcacacagggggcttggtccttcacctctgtcccctctccctacggacacatataagaccctggtcacacctgggagaggaggagaggagagcatagcacctgcagcaagatggatgtgggcagcaaagaggtcctgatggagagcccgccggactactccgcagctccccggggccgatttggcattccctgctgcccagtgcacctgaaacgccttcttatcgtggtggtggtggtggtcctcatcgtcgtggtgattgtgggagccctgctcatgggtctccacatgagccagaaacacacggagatggttctggagatgagcattggggcgccggaagcccagcaacgcctggccctgagtgagcacctggttaccactgccaccttctccatcggctccactggcctcgtggtgtatgactaccagcagctgctgatcgcctacaagccagcccctggcacctgctgctacatcatgaagatagctccagagagcatccccagtcttgaggctctcactaganaagtccacaacttccagatggaatgctctctgcaggccaagcccgcagtgcctacgtctaagctgggccaggcagaggggcgagatgcaggctcagcaccctccggaggggacccggccttcctgggcatggccgtgagcaccctgtgtggcgaggtgccgctctactacatctaggacgcctccggtgagcaggtgtgatcccagggcccctgatcagcagcggaggagcgctcgggccacctgcccgggctgtggaggagcgctcgcgctgaccaggcgctggggcgtccactgaagcggggtcatccaggcaactcgggggaggggaagctcacagaccggtacttcccactcccctgaattctctctgtccatcctcaacattcctttgcttcacagggtcagtggaagccccaacgggaaaggaaacgccccgggcaaagggtcttttgcagcttttgcagacgggcaagaagctgcttctgcccacaccgcagggacaagccctggagaaatgggagcttggggagaggatgggagtgggcagaggtggcgcccaggggcccgggaactcctgccacaacagaataaagcagcctgattgaaaagcaaaaaaaaanaanaaacanaanacgtgcgggagctggcaccgaagatcaagac

SEQ ID NO: 732917 - DNA, 483 bp, Homo sapiens; identical to SEQ ID NO: 623553

SEQ ID NO: 732918 - DNA, 525 bp, Homo sapiens
  misc_feature (500)..(500): n is a, c, g, or t
  misc_feature (516)..(516): n is a, c, g, or t
atcagctcgctaccttaacttagaagttgtggtggtggtggtcctcatcgtcgtggtgattgtgggagccctgctcatgggtctccacatgagccagaaacacacggagatggttctggagatgagcattggggcgccggaagcccagcaacgcctggccctgagtgagcacctggttaccactgccaccttctccatcggctccactggcctcgtggtgtatgactaccagcagctgctgatcgcctacaagccagcccctggcacctgctgctacatcatgaagatagctccagagagcatccccagtcttgaggctctcactagaaaagtccacaacttccagatggaatgctctctgcaggccaagcccgcagtgcctacgtctaagctgggccaggcagaggggcgagatgcaggctcagcaccctccggaggggacccggccttcctgggcatggccgtgagcacccttttttgggcgaggttgccgttttatntacattttagggacgntttccggtt

SEQ ID NO: 732919 - DNA, 892 bp, Homo sapiens
  misc_feature (849)..(849): n is a, c, g, or t
  misc_feature (852)..(852): n is a, c, g, or t
  misc_feature (858)..(858): n is a, c, g, or t
  misc_feature (861)..(861): n is a, c, g, or t
cttatctcggcttcgtttctggagggccaggaacaaacaggcttcaaagccaagggcttggctggcacacagggggcttggtccttcacctctgtcccctctccctacggacacatataagaccctggtcacacctgggagaggaggagaggagagcatagcacctgcagcaagatggatgtgggcagcaaagaggtcctgatggagagcccgccggactactccgcagctccccggggccgatttggcattccctgctgcccagtgcacctgaaacgccttcttatcgtggtggtggtggtggtcctcatcgtcgtggtgattgtgggagccctgctcatgggtctccacatgagccagaaacacacggagatggttctggagatgagcattggggcgccggaagcccagcaacgcctggccctgagtgagcacctggttaccactgccaccttctccatcggctccactggcctcgtggtgtatgactaccagcagctgctgatcgcctacaagccagcccctggcacctgctgctacatcatgaagatagctccagagagcatccccagtcttgaggtgtggcgaggtgccgctctactacatctaggacgcctccggtgagcagggtcagtggaagccccaacgggaaaggaaacgccccgggcaaagggtcttttgcagcttttgcagacgggcaagaagctgcttctgcccacaccgcagggacaagccctggagaaatgggagcttggggagaggatgggagtgggcagaggtggcgcccaggggcccgggaactcctgccacaacagaataaagcagcctgattgaaaagcaaaaaaaaanaanaaacanaanacgtgcgggagctggcaccgaagatcaagac

SEQ ID NO: 732920 - DNA, 788 bp, Homo sapiens
  misc_feature (763)..(763): n is a, c, g, or t
  misc_feature (779)..(779): n is a, c, g, or t
cttatctcggcttcgtttctggagggccaggaacaaacaggcttcaaagccaagggcttggctggcacacagggggcttggtccttcacctctgtcccctctccctacggacacatataagaccctggtcacacctgggagaggaggagaggagagcatagcacctgcagcaagatggatgtgggcagcaaagaggtcctgatggagagcccgccggactactccgcagctccccggggccgatttggcattccctgctgcccagtgcacctgaaacgccttcttatcgtggtggtggtggtggtcctcatcgtcgtggtgattgtgggagccctgctcatgggtctccacatgagccagaaacacacggagatggttctggagatgagcattggggcgccggaagcccagcaacgcctggccctgagtgagcacctggttaccactgccaccttctccatcggctccactggcctcgtggtgtatgactaccagcagctgctgatcgcctacaagccagcccctggcacctgctgctacatcatgaagatagctccagagagcatccccagtcttgaggctctcactagaaaagtccacaacttccagatggaatgctctctgcaggccaagcccgcagtgcctacgtctaagctgggccaggcagaggggcgagatgcaggctcagcaccctccggaggggacccggccttcctgggcatggccgtgagcacccttttttgggcgaggttgccgttttatntacattttagggacgntttccggtt

SEQ ID NO: 732921 - DNA, 948 bp, Homo sapiens
  misc_feature (905)..(905): n is a, c, g, or t
  misc_feature (908)..(908): n is a, c, g, or t
  misc_feature (914)..(914): n is a, c, g, or t
  misc_feature (917)..(917): n is a, c, g, or t
cttatctcggcttcgtttctggagggccaggaacaaacaggcttcaaagccaagggcttggctggcacacagggggcttggtccttcacctctgtcccctctccctacggacacatataagaccctggtcacacctgggagaggaggagaggagagcatagcacctgcagcaagatggatgtgggcagcaaagaggtcctgatggagagcccgccggactactccgcagctccccggggccgatttggcattccctgctgcccagtgcacctgaaacgccttcttatcgtggtggtggtggtggtcctcatcgtcgtggtgattgtgggagccctgctcatgggtctccacatgagccagaaacacacggagatggttctggagatgagcattggggcgccggaagcccagcaacgcctggccctgagtgagcacctggttaccactgccaccttctccatcggctccactggcctcgtggtgtatgactaccagcagctgctgatcgcctacaagccagcccctggcacctgctgctacatcatgaagatagctccagagagcatccccagtcttgaggctctcactagaaaagtccacaacaggccaagcccgcagtgcctacgtctaagctggtgtggcgaggtgccgctctactacatctaggacgcctccggtgagcagggtcagtggaagccccaacgggaaaggaaacgccccgggcaaagggtcttttgcagcttttgcagacgggcaagaagctgcttctgcccacaccgcagggacaagccctggagaaatgggagcttggggagaggatgggagtgggcagaggtggcgcccaggggcccgggaactcctgccacaacagaataaagcagcctgattgaaaagcaaaaaaaaanaanaaacanaanacgtgcgggagctggcaccgaagatcaagac

SEQ ID NO: 732922 - DNA, 582 bp, Homo sapiens
  misc_feature (539)..(539): n is a, c, g, or t
  misc_feature (542)..(542): n is a, c, g, or t
  misc_feature (548)..(548): n is a, c, g, or t
  misc_feature (551)..(551): n is a, c, g, or t
ggagaggagagcatagcacctgcagcaagatggatgtgggcagcaaagaggtcctgatggagagcccgccgccagaaacacacggagatggttctggagatgagcattggggcgccggaagcccagcaacgcctggccctgagtgagcacctggttaccactgccaccttctccatcggctccactggcctcgtggtgtatgactaccagcagctgctgatcgcctacaagccagcccctggcacctgctgctacatcatgaagatagctccagagagcatccccagtcttgaggctctcactagaaaagtccacaagggtcagtggaagccccaacgggaaaggaaacgccccgggcaaagggtcttttgcagcttttgcagacgggcaagaagctgcttctgcccacaccgcagggacaagccctggagaaatgggagcttggggagaggatgggagtgggcagaggtggcgcccaggggcccgggaactcctgccacaacagaataaagcagcctgattgaaaagcaaaaaaaaanaanaaacanaanacgtgcgggagctggcaccgaagatcaagac

SEQ ID NO: 732923 - DNA, 977 bp, Homo sapiens
  misc_feature (934)..(934): n is a, c, g, or t
  misc_feature (937)..(937): n is a, c, g, or t
  misc_feature (943)..(943): n is a, c, g, or t
  misc_feature (946)..(946): n is a, c, g, or t
gaaggaggacgtaggagcagcatagcagcgtgcagcgagagatggattgtgtggcatgcaacatagggttccttgactggagacgtacggacgagaccttgcgtccagtgagctacgccggggggcgtattctggcattccctgctgcccggtggcacctggaagcgtcttgcatatacatcgtggatgagtggatggtcgggtaccgcaatcgatctgtgagtcgaatttcgtggagagacgctctgactgcagtaggcgtctactcatcatgatgccaggcccagaaacacacggagatggttctggagatgagcattggggcgccggaagcccagcaacgcctggccctgagtgagcacctggttaccactgccaccttctccatcggctccactggcctcgtggtgtatgactaccagcagctgctgatcgcctacaagccagcccctggcacctgctgctacatcatgaagatagctccagagagcatccccagtcttgaggctctcactagaaaagtccacaacttccagatggaatgctctctgcaggccaagcccgcagtgcctacgtctaagctgggccaggcagaggggcgagatgcaggctcagcaccctccggaggggacccggccttcctgggcatggccgtgagcaccctgtgtggcgaggtgccgctctactacatctaggacgcctccggtgagcagggtcagtggaagccccaacgggaaaggaaacgccccgggcaaagggtcttttgcagcttttgcagacgggcaagaagctgcttctgcccacaccgcagggacaagccctggagaaatgggagcttggggagaggatgggagtgggcagaggtggcgcccaggggcccgggaactcctgccacaacagaataaagcagcctgattgaaaagcaaaaaaaaanaanaaacanaanacgtgcgggagctggcaccgaagatcaagac

SEQ ID NO: 732924 - DNA, 1184 bp, Homo sapiens
  misc_feature (1141)..(1141): n is a, c, g, or t
  misc_feature (1144)..(1144): n is a, c, g, or t
  misc_feature (1150)..(1150): n is a, c, g, or t
  misc_feature (1153)..(1153): n is a, c, g, or t
gaaggaggacgtaggagcagcatagcagcgtgcagcgagagatggattgtgtggcatgcaacatagggttccttgactggagacgtacggacgagaccttgcgtccagtgagctacgccggggggcgtattctggcattccctgctgcccggtggcacctggaagcgtcttgcatatacatcgtggatgagtggatggtcgggtaccgcaatcgatctgtgagtcgaatttcgtggagagacgctctgactgcagtaggcgtctactcatcatgatgccaggcccagaaacacacggagatggttctggagatgagcattggggcgccggaagcccagcaacgcctggccctgagtgagcacctggttaccactgccaccttctccatcggctccactggcctcgtggtgtatgactaccagcagctgctgatcgcctacaagccagcccctggcacctgctgctacatcatgaagatagctccagagagcatccccagtcttgaggctctcactagaaaagtccacaacttccagatggaatgctctctgcaggccaagcccgcagtgcctacgtctaagctgggccaggcagaggggcgagatgcaggctcagcaccctccggaggggacccggccttcctgggcatggccgtgagcaccctgtgtggcgaggtgccgctctactacatctaggacgcctccggtgagcaggtgtgatcccagggcccctgatcagcagcggaggagcgctcgggccacctgcccgggctgtggaggagcgctcgcgctgaccaggcgctggggcgtccactgaagcggggtcatccaggcaactcgggggaggggaagctcacagaccggtacttcccactcccctgaattctctctgtccatcctcaacattcctttgcttcacagggtcagtggaagccccaacgggaaaggaaacgccccgggcaaagggtcttttgcagcttttgcagacgggcaagaagctgcttctgcccacaccgcagggacaagccctggagaaatgggagcttggggagaggatgggagtgggcagaggtggcgcccaggggcccgggaactcctgccacaacagaataaagcagcctgattgaaaagcaaaaaaaaanaanaaacanaanacgtgcgggagctggcaccgaagatcaagac

SEQ ID NO: 732925 - DNA, 971 bp, Homo sapiens
  misc_feature (928)..(928): n is a, c, g, or t
  misc_feature (931)..(931): n is a, c, g, or t
  misc_feature (937)..(937): n is a, c, g, or t
  misc_feature (940)..(940): n is a, c, g, or t
tgcaagaagcaaatcatatgacctgcggcaaccatgaatgtggtcgagcataggatcgtactgtagtggacataccgcagatggcatgtatctactgacatgattcgccctgggggtcgtatattgaggactttaccatggctgcgcgcaggtgacacctgtgaaatgctgttataattgtggatggtaggtgcgtgagtgcctactatacgtgcgattctagtacttgctagggagtccccatggcttcaatgtgcgtctactcacaatgaacccaccagaaacacacggagatggttctggagatgagcattggggcgccggaagcccagcaacgcctggccctgagtgagcacctggttaccactgccaccttctccatcggctccactggcctcgtggtgtatgactaccagcagctgctgatcgcctacaagccagcccctggcacctgctgctacatcatgaagatagctccagagagcatccccagtcttgaggctctcactagaaaagtccacaacttccagatggaatgctctctgcaggccaagcccgcagtgcctacgtctaagctgggccaggcagaggggcgagatgcaggctcagcaccctccggaggggacccggccttcctgggcatggccgtgagcaccctgtgtggcgaggtgccgctctactacatctaggacgcctccggtgagcagggtcagtggaagccccaacgggaaaggaaacgccccgggcaaagggtcttttgcagcttttgcagacgggcaagaagctgcttctgcccacaccgcagggacaagccctggagaaatgggagcttggggagaggatgggagtgggcagaggtggcgcccaggggcccgggaactcctgccacaacagaataaagcagcctgattgaaaagcaaaaaaaaanaanaaacanaanacgtgcgggagctggcaccgaagatcaagac

SEQ ID NO: 732926 - DNA, 1156 bp, Homo sapiens
  misc_feature (1113)..(1113): n is a, c, g, or t
  misc_feature (1116)..(1116): n is a, c, g, or t
  misc_feature (1122)..(1122): n is a, c, g, or t
  misc_feature (1125)..(1125): n is a, c, g, or t
tgcaagaagcaaatcatatgacctgcggcaaccatgaatgtggtcgagcataggatcgtactgtagtggacataccgcagatggcatgtatctactgacatgattcgccctgggggtcgtatattgaggactttaccatggctgcgcgcaggtgacacctgtgaaatgctgttataattgtggatggtaggtgcgtgagtgcctactatacgtgcgattctagtacttgctagggagtccccatggcttcaatgtgcgtctactcacaatgaacccaccagaaacacacggagatggttctggagatgagcattggggcgccggaagcccagcaacgcctggccctgagtgagcacctggttaccactgccaccttctccatcggctccactggcctcgtggtgtatgactaccagcagctgctgatcgcctacaagccagcccctggcacctgctgctacatcatgaagatagctccagagagcatccccagtcttgaggctctcactagaaaagtccacaacaggccaagcccgcagtgcctacgtctaagctgggccaggcagaggggcgagatgcaggctcagcaccctccggaggggacccggccttcctgggcatggccgtgagcaccctgtgtggcgaggtgccgctctactacatctaggacgcctccggtgagcaggtgtgatcccagggcccctgatcagcagcggaggagcgctcgggccacctgcccgggctgtggaggagcgctcgcgctgaccaggcgctggggcgtccactgaagcggggtcatccaggcaactcgggggaggggaagctcacagaccggtacttcccactcccctgaattctctctgtccatcctcaacattcctttgcttcacagggtcagtggaagccccaacgggaaaggaaacgccccgggcaaagggtcttttgcagcttttgcagacgggcaagaagctgcttctgcccacaccgcagggacaagccctggagaaatgggagcttggggagaggatgggagtgggcagaggtggcgcccaggggcccgggaactcctgccacaacagaataaagcagcctgattgaaaagcaaaaaaaaanaanaaacanaanacgtgcgggagctggcaccgaagatcaagac

SEQ ID NO: 732927 - DNA, 1178 bp, Homo sapiens
  misc_feature (1135)..(1135): n is a, c, g, or t
  misc_feature (1138)..(1138): n is a, c, g, or t
  misc_feature (1144)..(1144): n is a, c, g, or t
  misc_feature (1147)..(1147): n is a, c, g, or t
tgcaagaagcaaatcatatgacctgcggcaaccatgaatgtggtcgagcataggatcgtactgtagtggacataccgcagatggcatgtatctactgacatgattcgccctgggggtcgtatattgaggactttaccatggctgcgcgcaggtgacacctgtgaaatgctgttataattgtggatggtaggtgcgtgagtgcctactatacgtgcgattctagtacttgctagggagtccccatggcttcaatgtgcgtctactcacaatgaacccaccagaaacacacggagatggttctggagatgagcattggggcgccggaagcccagcaacgcctggccctgagtgagcacctggttaccactgccaccttctccatcggctccactggcctcgtggtgtatgactaccagcagctgctgatcgcctacaagccagcccctggcacctgctgctacatcatgaagatagctccagagagcatccccagtcttgaggctctcactagaaaagtccacaacttccagatggaatgctctctgcaggccaagcccgcagtgcctacgtctaagctgggccaggcagaggggcgagatgcaggctcagcaccctccggaggggacccggccttcctgggcatggccgtgagcaccctgtgtggcgaggtgccgctctactacatctaggacgcctccggtgagcaggtgtgatcccagggcccctgatcagcagcggaggagcgctcgggccacctgcccgggctgtggaggagcgctcgcgctgaccaggcgctggggcgtccactgaagcggggtcatccaggcaactcgggggaggggaagctcacagaccggtacttcccactcccctgaattctctctgtccatcctcaacattcctttgcttcacagggtcagtggaagccccaacgggaaaggaaacgccccgggcaaagggtcttttgcagcttttgcagacgggcaagaagctgcttctgcccacaccgcagggacaagccctggagaaatgggagcttggggagaggatgggagtgggcagaggtggcgcccaggggcccgggaactcctgccacaacagaataaagcagcctgattgaaaagcaaaaaaaaanaanaaacanaanacgtgcgggagctggcaccgaagatcaagac

SEQ ID NO: 732928 - DNA, 949 bp, Homo sapiens
  misc_feature (906)..(906): n is a, c, g, or t
  misc_feature (909)..(909): n is a, c, g, or t
  misc_feature (915)..(915): n is a, c, g, or t
  misc_feature (918)..(918): n is a, c, g, or t
tgcaagaagcaaatcatatgacctgcggcaaccatgaatgtggtcgagcataggatcgtactgtagtggacataccgcagatggcatgtatctactgacatgattcgccctgggggtcgtatattgaggactttaccatggctgcgcgcaggtgacacctgtgaaatgctgttataattgtggatggtaggtgcgtgagtgcctactatacgtgcgattctagtacttgctagggagtccccatggcttcaatgtgcgtctactcacaatgaacccaccagaaacacacggagatggttctggagatgagcattggggcgccggaagcccagcaacgcctggccctgagtgagcacctggttaccactgccaccttctccatcggctccactggcctcgtggtgtatgactaccagcagctgctgatcgcctacaagccagcccctggcacctgctgctacatcatgaagatagctccagagagcatccccagtcttgaggctctcactagaaaagtccacaacaggccaagcccgcagtgcctacgtctaagctgggccaggcagaggggcgagatgcaggctcagcaccctccggaggggacccggccttcctgggcatggccgtgagcaccctgtgtggcgaggtgccgctctactacatctaggacgcctccggtgagcagggtcagtggaagccccaacgggaaaggaaacgccccgggcaaagggtcttttgcagcttttgcagacgggcaagaagctgcttctgcccacaccgcagggacaagccctggagaaatgggagcttggggagaggatgggagtgggcagaggtggcgcccaggggcccgggaactcctgccacaacagaataaagcagcctgattgaaaagcaaaaaaaaanaanaaacanaanacgtgcgggagctggcaccgaagatcaagac

SEQ ID NO: 732929 - DNA, 813 bp, Homo sapiens
  misc_feature (770)..(770): n is a, c, g, or t
  misc_feature (773)..(773): n is a, c, g, or t
  misc_feature (779)..(779): n is a, c, g, or t
  misc_feature (782)..(782): n is a, c, g, or t
tgcaagaagcaaatcatatgacctgcggcaaccatgaatgtggtcgagcataggatcgtactgtagtggacataccgcagatggcatgtatctactgacatgattcgccctgggggtcgtatattgaggactttaccatggctgcgcgcaggtgacacctgtgaaatgctgttataattgtggatggtaggtgcgtgagtgcctactatacgtgcgattctagtacttgctagggagtccccatggcttcaatgtgcgtctactcacaatgaacccaccagaaacacacggagatggttctggagatgagcattggggcgccggaagcccagcaacgcctggccctgagtgagcacctggttaccactgccaccttctccatcggctccactggcctcgtggtgtatgactaccagcagctgctgatcgcctacaagccagcccctggcacctgctgctacatcatgaagatagctccagagagcatccccagtcttgaggtgtggcgaggtgccgctctactacatctaggacgcctccggtgagcagggtcagtggaagccccaacgggaaaggaaacgccccgggcaaagggtcttttgcagcttttgcagacgggcaagaagctgcttctgcccacaccgcagggacaagccctggagaaatgggagcttggggagaggatgggagtgggcagaggtggcgcccaggggcccgggaactcctgccacaacagaataaagcagcctgattgaaaagcaaaaaaaaanaanaaacanaanacgtgcgggagctggcaccgaagatcaagac

SEQ ID NO: 732930 - DNA, 971 bp, Homo sapiens; identical to SEQ ID NO: 732925
  misc_feature (928)..(928): n is a, c, g, or t
  misc_feature (931)..(931): n is a, c, g, or t
  misc_feature (937)..(937): n is a, c, g, or t
  misc_feature (940)..(940): n is a, c, g, or t

SEQ ID NO: 732931 - DNA, 1178 bp, Homo sapiens; identical to SEQ ID NO: 732927
  misc_feature (1135)..(1135): n is a, c, g, or t
  misc_feature (1138)..(1138): n is a, c, g, or t
  misc_feature (1144)..(1144): n is a, c, g, or t
  misc_feature (1147)..(1147): n is a, c, g, or t

SEQ ID NO: 732932 - DNA, 971 bp, Homo sapiens
  misc_feature (513)..(513): n is a, c, g, or t
  misc_feature (928)..(928): n is a, c, g, or t
  misc_feature (931)..(931): n is a, c, g, or t
  misc_feature (937)..(937): n is a, c, g, or t
  misc_feature (940)..(940): n is a, c, g, or t
tgcaagaagcaaatcatatgacctgcggcaaccatgaatgtggtcgagcataggatcgtactgtagtggacataccgcagatggcatgtatctactgacatgattcgccctgggggtcgtatattgaggactttaccatggctgcgcgcaggtgacacctgtgaaatgctgttataattgtggatggtaggtgcgtgagtgcctactatacgtgcgattctagtacttgctagggagtccccatggcttcaatgtgcgtctactcacaatgaacccaccagaaacacacggagatggttctggagatgagcattggggcgccggaagcccagcaacgcctggccctgagtgagcacctggttaccactgccaccttctccatcggctccactggcctcgtggtgtatgactaccagcagctgctgatcgcctacaagccagcccctggcacctgctgctacatcatgaagatagctccagagagcatccccagtcttgaggctctcactaganaagtccacaacttccagatggaatgctctctgcaggccaagcccgcagtgcctacgtctaagctgggccaggcagaggggcgagatgcaggctcagcaccctccggaggggacccggccttcctgggcatggccgtgagcaccctgtgtggcgaggtgccgctctactacatctaggacgcctccggtgagcagggtcagtggaagccccaacgggaaaggaaacgccccgggcaaagggtcttttgcagcttttgcagacgggcaagaagctgcttctgcccacaccgcagggacaagccctggagaaatgggagcttggggagaggatgggagtgggcagaggtggcgcccaggggcccgggaactcctgccacaacagaataaagcagcctgattgaaaagcaaaaaaaaanaanaaacanaanacgtgcgggagctggcaccgaagatcaagac

SEQ ID NO: 732933 - DNA, 709 bp, Homo sapiens
  misc_feature (684)..(684): n is a, c, g, or t
  misc_feature (700)..(700): n is a, c, g, or t
tgcaagaagcaaatcatatgacctgcggcaaccatgaatgtggtcgagcataggatcgtactgtagtggacataccgcagatggcatgtatctactgacatgattcgccctgggggtcgtatattgaggactttaccatggctgcgcgcaggtgacacctgtgaaatgctgttataattgtggatggtaggtgcgtgagtgcctactatacgtgcgattctagtacttgctagggagtccccatggcttcaatgtgcgtctactcacaatgaacccaccagaaacacacggagatggttctggagatgagcattggggcgccggaagcccagcaacgcctggccctgagtgagcacctggttaccactgccaccttctccatcggctccactggcctcgtggtgtatgactaccagcagctgctgatcgcctacaagccagcccctggcacctgctgctacatcatgaagatagctccagagagcatccccagtcttgaggctctcactagaaaagtccacaacttccagatggaatgctctctgcaggccaagcccgcagtgcctacgtctaagctgggccaggcagaggggcgagatgcaggctcagcaccctccggaggggacccggccttcctgggcatggccgtgagcacccttttttgggcgaggttgccgttttatntacattttagggacgntttccggtt

SEQ ID NO: 732934 - DNA, 533 bp, Homo sapiens
  misc_feature (490)..(490): n is a, c, g, or t
  misc_feature (493)..(493): n is a, c, g, or t
  misc_feature (499)..(499): n is a, c, g, or t
  misc_feature (502)..(502): n is a, c, g, or t
tagctcggcccggttgcaactgaacaccggctctgaggcagcattctcccccagtttttcagccgtaattagtacaagtccacaacttccagatggaatgctctctgcaggccaagcccgcagtgcctacgtctaagctgggccaggcagaggggcgagatgcaggctcagcaccctccggaggggacccggccttcctgggcatggccgtgagcaccctgtgtggcgaggtgccgctctactacatctaggacgcctccggtgagcagggtcagtggaagccccaacgggaaaggaaacgccccgggcaaagggtcttttgcagcttttgcagacgggcaagaagctgcttctgcccacaccgcagggacaagccctggagaaatgggagcttggggagaggatgggagtgggcagaggtggcgcccaggggcccgggaactcctgccacaacagaataaagcagcctgattgaaaagcaaaaaaaaanaanaaacanaanacgtgcgggagctggcaccgaagatcaagac

SEQ ID NO: 732935 - DNA, 740 bp, Homo sapiens
  misc_feature (697)..(697): n is a, c, g, or t
  misc_feature (700)..(700): n is a, c, g, or t
  misc_feature (706)..(706): n is a, c, g, or t
  misc_feature (709)..(709): n is a, c, g, or t
tagctcggcccggttgcaactgaacaccggctctgaggcagcattctcccccagtttttcagccgtaattagtacaagtccacaacttccagatggaatgctctctgcaggccaagcccgcagtgcctacgtctaagctgggccaggcagaggggcgagatgcaggctcagcaccctccggaggggacccggccttcctgggcatggccgtgagcaccctgtgtggcgaggtgccgctctactacatctaggacgcctccggtgagcaggtgtgatcccagggcccctgatcagcagcggaggagcgctcgggccacctgcccgggctgtggaggagcgctcgcgctgaccaggcgctggggcgtccactgaagcggggtcatccaggcaactcgggggaggggaagctcacagaccggtacttcccactcccctgaattctctctgtccatcctcaacattcctttgcttcacagggtcagtggaagccccaacgggaaaggaaacgccccgggcaaagggtcttttgcagcttttgcagacgggcaagaagctgcttctgcccacaccgcagggacaagccctggagaaatgggagcttggggagaggatgggagtgggcagaggtggcgcccaggggcccgggaactcctgccacaacagaataaagcagcctgattgaaaagcaaaaaaaaanaanaaacanaanacgtgcgggagctggcaccgaagatcaagac

SEQ ID NO: 732936 - DNA, 1371 bp, Homo sapiens
  misc_feature (1328)..(1328): n is a, c, g, or t
  misc_feature (1331)..(1331): n is a, c, g, or t
  misc_feature (1337)..(1337): n is a, c, g, or t
  misc_feature (1340)..(1340): n is a, c, g, or t
cttatctcggcttcgtttctggagggccaggaacaaacaggcttcaaagccaagggcttggctggcacacagggggcttggtccttcacctctgtcccctctccctacggacacatataagaccctggtcacacctgggagaggaggagaggagagcatagcacctgcagcaagatggatgtgggcagcaaagaggtcctgatggagagcccgccggactactccgcagctccccggggccgatttggcattccctgctgcccagtgcacctgaaacgccttcttatcgtggtggtggtggtggtcctcatcgtcgtggtgattgtgggagccctgctcatgggtctccacatgagccagaaacacacggagatggttctggagatgagcattggggcgccggaagcccagcaacgcctggccctgagtgagcacctggttaccactgccaccttctccatcggctccactggcctcgtggtgtatgactaccagcagctgctgatcgcctacaagccagcccctggcacctgctgctacatcatgaagatagctccagagagcatccccagtcttgaggctctcactagaaaagtccacaacttccagcacagcccctctttactgatgagaaaactgaggctcagagagattgcctgatatacctgaagtcccacaataagggctgcacatgggatagaaactcacttcctacacttccagatggaatgctctctgcaggccaagcccgcagtgcctacgtctaagctgggccaggcagaggggcgagatgcaggctcagcaccctccggaggggacccggccttcctgggcatggccgtgagcaccctgtgtggcgaggtgccgctctactacatctaggacgcctccggtgagcaggtgtgatcccagggcccctgatcagcagcggaggagcgctcgggccacctgcccgggctgtggaggagcgctcgcgctgaccaggcgctggggcgtccactgaagcggggtcatccaggcaactcgggggaggggaagctcacagaccggtacttcccactcccctgaattctctctgtccatcctcaacattcctttgcttcacagggtcagtggaagccccaacgggaaaggaaacgccccgggcaaagggtcttttgcagcttttgcagacgggcaagaagctgcttctgcccacaccgcagggacaagccctggagaaatgggagcttggggagaggatgggagtgggcagaggtggcgcccaggggcccgggaactcctgccacaacagaataaagcagcctgattgaaaagcaaaaaaaaanaanaaacanaanacgtgcgggagctggcaccgaagatcaagac

SEQ ID NO: 732937 - DNA, 1013 bp, Homo sapiens
  misc_feature (970)..(970): n is a, c, g, or t
  misc_feature (973)..(973): n is a, c, g, or t
  misc_feature (979)..(979): n is a, c, g, or t
  misc_feature (982)..(982): n is a, c, g, or t
cttatctcggcttcgtttctggagggccaggaacaaacaggcttcaaagccaagggcttggctggcacacagggggcttggtccttcacctctgtcccctctccctacggacacatataagaccctggtcacacctgggagaggaggagaggagagcatagcacctgcagcaagatggatgtgggcagcaaagaggtcctgatggagagcccgccggactactccgcagctccccggggccgatttggcattccctgctgcccagtgcacctgaaacgccttcttatcgtggtggtggtggtggtcctcatcgtcgtggtgattgtgggagccctgctcatgggtctccacatgagccagaaacacacggagatggttctggagatgagcattggggcgccggaagcccagcaacgcctggcatcggctccactggcctcgtggtgtatgactaccagcagctgctgatcgcctacaagccagcccctggcacctgctgctacatcatgaagatagctccagagagcatccccagtcttgaggctctcactagaaaagtccacaacttccagatggaatgctctctgcaggccaagcccgcagtgcctacgtctaagctgggccaggcagaggggcgagatgcaggctcagcaccctccggaggggacccggccttcctgggcatggccgtgagcaccctgtgtggcgaggtgccgctctactacatctaggacgcctccggtgagcagggtcagtggaagccccaacgggaaaggaaacgccccgggcaaagggtcttttgcagcttttgcagacgggcaagaagctgcttctgcccacaccgcagggacaagccctggagaaatgggagcttggggagaggatgggagtgggcagaggtggcgcccaggggcccgggaactcctgccacaacagaataaagcagcctgattgaaaagcaaaaaaaaanaanaaacanaanacgtgcgggagctggcaccgaagatcaagac

SEQ ID NO: 732938 - DNA, 1143 bp, Homo sapiens
  misc_feature (1)..(1): n is a, c, g, or t
  misc_feature (28)..(28): n is a, c, g, or t
  misc_feature (33)..(33): n is a, c, g, or t
  misc_feature (1100)..(1100): n is a, c, g, or t
  misc_feature (1103)..(1103): n is a, c, g, or t
  misc_feature (1109)..(1109): n is a, c, g, or t
  misc_feature (1112)..(1112): n is a, c, g, or t
nctatatatcacgcgctactgatcaacnccgcngactgcatccaacgccgctgactgcatccaacgccgctgactgcatccaacgccgctgactgcatccaacgccgctgactgcatccaacgccgctgactgcatccaacgccgctgactgcatccaacgccgctgactgcatccaacgccgcccctatagttttcctgcccaaggttttcagcagatctcactgtgtcctttaggaggagaggagagcatagcacctgcagcaagatggatgtgggcagcaaagaggtcctgatggagagcccgccggactactccgcagctccccggggccgatttggcattccctgctgcccagtgcacctgaaacgccttcttatcgtggtggtggtggtggtcctcatcgtcgtggtgattgtgggagccctgctcatgggtctccacatgagccagaaacacacggagatggttctggagatgagcattggggcgccggaagcccagcaacgcctggccctgagtgagcacctggttaccactgccaccttctccatcggctccactggcctcgtggtgtatgactaccagcagctgctgatcgcctacaagccagcccctggcacctgctgctacatcatgaagatagctccagagagcatccccagtcttgaggctctcactagaaaagtccacaacttccagatggaatgctctctgcaggccaagcccgcagtgcctacgtctaagctgggccaggcagaggggcgagatgcaggctcagcaccctccggaggggacccggccttcctgggcatggccgtgagcaccctgtgtggcgaggtgccgctctactacatctaggacgcctccggtgagcagggtcagtggaagccccaacgggaaaggaaacgccccgggcaaagggtcttttgcagcttttgcagacgggcaagaagctgcttctgcccacaccgcagggacaagccctggagaaatgggagcttggggagaggatgggagtgggcagaggtggcgcccaggggcccgggaactcctgccacaacagaataaagcagcctgattgaaaagcaaaaaaaaanaanaaacanaanacgtgcgggagctggcaccgaagatcaagac

SEQ ID NO: 732939 - DNA, 1350 bp, Homo sapiens
  misc_feature (1)..(1): n is a, c, g, or t
  misc_feature (28)..(28): n is a, c, g, or t
  misc_feature (33)..(33): n is a, c, g, or t
  misc_feature (1307)..(1307): n is a, c, g, or t
  misc_feature (1310)..(1310): n is a, c, g, or t
  misc_feature (1316)..(1316): n is a, c, g, or t
  misc_feature (1319)..(1319): n is a, c, g, or t
nctatatatcacgcgctactgatcaacnccgcngactgcatccaacgccgctgactgcatccaacgccgctgactgcatccaacgccgctgactgcatccaacgccgctgactgcatccaacgccgctgactgcatccaacgccgctgactgcatccaacgccgctgactgcatccaacgccgcccctatagttttcctgcccaaggttttcagcagatctcactgtgtcctttaggaggagaggagagcatagcacctgcagcaagatggatgtgggcagcaaagaggtcctgatggagagcccgccggactactccgcagctccccggggccgatttggcattccctgctgcccagtgcacctgaaacgccttcttatcgtggtggtggtggtggtcctcatcgtcgtggtgattgtgggagccctgctcatgggtctccacatgagccagaaacacacggagatggttctggagatgagcattggggcgccggaagcccagcaacgcctggccctgagtgagcacctggttaccactgccaccttctccatcggctccactggcctcgtggtgtatgactaccagcagctgctgatcgcctacaagccagcccctggcacctgctgctacatcatgaagatagctccagagagcatccccagtcttgaggctctcactagaaaagtccacaacttccagatggaatgctctctgcaggccaagcccgcagtgcctacgtctaagctgggccaggcagaggggcgagatgcaggctcagcaccctccggaggggacccggccttcctgggcatggccgtgagcaccctgtgtggcgaggtgccgctctactacatctaggacgcctccggtgagcaggtgtgatcccagggcccctgatcagcagcggaggagcgctcgggccacctgcccgggctgtggaggagcgctcgcgctgaccaggcgctggggcgtccactgaagcggggtcatccaggcaactcgggggaggggaagctcacagaccggtacttcccactcccctgaattctctctgtccatcctcaacattcctttgcttcacagggtcagtggaagccccaacgggaaaggaaacgccccgggcaaagggtcttttgcagcttttgcagacgggcaagaagctgcttctgcccacaccgcagggacaagccctggagaaatgggagcttggggagaggatgggagtgggcagaggtggcgcccaggggcccgggaactcctgccacaacagaataaagcagcctgattgaaaagcaaaaaaaaanaanaaacanaanacgtgcgggagctggcaccgaagatcaagac

SEQ ID NO: 732940 - DNA, 1328 bp, Homo sapiens
  misc_feature (1)..(1): n is a, c, g, or t
  misc_feature (28)..(28): n is a, c, g, or t
  misc_feature (33)..(33): n is a, c, g, or t
  misc_feature (1285)..(1285): n is a, c, g, or t
  misc_feature (1288)..(1288): n is a, c, g, or t
  misc_feature (1294)..(1294): n is a, c, g, or t
  misc_feature (1297)..(1297): n is a, c, g, or t
nctatatatcacgcgctactgatcaacnccgcngactgcatccaacgccgctgactgcatccaacgccgctgactgcatccaacgccgctgactgcatccaacgccgctgactgcatccaacgccgctgactgcatccaacgccgctgactgcatccaacgccgctgactgcatccaacgccgcccctatagttttcctgcccaaggttttcagcagatctcactgtgtcctttaggaggagaggagagcatagcacctgcagcaagatggatgtgggcagcaaagaggtcctgatggagagcccgccggactactccgcagctccccggggccgatttggcattccctgctgcccagtgcacctgaaacgccttcttatcgtggtggtggtggtggtcctcatcgtcgtggtgattgtgggagccctgctcatgggtctccacatgagccagaaacacacggagatggttctggagatgagcattggggcgccggaagcccagcaacgcctggccctgagtgagcacctggttaccactgccaccttctccatcggctccactggcctcgtggtgtatgactaccagcagctgctgatcgcctacaagccagcccctggcacctgctgctacatcatgaagatagctccagagagcatccccagtcttgaggctctcactagaaaagtccacaacaggccaagcccgcagtgcctacgtctaagctgggccaggcagaggggcgagatgcaggctcagcaccctccggaggggacccggccttcctgggcatggccgtgagcaccctgtgtggcgaggtgccgctctactacatctaggacgcctccggtgagcaggtgtgatcccagggcccctgatcagcagcggaggagcgctcgggccacctgcccgggctgtggaggagcgctcgcgctgaccaggcgctggggcgtccactgaagcggggtcatccaggcaactcgggggaggggaagctcacagaccggtacttcccactcccctgaattctctctgtccatcctcaacattcctttgcttcacagggtcagtggaagccccaacgggaaaggaaacgccccgggcaaagggtcttttgcagcttttgcagacgggcaagaagctgcttctgcccacaccgcagggacaagccctggagaaatgggagcttggggagaggatgggagtgggcagaggtggcgcccaggggcccgggaactcctgccacaacagaataaagcagcctgattgaaaagcaaaaaaaaanaanaaacanaanacgtgcgggagctggcaccgaagatcaagac

SEQ ID NO: 732941 - DNA, 1121 bp, Homo sapiens
  misc_feature (1)..(1): n is a, c, g, or t
  misc_feature (28)..(28): n is a, c, g, or t
  misc_feature (33)..(33): n is a, c, g, or t
  misc_feature (1078)..(1078): n is a, c, g, or t
  misc_feature (1081)..(1081): n is a, c, g, or t
  misc_feature (1087)..(1087): n is a, c, g, or t
  misc_feature (1090)..(1090): n is a, c, g, or t
nctatatatcacgcgctactgatcaacnccgcngactgcatccaacgccgctgactgcatccaacgccgctgactgcatccaacgccgctgactgcatccaacgccgctgactgcatccaacgccgctgactgcatccaacgccgctgactgcatccaacgccgctgactgcatccaacgccgcccctatagttttcctgcccaaggttttcagcagatctcactgtgtcctttaggaggagaggagagcatagcacctgcagcaagatggatgtgggcagcaaagaggtcctgatggagagcccgccggactactccgcagctccccggggccgatttggcattccctgctgcccagtgcacctgaaacgccttcttatcgtggtggtggtggtggtcctcatcgtcgtggtgattgtgggagccctgctcatgggtctccacatgagccagaaacacacggagatggttctggagatgagcattggggcgccggaagcccagcaacgcctggccctgagtgagcacctggttaccactgccaccttctccatcggctccactggcctcgtggtgtatgactaccagcagctgctgatcgcctacaagccagcccctggcacctgctgctacatcatgaagatagctccagagagcatccccagtcttgaggctctcactagaaaagtccacaacaggccaagcccgcagtgcctacgtctaagctgggccaggcagaggggcgagatgcaggctcagcaccctccggaggggacccggccttcctgggcatggccgtgagcaccctgtgtggcgaggtgccgctctactacatctaggacgcctccggtgagcagggtcagtggaagccccaacgggaaaggaaacgccccgggcaaagggtcttttgcagcttttgcagacgggcaagaagctgcttctgcccacaccgcagggacaagccctggagaaatgggagcttggggagaggatgggagtgggcagaggtggcgcccaggggcccgggaactcctgccacaacagaataaagcagcctgattgaaaagcaaaaaaaaanaanaaacanaanacgtgcgggagctggcaccgaagatcaagac

SEQ ID NO: 732942 - DNA, 985 bp, Homo sapiens
  misc_feature (1)..(1): n is a, c, g, or t
  misc_feature (28)..(28): n is a, c, g, or t
  misc_feature (33)..(33): n is a, c, g, or t
  misc_feature (942)..(942): n is a, c, g, or t
  misc_feature (945)..(945): n is a, c, g, or t
  misc_feature (951)..(951): n is a, c, g, or t
  misc_feature (954)..(954): n is a, c, g, or t
nctatatatcacgcgctactgatcaacnccgcngactgcatccaacgccgctgactgcatccaacgccgctgactgcatccaacgccgctgactgcatccaacgccgctgactgcatccaacgccgctgactgcatccaacgccgctgactgcatccaacgccgctgactgcatccaacgccgcccctatagttttcctgcccaaggttttcagcagatctcactgtgtcctttaggaggagaggagagcatagcacctgcagcaagatggatgtgggcagcaaagaggtcctgatggagagcccgccggactactccgcagctccccggggccgatttggcattccctgctgcccagtgcacctgaaacgccttcttatcgtggtggtggtggtggtcctcatcgtcgtggtgattgtgggagccctgctcatgggtctccacatgagccagaaacacacggagatggttctggagatgagcattggggcgccggaagcccagcaacgcctggccctgagtgagcacctggttaccactgccaccttctccatcggctccactggcctcgtggtgtatgactaccagcagctgctgatcgcctacaagccagcccctggcacctgctgctacatcatgaagatagctccagagagcatccccagtcttgaggtgtggcgaggtgccgctctactacatctaggacgcctccggtgagcagggtcagtggaagccccaacgggaaaggaaacgccccgggcaaagggtcttttgcagcttttgcagacgggcaagaagctgcttctgcccacaccgcagggacaagccctggagaaatgggagcttggggagaggatgggagtgggcagaggtggcgcccaggggcccgggaactcctgccacaacagaataaagcagcctgattgaaaagcaaaaaaaaanaanaaacanaanacgtgcgggagctggcaccgaagatcaagac

SEQ ID NO: 732943 - DNA, 1143 bp, Homo sapiens; identical to SEQ ID NO: 732938
  misc_feature (1)..(1): n is a, c, g, or t
  misc_feature (28)..(28): n is a, c, g, or t
  misc_feature (33)..(33): n is a, c, g, or t
  misc_feature (1100)..(1100): n is a, c, g, or t
  misc_feature (1103)..(1103): n is a, c, g, or t
  misc_feature (1109)..(1109): n is a, c, g, or t
  misc_feature (1112)..(1112): n is a, c, g, or t

SEQ ID NO: 732944 - DNA, 1350 bp, Homo sapiens; identical to SEQ ID NO: 732939
  misc_feature (1)..(1): n is a, c, g, or t
  misc_feature (28)..(28): n is a, c, g, or t
  misc_feature (33)..(33): n is a, c, g, or t
  misc_feature (1307)..(1307): n is a, c, g, or t
  misc_feature (1310)..(1310): n is a, c, g, or t
  misc_feature (1316)..(1316): n is a, c, g, or t
  misc_feature (1319)..(1319): n is a, c, g, or t

SEQ ID NO: 732945 - DNA, 1143 bp, Homo sapiens
  misc_feature (1)..(1): n is a, c, g, or t
  misc_feature (28)..(28): n is a, c, g, or t
  misc_feature (33)..(33): n is a, c, g, or t
  misc_feature (685)..(685): n is a, c, g, or t
  misc_feature (1100)..(1100): n is a, c, g, or t
  misc_feature (1103)..(1103): n is a, c, g, or t
  misc_feature (1109)..(1109): n is a, c, g, or t
  misc_feature (1112)..(1112): n is a, c, g, or t
nctatatatcacgcgctactgatcaacnccgcngactgcatccaacgccgctgactgcatccaacgccgctgactgcatccaacgccgctgactgcatccaacgccgctgactgcatccaacgccgctgactgcatccaacgccgctgactgcatccaacgccgctgactgcatccaacgccgcccctatagttttcctgcccaaggttttcagcagatctcactgtgtcctttaggaggagaggagagcatagcacctgcagcaagatggatgtgggcagcaaagaggtcctgatggagagcccgccggactactccgcagctccccggggccgatttggcattccctgctgcccagtgcacctgaaacgccttcttatcgtggtggtggtggtggtcctcatcgtcgtggtgattgtgggagccctgctcatgggtctccacatgagccagaaacacacggagatggttctggagatgagcattggggcgccggaagcccagcaacgcctggccctgagtgagcacctggttaccactgccaccttctccatcggctccactggcctcgtggtgtatgactaccagcagctgctgatcgcctacaagccagcccctggcacctgctgctacatcatgaagatagctccagagagcatccccagtcttgaggctctcactaganaagtccacaacttccagatggaatgctctctgcaggccaagcccgcagtgcctacgtctaagctgggccaggcagaggggcgagatgcaggctcagcaccctccggaggggacccggccttcctgggcatggccgtgagcaccctgtgtggcgaggtgccgctctactacatctaggacgcctccggtgagcagggtcagtggaagccccaacgggaaaggaaacgccccgggcaaagggtcttttgcagcttttgcagacgggcaagaagctgcttctgcccacaccgcagggacaagccctggagaaatgggagcttggggagaggatgggagtgggcagaggtggcgcccaggggcccgggaactcctgccacaacagaataaagcagcctgattgaaaagcaaaaaaaaanaanaaacanaanacgtgcgggagctggcaccgaagatcaagac

SEQ ID NO: 732946 - DNA, 881 bp, Homo sapiens
  misc_feature (1)..(1): n is a, c, g, or t
  misc_feature (28)..(28): n is a, c, g, or t
  misc_feature (33)..(33): n is a, c, g, or t
  misc_feature (856)..(856): n is a, c, g, or t
  misc_feature (872)..(872): n is a, c, g, or t
nctatatatcacgcgctactgatcaacnccgcngactgcatccaacgccgctgactgcatccaacgccgctgactgcatccaacgccgctgactgcatccaacgccgctgactgcatccaacgccgctgactgcatccaacgccgctgactgcatccaacgccgctgactgcatccaacgccgcccctatagttttcctgcccaaggttttcagcagatctcactgtgtcctttaggaggagaggagagcatagcacctgcagcaagatggatgtgggcagcaaagaggtcctgatggagagcccgccggactactccgcagctccccggggccgatttggcattccctgctgcccagtgcacctgaaacgccttcttatcgtggtggtggtggtggtcctcatcgtcgtggtgattgtgggagccctgctcatgggtctccacatgagccagaaacacacggagatggttctggagatgagcattggggcgccggaagcccagcaacgcctggccctgagtgagcacctggttaccactgccaccttctccatcggctccactggcctcgtggtgtatgactaccagcagctgctgatcgcctacaagccagcccctggcacctgctgctacatcatgaagatagctccagagagcatccccagtcttgaggctctcactagaaaagtccacaacttccagatggaatgctctctgcaggccaagcccgcagtgcctacgtctaagctgggccaggcagaggggcgagatgcaggctcagcaccctccggaggggacccggccttcctgggcatggccgtgagcacccttttttgggcgaggttgccgttttatntacattttagggacgntttccggtt

SEQ ID NO: 732947 - DNA, 1464 bp, Homo sapiens
  misc_feature (1)..(1): n is a, c, g, or t
  misc_feature (28)..(28): n is a, c, g, or t
  misc_feature (33)..(33): n is a, c, g, or t
  misc_feature (1421)..(1421): n is a, c, g, or t
  misc_feature (1424)..(1424): n is a, c, g, or t
  misc_feature (1430)..(1430): n is a, c, g, or t
  misc_feature (1433)..(1433): n is a, c, g, or t
nctatatatcacgcgctactgatcaacnccgcngactgcatccaacgccgctgactgcatccaacgccgctgactgcatccaacgccgctgactgcatccaacgccgctgactgcatccaacgccgctgactgcatccaacgccgctgactgcatccaacgccgctgactgcatccaacgccgcccctatagttttcctgcccaaggttttcagcagatctcactgtgtcctttaggaggagaggagagcatagcacctgcagcaagatggatgtgggcagcaaagaggtcctgatggagagcccgccggactactccgcagctccccggggccgatttggcattccctgctgcccagtgcacctgaaacgccttcttatcgtggtggtggtggtggtcctcatcgtcgtggtgattgtgggagccctgctcatgggtctccacatgagccagaaacacacggagatggttctggagatgagcattggggcgccggaagcccagcaacgcctggccctgagtgagcacctggttaccactgccaccttctccatcggctccactggcctcgtggtgtatgactaccagcagctgctgatcgcctacaagccagcccctggcacctgctgctacatcatgaagatagctccagagagcatccccagtcttgaggctctcactagaaaagtccacaacttccagcacagcccctctttactgatgagaaaactgaggctcagagagattgcctgatatacctgaagtcccacaataagggctgcacatgggatagaaactcacttcctacacttccagatggaatgctctctgcaggccaagcccgcagtgcctacgtctaagctgggccaggcagaggggcgagatgcaggctcagcaccctccggaggggacccggccttcctgggcatggccgtgagcaccctgtgtggcgaggtgccgctctactacatctaggacgcctccggtgagcaggtgtgatcccagggcccctgatcagcagcggaggagcgctcgggccacctgcccgggctgtggaggagcgctcgcgctgaccaggcgctggggcgtccactgaagcggggtcatccaggcaactcgggggaggggaagctcacagaccggtacttcccactcccctgaattctctctgtccatcctcaacattcctttgcttcacagggtcagtggaagccccaacgggaaaggaaacgccccgggcaaagggtcttttgcagcttttgcagacgggcaagaagctgcttctgcccacaccgcagggacaagccctggagaaatgggagcttggggagaggatgggagtgggcagaggtggcgcccaggggcccgggaactcctgccacaacagaataaagcagcctgattgaaaagcaaaaaaaaanaanaaacanaanacgtgcgggagctggcaccgaagatcaagac

SEQ ID NO: 732948 - DNA, 1041 bp, Homo sapiens
  misc_feature (1)..(1): n is a, c, g, or t
  misc_feature (28)..(28): n is a, c, g, or t
  misc_feature (33)..(33): n is a, c, g, or t
  misc_feature (998)..(998): n is a, c, g, or t
  misc_feature (1001)..(1001): n is a, c, g, or t
  misc_feature (1007)..(1007): n is a, c, g, or t
  misc_feature (1010)..(1010): n is a, c, g, or t
nctatatatcacgcgctactgatcaacnccgcngactgcatccaacgccgctgactgcatccaacgccgctgactgcatccaacgccgctgactgcatccaacgccgctgactgcatccaacgccgctgactgcatccaacgccgctgactgcatccaacgccgctgactgcatccaacgccgcccctatagttttcctgcccaaggttttcagcagatctcactgtgtcctttaggaggagaggagagcatagcacctgcagcaagatggatgtgggcagcaaagaggtcctgatggagagcccgccggactactccgcagctccccggggccgatttggcattccctgctgcccagtgcacctgaaacgccttcttatcgtggtggtggtggtggtcctcatcgtcgtggtgattgtgggagccctgctcatgggtctccacatgagccagaaacacacggagatggttctggagatgagcattggggcgccggaagcccagcaacgcctggccctgagtgagcacctggttaccactgccaccttctccatcggctccactggcctcgtggtgtatgactaccagcagctgctgatcgcctacaagccagcccctggcacctgctgctacatcatgaagatagctccagagagcatccccagtcttgaggctctcactagaaaagtccacaacaggccaagcccgcagtgcctacgtctaagctggtgtggcgaggtgccgctctactacatctaggacgcctccggtgagcagggtcagtggaagccccaacgggaaaggaaacgccccgggcaaagggtcttttgcagcttttgcagacgggcaagaagctgcttctgcccacaccgcagggacaagccctggagaaatgggagcttggggagaggatgggagtgggcagaggtggcgcccaggggcccgggaactcctgccacaacagaataaagcagcctgattgaaaagcaaaaaaaaanaanaaacanaanacgtgcgggagctggcaccgaagatcaagac

SEQ ID NO: 732949 - DNA, 576 bp, Homo sapiens
  misc_feature (1)..(1): n is a, c, g, or t
  misc_feature (28)..(28): n is a, c, g, or t
  misc_feature (33)..(33): n is a, c, g, or t
nctatatatcacgcgctactgatcaacnccgcngactgcatccaacgccgctgactgcatccaacgccgctgactgcatccaacgccgctgactgcatccaacgccgctgactgcatccaacgccgctgactgcatccaacgccgctgactgcatccaacgccgctgactgcatccaacgccgcccctatagttttcctgcccaaggttttcagcagatctcactgtgtcctttaggaggagaggagagcatagcacctgcagcaagatggatgtgggcagcaaagaggtcctgatggagagcccgccggactactccgcagctccccggggccgatttggcattccctgctgcccagtgcacctgaaacgccttcttatcgtggtggtggtggtggtcctcatcgtcgtggtgattgtgggagccctgctcatgggtctccacatgagccagaaacacacggagatggttctggagatgagcattggggcgccggaagcccagcaacgcctggccctgagtgagcacctggttaccactgccaccttctccgcgatcgaagtgtgggagccggct

SEQ ID NO: 732950 - DNA, 1106 bp, Homo sapiens
  misc_feature (1)..(1): n is a, c, g, or t
  misc_feature (28)..(28): n is a, c, g, or t
  misc_feature (33)..(33): n is a, c, g, or t
  misc_feature (1063)..(1063): n is a, c, g, or t
  misc_feature (1066)..(1066): n is a, c, g, or t
  misc_feature (1072)..(1072): n is a, c, g, or t
  misc_feature (1075)..(1075): n is a, c, g, or t
nctatatatcacgcgctactgatcaacnccgcngactgcatccaacgccgctgactgcatccaacgccgctgactgcatccaacgccgctgactgcatccaacgccgctgactgcatccaacgccgctgactgcatccaacgccgctgactgcatccaacgccgctgactgcatccaacgccgcccctatagttttcctgcccaaggttttcagcagatctcactgtgtcctttaggaggagaggagagcatagcacctgcagcaagatggatgtgggcagcaaagaggtcctgatggagagcccgccggactactccgcagctccccggggccgatttggcattccctgctgcccagtgcacctgaaacgccttcttatcgtggtggtggtggtggtcctcatcgtcgtggtgattgtgggagccctgctcatgggtctccacatgagccagaaacacacggagatggttctggagatgagcattggggcgccggaagcccagcaacgcctggcatcggctccactggcctcgtggtgtatgactaccagcagctgctgatcgcctacaagccagcccctggcacctgctgctacatcatgaagatagctccagagagcatccccagtcttgaggctctcactagaaaagtccacaacttccagatggaatgctctctgcaggccaagcccgcagtgcctacgtctaagctgggccaggcagaggggcgagatgcaggctcagcaccctccggaggggacccggccttcctgggcatggccgtgagcaccctgtgtggcgaggtgccgctctactacatctaggacgcctccggtgagcagggtcagtggaagccccaacgggaaaggaaacgccccgggcaaagggtcttttgcagcttttgcagacgggcaagaagctgcttctgcccacaccgcagggacaagccctggagaaatgggagcttggggagaggatgggagtgggcagaggtggcgcccaggggcccgggaactcctgccacaacagaataaagcagcctgattgaaaagcaaaaaaaaanaanaaacanaanacgtgcgggagctggcaccgaagatcaagac

SEQ ID NO: 732951 - DNA, 1206 bp, Homo sapiens
  misc_feature (1)..(1): n is a, c, g, or t
  misc_feature (28)..(28): n is a, c, g, or t
  misc_feature (33)..(33): n is a, c, g, or t
  misc_feature (1163)..(1163): n is a, c, g, or t
  misc_feature (1166)..(1166): n is a, c, g, or t
  misc_feature (1172)..(1172): n is a, c, g, or t
  misc_feature (1175)..(1175): n is a, c, g, or t
nctatatatcacgcgctactgatcaacnccgcngactgcatccaacgccgctgactgcatccaacgccgctgactgcatccaacgccgctgactgcatccaacgccgctgactgcatccaacgccgctgactgcatccaacgccgctgactgcatccaacgccgctgactgcatccaacgccgcccctatagttttcctgcccaaggttttcagcagatctcactgtgtcctttaggaggagaggagagcatagcacctgcagcaagatggatgtgggcagcaaagaggtcctgatggagagcccgccggactactccgcagctccccggggccgatttggcattccctgctgcccagtgcacctgaaacgccttcttatcgtggtggtggtggtggtcctcatcgtcatcggctccactggcctcgtggtgtatgactaccagcagctgctgatcgcctacaagccagcccctggcacctgctgctacatcatgaagatagctccagagagcatccccagtcttgaggctctcactagaaaagtccacaacttccagatggaatgctctctgcaggccaagcccgcagtgcctacgtctaagctgggccaggcagaggggcgagatgcaggctcagcaccctccggaggggacccggccttcctgggcatggccgtgagcaccctgtgtggcgaggtgccgctctactacatctaggacgcctccggtgagcaggtgtgatcccagggcccctgatcagcagcggaggagcgctcgggccacctgcccgggctgtggaggagcgctcgcgctgaccaggcgctggggcgtccactgaagcggggtcatccaggcaactcgggggaggggaagctcacagaccggtacttcccactcccctgaattctctctgtccatcctcaacattcctttgcttcacagggtcagtggaagccccaacgggaaaggaaacgccccgggcaaagggtcttttgcagcttttgcagacgggcaagaagctgcttctgcccacaccgcagggacaagccctggagaaatgggagcttggggagaggatgggagtgggcagaggtggcgcccaggggcccgggaactcctgccacaacagaataaagcagcctgattgaaaagcaaaaaaaaanaanaaacanaanacgtgcgggagctggcaccgaagatcaagac

SEQ ID NO: 732952 - DNA, 1119 bp, Homo sapiens
  misc_feature (1)..(1): n is a, c, g, or t
  misc_feature (28)..(28): n is a, c, g, or t
  misc_feature (33)..(33): n is a, c, g, or t
  misc_feature (1076)..(1076): n is a, c, g, or t
  misc_feature (1079)..(1079): n is a, c, g, or t
  misc_feature (1085)..(1085): n is a, c, g, or t
  misc_feature (1088)..(1088): n is a, c, g, or t
nctatatatcacgcgctactgatcaacnccgcngactgcatccaacgccgctgactgcatccaacgccgctgactgcatccaacgccgctgactgcatccaacgccgctgactgcatccaacgccgctgactgcatccaacgccgctgactgcatccaacgccgctgactgcatccaacgccgcccctatagttttcctgcccaaggttttcagcagatctcactgtgtcctttaggaggagaggagagcatagcacctgcagcaagatggatgtgggcagcaaagaggtcctgatggagagcccgccggactactccgcagctccccggggccgatttggcattccctgctgcccagtgcacctgaaacgccttcttatcgtggtggtgattgtgggagccctgctcatgggtctccacatgagccagaaacacacggagatggttctggagatgagcattggggcgccggaagcccagcaacgcctggccctgagtgagcacctggttaccactgccaccttctccatcggctccactggcctcgtggtgtatgactaccagcagctgctgatcgcctacaagccagcccctggcacctgctgctacatcatgaagatagctccagagagcatccccagtcttgaggctctcactagaaaagtccacaacttccagatggaatgctctctgcaggccaagcccgcagtgcctacgtctaagctgggccaggcagaggggcgagatgcaggctcagcaccctccggaggggacccggccttcctgggcatggccgtgagcaccctgtgtggcgaggtgccgctctactacatctaggacgcctccggtgagcagggtcagtggaagccccaacgggaaaggaaacgccccgggcaaagggtcttttgcagcttttgcagacgggcaagaagctgcttctgcccacaccgcagggacaagccctggagaaatgggagcttggggagaggatgggagtgggcagaggtggcgcccaggggcccgggaactcctgccacaacagaataaagcagcctgattgaaaagcaaaaaaaaanaanaaacanaanacgtgcgggagctggcaccgaagatcaagac

SEQ ID NO: 732953 - DNA, 1326 bp, Homo sapiens
  misc_feature (1)..(1): n is a, c, g, or t
  misc_feature (28)..(28): n is a, c, g, or t
  misc_feature (33)..(33): n is a, c, g, or t
  misc_feature (1283)..(1283): n is a, c, g, or t
  misc_feature (1286)..(1286): n is a, c, g, or t
  misc_feature (1292)..(1292): n is a, c, g, or t
  misc_feature (1295)..(1295): n is a, c, g, or t
nctatatatcacgcgctactgatcaacnccgcngactgcatccaacgccgctgactgcatccaacgccgctgactgcatccaacgccgctgactgcatccaacgccgctgactgcatccaacgccgctgactgcatccaacgccgctgactgcatccaacgccgctgactgcatccaacgccgcccctatagttttcctgcccaaggttttcagcagatctcactgtgtcctttaggaggagaggagagcatagcacctgcagcaagatggatgtgggcagcaaagaggtcctgatggagagcccgccggactactccgcagctccccggggccgatttggcattccctgctgcccagtgcacctgaaacgccttcttatcgtggtggtgattgtgggagccctgctcatgggtctccacatgagccagaaacacacggagatggttctggagatgagcattggggcgccggaagcccagcaacgcctggccctgagtgagcacctggttaccactgccaccttctccatcggctccactggcctcgtggtgtatgactaccagcagctgctgatcgcctacaagccagcccctggcacctgctgctacatcatgaagatagctccagagagcatccccagtcttgaggctctcactagaaaagtccacaacttccagatggaatgctctctgcaggccaagcccgcagtgcctacgtctaagctgggccaggcagaggggcgagatgcaggctcagcaccctccggaggggacccggccttcctgggcatggccgtgagcaccctgtgtggcgaggtgccgctctactacatctaggacgcctccggtgagcaggtgtgatcccagggcccctgatcagcagcggaggagcgctcgggccacctgcccgggctgtggaggagcgctcgcgctgaccaggcgctggggcgtccactgaagcggggtcatccaggcaactcgggggaggggaagctcacagaccggtacttcccactcccctgaattctctctgtccatcctcaacattcctttgcttcacagggtcagtggaagccccaacgggaaaggaaacgccccgggcaaagggtcttttgcagcttttgcagacgggcaagaagctgcttctgcccacaccgcagggacaagccctggagaaatgggagcttggggagaggatgggagtgggcagaggtggcgcccaggggcccgggaactcctgccacaacagaataaagcagcctgattgaaaagcaaaaaaaaanaanaaacanaanacgtgcgggagctggcaccgaagatcaagac

SEQ ID NO: 732954 - DNA, 1108 bp, Homo sapiens
  misc_feature (1)..(1): n is a, c, g, or t
  misc_feature (28)..(28): n is a, c, g, or t
  misc_feature (33)..(33): n is a, c, g, or t
nctatatatcacgcgctactgatcaacnccgcngactgcatccaacgccgctgactgcatccaacgccgctgactgcatccaacgccgctgactgcatccaacgccgctgactgcatccaacgccgctgactgcatccaacgccgctgactgcatccaacgccgctgactgcatccaacgccgcccctatagttttcctgcccaaggttttcagcagatctcactgtgtcctttaggaggagaggagagcatagcacctgcagcaagatggatgtgggcagcaaagaggtcctgatggagagcccgccggactactccgcagctccccggggccgatttggcattccctgctgcccagtgcacctgaaacgccttcttatcgtggtggtggtggtggtcctcatcgtcgtggtgattgtggaagccccaacgggaaaggaaacgccccgggcaaagggtcttttgcagcttttgcagacgggcaagaagctgcttctgcccacaccgcagggacatgagccagaaacacacggagatggttctggagatgagcattggggcgccggaagcccagcaacgcctggccctgagtgagcacctggttaccactgccaccttctccatcggctccactggcctcgtggtgtatgactaccagcagctgctgatcgcctacaagccagcccctggcacctgctgctacatcatgaagatagctccagagagcatccccagtcttgaggctctcactagaaaagtccacaacttccagatggaatgctctctgcaggccaagcccgcagtgcctacgtctaagctgggccaggcagaggggcgagatgcaggctcagcaccctccggaggggacccggccttcctgggcatggccgtgagcaccctgtgtggcgaggggcggtcttataattagagctcccgtgagcaggtcagtggaaacccagggattccgccaaacggataagcctgtgaaacaaaaaagaaaaaaaaaattggctcgcgcgaaattaacattgggcggcccaaaaaaatggagcccaaacgggaaggggtccacaagcggggggaaaaagtgtggtaacccaaccccggg

SEQ ID NO: 732955 - DNA, 673 bp, Homo sapiens
  misc_feature (630)..(630): n is a, c, g, or t
  misc_feature (633)..(633): n is a, c, g, or t
  misc_feature (639)..(639): n is a, c, g, or t
  misc_feature (642)..(642): n is a, c, g, or t
ctatcttcatgatgtagcagcaggtcgcaggggctggcttgtaggcgcatcagagtgctggtagtcatacaccaccttctccatcggctccactggcctcgtggtgtatgactaccagcagctgctgatcgcctacaagccagcccctggcacctgctgctacatcatgaagatagctccagagagcatccccagtcttgaggctctcactagaaaagtccacaacttccagatggaatgctctctgcaggccaagcccgcagtgcctacgtctaagctgggccaggcagaggggcgagatgcaggctcagcaccctccggaggggacccggccttcctgggcatggccgtgagcaccctgtgtggcgaggtgccgctctactacatctaggacgcctccggtgagcagggtcagtggaagccccaacgggaaaggaaacgccccgggcaaagggtcttttgcagcttttgcagacgggcaagaagctgcttctgcccacaccgcagggacaagccctggagaaatgggagcttggggagaggatgggagtgggcagaggtggcgcccaggggcccgggaactcctgccacaacagaataaagcagcctgattgaaaagcaaaaaaaaanaanaaacanaanacgtgcgggagctggcaccgaagatcaagac

SEQ ID NO: 732956 - DNA, 880 bp, Homo sapiens
  misc_feature (837)..(837): n is a, c, g, or t
  misc_feature (840)..(840): n is a, c, g, or t
  misc_feature (846)..(846): n is a, c, g, or t
  misc_feature (849)..(849): n is a, c, g, or t
ctatcttcatgatgtagcagcaggtcgcaggggctggcttgtaggcgcatcagagtgctggtagtcatacaccaccttctccatcggctccactggcctcgtggtgtatgactaccagcagctgctgatcgcctacaagccagcccctggcacctgctgctacatcatgaagatagctccagagagcatccccagtcttgaggctctcactagaaaagtccacaacttccagatggaatgctctctgcaggccaagcccgcagtgcctacgtctaagctgggccaggcagaggggcgagatgcaggctcagcaccctccggaggggacccggccttcctgggcatggccgtgagcaccctgtgtggcgaggtgccgctctactacatctaggacgcctccggtgagcaggtgtgatcccagggcccctgatcagcagcggaggagcgctcgggccacctgcccgggctgtggaggagcgctcgcgctgaccaggcgctggggcgtccactgaagcggggtcatccaggcaactcgggggaggggaagctcacagaccggtacttcccactcccctgaattctctctgtccatcctcaacattcctttgcttcacagggtcagtggaagccccaacgggaaaggaaacgccccgggcaaagggtcttttgcagcttttgcagacgggcaagaagctgcttctgcccacaccgcagggacaagccctggagaaatgggagcttggggagaggatgggagtgggcagaggtggcgcccaggggcccgggaactcctgccacaacagaataaagcagcctgattgaaaagcaaaaaaaaanaanaaacanaanacgtgcgggagctggcaccgaagatcaagac

SEQ ID NO: 732957 - DNA, 1350 bp, Homo sapiens
  misc_feature (1)..(1): n is a, c, g, or t
  misc_feature (28)..(28): n is a, c, g, or t
  misc_feature (33)..(33): n is a, c, g, or t
  misc_feature (685)..(685): n is a, c, g, or t
  misc_feature (1307)..(1307): n is a, c, g, or t
  misc_feature (1310)..(1310): n is a, c, g, or t
  misc_feature (1316)..(1316): n is a, c, g, or t
  misc_feature (1319)..(1319): n is a, c, g, or t
nctatatatcacgcgctactgatcaacnccgcngactgcatccaacgccgctgactgcatccaacgccgctgactgcatccaacgccgctgactgcatccaacgccgctgactgcatccaacgccgctgactgcatccaacgccgctgactgcatccaacgccgctgactgcatccaacgccgcccctatagttttcctgcccaaggttttcagcagatctcactgtgtcctttaggaggagaggagagcatagcacctgcagcaagatggatgtgggcagcaaagaggtcctgatggagagcccgccggactactccgcagctccccggggccgatttggcattccctgctgcccagtgcacctgaaacgccttcttatcgtggtggtggtggtggtcctcatcgtcgtggtgattgtgggagccctgctcatgggtctccacatgagccagaaacacacggagatggttctggagatgagcattggggcgccggaagcccagcaacgcctggccctgagtgagcacctggttaccactgccaccttctccatcggctccactggcctcgtggtgtatgactaccagcagctgctgatcgcctacaagccagcccctggcacctgctgctacatcatgaagatagctccagagagcatccccagtcttgaggctctcactaganaagtccacaacttccagatggaatgctctctgcaggccaagcccgcagtgcctacgtctaagctgggccaggcagaggggcgagatgcaggctcagcaccctccggaggggacccggccttcctgggcatggccgtgagcaccctgtgtggcgaggtgccgctctactacatctaggacgcctccggtgagcaggtgtgatcccagggcccctgatcagcagcggaggagcgctcgggccacctgcccgggctgtggaggagcgctcgcgctgaccaggcgctggggcgtccactgaagcggggtcatccaggcaactcgggggaggggaagctcacagaccggtacttcccactcccctgaattctctctgtccatcctcaacattcctttgcttcacagggtcagtggaagccccaacgggaaaggaaacgccccgggcaaagggtcttttgcagcttttgcagacgggcaagaagctgcttctgcccacaccgcagggacaagccctggagaaatgggagcttggggagaggatgggagtgggcagaggtggcgcccaggggcccgggaactcctgccacaacagaataaagcagcctgattgaaaagcaaaaaaaaanaanaaacanaanacgtgcgggagctggcaccgaagatcaagac

SEQ ID NO: 732958 - DNA, 651 bp, Homo sapiens
  misc_feature (608)..(608): n is a, c, g, or t
  misc_feature (611)..(611): n is a, c, g, or t
  misc_feature (617)..(617): n is a, c, g, or t
  misc_feature (620)..(620): n is a, c, g, or t
ctatcttcatgatgtagcagcaggtcgcaggggctggcttgtaggcgcatcagagtgctggtagtcatacaccaccttctccatcggctccactggcctcgtggtgtatgactaccagcagctgctgatcgcctacaagccagcccctggcacctgctgctacatcatgaagatagctccagagagcatccccagtcttgaggctctcactagaaaagtccacaacaggccaagcccgcagtgcctacgtctaagctgggccaggcagaggggcgagatgcaggctcagcaccctccggaggggacccggccttcctgggcatggccgtgagcaccctgtgtggcgaggtgccgctctactacatctaggacgcctccggtgagcagggtcagtggaagccccaacgggaaaggaaacgccccgggcaaagggtcttttgcagcttttgcagacgggcaagaagctgcttctgcccacaccgcagggacaagccctggagaaatgggagcttggggagaggatgggagtgggcagaggtggcgcccaggggcccgggaactcctgccacaacagaataaagcagcctgattgaaaagcaaaaaaaaanaanaaacanaanacgtgcgggagctggcaccgaagatcaagac

SEQ ID NO: 732959 - DNA, 673 bp, Homo sapiens; identical to SEQ ID NO: 732955
  misc_feature (630)..(630): n is a, c, g, or t
  misc_feature (633)..(633): n is a, c, g, or t
  misc_feature (639)..(639): n is a, c, g, or t
  misc_feature (642)..(642): n is a, c, g, or t

SEQ ID NO: 732960 - DNA, 880 bp, Homo sapiens; identical to SEQ ID NO: 732956
  misc_feature (837)..(837): n is a, c, g, or t
  misc_feature (840)..(840): n is a, c, g, or t
  misc_feature (846)..(846): n is a, c, g, or t
  misc_feature (849)..(849): n is a, c, g, or t

SEQ ID NO: 732961 - DNA, 8001 bp, Homo sapiens
tgtcgattgtgtatggctgatgggattctaggaccaagcaagaggttttttttttttcccccacatacttaacgtttctatatttctatttgaattcgactggacagttccatttgaattatttctctctctctctctctctctctgacacattttatcttgccaggttctaaacctttaggaaaaatggagcaatttccaaaggaaaccgttgtggagagcagtgggccaaaggttttggaaacagcagaagagatccaggagaggcgtcaggaagtgttgactcggtatcaaagtttcaaggagcgggttgctgagaggggtcagaagcttgaggattcctatcacttacaagttttcaagcgagatgcagatgatctggggaagtggatcatggagaaagtcaatatcttaaccgataagagctatgaagacccaactaatatacaggggaaatatcagaagcatcaatcccttgaagcagaggtgcaaacgaaatcaagactcatgtctgaactggaaaaaacaagggaagaacgatttaccatgggtcattctgcccacgaagaaacgaaggcccatatagaggagctacgccacctgtgggacctgctgttagagctgaccctggagaagggtgaccagttgctgcgggccctgaagttccagcagtatgtacaggagtgtgctgacatcttagagtggattggagacaaggaggctatagcgacatcagtggagctaggtgaagactgggagcgcaccgaagttctgcataagaaatttgaagacttccaagtggagctggtagctaaagaagggagagttgttgaagtgaaccaatatgccaatgagtgtgccgaggaaaaccatcctgacctacccttaattcagtctaagcaaaatgaggtgaatgctgcctgggagcgccttcgtggtttggctctccagagacagaaagctctgtccaatgctgcaaacttacaacgattcaaaagggatgtgactgaagccatccagtggatcaaggagaaggaacctgtactcacctctgaggactatggcaaagaccttgttgcctctgaaggactgtttcacagccacaagggacttgagagaaatcttgcagtcatgagtgacaaggtgaaggagttatgtgctaaagcagagaagctgacactttcccatccttcagatgcacctcagatccaggagatgaaagaagatctggtctccagctgggagcatattcgtgccctggccaccagcagatatgaaaaactgcaggctacttattggtaccatcgattttcatctgactttgatgaactctcaggctggatgaacgagaagactgctgcgatcaatgctgatgagctgccaacagatgtggctggtggagaagttctgctggacaggcatcagcagcataagcatgagattgactcttacgatgaccgatttcaatctgctgatgagactggtcaagacctcgtgaatgccaatcatgaagcctctgatgaagttcgggaaaagatggaaatacttgacaacaactggactgccctgctggaactgtgggacgagcgtcatcgtcagtatgagcagtgcttggactttcatctcttctacagagacagtgagcaagtggacagttggatgagtagacaagaggccttcctggaaaacgaggatctgggaaactcactgggcagtgcagaagcccttcttcagaagcatgaagactttgaggaagcctttactgcccaggaagagaagatcataactgtagacaagactgcaaccaaattgattggtgatgaccattatgattcagagaacatcaaggctatccgtgacggcctgttagcccggcgggatgccctacgtgaaaaggctgccactagacgtagattgctgaaggagtcattgcttctgcaaaaactgtatgaggactcagatgacctaaagaactggatcaacaagaagaaaaagttggcagatgatgaagattacaaggacatacagaacttgaagagcagggttcaaaagcagcaagtctttgaaaaggagttggcagttaataagacccagctggaaaacatacagaaaactggccaagagatgattgagggtggtcactatgcctctgacaatgtgaccactcgtctgagtgaagttgccagcctctgggaggagttgctggaggctacaaaacagaaagggacccagttgcatgaggccaaccagcagctgcaatttgaaaataatgcagaagatttgcagcgctggctggaggatgttgagtggcaagtcacctctgaggattatgggaaaggcctggccgaggtacagaatcgactcaggaaacacggcctcctggagtcggctgtggctgctcgtcaggatcaggtggatatccttacagacctggctgcatattttgaagaaataggccatcctgattctaaggatataagggcaaggcaagagtccttggtatgccgatttgaagctctgaaagagccactggccaccagaaagaagaagctcttagaacttctccatctgcagctgatttgtagagacacagaggatgaggaagcctggatccaagagactgaaccctcagctacttccacctaccttggaaaggacctgattgcttccaaaaagcttctgaataggcatagagtcatcctggacaacattgccagccatgaaccacgcattcaagagataacagaaaggggaaacaaaatggtagaggaaggacactttgctgcagaagatgtggcctctagggtcaagagtttgaaccagaatatggagtctctccgtgctcgagctgctaggcgacaaaatgatcttgaagccaatgtccagttccagcagtacctggctgacctgcatgaagcagaaacatggatcagagagaaggaacctattgtagataatactaactatggtgctgatgaagaagcagctggggctcttctaaagaagcatgaggcctttctattagatctcaattcatttggagacagtatgaaagctctgcggaatcaggcaaacgcctgccagcaacaacaggctgcaccagtggagggagttgctggagaacaaagggtcatggctttatatgacttccaggcccgcagcccccgagaagtcaccatgaagaaaggtgatgtcttaacgctgctcagttccatcaataaggactggtggaaggtggaagctgctgatcatcagggcattgtcccagctgtctatgtcagaagactggcccacgatgagttcccgatgctcccacagcggcgacgagaagagccaggaaacatcacccagcgccaggagcagattgagaaccaataccgctccctcttggatcgggcagaagaacgcagacgtcgtctattgcaacgttataatgaatttttattggcctatgaggcaggagacatgctggaatggattcaagagaaaaaggcagaaaacactggagtggaactagatgatgtttgggagctgcagaaaaagtttgatgagttccaaaaggatttgaataccaatgagcctcggctaagggatatcaacaaggtagctgatgatctactatttgaaggacttctaacaccagaaggagctcaaatccggcaggaattgaatgcccgctggggttctttgcagaggcttgcagatgaacagcggcagctgctgggcagtgcccatgctgttgaagtgtttcacagagaagcagatgacacgaaggagcagattgagaagaaatgccaggccctcagtgctgcagaccctggctcagatctgttcagtgttcaggctcttcagcgacggcatgagggctttgaaagggacctcgtacccctgggagataaggtgaccatactgggggagacagcagagcggctcagtgagtcccatccagatgccactgaggacctgcagagacagaaaatggagctgaatgaggcctgggaagacctgcaggggcgtacaaaggatcgtaaggagagcctaaatgaggcccagaaattctacctgttcctcagcaaggccagggatctgcagaactggatcagtagcattggtggcatggtatcatcacaggagctggccgaagacttaactggcatagagatcttgctggagagacatcaggagcaccgtgctgacatggaggcagaggctcccaccttccaggccttagaggacttcagtgcagaacttatcgacagtgggcaccatgctagccctgaaattgaaaaaaagcttcaagctgtcaagctagagagagatgatttggagaaggcttgggaaaaacgcaagaagatcctagaccagtgcctggagttgcagatgttccaggggaactgtgatcaagttgagagccggatggtggcacgtgagaattccctgaggtcagatgacaaaagttccttagacagtctggaggctttgatgaagaaacgggacgatttggacaaagcaatcactgcccaggaagggaagatcactgacctagaacattttgctgagagcctcattgctgatgaacactatgccaaagaagagattgctacgcggctccaacgtgtactagacaggtggaaggctctcaaagcacaactgattgatgagcggacaaagcttggagactatgccaacctaaaacaattctaccgagaccttgaggagctggaagaatggatcagtgagatgctgcccacagcctgtgatgaatcctacaaagacgccactaacattcagaggaaatacctgaaacaccagacctttgcacatgaagtcgatggccgatctgagcaggtgcatggcgtcatcaacctggggaactccctgattgagcgtagttgtgatggcaatgaagaggccatgaaggagcaactggaacagctgaaggaacattgggatcatctgcttgagagaacaaatgacaaagggaagaagctcaatgaggccagtcgtcaacagaggttcaacacaagcatccgggactttgagttctggctctcagaggcagagacattgctggccatgaaagatcaggccagggacttggcttcagcaggaaacctactcaagaagcatcagctattggagagagagatgttggctcgagaggatgcactcaaggacctgaatacattggctgaagatttgctctccagcgggactttcaacgttgatcagattgtgaagaaaaaagataatgtcaacaagcgtttcctgaatgtccaagaattggcagctgcacaccacgaaaaattgaaagaggcctatgccttgttccagttcttccaggatctagatgatgaggaatcctggatagaggagaagttgatacgagtgagctcccaggactatgggagagatcttcagggggttcagaacttgctgaagaagcacaaacgcctagagggggagctggtggcccatgagcctgccatccagaatgtgctggatatggcagagaagctgaaagacaaggctgctgtggggcaagaggagatccagttgcggctggctcagtttgttgaacactgggagaagctcaaagagttggccaaggcccgaggacttaagttggaagaatccctagaatacttgcaattcatgcagaatgctgaggaagaggaagcttggatcaatgaaaagaatgctttggctgtccgaggagattgtggagatacattagctgctactcagagcttgctaatgaagcatgaagctttggaaaatgactttgctgtccatgagacccgagtacaaaatgtgtgtgcacaaggagaagacatcctaaataaggtgttgcaggaggaaagtcagaacaaagagatttcttccaagatagaggctctgaatgaaaagaccccttctctggctaaggcaatagctgcttggaagttgcaattggaagacgattatgcctttcaggaattcaactggaaggctgatgtggtagaggcttggatagctgataaggaaacaagcctaaagaccaatggcaatggtgcagaccttggtgacttcctcactcttctggcaaaacaggacactctggatgccagtctgcagagtttccagcaagagagacttcccgagatcactgacctgaaggacaaactgatttctgctcaacacaaccagtctaaagccattgaagagcgttatgccgctctgctgaagcgctgggaacagttgctggaagcctcggcagtccacagacagaaattgctggagaaacagctgcctctacagaaggctgaggacctgttcgtggaatttgcacataaggcttcagctttgaacaactggtgtgaaaagatggaagaaaacttgtcagagcctgtgcactgtgtctccctgaatgaaattcggcagctgcagaaagaccatgaggacttcttggcctccctggctagggctcaagcagactttaaatgtttgctggagctagaccagcagattaaggccttaggtgtgccttccagcccttatacctggttaacagtggaggtgctggaaaggacctggaagcacctatctgacatcattgaggaacgggagcaggagctgcaaaaggaagaggcaagacaggtcaagaactttgagatgtgtcaggagtttgaacagaatgccagtaccttccttcaatggatcctggaaaccagggcttactttctggatggatcattgctcaaagaaacaggaactctggaatctcagctggaagcaaataaaagaaaacagaaggagatccaggcgatgaagcgtcaactaaccaagattgtggacctgggggacaacttggaagacgctctgatccttgatatcaaatacagcaccattggattggctcagcagtgggaccagctctaccagcttgggttgcggatgcaacacaacctggagcaacagatccaggccaaggacatcaaaggtgtgagtgaagagactctaaaggaatttagcacaatctataaacactttgatgagaatttgacagggcgcctgactcacaaagagttccggtcctgcctgagaggactcaattactacttgcccatggtggaggaggatgaacatgagcccaagtttgagaagttcctggatgctgtggatccagggaggaagggctatgtctcactggaggactatactgctttcctgattgacaaggagtcagaaaacatcaagtccagtgatgaaatagagaatgccttccaagccctggcagagggcaagtcatatattaccaaagaagacatgaagcaggcccttaccccagagcaagtgtcattctgtgccacacatatgcagcaatatatggacccacggggtcgaagccatctctctggctatgactacgttggcttcaccaattcctactttggcaactaataagcagctcctcgtggatcgtagaaaatcttagtgtcgtgggaaatttactggggggcaaagagtacaggcaaatgtggaagataaagatggcctcgtgtgtgtgtgtgtgtgtgtgtgtgtgtgtgtgtgcttgtgtttgtgtgcatattacatttattgtaggatcttaaaaaatctcaagggtgggagatagaaaggttaatagagttggaggagtggaagctattttgtatgcaactagtcactgctgaggggtgtcaaagtttctatttttatttgttctgttttgcacgtctttatcattttgctttattccgattatagaataaagtaattctttttaaaaatattttttggggcaaagttaagtaaaatgttgagcttctatatttctgggaactgtactcatataagagtgggcagctaattttactgtaaagaagggccatggtatagtagataaataaaatccaaggcaattttcaaacaatttttttaaactttggaatgtgtttaaatttaaatttgaaaataaagatatttgattttctgggg

SEQ ID NO: 732962 - DNA, 374 bp, Homo sapiens
catgtttactacttgccgggtagaactggaggatagactttagaacaagaaatcatataattgaaaactacctttgctacttttggaattttaaaactgaaataattttagaaataattcgacctccctcatttgtaaatgatgaaagacttaaacaatttcacacaatgagaaaatgccagaaccagggctcgtaccgctaactcacatgttcaaccatcaaagtacacagtccctattggttttagttctgcccttttagattggtggccctgcagatatttaaagacaggcattatttttatcctcaatcttctcttctgctgagaggctttatcaggaaagatggtagtgtcttttttttctctctgcag

SEQ ID NO: 732963 - DNA, 1198 bp, Homo sapiens
acactttgatgagaatttgacagggcgcctgactcacaaagagttccggtcctgcctgagaggactcaattactacttgcccatggtggaggaggatgaacatgagcccaagtttgagaagttcctggatgctgtggatccagggaggaagggctatgtctcactggaggactatactgctttcctgattgacaaggagtcagaaaacatcaagtccagtgatgaaatagagaatgccttccaagccctggcagagggcaagtcatatattaccaaagaagacatgaagcaggcccttaccccagagcaagtgtcattctgtgccacacatatgcagcaatatatggacccacggggtcgaagccatctctctggctatgactacgttggcttcaccaattcctactttggcaactaataagcagctcctcgtggatcgtagaaaatcttagtgtcgtgggaaatttactggggggcaaagagtacaggcaaatgtggaagataaagatggcctcgtgtgtgtgtgtgtgtgtgtgtgtgtgtgtgtgtgcttgtgtttgtgtgcatattacatttattgtaggatcttaaaaaatctcaagggtgggagatagaaaggttaatagagttggaggagtggaagctattttgtatgcaactagtcactgctgaggggtgtcaaagtttctatttttatttgttctgttttgcacgtctttatcattttgctttattccgattatagaataaagtaattctttttaaaaatattttttggggcaaagttaagtaaaatgttgagcttctatatttctgggaactgtactcatataagagtgggcagctaattttactgtaaagaagggccatggtatagtagataaataaaatccaaggcaattttcaaacaatttttttaaactttggaatgtgtttaaatttaaatttgaaaataaagatatttgattttctggggaacatgaatattttagtttgtacaatgaaacaacacacagatcagcataacacctgttttcttcttgttttttttccatacttcaaaattattgtagatgttattactctcagaaagacaaaattccagcatagcagggctttctcttgtcctccaagctcccgtattttctcttaagttttaatgtaataaaaataatacttcaatatcctgttaaagtaa

SEQ ID NO: 732964 - DNA, 1201 bp, Homo sapiens; identical to SEQ ID NO: 76156

SEQ ID NO: 732965 - DNA, 979 bp, Homo sapiens
caaatgttgttaggcatataattccttctatttaataaaacaactttagggaatgagatttacagaataatcaaagtgagtaagctctctttttcaagaaagggctgagattaaaagttaagttactcattagaaattataaatttatgagataaaaattgtgtgtaatagaaatagggcttgcgtcttccagagactctccatctcctgcatttatggcgtaatatgggaagccccaaggaaccagctattttgaatccctataactgtatttttctctttttatacttttcaggcccttaccccagagcaagtgtcattctgtgccacacatatgcagcaatatatggacccacggggtcgaagccatctctctggctatgactacgttggcttcaccaattcctactttggcaactaataagcagctcctcgtggatcgtagaaaatcttagtgtcgtgggaaatttactggggggcaaagagtacaggcaaatgtggaagataaagatggcctcgtgtgtgtgtgtgtgtgtgtgtgtgtgtgtgtgtgcttgtgtttgtgtgcatattacatttattgtaggatcttaaaaaatctcaagggtgggagatagaaaggttaatagagttggaggagtggaagctattttgtatgcaactagtcactgctgaggggtgtcaaagtttctatttttatttgttctgttttgcacgtctttatcattttgctttattccgattatagaataaagtaattctttttaaaaatattttttggggcaaagttaagtaaaatgttgagcttctatatttctgggaactgtactcatataagagtgggcagctaattttactgtaaagaagggccatggtatagtagataaataaaatccaaggcaattttcaaacaatttttttaaactttggaatgtgtttaaatttaaatttgaaaataaagatatttgattttctgggg

SEQ ID NO: 732966 - DNA, 1136 bp, Homo sapiens
atgttccaggggaactgtgatcaagttgagagccggatggtggcacgtgagaattccctgaggtcagatgacaaaagttccttagacagtctggaggctttgatgaagaaacgggacgatttggacaaagcaatcactgcccaggaagggaagatcactgacctagaacattttgctgagagcctcattgctgatgaacactatgccaaagaagagattgctacgcggctccaacgtgtactagacaggtggaaggctctcaaagcacaactgattgatgagcggacaaagcttggagactatgccaacctaaaacaattctaccgagaccttgaggagctggaagaatggatcagtgagatgctgcccacagcctgtgatgaatcctacaaagacgccactaacattcagaggaaatacctgaaacaccagacctttgcacatgaagtcgatggccgatctgagcaggtgcatggcgtcatcaacctggggaactccctgattgagcgtagttgtgatggcaatgaagaggccatgaaggagcaactggaacagctgaaggaacattgggatcatctgcttgagagaacaaatgacaaagggaagaagctcaatgaggccagtcgtcaacagaggttcaacacaagcatccgggactttgagttctggctctcagaggcagagacattgctggccatgaaagatcaggccagggacttggcttcagcaggaaacctactcaagaagcatcagctattggagagagagatgttggctcgagaggtaagtagtgttggcatccctctcctctgggcagaatagaaatatttctggctcttctccctcccatgttaggagaccatttgaaaacatagccttgcaaaattgttcttagtgttctcaaccagcagtcattttaattaggtaaaattaacgggctgtgaagacattaaaactgtcactgataatcaattatccctaaactatagactttaagattccagaaagtggacctgggaaactatcttttttatcttttactgatgcatacatataagccaattgtctttaagctatatatttgatctggtatttgaaagaaagtggaagtttactttatagaattacaaacaaaa

SEQ ID NO: 732967 - DNA, 1348 bp, Homo sapiens; identical to SEQ ID NO: 76155

SEQ ID NO: 732968 - DNA, 1126 bp, Homo sapiens
gaaagcctaagtgtttcaggcaaaggcaagtgtgtgtgcaaaggaacttgagaaaacagattttcctaatacctaaagcataaggtaagaagatagtaacagaaagtgaaagggaaaacaattaagcagaaaccagattacaaagggtcacatacatgatggtatcgttttgcacaaactcatccaattgtctaaactcatcaaactgtacacattaaaggtgcaattctttatcaatcatacctcgacaaagctgttacaaaaagaaaatgatgtggtcttccagacactatctggagccacccacccacacgctaacttattggagtctttagggatccacttggtaatcaaacagcacagtgaatagaggaactctttggcataagaggatcataggttcaagtcccagctctaccactttctggcagtgtaaccactggcccttaccccagagcaagtgtcattctgtgccacacatatgcagcaatatatggacccacggggtcgaagccatctctctggctatgactacgttggcttcaccaattcctactttggcaactaataagcagctcctcgtggatcgtagaaaatcttagtgtcgtgggaaatttactggggggcaaagagtacaggcaaatgtggaagataaagatggcctcgtgtgtgtgtgtgtgtgtgtgtgtgtgtgtgtgtgcttgtgtttgtgtgcatattacatttattgtaggatcttaaaaaatctcaagggtgggagatagaaaggttaatagagttggaggagtggaagctattttgtatgcaactagtcactgctgaggggtgtcaaagtttctatttttatttgttctgttttgcacgtctttatcattttgctttattccgattatagaataaagtaattctttttaaaaatattttttggggcaaagttaagtaaaatgttgagcttctatatttctgggaactgtactcatataagagtgggcagctaattttactgtaaagaagggccatggtatagtagataaataaaatccaaggcaattttcaaacaatttttttaaactttggaatgtgtttaaatttaaatttgaaaataaagatatttgattttctgggg

SEQ ID NO: 732969 - DNA, 1382 bp, Homo sapiens
aggacttaagttggaagaatccctagaatacttgcaattcatgcagaatgctgaggaagaggaagcttggatcaatgaaaagaatgctttggctgtccgaggagattgtggagatacattagctgctactcagagcttgctaatgaagcatgaagctttggaaaatgactttgctgtccatgagacccgagtacaaaatgtgtgtgcacaaggagaagacatcctaaataaggtgttgcaggaggaaagtcagaacaaagagatttcttccaagatagaggctctgaatgaaaagaccccttctctggctaaggcaatagctgcttggaagttgcaattggaagacgattatgcctttcaggaattcaactggaaggctgatgtggtagaggcttggatagctgataaggaaacaagcctaaagaccaatggcaatggtgcagaccttggtgacttcctcactcttctggcaaaacaggacactctggatgccagtctgcagagtttccagcaagagagacttcccgagatcactgacctgaaggacaaactgatttctgctcaacacaaccagtctaaagccattgaagagcgttatgccgctctgctgaagcgctgggaacagttgctggaagcctcggcagtccacagacagaaattgctggagaaacagctgcctctacagaaggtttaaaaaaattatgaggcatgatcagttctctgttacctgtatattagccatgaaattcggaaacagatattgggaaactcagtttgggataatacaaaaaccttttattgcattgaaagatgttgggaagacattcttactgagcaaaaagtagattgaaaagaagctttaaaaattttttttagattgattgattagttgcataactaacttgagatggaagccaggcaaacagtggaagaggtggatggaacaagaggatgggaggtctttgtgtatgatagaattaaaactgtcaggcaaaagtcaaggttgtccctgtacttttcctaacccaaataaaaggagcactggacaagttgtcataaaacatgttctcaccttatatcaagctttcctaggttgaagaccttgtaaaagtcatttaatatctctaaaccttgatatccccatttagaaaattgagtagcatcaccattctattctgcctttctgttatcactattaaaaaagataatgaatctaaaagtgtaataattccatattattacattattacattcatataaatatgtatggttgtaatatgtgtgtattaataatacataattatatgtacattatctgtacctaaatatatgtacattaataatacataataaatatgtatgattaatatggaataatataa

SEQ ID NO: 732970 - DNA, 385 bp, Homo sapiens; identical to SEQ ID NO: 76163

SEQ ID NO: 732971 - DNA, 491 bp, Homo sapiens
ggatgtacctgtctataaggagtcctgcttatcacaatgaatgttctcctgggcagcgttgtgatctttgccaccttcgtgactttatgcaatgcatcatgctatttcatacctaatgagggagttccaggagattcaaccaggaaatgcatggatctcaaaggaaacaaacacccaataaactcggagtggcagactgacaactgtgagacatgcacttgctacgaaacagaaatttcatgttgcacccttgtttctacacctgtgggttatgacaaagacaactgccaaagaatcttcaagaaggaggactgcaagtatatcgtggtggagaagaaggacccaaaaaagacctgttctgtcagtgaatggataatctaatgtgcttctagtaggcacagggctcccaggccaggcctcattctcctctggcctctaatagtcaatgattgtgtagccatgcctatcagtaaaaaagatttttgagcaaa

SEQ ID NO: 732972 - DNA, 739 bp, Homo sapiens
ggatgtacctgtctataaggagtcctgcttatcacaatgaatgttctcctgggcagcgttgtgatctttgccaccttcgtgactttatgcaatgcatcatgctatttcatacctaatgagggagttccaggagattcaaccaggaaatgcatggatctcaaaggaaacaaacacccaataaactcggagtggcagactgacaactgtgagacatgcacttgctacgaaacagaaatttcatgttgcacccttgtttctacacctgtgggttatgacaaagacaactgccaaagaatcttcaagaaggaggactgcaagtatatcgtggtggagaagaaggacccaaaaaagacctgttctgtcagtgaatggataatctaatgtgcttctagtaggcacagggctcccaggccaggcctcattctcctctggcctctaatagtcaatgattgtgtagccatgcctatcagtaaaaaagatttttgagcaaaaaaaaaaaaaaaaaaaaaaaacatttgggggggcggccgggcccagaaaaaggttttaaacaccattcgtgtgggggcggcgggcccagtgggttacggacaccttgggccaaagggggcccaaagagaaaccggggccagacatgggggtgggtctcccccataaaaaccgcggcggcaccgggggtctggaccaatccagagggtcggggccacggtcaccacgggtcccgaaccaaaataggagg

SEQ ID NO: 732973 - DNA, 512 bp, Homo sapiens
  misc_feature (3)..(3): n is a, c, g, or t
gcngccgcctactactactaaattcgcggccgtcgacaaggagtcctgcttatcacaatgaatgttctcctgggcagcgttgtgatctttgccaccttcgtgactttatgcaatgcatcatgctatttcatacctaatgagggagttccaggagattcaaccaggaaatgcatggatctcaaaggaaacaaacacccaataaactcggagtggcagactgacaactgtgagacatgcacttgctacgaaacagaaatttcatgttgcacccttgtttctacacctgtgggttatgacaaagacaactgccaaagaatcttcaagaaggaggactgcaagtatatcgtggtggagaagaaggacccaaaaaagacctgttctgtcagtgaatggataatctaatgtgcttctagtaggcacagggctcccaggccaggcctcattctcctctggcctctaatagtcaatgattgtgtagccatgcctatcagtaaaaaagatttttgagcaaa

SEQ ID NO: 732974 - DNA, 747 bp, Homo sapiens
  misc_feature (602)..(602): n is a, c, g, or t
  misc_feature (609)..(609): n is a, c, g, or t
  misc_feature (627)..(627): n is a, c, g, or t
  misc_feature (643)..(643): n is a, c, g, or t
  misc_feature (657)..(657): n is a, c, g, or t
ggatgtacctgtctataaggagtcctgcttatcacaatgaatgttctcctgggcagcgttgtgatctttgccaccttcgtgactttatgcaatgcatcatgctatttcatacctaatgagggagttccaggagattcaaccaggaaatgcatggatctcaaaggaaacaaacacccaataaactcggagtggcagactgacaactgtgagacatgcacttgctacgaaacagaaatttcatgttgcacccttgtttctacacctgtgggttatgacaaagacaactgccaaagaatcttcaagaaggaggactgcaagtatatcgtggtggagaagaaggacccaaaaaagacctgttctgtcagtgaatggataatctaatgtgcttctagtaggcacagggctcccaggccaggcctcattctcctctggcctctaatagtcaatgattgtgtagccatgcctatcagtaaaaaagatttttgagcaaaaaaaaaacaacacaaaacaacaaaaaaaaaaaaatttgtggggcggccctgggcccccggaaaaagtttttaagacccttcgttgggggcgcgggggccccacttgggtangggacangggccaaagggggcccanagagaacccgggcaanagaaggggggggtncccccataaaaagccgcgggaaccgcgtcgaccatccagggtgcgggacacggcttataccggccacagcgaaatcgccgcggagggggc

SEQ ID NO: 732975 - DNA, 385 bp, Homo sapiens
attcgcggccgcgtcgacggagtcctgcttatcacaatgaatgttctcctgggcagcgttgtgatctttgccaccttcgtgactttatgcaatgcatcatgctatttcatacctaatgagggagttccaggagattcaaccaggatgtttctacacctgtgggttatgacaaagacaactgccaaagaatcttcaagaaggaggactgcaagtatatcgtggtggagaagaaggacccaaaaaagacctgttctgtcagtgaatggataatctaatgtgcttctagtaggcacagggctcccaggccaggcctcattctcctctggcctctaatagtcaatgattgtgtagccatgcctatcagtaaaaaagatttttgagcaaa

SEQ ID NO: 732976 - DNA, 504 bp, Homo sapiens
gcctactactactactactaaattcgcggccggtcgactgcttatcacaatgaatgttctcctgggcagcgttgtgatctttgccaccttcgtgactttatgcaatgcatcatgctatttcatacctaatgagggagttccaggagattcaaccaggaaatgcatggatctcaaaggaaacaaacacccaataaactcggagtggcagactgacaactgtgagacatgcacttgctacgaaacagaaatttcatgttgcacccttgtttctacacctgtgggttatgacaaagacaactgccaaagaatcttcaagaaggaggactgcaagtatatcgtggtggagaagaaggacccaaaaaagacctgttctgtcagtgaatggataatctaatgtgcttctagtaggcacagggctcccaggccaggcctcattctcctctggcctctaatagtcaatgattgtgtagccatgcctatcagtaaaaaagatttttgagcaaa

SEQ ID NO: 732977 - DNA, 625 bp, Homo sapiens
ggatgtacctgtctataaggagtcctgcttatcacaatggggctcccaaacttggctgtgcagtggaaactccgggggaattttgaagaacactgacacccatcttccaccccgacactctgatttaattgggctgcagtgagaacagagcatcaatttaaaaagctgcccagaatgttctcctgggcagcgttgtgatctttgccaccttcgtgactttatgcaatgcatcatgctatttcatacctaatgagggagttccaggagattcaaccaggaaatgcatggatctcaaaggaaacaaacacccaataaactcggagtggcagactgacaactgtgagacatgcacttgctacgaaacagaaatttcatgttgcacccttgtttctacacctgtgggttatgacaaagacaactgccaaagaatcttcaagaaggaggactgcaagtatatcgtggtggagaagaaggacccaaaaaagacctgttctgtcagtgaatggataatctaatgtgcttctagtaggcacagggctcccaggccaggcctcattctcctctggcctctaatagtcaatgattgtgtagccatgcctatcagtaaaaaagatttttgagcaaa

SEQ ID NO: 732978 - DNA, 777 bp, Homo sapiens
  misc_feature (3)..(3): n is a, c, g, or t
  misc_feature (542)..(542): n is a, c, g, or t
  misc_feature (544)..(544): n is a, c, g, or t
  misc_feature (548)..(548): n is a, c, g, or t
  misc_feature (777)..(777): n is a, c, g, or t
gcngccgcctactactactaaattcgcggccgtcgacaaggagtcctgcttatcacaatgaatgttctcctgggcagcgttgtgatctttgccaccttcgtgactttatgcaatgcatcatgctatttcatacctaatgagggagttccaggagattcaaccaggaaatgcatggatctcaaaggaaacaaacacccaataaactcggagtggcagactgacaactgtgagacatgcacttgctacgaaacagaaatttcatgttgcacccttgtttctacacctgtgggttatgacaaagacaactgccaaagaatcttcaagaaggaggactgcaagtatatcgtggtggagaagaaggacccaaaaaagacctgttctgtcagtgaatggataatctaatgtgcttctagtaggcacagggctcccaggccaggcctcattctcctctggcctctaatagtcaatgattgtgtagccatgcctatcagtaaaaaagatttttgagcaaaaacaaacaacaccacccccaccaaaaaacntntttngggccgactcgggcgccgaggagaaagggcttcaaacacccactccttggggccccgggggcccccagtgagtagctcaaacgtgccaaaagcggcccccaaggagaaccggggccagaacaagcgtggggcttctccccaaaaaaaagcgcggggacaaccgcggctctgaacaccagggggtcgaggcaaggcctcccaggggcagggacgtaacccgcgggtgggn

SEQ ID NO: 732979 - DNA, 640 bp, Homo sapiens
ggtgcttgttggctttaacatccacaatgaacacaagtgtgttgttgtcttctatcttcttcgtggtgactcagtggtcagcggaaacttgatgatagcgtagtggtcaagcttgtatctcctgggagcgactcttccaaagatatttgggctgcctcgggagttgcagcgtcttgggccgccggaagaatgttctcctgggcagcgttgtgatctttgccaccttcgtgactttatgcaatgcatcatgctatttcatacctaatgagggagttccaggagattcaaccaggaaatgcatggatctcaaaggaaacaaacacccaataaactcggagtggcagactgacaactgtgagacatgcacttgctacgaaacagaaatttcatgttgcacccttgtttctacacctgtgggttatgacaaagacaactgccaaagaatcttcaagaaggaggactgcaagtatatcgtggtggagaagaaggacccaaaaaagacctgttctgtcagtgaatggataatctaatgtgcttctagtaggcacagggctcccaggccaggcctcattctcctctggcctctaatagtcaatgattgtgtagccatgcctatcagtaaaaaagatttttgagcaaa
